United States Patent Application Publication US 2005/0287570 A1 - sequence listing, part 4

SEQ ID NO: 5255 - DNA, 600 bp, Rattus norvegicus
gttactgacagaccksmamgagcagcggaaggagagcgggaagaacaagcatagcgccgggcagcagaacttgaacgccatcacctacgagacattaaaatacatatcgaaaactccatgtaagaaccagagtcmsgmgrywgkscawgarkkyytyacagcartgwwgwgcywywmkytgaccaragccgagaagcttcagctgctgaatcacaggccaatgaccgctgttgwgatccagctgatggtggaagagagtgaagagcggctcacggaggagcagattgaagctctyctgcacactgtcaccagcatcctgcctgcaggtccagaggatgagcagagcaraagcactagcaatgacgcggcaatggragaggaggagcctgcatagacatctgtggccattatgacacagctggccaggttgttygtgatgctcaaagccacaacagccatttcctggacgttcagagaactgtttattcggcctgacccctctctcaaatattcctgatctcaggattggttgagaaaaaaaatcacaaaaataagwtkaaaaraaawmwwwrwrmmttgggttcaagaaacatggggtca

SEQ ID NO: 5256 - DNA, 600 bp, Rattus norvegicus
tcgcttatatcatgtgctgccgacgrgaaggwgtggaaargagaaacatgcaaaccccagatatccaacttgtccatcacagctstattcagaaatctaccaaggagcttcgagacatgtccaaaaacagagagattgcatggcccctgtcaacactccccgtgtttcacccarwractrgggmgatcwtacstcccatgcacacggacamstwcgacagtaccaacatgccyttgatgcaracacagccgaacttgccacaccagactcagatcccccawcmscagwswacagstaaatggtmtccytgaagaawgaaasctgacggaasccatgagtttmtaatcagcagcacagcawtcacgtsycccccccctttcacytccaatcgtgcwtgagctttcctgacatcattgtgcatgtcaactatattacatccataccaaatactatcacctagctctctcatttactaatgtattttttttgtacttaaagcattkttgaaaatttatargacatcaatgactttatatttgttacaataaaaagtgamctttaawrtaaatattaatgaagcctaaaaaaaaaaaaaaaaaa

SEQ ID NO: 5257 - DNA, 600 bp, Rattus norvegicus
taagtaytaccagtctccctgggagcaggccattggcgacgatccagagctcctggaagctttgtacccgaaacttttcaagcctgaaggaaaggcagaactgccagattacaggagctttmacagrgttgccactccatktggaggttttgagaargcatcaaaaatggttaamkkcamgvkkccagahwwskaacracwgctgytwwcagaksccmkgtwwttggmmtkwgccamtcctctttcgggcmracgatgctttaatwggacmccaaaggggtggatatctgagaawattcctgtmgtgatcacaactgagcctgcaraaratgtcmctatgccaragtcaratgacttgtgaacgggaagccaggcagkccgccgaragctytacacataaaagctsccgtcggtyttyttagcggcgaasccatttgagtgcctcgtcactgtggtcayccaattgcggttacacmcatttcattttgtggsgttcmmyyybmmcysmmcmaytaaattytggtttaagaawmwmwmaaaaaaaaarwmamraamgcggccgcaagcttattccctttagtgagggttaattttagcttg

SEQ ID NO: 5258 - DNA, 600 bp, Rattus norvegicus
ctaacatgttctacatcgatcccgagaaaggagacattgtcaccgtggtgtcacctgcgctgctggaccgggagrctctggaaaaccccaagtatgaactgatcatcgaagctcaagatatggcaggactggacgttggattgacaggcacggccacagccaccattgtgatcgatgacaaaaatgatcactcaccaaaattcaccaagaaagagtttcaagccacagtggaggagggagccgtgggagtcattgtcaacttgacagtggaagacaaagatgaccccgcgacaggagcatggagggcggcatacaccatcatcaatggaaatcctgggcagagctttgagatccacaccaacccacagaccaacgagggcatgctctctgtggtcaagcccctggactatgagatctctgcctttcacaccctgctgatcaaagtggagaatgaggacccattggtacccgacgtctcctatggccccagctccacggccactgtccacatcacggtcttggatgtcaacgagggaccagtcttttacccagaccccatgatggtgaccaaacaggaaaatatctctgtgggcagtgtgc

SEQ ID NO: 5259 - DNA, 600 bp, Rattus norvegicus
cccacaaaatctgctttgaagactgagagcgctttcacaactattaatgtcaatcccagagagagtgttttcagacatgaaaatgttaacaaagctactgttctggaagcttgcttgaaaggaaggaaggatatgctgcagcttcaagtcaccaccacctctgccttctacgtctacctcatcctgttcttcaagagtgtggtccacttggccttcgttgtgttctgtctgttcagaagagtacstatgcyttgtgatggccaacattcctagtggatgatgaaacaggaaggtcatgctatcttcatccctcctacatctcaatatctgctgagggtctagcttggcttgcttgctgactttgatgtccacaaggacacatatgtgtggttttgtatcattactataattctcagagcagagaaatcaacttcactctataacaaatagtagcttccaagcacccaatcgtcctgacccatcctctctcagtccctctagtagccctagcaacacaggcccaatgtatataaactccagttcctagtcaccccacttcatgccctagaaccagatagtgcccccaaagcctttacttca

SEQ ID NO: 5260 - DNA, 592 bp, Rattus norvegicus
gcttatcattcatgtattgtccagcttacattaaaagccctgtggataattaagttatcttcatacctgcaaaatggtggaggctattttcattaaaactgtcagaatttgcttactataattatgatacagtccaaagaatgcagtcactttttatcatgtwaactaattgttctcttttgaagatctatggttgactaattwaacmataattcaagtagrgtgtcccmgaaaaaaaccacttgggctccctgtttggrgtctggctggctytgrgcattgccaatggcccctamtcacctgactttgtatcctctccttttwgrggctttgcattytgcacccmgsttcactaacagtgggctgaaaacatccttgggttgagtgtttcatttgggrgttatttggccagggccttttgaacagtagtgtccccmtgaagtgstagrtaatatatgtgtaagrgtcagctttttttttttttttaactctaacacccttcagaaatttctamctactttgtaactgcatggcttaacctggtgrtaaaagcmgttattaaaagtytacgttttccaaaaaaaaaaaaaaa

SEQ ID NO: 5261 - DNA, 557 bp, Rattus norvegicus; identical to SEQ ID NO: 1165

SEQ ID NO: 5262 - DNA, 600 bp, Rattus norvegicus
aaattgtgaccaccattcccaccattggtttcaacgtggagactgttgaatacaagaatatcagcttsaccgtgtgggatgtgggtggccaggacaagattcggymgytrtrgmkmcmctryttccwgwrsrsmcaaggmtwgakstwcgwaswrrmcascahysmcakmkmsmtgtgtgaaskagsyycckysmwsagcytryaagggtccgatttgccatcgaaagacgacctctacttttttcttttgtattttgataaacactgaaraagctkkwkytkttwwwtttatcttggggaaatctcaraactggtttatttggtgtcgtggaacctcttactgctttcaatacacaattagtaatcaactgttttgtawacttgttttcagttttcatttcgacaagcactgtaattatagctattagaataaagtctcttarctatttgatgggcttgtgtgtcagtgccaccactgccaggctgcccctcctgagatgcgataggagacagatgtccttcaagccctagtggaagttggtgagatctggatgacttgggtcccctcatgtcttaaggtacttttttttgtgatcacc

SEQ ID NO: 5263 - DNA, 600 bp, Rattus norvegicus
gtctatggctggcgaggccaccacttgcgaggaacacagccacatctgtctctgaccactccctcttctgcagagmacctacggtgtcccggagagaccacagctgtgtcccacagctggattggagctggactcactgccaraaywckkagargcgcgcaggggagcgtgcccacgggactgttgggccgaagtstacctggttttagaaygatccaaagaaatggcaggaatgcattcactgtattcctctttctagccctgctccagatctctcacaatgaactgctacccgcaaacaatttatagtactcaatggcagacatctgtctcctcccaaacgaacggttggctgraggactctaamatgccccarctgtgcrcacctcctcctttagattaaacctcaagggctcccttcagstgagtgcaatgtgtytgattcaccaagagatctccagggtttgcagggagtttaaggtcaatgtgattttcaatatggagctaaggagagaaatgacacaaatttagtcatgccttctatatacacacacctatgagcaataaaaatgacacttttccagawmaaaaaaaaaaaaa

SEQ ID NO: 5264 - DNA, 600 bp, Rattus norvegicus
actargaagaatctacccgtgaggcctccaccasgttcttctggatgcagccaggagaaactcaacaccctgcctcttgccaagaccaggagscctcacctggcttygacctgccatctgttgccgagsccactggcttccatcctaagagtggggwgcaacamgacccmkkcckhksagaacstcaaagayttggttccaggctctccagagaccacacccagttsgtgtgcatgtgctgtttttgcttcaagctcagtagcakgacctrccctgcaccccytgctcmttacccctctgtgaggagttarggaaragrgctttgtctctagagcagargagaacaacgggatggcctgatgctgtcatgctytccactgcacctgtgtcggcctcytgagagccaccatgatytggaatgaaggccacaccagccaggtmtgmtaaagggccccagactgaagatgacctcagcccccacagttatgtytatggtgccagaggtytgtattaaggtagctgctgttaytaggcagctgtttgcmcaaatcttggacataaatccaacttgaggrtcwmmawwwaaaaaaaaaaaaaaaa

SEQ ID NO: 5265 - DNA, 1280 bp, Rattus norvegicus
ccatctccttctgagtccccatgcgttgtctccctctgcctgttgttgcccagaaaatgggacggtgaggagggaggagatgcttgttgcacagagactgtcaggccatgtgtgggacttggcaaacaaagcttgcactgagtggtggtgtgtttggcaatattactgtgccaaaaataatccttgtctacttytctggatgtgtatgkcaaactttttacccttactgcaagctgaaaattaaagttcttktktttwtkyttttgtgtgtaactrccttttctgacctgcttttcytgttacctgaaaatacagttctgtaaytcgtgttaaatgmaraggytttttgtgcacaaaatcacctgtgtagcactgaagtcagtgtttgtgcawtgttttgtctgwgtcckgakggywwckktgcctttgtcacctttcasaaggttggcttttttttttttaatgcaagtagtagcttgcttttgacttcacaaaaaaamvwmrkrmmgaaagaawgaaagaaagaawraaaraaaraaagaargaaagaaaraaaraaaraaaggaacaaagaaatatatacatatctccctggtaatgatagataagatagttaccacccaggcgctgttgaagcatttgggggttttttgkttgttttttgttttgwatttttttctccccctctccctbcaatcagaatagatagagttrgtrgggtcagtaataatgtgtggagtcttgaaaccagkaggatttttaaatttaaaacytgactcattgacaagcagytkagttggaggacttacwtggcttgtctctcargaggcaggggtaaggtatagttgggtgcgagagtcagcaarattcgatctgatgagkacgcctactctatggtgcargtgcacctcatctgtgcctcagtttccccggggcattcttgtcagccagttaatctactagctcttaggcagtaaatgcaatggttttttctttcctttaaaattttatactgtcttgtttaaaagtcttctgaatgtatgtgtatgtgttattaaaactttttctcagcttaaacgtgtcttgtaacatttgattgagtagtagaggtggttgagtatcgaaaataccctgtttgaagcttttttccctttagcttgatgccttttttgtatctgtggaaaacaaagccacagttctccacagttcatgtttacataacgcaattaataaatttactgtgtactttacagtcaggaatttaaaaaaaaaaaaaaaaa

SEQ ID NO: 5266 - DNA, 686 bp, Rattus norvegicus
gcaaatggtgtgaccgtctcctcatgagcggcagctccctcccccccccgctgtgggtagtgtatgactgtggctgtactgtatagtgaacatagttggcatatctttgtttgaagtttgttggtgactccaccaaactggtgtaaaaamcaawaacaghcaaawaacccccacaamccacccaacacacacacagaaagtcctgcttgtattcagtttcaaactttattagtcttatttttaattataaaaccagaaagctgcaatttcttttccctctaccccttgtttgttggcttctttgttttttaaygkcaamkmkgtttktttttaccaagaaagggagagcctggggagggctccaggccctggtgggctgcaaactgaggcagaggtcccatgcgcachtggtcagaccagtgcrctgggcyttcsttccttcccattagcattkttgttktgttttgttttgtttttaaattggagcccctggtgaggttacatgtgccaygagaasccagtbtacaccacagtgctggtgcctcggtgttggccaaactctggagtcactgactggtttgactttcatgtggtgaatatkcakttggtctgtactgatcatggaataaacacatctctcttttttwawrmwrrwrwmwmmmwraaatttctttgtgaaccaacta

SEQ ID NO: 5267 - DNA, 643 bp, Rattus norvegicus
gcttgtaccsamgatgrggaggaccgaaagttttgccgtagctgtcggagtttgtacaaaagcaagaagtccggagcagcggaaatgggacttgcttgagctgcccgyttctgaccgccgcccctccytcccccgmtggytgggaatcgctgtggtgtttgcggagaaaccgcgcgcggscccttcctcctcttcccaggtccctaggttcttctgtcgcatttgaaaatgttgtcttgttagtttgctattaatcgaggactgagtgaagttgaccccccccccaagaactgcaatgcctccacccccagtcgtattgcttctattttcctctggctttttttttgggggggggtgctggccgcgccaattggcgcgacagcgaaagccaatgttaatttatagccaggtgtgcgtgtgtttcccgcctcgccgcccctggccgcgggacagcctctgtccagtgcgcgtttaggctgttgagtttgtgatttctgcagtgatctatttgctatttcgtgtacgcatttcgttcgggtggtggggaaggggttattttgttccaggttttttcaaggttttactcttaattcctaagtgagagatcaataaattttatavccamcaaaaaaaaaaaaaaaaa

SEQ ID NO: 5268 - DNA, 600 bp, Rattus norvegicus
agtacgagaatggttacattcacccagtcaacctgayttggccctttatggtggccggcaaacctgagagtgacctaaaggaagtggtgaccgckagccgcttgtgtggaaccaccgcatcctgaccttgraggtgtgagtctgggaaccctgcgctctcgagggcagtgggccgktragsgtrwcgacccctsccctcccctchycgtctmtgctgccgccttgcatcgctcctctcchtatcccaccccgcaagaacasttaactgcgacgmggagattcgttyccaaaccgaaggagaccaaytgtacttacagattcccatctatttaacttgattaacttctgccctgaatgactgtgagcctggctggtccaagtgcaatatgtaattatatrtagtatatataaatagataataagagcctatcaatgtgtatcttttgwacaatatgttgtaaaatgtagatcatagaatagctgactttgacagtcacatttataaaataaatcactcaaagaaawawawwwwwwwcaaacaggttttgctatttccgaaaataaatctttctttatwttgctaaaaaaawwaaaaaaaaa

SEQ ID NO: 5269 - DNA, 600 bp, Rattus norvegicus
gatgagtagcawaagcctgtaatcccagcactgggaggctgaaccagaagggaagycaacctgggctacagaataagccttgagaaaactatcaattctttcagctttakcatcatgtaagaaacacagtttgattaacgctgtattaactttttaaatgtasgtttggaatgggatgacatctcagaatgtgtagactggatggtgccttttgtcagtgttgtaaaaagtgtaagtccagtgaagctgaagacttttaagaagatacccatggrggacagacacaatatccagacacacacaaattacttggctttgctggtatggtttttgtttgctttatctttcactgttttttaaaatcttgctatttagttaagtcctgaaactaatggagctgaagttagcaaagtttagctaaggtctgaaactagtgtccattactacttagacagttatataggatgataaagggggaattaaaacgtaagggagataattaacgcagtcttggtgatatgggcctagggtgcacactaactagcggtagagaggatgaggcagaaggatccacactggcctaggccacatagtaagcaa

SEQ ID NO: 5270 - DNA, 582 bp, Rattus norvegicus
gccagagtgaacaagaggaacctgccatgaaattcccttcttgggaggacaaacccgggcytctctttcttgtgttgraagatacctttctttatgcaactcttccttgtctactgagatgcccagctctccytgcctgctagcctgccagatcctagacctcaaactggatggtctgtgtcattataaagcatactccttaggctggatgaggctgttccttgtaatccctggtcccctgcccatacaacttgttcctgcctttccccagtctgattcgccaggaatcgaatcaagagttcccaacactgtgttcccacaaaaccttatagaacccctaaatcttcccttactccagaagatgaggttggcagctggtcagagctcaataattttatactgtaataagatctttgaatgtgtatattcttattttttacaatcatttcactttgtatttaacatcaatggactgagtcagattcagtaaataattgtaatgttcatattcaatatcttatagtggtacagttttgtatttacctataaatatwccaaaatgattaaaawaaaramaaaaaa

SEQ ID NO: 5271 - DNA, 600 bp, Rattus norvegicus
tcatagctctagactcrkgagcagtttatactgttgagaggttctgactggtttgtgcacaggcggaccggctctagaatctaggcagttrtacttccagaacctctgtgttscatgtagatrscatttatttctgcatatttaaaaaacccatttaggaaataagaaaaaaatgagamgtagaaattattttttcatgaagattttggtccacacctcactgtgttgtaacggattcmccagtttcttgagctggcaataatcaacatttggttcagatagagagagagagagcaagagagcatttgttagcaaaactcacagacttctgaaagttcattgttgtaatgatcaaagtgggkgaaacaaattattttatcaaggaaaaaaagttgagtcccaagccataaaagttggactcccargcsgtaatgctggacagccttggagcatttcatgggattccttgggtaggaatgaaagctctttacaaaatgcttgcattttcttctctctggaacatcaacaccagtatattgctggcagctattgtattaaaaaaataaatatattttcactawmaaaaaaaaaaaaaaaaaa

SEQ ID NO: 5272 - DNA, 600 bp, Rattus norvegicus
acaatctctactcaatggatgactgtgcccataagatcctgcctgtgctctgcggccttactgtagaccctgaaaaatctgtgcgggaccaggcctttaagaccattcgaagcttcctgtccaaattagagtctgtgtcggaggatcctacccagttggcagaaatagagaaggacgtccatgcagcatccagccctggaacaggaggagctgcagccagctgggcaggctgggctgtgaccggggtgtcatctctcacctccaagctgatccgaacacaccccacacctgtgccgtctgaggccgctgtgccccagagaccagtgccagagggagaccctgctccagctccagcccctgcctctgccacccctgcgacctcaggccaccgggaaacacaggaagaagacaaggacgctgcagaagacagcgccactgccgacagatgggatgatgaggactggggcagcttggagcaggaagccgagtctgtgttggcgcagcaggatgactggagcaccaagggcctaacctgcccaagcagtaggtcttggtgctgccgtcccaaccagctttggatgtgaatatcaatttgccttg

SEQ ID NO: 5273 - DNA, 812 bp, Rattus norvegicus
gcaggaacaagaactacgtcaagaagaggaacaaagacgtcgccaagagcgggggagaaaattccaagaagagcagatccgtcgtaggcaagaggagcagaggcgccgcccaatcctagagcctggcacacgccagtttgccaacgtcccagtgcgttccagtcctctctacgagtacatccaagagcagaggtctcaataccgcccttaaaagatgctgcgaaaatcctggcaccagccaaaccttcaagcaaaagaaaatgagaaacactggggtatccagcgataactcacgtgtttctggttgtgggaaaactctctgatcttagaatgtgtcttttcttacagaatcttaaactatacccatttcatttctttcaattcctgtctttcattcttcctcaggtagtccttttttgcaagatgtcattgttctttagtgcagatatgatgtgcacttttaaaagtaagtcatttaatttttctcaaacaactcaaatttaaaactgtaattgtagcattctgttccatttccccaagttttgttgggtttgagaatttttcwacttttgwatattttggtttgcaggaaacctactcaagattctgtaaacatttgtcttgtttgggtccaataagaactcacagagtgatggaagaaggaaagggggaaatgtataaacagatgccaaaattctagaggtctcttgattatacttatcagctcacaatcctttgaggccttatactacctggaagacattcttgttcaaataatttgactgttaaaaatcaataaatgtttggcaaat

SEQ ID NO: 5274 - DNA, 511 bp, Rattus norvegicus
ggacgcagctcatgtccccctgcagccctcgccctggccaccaacgagggacgcggtggaccccgccgggccagctgcccgcagtctgtgcgaggagggtcccccgagccgagaggcytcccctccgacacctccggtcagcatcaaatccgaacgtctgtctccagtcactgggacctctggagacttccccaggtccttcccctaccctytgctccttgccagacccctggcagagccactgcggcccgcgtccctgcgccgcttgactcccgacagctggccacggtagcgctctaagaggatcctctagcctccgcagagttcccgcagtctcagctttcctgcaagaccaggakggcgagggcacccaaggtgcatcactaatgaggccctgccccttcctgggagccgctgtatcaataaagctcaaggatttgggagggcactgtgcagcccccagctcagagcctcccgagcccaggatagccmcammmaawaaaaaaaaaaa

SEQ ID NO: 5275 - DNA, 600 bp, Rattus norvegicus
catgaacagttgactgagtcagagcaggctgcccagtgttacatcaaatacatccaagatatctattcctgtggggaaacagtggagcacttagaggagagcacagccttccgctacctggcccagtactattttaaatgcaagctgtgggatgaagcttcaacttgtgcccaaaaatgttgtgcattcaatgatacccgggaagaaggtaaggccttgctccgccagatcctacagctgaggaaccaaggggagacacccacctctgacacgcctgttcagctttaacttcctggagctgctgagaggaggcagaggctsccaacctttgtgaccgccggagggacagttcacacccccctgactgttgtgccactggctgctgtttggcttcctgcaagagagtttctagctcttcaattttttcatcccgctcctaagagggaagcagagagcacagttctgtctagggtcagacaaataccaaaggaccagactaaaagaacataagcacctacgcgcgacattakcccattagcmcmckktsmrgwrkckttccatacgtaaacacaacagtcggatctgacaagactccaggtg

SEQ ID NO: 5276 - DNA, 739 bp, Rattus norvegicus
gtcatcttgtcattttctcagatcaagaacgtccattcctttgattatgactggtacaatgtatsagaccaggcagatctgaakagccagctgggtgatgccggctacatagtgtttggcgtggtgctttttgtgtgggagctcttacccaccactttggtggtttatttcttccgagtcagaaatcccacgaaggatcttaccaatcctgggatggtccccagccatggatttagtcccagatcttacttctttgacaacccccgaagatatgacagtgatgatgatcttgcctggaacattgcccctcarggacttcagggaagttttgctccakactactatgattggggacaacaaaataacagcttyctggcacaagcaggaactttgcagcaagactccactttggatccagacaaagcaagccaagggtagcacagcagctgacacagtcctatggaagagtcctctactgaaaaccttcarccagccagacttgatgacagctgagtttttaargcagtttccattcagaaacagaactttattttttgctagctatagctttctcatggctctatagggctaagcaataaacctttagtactagcagagagcctggctatgtcagtgagtataatttaaacttttaaaatcaagagattctgtacttttataaagatgtattttatataacttaaatactaatgctaaagtmtaaaaaaaaaaaaaaaaa

SEQ ID NO: 5277 - DNA, 600 bp, Rattus norvegicus
gggtcagctcacagtacagctcggcggacagcatgaccatcagtgtctccacmaaggtgtgttccttcggcaagcaggtggtagagaaagtagagmcagagtatgcccgcctggagaacggccgctttgtgtaccgcatccaccgytcacccatgtgcgagtacatgatcaacttmatccacaagytgaagcacctgcccsagaagtacatgatgaacagcgtgctggagaacttcaccatcctgcaggtggtcacgagtcgggactcgcaggagaccctgctggtcattgcttttgtctttgaagtgtccaccagtgagcatggggcacagcatcacgtctacaagcttgtgaaagactagcatgcccaaggtcgcctgggtatttatgagtttcaaatgaagtactgtgcccctcctcatccagcccgagctccctgaaggtcttcaccattgcatactgctcatgccacccctaaaccccacctaggttttatatcatgtattatatatatttttgtgtatttttaaaatccagctgtgacgggctatatcgtaaatggctctaaagcaggggccactcaaggcctggctcctgctt

SEQ ID NO: 5278 - DNA, 600 bp, Rattus norvegicus
tgcagrctcttatgaaaacatggataaatctgacgacccagagccagcatgggcaggagagggccacatggggacttggggtgccacgtgactcccaggtgactagcctggacttccttaggtcccgagraccccatcttactctgaaatctggagatcccawkaagatggtgtcagtcagtgaaataaccktgtktaggatgtgtgtgcgcgcacacacacacacacacacactcatatgcatgtacaagcaaagcttccttttgactctttttgctttccccaaataaactcaacaagccactcaaatactctgaagcatgcccttgtgtgggagaagaaggaaagatgaggctgaatccagctctgaatcacccagaggaaggagagctggtctgaatacattctggccctagcatgatatttagccactaacatccaatgatgcaaatatgttcagccattattccatggtgtgccacaagggacagacagtgatgggattggcacccctgcacaaactgggaaaccctgtctgcccttctttccttaaccctggctgctctgggctagcaagtcagtacccctcatctctgagtt

SEQ ID NO: 5279 - DNA, 600 bp, Rattus norvegicus
atattttgaaatttcaactctttgaatagcaattgcatagttaattgattgtgtggagtaaattaggtgaactaatcaatcttcgttttgatcactttgtggatttaaatcawtgcwagtttattttcagtttaggtgataccttgttgaatcattgaatggcagagcactsttcctgaagttcagaawcaaaaaaagtgtaytgaaaacttytactacatttgaagaaagggatttggactttggtaaactttggctcttatggataaaatatcaggagctacmcaagcttcatggtctagacttgatgaaacagtgagaagtctccaggggagctagagatcatgcagagtatctctaatatcagtatctstgaggcmtaggctcctattcctccaytgatgggtcagaaaaattkrycagacccytwccmamcywtcvcwyataaaraaarkatakatttmatctkgttkgaagattcmtggtagacaakccwwtcaattytraraacctttccaacaaagvccatatgtagaacatgraattatattmaaaaactcaataaatgattggtgmscmatraamaarwaaaaraaaaaa

SEQ ID NO: 5280 - DNA, 600 bp, Rattus norvegicus
tcggctctctctgtatgaactgkttgtgacgctttcactttctgcggaccagctttgctcagagtgacgtctgcagtgacctctgcccgtgtggtgtgagatacctttcttgttatgtatgtactgtgaatgtgtgtgttttcgcaccacccgcagtctgtccttccagtctcctctgtgtgtctttgtgtgttctttcctgtcccattatggagtcrgacaatatcacagacttaacggtggggatgaaatggaagacactgtgaacttgtcagctgcagaacttgagcagtggagacaatggaagcctctccggtcacatggctgacctactgtcatgcatcaggctgctgmtatgtcyttcactgttgggctggcctgtgggawgaccctgtcaratgttagtgtcytgctttcacacgtgtctagcactcccctcctaaagmtgaactgtttaagctaggattattaattattgaatatattttaattgttgttgatgtgaggcctctytgaatttcagagcstaaggggaaatgatgaaaggrmtgattccagaattttggcaaaatttaagtgvcctaaaaaaaaaaaaaaaaa

SEQ ID NO: 5281 - DNA, 600 bp, Rattus norvegicus
tttgaggaacccaagcccaattctgaactgtgttgcaagccactgtgccttatgctggcagatgagtctgaccacgagacacttactgctattctcagccccctcatcgctgagagggaggccatgaagagcagtgaattgctgctggagatgggaggcatccccaggacttttaaatttatcttcaggggcactggatatgacgagaaacttgtcagggaagtagaaggcttggaagcttctggctcagtctacatttgtacactttgtgatgccacccgtctggaagcctcccaaaatcttgtcttccactccataaccagaagccacgccgagaatctgcagcgctatgaggtctggcggtccaatccctatcacgagtcagtggaagaactccgggaccgggtgaaaggagtctctgccaaacctttcatcgagacagtcccttccatagatgcgcttcactgtgacattggaaatgcagctgaattctataagattttccagctggagataggggaagtgtataaaaatcccaatgcctctaaagaggaaaggaagagatggcaggccaccttggacaaacatctgcggaaaagg

SEQ ID NO: 5282 - DNA, 600 bp, Rattus norvegicus
gggttcggatgtaagtcgaggcccaaggcacgatccagcacagaaggcagggagtgtgtgaactgcggggcaacctctaccccactgtggcggcgagatggtactgggcactacctttgcaacgcctgcggactctaccataaaatgaatgggcagaaccggccccttatcaagcccaagcgaaggctgtcagcagcgaggagagcagggacttcctgtgcgaactgtcagaccaccaccaccaccctctggaggaggaacgctaacggagaccccgtctgcaatgcctgtgggctgtactacaaactccacaatattaacagacccctgactatgaagaaggagggcatccagacccgaaaccgtaagatgtctagcaaatcgaaaaagtgcaaaaaggtgcatgatgcgctggaggacttccccaagagcagctccttcaacccggctgctctctccagacacatgtcgtccctgagccacatctccccgttcagccactccagccacatgctgaccacaccgacgcccatgcacccgccctccggcctctccttcggacctcaccatccatccagcatggtcaccgccatgggttag

SEQ ID NO: 5283 - DNA, 600 bp, Rattus norvegicus
tgccaccctgwgggtgctgctggtaaracytgcaatcaaaccaccggccagtgtccytgcaaggasggcgtgacaggcatcacytgcaaccgctgtgccaaaggctaccagcagagccgctcysccrtcgccccttgcattaagattcctgtagcgccacccaccactgcagccagcagcatggaagaacctgaagactgtgactcctactgcaaggcttccaaaggaaaactgaagatgaacatgaagaaatactgcaggaaggactatgctgtccagatccacattctgaaggcggacaaagcaggggactggtggaagttcacagtgaacatcatctccgtgtacaagcagggcacaagtcgtatacgccgtggtgaccagagtttgtggatccgttcgcgagacatcgcttkcaagtgtcccaaaatcaagcccctcaaraagtacctgctgctgggcaatgctgaggactcgcctgaccagagtggcatcgtggcagacaagagcascctggtgatccagtggcgggacacatgggcacgacgcstgcgcaagttccagcagcgggagaagaagggcaagtgcaagaaggcctag

SEQ ID NO: 5284 - DNA, 600 bp, Rattus norvegicus
ctgcttaagtctcaggaccatggccgcagctgggtccccctgggtttcttctcttccagctgtagcctggactatggccgtctgcctgctcctgctgatggccctgctggtccagggccagaagccctctgtttcccagccccccaggctcagcctgatggtggaggccttctggccttcagtgcgcaggatggcagcccacagggcctggacctggacaacagccccgtgctccaagactgggtgactgccacagatattcgcatagtactcacaaggcctgccattcagggagacaccagggacggtggggtcacagtcccctactcctactcagccactgagcttcaggtgggaggtcgatgcaagtgcaatgggcattcctcacggtgtctgatggacacccatggccacctggtctgcgactgccagcatggtacagagggccctgattgcagccgctgcaagcccttctactgcgacaggccatggcagcgggctacagggcaggaagcccacgcttgccttgcttgctcctgcaatggccacgcccgaagatgccgcttcaacatggagctgtaccgactgtctggccgccgc

SEQ ID NO: 5285 - DNA, 600 bp, Rattus norvegicus
agctccattccctctatctccgacaccagcaccccaagacgaagtcgtcgccagctcccacctgtgccaccaaagcctcggcccctcctctcctacagctccctgatgagacacactggcggcatctctccacctcctgatggaagtgagggtggatccccactggcctctcaagctctggaaagcaacagcgcttgcctaaccgagtcttccaactccttgcacccccagcagggccagcacccttccccacagcactacatctctgagccctatctggccctccatgaagactcccacgcctcagactgtggcgaggaggagacactcacctttgaggcagctgtagctactagcttgggccggtccaataccattggctctgccccacccctacggcacagctggcagatgcctaatgggcactatcggcggcggaggctggggggcctgggcctggccatgatgtgtggagctgtcagtgacctcctgagtgacacggaagaagacgataagtgctagaggctgccatcccctccgatgcatgctcttctctcacagggagaaaaccaagaccaaattgggaagccagtgcggccc

SEQ ID NO: 5286 - DNA, 1400 bp, Rattus norvegicus
atgaattctgaaggcaaccccatccttcggacccctcaaaatgctatcttctttaaaacatgtcaacaagctgagtgcccaggagggtgtcgaaatggaggcttttgtaacgaaaggcgggtctgcgagtgtcccgatgggttctakskwsytsactgtkwkaaagmmswywgcatacctcgatgtatgaacggtggtctgtgtgtcactcctggcttctgcatctgcccgcctggattctacggtgtcaactgtgacaaagcaaactgctcggccacctgctttaatggagggacctgtttttacccaggaaaatgtatttgccctccaggacttgagggagagcagtgtgaactcagcaagtgcccccaaccctgccgaaacggaggtaaatgcattggtaaaagcaagtctgtctgcgagcctggctgcggtgcccatggaacctgccacgaacccaacaaatgccagtgtcgagagggctggcatgggagacactgcaataaaaggtacggagccagcctcatgcatgccccgaggccagcaggcgccgggctggagcggcacacgccttcacttaaaaaggctgaggggcggagggatccacctgaatccaattacatctggtgaactccaccatctgaaacggttcgagttacgccgagttcacagcctttgttaacctttcgtgtgttggatgttcaaatgatgttcattacactttagagtactggcctgaattttattagcttcattatgaatcactgggctgatatttactctcccttttaggtttcctaagcatgtctagcatgatggtatagattttcttccttcagtcctttgggacagatctttcatgtcagttgatcaggttaaaaaataaaaaatctgtctcttcagtatgtagttgacagatacttgcaaaatcacgacacatttgtggtattgggatggggagccctagagaggcgaaactgggcaaagatacataaatcacaaggttttggataaagcagataacagtgtttaagctacagtatttcacattctgttgtcaaatatttggacacttgtctaattaatatttcaattgccccccccccatcttgaatacgtacaatctatttcgcccttactgttactctagacagttcagttttgaggggggaacagagttaaagggaaaacatcacacttgtgttagtggcatttaaacaatataatatattgtaaacacgacaaagtaaggaatataatgtatggagtctttgccttggatggaagcaatataatatattgtaaacaaaacacagctcttacatagtaaacattttatactgtttgtatgtatcaaataaaggtgctgctttctctctctgaaaaaaaaaaaaaaaaaa

SEQ ID NO: 5287 - DNA, 1400 bp, Rattus norvegicus
ggctgaagccacctctccttggaggactcccagccttgtgccgccattactgtgaatatttctaagtgggctgcagcttgtgtgtgccctgggtgctgcccagaagtgttttcacggacagtgtttgtttggagagcaaaatggacaggtttacagatttatagcaagaggaggagactagggatagaaaaatgaaacttttttttyttttttttttttttgaaggagaaaggagtaggcaaaaaaatatttattttgctcttatttcttacaagaacgtgaagacacagaggcatgggctgtttgtgttctctgggtccttccttgggacctactgccaccagtsrgggctcttgggggcagcttacaggtcctcaggctgagcctgctcctccccagcctgccgggagggtagcccttgccctgacgcagccccagagggcagagacaattscaggcggtcctgtgcggattcccagsccagggctgggtcacaggaaggaagcattctctggaaaggggaaatgtctcccagatcattcccctggcttccagaggccaaaactggtgtgacccaaatgggccaagctgtagcctgtgctytaggccagttggacccctgtwaatacatycttttttttctgctaaacccytcaacccsctyccactctaagataaataagaaaatactcaaatcaaaaaccaaactgcataagcttaacccgctgatgagtggttttactttgaaactcgttttgggtccagtccgttgtacgtcgccacagaagccacmccatgaaaaagaataaaaccttaaaaaacaaaacaamwvwmmhbvrhrscmgsgccaagcttcacagttctttaaatggttcttgggttccacggccctagcaggagactggggacaaggggcaatcttctgctcttggtttctggggggacagggcgtgggcaggcagtggccctgtggtcccaggcttctgttctgcggtagccggctggatccttcaaggtacagctgtacataaaaatgtrtcccaagcttcgattctgtgtrcggtggtggcagtggtgcagcagccggcacggggccccgagcccagggagacgattgtgcggactagtcaaccaagtgcaatatcggtgcccactgctgcagagcgccccaacagaaagtaacttattttgtgctagtacccgcctaagaaaagaatcggcagtattttctgtttttatgttttgggcttgttttattttggattagtgacctaagttattgttaacwgtgtacaacatttaaatattgtctgtaaaaattgtatgctaccctcttattcctttaaagtgaatactgttaaaagtaataaaatactttttgtgaaaaaaaaaaaaaaaaa

SEQ ID NO: 5288 - DNA, 1400 bp, Rattus norvegicus
  misc_feature (1370)..(1370): n is a, c, g, or t
cttagcaaagtatccagagatcaagtccttgatgaaacctgaccacaatctgatctggattgtagccatgatgcttctcgtccagctggcttcattttacttagtcaaagatttggactggaaatgggtcatattttggtcctatgtctttggcagctgccttaaccactccatgactctggctatccatgagatttcccacaatttcccctttggccaccacaaggccctgtggaaccgctggtttggaatgtttgctaacctctctctcggagtgccatactcgatttcctttaagagataccacatggatcatcacmggtacmtcggggcggacggcatcgatgtggatatccctactgatttcgagggctggttcttctgcaccactctcaggaagcttgtctgggttatccttcagcctctcttctatgcgtttagacccctgtymatswrsscyawsccwmktrcccatctggaagtcatcaacgctgtgatccaggtcacttttgacgtcctcgtctactatgtttttggagtgaagtctctagtgtacatgttggcagcctccctgctcggcctgggcttgcacccaatttcggggcatttcatagccgaacattacatgttcctaaagggacacgaaacatactcctactatggscctctgaactwactcaccttcaatgtgggctatcacaacgaacaccacgacttccccaatgttcctgggaaaaacmtgsccckrgtgagaaaaatcgcargtraktwctatgataacctyccacactacaactcctggwtccgagtgctgtatgactttktgatggacgacacaataagtccstactcacggatgaagaggcccccgaaagkgaatgagattcaggagtaaatgccatcacagccaaaggaattcctgtccacacttcagaataggagataaagtggagctttcctctmgttaaggtcagtgatgctcagaagccgcgctgacgtaatttccggstcgctgasgtaatttccggctcgctgacrtaatttccggcyasgakctcsgtgtcatcagaagctcytsggccttcagacagccagaactcacacttgctcgcagycgcacgcctgctcaccgwactcacgcaacgtatgactgttactgaggcgwcctcactcatgtctgtcctgctgcaagcaaatcataaaagcttmtgttatttttcactgtaaggktttactytattaaaagcccytaataaactgaactgttwtcdwawawawwaaahaaaaaaaaaaamaattgcggccgcaagcttattcactttagtgagggttaattttagcttggcactggccgtcgttttacaacgtcntgactgggaaaaacctggcgttacccaact

SEQ ID NO: 5289 - DNA, 451 bp, Rattus norvegicus
  misc_feature (113)..(113): n is a, c, g, or t
aggtttgcccaagctggcgagggtctgcgcctacaggtccatggctgtgggtcgctgtgggcggtgcggcagggggcgcggcgctgctggccgcaggggccggcctggccttntacgtgcagtccaccgcttgcaagaagggagagtacaacgtccaggaggctgagagctcaggcgaggcggttgtctcaatggcgcgggcgggacaccgggtgcagaaggcggagcagagmcccccggcactsccgagtcacctgcagatggcgaggttytcsccatccagctgacatcttcctgagcctgtatccagctcccccaagggscctcgaaagcacaaggggtggacgtatgtattgttcactctmtatttattcaactcccaggggcgtcgtccccgttttctacccattcccttaataaagtttttrtaaaggaaaaaaaaaaaaaaaaa

SEQ ID NO: 5290 - DNA, 462 bp, Rattus norvegicus; identical to SEQ ID NO: 1194

SEQ ID NO: 5291 - DNA, 469 bp, Rattus norvegicus; identical to SEQ ID NO: 1195
  misc_feature (401)..(401): n is a, c, g, or t

SEQ ID NO: 5292 - DNA, 464 bp, Rattus norvegicus
accagagtcagttggaccgagagcacgtcctgaacttggagcagagggtggtggagttacagcagaccctggctcaaaaagaccaggttctgggcaaacttgagcacagtctgcgactcatggaggaggcgtcctttgatggtactttcctgtggaagatcaccaatgtcaccaagcggtgccacgaatcagtgtgtggcaggactgtcagcctcttctctccagctttctacactgccaagtacggttacaagttgtgcctgcgcctgtacctgaatggggatggctcaggcaagaagacccacctgtccytgttcattgtcatcatgaggggagaatatgacgctctgctgccctggcctttccggaacaaggtcacctttatgctacttgaccagaacaaccgtgagcacgccattgatgccttccggcctgacctgagctcagcctccttccagcggccg

SEQ ID NO: 5293 - DNA, 458 bp, Rattus norvegicus
ggagacacgcttcactgcagtcaccgcctaccagaatcaccggmwcgakscgcagcttaagattgccagcaaccccttcgccaaaggcttccgggactgcgacccggaggactggccccgaaaccaccggcccggagcgctgccgcttgtaagtgcctttgctcgctctcggaatcccgtggcttcccccacgcagcccaacggagcggacaaagatgtggcagaagcccggcgcgagttcgaccgtgactctggacccgcagcgctcggcgacgccacgcacccgccgcagctgctggcgcgcgtgctgagccccgcactgcctgggcctggtggcctcgtcccgctacctggcggatccggaggccgccacagtcccccgcacgctgatctgcgcctggaggctccgggcgcatccgaaccgctgcaccaccatccctacaagtacccggcggccg

SEQ ID NO: 5294 - DNA, 511 bp, Rattus norvegicus
cacgaggcagttggatgcacacagactcctccktcacttccactacacggtgtggccagaccatggggtcccagagaccacccagtccctgatccagtttgtgagaacggtcagggactatatcaaccgaagcccaggggccgggcccaccgtggtgcactgcagcgctggtgtgggcagaacagggacatttgttgccctggaccggatcctccagcagttggactcaaaggactccgtggacatttatggggcagtgcatgacctaagactccacagggttcacatggtccagaccgagtgtcagtacgtctatctgcatcagtgtgtgagagacgtcctcagagcaaggaaactgcggwacgaacaagaaaaccccctgtttccgatctatgaaaatgtgaatccagagtatcacagagatgcaatgtactcgagacattgagaattcacctggagatcccctggataaaagtttttcactgtgtgactttaaaaaaaaaaaaaaaaa

SEQ ID NO: 5295 - DNA, 595 bp, Rattus norvegicus
cacgaggcccttgtgtgccttctctgcaaggtaccagctccacccattctcttcaacttaaaaagaaatgtatctgagcaggctctgatttctaggatgatctctactgccaggtagatctttgtgaggtttccatggcatcatagaccaggggtccattcttggtcctttgctgccaactgctcactcttgacttagctctagccatttgtgacaaccacccttgtttccttacaaatcctcgcatgtaaccttggtactcctgttgtttcttgtgaagaatctattctgttgtctttgatgtaataaaaaaaatccatgtagtttatgtaaaaataactgactcagaaggaagccaactgtgtcttgtgttggaacaattcataatgtaatttctagaccacttttgcaaattgttcttgtcaccaaatgtgttcagacattgctgtgcagttgtggggaagggktggggggggggaaggtaagatgmgaagattgttgggctttttttttaaaccttctccaaatgtggaatggtctggccaacttgctccggatgcaataaagacaatgcmgtgaaaaaaaaaaaaaaaaa

SEQ ID NO: 5296 - DNA, 722 bp, Rattus norvegicus
gcggccgccagcgattttttttgtttgttttggtttgttttgttttctgtccccagatcctgacttttccaaagtgccttaaaagaagggagatcacagacacatggagtgtgtcacttcctyyyytyytwwwkywwwbckccaccttttctctgtgctgttcctgttgggttttgttcacgtcaaayrygwggttcattctcagamccaagggaaattgtcttgcctgttcwttccgtttcctcccagcatgctttggggcacctcaggcccaaggcacacccaaggcactgttgttaggcmtgggcatttgcctgacccaggagatsccgttgggggctggaggattgagggggcagggaccatttccttcacttgggaattctcaccctgttgtcccatgctgtgtctttctctgtctatatttgtggtggcctgtgtggcagggcccttgggaaagctcakaggcacagarrggcaaaggaaacgtgytgccctykwgcckggcagggtctcggctgcccactgggctgttacagacctrtgatgcyctgtgtgtattttgatatcccatgtgtatagatgtatttaccactggggctgggagtgggtggctgtctctgaccttgatattcagaacagacatctgtatttttgcctttgaaatgcagtaatataacatgaataaatgaccctatctttgtaaaaaaaaaaaaaaaaaa

SEQ ID NO: 5297 - DNA, 450 bp, Rattus norvegicus
ccccaattcccaatttgtgtccccaggcatggggctcttttgtcattgacagccctgcagaggggactccatggcagctggtctccatcccttgttcatgagcttagggtgggttmttccctcccccacctygtcctggggaakgggctccaytmgtkataaataagctttmtgrttgtgtrccaagaaaatcaawgacsatcakcacccagsttcaaagatytggagctkcyctgggtcagggaaatgatcccaaaccccacatggccgggcgcctccctccccacctctgttgacccyatttctctccagactgtttctttttatgactgtaaacatagatagtgctttattttgttactaagaagataatgatgaataacttaammarmawawwwrwwwtctgatggtgtaataaagaccgaccatttcaaaaaaaaaaaaaaaaaa

SEQ ID NO: 5298 - DNA, 522 bp, Rattus norvegicus
  misc_feature (67)..(67): n is a, c, g, or t
atctgtctcatatccttggagcccatcagagagcagctcctgacctccaaacaagtgcaagagcctnatgaggactgattgtaaagttcgccactaaaatcgctgctctgtgaaggactgtgctgtggagggagcaccctgcctccacggtggtctgtaagcaaagtgccttgggctggctatagtggctcactctgcaatcctagcacttgagagttgagaactgctgtgctttatagcagcctgagctacaaatgattcctttaaacaaaaacacacgaaagcaagtgcctttacctggagataaccagtgtcaccaagaatttccattatattaaggacccttctaatctcagaagtcccagtagactgactacagtgtgctcacagccctgggtgctagtcatgaatgaggtggtgtgatttcctgaytwgcttcacaccagcaggggccctgactgccacactgggcggccaaataaaccatttcttgtctcagttttccaaaaaaaaaaaaaaaaa

SEQ ID NO: 5299 - DNA, 600 bp, Rattus norvegicus
gactgtgwykasctktgymdmwvchwstysmrgccrargtcacacgctgggtatcagaaggttatgctggaagagctgcagcggcagcactgagcagaktgaakaggggaccgagtggttggattttgcaagctgtggcgaggaccatactgtgaagatttwtagggttaacagatgtgcactktgaaaacttgacctcaccctgcctgtcttgattgtcttaaacgtwtgttatgtaaatagatcrccctttccttaccttagtgattgaatgagtttccctgtmwactatctgatataggtcacgggctctttcccttgkttwatcgcatgtatgtaacctcccagaaccttacccatgctgtcagaracgcttgggkctacctctgtgtgtttcagattaagaacacttttaatwtktgcymaaawrwrwmwrawwwwwmttmtmtaktstttttsraaraaaaaamwwrarrrgtgggcccggtcccaaatcgccctatatgagtcggattacaattcactggccgtcgtttacaaccgtcggactgggaaaaccttgcggtaccccactaaacgcctggaggaaatccccttttc

SEQ ID NO: 5300 - DNA, 600 bp, Rattus norvegicus
tctttattcagggagtgagacacggactaatcggtatggattccctgtgtggctcacttggatgagttgasggtgtttagcagttttwwtatacttcctccgggtctctgggaactcaagacttttttaaacataggtgtaaataaggagcgattgtcacacctgaccccagtgagtggggagaggggaagctattatcttgccaagcctggttgtaatttgtaaccattttctatttgtgcaaactctgtaaatatgtttaaaaatgtaatattttgtacaagacacactggagaacaaagggaacttaaaactcttccacaagtccacccatcccatggagtgggactaactcccctgctgctccagccaggggccctgagcttctgtgcagacaggaagctgtatgggagactgtcattggggatttgatttttttttcctgtacgcatttaaaaaaaaccttcattggawwammwwrmarwrrwrtgtttgacttttataggctgtctttagcattgtgcaatttaagaataacttaagtatcatggactttacataaattttgaattgtataaactwtaaaaaaaaaaaaaaaaa

SEQ ID NO: 5301 - DNA, 534 bp, Rattus norvegicus
agacatggagtcagagctgcttcgagggagtcaggccatcatgcttcgttcagcagacctgtcggggctggagaagcgcgtggagcagatccgcagttacatcaacgggcgtgtgctgtactatggcacctgcaagtgatcttaagtcccagcctcagacaattcccctccctgccttggaagggacacrgsrgaggggaggtgtttcctggacctagggcacttggataccattgatagcatagtctggtcaccatggacatgcttcaaggtacctgactgccactgagcctgtgcttgcctgaccacactaaggagagagatggtgcagggggtggggctgtcacaactgaaaatcctcccaaaaagggagctggatggacagagtgcccccaacaccaactcctgccctccactgtggtaaagtctgggaccaactcaaaaactgaacaaagtgtgatgtacgaccacaaagtccaataaaaatctttggacaggagcctggaagctcaataagaaaaaaaaaaaaaaaaa

SEQ ID NO: 5302 - DNA, 427 bp, Rattus norvegicus
agaacataattgccgagcatgaaattcgtaatatctcttgtgctgcccaggacccagaagacctctcaacctttgcttatatcacaaaagatctgaagtccaaccaccactactgtcacgtgtttactgcctttgatgtgaatttagcctatgaaatcatcctaacgctggggcaggcatttgaggtcgcttaccagctagctctacaagcaagaaaaggggcccattcctccacgcttccggagagctttgagaacaagccctcgaaacccatcccaaagccccgagttagcattcgcaagtcagtggcccctgcagagtcgctgtgcagtgcaggtgcgaaagcgcggacgccgcccgggccgccccgcagcgcggctgggcgagcggggcccgaggtggggttccagcggcgcccacgcggccg

SEQ ID NO: 5303 - DNA, 526 bp, Rattus norvegicus
tctctgtagggaactctggggtcccccatccccatcctccagcttatggtactctcctagagacagaagcaggctggaggtaaggcctttgagcccacaaagccttatcaagtgtcttccatcatggattcattacagcttaatcaaaataacgccccagataccagcccctgtatggcactggcattgtccctgtgcctaacaccagcgtttgaggggctggccttcctgccctacagaggtctctgccggctctttccttgctcaaccatggctgaaggaaaccagtgcaacagcactggctctctccaggatccagaaggggtttggtytgggacttccttgctctccctcttctcaagtgccttaatagtagggtaagttgttaagagtgggggagagcaggctggcagctctccagtcaggaggcatagtttttactgaacaatcaaagcacttggactcttgctctttctactctgaactaataaatctgttgccaagctgraaaaaaaaaaaaaaaaaa

SEQ ID NO: 5304 - DNA, 570 bp, Rattus norvegicus; identical to SEQ ID NO: 1208

SEQ ID NO: 5305 - DNA, 557 bp, Rattus norvegicus
  misc_feature (35)..(35): n is a, c, g, or t
gaaacctggcaaaatggaggatgatatagataaanttaaacctagtgagtctaatgtgactattcttgggcgatttgattacagccagtgtgacatttggtacatgaggttttctatggatttctggcaaaagatgcttgcattgggcaatcaggttggcaaactgtatgtttgggatttagaagtagaagatcctcataaagccaaatgcacaacactgacccatcataaatgtggcgctgctattcgacaaaccagttttagcagggatagcagcatcctcatagctgtctgcgatgatgccagcatttggcgttgggatcgacttcgataaactatttttccctagtaaaaattagaatatgttgtctgtgtaaaatagaattaatgtatcttgctagcaaagggactagagcatttagacttgtctttcagcatccgatcaggctgagctgaatgtagtggtgtttacattgtttacattctttgtactgtcttcctgctcagactttactgcttttaataaaaatttatttttgtaaaaaaaaaaaaaaaaa

SEQ ID NO: 5306 - DNA, 496 bp, Rattus norvegicus
ccagtgtttatatttcaaggtcggtgaaaagtagaagtctcagtgtaatgtgggaacagcagtccacgtaagaaactgtagatgtctgtagtactttcttgcagttcatttgaaactttggatgctgagctttatctggtttrgatggttaaaaaatgcatgtgtaattttaattttataattattttgacaagcataatttttctggacaaccttgtaggtggtagccttaacttttagccaactttgttttttttttatataaatatatatatacatattatatatataatgtatggttgtaaattcatacacttatcacatgaatatgttactatatacagaactcttaatgctttattttcagatgctgggttgaaactgtttgaaagcctttaaatatatatctttataaagtaawawwwarrawrawratggaaattgtttatattgttatgataaaagatggtattatgttraaaaaaaaaaaaaaaaa

SEQ ID NO: 5307 - DNA, 600 bp, Rattus norvegicus
atatagaaaaatgtatagacgttcggacagacccggcaaggggtggccactggttaatgttaggaacatgccrgtcacctaacatctgagcacgctcacaaacctgcaggcatatatcattggcgtatggcactcatgcaaaaggatcagaaaccattcaaagaggmccatacccactktaaaaraaaarraaaaaaaagtgtggtgtytgagagctaacgtatttaattaaataaataaatctgggtctgcatctcttattaaawaaaaawawaaaaatatgtacattacattttgcttattttcatataaaaggtaagaaagagtttgcaaagcatttgtggctatttgtagtttacttaagccaaaatgtgtttttcccctcaatagcttcgctactattttaaacagtcctgtaaaccccaccaaggactttttgtatagaacgcactaccctaagccatgaggaactccatgctttgctaaccaacataactgttttctctttgtagaagttttgtttttgaaatgtgtatttctaattatataaaatattaagaatcttttaaaaatctgtgaaattaaaaaaaaaaaaaaaaa

SEQ ID NO: 5308 - DNA, 600 bp, Rattus norvegicus
ttgagaagattcatcacmmcagcgaacagaatctctcctgaaattcaactcaccarcatcaattaaaagaaaacctatttttctaaaagattaatgcagaacckcctccatttktgccttakctaagtwagcaaaaccgtwaactattttgtacagacagcaaaatcatggkttattaaaasgacagtttactccagataccacgtwagtttcttgcgttcagagactcgctttcctgcycaytttgtcttgcccctctgcctctgccttgcckmwywcytgkhagataatattttatcctatgtcgaaagaagggggaaagtccctgtttatgaaaatcgctttctttttattcatggacttgtttttaaatgtaaattgcaacatagtaatttatttttaatttgtagttggatgttacggaccaaacaccagaaagtgttccaaaaacttttcaagttaaattgcctgaaacttttaaaatgtgccttttctctcattataaaaagggaaactgtattaatctcattctatcatccttttctttttgttgatcatatccattgtttgtttattaataaattgccgttcagtttgaat

SEQ ID NO: 5309 - DNA, 494 bp, Rattus norvegicus; identical to SEQ ID NO: 1213
  misc_feature (410)..(410): n is a, c, g, or t

SEQ ID NO: 5310 - DNA, 581 bp, Rattus norvegicus
tcagtccccttgataaccatgaactagatggttggaccaggtggacagataagctgacgcccctgtcatctgcmttcksyrygmrrggagagctcacagtaacaccgcgtgtcmccatataactscacttcaccctcgtccttgtgcatgacctgcaaaaaaacaactgtgtgtctttgggctggywysmstacrcacswkracgatggtcaggatmkgcagykasvcagccacaaaggggacagactttggggactytagcyaaatgtggactcaggggaaattacctggagacattgtatatatttagtaattcataatatccgtatttcagctggaaacacatgagcagaggcaggccytggccagtctcaaaggctcagttctcagacactgcccmtatacttctgtcgaaggaagaattcaagtgccttaggcctgtgagccacaaagtcttggctgagatcaaagtgggtatttaggccatagtgacaatgtaatttgattgtaccttactatagggtggccacttctttctgataataaaaacagtatttrtdtrraaaaaaaaaaaaaaaaaa

SEQ ID NO: 5311 - DNA, 600 bp, Rattus norvegicus
amtactgttyccaaggttactaaaaaaaarrmwamatgcgttaccaagtcttaagtaatcctcactgcaagakagtggggcagacaaactaaagtgctgaccatgagaagggatggggtggtcactatccttgcargttcctgggaggtggtggttgggsskcrwgmmaatkmwtkkaagttacgtatgttgtttctcattacttcccgtgcattacccrtttgccacacacacccacccctgtgcawattttcacaagacattaaaaacctgcagatttcaaaagttgcattaagtgtgctgtagagattcaaacggacggacggacaaaccaacggacggacgacggaaaggaaaacaaaacagaacagaaactcaarmgksmrcagtgaagatgaggacaggcggactggcacgactcgggtgatctaagccctccactgagaaccaaggattcagcttcttggaagtcaccgcaggtgcaggcgcagcgctcctcgtgtggctgacgtcgccccgcctgttcttatctatatttttggtataaatatttgtacagttccacacgatgtttgaatacagccctaatgacacctcgtg

SEQ ID NO: 5312 - DNA, 600 bp, Rattus norvegicus
aaggtccagttgaggccccttttacacaatctggygksaskwskgtgattcattttcaatctgtgtttccttgacttagaagaagagaaacagtactgctgtgcttatgtctgcttggytgktaccccaccaccacacccctctgggctcctgtgccctccactgtggggagcatagagcccagacagtgcggactgccactgtcccagtgcagggtatgcaccagcagcccactcmtcgggggctcggggttgtgagtttcctgtgggagatytggcttctgattcccaggagtggggggtttgtgtttttcttttawttttttctacatttacccccaagcatattgaarmawrwmwmawwmaatgttatgcaatggacgcatacggaaatccacttagtgtcagccgcaccgttttttagtgtggtgtattcacctgtaaatagtttgtgtaaaatttgacagaaaagtctatttactacattgtaaatacatgtgatgatatattgtattattttgcttttttgtaaagcggttagttgctgtacatggatarcaaacaaaaatttgattattmwwrwraaaaaaaaaaaaaaaaa

SEQ ID NO: 5313 - DNA, 600 bp, Rattus norvegicus
gacaccctttccacatgacgcccatgccttatgacttacaaggattagatttctttcctttcttatcaggagacaatcagcattacaacacctccctgcttgccgcagcggsagctgcggkctcagatgaccaggacctcctgcactcctcccgatttttcccgtatacctcctcgcagatgtttctcgatcagctaagtgcaggagggagcacttytytgccagccaccaatggaagcagtastggcagcawcagcagccttgtgtcttccaacagtctgagggaragccatggccatggtgtggccagcaggagcagcgcagacacggcatccatctttggcatcataccagacattatctcgttggactgacgccctcaccctgctgctcccaccccatcccagattaaatgacttggcagaagagaamwmwawrmwmwrwtttaccttatcctgtttagaaaagtatacagcgtgttttttttttccttttttttagggaaaaaaaattaaaagaaatgtacagagaacaaaactatattttcagttttacttttgtatataaatctaagactgcctgtctgataaaacacttgtt

SEQ ID NO: 5314 - DNA, 420 bp, Rattus norvegicus
cccctattgaaaagttcagcaatgatcttaaactggagagtgcttcctgtccmaacagtgtgtarcttgttaactyttacacggtagtgcctcacrgaatggagtsrtatcctttagagagcatgtattstgggaaggagtagacgacgktgctctggtaatctctttaccytaccacctttgaaaaagcatatgttgtttdacaaaaacttaaagtagggacktacaggaaastmttgaatyttatttgaaggacactgcagtcctaacatggtsttcagtgaaagcaaggtggtagattkytggacgtcayacatktacatttaataytgytaagtgytcgtcagtgtaatgtgacttcatgstrtrtatcttktgtaaaacatttccwtttdhamrwamrwaaaaaaaaaaaaaaaa

SEQ ID NO: 5315 - DNA, 815 bp, Rattus norvegicus; identical to SEQ ID NO: 1219

SEQ ID NO: 5316 - DNA, 508 bp, Rattus norvegicus
aaagggagagaaggataccaggagtgacagacactattgggcctcatcggttagaaamtaaagaactagcggaatcagaaagctttcagtctctaaaagaagatgatgtctatcaatatgttgttagaaagccctcaaagaaggtaagaagcccgtgaccaaagccaccaagatccagcctcttgttactccatctgtcctgtaacacaatgctgacttactgctctgaagaacaaggaggacactgtaggatatgttaaactattggccaagagagtgaaggaagctgaagaaaaacatcagaaaggattacaagacacataggctgtcgtcatggagagcatctacttaagactgctaagtcttagyccagtcaaaaacaaatctttaataagaataaataaataatcatatcttgaagactccccctaaaaaatctactaaaatgttgttaaaagaaaaagtgacgcacccttactcaacagaaaaaaaaaaaaaaaacctcgtg

SEQ ID NO: 5317 - DNA, 600 bp, Rattus norvegicus
  misc_feature (524)..(524): n is a, c, g, or t
tcggctcacaggsccccaggggagagaaaatgcttgcttttcyccctggtcctctgcactgccatttttaccctgacccccagtctacatccktcctacaaaatggatagacgagccaaatgctagcaacattcttccaccttcccggctgggagcttggcttgaatccaagtatatggctgctttgccctagagggaatccctccacgctgcctgttctggaggcagtggagctttgaaaagaacatgctaaaaataaaaatttatttttatttttttaactcaatgttaagaagattatctaagtcctggggaaaaaaggaatgcgcttttagacaagtttccatctaaaagcacttccagggtcgaaggcaaccagcttgtgtgctgtcaccttgctgtagtttctaatactgtgtgtctgatagtggtaccctcatcccccaaactactccagaatgacatttggcactgttcttagaaccacatggtcactctagcaaggtcctaaaggaccctgattntacattacatttcaaatgttacttgcttttttttttaatttctgtcatcattgaaatgcaaaaagaaaaaaaaaaa

SEQ ID NO: 5318 - DNA, 600 bp, Rattus norvegicus
  misc_feature (205)..(205): n is a, c, g, or t
gcaccagtcaaacacggaccctcaggccctcagaatcgggratgtgaaggcaagttccatgtaggacagcagcacatwwtcaaggccgccattttgccttytgttccsgccamcctccsgcytttggccccayttcagataaaggaagggwtgtaaacccagcagtgagccctgcaagagggcaaggggscacagctcmtgcttntggttgcctctctgcctcaccgtgacagctattgcctaccagagaaacaaagccagacagcccagacctgcagcccactgcytgrtacatggggcaggcagtcytgsgacaaaagcgaagatccctkgmaasbtgggctcttgsccagggtgctgggttcagtttctttaagctaagactgacaaggccatgttgsccaytgaggachtgcctgstaytgaggctcacggtacagaggcytgkctgccccacatccagggcagagggtytcccasttaaaagaytaggttttgtaaaktktkttaacmtgtaaacctytcaatgttgwtacacaaawttaratctcctgdtraaaaarawrrmawrmwwgctggtggaaaaaaaaaaaaaaaaaa

SEQ ID NO: 5319 - DNA, 567 bp, Rattus norvegicus
agagagagagagagagagagagagagagagagagagagagagaagacgactctggctccaaactcagccctttgaagaaagctatttagtttctcctacagacaccttgccagtaaccttacaggtcttacaggagggcagacctaagttccgaggctgatctgcaaccacagctgtccatcaagaaaacattcctttcagtgcaaaatggttctttgctgtttctggattcccttcttcttgccccatgtcctgttcctgaggagctacttcctgtagtaatacggtggactcttctatgaggagacaacctytgggtgtttttcaatagcctgtggtgggtaatgtgttttgtcaagggctaaatagcagatggatttaatttytgyttaaaacggtcacagtcwttytgaaacggacacataaaaatcctytgtwttagaaaacggaatggagcgcggtsccaattgtatttttctttatttattccctgtaagtytgtcagatgataaattgtaaataccagtgattaaaaagrgtcwtgytwmwraaaaaaaaaaaaaaaaa

SEQ ID NO: 5320 - DNA, 537 bp, Rattus norvegicus
cggcacgagggtcgtatgtcattgtttgcagcacaaaacattctatgcatttgaaactgagcactaaactgggctagctttctgatagaccgttttgtggatagtgtgatctcacagtctacttactgcctgtttccactgaaaacacaacattattgtaaatattttctttcatgcacaggctcacacagtggttacaaactgccagtgttaatcctgaaatgtctcaccgactggtcctcctcctgtccatgttgtgtctgcagagctttctccttggttatgtctttgctctattgccccccccaccccaccccaccccatcagaaccatttytgtgcgccaacatacaacagggaggtgtgtcccagcacacttccaaataaaacgtgactgaaagaagaacaattttatgatctgggtgcatttttgtgtttacattgagccaagtcctggtagagccggtcaacaaatgagacaaccaaaacaaaccaaaacaamccaaaaaacaaaacaargcaaaaaaaaaaaaaaaaa

SEQ ID NO: 5321 - DNA, 600 bp, Rattus norvegicus
ggaaagcacaatgtacaaaatgtgcatgtttcagtttacactatacaaaaatagktaaratacattccaggtaaacatgttacattaagaaatagcactagtaagaaattggcactcaaataaaaatgcagacgtgttttcaacattgaagacatgagacagtggaattgggggaccaggagataawacagcacatagcccactcarctggctggagttgagtcyraaactggcatttctgcagaacttcatttttcccagattcatctaaaatgcctaccaccatcccaaacaggcacttcaaactattgaactaaaccacaaatctgaatctaattaataactmttctttgaaaactaatgtacttctttagaaataagttttcatgttttgacaatttacagctattgggtatatctgttcaatttttcaatgcagaattcatgctacgcagtattacacagaagttcttaagtataaattcacctttaaataactttggggttttaaaaaaatgactacacaattatcaagaaatcactactttcaacaaatggaaatcagttaaatttttattgcctacaaaaaaatccctcgtg

SEQ ID NO: 5322 - DNA, 600 bp, Rattus norvegicus
  misc_feature (185)..(185): n is a, c, g, or t
tcytgggcagccatttttcccatccmttccctctgtggktgttttccaagcmtgcggtckscaygarggtgctaggggcatgggaaaaccaytgttgtgtccattacstmtcttgcsttgctctcytgagatggtattcccggtaacatcccccggtatcacagtgatcgcstvtasacagvtcnwascrgtrsttcccbtttchtcccctcmtcwcagtttcctcakmcaggtcatccctktccccatcccstcagcytytktaatgcacgytgaaggtycaggcacacctcaagtcctgtgcttgagcaataaagtggaavcwmcaaaammwrrrwrwmarrmaammmtttatgttgagctctcgggtggggcatggtggggatmtgggcggggcaggatgaataaggtcccactytgctccatcgttaagtrtgsgatrtggtgcagactgtggcaaggcaggaaacagctgctgtgctcatacaccctgagctctgatatagacyacagcagtagaatgctggggtggttcccctcaacaagaagaggaagagktwataaacagtggttktgaaactgaaaaaaaaaaaaaaaaaa

SEQ ID NO: 5323 - DNA, 600 bp, Rattus norvegicus
  misc_feature (60)..(60): n is a, c, g, or t
aaaggatggcacaaggcatggtttgtggttcccgagaatgaacccttggtgctgtacatntatggagcccctcaggatgtgaaagcccaacgcagcctgcccctcattggctttgaggtggggcctcctgaggcaggggagcggccagacaggaggcatgtcttcaagatcacccagagccacctaagctggtacttcagcccagagacagaagaactccagcggcgctggatgrctgtgcttggcagggcgggccgtggggacacattctgcccagggcccacactgtctgaggacaaggagatggaggagacaacagtggcagcttcaggagccactgctgaacctcctgaagcctcccagacccgagacaagacctagagggtttggggggggaactgggagttcctgccccacactccagctgcccatgttcaattgggggctctagcccactcccaatgcagtcaatacttgaattcccatcaagggsactttcaatcccgaawrmwrrrwmwwrrrwtttttaattcatcttttcacaaaatgtgggctttttaaaaaagaaagacaaactattcctaaaaaaaaaaaaaaaaa

SEQ ID NO: 5324 - DNA, 600 bp, Rattus norvegicus
tgaagatcaagagatcgtcactaacccgccagacatctgccaggttgtagaagtgaccaccgagagtgatgaccagccagtcagcatgagcgagctctaccctctacagatttctcctgtgtcttcctatgcagaaagcgaaactaccgacagtgtgcccagcgatgaggagaacgcagaggggagaccacactggcggaagaggaacatcgaaggcaagcagtacctcagcaacatggggacacgtaacaactgtctgctgcctagcatggcgacctttgtcacttccagcaaaccagatctgcaggtcaccatcaargasgagagctgtccaatgccttacaacagctcctggccgccgtttacagacatctcccttcytgccccagtgacccccacgcccagcagcagtcggccggaccgggaggcccgggccagtgtcatcaagaagacatctgatatcacccaggcccgtgtcaagagctgctaagcctttggctctccctggtggttgttgggatttcttagctttgtgttgttawttgtttgtattttattttttctctatrawacctatcttagagaaaaaaaaaaaaaaaa

SEQ ID NO: 5325 - DNA, 600 bp, Rattus norvegicus
atcttatggctgctctggacccgcgtgctcctgcagggactctttgtctacggacgcttgtggagcattctggaagagttttccgactccagtttgatgaattccagattgtcagtagttcacatgatgacacaattctcatctgggacttcctaaatgatcyrgccactcrwgcysaaccgcmmykckscmckwskcggacatacacctacatctccagataaataacgcgacactggcctcataattgcccaggactcgttaacgttgcagtatttaacatgcctgccaagaccaggatgamcarcaacaatcaaactcccacccggattcctggacggaccakcgaggagcaggcctttgagactcctgttgggacacagccggtcagcagccgaccagkacggtctgctcggcacaccggctgcttcartgctgctatcagaagatgtctttatcttgtgtgaatgattggwactttcaagcctccctmccctctccttcccccttcctstgcacctgtttctctcccattgggttccagacaaagatgacttataaatatatttagtgtttbgccagaaraaaaaaaaaaaaaaa

SEQ ID NO: 5326 - DNA, 1269 bp, Rattus norvegicus
ggaggaggctctgaagagttgaatcactgacctgaggaggctcagcccgtcgtaagtagtctgaaaacagcatgtacacgcccatccctcagagtggctctccattcccagcctcagtccaagacccaggcctacacatatggcgtgtggagaagctgaagccggtgcccatagcacgagagaaccatggcatctttttttctggggattcctacctagtgcttcacaatggcccggaagaggcctcccatctgcacctgtggataggccagcagtcatcgcgcgatgagcagggggcctgcgctgtgctagctgtgcacctcaacaccctgctgggggagcggcctgtgcagcaccgtgaggttcaagggaacgagtccgacctcttcatgagctacttcccacaaggcctcaagtatcgggagggtggcgtggagtcggcgttccacaagacaacctcgggcaccacgccagcagccatcaggaagctctaccaggttaaggggaagaagaacatccgtgcgaccgagagggctctgagctgggacagcttcaacactggggactgcttcatcctggacctgggtcagaacatctttgcctggtgtggtggsmagtccaacatcctggagcgcaacarggcgagagacctggccctgsccatccgggacagcgagcggcaggrgaaggcccmrgtggagatcatcactgacggagaggasccasccgagatgatccaggttctgggccccaagcctgctctgaaggagggcaaccctgaggaggacattacagcggaccakaccaacgcccaggctgcagccctgtataaggtctctgatgccactggacagatgaatctgaccaaggtggctgacwcsagsccgtttgcctctgaactgctaattccagatgaytgytttgttctggacaacgggytatgtggcaaaatckacatstggaaggggagaaaabccaatgagaaggagcgscaggcgvccctmcaagtgsctgatggcytcatctctcgaatgagatattccccaaacactcaggtggagatthtgccccaggvccgagagagtcccatcttcaagcagttcttcaaggaytggaagtgagggtgggtgtccccatcchtgctctcytgcccccaccacytgcctgcttgtttcccctctggctgctgagtcagaaytgaggggccctctggatgctcaataaaggacacgttctgttccmaaaaammaaaaaaaaaaaaaaaaaaaa

SEQ ID NO: 5327 - DNA, 600 bp, Rattus norvegicus
sagccsttccatcrcatwtgatatcagtsagttgtktgakttyrttgacgatctggcagatctcagctgtsttgtttmccgagbtgatacacagacawmccagccgtataacadrgactgkrycmrmvmkragathtrmgwscycctccrkhgwmakkyccaacarrctgsrmagtaattgagttsgaagcgttrggggctksgggtsgmcttggaacaggtgcccacagcgcgcwskagkgraccttttgtatgatagtgagcctgttyccgctgtgttacactcgasccaagattgaatgtctgacgtgaaccgtgaatgatcttttcactctgaagccaccgttgcccctttgmyccttwactttcgtttttttacttaaacatttttatgaaaattcagatagaaagcatttttgccatttaaggttggttccaatccttgaaactgtccgagtctgctttatagcagtgagcgcactaacccttcgtggggggtggggtkgggacaaggttagttatgtcctctgggaaagtcttwgtgaaaaataaagaaatgttctgtarwwrwawwwwhwmmmwraaaaaaaaaaaaaaaaa

SEQ ID NO: 5328 - DNA, 600 bp, Rattus norvegicus
aaaaatgtctttaaagtttttaaaatgcttattacacacttgtatacaccccttgtgaagaacacgtgacttttttaaagaaaattactaagcaaactggaaaagtgaagtattttcatagtgctctgtgctccacttaaygkywcswrgggaccatcagtgtctttttaaaatwacattttatttcacatttcataattcrgaagtaaacctttcataggaaaaatactgagctgtgctaatgtagctgattttagtctccttgtcccacttacactatgcagtatcttgtaacttcagtagcattcttctagaacagtacatctggtgtgcttactgaaatctctggcacagatggcggtgtgtttgcctaacacaccactatctgtcccagaccagtggcattaggccatatagttactctcttctagtgtttgcttaaaatacgtgaagtttttcttgctatttcaataacagatggtgctgctaatacccaacatttcctaaattattttatatcatacaggctttcattggttatatgaatatgtctatccaataaatcagtgaactattgcccttaaaaaaaaaaaaaaaaaa

SEQ ID NO: 5329 - DNA, 600 bp, Rattus norvegicus
wtcttakaaawtaaaagcwtatcagctcmtcttatttaacgtggscatymaaggtgtttctgttatccaargacaggtcagggctgggcagagctaaagggagaagaacctgggaagggagggagggtggttttgttttgttttttaaagcttttcatacttttttggggggtggggatcacacagaagggaggcaaggagggaacaacaatccttggttcagattgagttatacaggaaaagataccttcctggtcggttcccatgccaaaaaggaaaagaaaacccacttgcaattatgcacagactccattatgtgagtcagcggccagccttctggtcagcatccccagtgacggacatgcccggcttgtcaggctgcatcatgtagaacccacttcacaagaaccctttgccccaaagcctcttccttctggtaggctacagaacaatgtccgtcactaacactttgaccatggcaggcttgaggaagttycwcagtktcgttatgctctagtttattactatcatatttacatttttattttattttatttttttttgctgaattgctgattttccttttggcgcatatgaagc

SEQ ID NO: 5330 - DNA, 600 bp, Rattus norvegicus
cgtgggggccgccaagctcaaagagctcagtaggagagccrcaybmrkcygcgtgacccaacagcacaacacggwgttcggctawcctcggggatgttcggttaacctcggggaagcggaagcmtcctttcrccacgcttcaccccatcccgcctcmttatmtgccctagcaggytgcytgctatcacagacgctgagactgagtcctcatcctgatctcggggcttgccctartgcctgtgtggggcccagaaacagggtgctcgaggggcccwgggtcagcachtarmactcattgtctcyttgtttyaaccagcccttgcaccctcytttccaccccttgcccwttgttttyttthtaaaggrcawtggtktcrcttttaawawaarrmwrwrrwmtwgrmwrarwrmwrrarwwwrmawrttcaggagcacagtcctgtagagccgtaaggattgggaaagtcttcccagtcagtggccctcagtggttaatgcacaaggcccccggctggggagggggcgcaagagcctaaagcagctcacaccgcactgactgccacccccagcatttgttgctgggaagaaaaaaaaaaaaaa

SEQ ID NO: 5331 - DNA, 600 bp, Rattus norvegicus
ttttwwtwttttggtcactacttttgggaatggtgtatyttcaaaatgcggtacatttyttaggaaaatcaacattacaaaagtgtytgatttgccttatacaaggaaaaatggtatattagcmaaaggaaaattgacgaaaaagtaaaagaaattaaaaggtaaaagtgaaaawrmawamammmwrmawrrraatgctcgttgagtgactgtgsccttgctcgtgtttgagggaagcagctcccagctcatcgcctctcagctttcctgtgagctggaagaaggctgggcagatgcgtagaaggcagtggtgatcctatttatttttcgctctcccggtaaggagatgacgcagttccagacagtgacccctctctactgctgtgttcccccatgcacgcctgggtggagctgtgcacagagccagtgcttccgatgttgtgggtttggggtcttttggtttggtttttggtttaaattggtaatttttatgcttatcytcaaggctggcttaagtataaatttgttttttaaamcwvwwraaaaahwaaarramwcgttttatawrhwrrwrwwmaaawwaaaaaaaaaaaaaaaaaa

SEQ ID NO: 5332 - DNA, 600 bp, Rattus norvegicus
gagttcaaatggttctatggctccttctctaatgctccgaggttcctccaatactatcattcctgcaatatgaagccccaagacactgtatttacttgtttgagctctcagattagtccaggatagaactgattaggaatcagtgagaaatcagctcagttactgaaagggcctagattgttgcttggcattgattgctctgagagtaaaagtagcaggagggcaccatgagtcacaggtataggtgtatataggttgagcctattgttacctctcagttttgtggcttcgtttatttatctggtagtttcattttgctcaggcttatgaagatgctatctactggacttgagagtacaataaatagacatttctactcaaagctagcagttggattttaacactcacaagcccggtcttaatcagtagcactaaataaacaaattcaacaggtcgtagtatcggacatggtagaaggtgaacgacgtgtcttgcgtattaaacatgtcggttcactgagaataacatagattgtcaatttttttaaaaatgctaaggttcaataaaatgcatgaacaataggaaaaaaaaaaaaaaaaa

SEQ ID NO: 5333 - DNA, 568 bp, Rattus norvegicus
tctttcaaaaaggaacaaaaggttttgttatgtccgtcatttaagaagacatactccttacggagccaagcatctacggttggtgcgaatgtagcctctaaaaaaaaggagggaacactacagaaatttggagacttcttacaacattytccaacaatccttcaatcaaaagcaaaaaagataattgaaacaatgagttccccaaagttatcaactgtagaagtaagtaaagaaaatgtatcccagcctaaaaaagccaaacggaaattgtacagaaatgaaatttcatctcccatcaacatatctggccaagtgattttaatggaacagaaagcaaaagaaactgatcatcagattctcaaacgacggcttcgaacacgaacagccaaataaattgctttggtagactgtttcactgtaaagtttatatccacagtcattgtaaattgtacgttctaaagtttacttatatatattatgatgtattaaatgcctctgtatagattggtgtcatatatatataattttaattcaataaatatatcaatwwtaaaaaaaaaaaaaaaaa

SEQ ID NO: 5334 - DNA, 600 bp, Rattus norvegicus
kgtgtactyrtyywgggtysmwgkkgaaarkgccatgaccaaggacaacaacctgcttgggaagtttgagctcacaggcatacctccagcaccccgkggggttcctcagattgaggytacttttgacattgatgccaatggcatcctcaatgtttctgctgtagataagagcacaggaaaggagaacaagatcaccatcaccaatgacaagggccgcttgagtaaggaggatattgagcgcatggtccaagaagctgagaagtacaaagctgaggatgagaagcagagagataargtttcctctaagaactcgctggagtcttatgctttcaacatgaaagcmactgttgargatgagaaacttcaaggcaagatcaatgatraagacaaacagaagattcttgacargtgcaacgaaatcatcagctggctggataaggaaccagactgcsgagaaggaagaattgagcatcagcagaaagaactkgagraaggtctgcaccctatcataacaaagctgaccagagtgcttgtggcatgccctgaggaaatgcttgtggcttccttgtagaagaagctcctcatcttgtgagcctctta

SEQ ID NO: 5335 - DNA, 624 bp, Rattus norvegicus
ttcggcacgaggcccgcagtgccccaacggttggtcctcactgtggattggctattcctttgtgatgcacaccagcgctggtgctgaaggttctgsccaagcccttgcatctcccgggtcctgtctggaagagtttagaagtgccccattcatcgagtgccatggcagaggaacgtgcaattactacgcgaatgcttacagcttttggctcgccaccatagagagaagcgagatgttcaagaagcccacgccgtccaccttgaaggcaggggagctgcgcacgcatgtcagccgctgccaagtgtgcatgagaagaacatagtgatgcccccctctgccgccgtcacaacatggtgctactccctccttgtcctcctctcccctcctkttgwattgttaacagcaacgaaccctagaattatatcctatgtacctcactgtccactatgaaaaccgtaaagtgccttacagggatttgcgtaactaacacaccccgcttckttggcctctgtttgctgaaggagaaggacagacagctacgagcctcccataatggcacactccaaatggcgctcctgatccaataaaagatgaattgccttttgcaaaaaaaaaaaaaaaaaa

SEQ ID NO: 5336 - DNA, 563 bp, Rattus norvegicus
ggcactgtaccagtacatagcccaagatgtggatgagctgagctttaacgtgaatgaagtaattgagatcctgatggaagattcttctggctggtggaaaggtcggttgcatggccaggaaggtctctttccaggaaactatgtggagaagatctgatcatctatccacacacctgtctgcttgtcttcctgggagccaaaccctgccagtgggagccttgattaccctgtctgcactggccaggcttatgacctccagcccagtgggggccctgtgtataggaggatcaccactgtagcaccccatgcctggtgctgccttcctatgggttgaattgctatctaagtctccattttatcatgtgyccaatagtattttctgcagaacctacctcccagctgccttgtgtgcatgaaatgaatcatatcctgccctgtgagctaagtgctgggcactgcccagggttaggagacttcracaattaggcctttccactttttctcatcactgaggcaataaacatatgtcaggtaaaaamarraarwaaaaaaaaaaaaaaaaa

SEQ ID NO: 5337 - DNA, 419 bp, Rattus norvegicus; identical to SEQ ID NO: 1241

SEQ ID NO: 5338 - DNA, 581 bp, Rattus norvegicus
tgggcagagccctcccatccttcaggctgcacttggtgtgaagtagctgcctctctccttccccttggttgctcccccccacccctgtttggacttagtgcctgcctggcagtcgacggggctggaaagctctcccctcggcttcgggccccctcctctggcggcagtcctatgatggggaaggacaggggtgaggcagaagagaaataagaagaaaccctgctaggggagcccctctcttctgagcctgggctttcccatgaagggcattttggagaagggggtacaagtacctctgaggcagcagctggtctgggggtgcccaggcctgccttcctgggactagatggcacccagcctgtccccccagcctgaatttccccacaagtgggcacccacccccatttggtgctaacagctctcccctggtggtatgagggtggggtggccagaagaggagtctgggttcagggtggtgagcactcccacccccagacctcccactttgtgcctttagtaaacactgtgctttgtaaaaaaaaaaaaaaaaaaaaaaaaaaaaaacacatgcggccgcaagt

SEQ ID NO: 5339 - DNA, 663 bp, Rattus norvegicus
aagattcggcacgaggacgatcctccctcctcatgaggtcccgggtgactgacccacgtgggctttagactcaggatgtacagagtcagccctgagtcttgaacacatacactcccacamtyyggyatcwsvrkcaaccagggcacttgctgatgcttctccccagcgcctgtttgctgtgctgtgggtttccctcttcctgmtactgtgtttcctgcacttcctcactgcctttcccaggatcagacctcgggagatggaccaggacgtggggtgtctgtggccctgtagtcctgagccagcatctgctgagctcggcttgagatgccactttctcaaatgtgctggaaggcctaagcttctggaaataccaccgagtcccctcccccagcacctttttctgcatgattgattagctcataagatggaatagacggggagaattttcaagacttwacaactttttaaaaaaatgtatgtgacttatgacttatctttggcttctctgagaacaaacttggtaaacttccttccttgtgagttcctgtggaatctgcagaaatcgatgtgacataccccctcctgtctggtctgtttgtataattgtatataaatacagcaataaatatattctaccgtcawmwrraaaaaaaaaaaaaaaaa

SEQ ID NO: 5340 - DNA, 665 bp, Rattus norvegicus; identical to SEQ ID NO: 1244
  misc_feature (53)..(53): n is a, c, g, or t

SEQ ID NO: 5341 - DNA, 591 bp, Rattus norvegicus; identical to SEQ ID NO: 1245

SEQ ID NO: 5342 - DNA, 583 bp, Rattus norvegicus
  misc_feature (126)..(126): n is a, c, g, or t
actcgaagacccccttaacccccccgagtgctgtccaccccttacctgctgagggttacaatgaggtggggccaggctataccccctggggagggggcttcggcgcaggagaaatccaggggtggntacggcagcggcttcagagacaatgtgcctatccagggtatcaccctggaggaagtgagtgagatcattggccgagacctgagtggcttccctgcacgtcctggagaagagcctcctgcctgaaccacatgtagtggccccagaagtcccgcctccttgycctyttaacytgggtgctggctccaraagcttggggccaactytagtttytytttgcccagcttytaccttcctgtatcccctttytytcctggckaaggtgtggcccccaggcctggtgctsccttkaaagggactragggtgtggaggacagggcragggtggagcctraggctgggtgccaragctgactgggacgaaratgctgtccaggctgtgcaggstatratgctggcaggctggacaggttgatgggtaataaactgcttgctgcccggwraaaaaaaaaaaaaaaaa

SEQ ID NO: 5343 - DNA, 600 bp, Rattus norvegicus
atgcgctccgactggcctcacatctcaatctggccatgtgtcacctgaaactgcaggccttctcagctgccatcgaaagctgtaacaaggccttggagctggacagcaacaatgagaagggcctgtttcgccggggagaggcacacctggccgtgaatgactttgacctggcacgagctgacttccaaaaggtcctgcagctctatcccagcaacaaagccgccaagacccagctggctgtgtgccagcagcggacccgcaggcagcttgcccgggaaaagaagctctatgccaacatgtttgagaggctggctgaggaggaacataaggccaagacagaagtggctgcaggagaccatcccactgatgctgagatgaagggtgagccgaacaatatgccaggcccaatgatggcgctatggtagaagtggcactagaaggctactataatgaccggctgtttgaccagcgggagctctccgcctacccacccctgcggctgcctccctgctcccttccctactccaccctgttagttttgtaaaaactgaagaattttgagtgaattagacctttatttttcaaaaaaaaaaaaaaaaa

SEQ ID NO: 5344 - DNA, 702 bp, Rattus norvegicus
taaggactcacagaactgatgatgccagtttgtccctctgggctagttwmcctgtgtcatgagaaggacgtcgtgaaacccggtcaatttggtttgcacttttcataacacggrtaatctagatgtatgtcaccattttaaaagacggttttatatatatatatattcarswmtctmkgsamgwskgttttgcatcaagtggattttaatgkwtgttttttatcctgttagctctggagtgttgaacactgacagtgaggagcctttcttaatgttttcagtgtaactaataaggctgtgaagctttmtatcgctttaaatctacatatgctgagctctgcttgtatacacggtataaccarmtgtgccttcctttgcatttagttttatgtacatgaacttgtgtatttctagtattrakaggaaatgtttgarggacgcattggcatcaawcagctctcagtagagtgctattttctcacgtagacaccatcaaagtgtactycyatcactaagaactgccttaggacttmttttgaactgaaatccagtaaatacaatgtccaagtaatgtttttataagaatgaacgaagccatatttmgmcaataaacattctttaaagaamawrwwaaaaaaawwaaaaaaaarwrarmrrmcgcaagcttattccctttagtgagggttaatttagcttggcact

SEQ ID NO: 5345 - DNA, 600 bp, Rattus norvegicus
  misc_feature (581)..(581): n is a, c, g, or t
acacttcccwytgggtgaagctggatccatttcaacactatgagaatgttactgttggacctccaaaaaacatctcggtgaccccagrgaaaggctccctcgtcatacacttctcccctccctttgatgtggtccaggaggcatcttttcagtattttgtccactactgggaaaagacagaaacccaaaaggttaaaggcccttacaagagcaactccattgtgctggatgatttgaagccattcagagtatattgtttacaaaccaaggcccaactgattttgaaaaacagaaatatcggaccgcacgggctcctgagcaatgtatcttgtcacgaaacaacagcggatgcctccaccagcctgcagcaagtcatcctgmtcstktkysgmatcttcatgttgctgctggcactgacgggagcctgcttcatcctgttcctcagataccaaarccgggtgaaatactggtttcaagctccaccagacatcccagaacaaataaaagagtatttaaaggacccagatcagctcatcctggaggccttggacaaggacggttcgccgaaggatgaggcctgngactccgtatcaatcattt

SEQ ID NO: 5346 - DNA, 600 bp, Rattus norvegicus
  misc_feature (571)..(571): n is a, c, g, or t
tgaacgagaagttctggaaggtctccaggccgttagagctatgctatgccccgacgaaggacccaaaatgacgtcacagggacagccagaagatggggaccatggggtgctskttctgaagactctggtgatcggggcggcaccctgggagggggaaccctaggccccccaagccctcctggggctcccagtcctccagagccaggtggagagatcgagcttgtgttccggccccatcccctgcttgtggagaaaggagaatactgccagactaggtatgtgaagactactgggaatgccacagtggatcacctctccaagtacttggccctgcgcattgccctggagaggaggcagcagcaggaaaccgtagagcccggagggcctggcgggggtgcctcggacacagacggcttttatacaaagtatctatattgaactagtctatattgtacagcacgggacccgcgcccactactgccttttctatgggcccccactgcccaccgagccggtgacccggcggtcgaacaaggccccctccccgccctcctcccaacaacaaatttgntatttcttcttgaaaaaaaaaaaaaaaaa

SEQ ID NO: 5347 - DNA, 600 bp, Rattus norvegicus
  misc_feature (502)..(502): n is a, c, g, or t
  misc_feature (567)..(567): n is a, c, g, or t
aggaraavacatacatttgckatggatabaaagctacctttamcctaraavtgasattccactgcaatggttggtcctgtgccgcagggttcaggtcattctcctgagtctcaagcctccccatagagtcagatgtacggtcgtgactgccakactccaaccccctctgtgtctgttactgtagctggcacaagattggcagtgaattttaatacgaataaacgcacagtttacagttctgtctgtgttggagaaatcacttcagagacaggcrtgagcatctgcattttagcccgcttaggttacytctcttggactgtgtcgtawaaacatgtcmmcagactgctcttgctgctagawgtggagtctgttgawacagtttgacacaacttggactatacctttaataagcccaagcaagtgaacggtcctttcaaactcaggctgtgccatactttgcaggaggatgtgtttaggaatgtggggaaatggtccctatcanagcatggcttggctgtgttggctgcctgcttccaatacagtgccttcttggtctgatgtcagcangaatatcatcaacaggctctggctttcaaacta

SEQ ID NO: 5348 - DNA, 600 bp, Rattus norvegicus
cttgttttagaccagtggggagctctcaactgaacacagcactgtcccccctcaccccttcagcctagggagcctgtgtccctgcatatcagtgttgactctcgcctaatggtgaggtgtgaggcccttgaagctggggtcacaggcgtccctgtccctccctctggcactttgagctcattttcaaaatctgtcctcccggagtggtttgtctgtgtcccatcgtatccatgtgaccgaccgtgtttctgcactgaatttctaggccattctttgcccgtctttatttctacgtttcttctaatggggaggaaaaaaaaaagaggaagctattgaaatagaagtattaaataaaaagataacagatccccaawawmamwrarmwwmaactgaaaagtgaaaatctagtcctgcatggtggcccgacactgcagtcccagcagccagaagtatggcaagaggaccagaagctccaggtcagcctgggctgggtcatgtgacctcaggaaaaggaaactgatgaccgccccttggttctagcctcatgttctctccttatgaaaaatgaatctttctagagtttaaaaaaaaaaaaaaaaa

SEQ ID NO: 5349 - DNA, 600 bp, Rattus norvegicus
ttccctggcccggtaggaggtctctcccacccccagccccccaacactcccttcggatacaggtgccaaagaactttgtgaagaaatgaagaaccaatcgtctgggttaagaaagtggctctcagtattgcgacagtacaacattttttacaaggttgtttttctaccaccgtatttttaaagtatttttatgatcttcgtatactcacttcgcttgtattgtaaaaggagggtatatttgcacttatatatacttttacagtktgccaagatattttgatgtaagtttcttttttttttcaataaaacgtgtataatgmstmgtksykctagggaccctttcctctgcagactccctttcatggccacaccctccaggcaacattgcaactctaggctgccccccccaagttttataactgacatgatgtgaggtttctgttttgaataagccaggtcagtcctgatggtgggctttctcagcggagagggcacatctattatttttctctctctagttcactctcactttttctagtcaaacaaaaaccagaaggtgaaaggaacttcaagacaaaacagcaaaaaaaaaaaaaaaaa

SEQ ID NO: 5350 - DNA, 512 bp, Rattus norvegicus
agaattcggcacgaggggctttctaatatgaaactgtctttttaataactgagagaaaaattgcataagaactagayctcttcacattattacattccttctgctgttcatattaaccttgtataacttcatttattattcgactgttttatmgttatgcttggtttatttataaattcatcagccacacaaccaaatagattctatgtatttgtttctataatttggccaaatccttaagttcatatatttgaatcaaatattttatctgtgtggagtaggcagcaattctgactatacgatttaacttgagtcaacgtcgtacacagtcctttaataaccactggatcactacactaaaaatcctgtggacttaaatggtaagctgctagggtatattttctcctgttttcattccttttttttttgtaagtagatcttgacatctttatttatttcatcttgyaatctctataataaagaagaatgcattgcaaaaaaaaaaaaaaaaa

SEQ ID NO: 5351 - DNA, 600 bp, Rattus norvegicus
ttttttttttttttwwwaagaaccatctgcacaatttaggcaaaacttggtacacagaaaaatgactgagttcttggccaggacaaccctctccaaaaagctttcaaagaaacaaaatgggaccctttaacccgccctgccccaccccaagccccacccacaaaaaaagttatcctagtaactgtgtctttcacattttataaatattaacctcttagacctgcaccttcttctttgtccacatackgtcacattacaaaaagagagaaatgtcaattaaatacattgttaatgttacwatattaactctgttctctgcttcagcaagcggcttcttacaccaacttttcacctctctgtgcctgccgccaacgtcgggtggcgcaatcgtcacaaccagcagacgcccacgggacagtggctcggaracgaggaatcctgragctgtaggaaaggcgctcttcccggtctgatgtgttcatccccaagcattcctascaccgatggtagagtckgaacagcaccagctgcaatgcagccttggtttatttttttgagaaaggaggaggagagaatgggaataaactggcagaaagtgta

SEQ ID NO: 5352 - DNA, 600 bp, Rattus norvegicus
ctggcccacctgtccatgatgcctccaccaccsgcrckmskgctggctgaagctgcccacggcaaggcctctgccctctgtcccaacggggccctggacstgccacytgccactttgcagccgyccatggtcccttcctcatcgctcgcacaaccatcaacttcttcctdacattcccacaactcgctggctgggacgcaaccccagcctckgyckmkggtgaccaagtctttagaatagcttcgcctcctcgtcttccgtgcccctgcttgattgaagtgtttccttctggttcttggttcgcccttcccccgcttggaaagccttttttcttgttctttaattttgtgccactgtggctacatgagttaawrwwwawrrarwwcattggtcaatatttgacccattcttatttcaatttctccttttaaatatgtagatgagagaaacctcatgattctaccaaaatttttatcaacagctgtttaaagtctttgtagcgtttaaaaaatatataaatatatatatacataactgttatgtagttcggatagcttagttttaaaagactgatttaaggaacaaaaaaaaaaaaaaaaa

SEQ ID NO: 5353 - DNA, 499 bp, Rattus norvegicus
aagtgcaggctctctgggctcgggcagccctattgtgaatgcagcagtggattcaccggggacagctgtgacagagaaatttcttgtcgaggggaacggataagggattattaccaaaagcagcagggttacgctgcctgtcaaacgactaagaaagtatctcgcttggagtgcagaggcgggtgtgctggggggcagtgctgtggacctctgagaagcaagaggcggaaatactctttcgaatgcacagatggatcttcatttgtggacgaggtcgagaaggtggtgaagtgcggctgcacgagatgtgcctcctaagtgcagctcgagaagcttctgtctttggcgaaggttgtacacttcttgaccatgttggactaattcatgcttcataatggaaatatttgaaatatwttgtaaaatacagaacagacttatttttattatgataataaagacttgtytgcatttggaaaaaaawwaaaaaaaaaaaaaaaaa

SEQ ID NO: 5354 - DNA, 494 bp, Rattus norvegicus; identical to SEQ ID NO: 1258

SEQ ID NO: 5355 - DNA, 942 bp, Rattus norvegicus; identical to SEQ ID NO: 1259

SEQ ID NO: 5356 - DNA, 600 bp, Rattus norvegicus
cagctcagggttgtttggagcctgtttsackwkgcaatmdmydsmwdhrahddtyttttcttaaraacaactccgtgtrryyacvhggastawgttgagaaggaaaatgccaaatgctttgggtttttagcgttttaatacgtaggctctgttatattattaggtgttrwkmktwwmvrmamrwrkkttcwtttttykttttttgtttgchtmaactttgaakaaawawrwgbmtcrgcydagatgttwwgtcktctcctttctgcacttaaatachtgacagcytgtccgatcactgtscctccgagggcghtactagctcatcgtasayytgtgmyrtcatagtgtaaactgcagtgaccggaaawtgmcctgacatgtaaacgttttcagggaatgcagagggtgttaattgatagmcaaaacctttatcccgcgtgctttgcttcactctgtgctatatagctctttggctcgtgaacctaattgtaaactttcaggtatttttgtacaaataagggactgatgttctgtttcttrttattagaaataaacmttaataaagtgwwmhwmawwwmmwvhmaaaaaaaaaaaaaaaaa

SEQ ID NO: 5357 - DNA, 556 bp, Rattus norvegicus
tgaaaagcagaccgcggtgtcggtggaaaacttcattgctgagctcctgcctgacaagtggtttgacatcggctgmttggyrskwgragaccccgtkcatgsyatyygcctrgmmsccwttacccaagccaswmygryryckytggmrywkgkacmgsarscacawagcctgactccccaggactacaatctgaggtggtcaggccttctggtaaccgtgkgtgaagtcctggaaaagagcttgctaaacgtcacccggactgattggcacytggctttcactggcatgtctcgccgccagatgatctacagtgcagccaaggctttggcgggcatgtataagcagcgcctgccacccaggcccctgtgagaccagctgytggkacacggagacttgccgttgtcaccctgggctccaggtcagaggaaactgaatagcttccgtgaatccaacagtttttacatttgtcctataggmtgcagtccttaaaaaaaaaawwwwwwttttaaataaaggtacaatgtcattccarwaaaamaaaaaaaaaaaaaaaaa

SEQ ID NO: 5358 - DNA, 489 bp, Rattus norvegicus
atttctcactggtcaggctagtggagagacggccaagtgtacagttctcaccaccccgtgttgtaagtacccgtggaatggattcgtaaggtaatctttctagataaacctcaagcaacgattcatgttgtaacagcttcatgtggtttagttttaagaaaacttcaccatgaagcacaatgtatatatttatgcagtttttaaagtttataacagtctgtttggccattactacactttttactttataatataaaagcaaagtttttgtcattaaatgaatgtttgttgagctacattcttcattgctttaaacgcaataaagtaataatctcacttttatatgaataatatatttcacatctttattattgcagttttctctagaaggctytgagtagctttytctgctgcagctgtgtataaaatatttaaaatgttgtatggtgtaaataaacttttgtctacrtttaaaaaaaaaaaaaaaaa

SEQ ID NO: 5359 - DNA, 457 bp, Rattus norvegicus; identical to SEQ ID NO: 1263

SEQ ID NO: 5360 - DNA, 600 bp, Rattus norvegicus
cttctamcgttgtgatgtggaaacaagtcmcccagtcctactgggacacmaaccccamaagggctcagggatacycaggcctgtctgtaaaggttgtaaactccaccactggmcccggmgascacctgcggratgmactgtggmacacmggaaacaccccyggccaggtgcgcmccctgtggcatgaccctcgtcacattggctggaaagakttcactgcatacagatggcgtctcagccacaggvcaaagaccggtttkatcagartggtgatgtatgamggaaagaaaatcatggctgactcaggacccatctatgacaaaacctacgctggcggtagactaggcctgttcgtcttctctcaagaaatggtgttcttctcggacatgaaatacgagtgccgagaactcctaatcaccaccccgmtcataaccagmctggcattgcaccttccgaaaccaagggctagagaaaaacccctccaggatcgcttctcctcgccttccctgcctctcttcttgcatagtgtgggcttctagagtctgtgacctgcctcaagaaaatgcagttttcaaaaccgtaggccagactcaagaactt

SEQ ID NO: 5361 - DNA, 416 bp, Rattus norvegicus
gtgatgctccatttctggacccctgcttgcctctggaccttaaagatgagatccagcaaaatgggcaaaccctgtaccttcgggggacaggagacttcgacctgtgtcgagagaccctccagtctttcatggacaaaaccaatgagacacagacttctctcaatggagtctaccagcctccaatccacttccagaacagtgaattctatggcttctctgagttctactattgcaccgaagatgtcttacgaatggggggagactacaatgctgctaaatttactaaagctgccaaggcttactgtgcaacaaagtggtcgatcttgcgggaacgctttgaccgaggactgtacgctctcatgccgacctccatcgactctcagtatccgtgttccaaatccgcctggatgtttgcg

SEQ ID NO: 5362 - DNA, 476 bp, Rattus norvegicus; identical to SEQ ID NO: 1266

SEQ ID NO: 5363 - DNA, 503 bp, Rattus norvegicus; identical to SEQ ID NO: 1267

SEQ ID NO: 5364 - DNA, 302 bp, Rattus norvegicus; identical to SEQ ID NO: 1268

SEQ ID NO: 5365 - DNA, 457 bp, Rattus norvegicus; identical to SEQ ID NO: 1269

SEQ ID NO: 5366 - DNA, 1221 bp, Rattus norvegicus; identical to SEQ ID NO: 1270
  misc_feature (674)..(674): n is a, c, g, or t
  misc_feature (743)..(743): n is a, c, g, or t
  misc_feature (1063)..(1063): n is a, c, g, or t

SEQ ID NO: 5367 - DNA, 600 bp, Rattus norvegicus
ctcatatgacagagactttctggtaaaagttccatggcttgcagaagccaccacaggcttcgcctgctgttgagaagaagtttgccagccccctgttggccatggcccatgtggacctgactggagatggcctgcgggagctggctgtggtatccctgaaaggggtgcacatcctccagcacagcctgatccaggcctctgagswggtcttgacacggcttcgtcatcaagtggagcagaggaaacatcagcagggccttggggacaaggcgggtcccagachtgaggagcccccagcctcytgagcactccctcttctcaggtgtaggcccmtmgtgtctatcattgatggggaaggaagcatctcagaagacaaatgtgccccttggactccccgagaaggaggttgctgagagtccytgacccaccccagtgtgytgtgtgaccctaaccatttgaaaaggggcggaaaaggaacgttctcagcctaccactgcaatcccatcaggtgttggtccctgaagactattcacacatgcmgrgcawmrrarmwrmmmwrrmwrwmatcawwwmmwwrwmwrrmaaaaaaaaaaaaaaaaa

SEQ ID NO: 5368 - DNA, 1400 bp, Rattus norvegicus
gcctttaaagattaggaacctcaggcccaggtcggccactttgggcttgggtacagttagggacgatgcggtagaaggaggtggccaacctttccatataagagttctgtgtgcccagagctaccctattgtgagctccccactgctgatggactttagctgtccttagaagtgaagagtccaacggaggaaaaggaagtgtggtttgatggtctgtggtcccttcatcatggttacctgttgtggttttctctgtatacccccatttacccatcctgcagttcctgtccttgaataggggtgggggtactctgccatatctcttgtaggcartcagcccccaagtcatagtttggagtgatctggtcagtgctaataggcagtttacaaggaattctggcttgttacttyagtgaggacaatcccccaaggccctggcacctgtcctgtctttycatggctctccactgcagagccaatgtctttgggtgggctagatagggtgtacaatttgcctggwwcctccaagctcttaatccactttatcaatagttccatttaaattgacttcaatataagagtgtatccatttgagattgcttgtgttgtggggtaaaggggggaggaggaacatgttaagataattgacatgggcaaggggaagtcttgaagtgtagcagttaaaccatcttgtagccccattcatgatgttgaccacttgctagagagaagaggtgccataaggctagaacctagaggcttggctgtccaccaacaggcaggcttttgcaaggcagaggcagccagctaggtccctgacttcccagccaggtrcagctctaagamctgctcttgcctgctgccttcttgtggtgtccagagcccwcagccaatgcctcctcaaaaccctkgyttccttccttctaatccactggcacatcakcrkcacbwssggattgacttcagatccacagcstacactactagcagtgggtaagaccacttcctttgtccttgtctgttctccagaaaagtgggcatgraggcggtgttaataactataggtctgtggctttatgagccttcaaacttctctctagcttctgaaagggttacttttgggcagtattgcagtctcaccctccgawggctgtagcctgtgcagttgctgtactgggcatgatckbcastgmkkgcaagtcccatgatttctwtggtgttttgagggtggggggagggacatgaatcatcttagcttagcttcctgtctgtgaatgtccatatagtgtactgtgttttaacaaacgatttacactgactgttgctgtacaagtgaatttggaaataaagttattactctgattaaamaaaaaaaaaaaaaaaaaaaaaaaaaaaaaaaa

SEQ ID NO: 5369 - DNA, 594 bp, Rattus norvegicus
gtgtaagaggggctgcggctggtggaaaagatggtgatagggtacgcggaagaggtcagggccaaaactggaaccaaggatttaataactattatgatcaaggatwtggaaattataatagtgcctatggygakgagagctatagtggctatggcggctatgactwtacggggtataactatgggagctatggatatggacmggsayvwrsagactacagcggtcagcagagcacttatggcaaggcatcccgmgggggtggcaatcwccagarcaattrccagccstactaaaggaggmcgstggsagagcaggaggtgtaaagaaaccatctkacaggrcgacaytgaaggttgcttgatcttctgttgacctaagatgattattttgtaaagactttgtagtgtacatgacacaattgtgtcccactgtacatagctgccaattagttcctttgttaatctgtcswwtgttccttccctgtgttatgactcaatgtggatktgtgtttatacaaatttttatttgtgtgasttcatgttcaacctcaaataaatgcttccttwtgtgawwrwwaaawaaaaaaaaaaaaaa

SEQ ID NO: 5370 - DNA, 772 bp, Rattus norvegicus
cacgaggggagagacccacacccagctcatatatttattaccgtcaccctctcagaaccctccctgctggtacctaccctctatttattagccaactcgtccctgctgaatgacttgctccctccaagataaggggcatggaaggacaagaccctcaggaattcagtgccttaaaacagaacgtgagagaaaggaagaagccagccacggttccgtgggagcttccttcggcttgggaagaagcaagacacggacatggccgtactagggataagccacaccccagaggccytgggtctccagggaactggagaagaaargaggagacccagagcytgcyttggtcctctgttccacccagacagcagctccggccctggmtgcattgaagacatgtggaggggacccagtctactgtatcctggaratcaggacgggatatttggctmtggaggacagagctcgcctgtgggctttscctgtcagcytagaagttcacgcttyaccctttrcaaagcaccaccaagbtgtcccctctytgggacacaggcagagtggcccggggctgaacagagggcaggctgcatgaggagtactagyccatkgactktgrccaytgcaagtytgggccatgtgyacarytmtgaaaagcgaaccaattsctggagggcccttgcagcccaccagttgtctyttccgggactgtctaactgccaagccagmttctcttgaataaagcattctagtytggrammaaawraaaaaaaaaaaa

SEQ ID NO: 5371 - DNA, 600 bp, Rattus norvegicus
tcatgctaaaaaatcagctactaacastgaagataaaatgctcaaatcaacbtgaacaacaawtattagaaaagcagttgccagactccatgacaattcaaaaggtaaagggactgctgtcacgtcttctcaaggttcctgtgtcagaacttctgwtgwcstacgaaagttccaagatgccgggcagagaaatcgaactagaaaatgacctgcagccattacagttttattctgtggagaatggagactgcstastggwgcgctggtagcaggccaaccgtgagagttaaggytggaatgtgtacmccagaaacagaacctstgccctcacaaatgatgwtgwtttgwtgggaaaagmccattcggwtgwttattaatagaataataarggctywsmtyactawwaaaaaaaaaaaaaaactcgagaccaggttcacttcggtgtcacagttgactgtgtttatttttactgattctgttacagttttgctaattttaaattttttccccccaaaaaatactaaggtccgaatgtttggcatgctatttcagtttgcattatttatttatgatgattcttgacattgacttttatacatt

SEQ ID NO: 5372 - DNA, 526 bp, Rattus norvegicus; identical to SEQ ID NO: 1276

SEQ ID NO: 5373 - DNA, 653 bp, Rattus norvegicus
actttttatttcattttcccaaaagagacaaaggtggaacttatatacaaatattacctcatttgttgtgtgactgagyamagrattttgratcaagaagaaagagtttaagtgtcaataaacttaaaactactgtcgtgtctaaaaagtcagtgttgtacatagcataaaaatcctttgcagagaatgatcccaatacagaaatagctttgaaatgttaaatacaactcytcaaagttctggttttgttctatcatcttgtacaccattgcttttatttttataaattattttctcattgccattggaatagagatctcagactatgtagatatgctatttaaataatttatcaggaaatactgcctgtagagttagtatttctgttttttatatgttgcacactgaattgaagaaatgttggkttttcttgttttgttttagtttgtttctttggttttgtttttggttttgctttttacttcccaggtttgactatttgccaatgccctgtgttctaggaacgtgcttttttgtacacattttatccattttacattctaaagcagtgtaacttgtatattactgtttcttgtgtacaaggaacaacaataaatcatatggaagtttatatttawaaaaaaaaaaaaaaa

SEQ ID NO: 5374 - DNA, 1071 bp, Rattus norvegicus
tgtaataagaagtttgctcagtcaactaacctgaaatctcacatcttaacacacgctaaagccaaaaacaaccagtgaaaagaagagagaagaccttctcgaccccgggaagcctcttcaggagtgtgattgggaataaatatgcctctcctttgtatattatttctaggaagaattttaaaaatgaatcctacacacttaagggacatgttttgataaagtagtaaaaatttaaaaaaatactttaataagatgacattgctaagatgctctatcttgctctgtaatctcgtttcaaaaacaaggtgtttttgtaaagtgtggtcccaacaggaggacaattcatgaacttcgcatcaaaagacaattctttatacaacagtgctaaaaatgggacttcttttcacattcttataaatacgaagctcamswrttsskyacratkkttttaattttgtattttccaagtgtgcatattgtacacttttttggggatatgcttagtaatgctgtgtgactttctggagggtgacgacttgcttgcggtagattttctttaaaagaatgggcagttacatgcatacttcaaaagtatttttcctgkacaaaaaaaagttatataggttttgtttgctatcttaattttggttgtattctttgatgttaacacattttgtataattgtatcgtatagctgtattgaatcatgtagtatcaaatattagatgtgrywyrakrgtgttaatcaatttaaacccattttagtcactttttttttcccaaaaatactgccagatgctgatgttcagtgtgatcctttgcctgttgagttacagaaagtggtgctcagttgtagaatgtattgtayctttarcacctgatgtgtgcattcatgtaacggaaagggcaacaataaaatagcgatcctaaaraaararwawrrmagaaagacctctgtaagcacagccttattttcctctgttgtccagaatacttacaattcttgagcctcccagaaattggaagctaaataaagcaactcgagtttcctctaaaaaaaaaaaaaaaaaa

SEQ ID NO: 5375 - DNA, 600 bp, Rattus norvegicus
cgctggcactgagctccgtggacggagacccagtggctggcatctgytatgtgggcaaccaaaacctgaactcgctacraggctttgtcttgggcccactggtgctgwacctgtyggtgggcacgctcttscttctggcasgcttcgtgtcactcttccgcatccggagcgtcatcaagcagggtggcactaagacggacaagctagagaagctcatgatccgcattggcatcttcactctgctstacacggtgccagccagcatcgtggtggcctgctacctgtatgaacagcactatcgggagagctgggaggcagccctcacstgcgcgtgtccggggtcggacgctggccagccacgcgccaaacccgagtactgggtgctcatgctcaagtacttcatgtgcctggtggtgggcatcacgtcgggagtctggatctggtccggaaagaccctggagtcttggcggcgcttcaccagccgctgctgctgcagctctcgacggggccataaaagcggtggcgctatggtcgcaggagactatgcggaggccagcgccgcactcactggcaggaccgggccgccgggccccgcggccg

SEQ ID NO: 5376 - DNA, 655 bp, Rattus norvegicus
caagggggattgcgtaagaccaaaaggggattgctccatacgggcagtggcagtacatatagacgtctccagccagatctcctcagcaagggacagaggccactcacctggggtcccagcaggagttcacagcacaagcaggatgaagtcttccattgccatcgttttttgcctcttgatcctgggagttgacagcaaaagacggttccagtttatgaaggaagctgggcaagggaccaaasacrwgkggcgcgcctactcggacatgagaaaggccaactggaaaaactcagacaaatacttccatgctcgggggaactatgatgccgcccgaaggggtcctgggggagcctgggctgctaaagtcatcagtgatgccagagagggtattcagagattaacaggacacggagcagaggactcaagagctgaccagtttgccaacaagtggggccggaktggcaaagaccccaaccactttsgacctgytggtctgcccaggaaatactgaattttctcttcatgttgttcccgggcgcacagccccccaaggaaaggggcaattactgagttgagttatttcctaaaacctggatccctaaacatcccaatgtgctgaataaatgcttgtgaaatgcaaaaaaaaaaaaaaaaa

SEQ ID NO: 5377 - DNA, 600 bp, Rattus norvegicus
cctcgaggccaagaattcggcacgaggtcarcggcaccaaggtggctgagggccacaaggccagcttctgcttggaggacactgagtgtgagggwgacattcagaagagttaygagtgtsccaacttcggagaacaaggcatcaccatgggctgctgggacatgtatcgtcatgacattgactgccagtggatagacatcaccgatgtgccccctggagactacctgtttcaggttgtcattaaccccaactatgaggtgccagaatcagatttctctaacaacatcatgaagtgcaggagccgctatgatggctaccgcatctggatgtacaattgtcacgtaggtggagccttcagtgaggagacagaacagaagttcgaacacttcagtggactcctaaataatcagctctctgtgcagtaaagacgactctgggccaggcatgayggctcatgcctgtaatccccgcactcakgcakgakgattgccrcamgattttcactctggacactagaccaagcttcagtctcraaaraarrwaaaraaaagaaggaaggaaggaagggaggaaggaaggaaggaaaaaaaaaaaaaaaaa

SEQ ID NO: 5378 - DNA, 610 bp, Rattus norvegicus
tcaggtggatgggctgggctcaggatatttgaacgtgtttaatgggtttgttcaggtctatgggacctgactccacccctgagaccatgatggatgtcctcctgtactgatataatcctgtttgccccctgacgcttggctgtgaggcagatagcgttgagtatgagaatgatcagagaccaacaaatgctgagctcagaacagtcgtaaactgaattctgggatatagaaagtcctgctgctatgtcagggcaagaaatctaatcccactgtggccagtattcttgcttcccccactatatgtttttgttgaccagatttcttccaccgcccacccaatacatgagtatgtcctttactgcatagtgagacagtagtaatgggtgtagacctggaaatctggcccactcggagcaatggtgcccactgccacccctcaccttcatgctctccacctgagagtgacagcctttctcctaatggtgccagaacaacttggagactgtggtccttatgaaagcattttttttttttttttaccagccaaggaatccctgggaaaggtatttcctttgagtttcaaagcaataaaagaaaatatggtcttggg

SEQ ID NO: 5379 - DNA, 600 bp, Rattus norvegicus
gagaattcacactgcagagaaaccttacgactgcagcgaatgtggaaaagccttcagtcagctctcttgccttattgtccaccagagaattcataswssagakctcccttatgtatgtaatgagtgtgggaaggccttcacttgtagctcatacctactgattcatcaaagaatccataatgggraaaaaccttattcttgtaacgagtgtgggaaggccttcagacagaggtcaagcctcactgtccaccagcgaacccacaccggagagaagccctatgaatgtgcaaagtgtggtgcagcttttatttctaactcacacctcatgcgacatcacagaactcatcttgtccaatagcaaggaagagggtgaaaccttgctcttggtcataacctactgctgytaatagcaggcacctctgttctttattmttccttggmcaaaatgaggactgtaccttttaaagttattyytctggaaggtaatgtaaacacacatttcaaaggmtaatttaaagaaaataaaacttaaacacctaaaarmmaaaaaaaaaaaaaaaaaaaaaaaaaaatggaagcggccgcaagcttattcccttt

SEQ ID NO: 5380 - DNA, 967 bp, Rattus norvegicus
  misc_feature (765)..(765): n is a, c, g, or t
gcggatggcgaacatgagcagcggggcsrcgwsgcgggactgggcgggggcggccccggggcggggggcckkgacccakggaccccccgcccggcgagactcacaagctggtggtcgtaggcggyggcggcgtgggcaagagcgcgctgaccatccagttcatccagtcctactttgtgtctgactatgaccccaccattgaggattcctacacaaagatctgcacggwggacggcatccctgcacggctggacatcctgkacactgyggggcaagaggaattcggcgccatgcgggagcagtacatcgcgtgctggcaatggcttcttgctggwgtttgccattaacgwcaggcagagtttcattgaagtaagcragctcttcactcagatcctcagggtcaaggmccgcgatgacttccccattgtgctggttgggaacaaggcagatctggagacacagcgccaggtccttcgatcagaggcctcctcctttagtgcttcccaccatatgacttactttgaggcctcagccaaactgcgtctaaatgtcgatgaggcatttgagcagctggtgcggactgtccggaaataccaggagcaagaactccctcstagcccacccagtgcccctaggaagaaggatgggaggtgcccctgtgtcmtgctgtagcctcaagtgaccagcacaagctytygggaccagctgscwcasrcttgctgtgtggcccaaggctytctytgamtgagccthtgtttcaacctntgggttccccaggacacavtacaccctyttacctttactthtggcctcctggggytaccmccatgtgccttmtgtcaawacctcctcctttcccccacaagaccytggtagggtkaggggcatcttgtcactgctgtatataactcccatctgtcagtataataaatatcmctgccarcavmwddaramaaaaaaaaaaaaa

SEQ ID NO: 5381 - DNA, 546 bp, Rattus norvegicus
tgagatccamrmysmtmyccmatccgccctcccccaccctgcatggagcctctgtgcttagtggccgagtcagtcacacgactgccccacaytcytgcacatcggcagcmccacgscccgggaatsccacgtgtgttgaacctcatccstytgtgtcytgggctgagatcaggtctgtggccmtacccatgaaggcttgcgactaactgtggcagcagacatgtcttgtcctcgtcctggacaggcctcccttccccgytggcgcactcggggacgagattcggggtgagcgcttgsccaagttggcactsmsrsywgkrscactscwggccaagcmtsyrtgksmywcccagcacytgytgchtgccccgtccaccctcccmggctttgtgccggggcaggcacctsctgggggttctggtttttacttttttaatgtaagtctgagtctttgtaattattgaattgtgagaacatttttgaacaatttacctgtcaataaagcagaagacggsrgttttaarrwwhmaaaaaaaaaaaawaaaa

SEQ ID NO: 5382 - DNA, 1262 bp, Rattus norvegicus
  misc_feature (5)..(5): n is a, c, g, or t
  misc_feature (7)..(7): n is a, c, g, or t
  misc_feature (11)..(13): n is a, c, g, or t
  misc_feature (17)..(17): n is a, c, g, or t
  misc_feature (27)..(27): n is a, c, g, or t
  misc_feature (1197)..(1197): n is a, c, g, or t
cagtngnacannntggntaccaaagantcgscarsatggcggccagcaggaggctgwtgaaggagcttgaagagatccgcaaatgtggaatgaaaaacttccgtaacatccaggttgatgaagctaatttattgacttggcaagggcttattgttcctgacaaccctccatatgataagggagccttcagaattgagatcaacttcccagcagagtatcccttcaagccacccaagatcacatttaaaacaaagatctassaccctaacatygmcgmgaaggggcakgtctgtctgcccgtaattagtgcggaaaactgraagccggccaccaagactgmccaagtaatccagtccmtcatagcactggtgaacgaccctcagcbtgagcacccactccgggctgacctagctgaagamkrcwctrargmccgtrmmawattctgtaagaatgctgaagagttymcaaagaaatatggggamaagcgacctgtggactaaaatctgcmacgagtgattccagcaagtttragcasasrcccckagcagtgcattcagacaccccgcaaagcargactctgtggaaattgacacgtgccaccaactggcgtccgcttgtggcagttactaactttstmcagttttcttratcaaaagtggtctaggtaacctgtaaagaaggattaaaaaattcagatgttctwrhwmwdmwwrmwwwrwwwwaaaaatcactgctttagtctacttcaaaagaatggcatttcttttcttgcccagatttactcaaagttgcagttagcccaggtttaaagataaaggttgtggtttcctctcccttccccgcttctcccttttcgatttccacttccacagaccaaggccccagctccccacaggggcggcggcagcattggcaactttgtcctgtgccacactgcccgtggataatgaatagctcaagtccccataccagcttattgacatctttaaaaactatagaacagtatcagtgccctgccccacgggacatccgtgcaaagggaagccgttggtttttgtttgtttgtttgtttgttttttttacataaaatcttagcaaagggtttccacagtagtaatagactcaacagacagaccccatggtccacatcagtggtcagactgtgctgggtctatgtggggaaccctgttatatcangtttgtggtgacccttgaaaggaggtctgccattggagaatacagttcacttgtgtgatgaaatt

SEQ ID NO: 5383 - DNA, 745 bp, Rattus norvegicus
cacgaggctgctgctgctgtcgctcccgtggccagtgcgttccggaccgctacataggtgctgggagctgctgcaacggcaactgaagcagacatggagtggytttgccagtcctcagwgggcaccagcactagcagtccagagcccatccaccctcacggagctagcatatgataccagtaaaaataaagagaattccagctttttagatagtatctttwggatggcagctcccaaaracagacgcaccatcgaagttaaccgatgtargagaagaaaccctcacaagcttattaaaattaagamcaatatagacatttgccctgaatgtggtcacctgaagcagaaacacgtcctttgwgsctawtgctatgagaaagtaagccaagmgvcamctaaaatcagacaacagatatgggctcaagawgggggacctttcaaagctccttccatcgagactgtggtactgtacacaggagagaaaccatcagaaaaggatcagggcaagaggattgttgaacgaaacataaagagaccatcgtggttcacccagaattgagctaaaacctttaaaaagataatttaatagtaaggcagtcttcactttaatgttgtscctgctttcaaattatcatcgtattttgaaatggattttgttagctgttatttttaaatgaggtaatttgaagactgtatcatgaataaactaagcacgtttwtgtaarrrmhmwmddrmmaaaaaaaa

SEQ ID NO: 5384 - DNA, 723 bp, Rattus norvegicus
cacgaggaaccagctctccatgcagtgtgtcaaggacgatgagctctatgagraagtccggctgacacttgagggctgtgatgtggaaggtgatatcaatggcttcatccagtccaagagcactggcagagagcccccagctcccgtgccttatcagaactactacgaccgggaggtcaccccactgactggcagccctatcgtccagacctcctgtggtgtgataaagaggttctctgggctgctacatggaagtcccaagaccacaccttctcaagctcctgccgcttccacagagactctggctcccacctctgagcagaaagaattggtctatgcatccatygaagtgcakgcaacccaggggaaccttaactcagcagcccaggactaccgggcgctytatgactacacggcacagaattctgatgagctggacatttctgcgggagacatcctggcagtcatcctggaaggggaggatggctggtggactgtgraacgaaacggacaacgtggctttgtccctggttcgymcttgsakwagctctgaggaaagwccagcggtccccacatacctytgcccggctgtraggtcaaggactgttyccatcaccgccccggcctytmggggtcagaaccatggctgsctgcgctggggatgggatggttgctggctactctcmataaacttytcccaggrrwaaaaaaaaaaaaaaaaaa

SEQ ID NO: 5385 - DNA, 679 bp, Rattus norvegicus
tgtccctgatgatcctggtgctgcccgaattcccttgggcgccaagtaacctgccaggcagccagtccctctgtcaccagcctttgcatctggatagggaaaagggggttggagacatacagtctgctttgtgttgaaacccagatttgtaccytgtgtttacactgtgctgcytgctmtcggggacagtgggaaggaagtgcagccgaggtggcagacccctmtgattcattgcytggtcggctttsasgrrgggtttggagagcaaaaggctgcattcctctgtgggacttggcmtgaggcctttaggcctctccatcgagttctgtttatcttctcatgggtgattatctcggcggcgtcaccaggggcttcctcacagaagtcattcctccgcagagcttgcagtgtytacgcagcgatggtttcagtgttkcatgtggtgaatactgtaytttgtttcagktctgtstcccagataatgtgaaaatggtccaggagaaggcarcttcctakacgcagtgtgtsctttcttattctcgttyttaawatatgmcagttatwtgaragsycatttmyackttgaagtcatatcaatgaaaamtgatgtatbtkcacstacaatttttcctaataaagtyctgtattmgaawrwaaaammmaaaaaaaaaaaaaaaaa

SEQ ID NO: 5386 - DNA, 600 bp, Rattus norvegicus
gagattgarcggccratgcytggaacccacactgtcaccctgcagtgccctgctctgctcgtggttggagacaactctcctgccgtggatgctgtggtggaatgcaattccaaattggacccrrsgrrgaccaccctactcaagatggcagactgtggaggccttcctcagatctctcagcctgccaagcttgcagaggccttcaagtactttgtgcagggcatgggatacatgccttctgccagcatgactcgcctgmkgcrgwsscgcacagcctctggctccagtgtcacatccctggagggcacccgtagccgctcccwtaccakcgaggggccccgaagtcgctcacacacaagtgaggggtcccgtagccgctcccataccagtgaggatgcccgtctgaacatcayccccagctcsgrwrmmacagrraasaawrmcgggcccaagtccatggaggtgtcctgctaagcagtctgcatcagtcatcctggactggtggtctcttccttagcccccaacccttgcctgccaccctacgctaatgcggtattaatctaaagctgcttttgtaagawtgaaaaaaaaaaaaaaaaa

SEQ ID NO: 5387 - DNA, 600 bp, Rattus norvegicus
tttgtctccagagaatttatctttaaccagacagtgttrgacaagcatgtgacctcgtcttgccgccatcatgtgatatgaaaagaagcatgattttttttcctgtaagttacatcatgagcagtggaargttttcttctcgttgtaaatattgtgaacaggacttccagcgcacacaccgaagaatgcggccacacccttcctagacaactaacacgtgtccttggatgaacggtgcccaagtttgttttgctgtcctcttgactggatctgtcacaagccaccttggggtccctcggcactttgccccgatttcagcttttaagacatttggatcctgagtaacagataccattgaattgctgtaaaagtagggtgatgagctcgggtttcagtctttcstaacagcgagcctgttggacaaaactcgcagctggcgttggtacagacaccagccacccgtkttcctcggcgagctmtctgamgcgtggacaccggctsaygtctacagctgtttggggtgctsggcaarggagaactttrmaattgwtagaaaactaarmttgaggaattaaaatcargcaaaaaaaaaaaaaaaaa

SEQ ID NO: 5388 - DNA, 600 bp, Rattus norvegicus
ccaggacaagccactgtctgacatggaaaccaagccagaactgagtcaggcaccaagataccccmagacctccccaggcctgtgcccatatccaccagcgcyttaccattccagggtgcytgaaagccagctagtgaggccytgggaaccgtgctcccttgtgktgtagagcagaggaacggatagcaaggcaggggtagtggtggggggtaaacttggccccaaatgtgaattaaataaccatgtcctccggcgtgytacaatgtattcattcattattcactgacttgcccgatcatccacacaggtgctgaagagtaacccatcccacgttgtattcagaataatgtttttgtacttcaaatacatctggaattctgtcawatattccaargttktttttctgaataatcttcggttacctctggttctacaaatgacactttasgcaaaggtcttggcactttcctcttttcaaggtgtcgttttctttggaattctttctacattcctgttttcccctcctaataagtggttgacaaatattcctatttattgattaaaatgtgtttcaraaamwmrwaaaaaaaaaaaaaaaaa

SEQ ID NO: 5389 - DNA, 600 bp, Rattus norvegicus
gtacgatagtcggctcttcttttggtagggaactcttgagaccctgcttccatccwcsagsywcwwgcmctcwccwagmsasgkkcakmctssagctgtggccttcaggccgtaarsccttatatccagtgtcttcctmgacatggatccytgcacaccttgatccaaagcaacgctcmtaggagcagcccccatgaggtmtgcctgacaccagcatttgrggggccacttttctgtcctgtggagctcctgccctgccaactctccatgctgagcagtggctgaggggamcaggaggggacattgctggctgccttcaggacygtgaggctgyttggkwtgagacatccctgcttcccmwttmycamgtgcsttaatagcagggcaaattgmgtagagtcaggagggcagaccagacmtcagccataagacagtctttacycaaaaagctattggactcttgctywttstagctmtgaastawtaaatgtattaccacgctgrmmaaaaaaaaaaaaaaaaaaaaaagttgtgcggccgcaagcttattccctttagtgagggttaattttagcttggcactggccgtcgttttacaac

SEQ ID NO: 5390 - DNA, 572 bp, Rattus norvegicus; identical to SEQ ID NO: 1294

SEQ ID NO: 5391 - DNA, 600 bp, Rattus norvegicus
taattgataattttaatctaagcattgtagttttatgtactgagatttgctgtgtgaacttgccttcataacctaggtaagaggactttgtcctaatctgytaatcttagacatatctagtcaatttytacccaataattgtgatgtgtttacatttcaaaagaaatgaaattggcatggacaaattttttttacagtaattgtaacttcttttcaaaggaacagatttcagaaagaaagaaaccagaggcacttcaagaaagmtaaaatattttatgcttgttttttgattgacatratataaaaaggattatatttgtgagagaagatactggttcgaaataccctcttgcaatgtatagtttttagggatmttatagtataaacttgtaatctgaacttttactttggaatgtaagtaggaaataatagctatgtcaatgatwtcttgcaaagtgtccccatttataattatttatattgtaaatagctttctgaagtaaaattgaagttaatgtgcataaaatgtatttattatgtgaggaatttttggtttaaaatctagttaccaatatgcattttgaaaaaaaaaaaaaaaaa

SEQ ID NO: 5392 - DNA, 600 bp, Rattus norvegicus
atgcctcactttaaataaatgtctattataaccgttgttggactatttgaatccaattcaaacttttactctcataattactaytatcatttttatgacacaaattttttccagatttcyaagatatttttagttgctgcttaactggagatgacaggagctgctttaatcatctcttcatggctatataactatccagcttactgaaagatgcagcactttatacaagctgaatagtaggctttagattccctttctgggctcctgggaagtcatagcaaggcctgtacaggtgtgagatgagggattaggcaaccagcactgaacagttgggccatcagctttcagagtgactgatggaaggaagggaacatttaccccaggttagttacccaggacccgagacacakcctttcagaacattgctctctacctagatttattttgcatttaggaaaagtctgtattccattatgggcttatgtaacttacctatgtatgtgcaggtgcatgtgctcctatgctaatcagtaatgaataaataagtaataaatctggcatgaggaaaacaacagagaaaaacacaaaaaaaaaaaaaaa

SEQ ID NO: 5393 - DNA, 634 bp, Rattus norvegicus
  misc_feature (180)..(180): n is a, c, g, or t
agagctgatattttacgagtaaaagggcatttcttcttttgtacagtgttttgttaacatgaaaggaaaaaattattccttaggggcgacccaggcaaggccttggtctcagagccctgaaggttthtcagaaatttttatgccattgtcaaggaagccaggggscaactgcygctgctntaaggtgtgctcacggtacaacttgtggcaaatgaaacgtgagaacctgtmctatgggcgttttswacatggtgcctcagaacarttcrgsaaggggttaataataattgggagaggggacagcagtgtcatgcccasccttgaaggtggcatgagcaaaccaagamccaagaaggtggatgaggaagatacacacaggagcagaagaaastcaaggagccaaaagctgtamgaaaaggtgcttggccaataggtaaagttaagaaatcggcaaggccagacagggtggcacagtgggrccacgggcaggggggacgtgatggtgccgttgcatcctgatcctttgtgagttcctgggttctytggtgtgccatctcccaccacgccctgaatagctagtcctttgtacatcataataaacttytgttaaamcmmmmmmaaaaaaaaaaaaaaa

SEQ ID NO: 5394 - DNA, 681 bp, Rattus norvegicus
ggcgaccaccatctcatccaggaagccctggtcttcgacaacaagcacaccaactacaccatggagcatatccgtgtcggatgggagttgctgctcacaactatcgccagaaccatcaatgaggtggagacccagatcctgacaagagatgccaagggcatcacccaggagcagatgaatgagttcagagcctccttcaaccactttgacaggaggaagaatggcctgatggatmatkmggaywysagrgcctgcctcatttccatgggctatgacttgggtgaagctgagtktscccgaattatgactctggttgaccccaacggacaaggcacagtcacctyccagtccttcattgacttcatgactagagagaccgcagacacggacaytgcagaacaggtcatcgcctccttccggattstggcttytgataagccttacatcttggcagaggaacttcgtcgagagctrcytccgratcaggcccagtactgcatcaagagaatgcccccatactcaggcccaggcagtgtccccggggcystggaytacactgccttctcctctgcccthtacggggagagcgacctctgatgytccttctgtaacccctgacchkatcagaamgcaataaaggmtcaagtgtagrktgttammtggaaaaaaaaaaaaaaaaaa

SEQ ID NO: 5395 - DNA, 466 bp, Rattus norvegicus
ccagtgcaggtgatccaagtaaaggaagacatggtgatggtgttgatggatggctctctgaagctagtgaccccggagggggcaccagctcccgggcttcgcacccctgagatccccatgacaraagcggtygaggctgtggcaatggttggagatcgactccaggccttctggaagcacggagttcaggtgtgggctccagactcggaacarccgctgcaggagctgagagatcccacmctcaccttccgtstgctctgctccccgaggcctgtagtggtggaaacacggcmcasggatgaccctaccgcccccagcaacctytacatccaggaatgaaccattgagagggcattgagaaacrgacacctgcagaccctaagggacacactagtggtcacaacatgtccttatctcccaataaacttgactttartcttgtcawmwwraaaaaaaaaaaaaaaaa

SEQ ID NO: 5396 - DNA, 600 bp, Rattus norvegicus
gaggctttggccttaaaacccaggaacttttttattacaatcgtaggmaskarrgccttgtctccctccctyttctctgcctcttacctcgtcctgcctctccccccctcgtgcccctcccccagccctaamcctgccttccttgcccctccargggctgtgagtgcctgggtttyttataccccataaggttgcagcaraggcaggagggacarattttatwaaccaaaaattctgtggggggtgktrgggtggggggcagaggaaggtgaggggtgccgcctatgggccacaaatctctacaagtgcctgttccctacaccaccccagtactagtccagtcccttcacacccactcccagctgctcctaggtytggcccatgggcaggtgggtcaagggacaggaagggggggtccctcaaaaccaaactggaagcccctctctgcctcccagctggggccccaggggtgggctggagggttttggtcaagccttattytgtattgggaatgsagggtggggtgggacatgagggggctgctggagaatgtattcaaaacaataaaactttggacctttraaaaaaaaaaaaawwwaa

SEQ ID NO: 5397 - DNA, 600 bp, Rattus norvegicus
tctggttccaaaaccatcgctmcaagatgaaacgtgcccgggcctgagaaaggtatggaggtgacsccctctaccccctcgccgcsccgtgtggcagtgccggtcttggtcagggaccggcaaaccgtgccacgccgcctcaaagcccaggacctggcagctgccaccttccaggccaggcatccccttttccgcctaccagcgcgccagtccgctgcagcacatgccaataccaaccgcccagtaccagcttcggcccagcaccccccccagtaccccgaccagcacaccccctggtccaggcccagcagtggacttggtgagcgccgcccctccaagactggaggccttaggccctggccccacccccagcggcggcggtggcgaggaggacctcgatccttaccacggttgytattattattattataattattatagagtcggactctcggctcggttgaggaggcaccgggaggttgcctgtgcctcctcgagtggcagattccatcgactctgccccamcgctctctcctttgaacttttggagagggtagaactctaagccgtgtttacagaatgtttgtgcagcttcgcttc

SEQ ID NO: 5398 - DNA, 580 bp, Rattus norvegicus; identical to SEQ ID NO: 1302

SEQ ID NO: 5399 - DNA, 348 bp, Rattus norvegicus; identical to SEQ ID NO: 1303

SEQ ID NO: 5400 - DNA, 600 bp, Rattus norvegicus
ggkagaaggtggacccggtgatcgagcaagcgtccaaagagagtggtctggacattgacgatgttcgtggcaatctgccgcaggatctgagcgtgtggatcgacccgtttgaggtttcctaccaaatcggtgagaagggaccagtgaargtgctgtacgtagatgacagtaatgagaacgggtgtgagctggataaggagatcaagaacagctttaaccctgaggcccaggttttcatgcccataagcgacccagcctcctctgtgtccagctcgccgtcgcctccctttggccattctgctgccgtcagccccaccttcatgccccggtccactyagcctttaacctttaccactgccacttttgctgccaccaagtttggctccaccaaaatgaagaacagtggccgtagcagcaaggtagcacgcacttctcccatcagcctgggcgtgaatgtcaatgtgaacgacctcctgaagcagaaagccatctcttcctcaatgcactctctgtacgggctgggcctgggcagccagcagcagcctcagccgcagccgcagcagccgccatcccagccacccccgcccgaggcctttagcc

SEQ ID NO: 5401 - DNA, 600 bp, Rattus norvegicus
tgtaaacattgtatttagtgtccatagagactctatagtttaaatcacatccatcaccagtttaagtgtaatgagggtacagaaaacttgcagattaaacaagctgttgctttttctggttacaattctattcttatctgtaaaactaaaaatgggaaacctgccatttgaaaaaaatcctctctgggaatcttaagcatcaccctcctcatcgtatttaagcctctgaagtactaccttactgagtgatgcctactccatgcctcactgagtaccttcttgaaaaagatgtgcttcatcccccatgtcgttttctatgcctcctacacccactcaggcactggaaagcaagccctgtctctgtttcccctttgtgtcctcagtacttgcctcatgataaatgctgaagttatttgttgaatatcaaatgcctcgagaggaggatggagattataatgtgaatgactaaggacactaagcaatggtatctgtcttgtactcacaggatagaagaccttggagttgtggtagattgccttcctgttctaaccaataggtaaatgcagtaattttttttccagaaaaaaaaaatagaaaaaa

SEQ ID NO: 5402 - DNA, 557 bp, Rattus norvegicus
atagcaacaaaaaggagtacaacttccctgggttgctgccccttccctgagaatatttttttctgtgcccaatgactaggctggctttatttctaagttaatgccacctgaaagaaracagtgcaagaraaaragatgctggsacgggtagtgttttcagtaattaaaaastaggcacacctytwttagcccggytacacccaatgctccstaatgtwcctcccgaccmaacagcattgtttsaggtgttttcccctccatacatttgttgattttgaggaacaaactgcttsagggtgstgaggtccattctggcttytggtttgcaaggaattggagtgggtaaaaacccaggaacccaggaggctcttstggagtaaggcaakagggctattaactgatttcaagttcagatgawctggyggcgggactytgagtayaattcaatttttgtagtcataaacatattactggtgaragtytggcttcacctgttaaacatgggcgggcgtctttgaataaaggaaattctgaaattcaaaaaaaaaaaaaaaaaa

SEQ ID NO: 5403 - DNA, 587 bp, Rattus norvegicus
tgagcttccaggttgksykmccwttctgatswtggtccatcagccctgttcctggtccctctacccaatcctggactctacaacccgcccccgactccccaaccacgaccaacagcggcctccatccccctcgctcacctaaactggcggagcaaactcaactcgcttccgctgggaataactttccgtacaggtaaaactgwtaaccgaatttccaaaaatgcmccccgacggcgcctgtgctytcagtactgtgggggtgggagggaaattctttgtacatatttgtataaaaatcattgactttccttttggggtttttatttttttaagaaaagaaaaagcaattcagtagatttagagctytgaactttcattttttttgaaggttcactctccgcagttttatytgagaaaaagaatgtatkaagacgyyksgwgattttaaatacaagaaaatttttcaaaaaggcgaagtgtcattgtattataaaagtctgtttatatatgaatgaatatatatggtattytaaatgttactccatcgtgttgtacacaattttgtaaataaatttttaaaaatgctc

SEQ ID NO: 5404 - DNA, 746 bp, Rattus norvegicus
gcgcctggtctgcaagatctctggtgacgtgatgaacgagaacaacccacccatgatgctgcctaatggctatgtctatggctacaattctctgctttctattcgtcaagatgataaagttgtttgcccaagaaccaaagaagtcttccacttctcccaagctgagaaagtgtacatcatgtaggcctgcgttgccatgtgcacgcccttggccagaggctgtggtgggtgggagccatgccctcctgccctgacccttgacccctgaccccagcctgcctcggcatttgtttcttgcgaccaaagatcagtgagcaacgacaaatactcttagaaaaagaggaagtgagatttactaagtctgtgcttgagaacagcgtttggttggtaggattttgtaacataagtcgactgatgcctctgcaggttcttgcacctctcaaaskwawctctctytasaatgtattcacgggaaagccactggactgagtttctgcagaggccttgccaggtggttccgtagtcctagagtgtacatgcttttcattacggaaactgatagttcagctaaagtaagtactgacgggttttccagacatgaaccattgtaattcacacaaaaccatattgtagaggtttgtatctagcgcttatttttgcatgttgatgttgattagctaatgaactgtaaatgtaaagcgtgttaataaaatagctttctatttctcaaaaaaaaaaaaaaaaaa

SEQ ID NO: 5405 - DNA, 933 bp, Rattus norvegicus; identical to SEQ ID NO: 1309

SEQ ID NO: 5406 - DNA, 599 bp, Rattus norvegicus
ggtgggctactaccagtatagatcagagtcactggagaaggactcatggattcaagctggcctttgagataactatgattgggtattgtagagatgtggaaaaggaagggcattscargtaaaggatgcagcatgagccaacaacascagcagcagcaacakcagyagcaacaacagcaacagcagcaacagcagyaacagcaacaacagcaacaacagcagtaccacatccgacagcaacaacagcaacagcagatcctaaggcaacagcagcaacagcagcagcagcagcaacaacagcagcaacagcagcagcaacaacagcagcaacaaccacaacagcagcagccacaccagcagcagcagcaggcagcacctccccaacctcaaccccagtcccagccccagttccagccccacagcccagtaccaacatatttggacgctactgagtcacctggaggaactgcttatacactggatgtggcccagcctttctgcttaattcccagtccccttcttgggcgagctccagtagtggttggggtccttccctcaggctccatttttaatgaatttttagtatttttgttaatgtg

SEQ ID NO: 5407 - DNA, 800 bp, Rattus norvegicus; identical to SEQ ID NO: 1311

SEQ ID NO: 5408 - DNA, 895 bp, Rattus norvegicus; identical to SEQ ID NO: 1312

SEQ ID NO: 5409 - DNA, 379 bp, Rattus norvegicus
gaagcagtctcagatcctgacggtgcagcagcccgcagcctcagccagggagtcccagccgctttcaatggaggagaagcccsgccagccacagcctyagcaccatmrcagccrccaccatyacacacacacacacacacacacacacacacacatagtagttagaaatgtctcttaaactttctgggatccctaatggtccatcatattaactgtcagtattttttggacattgggttaatggacttagttgcctcastacaagcaggactttgggacaratatcttttgtgctgtttgatacttgtctcaatctttctccttaggtcctcacacaattccttacagagcacttattaaaaaaatgtcttacgagttc

SEQ ID NO: 5410 - DNA, 600 bp, Rattus norvegicus
ggctcaagtgcctggacgcctttccaaatctgaaggacttcatggctcgatttgagacccttgagaagatctctgcctacatgaagtccagccgcttcctttcaggccctgtgtatttgaagacagcgctgtggggtaacaagtagagcgcccgtaataccagggccaggaggagatttacctctatgcttgcggtccatggtctggggcccatctgcgtccccgggcatctctgtatcagtcttcccacctccgttcttctctgaaaggtgttagtgactccgctttctacccagcctttytgtaaggggaggttctcaaactcaggtctagttccctaattggttcttgatgtgtcaataaaraaggctgggagccaattgctgggcggaaggtaacagtcatgtaaggtcttccggcagctagggcctgtggcctccgcaacaggsggatagccaaggatgttggcaggggctggctgatacaagtcactaagtttarggcagagggagatggagataataaactggtaagagcacgcctttccaggccgttgttatytgagcccagcaattgtgcctagcargcaaattytaaagt

SEQ ID NO: 5411 - DNA, 678 bp, Rattus norvegicus
ggccttactaccattgtccaaagtttgctgagtttttcactaagcataggcctcctattcctgactcactcccttttatgagatggattggtacacgactgctgtaaaatgagaattcataaattatccctgagcttatttagtgccttacctcaatggagcttaaagcatagcccataaattttatcttatttagccctggagcatcactaagacgaaactrggaaccaaggctcaccagacagagggtgctcatgccaagaggaatgggaaggcttagaattgcttatcaaatatctcagagcatgggaagacaggttttgtgctttgggctactgacctttgaattaacttgcatctcttagaagatcttcttttctgatatgtttattccaccagtatttctaaagttacttatcatttggtagccactgcctttgatattttttaacataatgtcacagtacaccttaaattatggaaaactgcatgattgtttcatgtaataacatctttatcactagtggcagtgccttactggttttaagaaagatgtccttggatttgcagtttaaaaacaatctatgttgctactatcagactggtttggttgtgatttttttcctttgtgaaacaaggacaatcatcattttaaggacaataaaacatttgttgaag

SEQ ID NO: 5412 - DNA, 600 bp, Rattus norvegicus
ccaccatccgcgaggtggcggtgctgaggcacctggagacctttgagcaccccaacgtggtcaggttgtttgacgtgtgcacagtgtcacggacagacagagaaactaaacttacgctagtgtttgagcatgttgatcaagacttgaccacttacttggataaagttccagaacccggtgtgcccacagagaccataaaggatatgatgtttcagcttctccgaggtctggacttyctccattctcacagagtagtgmatcgtgacctgaagccacagaacattctggtgaccagcagtggacaaataaaactggctgacttcggccttgcccgcatctacagttttcagatggcccttacctcggtggtcgtcacgctgtggtaccgagccccggaagtcctgctccagtccagctacsccamccccgtggacctctggagtgttggctgcatctttgcagaactgtttcgcagaaagcctctttttcgtggaagttcagacgtggatcaactagggaaaatcttggacgtcatcggactcccaggagaagaagactggcctagggatgttgctcttcccagacaggcttttcactcca

SEQ ID NO: 5413 - DNA, 475 bp, Rattus norvegicus
ggtaaagacaccatccgcctatgagttgccctttgggactaaaggaagtgaagatcttcttctccgggtgttggccatcaccagctactctatacccgagagcatacagagcmtcgagtgtcgtcrgtgtgttgtggtggggaatgggcaccggttaaagaacagctcactgggaggtgttatcaacaagtacgatgtggtcatcagattaaacaatgctcctgtagccggttatgagggagacgtgggctccaagaccaccatacgtctcttctatcctgagtcggcccacttcgaccctaagatagaaaacaacccagacacgctcttggtcctggtagctttcaaggcgatggacttccactggattgagaccatcttgagcgataagaagcgttgacaaaggggttctacctasaargggcctcaccttgaaaagaggttgcaaaagaccattaaaatatttttttttcct

SEQ ID NO: 5414 - DNA, 873 bp, Rattus norvegicus
gatctttgaatacatgtgtatttgtggatagcattttaattgcctgtaggagttgagacagcaatttttactgtttttatcacccatatgatatcatctttagacagtgccatgtcttcatggagaccataccagctcccaagacaattcaatttgtaaatattatcttccaggttgctgaccttcaaggccattgcccagattttcatcttgggttgctcctgggtgctgggcattttccagattggtcccttggcaagcataatggcatacctgttcaccactatcaacagccttcagggggccttcatcttcctcattcactgtctgctcaaccgccaggtacgagatgaatataggaaactcctcaccaggaagactgatcttagctcccattcccagacttctgggattttactgtcatctatgccttccacttctaagacgggttaacatttttcttgcttttaaatatattatggagcaacatttgaggattgtaagtgcttcaagrytacttsgaatcattatatagcttatggaaatttaaggtatcgttagttggcggcagctttatatttaactcaaaacatggataagtggaaccaaactccaagagcttcatgcaccaaggagaaacataagttacttactcaaatgaactcaaatgtcttctgtgccttgcaactatgaagctccacatgttttgaaaagagcatatccagtttcaatgccmcaagggattagcatttttgtgtcttytatgtcctttcttgtggggttccagaaattytcatttaacmcctatcaagtagtgagcacagaatagctctcaataaagtatttgttgtctgtcwraaaaaaaaaaaaaaa

SEQ ID NO: 5415 - DNA, 600 bp, Rattus norvegicus
ccttacaaagtactccaagtttacttccttacttgtctgatgcctggttgtcaccggtgaatgaaagccttttctggattacstacaatgctttaaaactatattatmamgaggaaaaaagcaggaaaaagawcagaacacaagagaatgtattaaagtattcttattttgtttcatttttgccatgtgtgccttggaagaggagggaaggacwwrcttcawacattcctggtgcgtgtcccatgtctttctttwaaaaaaagaatcttagtgttttataagacaaagtaatgaaaatgttcaaaagagtttcttagacattcagtaatgtactcagacttttgaaacttcatatgacggatrcaataacaatgcccctccaagtgcctgttttaatgaattctgtagttgatgaattgatgtaaatttgtgtttatttttatawgactgaatgmmctctgtataaaagtgaggtgtggtttatagccatgcctatattcaaccagaatacttttgaaatcmatgtcctttttaaaaaaaaamctttsgaggtctctttttttacaataaacatttttgrcttaaaaaaaaaaaaaaaaa

SEQ ID NO: 5416 - DNA, 706 bp, Rattus norvegicus; identical to SEQ ID NO: 1320

SEQ ID NO: 5417 - DNA, 600 bp, Rattus norvegicus
gaaaagaccggctgatttggacctgagttgcccaatcttaagtacaaatagaaaactgagactatgctgggtgtgttggtgcacgcctttaatcccggcactcgggaggcagagacagtctcagatctctctgagttcaaagtcagcctggtatagtaagtgaattccaggacagccagggctacacagaaactctgtcttggaaaaccaaaaaagaaaactgagaatattagagattgwgcattttctcagaaagcargaagaaaacaccactctgatgggaaaagggaggcaaggcccttgagacttttcattgaaattgctgtactcacataattytggaagcaaatgatgactgcaatcaactgtgagaactgytggtttctctgtagtttaattgtctaatgttgatagcgtgccctttgtatgtagtttgagtgtatatgtgtgtgggtgctgatagcgtgccctttgtatgtagtttgagtgtatatgtgtgtgggtgctgataattttgtattttgtggggagtggaaaaggcaagcaatcggaactgttctctaagatgcatttttatgaattttattaaagagttttgtt

SEQ ID NO: 5418 - DNA, 600 bp, Rattus norvegicus
ccctccaggattcccagtgctggwgattataataccagtgaacagaaacaagcttgcaagaagcacgasctctatgtgagtttccgcsatctgggatggcaggactggatcatagcaccagaaggatatgccgcattttattgcgatggagaatgttcttttccacttaacgcccacatgaatgccactaaccatgccatagtccatactctggtacacctgatgtttcctgaccatgttcccaagccctgtkgtgctccaaccaaactaaatgccatctcggtcctgtactttgatgacagctccaatgtaattttgaaaaagkacagaaatatggtagtccggttcatgtggctgccactagctggacgttctagtgataacaatgaaacagatctgtgttatggtttatgaccgcaataaaaagcagggaaatggggaatttcctaaaatcgatctgggtcatttcatctctatgtatgataatcatggtatatacacttcttatttatttaaaatgatatattctctttcggatgccttaccagtaaaatctgttaaagatccccatattatataatagattcctattctagcttt

SEQ ID NO: 5419 - DNA, 595 bp, Rattus norvegicus
cacgaggagcgcttgggcgctcagtggaagctgskggacgatgaaragaaragacccttcgtggaggaggctaagcgtyttcktgcccgccacctycatgactaccccgactacaagtaccgaccccggcgaaaaagcaaaaacccgggcaccgggtcggtycatttyakccagggaggaggtggcccggtwtgtggaggcccmcactgggggccggggtacacaactacccaagggagtaggggctttgggtaccagccccccaactattcgacagcctacatgcytggcagttacacctsttcccawtgcagaccggaggccccctyaccgkgtactgtccctcagagtgatcytaggytccaaggggagstaataccctccttcccccactacccatctccaggctctcccactccatatatataatacttcccttgstggtgcctccatgccagtaacccacctttaactggcacggacaatcagggacaaccccgaagacccagccctttcagttcagaaccctaggaaccagaatgcgcaattttgtataattaaagcatgtttgagtctttaaaaaaaaaaaaaaaaa

SEQ ID NO: 5420 - DNA, 600 bp, Rattus norvegicus
tttttatgttcttgtgagggaaaaagtaagacatgtttaattttatttgctattatgagttgctttcaacaagcaaatgttagatgtgtaagccgtgacttgttactagtgttgtaattttccaagtaaaagtgtccctgaaggccacttcctgatttttcccagcaaatgaggcaagcaaccccaagatcttccacaaacatttagccatctagatgtcctttggtctccattgagagttgaatcaccctgcctgtgcagacaagctagccattagagagggttgrtggggtgtgakgatttcagggtgtcttccaactgaaatytcaatgttcgcagtatatatatattcaracaracaawccaagctgagatcagatgcstaggcatgtactatttacccagaaacccccccccctcaaaaaaagcaaatggatgctggccatattttgcttttctgacctttccttgggaatctacaagaacctcccttccccctccccgagtaagaccatttaagtgtgtgttaaacaactacaaaatactaaataaaaagtttggccaaarksrrvvrdrrrrvdrmaaaaaaaaaaaaaaaaa

SEQ ID NO: 5421 - DNA, 560 bp, Rattus norvegicus
ttaatcatgggcaaagaggctctgcagatcaaacacaatttcagtttcaagtatatataccctctagattcctccacctggattgaatattggcccacagacacaacgtgtccatcctgccaagcgtttgtagctaatttggacgagttcgctgaagacatctttctaaatggctgtgaaaatgcctgaggaagttytgctgcgtggccttcccgggtactcctgttggtggctcctaggagccaggatcgcttggaaacttagcctagaatcggatacattttctttatagtaaagcgtaagttgaagagttactttgtgaaacaaaatagccttgtggagagccgaaggcaggtcccccaaggctattggacatcagcaccaataagctgkaacaagtytgtaacgttagcagccaggggtgtttgttggggccggaagaagagactcactgaaattgtagccccttaggaaaacatggtcttgcttgaaaaaaaaaataccaaggacagaaaatgccataaaagcttgactttgcactcaaaaaaaaaaaaaaaaaa

SEQ ID NO: 5422 - DNA, 446 bp, Rattus norvegicus
ctggggacagagagtcagactctgctatgawttccagagacccacgtgagggcacgccgkttsgtmwtgttctccctcwtaawttatggamtgctcccaacactcccakwacccactggtccctgtgytrtggtttcttggctrytggtgtggtttggggttctaaactgcctgtggggtagtgaatgcccagtkwtgtgtttcagggacaatcattctctaggcgttggttggtgagtgaggcsgtgtggggctwtggggaagcctgttgcttaccttttstctyccaagccccthtytgatgtcatgcggmcasygtgggtscchyaysccsccatyttgtgttgtaggagagggggggaccctgggaagggargggtgctcggcaacaatggataaaggcattaaataaaaccacgtttacattttaaaaaaaaaaaaaaaaa

SEQ ID NO: 5423 - DNA, 483 bp, Rattus norvegicus
ccagtgaccagcacattgtggatgtggtgctgaagatgattcaagagcaacttgcagaggtagctgtgagtgccaagcgagrrrcccwgggkkcaacaagttcagtgagggagggrttggggaagagagaackgcmcswcytaagggaagagggtggyttttcttcccagaggrccagctagctyttacccatgctgttcagcacgggccatchtaccctcagggcagcgggghtgaggcttmtggtggtccttgccccatttttaccctctggacttatttttattgggtctgctgggggagaataccmtgaggtgtcagtccttaggccagccccgctattgcctctctgtctcccatccgagtatttaaacatccatctcccttgttttggcatcggtttcccagtcccttttgcstataccactstggcctttgtgtaaataaaagttcccaagttggttamaaaaaaaaaaaaaaaaa

SEQ ID NO: 5424 - DNA, 582 bp, Rattus norvegicus; identical to SEQ ID NO: 1328

SEQ ID NO: 5425 - DNA, 480 bp, Rattus norvegicus
acctggtgctgggggcassmggwkmrgmmyswskragccccagcytagtaacctcgcctctcttcttgaaccacaccgggctgcccctgctcagtgccccaccaggcgtgggtctggtctcagcagcggctgcagctgtggcagcgaccatctccagcaagtctcctggcctctcctcctcgtcttcatcctcctcctcctcctmcacttkcagtgaagtggcagcgcasacctctggaggcccggggggacccgaggcagggtccaagsccgagtgagagcccaccatgcctcccctcctactcctctgagtcccctgaccttggtcccctgcccaagagagsgtgaggaggctggtgggggatacagtggatcctcggagcaggagtgacgaaggaggaaaagaccaaaaatccaaccaaaaacaaaaacaaacaaacaaacaaacaaaaggaaaccaaccaacaaaaaaaaaaaaaa

SEQ ID NO: 5426 - DNA, 532 bp, Rattus norvegicus
  misc_feature (8)..(8): n is a, c, g, or t
atcagttntacatcaagacatccattacggtgcgcrscacgagrgatcaacttcaaggtcggagagggcttcgaggaggagacggtggacggacgcaagtgcaggagtttacccacttgggagaatgagaacaagattcactgcacgcagacgcttcttgagggggatggccccaaaacttactggacccgagagctggccaacgatgagctaatcctgacatttggcgccgatgatgtggtgtgcacaagaatttatgtccgggagtaaaggtggccagcttgttctgctttcatggcaggatacaagttcccacgaggagcacgtcgtggtcccgcactgccagtgggtctttcctccacacacctctcccccatgaatattakgcaaccccattttccctatgacaatgttgtagtaccctcccctcaggcccttgttgcctcccgcatccctggtttggcatctgcatgattgtaccagtcattaaactgtttggrtgcaaaaaaaaaaaaaaaaaaaaaacattgcg

SEQ ID NO: 5427 - DNA, 600 bp, Rattus norvegicus
ttgggattggggtttattttgaatggacagactctccaaacrctgctgtcagtgtgcatgtcagtgagtccagtgmcgacgaagaggaggaggaagaaggtaggccttggttcacatctagtcctgctaacactcatagacaggaagtgctctrttcaggattgggrtagtgggtgaaaagactctgagaaaggcctgcctgtcacaaaggccctaaacatgaatttctctaaaatgccaagaaagtctgtttggttctgagtgttgttttacttcagtctagtgtgttgggaagctaagtatgtgaagacccttagaggagcggagttgtwtgtatattttgtttwtgagacaggaacttrckkycktgtccaggctggtcttgaactggtgaactcaaaacagccctcttcctcaccctccctagtagctgggactactggtgtatgccaccatgccccagtttgtaaaggtttgaaagagcaagtaagaattcttgccaacaaaagaatttatatttccgataacaacgtttttgtttgaaagacaggatccctctgttaatttgaggacagcctggtctaaaaaaaaaaaaaaaaa

SEQ ID NO: 5428 - DNA, 503 bp, Rattus norvegicus
acagcattgcatcttttaacataactgtactttccatttcctctgcatcattagtcatatgccaatgtataataaatacacattagtcctgtcatccaacgagtctcacaagtgttctcattgcaggcagagatcctgcaagagtcccggatgatgatcccagactgccagcgccggttagaggctgcttacactgatctccggcagatactagagagcgaaaaggacttggaagaagctgaggagtacaaagaagcccgcatagtgctggattctgtgaagttagaggcctgacgtttttctctacggcgtgattttttgcattaaatcctggggtccattctacaattcgtcattttcggccactgctgtgtttaataatatgaaaacgtggttctttttatgcagttgcatatatttttctttgcataacttaatgtgtcaaataaatgagttcatctaataaaattgtttgttttatactttaaaaaaaaaaaaaaaaa

SEQ ID NO: 5429 - DNA, 545 bp, Rattus norvegicus; identical to SEQ ID NO: 1333

SEQ ID NO: 5430 - DNA, 529 bp, Rattus norvegicus
aattcggcacgaggggcatccccctgcttcctggcccttcccggacatcttctctctcaagtaccgacttcgctaccggcgccgaggagcctctcacttccgccaggtgggacctattgaakccasgactttcaccstcaggaacacacaaccccrtgcyaagtattgcatccaggtgtcagcccaggacctcaccgattatgggaawccaagtgactggagcctcmctgggcaagtagagagggcgccccagaasccctgaagagggactgcatccttgatatcagaccgtgatgttgactacttgagggtgsmtgmgtggcctgtcctgagttcgaattctgacttcgcatgtactgtgctgcwccgaagcattggataattcacttgmcctmtccagaccttaatttccaaaactgtagggatcttctttctccttccatcagtgcgggactttgtgaactttaaatgtgatttatttcgaaaacctarttaahtamgadtawttctcaaaaaaaaaaaaaaaaaa

SEQ ID NO: 5431 - DNA, 472 bp, Rattus norvegicus
cccttaattaagagacggtttctgggacatccaacctagacgctaaacactggaactgagagatgtctgtggtgtggtctaggagactgccctcccccaccataccgtggtcttggccctctaacctcaaatgtgtggaggctttgatgggcgtgtgtgcaccgcttactccagtgtcccgcttaggaagatgggattctcttctgctggtttctgtcttacatttttgtaawtggtgcccagtgttcacagaaaggttttggttcgaaatgtatyttgtaggtyytgcaattcgtaatgkttgggaytaygtatttatgcctggatcgggagagtatttattgcttgtgttccagataaaagtacttcagatatgtcttaccctctgtaggaggcacaagtcaacagttgcttatggaaaaaaaaatawtartaaagttacatgttttwcaarwaaaaaaaaaaaaaaaaa

SEQ ID NO: 5432 - DNA, 340 bp, Rattus norvegicus
cggcacgagggctgaaacagtrccgacttgcaaacggattggcctaatgaagaagttcaacctggagagatggaaaatcagctctcataactaagttaatttagtataaaaatagaattgatagtgagggtataaagtgtaaccatcagttaaacctctcctgtcattcctagcttccttgcttcagaattgaaatggaagtgggggtgtccctactctgtagaatctgggactgggcaaatgtttgtgtggcctccttaaactagctgttatgttatgattttattctttgtgagttaattagaataaagtcattttcttccaaaaaaaaaaaaaaaaa

SEQ ID NO: 5433 - DNA, 406 bp, Rattus norvegicus; identical to SEQ ID NO: 1337

SEQ ID NO: 5434 - DNA, 429 bp, Rattus norvegicus
cagatccttggagcgtgagatcgaagagaatttcttagcaacatcttcagaatcagaagtcagtctatcaaagccgcatcgagcctactggatagagcagcagaacaggctgcccctgcctctgatggatatcatggagacggaagttctggacatcctcaagaaagccctcagtagtccacgattggcaggagccacttcatgactaaagagctgcagggatacatcgaagggatgaagaagcgccggaacaagaggctgtactgtttgtctcagtgaacctccagctcaagtggccgacgagacgtcctccccatgtcctttccgtccctcgaacccaagctcgaacccaagctcgaacccatctgcatgaaatttgaatcatagagaaattaaagagtctatgcatggtaaaaaaaaaaaaaaaaa

SEQ ID NO: 5435 - DNA, 487 bp, Rattus norvegicus; identical to SEQ ID NO: 1339

SEQ ID NO: 5436 - DNA, 465 bp, Rattus norvegicus
gccccagacaaagccttccaggagagactggggtcccrscwygwggtcaccaactgctcsgcggaacacagccacccagctctgtcctgcaagatggctgctgagytcgacmccttcttgsccagtgggcttaggtggttctsccatgtggacgatgacaactatgtgaacccaagggcgctgctgcagcttctgagagccttcccgctggcccgcgacgtctatgtgggaaggcccagcctgaaccggcccatycatgcctcagagccacagccccacaaccgcacgaggctggtacagttctggtttgccactgggggtgctggcttctgcatcaatcgcaaactggctttgaagatggctccgtgggccagtggctcccgtttcatggacacatctgctctcatccggctgcctgatgactgcaccatgggctatatcattgagtgcaagctgggcggccgc

SEQ ID NO: 5437 - DNA, 445 bp, Rattus norvegicus
tctgcacatccagtgaccaaaacctcagaattcatcaggtaagaaatccgaggggcttctgscagctcttacccatgccgcacctgtgtgacctcactgtagccttcctcagaacacacggtgtgaacccttacatgtcacagtcgccacacacagggcccacgggcgctgcctgaagtctctccgctcagggccagcgtcgtcgcctgttctaaaccgcactgctttgctcttcctgaagcacagcgccgtacttacggtcctttcccattctcgttcttcagtgctcacgcatcaagctagtctgctgcggattgcgttgcgtctcggcgtgatttcacccgtccccattcctccccttaacacaacgtgttccacggcactactatgcaaatttggttttgtggttaataaattatcacttattgaaaaaaaaaaaaaaaaa

SEQ ID NO: 5438 - DNA, 579 bp, Rattus norvegicus
tgggccacggaattaacccgagcaggcatggagcctctgctctcacctcatcagcagtgaccagtgtggccaaagtggtcagggtggcctctggctctgccgtagttttgcccctggccaggattgctacagttgtgattggaggagttgtggccatggcggctgtgcccatggtgctcagtgccatgggcttcactgcggcgggaatcgcctcgtcctccatagcagccaagatgatgtccgcggcggccattgccaatgggggtggagttgcctcgggcagccttgtggctactctgcagtcactgggagcaactggactctccggattgaccaagttcatcctgggctccattgggtctgccattgcggctgtcattgcgaggttmtactagctccctgcccctcgccctgcagagaagagaaccatgccaggggagaaggcacccagccatcctgacccagcgaggagccaactatcccaaatatacctggggtgaaatataccaaattctgcatctccagaggaaaataagaaataaagatgaattgttgcaactctaaaaaaaaaaaaaaaaa

SEQ ID NO: 5439 - DNA, 600 bp, Rattus norvegicus
tgagctgagccctgagaccagcccttacgtcaaggagttcagagatggctgtcagacccagcaaggccggacggtgttagaggtgcgcacgcctgtgctggagcagctgcccgtgctggatgcttccttctcagacctgggggcccctacaagacggggaggggtgcttctggggcctgtctgcttcatgggctaggcctgtctctgaccctgtcgaccaaaaccaggtccacctggagtcacmcagtgtggattccatsccacctctcctaaggatccctcwttgtctaggggsccttgggtcagggcacctcaagcctcaagtcaggggcagcaccyaggtgtggggtgagcrgggcggggggtgccaggacagcccaggggaagggtggtacctgggcctccagctctcccacttatgacccwttagagagctgagayctttatttaaaacacttccctgtcacccsaaatacgtgggagagaaaggamamwrwrwawwwwrwawttaaaaaaataattatattamttawwwaaararwrraaraamaaagtaacaaagaagataaaaagagaaattgccaaaaaaaaaaaaaaaaa

SEQ ID NO: 5440 - DNA, 600 bp, Rattus norvegicus
gcctgcaagtttsccgagctaaaggagaagattgaccgtcgctctggcwagaagctggaggacaatcccaagtccctgaagtctggggatsccsccattgttgagatggtcccaggaaaacccatgtgtgtggagagcttytcacagtacccmcccctcgsccgcttcvccgtgcgsgacatgcggcagactgtgsccgtgggcgtcatcaaraamrwrraraarargmrcggsggcsccggcaaggtcaccaagtccgcacagaaggcgcagaaagcgggcaagtgaagcgcgggcgcccgcggsgtggccctccccaamggsgcmgckccgcscccccarcyssrccccmgvcahtgkccccktcccytmmccsrccccaggsgcggcccmkscgmmscgccccyccgccaggbgsatgtytkcacytccgvttgtaagaggcthtacgtcagsgaytggatgctcsccatcaaagtccagtggaaattyttcaagaggaaaagcssccscaccccaggctyccgcgccagtgctgaccacgctcagtgcccgttttcccaataaabtgrgcgmccccmraaaaaaaaaaaaaaaaaa

SEQ ID NO: 5441 - DNA, 591 bp, Rattus norvegicus
actagatcagttcctggtatacagaaggcactcagtagctgcttgttagaagctggsgagatggcttggtcagtgaggggcattcaaaagtgcttsccttgcaagtaagcacaagsccgtgagttcaattccmagaayccacgtwrgctctgtgtrgtaggacatgcttgytktcccagtgctggggaaatggagacaggcagccttgtggacctcactgkcaagaagcctagtccattcagtggtgctcaggccaaaaagcaaaayaaaatggtggagcagtgcttcaggaagaatacccagagttgtcctstgacctctgtacaaacatgtgcatacacacctscacatacatatgcattcacacaggaagsccatttgtcacatatgtaggactgccaattttaccctttccttcctgtgtaacctcaggaaaatgtcttgacctctvtgggctcatctcagccatggggatggtcascctttmtacctcatagagctgatgatgggthccatttaaactgcttaggagagacacagatgagtgtttaataaagttyatgtttwttgctwaaaaaaaaaaaaaaaaaa

SEQ ID NO: 5442 - DNA, 511 bp, Rattus norvegicus
  misc_feature (30)..(30): n is a, c, g, or t
cggcacgaggcctgaggctccagctcactntaccccatctccttgccgggtcagccctgacaaaggtcagctagccccttgaggacatcagctttgscctcagggtcctaatgscagcagaaccactgacagagctagaggagtccattgagaccgtggtcaccaccttcttcacctttgcaaggcaggagggccggaaggatagcctcagcgtcaacgagttcaaagagctggttacccagcagttgccccatctgctcaaggatgtgggctctcttgatgagaagatgaagagcttggatgtgaatcaggactcggagctcaagttcaatgagtactggagattgattggggagctggccaaggaaatcaggaagaagaaagacctgaagatcaggaagaagtaaagccgcctggctgagatggggtgggcagggcagagctgatcagggccgagcagaaccgcactcttcccaaataaagcttcctccttgaaaaaaaaaaaaaaaaa

SEQ ID NO: 5443 - DNA, 628 bp, Rattus norvegicus
tgtggaagcagcagtccgcggcgtgcggcaggcccaggcagaagacgcgctccgtgtggacgtggaccagctggagaaggtgcttccgcagctgctcctggacttctagggatctcagccgtggctgaggccacccccagaggagcccctggtccacagaagcaggccttgtgtttccagcggcctctgataagaggcagggaaggacctgaaggatttggagttgattcaaacaagatctctgggagtctccagcytgtgcagaaggggcaggactgcagtgcactgcgggccttggagtgtccagtggggacaytggtgtgggaaggggcagcacytggggagtccctgcctmtcctccytgggacaatagtgtgcatgccacccggkgtchtacaggcaggtgmtgggaaagkcytgkccagcaggtagcctgtgtgtttgacaaacagcagytggcagcgbtgcctcctgcccacattcmtrccaccsgacatcaaagytggcgtgtgacctttccasccatgygatattccccttggaagatgcttccccaggctataaatttgttstcacaaagcaacatcaataawtcaaaactgtctctcccaaaaaaaaaaaaaaaaaa

SEQ ID NO: 5444 - DNA, 600 bp, Rattus norvegicus
aacacaggccgcaaggtgcagggctgggtctcccttgttttgcaagcaaagcctcaggtagatcaccttgacagcttggccctgacagtggaattgttcccttgctccatggaggacaaattagtggatcgttcctggaatcgtctgttgcgcctgaaggctggtcaccgcctcagtgtggatctgagggcctatctgcatggagcccaggatgcatacagagactgggagctgtctcatsccaacaccaccagctttggactcttccttgtgaaacctgacccccctcagggatgagttcttacccacgtgacattgcacatgggtgctstagccacccttcttgtgacccctggacgctaagaccccaagctgctatatttcatggggcctaggcagtccttcctccaggactttcctcttgtctttaactggactcagtatttattgtgagcatagctcagacaagactttatataattcactggacagcattagtaactgctgggcagctgctagaaatcaaaggttcccaaatcaaactttatatttatattaataagtaaaaaataaatgtatttgtaaataaaaaaaaaaaaa

SEQ ID NO: 5445 - DNA, 443 bp, Rattus norvegicus
cggcacgagggaagaaaggagccctgcgtttcccccaagctgtgtagcaggcactgcggtgatggtgatcggttgcaagtgaaagaagcaagacaaactcctgcatacaaaggacaatgacaaccagaaaacggcagccccatcctgccctggccttgaaagggattggatcctaggaggtggcagcatttcagatctattgtcctctgtcgccctctgctgttcttctggagaagtttccccttacaacaatgagaaatcatgtactagctgcatccatttctatgctctccctgctggccataatgggagatacagacagcaaaacagacagctcgttcctgatggactctcaacgctgcatgaggcaccattatgtcgattctatcagtcacccattgtacaaatgtagctcaaagatggtgctcctgsccgcaagctta

SEQ ID NO: 5446 - DNA, 600 bp, Rattus norvegicus
cggaaagttccccagaatcagtgagatgcttgggttcctaggaacctgtccagcaccctctggtttgcaaaccttgtagaagataccatgaggtgttgtgtgtgratctttgagcaagagctccggaagccacctcagctccagcagaggctggttcagtcaacccctgtcagttgtatagcatctgccacctttgtccttccttytgctgagcacccacagcaggacccgggtcacattattggtaggcctgacgcatgtgctcagaaaagaacttcactagccagggagaacaggcatggagsccttctgaagtcattggggcaagtccaatcacacagcttcaatggccttggctctgtmtatgccagacagggcccatcttggtttcttaaaatagaaattagyattgccattttgaaaaggtcaaaaagggaaagaaattaattcagccccatcgatttgttaaaaaaaaaaaarmmwrwtaatatgctgtgaatttatctgtaamwwwrmmwwmwmwawrtgtgcacatttgtacttttaaagtcatgaactacatgtatccatttagattgtaataattagcaagaaataggg

SEQ ID NO: 5447 - DNA, 535 bp, Rattus norvegicus
  misc_feature (29)..(29): n is a, c, g, or t
ggcggcggcaggtgtccagccccacagcntagacctcagccacaactcgctgcgcgccaccgtaaaccctagcgctccgagatgcatgtggtccagcgccctgaactccctcaatctgtcgttcgctgggctggaacaggtgcctaaaggactgccagccaagctcagagtgctcgatctcagytgcaacagactgaacagggcgccgcagcctgacgagctgcccgaggtggataacctgacactggacgggaatcccttcctggtccctggaactgccctcccccacgagggctcaatgaactccggcgtggtcccagcctgtgcacgttcgaccctgtcggtgggggtgtcgggaaccctggtgctgctccaaggggcccggggctttgcctaagatccaagacagaataatgaatggactcaaactgccttggcttcaggggagtcccgtcaggacgttgaggacttttcgaccaattcaaccctttgccccacctttattaaaatcttwaccaaaaaaaaaaaaaaaaaa

SEQ ID NO: 5448 - DNA, 502 bp, Rattus norvegicus; identical to SEQ ID NO: 1352

SEQ ID NO: 5449 - DNA, 575 bp, Rattus norvegicus
ctgagtatcccactaccaccattgtgaacatgcctttcctctctggagctacactttgtgggtgcttcctaaccctgccttgtgtgtgtctttgctgtgagcagaccgtgtcatctcaktgtgtccctgctgcagtggcttctctgctcacaccccctgtggttttcacacagtctacctgtgccccactgagggagactgataatgggctcatggccctaggaggcccagaacttcctgctgcctcctccagcctccttctgcccctgcagaactgggaatcctccaccatggccagcaggcccctcaccaggctgcagctccaggaggcactgctgaacctcatccagaatgacgacaacttcttaagcataatctacgaagcctatctcttcagcgtgacacaagccgccatgagaaaagccacgtgaccagctacctgagagcaaagactgagaactagttttccggggtcttcctgtgaactggtgtgaccaaacacatttatgcctttttaacaaagtatagtgatgcagagtaaaatgttttgwactawmmaaaaaaaaaaaaaaaaa

SEQ ID NO: 5450 - DNA, 600 bp, Rattus norvegicus
attcggcacgagggtgaaggagataacctacatcaacagagacaccaaaatcatcctggagacaaagagcaagaccatttacaagctgaacggggtgtccgatagggacctgaagaaatcagtgctgtggctcaaagacagcctgcagtgcacctgtgaggagatgaacgacatcaacgctccctatctggtcatgggacagaaacagggtggagagctggtgatcacctccgtgaaacggtggcagaagggccagagagagttcaagcgcatctcccgcagcatccgcaagctgcaatgctagtttcctagtggagtggcttctcgccgaccaggccctgggctccgtggaccacttccactctgcgacctcatttccggtttcccaagtactgtcgggagagctasagtctcagcttggagcagcttgccctgccttttgcatgtgtgtatcctaacgtgtcctgagttataaggccctaggaggccccgggaacagatagctattttcacataaagcgaaaagtccattctgatgttgtagaaatattcacaactaataaaatcatgactgttttttwtgaaaaaaaaaaaaaaaaa

SEQ ID NO: 5451 - DNA, 567 bp, Rattus norvegicus
aattcggcacgaggtcgactacgagctcccggatkcgrmacgwsgatcaccattggccaggagcgcttccgctgctccgagatgctcttcaagccctctttggtgggcagcacccagcctggcctccctgagctcaccgcgacytgcctcgaccgctgccagggcactggcttcaaggaggagatggctgctaacgtgctgctgtgtggtggctgcaccatgctggatggcttcccygagcgtttccagagggagctgagtctcctgtgcccaggggacagccytacagtggcagctgctccggagaggaagacgtcagtgtggaccggcggctccatcctggcctcgttgcaggccttccagcagctttggktcagcaaagaagagtttgaggagcggggctgtgcagccatctacagcaagtgctaaggggcgggccccacaggcaagagctggagagcagtggccctccctggggtcactctatacctttacagaatttcgcataaaagtttaacctgtwamrrwaawaaaammmrraaagattggtaaaaaaaaaaaaaaaaa

SEQ ID NO: 5452 - DNA, 600 bp, Rattus norvegicus
gccttggctgtttcttggagcatcactaatggcccagtcccaggcacaaggggcagagagacaggcagtcgccccaaataagctctggggaagtccattccagtcgccacsrgsaracmgaacagttctgtcttgggagccggtttcaaaaactccgagggacttttcttctgytaatggttcaggaggcgacacacagaggagctcytgsccttccggatcacaytgaacaggccagatcttcytgaggacagccacccaggtctgcagccccacaaggccytgccctgcacgggtgcccgctcytgccctgctgcaggtgactgtcttgagcctcgactgccaytgagaagcattctcttgcatytgggtttgtttacagcaattcgtggacttgggggtattttgatcaggggtggttttggtctgggagggtttgtttgttgggtttttttaaatgmcaatgaagagacactttgacatttcytammwwwwrarramwwrawccttctccaggaagaaggtgctttctgcttactgacttaggcaatacaccaagggcaagattttaaaaaaaaaammmaaaaaaaaaaaaaaaaa

SEQ ID NO: 5453 - DNA, 593 bp, Rattus norvegicus
aggggtcaagacagctcyggmacagarggttagtrcagccaagggagtattgcggatgtggggggtgcctggaaggatgggkttgggggggaatcaatctgcctatcacctytgagtcttaccgaacaaacattccaagttgggacttccagcaccagagacyaagatggctgtggagaygtaggttgccagcattgttytctctgcacttgaggcttctccgggagaaaatycttttaagtatactatktygttctgttgtgctgattgtctcagctgctgttgttgctgttcttatttaytgtgatttgtttgcccgtactgaagaaactcaacgrgagmtgytgcccgaccgcgcctcctccctaccagactctacctcagcaagccttkcgaaccactgagggctgtcggtgggtgggggtggggggactccccactgtgttaatatttatttattgttaacaaagggagctgggttcctttatcagtggtgtacgaaatccctgtttttctgtttgagcatgttatattcttgtaaaaaaaawraaaawaaaactcaaaaawtawwrwmmmaaaaaaaaaaaaaaaaa

SEQ ID NO: 5454 - DNA, 600 bp, Rattus norvegicus
aatgtgattgcagatggcytgaaattggacaaaaacaaatctagacatgcatgtttcaggggttagtagtgtatttcatgtttcatacagataatccacatgaaaatgatgagacattttctctttgaactatatggtattccctattcagttacattacgaatctaaaaaacatgtgataagcatgaccggagaggtttaatttttataaacaaaaaatagttataaaaatgcaaagctgctgctgcatgcaaccttattgcaatcagtatatcattcctgtggcaatttctgtcacattatattgtgaatacaatttttctatagaaattaaatgatttaaaaactcatatatgaaatgtttaatgctttcagcctgctttatggctggttttgttatttgattgctaatttggggacctaattccagcagtctgtatagataactaaagcccagttaagtattttttaatttcaggttactatgccatgcttgggatgtttgaaaraaaraaaaaaarwacatgtaatatgtttcacatttctgcaccttcatcttctaagtaaatctgtgggtgacttgaaaaacaaaaaaaaaaa

SEQ ID NO: 5455 - DNA, 490 bp, Rattus norvegicus
gcacgaggcctagcagtgtgtggacagaatcccgtggtcactactgtatgtaatattcacataaagactgcagtgcaggcggcctcttaaccttccaagactgaagactacacggtgacaagcctcactcctgctgctcctggtgtctgcaatagcacaggacccccgagtgacagtgttgacaaggttaaagaagctgcatgttaagtgccattaytactgtacacggaccacmgcstctgtmtccwccgttccccgtgtgacatcagcatagtgttcttgagcttmtgggttcagaagaaaatgtagtgttaatcaggtgtscaggaccttgtttcygcctcmtgtttgytggctctgactgtggctcmgactgtggagcctcyttkttggcaagctgcaggtttgttatgcaaaggttcataagtgaaactgaagaaaaggttctttttcaataaatggtttattttaggaaaaaaaaaaaaaaaaa

SEQ ID NO: 5456 - DNA, 600 bp, Rattus norvegicus
tgtatggtcggaatgagctgatcgcacgctacatcaagctcagaacagggaagacacgtacaaggaagcaggtctccagccacatccaggtgcttgcccgtcgaaaagcccgggagatccaggccaagctcaaggaccaggcagctaagaacaaggccctgcagagcatggctgccatgtcgtccgcccagatcgtctcggccacaaccttccacagtaaaatggctcttgcccggggccctggctacccagcaatctcagggttttggcaaggagctttgccaggccaacccggaccctcccatgatgtgaaacctttctctcaaaacacctacgctgtccagcctccactgcctctgtcaggctttgagtctcctgtaggacccaccccatcaccctctgcaccgccagctcctccatggcaaggccgcagcatagccagctccaagctctggatgttggagttctccgctttcctggagcgccagcaagatcctgacacatatagcaaacacctgttcgtgcacatcagccagtcaaacccgagctacagtgacccctacctcgaaaccgtggacatccgccagatctatgacaagt

SEQ ID NO: 5457 - DNA, 600 bp, Rattus norvegicus
  misc_feature (592)..(592): n is a, c, g, or t
gaggcgctgcgcacaamctgggaagaaccctaagggtatctatccctcctgcctccatccctgttcatcccgagcttggtttagagaccccggaaatagagaacccagaatgggggactcaaactccccagcccagagatactgacagggggaggccacagtctccctaccgagtgacactttccggattcattcgcatggtctttgtaacccattcgtaggtctcaaaactgttataaaattctgcaagtttttcctgagaaaaggacgaaaacagacgagtctcctcaccccaccctaccctactttagactccagtagtcataatgctggacctagcttatcagggctagaagaagagcccccatctcagatatgcagggtccagggaaaagatatgggccttctcttgtctgtcacggatgctcctccctcggggtgagctagaacttctaggcctagactccctgctgttgactattcaagaatctaacactttgtcttcatatttcccacttgccctggggaaaaaamccrwrcmraacaaaaatcaactaaacaagacaaaaaaaaaaaaaaggatgccctcgtngcgaattc

SEQ ID NO: 5458 - DNA, 600 bp, Rattus norvegicus
ggttcacttagctcgggattttgggtatatttgtgaaacagagttccctgctaaagccgtatctgagtatttgaacagacagcacacggaccccagtgatctgcactccagaaagaatatgctgctggccaccaagcaactttgtaaagaatttacggatctgctggctcaggaccggacaccgatcggaaacagccggcccagccccatcctggagccgggcatccaaagctgtctcacgcacttcagtctcatmacgcacggcttcggtgccccggccatttgcgctgcgctcaccgccytgcagaactatctcaccgaggctctcaaaggcatggacaagatgttcttgaacaacaccactaacaggcacacgtctggggaaggcccaggtagtaaaactggcgacaaggaggagaaacacaggaaatgaaaaaaaawwaaararaaggaaaatgttttaaatacaaaaggaaaacagaaaaaaataaatttagctttaacatattggattggctttggaagaattatattaggtagamtacacatacaatcaaaattttaaaagaaagctaawtaacttaaaaaaaaaaaaaaaaa

SEQ ID NO: 5459 - DNA, 600 bp, Rattus norvegicus
ttctggtgtgctacgaagatgaaggggtttatgtgaaacacgtacggaagaatcaccaaggacgtggttctgcagtggggagagatgccaacatctgtagcawrmatycggycgarkcagacaatgggctggggagagaaggcaatagagatacgctctgtggaaactggtcatttggacggtgtgtttatgcacaaaagggctcagagactaaagttcctgtgtgaacgtaatgacaaggtgttctttgcttccgtccgctctggcggcagcagccaggtmtacttcatgaccttaggcaggacttcccttctragctggtaraggcagtgkgagccgggatcactgacctctggagtcggcaagaccccaagaacttggaattccttgcaactggagctcagarctgtgccggtgcagccatgacagctgtctatgcasgcctcttgtggcgtggcgtgtcgggtcgggtcctctcccctcmctcctacactttctgccagtttattcccattctctcctcctcctttctcaaaaaaataaaccaaggctgcattgcagctggtgctgttcagactctwwaaaaaaarrraaaaaaaa

SEQ ID NO: 5460 - DNA, 392 bp, Rattus norvegicus
aattttgataatttgsgkywykmkkcccattggtccaccagagagaaaggtgtttggttttctttttcccattgggttccttttgtcaggccaataacagcaaatggaattctgtatttattattatttaagtgtagtgcagatgtgtgtgctctggtgtttcttgtgttgcatttgtggaggttcttatggatgattcatgttgctgtgagggagtgctggccatggtcagttctaggcaatggactcactggccaacctgcccaggatcttgataccccaatactgtgaccctccttcctcaggaaacacgttggacccacagtacctcgtggtgtgtttggagggtgatttctaataaaagtctcactgtgmaaaaaaaaaaaaaaaaa

SEQ ID NO: 5461 - DNA, 440 bp, Rattus norvegicus
ggcacgaggctccctcaactggatgaagaaactgtctccccggaccatccacctgaccatgccccaactggtgctgcaaggatcttatgacctgcaggacctgctcgcccaggctgagctgcccgccattctgcacaccgagctgaacctgcaaaaattgagcaatgaccgcatcagggtgggggaggtgctgaacagcattttttttgagcttgaagcggatgagagagagcccacagagtctacccaacagcttaacaagcctgaggtcttggaggtgaccctgaaccgcccattcctgtttgctgtgtatgatcaaagcgccactgccctgyacttcctgggccgcgtggccaacccgctgagcacagcatgaggccagggccccagaacacagtgcctggcaaggcctctgcccctggcctttgaggcaaaggccg

SEQ ID NO: 5462 - DNA, 600 bp, Rattus norvegicus
acagggtcctgtcttgaaggcccagcaccacacaaactaggcacatggtccagggatgtcatcctagtagaggcaggaggatgggaagtttggggtcacctttgattactatctaggatgtttgaggccagcctggagctgtaagagactgtcacagaagaaaagaaagacctgtcaaagattctgtggaccagtcagtccattgctcccaagttcccaagcacagtggtggagagcctgcccttagttagctaaagctcgtcctatcaatttgagtcaactaaatcacctctgactggatcattggacttagtctcagcttcctgtggattgatgaggctctctcggttctactctgaataccaacagaggaaaccaccttgtggttttcttacaactggggatttggctggcagaatggctcatctgaagacacttgccaccaagcccgatgacctgagttagatctcaggatttaagccaccctctcaccttcacacacattatggcgagcataggtgtgtgcagtcaatgtcaaacaaaaaaaccttttgtgaaaactgaataatgtggaaactttgttaaaaaaaaaaaaaaaaa

SEQ ID NO: 5463 - DNA, 686 bp, Rattus norvegicus
  misc_feature (112)..(112): n is a, c, g, or t
tcggcacgagtccttgtgcgctgcccttattgagagcgggatgaagtacgaggacgccatccagttcatccgccagaagcgccgcggagccatcaacagcaagcagctcacntacttggagaaataccggcccaaacagaggctgcggttcaaagacccacacacgcacaagacccggtgttgcgttatgtagctcaggaccttggctgggcctggtcgtcatgtaggtcaggaccttggctggacctggaggccctgcccagccctgctttgcccagcccagcaggggctccaggccttggctggccccacatcgccttttcctccccgacacctccgtgcacttgtgtccgaggagcgaggagcccctcgggccctgggtggcctctgggccctttctcctgtctccgccactccctctggcggcgctggccgtggctctgtctctctgaggtgggtcgggcgccctctgcccgccccctcccacaccagccaggctggtctcctctagcctgtttgttgtggggtgggggtatattttgtaaccactgggcccccagcccctcttttgcgaccccttgtcctgacctgttctcggcaccttaaattattagaccccggggcagtcaggtgctccggacacccgaaggcaataaaacaggagccgtgaaaaaaaaaaaaaaaaa

SEQ ID NO: 5464 - DNA, 552 bp, Rattus norvegicus; identical to SEQ ID NO: 1368

SEQ ID NO: 5465 - DNA, 542 bp, Rattus norvegicus; identical to SEQ ID NO: 1369

SEQ ID NO: 5466 - DNA, 1356 bp, Rattus norvegicus
  misc_feature (63)..(63): n is a, c, g, or t
gtacatcagtgactccatgaactggctaaacagtaagatgaacgcgcagaataaattaagtcntactcaagatcccgtggtaaaggtgtcagaaatagttacaaagtcaaaggaactggataatttctgtaaccccatcgtttataagcccaaaccaaaagtagaagctcccgaagataaaacaaaagctagtagtgagcacaatggaccgatggatggacagaatggtgcagagagcagcccagacccacccaaaggaggctcccagcacaccgactctggagagatggaagtggactaggcgccatgtaattcagcaggggttaaccacagggtccgtccatccttatgcctggtacacacaacatatgttcagttgttcctaamwamwwwrwmawwwrttttttggagtagtttcgaaaagtgtctatattgagtgcatattgatgtccattgctgctgtgaagctttagctgaatatagacgtacaaatcagtttgagctctccttacatactttgtgtcagtatgcaggactgctatgtactcggcaaccacccactgtagccacagcttctacttgcatagccctcagcttctgtgtgcaggracaggatactgcattgctcttttgttgcagaggcagggttaactgcattattgttgtgaaaacaatctgaagataatgtggtttagagccaccagcactgacccttttctagttccctaatgctatcacttaaatattaaaacaaacgggaggttctgacatcctagaacatctcactgatgcgccataaggaatccagtcttgtcatcacataaatgatcaaaatgacactcagagggacagtgtggtttgagttggaataacaccagcatttgctgcttttgttagtagcatggatttgtgtttcctcctcgagtaactcttcatttgaaactgttgatctacttgtccaaaagaccagctgctgtccacacttgtccacactaatgctaaagcactgttgacctgctcaggtgtgcatmtgtgatgctgacasccttggttcagtttayagttgtgttggttttcttaattgctttttgttaataataccttaatctggggtagggagaygttgcacaatgccttgcattatatatacctatcactgatttaatgttccaatgtwgatagacactattaaataagcagtaattccttgaaaggagtacctgtaccaagtcttaggaaataatgcttgtaataaactgtgttacatcagtaggtaaaatacataatgttacatagtgtaatatgatataatgtgattaaattatagttcctgctgttaaaaaaaaaaaaaaaaaa

SEQ ID NO: 5467 - DNA, 600 bp, Rattus norvegicus
ggaattttcttctacttgtatccatttcccgtggcttatggacccattcatactctccatacttggaatcaaaggttcccttctgcagagatcgtaattttaaggtaaaacgtggtccaagttcctgaattcccaccttcttttcactcttgaatatgtatctgtgaaacctgaagaagatgtaatcccgctgattgtggaacgtggmaacttgtcttccaataaattgagggttatgaggaaagagagaagcaaacatacgtccgatagagtgacctagccgtgtggtaaagttgtttagaattatctcaggtacatgttctgtggggtctttgcctcgtcgcttaatttctttacgaagacgaacactactcattttaaaatgagcagttggaccatttggcaaatgactcaaaataagtccatttggtgttttacgatcttcattaataacgattaggtctgtgaaatctcttgcaatgcactgtgggataatttttttcagagccagtcctcttctgtaataaacatgtgaatccggtataactgttgagagctgctcacagagtcgtactgttctcccatgaggtctgcctcgtg

SEQ ID NO: 5468 - DNA, 539 bp, Rattus norvegicus
cacgaggatcctaaactccaaggggactgtccacctacagacaytcagtggataccacctttgatccacactgtgcccaggacagctgccccctacccatggacacagggtaaacatctgccaggctccatgagtggcccaaggccatggaatagaggcagggcttgtcacagacagcgtgaggccctgtggcctgccaccctgacatcytggggtctcctttcctctcccacccaccttkttatctccacaaagctgcctgtctgggataatttggggattttttttytgggggacaattcttttgcatgaccctctaaagagcaggacacgtctgctctactggytaggtgttcrcaggtggtggcstcgactgtggccagtgctggagcgtgtcactgcctgcagtactggtgaccctcctctmttctctttttgctgagttccattgtcttttctttccgagccttgtaggtgtacaaaacttattsttattttgttctgtctcgggaaaytgcaadwaaaaaaaaaaaaaaaaa

SEQ ID NO: 5469 - DNA, 571 bp, Rattus norvegicus
  misc_feature (77)..(77): n is a, c, g, or t
gtgacacagcccaaggcagacattgccctcccttctcccagcccccagaggcctggccttgagtttgtcagcatggnccgaggacgttgcctgtagaatcctcctctgcctgrgagtggctctgtgtggaccagtccctcactggcccattctttttttgacgcagccaatctgtgaccacgattcctcccacagatgcctcctgcttggattctgagtggtcagagatctgtaaagcatgactttcaaggatggttcttaggggactgtgaaagtgttgggtcttcctccaggatgcctgcatgggaccccacccggagctggtgtggccattccccgagtgccactggcccatggatgggggtgggtgctggtgccacctgggctgggtgtgggttctgtgtccttccaggatctstgtcatttcccatgaggggccggggcaggtggctgggtgggggcacaggctggagtattcttagttctactggttmtacactgtgaggtggcaatgggatttgctcagatgccacccaataaaatgcctgttacktaaaaaaaaaaaaaaaaa

SEQ ID NO: 5470 - DNA, 432 bp, Rattus norvegicus
cggcacgaggactgccccacttcaaattgcagtgttctgtcacctaggcaccatatcctcctgccctcagtgtttgattacaaggaatggaggggaggggggctttcttagacacactggcaccaaggtaagaggtggagctgctcaggcaaagtcagtgaacatgaaaacgagacaaaagcagcgatggaaataatgctcctcttgaggagaaaagcaatactgactagaagggctttcctacaataactccactgaggactcacgttaccgattttcatacttacgaaagggattgtaaaaaacaccccagcattgcagatgtcttagttacatccacagcacggaggtaatctttcctctgtttgctgtcctacttgcttaagtaccacaattaaagactatgctcccctttaaaaaaaaaaaaaaaaa

SEQ ID NO: 5471 - DNA, 600 bp, Rattus norvegicus
aactgcccactaaacagaccgtcgcgaagctacagcagtccgacatwtggaaaatsgagaatgagttctatgagtttgccctggagcagttccagttcatgagagcccacgcggtccgtgagaaagatggagacctctacatcctggcccagaactttttctatgaaaagatttaccmtaagtcgaactgagcgcaggtgtgkccagagcactcttgatytggaactkgactctgtgmccaccttctcagccccactgcgcgkccgatgcgtgtgtgagctgcccgcgaagctaagagatgtcttagatgtcttgatgtcaagagaggagatgctgrcgsccgtcagaggtcaaggagagttcggctctcaggcagttcactctctcgwtktgttcccattttcwtgatagttacactctcctsccggkgcagkgaggggcctcgaattgcvtacaacatacccmcggkgcagggaggrgmswsgsawkgssyrtrmsvcmsccgtggaggttagagggaaggcgagtaccattccagaagaggctctgctgctcttgcttttgatgaggctttcctcacctctccttgaatgaagatga

SEQ ID NO: 5472 - DNA, 658 bp, Rattus norvegicus
aagaattcggcacgaggccgttagtcagctgcaggaacggctgggcccattgactcgggacttctgggataacctggagaaagaaacagattgggtgagacaggagatgaacaaggacctagaggaagtgaaacagaaggtgcagccctacctggacgaattccagaagaaatggaaagaggatgtggagctctaccgccagaaggtggcgcctctgggcgccgagctgcaggagagcgcgcgccagaagctgcaggagctgcaagggagactgtcccctgtggctgaggaatttcgcgaccgcatgcgcacacacgtagactctctgcgcacacagmtagcgccccacagcgmacagatgcgcgagagcctggccccagcgcctggctgagctcaagagcaaccctaccttgaacgagtaccacaccagggccaaaacccacctgaagacacttggcgagaaagccagacctgcgctggaggacctgcgccatagtctgatgcccatgctggagacgcttaagacccaagtccagagtgtgatcgacaaggccagcgagactctgactgcccagtgaggtgcccgsttccactccccacccccgcattggctttcttacaataaacctttccaaaatggraaaaaaaaaaaaaaaaa

SEQ ID NO: 5473 - DNA, 309 bp, Rattus norvegicus
cggcacgagggagggagggaaggagcggtggccatcactcaagcgatctttatatgtaaaagataactgattgtgccttaaagattcataggtcaagtaatggcccacaagcaccaaggttcattttagagtatataaggcccacaaagataccaaccttacaagtatcaacaaactagttatgaactctgttcctcactcaaacaaaatccttcaatcctccttgctcttcaaggaatattgctttttttcttcaaaaaaacaagagacttgattcttacaccattcattgataaaaaaaaaaaaaaa

SEQ ID NO: 5474 - DNA, 600 bp, Rattus norvegicus
cacattccttaaattaaggagtaagtctgccagcattatgaaagtgaatcttacttttgtaaaactttatggtttgtggaaaacaaatgtttttgaacatttaaaaagttcagatgttagaaagttgaaaggttaatgtaaaacaatcaatattaaagaattttgatgccaaaactattagataaaaggttaatctacatccctactagaattctcatacttaactggttggttgtgtggaagaaacatactttcacaataaagagctttaggatatgatgccattttatatcactagtaggcagaccagcagacttttttttattgtgatatgggataacctaggcatactgcactgtacactctgacatatgaagtgctctagtcaagtttaactggtgtccacagaggacatggtttaactggaattcgtcaagcctctggttctaatttctcatttgcaggaaatgctggcatagagcagcactaaatgacaccactaaagaaacgatcagacagatctggaatgtgaagcgttatagaagataactggcstcatttcttcaaaatatcaagtgttgraaaaaaaaaaaaaaaaaa

SEQ ID NO: 5475 - DNA, 600 bp, Rattus norvegicus
  misc_feature (104)..(104): n is a, c, g, or t
tccagttacttcaacaaagtcggggtggcacaggatacagacgactgtgatgactttgacatctcccaattgaacttgacccctgtgacttgtaccacaccatntaccaactcacctccaaccccggcccctaggcagagctctccatccaaatcatcagcttcccacgtcagtgatccgaccgcagatgacatctttgaagaaggctttgaaagtcccagcaagagtgaagaacaagaagctcytgatggatcacaggcctcctccaccagtgatccatttggggagcccagtggtgagcccagtggtgataatataagtccacaagacggtagctagatagcgcaggtctgggagccagagcctctctatgcgcagatcaacagacctaagaaatagcatcaatgcgagctcatggtgggtgcttcatgactgacatgggaatccacagtgcaacaggctctcttgggctctcacttcacctcatccacacagaaaaaactcaaccaatcgccccagtgaaatcgcccgaagagggaacagagtgttttttggcaaccaatggcagatacctatggcwgcacaaaaaaaaaaaaaaaa

SEQ ID NO: 5476 - DNA, 511 bp, Rattus norvegicus
gatcacgctgggcgacctgaagcgctgcggcctggcgggcgagttctttgatgcctttttcaatgctgacaaattcctggagcacgaacggcgggagccagcggggcctgccccggatgccgaccccaccctctccgactgggataggttcgctgcagcggagtacgacttcctgcttgctgaggaggcacaggatgatgacgcgtgggaggaggggtctgagtccccgcccagctccccggatccctacgacttcgcagatgacaccctagatccgctgtgacgtgcgtgggcagggtcgtgggacatactgtgcaccctgcccggggtcacacaggatcacgcaactgaggactacctcctcggcggcggtgagttcaatcgactgaggacaacctcgacactcccatgacatcctgtgaccccacgtgacctcgcaccccactgtgcgcagaaccgtcgtctgtaatttttgaataaagagttcaacgttaaaaaaaaaaaaaaaaaa

SEQ ID NO: 5477 - DNA, 776 bp, Rattus norvegicus
ctgcatctgagcacacagtgtgaatgggaagagagatctgaagcccacagcgattcttctgaaagtacaagcatgcagactgctgagcggtccaggaccagttaaggaaaaaattaaaaggaatggtctattgggttttgaaagggagaggagatgttgggggagaaagatggcctttgttgcgcttgtgtcatagtctccacttaggtgatttgctcagtttcctgtgctttcagtgggtaagggggaaacaaacaagcraaaaacatttaaaggatgtaaaatcagctagcttcccacttcatgtactgcgagtacagtaaagttctgctccaatgtcttatatgaggcacaactcttctaaaaatcataaaaatcatgctgttaattttagcatccaawrmwrwamwrwmammttaagctttaagaatcatgtccaattctagtctatgaaattgtcaattaatgaggaatttttaaggagtgctaaagagraagaagtccmgggcagagagagatcttcaggtaccggcggtcatcacagaactgctgctgtctgtgactactgtaaaaaaacgactttacgtttctaaagtttctcctaccgttctggtgcttcatgcagtttcccagcctgtgcaccccacagagggaacagatgtgcaggaaacactgatcaggaaataccatctcttcctccctggatatgactggcaccgtagcgctgctcactgctcaataaactctctcggcagtttaaaaaaaaaaaaaaaaaa

SEQ ID NO: 5478 - DNA, 600 bp, Rattus norvegicus
cccccctttgccaatttgtggcattcccctccctctaccttctcctactttgataacctggctatgactagcagaagtacagccaggcccaatgggcagccccaggccagcaaaatatgccagttcaaattggtcctgctgggagaatctgcrgtggggaagtcgagcctggtgttacgttttgtcaaaggacagttccaygaatrscaggaaagtaccattggaggksmktsctyacscastyrgtrtgkctwgawgrsacawcwgksamgtttkarawctgggacacagctgggcaggaacgataccacagtttagcccccatgtactacaggggtgcccaggctgccatcgtggtctatgatatcactaatcaggaaacgtttgcccgggcaaagacatgggtaaaggaactacagcggcaagccagccctagcatcgtcattgccttggcagggaacaaagctgaccttgccaacaagcgcatggtggagtatgaagtaaggtggcctacagaatcctcctagcatgttcactctgtatgtgggacctctttttcccaaacagtctcctgagaatttcaaaaaaaaaaaaaaaaaa

SEQ ID NO: 5479 - DNA, 456 bp, Rattus norvegicus; identical to SEQ ID NO: 1383

SEQ ID NO: 5480 - DNA, 1400 bp, Rattus norvegicus
ctcttctcgccgcggatacgtctaactccggtccgccgttcgtggcttgtgcgcggggtggcggggcgaggggacgaccggccggaagagcgcggagccacaaacgtgtcctcagtagttttagtcctgctccatgctcgggcccccgccccgacactgactgcgcccgggcttatgcgcggcgcgccccgggagtcgtagtgcatccgcgcctggctcccggagcgacgggggcgcggggcgtcaatggatcgccactccagctacatcttcatctggctgcagttggagctctgcgccatggctgtgctgctcaccaaaggcgagatcakatgctactgtgatgccgmtcactgtgtggcaactggttacatgtgtaagtccgagcttagtgcctgcttctccagactccttgatcctcagaacaccaattccccactaacccacggctgcctggactcactcgcaagcacagcagacatctgccgagccaaacaggcccaaaaccactctggtmccaccatgcccactttggaatgctgtcatgaagacatgtgcaattaccgaggactgcatgatgtcctctctcctcccaagagtgaagcctcaggacaaggaaacagataccagcatgacagcagcagaaacctcatcactaaggtgcaggagctgacttcctccaaagaactgtggttccgtgcagccgtgatcgcggttcccattgctggcggactgatcttggtgctgctcattatgttggccttgcgaatgctgcgaagtgagaacaagaggctgcaggatcagcggcagcagatgctctctcgtttgcactacagyttccatggacaccactccaagaagggacaggttgcaaagttggacttagagtgcatggtgcccgtcagtgggcaggaraactgctgtctgacctgcgacaaaatgaggcaagcagatctcagcaacgagaagatcctctcccttgtgcactggggcatgtacagtggtcatgggaagctggaattcgtatgacagtcgtgtytgaactgtaaatggaacccttgaagsccytytgagttctgctgacaggagcacttttatctggagacaactaacttgcttagtcatcctggagaaacaaaatgacctytgaaaagagaaccttgggtatttcttctgaaggattatttgcacagactctacagtcaaatggattaatktgcyttaaaattataataagcagagagaggactytgcacactttcccakggttyttagtgtcccagggaggcmcaactgactgaaataaaagcactgtgctctctgtaagctcctacatattcatttattgtaamgattttttaaaatatatatatttttgtccgaaaaaaaaaaaaaaaaaa

SEQ ID NO: 5481 - DNA, 600 bp, Rattus norvegicus
tacggagccagttctacatgctgcgcatggatggcccccttcccctcccggacaggcactacatcgccatcatggctgcagccagacaccagtgttcctacctaataaacatgcatgtggatgaatttttaaagaccggagggattgctgagtggctcaatggcttggaatatgtaccacaaagactgagaaatcttaatgaaattaacaagctgctggcacaccggccctsgctgatcacgaaagagcacattcagaaacttgtcaaaactggagaaaataattggtccttgcctgagctagtgcatgctgtggtcctcttggctcactatcacgctctggccagctttgtttatggtagtggcatcaatccagagagagaccccggaatcgccaatgggttcagactgatctcagtgagcagcttctgtgtgtgcgacctggccaatgacaacagcattggaaatgcctccctggcaggcggcaactttgggattgtggactctctaggtgagctagaagccttaatggagaggatgaaaaggctccaggaagacagggaagatgaagagactactccggaagaaatgagcacgcgtt

SEQ ID NO: 5482 - DNA, 600 bp, Rattus norvegicus
gattccrrccgagtgtaccggagggccggtgcggctgcgcgaccacccgacggccgctgcgcytgcgcgacgttggacagccgcgccatggcggacgaagaactcgaggcgctgagaaagcagaggctggccgagctgcaggccaagcacggagatcctggtgatgcagcccaacaggaagcaaaacaaagggaagcagaaatgagaaacagtatcttagcccaagttctggatcagtcagcccgggccaggttaagtaacttagcacttgtgaagcctgagaaaacgaaagcagtggagaactaccttatacagatggcasgktrtrgabrgctgastggkarggtgtcwgaacaagkgkkawtagaaatactcgagaaagtcagccaacagacagaaaagaaaacaacagtgaaattcaacagamgaaawgtaatggactcrgatgaagatgmtgwttactaaagaggacgtscttagacagacccacggagcaggtstaggacagttaccacctgtaaatgtttactktgttccctgtctatatgccttttgaaaaaaatmmwcktgtacctcaaactcaaaaaaaaaaaaaaaaaa

SEQ ID NO: 5483 - DNA, 432 bp, Rattus norvegicus
cagctggtctttattcctccctcatgagcacagggtcgggggggtccccattcttggaagaggttgagaagactcctgggcttcagcctctcccacccagccgtgcccctcacctgcctgccctcccctcccccactctatactagggactggatctcagcctstgatcagtttcacaaagtttgttccstaaggaaatcaaatcccattgtcacctaactctgaagatctaaatagcccttggatcagtacgggaaccccaaatcccacaggsccagatgtggagtctgtgtctgcccccgtcttctctccatcctcaaagcccccacttctctccaggctgtttctttttttatgactgtaaacatagatagtgctttattttgttaataataagataatgatgagtwacttaaaaaaaaaaaaaaaaaa

SEQ ID NO: 5484 - DNA, 592 bp, Rattus norvegicus
  misc_feature (14)..(14): n is a, c, g, or t
tatgttggacctgntacccccagcaccaccacttgccagtgctgtggtgggtaatgggggtgcaggggccacggtcgtggagtctcctggcccagagcccctgtcgctggactcttttgcagctccgggccctggggatgttggtactgctagccttgtgggcagcaacatgttccctaaccagtaccgagaggcagccttcgggggtggcctcctgtccccagggcctgaagccacgtagcctctgagttgaccaggaggcagtgggksasgmkkgtggtccagcactccatccccgaagccaaccttgatcagtmttccagcttcctcatcytgagtcggacgtctgcagtgctgttgagaagatggggygagcgcytgttctctttgagcycattwaacagaatgcggagtccggagaggaaaaggggctcctgcaggtggaccccttctcaggacagaatctcagagattgtacataggggatagggagcagatccccagtyttyttccccaatcctgaagaagggggtaggttgtttgttcagttttcccaataaaaattagttttttgraaaaaaaaaaaaaaaaa

SEQ ID NO: 5485 - DNA, 568 bp, Rattus norvegicus
tctcagaaaacaaacaaacagaaaattaaagtcttctcttcgattctcattttttattgcttcgtcaaagaagaaaaagattgagaaagaaaaggartrgwsctkgatmakmamgwagawtwyyryakwyarwctsttmatwgttcataacwtymywcaggtattatttctgaatgccagcaagaaagatctcagckgmagarsagggagctggctatgaaaaagttacgtgcaaggttatacagcatgcgtctagaggaagaaactgctaaaagatacagygctcgaaagatccaggttggawctaaaggaagatcagagaaaataagaacatacaactttccacaaaatagggtcacagatcacagaataaacaaatcactacatgaccttgagagcttcatgcaaggagactgtcttctggatgacctgatacagtcactgaaggactattcagattatgaatctctagtagaaatgatttccagaaaagactaagcttctttgtaaagatatatgtttttaatatacactgggaaaattctarwrmaaaaaaaaaaaaaaaaaa

SEQ ID NO: 5486 - DNA, 600 bp, Rattus norvegicus
  misc_feature (592)..(592): n is a, c, g, or t
gcggagacctgcaggagggagacggccgcagcatggcggcccgcagcgcaccgccctgccatccgccttcctgtcgcagccgcccggaccccgtggtccgcgagtgcttgctgtgagcccgccgcgcgtcagcccgccatccgcccgccctccttcccttgtcgmctctgccagcccgggggggggggggcggycgggcgcgccagcakccacccgccggggcccttggaccatggaggacgtgaaactggagwtcccctcgctcccgcagtgcaaagacgacgccgaggagtggacttaccctatgagacgagagatgcaggaagttttgcctggattgttcttaggcccctactcttctgctatgaaaagcaagctacctatactgcagaaacatggcataactcatataatttgcatacggcaaaatattgaagcaaactttattaaaccaaactttcaacaattatttaggtatctaatcttggatattgctgataatccagttgaaaacataatacgttttttccctatgactaaagagtttattgatggtagcttacaaaatggaggaaaagttctcgtccatggnaatgcagg

SEQ ID NO: 5487 - DNA, 429 bp, Rattus norvegicus
agaattcggcacgaggcatacctcagtggttagaagcatgtctctcttgagctacagtagaggggaagggattgttgtgtagtcaagtcaccatgctgaatgtacactgattcctttatgatgactgcttaactccccactgcctgtcccagagaggctttccaatgtagctcagtaattcctgttactttacagacaggaaagttccagaaactttaagaacaaactctgaaagacctatgagcaaatggtgctgaatactttttttttaaagccacatttcattgtcttagtcaaagcaggattattaagtgattatttaaaattcgtttttttaaattagcaacttcaagtataacaactttgaaactggaataagtgtttattttctattaataaaaatgaattgtgacaaaaaaaaaaaaaaaa

SEQ ID NO: 5488 - DNA, 546 bp, Rattus norvegicus; identical to SEQ ID NO: 1392

SEQ ID NO: 5489 - DNA, 523 bp, Rattus norvegicus; identical to SEQ ID NO: 1393

SEQ ID NO: 5490 - DNA, 950 bp, Rattus norvegicus
cacgaggctggacaccagaagtcggtggatctctctggacaagcatttgatgaagcctttgctgaattccagaggttaaaacaagctgccattgccgagaaaaatcgggctcgggtgctgggcggtctcccggatgttgtcaccattcaggagggcaaggcactcaatctcacctgcaatgtgtggggtgacccaacccctgaggtgtcctggctgaaaaatgagaagccgctgacctccgacgaccactgcagcctcaagtttgaggctgggaagacagccttcttcaccatctcaggcrtgagcacggcagactccggcaagtacgggctgktggtgaagaacaaatacggctcggagaccagtgacttcaccgtcagtgtgttcatccccgaggaggaggcaaggaagggagcatcagagcccccaaagggcaaccagaagtccaagtgagcggagactgggggagttatgaggagagccagggccagctggccacccaccgcgctgctgttgtgaaaatgattcggttagagatgaggagatcctcctggtgtctccctgctttgtgctgacttaggaggaaaccatcaaatctcttactcctataggcaccaataaaggacaatttaagggttwwwaawmwamaawwwmwrtagtaaaaaaatacwttaggaaatgatttcaaggaagaagsccagagaatgtcgtagtggtgctaaaagagagcagaagcgagsccgagttggaagctgatgaagtaagttcttagggattgtgtcwacatctggcactctgtcagaacagaggcacactgctgtgggcttgagtgtggtgggtcactstwactgtggtgatggtgcatttctgatggcasccttgggaactggcctcccccagtgtgaataaagtctttcccctcawrwmwmwmmaaaaaaaaaaaaaaaaaa

SEQ ID NO: 5491 - DNA, 491 bp, Rattus norvegicus
atgtcttaatatttaacttatccgaagatctgttctccaccattaaacatgtttcccatggtagaaaggatttgtaatcagccctgggaagtgagaatgtctcttggaattgggcatttacagtagtcaaagggctatctatgcagctttaaaagaagttgatttcatattcagagttcaagttaactgtttgactcatgttgacttaatttaaaaatccttaaaggaaattgacggttataagagatattatccccctggcttaaagatagagagagccaacaacctgttagcaattatttcaatttaaaaaattacttaaaagtcgtctctgcttaaggagagatgtatctttcaagcttttttgttactgagatgtttaacattctagtttccccaaaatggaaaattttgtatgcaaatgttttctatgatttaataaaaatatatggcataccttttgtttaaaaggcaaaaaaaaaaaaaaaaaa

SEQ ID NO: 5492 - DNA, 577 bp, Rattus norvegicus
ctcccgcatgacacagctcaagaagcaagcggccctttcgggcatcaacggaggcctggagagtscgagcgaggagtcattytgggttaggcgcgaagactttgccccctccaggaaactgaacacagagatatgactttcttgtccctttagagaatgtgtgtagatacgatgccggccccaccctcactytgcccaccctcctgtkccgtccacgagaatgtcctcttaggtcgcactcttgcacacagattttggcagctgactcgggtctgaagccatgtggccacccaccttcatcattcttaatgacatcagagagaatcgttcagaatcccaacaagcttgagtcctatcctctgtgcccagggctctttattctcaattcatcggggcctgaagatttagaacaaaaaatcgwtmgcactggaaattaaaccgtccccaccccagyagtcaaagcaaaktatcggartgacaggacagcsttcacwtaggtgtcycagctccacctccctgagtccagtstcgwcagctrgggaaccttcaracacacmttraaaaaaaaaaaaaaaaa

SEQ ID NO: 5493 - DNA, 455 bp, Rattus norvegicus; identical to SEQ ID NO: 1397

SEQ ID NO: 5494 - DNA, 535 bp, Rattus norvegicus
aggacagccacccgagggctgtgaaatccccaaggtgatcgtcagcaaccacaatctggctgacactgttcagaacaagcagctgcaagctgtccttcagtgggtggctgcctcagagctcaatgtccctattttgtacttcgctggtgacgatgaaggaatccaggagaagctgcttcagctctcagccactgctgtggagaaagaccgaagcgtcggggaggttctgcagtcggtgcttaggtatgagaaggagcgacagctggatgaggcagtgggaaatgtcacgcggctgcagctgctggactggctgatggcaaacctgtgattggggcccacccggtgttcctgcagtgggccgagtccctgccctctcagcccctccctgccgcacagagccctaaagttccctccataccacccacactagacacgccatctaatgctactcactggattttgcagattttcttgtccatgcgagcaaggacataaattaaaagattacmgttwaarrraaaaaaaaaaaaaaaaa

SEQ ID NO: 5495 - DNA, 535 bp, Rattus norvegicus; identical to SEQ ID NO: 1399

SEQ ID NO: 5496 - DNA, 600 bp, Rattus norvegicus
ccttggagtggtgcctgccagtgattgatgccaaaaataagagtggcagcctggagttcagcattcctgggcagcccaatgacttcttccctgttcaagtttctttcatctccaaaaagaattactgcaacatacaggttaccaaagtgamccaggtagatggaaacagccctgttaggttttccacagagaccactttcttagtggacaaatatgaaatcctgtagtaccaagaagagaaagctgaaaagcaaggatttcagattaataaagaagaagccaaaagtggctgaagagtttttccaaatttacaagccattggagatcccctcccccccttttttctgatacagtgcacgttctctgcgcgcaaggaccctcaactcacacccagtgttgtggtgtcacagagacatttttgacaaagacatgacgctgacataaagggaaaggctgctgatttctttggcagatcttactggccagcaggaagccatctctccagggaatgccccagtaaatagctcttctgccttcacctaagtctccctttattttaagccctaaatacaggtatatttcataaaaaaaaaaaaaaaa

SEQ ID NO: 5497 - DNA, 600 bp, Rattus norvegicus
gaagtattgtcttagagaaaattggaaacatctgatttctttcttaagtatcagggcaagctcatagcatatgttttacagagacatagactataaaccatggagttcctaaagcactagcaataagktgaatgataatcgcttatagcacayttgttaataattcttatgtcatcaagtagtagtacgtaatagtacccaacacagcaattattctcaacttgtgtgctattcgtaagttccgtgcagtttggtatgaagtatatctatataaaaacaaccatttggaaataaatcttacagttcagtgttaaatctacaaacttttataaatgttttaaaacagttcatgtgacaactgtaaacgtggtgaatttactgtcaaatcattttgatgtgctattatgtatgtatactctttaagactgccttatattattatttcctgtgattttcctcctttgtcaaacggtactttttgtgaatggttgcaaactgstgtcwtattccttattccsgtgtgktacattcttctgagttttgtgagacttcctcttaatttattaaatytattaagtgmtgaaaaaaaaaaaaaaaaaa

SEQ ID NO: 5498 - DNA, 484 bp, Rattus norvegicus
gtgcaagcggtcaggagttgcgtcatgggacagacgcgggtgcttcctgttgccttgcgtgggtgtggggccyggsasgaggccagggtgtggacccgccctagggactgggaagtgacttgagtcacctcgcccccacaggctgctgtggscgagccggccttcggctgagatccagaactgaacaaatcaaatcttgctgcgatcagagykgmwygargtggctggagaccccgggaytggtcagcctagactgatcgcctggcgtggactaccgcggaaagggtgggtgggtggtctcatttgctgtyttagacacgacctcttcgggcaagatagaattttttaccagcgaatttaagaaagtctgtttacttttcccacggtgggttgtgtttaactcccaactacctggagttttacaatgtcagctaggaaarkraamgtccatcggtgtwaaamrmrmaaaaaaaaaaaaaaaaaa

SEQ ID NO: 5499 - DNA, 499 bp, Rattus norvegicus; identical to SEQ ID NO: 1403

SEQ ID NO: 5500 - DNA, 534 bp, Rattus norvegicus; identical to SEQ ID NO: 1404

SEQ ID NO: 5501 - DNA, 552 bp, Rattus norvegicus
gtatcacgtatgcagcaaccgtgggaagggatgsyayrasrctagactcaaggaagatggcggctgtactatctggyacvatgaawtgcagctactttctgagatagaagaacacytgaactgtmccatttcccaggttgagccagatataaaggttccagtggatgagtttgatgggaaagttacatatggtcagaaaagrgctgctggcggtgggaactataaagsccatgtggacatcctggcacytaccgttcaagagttggctgcccttgaaaaggaagcacagacatctttcmtacaccttggctaccttcccarccagctgttcagaaccttctgatttcatgtagatggagaaggattggagtaatcgcgtctgtagtcttaacttaacgtggtggtgcttctgagcacagtgtttacagtagctgaactattactgctaactctgcatgtcggcaaacacaaatcttaggagttcttcataaaatggccgcctaatgaaaataaattggacaactwtawwwwmawraaaaaaaaaaaaaaaaa

SEQ ID NO: 5502 - DNA, 484 bp, Rattus norvegicus
  misc_feature (14)..(14): n is a, c, g, or t
attccttgcagacntacatgtttgagggggacggctccgtgcccggctcgctcagctcgcttcagtcagccacctcggactcagagcagagctttgatttcctcacggactggggacctcgcttccggaaactggcagaactctacggggcgtcggagggsccctcgcccttgtggtgacagaagcccggagrccaaggtgcacccaaatccagacgttctcaaacgctgcttctcgtccatgaggcgcggccaccacaggagcaatattgtgctggacagtgaggatgggagtgagtggacccaacagagctctctctggatcagctttacttggttagacgaaattaaataatcagaaggaaacccagaagaagagggcagaatccccaattatctttttaatttgctttttgacactgtattcacaggtttgaagtattaaagcttggcttttttgtttgtttaaaaaaaaaaaaaaaaaa

SEQ ID NO: 5503 - DNA, 726 bp, Rattus norvegicus
cacgaggttgggtccacacacgggtagggaaaatactctccgtttaaaaccgtgtctgcctgtcagcagcacggagaactgtgggagcgtctgggagtcggaaggggcggactcaagtcaagtgcgctttgctcttcagcgcaagccctgtaggcaccccttgtttacggtgcgcctgctctgcacacgcaggcgcggtgctggtcactcctgcctctctatttatttattttgacatctgtacattcctttcctatagttaagagccgcagttctgcaggctcctatctcaatctgttgtacggtttggatgctatttaaatgccaggttctgtgtggskggatttgctgccttcagttacttgtgctgtgtttcaagtaatctgcattcttgttcacttaatgaatatttrgtaraagtaactttgagtaactgtggccacttatttgggtttgctcatttagcacactaaggtcgtatactgtgcgtagtagtaayctctctttctgctcttgagtaatttaatgttcatttatcaaactcggaacttcaaagtgcactaaagttttgtttagcagtggttcaaactgtttcagaaattacttttgtaatcatttgcaattaattgttcttttgtctttactcttgttcaagcctgtgatctttcctctcccagccaagaatwawwmaawaaawttaagaaatgtcaaaaaaaaaaaaaaaaa

SEQ ID NO: 5504 - DNA, 539 bp, Rattus norvegicus
cacgagggctggaccgaccatatccattgggcttctgacctgcctgtcatggagtccagacttttctgcatccacttatggaatctgggcttgctgtcaccctacttcgttgtggccttcctggtgtaagagcctgtgctccttgctcacctcccmtgattcagaacagctccgtcaagcaatgtcttttragtttctgyacatggatgsaacaggggagtgaagsacagtttagctctctccatacttggaacaaccaagctatttgtgcaytgaactgatactctgaaaccctgamtgggttcagggtcctcagtastggtctctcccttatgcactaccactggactccttggaggaccccttcaatatcatctgctccagggagccccctagamtacctcctgagtctggacaaagtctcctgattctaactgggtcacttctgtatgggacagttatgtgctgggtgtctgctaaaacttccctgaccaactgagagcataaaccatgtgtyttatcaaaaaaaaaaaaaaaaa

SEQ ID NO: 5505 - DNA, 520 bp, Rattus norvegicus
cacgaggccacgcctcaggaagcccagcagtggctgcatcgaaaccggttttccacgttcacgaggcttttcaccaacttctcaggggcagacttactgaaactaactrgagatgacgtgatccaaatctgtggccatgcagatggaatccggctctttaacgcattgaaaggccggatggtgcgtccaaggctgaccatttatgtctgtcaggagtcgttgcagttgagggagcagccacagcagccgcagacccttgtattggcccctgctgtatgacgtcttcagatcactggccagacgtggagttcagtgtttccctaggttctgggtgctggtgacagcggtgagaagcctggcccttggggtttgtagagggcagagtgataatgggagtcgtgcgatgtcttctggaaagaagtttaattttgtgatatagagctctgacattttcctaacataaaagtgaacatctgtcttcataaaaccaagctatctcttttawaaaaaaaaaaaaaaa

SEQ ID NO: 5506 - DNA, 423 bp, Rattus norvegicus
cacgagggacatctctacgaccccaagaaccacatcctgccccccatggaccactgcaccatcagcctccagatgggcaccaataagtgtgccagccaggtgggcatgacagcacgagggacccggaggcacatctatgacaccaagctgggcaccgacaagtgcgacaactcctccatgtccctgcagatgggctacacacagggcgccaaccagagcggccaggtcttcggactggggcggcagatatatgaccccaagtattgcccacagggctctgcagttgacggggctcctaccgggggtgatggccaaggcgaggcccctgaatacctgtcctactgccaggaggaagccagctactgagcacccaggggtgccagctccccgccttgcatcagcagccctgtgtgggtttggggg

SEQ ID NO: 5507 - DNA, 584 bp, Rattus norvegicus
  misc_feature (69)..(69): n is a, c, g, or t
tgagcagaccaaaggggagggatgttgtacagtgtatgtgcatgcaccccatactgcgcactgtgtacnttggggtgtgtgtgtgtttatgtgtgtgtatgtgyrygtgccggggaatgaaggtgaacacatctgtatgtgtgctgcagacacatcctggtgtgtccacatgtgtgcatgagtccatgtgtgcgcattggggtggggtgggctctaacagcacttttggtgtccttgctgcaggggccctgtgaggcccagggtggctgcctgcttccagaatcctgtgtcagccaggccgggtggtgcagcttggctgactgggtttgcagggcagcaagagcactgcttaaaggttttccgatcgaarmwwwaawrraamrwttatttatttatcgaggcctctggcaaacctggggwataagcaaagagtggggagatgtgggggccgataccccaaatccctgttctctgaagcaagggcagggtcccctactcaaggagctgaggcccaagcagtttatttattgggagagagggagacagactgacagccatggatgggctggagaaagtcccttttt

SEQ ID NO: 5508 - DNA, 600 bp, Rattus norvegicus
ttccacggyctccgcaccctccagatatctctccatattacccgctgtcgcccggcaccgtaggacaaatcccccatccgmtaggatggttagtaccacagcaaggtcagcctgtgtacccaatcacgacaggaggattcagacacccctaccccacagcgctgacagtcaacgcgtctatgtmtaggttccctccccacatggtccctccccatcacactytgcacacgaccggaatcccccacccggccattgtcacaccgacagtcaagcaggagtcctcacagagtgacgtcggctcactccatagctcaaagcatcaggactccargargraaraararaaraaaaagccccacataaagaagccccttaatgcattcatgttgtatatgaaggagatgagagcgaaggtggtggctgagtgcacattgaaagagagtgcagccatcaaccagatcctcgggcgcaggtggcacgccctgtccagggaagaacaggcaaagtactacgagctagcccggaaggaacgacagcttcacatgcagctgtaccctggctggtctgcacgggataactatggaaaaaaaaaaaaaaaaa

SEQ ID NO: 5509 - DNA, 600 bp, Rattus norvegicus
actccaattgtgcagatgattcctgtccccttggtttatgtgtttgtccctctcagccatcttaggatggcatgaaccatggtgtcaacatgcttagcccctctgtaactgcctccctttagttctakgaacagagctcccaaggcaaaaatgaccttctcacttggattggggctgggttccccgatgttctacccctatcatcagagccaggcccaccctatgggtcctaggccatccaggatggggtttgtggtcaaaagatasgtgaggagctgtgggccasggtcctgtcctactgchtacgtcttctcytycccatcttacctttgtgggcccagaaaagttagtgtctggcagagggagcacccagttctttccctgttggctttgctgttccctagccttctttttggtgtttttataactgtcatcagtttagccactgttaaaatgtatatattgtactgaggtgcctggcctgttccttcaktgagccatgcctacccttgtgttgtagtgagaaactgttgtcacaactaacttgtctctggaattgtttcaaataaagagttaaaattgaaaaaaaaaaaaaaaaaa

SEQ ID NO: 5510 - DNA, 600 bp, Rattus norvegicus
catccggggtcaggatggctcctcacwgatasagracmtccascmrkyttctsctagagggccaaggggaaggtggaggatccatagggactcagcccctcctgcaaccatcttcttatgggcaatcggggatctcaatgtcccacctggacytaaggaccaaccccagttggtgatcccaactggagaagcccagagacagagcctcttctgtctytatggacccgctctggacacctgctcatgcaggtgcctccgtctccagctgttccttggtcaagagaaaagaactggctgggagaacgtgtggmawawrraamwrmwrwrctctgtccttcctatcccgccaggccccccctttgccagcaccgggtgcaaagggatgaggggggatattcgggctctgtgatacaggctcstgcacaacacacacacacacacacacacacacacacacacacacacacaccccagaactgtgttgagccagggcctgggactcacacgcaaaacatagacactgtgccaaagacagagggcataggcttagggattggagctgggttcaggtgactctgggagaaaaaaaaaaaaaaaaaa

SEQ ID NO: 5511 - DNA, 709 bp, Rattus norvegicus
cacgaggcagcgactttggcctgtccaaggcactgggtgctgatgacagctattacacagcccgttctgcagggaagtggcctctgaagtggtacgcaccagaatgcatcaacttccggaagttctccagccgcagtgatgtctggagctatggggtcaccatgtgggaggccttctcctatggccagaagccctacaagaagatgaagggccctgaggtcctggatttcatcaagcagggtaagaggatggaatgccctccagagtgtccgcccgaaatgtacgcgcttatgagtgactgctggatatacaagtgggaggatcgtcccgatttcgtggctgtggaacaacgaatgaggacctattactacagcatggctagccgggcagagggacccccacagtgtgaacaggtgsccgaggctgcatgtggctgagccccaagcctccctaccctcagccttgcttagttagccttactctctctgcacaggatgggctgtattcaggagcccaatcgaccgtcccatgtgattctccccgcctcatggctggggctgatgggacactrgtaaacatcaccaktgggccgagagtgtatgtgctcccaaatctacttccgctatttctgtgggagctcagagtcctccaggggtcactgtcattcatcggaataaactccacttctctttaaaaaaaaaaggaaaaa

SEQ ID NO: 5512 - DNA, 466 bp, Rattus norvegicus
cacgagggccctcagtcaccagcggtcctcaaagccctgagattgcccaggttccgcttgcaggtttatacactggaccgagggcatggcgtgtagcttccccaacactggctggagattgtgcctactttaagttggtggcaagggtcgccgagatgggatccggacgccgtgggcagcctctttggggttcatgccttttctcttgctgccaaggctccytaaggcccacaaccccyttccccacaaagagtggagagttttaaggtccctggccaaagaaagaattcgactgttctccctacccaagcagctcacactgtgaagtgttcagtggaactgttcctctgagcaccaggggtcttggcgtaaggacaagctgcacttaggaggcctttaacttgtaaataaaatgtttactacggtttgtaaaaggccgtttggcgtacaaaaaaaaaaaaaaaaa

SEQ ID NO: 5513 - DNA, 600 bp, Rattus norvegicus
aatcttaataatgtgccttcatttaaatattacaactgccatgcgccaattgccctggtagatgctagggttacaaacacatgcccacagtgtccccctgaagcttagaattggtggagaggacagaagagcaggcagagagaagtaacacatctgacaaatacagtagcagaagtagtcgtgagttgtattggaattttgtcctgtaacagcactgtgaacggtaaccagtcttgtcttctctcagagtctttcttcagckmrkgtggaagtctacacaaactgagtgaagagccactagttcctcctccgcttccccctcggaaaaagtttgatcacgatgctccgaactccaagggagctatgaaatcggatgatgaccctcctgctattccaccaagacaaccccctcctccaaaggtaaagccaagagctcctgtcctcacgggtacatttgaagggcctgtgcccagtccacctccacctcctcccagagaccctcttcctgatactcctccaccagttcctcttcggcctccggaacactttataaactgtccgtttaatctccagccgcctccgctgggacatcctcacaga

SEQ ID NO: 5514 - DNA, 549 bp, Rattus norvegicus
cacgaggagtgtctccggcgccagctacgccgctgtggctgtcactatggcccattacaaagccgccgactcgaagcgcgagcagttccggaggtacttggagaastcgggggtgctggacacgctgacgaaagtgttggtagccttatatgaagaaccagagaagcccaccagtgctctggactttttaaagcatcacttaggagctgccaccccggagaacccagaaatagagctgcttcgcctagaattggcagaaatgaaagagaaatatgaagctactgtagaagaaaataaaaaactgaaagcaaagcttgttcagtatgaaccacctcaggaggagaagcgtgctgaataggattcttctcagttgaaaagacactgaaaactggttttgtatcacttgaatagcttgtatagtatatgatctttcctgaaaagatgctataaacttttaatatgttaaawwmamwmawmamamwttaatgttataaacacatatacatagaatcaccaataaaaactcrrtytraaaaaaaaaaaaaaaaa

SEQ ID NO: 5515 - DNA, 499 bp, Rattus norvegicus
  misc_feature (147)..(147): n is a, c, g, or t
cacgagggttcccactgtacagcccaaaggtcctctgagactagaacccttcccgagctggagaaagaagctcaacgctcctaggaagcatccagaagcacatgaccaagaggatgggcctgaactgggagaaggagtggtgctgangaccctgattytcmtgsgggaacccagtgccttccgtgcytmtgttcygsttcttmtcctcccccactacctytgggaaccacgattctacaaggggaaagactgctgggtcagaccaaggccatatccacgcgaactcctgccctgttttcttttggcctmtgtcccagaagyttaactcttttcttctgtacaaaacaccaccggcttattgggattctttaattwatcctcamtcagcactaagggttccctcacaccattcctgctgcccctgagytgagcagagtcattattagagatttttgtatttattaaaacatcttttttttttcarmmaaaaaaaaaaaaa

SEQ ID NO: 5516 - DNA, 600 bp, Rattus norvegicus
ataagctgagaatttgccaatatttttcgaggaaagggttcttgctgggttttgattctgcagcttaaattaaggaccgttacagacaaggaaggaatttattcggatttgaacgttttagttttaaaattgtacaaaaggaaaacatgagagcaagtactggcaagaccattttcgtggtcttgtttagggcaaacgttctagattgtactaaatttttaacttactgttaaaggcaaaaaaaaatgtccatgcaggttgatatcgttggtaatttataatagcttttgttcaatcccacccttttcattttgttcacataaaaatatggaaattactgtgtttgaaatattttcttatggtttgtaatatttctgtaaattgtgatattttaaggttttttcccccttttattttccgtagttgtattttaaaagattcggctgttattggaaccaggctgccgagaatccatgtatatatttgaactaataccatccttataacagttacgtttccaacttaagtttttactccattatgcacagtttgagataaataaatttttgaaatatggamamwraaaaaaaaaaaaaaaaa

SEQ ID NO: 5517 - DNA, 852 bp, Rattus norvegicus; identical to SEQ ID NO: 1421

SEQ ID NO: 5518 - DNA, 472 bp, Rattus norvegicus; identical to SEQ ID NO: 1422
  misc_feature (448)..(448): n is a, c, g, or t

SEQ ID NO: 5519 - DNA, 369 bp, Rattus norvegicus
tgaggcaggaggcatacataaatttgagactggcctggactatgttgtgaatttcaggctaatctgagctacagagtaaatactttctcaaaaacaaagtatatctgttgtttgggttgttaaagattctattcagccttctgattttttgctactgtwktttatgataatcaactatgagagtttcccacgggtctggcctaggcttatagttctatggctgagaatggatttactccaaaaaaaaactgggttagtgagttatgtaaattatttatttttgctcstaagcttttgttttaaagcttatttaccttaaagtttattattgactttgaatacagcagtttttamaacmmwmrwraaaaa

SEQ ID NO: 5520 - DNA, 600 bp, Rattus norvegicus
tgaccctggctgtgccatggttcctgggccatgctctaccaatatctckgmrcsargttcagagccatgttctaccaatgtccgtgaacctggctaccttaatgcctcagagsscacgarkgccaaggttcctgatcagggatacaccaagatacctgaccagggatactcaaaggtaccagagccatgccagtccagaactcctgaggtgtgccccacaactgtcaccccaggattagctcagcagaagaccaagcagaagtaatatagtccatatgcagccaggcccttgaagagctgatcacctgctgctgaagtcttttctgtctgcttcggtgttcccattttctggagaccatgtaacaatattttgctacagtttctatttgtaacttaaaaatcgcatgctgttaggtcttctccataccctctaaaatgtatccagagcctcwgagttaagcagaccatcttagttccttgaacactctttgggtactggaagttcatctgaagtggaactctatgggattttctgtgggaaaaaaatgcatgtttgcccattaaataattactttaamctccaaaaaaaaaaaaaaaaaa

SEQ ID NO: 5521 - DNA, 438 bp, Rattus norvegicus
cggcacgagggtccacgcaaagcagagccagggcatctcggagttctacgctgatgacattgccctgctgaagctgtctcagagagtgaaaatgtccagccacgccaggcccatctgccttccttgcacagtgggggccaacatggctctgcggagatccccaggtaktacctgtaaagaccatgagacagaacttctgtcacagcagaaggttcctgcgcatttcgtakctctgagtgttcttgctcccaggtacataaatcctgkaacgcagagacaaaagctasgaatccccarggttgtgccagaaccactgtgccctcycgagaagcaagtgtckctctagcgtggatggcccgtgctccttttgctttcacacagaatttcccagttatgawattaataaaaatcaatgatttccaaaaaaaaaaaaaaaaa

SEQ ID NO: 5522 - DNA, 600 bp, Rattus norvegicus
ctttgtcatcgctgagattaatgtatgaagggcatggacctggatctgtttttcatatattgtataaaaacctgatgaaatcccaaactgagatgtatgaaaatatagcattggttctcaacctgtgagtcatgactccctttggagagagaatggccctttcacaggggttacctaagtccattggagagcacagatgtttatatcacagtttataacagtagtaaaattacagttttgaagtaacaatgaaaataattttatggttgaaagagtcacagaattaggaaggttgagagccactgaaatgcaggcctttttatttttttagaaaattattgtatgtaaacatgccatcaggtaaaaaaaaaagtctcttacttctatgcattttaagtcaaaattttgaaactttaggattaagcattgaaaaacaactgtctaaaacatttcacaatttgctttcagcatgagatatcaccagtggtctgaactaatatcctgtttttctatgtaaactttacattaaaagttgccagaaaccattttgtcastctcktstgcatgttaccaaatgttcagttaaaaaaaaacctcgtg

SEQ ID NO: 5523 - DNA, 1400 bp, Rattus norvegicus
atgtgawtaaktgcacatgatctcmtagaggaactgtaaakctgwtgcccagtcataacattttgagctgcatttcagtagaccatggacygttaagctgggcaaatgaaatgacaaggggacggggtctgtragagtcaattcaggggaaagatacaagattgatttgtaaaacccttgaaatgtagatttcttgtagatgtatcttcacgtwgtaaatatgttttgtagagtgaakccatgggaagccatgtgtaacagagcttaracatctgaawstaatcaatgctgaggtggctaaatacytagccttttmcatggaaacctgtctgcaaaattagctttttttaaaaaaaraaaaaawwwggsrsgwkratttatcattcagaaatcttgcwttttcaaaaatccastgcaagcgcmaggtgatctgtgtgtraggatacgattttgaaccttatgagcagtgtrcraatatcatgagacaactgatcrgcacktgcacytgatcaagagcagtgctgctccatttgttttgcaaagaaatgttktcatttcstgtatgttccattccctmtgaagtcccttggcctgattttatccattttttwaaaggtgccctmtttcctttcttggggcactgttgctgtggcayttttctawaasyttswcaywmcwrwghwyrgtagctggakttscagtgattgagcataacccacgtttgtataaattattgaaatccattttcaccctstaagaatggacttaaagtactgytgggcaagtgtgctggaagtacattgactgctcaaatacaaggaagtggcccaatgaacatggttgtgggaggggaaaggagaaacaaagctagtcagatgtgaattgtatctgttgtaataaacatgywyravsmmrmamardwwrwwwhwwwwwtttytttcggtcagtacatattagaatttgaactacatgaggttctttatcaaaactattcttgttgaatatttatatcttattacaagtawtaattccttatrtggaggttttgtttaaagcactaacaataaattgtgtaaaasatactcartgamtgtgaaattcaacargaatgaggagtcacttcccaagtggtgtcatttgttcaamttggtttavywgkckksykmwtvwgayacttywttttgaaggatgtctgtgttgtacctaacttttcaagtctggtgctgactgttgttcttagcatcacaaacagtttgtgtcattgaatttcctgctgttaacagaaacaacaggaaagctcagctytgtatagtgtttcctaaagyatattaaaataaammwgwrmcgattgctactwwaaammwmrwrmmraacctttgcggccgcaagcttattccctt

SEQ ID NO: 5524 - DNA, 307 bp, Rattus norvegicus
cctcccactccagggcgccctgccaggccggggacctccgrgacatgatcagcatgtacctccccggcgccgaggtgccggagcccgctgcgcccagtagactgcacatggcccagcactaccagagcggcccggtgcccggcacggccattaacggcacactgcccctgtcgcacatgtgagggccggaccgcgaactggagaaggggagagatttttcaaaaagatacaagggaattgggaggggtgcaaaagaggagagtaagaaaaatctgaatgctcaaaaaaaaaaaaaaaaaacctcgtg

SEQ ID NO: 5525 - DNA, 863 bp, Rattus norvegicus
mggscgctccaacatcagaatgagaactgagaarrtccttgtttcahkgattttctcagttctcattctgaagatkgtttccwgttgcaagttakagtcaagccagctacccakccttawctctgttcagtgccctgtyaykartgtttttaacgggttggtttctacakgtttaaactgtccarcagttggattttacctyttgatagttccgtttgtccctggtgctgcttttaaaggtatagggccctgtgaagtgtccagtggagtasgtackcakttggcctgktaatggaaaagctgctttggawtrratgtyywcwtgggttcctgtgcagaactgggcagcawtyctggaaagctctgtaaagcccgtaaggaasgatwtgaagagggctgcccttaaktctdtgaacatgaarcacttgtgtgcatgctgtcaaaagactgcagtgattgtcatcccaggcttcctgacctccaggaaacactttggaaaggcgacagaggagcaccaagggaagggaatwtgcttgscttgwwwtgtctgckttckcakttccttaccatktaaacctgaacgaaacacccttctccggtatctgatccagcaaactcttggttggsaagccctgtgttgaattttgagaatstacccgactttttgtacagtgctttacacytgmtaaaacttaacttgttaatgcagaagaagmccttgaaaggtcagtcatcmawtvtgkkwtgattwktrayagctatcttttaggaasaagctttttccctctatgtatgatgtcatactgcagacttwaaatwtagactwtcaataaaatgcatgaagtaaaaaaaaaaaaaaaaaa

SEQ ID NO: 5526 - DNA, 927 bp, Rattus norvegicus
cacgagggggcgagtgtacatttataatggcatgcataccaccttaggtgatgtgacaggcaaatgcaagtcctggatgactccatgtccagaggagaaggcccagtatgtgctaatttctccagaggcaagttcaaggtttgggagctcactggtgtctgtgcggtctaaggaaaggaaccaagtggtcgttgctgctggaaggagttcttggggagcccggctctctggggcacttcacgtctacagcttcagctcagattgaagatgtcatctcctaatcagcccgtctcttcagcaagtcatctccatgatggccaaagtagttctccagaggagctctggtgaaacctgacagaggtggggctcctggacagccaggctacccggaaatgcggtcagctctgtgtggacactggatgagagggagcagcaggctttgagggcaagtccctctaaagtgcttttgaatcctctgagcttgctgcctgtgcgtgggactttatcaacccacccccttttctgcggcattacctgcctctctagtgtagaaagggtgtagttagctcttaacattctccatataattgctcctataaaatccttcttcgtrgtggctggtcctatttggatcttaaatgtaccccaaatctatgttgaaggcttggcccttagcttaaagaaggtaggaactgaagtgggtctttgtcggaggaagttatgttactggggtgtatcaggaccccaggtccttccttgcctctccactgccagttgctgtgaaatgagcagctctcctccgccatgacatagtgcttctttcccagccccaaagcaaagggccaagcaccctggagctgacttggctgaaactgagccaaaataaacatttcctctttttaggctgttaaaaaaaaaaaaaaaaaa

SEQ ID NO: 5527 - DNA, 600 bp, Rattus norvegicus
ttcccaaggccagtctggatgaatttggggtggctttatcctgagagttgtaacctcaggttccaaagtctgtacttctcttgaaatgatggaactatttctcaacarwmmmmwrwmawmcktaagwaayttctgggttttccacaaattcctcatttttagacawactttaggtttacttttggcctggatgcttcctctccctgtctctctcttgtcccacagcagttccctctgacagcagacaaggcagctytgggagggagccagtggccctgatagcycagkbggyacckmrkgtgatgcaaatactccgtgtcaatcaagcagtgcagtgagccgtgctgctgtgctgccacagctccctggacagcaaacaggatgtgtgcssmamgarktaaagtgacgggtggctggtgaarmrmwhwmwrwmmwractgttcttttgtcaccgcaatccactgtcaaggacagaatttaaaactaggggctgggggacagctccaaatacaatgcctgtcttgccctcggcccagtccccagcattgggggaaaaaaaaataaaaccacaagatttwaawwwaaaaaaaaaaaaaaaaa

SEQ ID NO: 5528 - DNA, 537 bp, Rattus norvegicus
cacgaggagaatgtatttcatctttttaggacatactattttgcagttaacaatcaattctttagtcgtttccttacaaacgtgcgactggaatgtgcctctgtttcctagtrtgacctgccttgctgccttstaagattgtccattaatgccacccatatttcctgtgtgaatttccatattgctggggatctatttgtagcttcctcagactgatcaatgtgtgggtagaaattgttctgggtccactgaattattcacttgaaagtgattggttttatgtcactttcatcttaactgaaaaaaaaaactgcttattaaaggatctttggcctctggawaamwwrmmwawawrwagcaatcactaacataattcttgccttctccctaaaaagttgatgaatttgatactaggaaatgtgtatactagatagtttttcactgaagcataaacttgcgttcttaaagattttataatgtctccaagaaaaaaataaacatttttgtgaggtttgctctcaaaaaaaaaaaaaaaaa

SEQ ID NO: 5529 - DNA, 417 bp, Rattus norvegicus
cggcacgagggctsttgtagctcagcggtagattgcttgcctaatctgtgcagagagagaccctttttggagccgagcggtgtacatctcagttctagaaggccaatgaaagtggattggaggaggtggagatggaggtccagatggagccttaccacccaccaccgccastaccacaaccgaaacccaggagcagcagtggccccagmtaggcctgtctgtagmtgtcctccaggtctcacagttgccatggtaacccagccctccagttcagcaacatatggggagggccgttgggcagggcagaagctttgagctgggagtatccacctcatcagccactgtcatctgtcctstaaggggcacaataaacgggagaagcagccctgtgtggggkwwaaaaaaaaaaaaaaaaaa

SEQ ID NO: 5530 - DNA, 448 bp, Rattus norvegicus
cacgaggatcatcttcgacatcacagaagggaaccttcgagactcctttgatatcatcaagcgctatgaggacggcatgactgtgggtgtcgtgcgccaagtgcggcccatcgtgggcccattttatgccgtcctgaagctggagatgaactacgtgttgggaggsgtggtttcccaccggaacgtmgtcaatgtgcatatcttcgtctctgagtactggttmtgaggaccggtttgcagcasggmcaggagtgtacccctccgmctggccacgccmttgctcccagtgmctgscaggtgcttgtstgtacccctcgggcgttcmttggtgtttcatgttggtttgtaaggccacatacattaagctgagccacgtcatttaagtccagctgacgtactgtgctgtttaaacattgctcagtcatgtggttaaaaaaaaaaaaaaaaa

SEQ ID NO: 5531 - DNA, 426 bp, Rattus norvegicus
cacgaggcgctttgttacaaggttttggaaacaaagttgtattgtcattggtgcctctgtcatatggttcttgagaaaaacccagcctgtgtggattttaaatatggagcagacctatcctctaagcaagattaggttttaaataacagtacaaaacaacaatgccacatcttgttccttttccagggtgacttgtatgtgccacttgaacgttttccacagttttattttaaaaactggatggctttatgattgtaaaacattttcacactttctgaaaaacatttgttctcagtttgcttatgtagtcctgccttactgtttgtttttatttatggcagaatgtatggcgactgttttgtagttataaatttttaaaagggtcctttgaaaaaaataaaaggacctcagaaaaaaaaaaaaaaa

SEQ ID NO: 5532 - DNA, 600 bp, Rattus norvegicus
atagaagatggaaaaactatctaatcggaaatcctgggaatgttaaatgtgctggccacgtggctatgccgtagtgcctgtaccttcctgcttgggaacctgcagtgggccctccagctggctcccttcttgaaaacctcccctccaagataacgtctgaaggattgacggcagatccagtttcctttaggagacacttttctttggagagggaggttctttactaaaatatcttcttaggttttcagctaagctttgctttggcttcagttgtattggggttatttctaagtaaagtaatgtacaaatgagtgttttgtattgaaagtttttgttatgagatttttcatacttttgtccatggrstgtbtktcagrytgmtamkttttsaggtgwgrctgatccccaccgcactgtacatacargaawtatawacgtgtacttggcatagttaaggttaagtaggtctccagttggctaccgttacatataatggcacttcgtttgtgttgttagaaaacattgcattgccatgaactccccgtgtctgtctgaagaaaaaataaaagtacagtgtgcagcaaaaaaaaaaaaaaaaaa

SEQ ID NO: 5533 - DNA, 426 bp, Rattus norvegicus
  misc_feature (338)..(338): n is a, c, g, or t
cacgagggtcgaagagcaggagaagcagctgacaacagatgctgccaggattggtgctgatgcagctcagaagcagatccagagcttgaataaaatgtgctcaaacctcttagagaaaatcagcaaagaagaacgagagtcaggtgatctgtgctgagttgagcaatgaaattatcttttgctcaaggcttatttagatgggtacaataaaagatgcaggctttcagcaagagacagatctcagctccactgtgaatagccatggaacttgggaaaatgacctattttttcatgagccgtgttcttgtctgtaaatggtgataatacctacctcatanggttgttgtgaggattgaaatgggagagtgaatgtaagacacttagcacggtatacaaaatactgggtcttgaataaataatagtttc

SEQ ID NO: 5534 - DNA, 819 bp, Rattus norvegicus
cacgaggggactatggaacacaaggaagaagacccaggaaggtcccttgaccaggaactaaaaatgtcactgactgactggaaatcacatcaaagatgagaagatggctatgaagcctcataaatgcactttatattttaaacctaggatgaatacaaatgactagttttaaagtcactatttattgctaaatgactgcaaaagccagcgccttcatgcatttgcactatttgaaggggattccgtggtggtaaaagatgaatgtagatacargaaattattgatgactgactaatgattttcttaaactcctaaagcattcacaagtagaccaatgcttatgaaaacaagctttgcagtagctccatcctattaacagacctttgcctcattattttgtcaattgtttccccccaaagaataagggtgamcttttctttaactgcctcagagtaracagttaattttcattggtacatatttcttagtatctaaaaatctctgtagtgtgtttcaaggaagaaaaaaaaagcccagcacatgaggaatatttgtagagcagatttcaaagtgttacaaagaaaagtgcaatatgtgtcgtggcagatctctgtcaggacatacaccttgtggttggaccctggaataactcccatcttgtcccataacctgtttgtgtcttttgcagtcctttatccaaagtatttcccatgtgcaataaagtgtttatgtatgtgattgtattttaaaacctaccataagtttaagctgtttctatgtatgtgaaaataaaagaacagacaaacaaaaaaaaaaaaa

SEQ ID NO: 5535 - DNA, 730 bp, Rattus norvegicus
cacgaggttgagctgagacgcacagtcaacgccctggagatcgagctgcaggctcaacatagcatgaggaattctctggaatctaccttggctgagacagaggctcgctatagctcccagctgggccagatgcagtgcctgatcacaaacgtggagtcccagctggctgagattcgttgtgacctggaacggcagaaccatgaatatcaggtgttactggatgttaaggcccggcttgagtcagagattgctacctaccgccgcctgctggagggcgaggactgcaagcttcctgcccacccttgttccaccgattgcaagcctcctgtaagagttcctttcgtcccttctacatcctgcaccccggctgtaccctgcaccccagctgggccctgcaccccagcttctcaagtcagcacccagatccgcaccatcactgaggagatcagggatggaagagtgatctcctccagggagcacgtggtgccccgtgcagtgtgaacatccaccagtggggccgaggccacaggaaggaggacgccttgtggctcttggcagctaaatgatctcacacttccctagggccctccttgcttagcaggtttttctactaaaattcatctattgtttttggtcttaactgtgctttttcccgccatgcaaagccaggttcccctggaaatattcccaataaagtgttctcttggcatagcaaaaaaaaaaaaaaaaa

SEQ ID NO: 5536 - DNA, 576 bp, Rattus norvegicus; identical to SEQ ID NO: 1440

SEQ ID NO: 5537 - DNA, 600 bp, Rattus norvegicus
ggcaccttccaccttccagaaatctcggccctttgctatgacgtacggccgaggtgggcttgaaggttagttaaccaccaccaccaccccccccccccgcagctacaaccccagcgttttcagcttggtgcttagscmybwsbtggacctttcagaagtkagttgatykccggactttggtgrgaagcggatcatactgtttcactytgtgtcccccttahtggcctytcaaaccagttgmccctgtygtcatttgtaggccggcatkttwtaamgtgaagccarttytyccaagataaaytgkwaagggtcagggaacscstwttggcctktggacagaasmattktwwacctkccgcagaagactwraggrgccgggccwagstwtccctytcccttaactcaaamtacaacccaaacacccmgrtwccarcmcaagtcggtgaatccctgtytggamtgagcctytggcttytgaactggaacttttgcagctwttacaagtttwgaaccttaagaagtggggrgrttcaatgggstaattttwttaaaggatcgtttttggkttgttttttttttttwwaaaaaaaaaaaaaaaaa

SEQ ID NO: 5538 - DNA, 905 bp, Rattus norvegicus
cacgaggattccttaatggagagcactctaaccagctttcccccgccaataaaccaagagacagctatagaagccacttctgcaaggacagatgatgaaatccccccgccactccctgaacggacacctgagtccttcattgtggccgaagcagccggagagccctcgccaagcattactgagtccttacctctggcaggaaaatctggagtgacactggaatgcgggggaacatctgagtcacagacccatgacttggtggcgtttacgtcaagcaagaatgtggaactcggaagtcccaaatcagatcaacatcaggatggttctcctccacctccactcccagaaagaactctggagtccttctttcttgctgacgaggactgtatacaggcccaacccatgaaaccttcctctattagctatcctgaaaccacagagatctccacatcttctaagcaaacattgaagaccccaggaaaaagtttcacaaggagcaagagtttgaagattttccgaaatatgaraaaaagtgtttgtaattctccctcaccaagcaagcctacagaatgtgttcagccaaaaaattccagctcctttmtgaattttggttttggaactcgtttttcaaaacccaaaggaccaaggaacccaccatcaacttggaatatttaacaacctccggatttataagaatatttgctaaaattgtgcctgcaaataaagctactggaatactgctagaataatatctgtaatgacgacatctgtaatgacgacatattgtcaatgaagagggaagcagtgtgtggaaacttccagcaatcatgtattttcatattccttctcttttattgggaactgccaataaagtttgtacttcagtttawrwwwmaaaaaaaaaa

SEQ ID NO: 5539 - DNA, 418 bp, Rattus norvegicus; identical to SEQ ID NO: 1443

SEQ ID NO: 5540 - DNA, 537 bp, Rattus norvegicus; identical to SEQ ID NO: 1444

SEQ ID NO: 5541 - DNA, 890 bp, Rattus norvegicus
cggccgcaaaggttttttaaactttataatcaatgtatgttacaatctatgtgggttgtttagctttttaaaatgacttgctttgtttyasgartgcgacattctagtcagcactctgagaagccggrtagaattctgagctgatcgggcatgctgatcgttcgttgggtgctgcagttatttttatattamtctgaaatcaaggacttgaaattcttttcagtgatcttttacagtgattgcttgaaactgcccattaggttactggacctaaagttgttaggtagagcagatttctgtccatcagaaacgcacaggaagcgtgggcaggtgcagcctcagagcgggtascacggcttacacttcacacggkycctgaagaatcactgggcattaaacctttggataacagatgtgtctttttagcacttgatacmcagaagcaaaaggatcaaattgtgtttcttagaaaatgaaagaaaaaattaaggcagttacctctagagtatttcagagctgtaatccatttctattaacctcttcttcaraaactgttagttaaccacgtgaagtgcctcatctgctcagacctacagaacgttttaagtgtcacacaagaatggtmaysctyswrttccctagtagttaagagtgctaactactacttgawactaktgtttacacattagtgatgggctgatggcggactctggttggaccctgccctccaggtgccctcagtcagtacctgctcttccttacscaagtccagctgggagctattttgccaacatgtcgcagcaatctgtatttttgtatgtgatttttacttttatagactgattttaaaataaagtacatttttataagammaaaaaaaaaaaaaaaaa

SEQ ID NO: 5542 - DNA, 799 bp, Rattus norvegicus
cacgagggcgaatctgtacgtgtttctagcgggcggtgttttgtctccttgttgctgattcctctcagattcccggaacctccgggcccagcagcatgacgtctgccttggagaactacatcaaccgaactgttgcagtaataacttctgatggcagaatgatcgtgggaaccctraaaggttttgaccagaccattaacttgattctggaygarrgccacgagcgggtgttcagctcttctcagggagtagaacargtggtattggggttatrcattgtgagaggagataatgtagcagtcattggggaaatagatgaagagmcakattctgcactcgacttggggaacatccgagcagaacctytgaactccgtakcacactgrgagcttagtgtgcaggagacgtctgtwaatcctgtacagagacttcttatgctcagagtgatgtctagatttttttatgagtgtgtaattgtggatatttgacttcatgttggtacmctgkaatatgtaatttaaatatttmtaccwttttatcgggaaacattgcctawattmatgtggytgcttggtttatttttctatcaaatgaaacaaaaatgtaagggacattttggaaagttacaaagtaccmctctttttggtaatgtaatatttataggaaattggctgtaaaragaacttagactgttattgtaacttagacatgcaactamcagtaataaaagacmcgtttcttttwrwrrmaaaaaaaaaaaaaaaaaaaaaaaaaaaaaaaaaaaaaaaaaaaatagtga

SEQ ID NO: 5543 - DNA, 420 bp, Rattus norvegicus
caggggtggggctgaggggtggggttgaggggtggggttgaggtttccctctgtccctckshhbvvkctcctccctggagtaactcatggaatcatctygcagccctgcctytytcarccacaccccagctctgctgacctctctctagagtgttgggattccctcaccccgaccctgagtgccagcctakaggggaggctctcactgggctgcctgattcgcccatgctctgcttttgctcatttttcttctcttaagatacaaattggractgcccttctgtttagtcytamaactgaaaataaagcaagactgtggcttarmwwwmaaaamawrwamawwwmattccaacataatgagtatacttcgcccggccgcaagcttattccctttagtgagggttaattttagcttggcac

SEQ ID NO: 5544 - DNA, 600 bp, Rattus norvegicus
cagtctggaccagcagagcaacatccgacgtcttcactccawatcatgkgcwyrmskgttaaatactcccytttattaatcttagaggattcactggtttcytttcataagcaraaagtacctcttctcaaagtgcactttgcagaagtctcaccttttccgmtgagtttgagttaggagcctttgcyttgtagcagascwgtgttaacatytagttggtccaccaggggaacgagaggccarccatggggccyttcaatgtggatgctgstcacamtgacygatkgagaagggagggggttataatacacgaggtgacaacctcagaagtgtaaagactgaattgaattytamgytaatgtgaaattctggcagagaaygttttaataaataaatgccttaagwgthwwwmaawawmwrmhwmmawawwwcaarakrtmrmgksyracatgacaggagattttatgtgtctgacattgtgtctgggaaggaagggccagactttagatcctttggaacctgctgtcgtaggcctttcagtgcagcttgaatcttacggttgtagactttggcccagaagtaaagtttggaaagttctgt

SEQ ID NO: 5545 - DNA, 502 bp, Rattus norvegicus
cacggggccaaagtggggtccaaatctgggtccaacaaaagcagtattagtagcaaatcaggagatgggaagacctccgtctggatttaatcttggttgggcttaaagcttgggtttccatagtttatggtaagcagcaacttgctgaatgatgactcccattgagtaaacatctggctctggttatcttcagggatgctgttggctcgtgatccaaactcaggggactgaaagtggatctgggatgagtccggagcgggaaacacagtgttcccaggcacaggttctcagcaataatgcagttgcagaactctaagctgtgtcttccagatccggagaagaacagatatatttaaatcattcttgttgaacagttttgtatgtacagtattatggtacatttttttttagtatgataacttttttgtatttgtacattggactgctgtagttacacttttttatattaaaggaaaaatccttgtaaaaaaaaaaaaaaaaa

SEQ ID NO: 5546 - DNA, 600 bp, Rattus norvegicus
ccaactagtcccaacctcacctmtacttgtccgttggaccacctgagtagtggtctcctctcccagacctccctgagcatgctcaatggtatgtaactccagctcttcgtgaactttgctaagatctcctggcccacaaaaatgtgcctgtctttatcctgacattacacccaatcaggtyccttcataccstgcaatggtcaatccagaagagttgtcagtattggraaagcaccgtgtttcctggcmccgtgcctttggccttgcagtttgcatcttmtgkatcattcttgagtttcttccaaggcgcatgcagagaccacatcckccatgaagccctccccagtccatcaatgmtgggacstctccccccacagwaccaccacagcactttatttctccctttctcacggcacttaccatattctgccttgtattatagctacttgtgcacttgtcctatgtctgttcgtagactgtaaccctgccaagggcaggcactgttttattcatctgtatccatcacagcattaggcgtggtgcatagcacacaacagttkctcaataaatgtttgttggatcaaaaaaaaaaaaaaaaaa

SEQ ID NO: 5547 - DNA, 539 bp, Rattus norvegicus
cacgaggctgatckttggagatgcccctgcctccctggacgcctttgtttttagccatttgktcctgctgctgcaggcaaagctgcccagtgggaagctgcaggcccaccttcgggggctgcagaacctctgtgtctactgcacccacatcctcaacctctactttccccgggatgcaactgacgtgccaccgcctccatgccagacaccarcaggccctgagaccgaggaggaaccataccggcggcggacccarattctatctgtgttggcagggctggcarccatggtgggctatgccttgctcagtggcattgtttccatcmagcgtgcaagccctgctcgggccccatgcacacaggccttggacttggctgaggaggatgaagaggactgatgttcttgttcccaggactgatttttctattcatgcattccaaatgcccctttgtccccccattgttggagcagccaaaaatggggtgctatcctcagaataaaattgtttacactaaaaaaaaaaaaaaaaaacctttgcg

SEQ ID NO: 5548 - DNA, 587 bp, Rattus norvegicus
cacgagggattcactgcggtctacgatgctgggagcccaggccatatgtgcgatggacgatggcataaagtcactgccaagaagatcaaaaacccgccttgagctggtggtagatgggaaccaggtggatgcccagagcccaaatgcagcctccacatcagcagatacaaacgaccctgtttttgttggcggtttcccagatggcctcaatcagtttggcctgaccaccaacgttaggttccgaggctgcatccgatctctgaagctcaccaaagggacaggcaagccgctggaggttaattttsccaaggctctggaactgaggggtrttcaacctgtatcatgcccaactacctaataaagataagttcaatccggagaagaattcaccaagacaagtatatcaagttaaacagtatacactcccaccatattaataaaaactaatgtgcgcatatacacaaaattctctctscattgtgtcagatggtgataatycrgaccacagattgaattttaactcaagttctctttcaagcttatgattattaaaccaattatttcattctaaaaaaaaaaaaaaaaaa

SEQ ID NO: 5549 - DNA, 802 bp, Rattus norvegicus
cacgagggcccatttctcaagattaatatcaatttcttcctgattccaaggcaagagacgggagtaagaaagggagagagattgctacagtctctaatggggctgggcaggtaagatctaaggaagaccccgaattccgttctcatactccacatcccatcttttttcctttacttcctccctgcccttgagaaatagcagcatcccaagaacaatatctgtacaaaggggggaaaatgtaagcatgagaaaacattgacaaacaaaaccagtgaggaatataagtacagagagattcscgtccttcaagaataatccatgtttatttgtggtggcaagtgacaagatggtacaacctttatccttttccagaaacaaaaataaagagcacagcaactgtagtgagccaacagctattttggccttttgggtgggtctagcagtacttgggatcccagtggtacatgaccctytgcytaaggcttgcctcagcctgtgtaygtakcacgcsgtgtytgtgggcawgcccagcactttccgtcagtgtcgtactgtatgtgatgaactgtgttggtmtctgtgtgtttctgcagaagaggagtaactactccgggtaccttgatatttgtacagcctagagaccaacactgcgggcgtgtgactctttattggraaaaaaaaagacaaaaacaaaacaaaaaaaaataccagtgtggtgacaatagtgtgtgtatatatatataaggttatatgggaagatttctaaataaaagttttacaaagggaaaaaaaaaaaaaaaaa

SEQ ID NO: 5550 - DNA, 630 bp, Rattus norvegicus
cacgagggggaaattgcagcttgtcgggacagcagctattctcctggcttcgaaatacgaagagatatacccgcccgatgtcgatgagtttgtctacatcaccaacgacacgtacacaaagcgacagctactgaggatggagcatctgctgctgaaagtcctggcattcgatctgaccgttccaaccaccaaccagttcctccttcagtacttaaggcggcaaggggtgtgcatcaggactgagaatttggccaagtatgttgcagaactgagccttctggaagctgacccattcttgaagtatcttccttccttggtagcagcagcagcttactgtctggcaaactatattgtgaacagacacttctgggtacctgcacgtgtccctcatggagccgcccgtagttcttcccctgcagtgaacgggtcagctcaacagccacaccagcaggcttactctgacctgttacagttttctgcgggtcgggccaactaatgtcagttgtagatgtcaccttcaacatatgagtgttaggttcttttagacgtcggtagtttataatttatatagatatagacaggtattttwaaagaataaacaacttgctgtgtgaaaaaaaaaaaaaaaaa

SEQ ID NO: 5551 - DNA, 600 bp, Rattus norvegicus
caattctatgacctcaaggagctgttcagagtaggtggcgatgtccctgagaccaactacctcttcatgggagactttgtggaccgtggtttctacagtswygarrccttcctcctcctgctggytcttaaggttcgatatcctgaccgaatcactttgatccggggcaatcatgagagtcgscagattacccaggtctatgggttctatgatgagtgcttacggaaatatggttcagtgactgtatggcgctactgtrctgagatctttgactacctcagcctgtctgccatcattgatggcaagatcttctgtgtgcatggaggtctttccccttctatccagaccttggaccagatccggacaattgaccgaaagcaagaggtaccccatgatggacccatgtgtgacctcctgtggtctgaccctgaagacacaacaggctggggagtgagcccccgtggggcaggctacctgtttggcagtgatgtggtcgcccagttcaatgcagccaacgacattgatatgatctgccgtgcccaccaattggtgatggaaggttacaagtggcacttcaatgagacggtgcttactgtgtgg

SEQ ID NO: 5552 - DNA, 667 bp, Rattus norvegicus
cacgaggcttttgactcaaggaagcggccatccttccccaatctgacgtcatttttaggctgtcagctcgcagaggcagaagcagcgatgtatcagaacatgggcggcgatgtcccactggagcacccagccatctaccaaaacaggcggcctgccagcagagaggcaggctcagagccgccatcaccacaggttcaggagaagactcacagagaaagaagttagtgaggccttggacyccgccacccctagacaggctgtagatcgcagagccaaggttagcttcacctcasaggaagcacccygccggctgctgcttcttygctggacttttctctagatrctgtctgccattactccagagtgacttctataagaccaaaccgctcctmgcccaggcagaagagmcaataatgaggctgactggtgagcctdcctgccmtggagacctttccaggctggcttgaggggaaagccatgtatcggaaatacagtatattcctgtaaatacataaaacaaaaacaaactcatttttgctaaggmgaagctaaatatgattttttaaaaaaaatctatgttttaaaataatatgtaactttttcatctgcttagtgatatattttatggacggaaataaactttctactatagaaaaaaaaaaaaaaa

SEQ ID NO: 5553 - DNA, 525 bp, Rattus norvegicus; identical to SEQ ID NO: 1457

SEQ ID NO: 5554 - DNA, 600 bp, Rattus norvegicus
gggagctcattatgtcyggcaagaacatgcggctcagctccttggccctctccagcttcagcacacgctccagctccagctggatsgagagcctgcgcaggaagaaaagtgacagtgccaacagccccagtggcggagytgagaagcccctcaagggctgaagatctgggctgagaccccctgcgtcggggatcagagytcacagagccagsgtctggaaactgctggcyttccatgcagcctgccgcctctmtgcctggtggactgctctgttggtctcaccagtttttagaaktggaggaagtgggcctcaggggcagcactggttcaggccttgaatggggcaacagtgagggacaagatatggaaccaaaaaaamawraaaaaagaactgtgagattgggtccatccctgtcctgcttggagtccacagggagactgtaatctccatatttttttactctattccccagagggcccttgtgcccttgttcctgaattacacaagaatgtatcacgccgggaagccagagacctgctggggcctccaagcccctcatatcatcgtatgtcctcttggtttaaaaaaaaaaaaaaaaa

SEQ ID NO: 5555 - DNA, 600 bp, Rattus norvegicus
actgtgcagatgggtcatccccgcacacagctctggattcactgtgcggtgttggtcttcacatcagagatgatgttggcaaccctcctttctcctcctccagcacccagtatccgtgaaggccttcccttcgcaccccccacttcactgagggggcgcttggacaccgtagttgacattcctatctgatctgccccggtgtctcagccgcagctccytaaggtgcctttggctcctggctggccttttgactctttaacagstgagcactycmaacccttcctgtgttttcattsccttaaccacaaattgtggtgctttttgtmtattttatgtataaaacacaaarwwraaycytkgckryykttaagacaaaagtctgttaaacttttttttawtgtaaagaatatttattatgcgaatctctattattttatgatatttattgcaaaagactgttgaaatgtactcatgtctgaatataacatatcactacttcaagaaaaacaaggtgactcaaagacagtacacaaagtacatatatgttaactacaatgcagaaaatatattaattawtgaaammaaaaaaaaaaaaaaaaa

SEQ ID NO: 5556 - DNA, 600 bp, Rattus norvegicus
gacgctgcatagtgacccggagggctccgtcatagatgacagccgagcacgcggcaagcccatggagctcatcatcggcaagaagttcaagctgcctgtgtgggagaccatcgtgcgtaccatgcgtgagggggagacggcccagttcctctgcgatgtcaagcacacagtcctgtatcctctggtggccaagagcctccgcaacatcgctgagggcaaggaccccttggagggccagcggcattgctgtggaattgctcaaatgcatgagcatagctccytgggtcatgcggacctggacgccctgcagcagaaccctcaacccctcatcttccacatcgagatgctgaaggtgtkrgagcycgrccctrccmtggcgcctgtggtaagcagagagctgcgggccctggaggcacggatccggcagaaggatgaggaggacaaagcccgcttccggggcatcttttcccactaacaggacctcagttctgccctgccctgccaagcccactgctgccaccacctgtcaatcccccactgccaccttgtgcttctgtgtatataaaggccttatttatctctcaaaaaaaaaaaaaaaaa

SEQ ID NO: 5557 - DNA, 600 bp, Rattus norvegicus
aaggaattctgtgtcagtgtaactgccagttcagttaatccaatgtcattgttcaattgctaatgtcactttaaactaaaagtggtttgttccttgatgacacaactaccgaaggaaaaaatctgcagtcatgatagcctccaaggcaaaagcactgtccagtgttagtaaatgtgtttacctgttcacaagccattggagagatatcacaggataatcagcagccttgtctgccatctggactctagcagcccagtgtccttcytgactcaggcctgatcctggattcmccagacttgaagcttgagggtgtgggcagtggcctcctmtggccttgttcaatcactatgatgcagactgacagcagtgggagactgagtggttgacagactcaagtgtcgrgttctgagttctcatgtaagcactagtggaactttcattgtttttgatatattagcaaaggtctgtgctataccactggctgtttgtacattgagacggtttaacagtgctttctatgttcatatactgtttaccttttwccatggagtctcctggcaaagaataaatatatytwtyytwaaaaaaaaaaaaaaaaaa

SEQ ID NO: 5558 - DNA, 600 bp, Rattus norvegicus
caaatgctgtccccacaacagaaacggtggtggcagaatttctagaatgttaaaaaaaaaaaaaaaaaaaaaccaccctgtgccttttcaaaaaccaacaaaacttcagaaaaacatctctggttctttcaaagtttgtgttttaaagagcagcataaagtgctctggtacttggtatttttgcttaaaatgacaattaccaattcattttcctttaagttacattgaaaatttttcatttaacggcggctaaagggccattttcaatggaaaaaattcatttccatctgtggtaaactttattttgatgagaacttgcactagtattttaccaccagatgggaaaagattagctgagcatcattttaaaattaatgtatttaaataaagtacagaggaaacgtatgtatataatatatcaggctttgttttgagtggactcttttccccccaatccttaatgtaaagattttgtgctataacttttaaagccatacaaataagagtgctaaactgtggacttaaaagtagttgtgtaaatatttttaatcagtattacttggaaaataaaaatataacaaccacaaaaaaaaaaaaaaa

SEQ ID NO: 5559 - DNA, 443 bp, Rattus norvegicus
cacgaggttcaagttcgtggatattggaatcaacctgacagatcctatgttcagaggaatttataggggcatgcagaagcatcaagatgacttacaagatgtaatagggagagctgtccagattggtgttaaaaagctctctgaaaactgaagctaatttggaagttctgaagtcaatacccagtgaaaaactaatgattgagacagatgcaccttggtgtggagttaaaagtacacatgctggatcaaaatatataaaaactgcatttcctaccaaaaagaagtgggaagccgggtgctgtttaaaagacaggaacgagccctgccacatagttcaaatattggagataatgtcagcagtaagagaagaagatccactggaattagccaacacgctatataacaacaccattaaaatattcttttcctgaaaaaaaaaaaaa

SEQ ID NO: 5560 - DNA, 420 bp, Rattus norvegicus
cacgaggagaccctgcccaccaccccctgtatccctctgaagaagacatgattgagtgggccaagagggagagtgagcgagaagaagagcagaggctcgccagactaaatcagcaggaacaagaagacttggaactggccattgcacttagcaaatcagagatctcagaagcatgaagagtcctctgtccccgtcagccgcacatgctcttcctgaataccgaagctgtttaccatgtgcatccaactacctatgagcatgggatacaaaggtttgcgattcctgtaaatgtgacaagtctagtttgttcgtttgggggggaggggacttcaaatgtgtcytttattttttcttccaaaagcagtaccctaattaaacagctttgcctagaaaaatcagttttaataaaaaaaaaaaaaa

SEQ ID NO: 5561 - DNA, 485 bp, Rattus norvegicus; identical to SEQ ID NO: 1465

SEQ ID NO: 5562 - DNA, 600 bp, Rattus norvegicus
taaattggaaaaagtaaccaaacagtgggacataactaactccacatgaaacttgaaaacatcatttccgtttctttaataatttttatttattttgtgccttttctgttaaccctaatgcatttccaagattcagaatagtcattttctcttgcaaatggggagcccaactgaccacacaagtattccatccaactgctacagtgcgctgggatyctaacctgccctctctgggaaccggggaaatgtgtcctaragcaaatgtcacatcccagaccccagctggtttgtgcatgtattcacagcttcctaggttaaatagtttgcactatttttgcaataaatccatgggaaacctaacagctacttatgttgttgttcttactgtgtgtataaactaacactaaaggtttggaatagtgttttttttttcctcccacctcatgtagccccttaacatgcacagaatgctgtaaatctgatatatgatgtgaatgatattttataaagttattttgtatggtgtcgatttgttttgccgcatagtatgtcagcaagaaataaaataaaattccttgtatttacaaaaaaaaaaaaaaa

SEQ ID NO: 5563 - DNA, 444 bp, Rattus norvegicus
cacgaggatcctgaacccatcaccgtccccggccacagacccctccctgtacaacatggacatgttttattcktcaaacatcccatccactgccakaccatacargccctacatcattcgaggtatggcacccccaacaacaccttgcagcacagacgtgtgtgacagcgactacagcaccagtcgctggaagaccagcaagtactacctgcacggactcgtcctgacctcggccgtccaccccggcctcgctgcctccctgtaaatatttttaaatatgaacaaaggaaaaatatattttatgatttaaaaaataaatataattgggatttttaagaagtgagaaatgtgagcggtgaaggggtgggcagggctgggaaaactttgtacagtggagaaaatatttataaacttaattttttaaaacaaaaaaaaaaaaaaaaa

SEQ ID NO: 5564 - DNA, 599 bp, Rattus norvegicus
cacgagggctaccgagggcctcaaggtgtgcctggcatcagcaaagatggtcgagatggtgctcatggtgagcctggccttcctggtgatcctggccttcctggagctgctggtgctcaaggaaccccggggatttgcgacacctcagcctgccaaggagctgtgttagggggaggtggggaaaagtcaggtcctcggagctcataagcaagaactaaagtaggaaatgacagagcactccagcaggcagcagggatgagcagtgtgatggctatggacaggaatggacagtggctggctacagtcagctagtccttcctggcctgctgcttggccccaagagcatctattggcgccactgtcactgtcccatcttcaggatttatggcagcccattcatctgtgacagcatacctcagacacagaccttagggatggagactttaaacccagcatctgggaggattggtgttattgaagagttttgtacaattccatgagataaaaacactcaagagacttgtttacacatttatataaagcctatgacagactaccaataaagcgatcttctaacccttcaaaaaaaaaaaaaaaaa

SEQ ID NO: 5565 - DNA, 600 bp, Rattus norvegicus
  misc_feature (581)..(581): n is a, c, g, or t
gaggtcgtgttgaaaataactcatctttccatatttctcctggggggaaaaaaaggctttgttcacccaacctacaaagtctccatgattacatttctgatctccacasccggaatgagttgaacttgtcgtgtttattaatgacctcatgtgttatagatttgatcatgtagaccattatccctccctccttccctccctccccttttcttgaaataatatttgtatatgtctgtgttcatgtgtgtgtcctgttttctgactttgaaatgtttattatgccttaracagttaccccagggagattatgtaaaaaagcctggagatggcgactctttttatagcgactttcctcctggaggcagcgcagactcagcatctagttctaagaagaggtctgcttttctgtcgcattttcagatttccacctgctccatcacacattattccattagtcagaacatttcattattttgcagcaggtttgactacttcttccttctttcttgaatgttaaaatagtatcccttgttctttgattaccctacttcaaaatgtcatatgctcaggaccagatcatnccaaaaaaaaaaaaaaaaa

SEQ ID NO: 5566 - DNA, 512 bp, Rattus norvegicus
cacgaggctgaccccagggtctgagtcgccgctgccgccgctgccaccatccgcgaggcagttgagaggaagagtgcggtgtgacggccccggggccgaggagggacccagacatggagcttcgggaagaagcttggtctccagggccactggattctgaggaccagcagatggccagtcatgagaacccagtggacatcctcatcatggatgacgacgacgtcccaagctggcccccgaacaagctttccccacctcagtctgcacctcctcctgggcccccaccccggccgcggccacctgcaccctacatctgcactgagtgtggcaaaagcttcagccactggtcgaagctgacgcggcaccaacgcacgcacacgggcgagcggcctaacgcctgtaccgactgcggcaagaccttctcgcagagctcgcacctggtggagcaccggcgcatccacacaggcgagaagccgtacgcctgctctgaatgcggcaagcgctttagctgg

SEQ ID NO: 5567 - DNA, 600 bp, Rattus norvegicus
tgagacaatcctgaatggagaattttcacacacccctttaaagaggcaactcccaaatttacaagggaatagattctggtatctcagcctctcagcccttcctgttgatgacataagcccttggaagaaaagagaacmcaccctccttggttccttctgaatgtttttctttggcttctcttctgccagttctgaggcaaagacacgacaaaacmcctgtacctgaaaagcaaaagaaatgtgtcaagtccccttcgcccaggaaaacatcaagctttggcagctgttctccagttgcacggaggaacgtgcgtctcaagacaccagctctgcagagcccttgctcccaaactccttgtggttttatttmtacgtatttccatatttcattcctstacgtcactgctgcatccatgtggcagcacgtgaccaaatggtacaggttttactatggacgccaggtcaggcgccaccacgcagaacaaagccagttccgtaagctgcctccgatamgcattgctgaagtgacattttacccagggtgtgccattgcagtgatacaaatatatttttttcctrgrctaaaaaaaaaaaaaaaaa

SEQ ID NO: 5568 - DNA, 518 bp, Rattus norvegicus
cacgaggtttactgtgcaatttacttttggacattgagaacttgaaattatttcctgatcccttccccttccactattaataattcatttctgtcaaactgtaagagtaggactcatttttttttttagtttttaacattggactgttatttcatttagagttctctatctctaaatatttrkttagagamtgattttcaaagggartgatatgcttgtttaartgaaagagaaaagctgtagtaaactgtgtwaawtggtaatgastatttatcgwcgatactctgtagctgtgtaagttttgacaaatagtgtatctcgtggaatcagtggttagcaktgccgstattatatttastcattttatcattataaatgtgmttagttcatcatgtarmawmamwwrwmwmamgtctcattttttccttgcatgtcacaagtctcagatcatttataatacattaacagtaaataatatctatgttaatttctttcaccatgctgtctcagagtcagca

SEQ ID NO: 5569 - DNA, 518 bp, Rattus norvegicus; identical to SEQ ID NO: 1473

SEQ ID NO: 5570 - DNA, 600 bp, Rattus norvegicus
tgcccgagctgcccttggctgtgggctgcattctacggctacccttcaggagagaaacacagcttccgtgggagacgcgatgccagtcttctttgggtctgtttcccgttccatctgcgctgagttttctgatgcctggcctctgatgcagaatcctctgggtggtgacagctctctctgtgactcttatcctgaactcactggagaagatatcaattccctcaatcccgaaaatgaaagctcaacatctgtggattccaatggtggtcaggatctggctggggcagctgctccagattcttctggagatttttcagaaaatactgactcacctagatatggtgacgccgatacggtctgggagcaaaccctagctcargatgctcaaaggactccaagcagagagggctgggaagccagtgaaaacctgaatctagccacgtccacagccttccaggatgcctgaaggccatcttcctgacatggaggtgtgggtctggacacgcctctggtgagtcttacagactgagcagtcttgaccttctacggtgtctggaaggaaaaataaatatgaagcaaactgaaaaaaaaaaaaaaaaa

SEQ ID NO: 5571 - DNA, 586 bp, Rattus norvegicus; identical to SEQ ID NO: 1475

SEQ ID NO: 5572 - DNA, 530 bp, Rattus norvegicus
cacgagggttcctgactcagcactatgatgccaagcccaagggtcgggatgccagatactgcsmaagwatkmkgasgagragagscctaacctcgccctgcaaagaggtcaacacctttatccatggcaacaagggcagcatcaaggccatctgtggcgcgaatggaagcccttacggagaaaacttaagamtaagccagtctcccttccagatcaccacctgcaagcatacaggagggtctccccggcccccttgccggtaccgagcctctgcagggttcagacatgttgttattgcctgtgaaaatggcttgcctgtccactttgatgagtcttttatcagtctctagtcagcaggcccccggcgcagacttaactctgttctctttttatctcctctcaccccagaacactgacatccattgtcaggggctagaaaatttactatcwgaaacatatgtctcccgacttacaaaacacaggaataaagatttctcaaaagccaaaaaaaaaaaaaaaaaaaaaaaaac

SEQ ID NO: 5573 - DNA, 600 bp, Rattus norvegicus
  misc_feature (581)..(581): n is a, c, g, or t
agaggccatgaagagactctcctatattagccagaaggttgcagatgccagtgacaagacccagcaagcagaaacggccctggggagcgccactgctgacacccaacgggcaaagaacgcagctacggaggccctagagatcmccagcgagatagagcaggagatagggagtctgaacttggaagccaatgtgacagcagatggggccttggccatggaaaagggactgsccactctgaagagcgagatgagagaggtggaaggggagttggccaggaaggagcttgagttccacacggataaagactccttgcagctggtgattactgaagcccagcaagctgatgccagagccaagagcacgggagttacgatccaagacacgctcaacacattggaaggcatcctgcgcctaatagaccagcctgatgctgtggatgaagagggggctgcattcacctggcctggacctgggtccctccgcatcctgtaaatatgtcatctgggctggggtggggaggcagggcccggggcccacattaaagattaaagatacgttctgggcttccatagagctcacnccaaaaaaaaaaaaaaaaa

SEQ ID NO: 5574 - DNA, 600 bp, Rattus norvegicus
ctgcgtctagctgagatgctgactgtccctgcagggaaagagttagaatggagaataaagccctacagaagcagtttcccaatgaagccctgttgcccctgtcagctaatcctcagccaaagaagggatgcttgactcaatttccatggagtcaccagtgagagacacggatgaccccatgggcagagtgggagagtctccgtgagctctcctgggccttcgtwtgcttctggggccctttcattgtcttcgttwacacgtctgccaaagggggtggaaccgtacttcgttttacaggtaaatttcaaggcacaatcagttkktaagaaagtgsttcaagaccctaggcaacatgacagttmtcagttccctctgaattttagtctctgtwacagggcgctctttmtcagatgagcacgctgcaggatgaaaytcaggcgcctcatgcccaggcctrctgtcttgagtacaaatgtgaatggtggactgactgcttgttkccaaactggaaatgttctgtaggggtttactggcatggtatcattcctaggaagaagaagagggaaaaaaaagaggaaaaargaaaaaaaaaaaaaaaaa

SEQ ID NO: 5575 - DNA, 600 bp, Rattus norvegicus
  misc_feature (502)..(502): n is a, c, g, or t
  misc_feature (522)..(522): n is a, c, g, or t
  misc_feature (529)..(529): n is a, c, g, or t
  misc_feature (534)..(535): n is a, c, g, or t
  misc_feature (553)..(553): n is a, c, g, or t
  misc_feature (574)..(574): n is a, c, g, or t
ggtggcgggtctgtgccctcggccttccccctcccaccctccttcctcagcttcccgctccctcccccgcccgccctgcgctgccagcagggactgctgcccggagctcttcggagacctcaggtggtggatacttattctgttgggaaatacagcaagagtatttgtgagcagaaagtatgcctcccaagttcaagcgccacctaaatgacgatgacgtcactgggtctgtgaaaagtgagaggagaaatcttttggaagatgattcagatgaagaagaggacttttttctacggggaccatctggaccaagatttggacccakaaacgataaaattaagcatgttcagaatcaggtggacgaagttattgatgtaatgcaagagaatattaccaargtaattgaaagaggagagaggctagatgaactacaggacaaatcagaaagcttatcggataatgcaactgctttcagcaacagatccaaacagcttcsaaggcnaatgtggtggcgtggatgcnaaataanagccnntcatggctttggctgcanctatccttttgctaatgattntcattcttatagttgtgaaataccgt

SEQ ID NO: 5576 - DNA, 567 bp, Rattus norvegicus; identical to SEQ ID NO: 1480

SEQ ID NO: 5577 - DNA, 600 bp, Rattus norvegicus
agcacaagccactggatctgtccgattctacattgtcttacactgaaaccgaggccaccaactccctcatcactgctccgggtgaattctcagatgccagcatgtctccagatgccaccaagccaagccactggtgcagcgtggcatactgggagcaccggacacgcgtgggccgcctctatgcggtgtatgaccaggctgtcagcatcttctacgacctacctcagggcagcggcttctgcctgggccagctcaacctggagcagcgcagtgagtcggtgcggcgcacacggagcaagatcggttttggcatcctgctcagcaaggagcccgatggcgtgtgggcctacaaccggggcgagcaccccatcttcgtcaactccccgacgctggatgcgcccggaggccgcgccctggtcgtgcgcaaggtgccaccgggctactccatcaaggtgttcgactttgagcgctcaaggctgctgcagcacgcagacgccgctcatggcccctatgacccgcacagcgtgcgcatcagcttcgccaagggctggggaccctgctactcgcgacagttcatcacctcctgcccctgttgggtgg

SEQ ID NO: 5578 - DNA, 600 bp, Rattus norvegicus
catttttgttctaaaatatgtttacatacaatcaaagtagaacatgcaamttacactttwaaaaaggcttttaaaaaccacttatgaatacaaactaaaaattagccagaaggactcgtaagacaatcttgtgcccattttttgaaatatatatgtacatatttaacacatcatgtgcatttattattatttaagaaatagatttcttttttaaaaaaggaagaaaaagaaagacaccaatccagggcagaactacccttccaggtcgaccagttggcagctcttcggttttcccctctttagtgtttgttatacctgggcaagtgggagacagatatccaggaagtttcttccttggtttctatgtgcttctatgactgttccccaagtgacagagtccaacagggaaggcaggctcctcagtgggtgaactctcttagaaacacgaggcagagggagccttgctttgtggaaagaaacgtgaagaaacaccaagaagatgctacggtatattacagtttgagtttctaggcactgtgatgacattatctgtaagtgctggcatttggaccattgtgatatgatagggtagtcctcgtg

SEQ ID NO: 5579 - DNA, 600 bp, Rattus norvegicus
atttactttgccgaaaactcttccaaaagcaatcagtatgtttatggaattggaggaggaacaggctgccccacacacaaagataggtcatgttacgtatgtcacagacaaatgcttttctgtagagtgacccttggaaagtcttttctgcaattcagcaccatgaaaatggcccatgcgcctccaggacatcactcagtcatcggtagaccaagtgtcaatgggctggcgtatgctgaatatgtcatctacagaggggaacagaaggccgagtgcatactgcctggacaccactggctcctgaggctggaggaattccttagggaacaagcacttggtgacgataccttgcccctaaaggcggtcttccttgcaatactgggggaacagacctctgtgcttatctctaacccccctttccccatgcttttacctagccgtctactgaacagattctgtactctcctaccaaccgtctctccccaatgagctcccttttccaactggacagccccgggacatccattgactttttttttccattcagaaaagtcctctgcctcaaaaaaaaaaaaaagtttctcttgttcttctacctca

SEQ ID NO: 5580 - DNA, 957 bp, Rattus norvegicus
cacgaggggagtgggctctggcaccatggcgagcacggccgtcagagtcgccgggcggcggctgagccagcaaagcgcatccggagcgccggtcctcctgcgtcagatgtttgagcccaagagctgcacctacacctacctgctgggtgaccgggactcccgagaggccatcctgatcgaccctgttctggagacagcgcaccgggatgctcagctgattaaggagctggggctgaagctgctctatgcggtgaacacccactgccatgctgatcacatcacgggctcaggggttctccgatccctcctcccgggctgtcagtccgtcatctctcgcctcagcggagctcaggctgatttgcatatcggggaaggtgattccatcccctttggacgctttgctttggagactcgggccagccctggccacaccccaggctgtgtcacctttgtcctgaatgaccagagcatggctttcactggrgatgccctactgatccgagggtgtggacgaacagacttccaacaaggttgmgcgaagactttgtaccactcagtgcacgagaagatcttcacacttccaggcaactgtstaatctaccctgstcatgattaccacgggctcacagtttytactgtgraggaggaacggactytgaacccacggstcactmtcagctgtgaggagtttatcaaggtcatggacaacctgaacttgcccaagccacatcagwtrgacattgccgtkcstgcaaatrtgcgstgtggggkccwgastccrcsttcstgattcatcccagccagctgstcacrkccgttaagaargcvctaggtggggtraggggasgsgtgtcaccccagggcctctytcctytcctacccctactstcaccagstacttcagcttyttaaataaagtttactttgattttgcmmwrraaaaaaaaaaaaaaaaaa

SEQ ID NO: 5581 - DNA, 600 bp, Rattus norvegicus
acgaggctttcttttcctctgggtcacaggcagggccatggaattgggcagagaatgtctgaacctctggggttacgagcgggtggacgagatcatctgggtgaagaccaatcagctgcagcgcatcatcaggacaggccggacaggccactggctgaaccacgggaaggagcactgyttggttggtgtcaaaggaaatccccaaggcttcaaccagggtmtggattgcgatgtgattgtagctgaggttcgttccaccagtcacaaaccagatgaaatatatggcatgattgagagacwgkcccctggcacccgaaagattgagttatttggacgaccacacaatgtgcagcccaactggattactcttggaaaccaactggatgggatacaccttctggacccagatgtggttgcccggtttaagcacaggtatccagatggtgtcatctctaaacctaagaacttataggagacattgagagccgtggctccacaggctgcctgaagagaagtgcttatgcagtgtcccccaccctgtacataaataaaagtctgtattmtamttggmawwwwwaarwraaaaaaaaaaaaaaaaaa

SEQ ID NO: 5582 - DNA, 381 bp, Rattus norvegicus
tacactttccagatgaaacaaaaccaccactgtactctgtcgccttcagcgaccaccttcccatacgtgcccaaaggtaaacaggagacacaaggacaaacactgcggtttaaccttcttattgttattttttgtttgtttgtttctattttggctttttgagttgagtgcagagcagtcggttgattttggagcaatctagaactctgctctgctcgtttgctttgcctggctgtctttcctggccttgtatatcctatctgagccatgtcggaagcacgtctccgttgtgtttaatttatttcaatgtagcttattttcatataagttatgacatttaaacaatctcagtcttgtgaataataaaaaaaaaggcaagga

SEQ ID NO: 5583 - DNA, 600 bp, Rattus norvegicus
gggcccgggatggacattcagcttgtgtcctgggcaagatcatgtacatttttgggggatatgaacagctggccgactgctcttgtcttcattgcccctgcccatctcacctgccttcccctttggaccctggactcagtatacctycacgtggagttgatggactagaggtsttttctgtrctgtgaattcagtggggagttgttggggrgaggsccatttsyctcctccmytggvccgagggcccyktccmttggtgckctgtcsccatccacstccctccastgstcvtgggcctttgctctgccccaggccaghtgggtasccaggctgtgctgaaaagggacaggastggggagaagaagccagcagtgtcggagcbtcaggagcttcccthtccccgtgaccaccstctccmtgmttgagcatcgsccgggagctgcraggagcmtcagctgttggcatgaaaccccctccccaactcscggtggtggggaccaayagrcagcttcacccttccttgagctgttgctgtacccctgaagctcagccagctctgactttataaaacataaamcctcwaaaaaaaaaaaaaaaaaa

SEQ ID NO: 5584 - DNA, 588 bp, Rattus norvegicus; identical to SEQ ID NO: 1488

SEQ ID NO: 5585 - DNA, 836 bp, Rattus norvegicus
agttatttcacgaggaatatacctgacgagtacctctcaagctagtttttctagctgaataaatgggtgtaaataattttatggtggaaaagtactctgctatctattatgcttttgttcattgtgcataattataaaataattttaataatctttgtttccatgatcacttgatgtaaattagataaactgtaggtagggctttatacccttgttaattttgttttcaggtactgttgacatacattttctatawtttgaactggcattgtttggtacaacattaaggaatattatgatttgggtttttaagaaaataacattaaatgcaataattttatttatcaaawamwwwrwawawmmwtattttcctttgaacagtattataatgttatacagagctgtaatttatatattgcatgtataaatgttgaaaatcagctgcaatgacaacttcgtgtgacaagaactaggattagtagcttttccctttcattacagatgtcaagatgttaacagtgttcatccttaaaatccattttcaaatgcagaaagccttcagttttaatggatgttttaagtgattctttaaaatttctctgttttgtttttgtttygtttttaatcyyacataatataatgcagggtacccattctttcagctagataacattactgattgattacaaaccaagatatacatatttttgtttgtgatactggttgatttgtttaaagaaataattgcatattgtattttatggggaaaaacaacatctcacagtttaaaatacattaaatttttccmccmttgwwatawaamaaaaaaaaaaaaa

SEQ ID NO: 5586 - DNA, 600 bp, Rattus norvegicus
accagttaaagggtttcaacatcacgttcccaaaccttccgatttccattggttatgcttcccacaggccargcagaaacagacaccaaaacttgggctragggtcctaccatgtggagaactagggaaaacaaaactttttttgttttytttgkttywgttttkgkttttgtttttttgcaccttattgaaaagaaacttttaagcgcatacatagctwagagctttttctcgtgacaggaggacgtctccatatcgtaatactctctgtaaccccagtgtaaaatgtacttgcactagcttttttaaaacaaatattaaaaaaaatggaagaattcatattctattttctaatcgtggtgtgtctatttgtaggawacactcgagtctgtttattgaattttatggtccctttctttgatggtgcttgcaggttttctaggtagaaattatttcattattataataaaacaatgtttgattcaaaatttgaacaaaattgttttaaataaattgtctgtataccagtacaagtttattgtataatactcgtactactaataaaataacagtgccaattgcaaaaaaaaaaaaaaaaaa

SEQ ID NO: 5587 - DNA, 526 bp, Rattus norvegicus
  misc_feature (33)..(33): n is a, c, g, or t
acttttgcttcggctcactcagcactatcggcntaggagacttgctgcctgcccagggaagaggcctgcatccagccatttatcgccttgggcagtttgcacttcttggttacttgctcctggggctcctggccatgttgttagcagtagagacgttctcagagctgccacaggtccgagccgtggtgaaattctttggscccagtagctctagaccmgatgaagaccgagatgkcatcmtagsccaagatgagctggctctgagcaccatgccrcctgacsccccartcaagggacaawccatcccggcatyagcatcacaacagacaccagcttgctgatgcaagtaaggtgacagcaacccagttccatcattggaggaccttgagcaggasgccmtaaggaggcctgaagagcacagggggaaggggttatgggaatgaagatgtcatgggatgatgccaatgttaaaaattaaatggaytgctykacmccaaaaamaaaaaaaamaaaccagtggcggccg

SEQ ID NO: 5588 - DNA, 600 bp, Rattus norvegicus
satyrggyagmkgcggcakctgyggaggcgatggcagggaaagaattggagcgatgccagcggcaggcagaccaagtgacggaaatcatgctcaacaatttcgacaaggtcctggaacrcgakgggaagctgtcagagttgcagcagcgctcagaccagctcctggacatgagttctgccttcagcaagacaaccaagactttagcccagcagaagcgctgggagaatatccggtgccgggtmtacctggggctagccgtggctggsgsymttctcctcaycctgrdtgtgcytmtggtmatctttcttccgagtggagaggacagtagkaaaccayaggcctaggakgcaggcacggccytakggactggggcctgacccascctggcctgaaggaaasgctgaatggctgcactggcctgttctggtctccakagaatcctggtgtttgcttccatctaggacaccccastgactgctgaagggcatgctggatatgtgcacytctgcgtctcccatcatgccayggactggscctattgggccacaccactggagctcagtaaaagctgctgttkggttaaaaaaaammwmrwraaa

SEQ ID NO: 5589 - DNA, 600 bp, Rattus norvegicus
ttcytgagacagactatgagtgttcaaattccaccacctgcatgaccgtkkcctgccctcggcagcgctactttgccaactgcactgtgcgcgaccacattcattgcttgggtaaccggactttccytaaactgytgtactgcaactggactggaggctacaagtggtcgacggctctggctytgagcatcacccttgggggctttggagcgratcgcttctacctgggccagtggcgtgaaggcctcggcaagctcttcagctttggtggtctgggaatatggaccctaatcgacgtcttgctgattggagttggctatgtggggccagcggatggctctttgtacatttagtgwggwtatgtgcttcagagagcagtgcgtakagtcctttgtgcgaggtggacatggtgtaagaggggtatwtatgtttttaatgtacagcatctgtmcttggctwgccttgatgaaggtaaaataaagaaatggaacactgaaaaaaaaaaamawmmmmtacaaaaaattaaacttattaccaatctttataatatgaacacatttatcaccatacttccactattgttacatgagggtaacaacg

SEQ ID NO: 5590 - DNA, 536 bp, Rattus norvegicus
ctgtgggcctgagacacactggttacgtcattgaactgcagcatgttgtcaggggctccagtggctgtgtggaatgcttgsaggtgacctgtagacgagctgatgctggagagaagcccaaggcctttattcactgggtgtcacasccthtggtgtgtgagattcgcctctatgagmgactatyccagcacamgamccytgamgaccctgtmgaagtgcctggtggmttcctaagtgmsttgaacssggcatcahtrcamgtgmttaamggagcgttggtggactgctytgtggctttggcarasccctttgacaagtyscagkttgagsgccytgggkacttykctgtggatccggatasccwtcaaggacagkttgtctkcaaccgaacaktcacactcaaagaagacycaggcaaagtmtsaactkaatacatgtgsccctacctcattmtggaggmtgggggtgccctcaccaccccacactccatttcaataaagagtawttaaatcccmmwrvmramaraaaaaaaaaaa

SEQ ID NO: 5591 - DNA, 578 bp, Rattus norvegicus; identical to SEQ ID NO: 1495

SEQ ID NO: 5592 - DNA, 505 bp, Rattus norvegicus
atctgcacaaaagagcaagcaggaccgaacccagtgaaattcttcaaggggctgatcacagtcaagcctacctcttcaagcctgggctaaggatgccccaggtcaggaagatgctgccstatacttcccagccgccccagaamccatgskrsagaskacttccccaccagccttaagatccctgttgagtgtaaacttaggctggacccaagaattcagatamtaggttcagtgaaaggagtgttggtcacarccctctacacacagtctaaggggctatgggaaagtaactctctccaacaccatctatctaaaccctagagtaaagaagacattgtggactagcaacggtatggttgaacaggttcacatatactcagcaagcacatcaaacactcactgaaacagatgccgatatgagccttggccatgtcctatgtgaatccagtyttacaayaaaaggagaaagccctggrawwddwwwdwrraaaaaaaaaaaaaaaaa

SEQ ID NO: 5593 - DNA, 600 bp, Rattus norvegicus
atccttttgtgtatcacaatttgggtaaaattaaacactttttcaaactatataagaaagtcactttattacactaagatatccctaaggcgctttatgtttgtaaaactggtggtccatttttaatattatgagatgaggactgtgtcaacatsgtaaaacttaacatatgacctaaacttctattttcttatggcagaaaaatattaaatgtatactgactcctagaaatttatttatttaaacttgctgtatatagaatagctacttatacattaaatattttaagttascctktgaaaaggaaatttgggcctaaaaaatgttaatttcattggataaaagtggtaccagactgccagattatcagacatgtgaacctttgtctctctttgaaaaattataaactattgttaagatatgaagtttttgtatactttttgtttataaactaatttgtttcagtttgttttggttaaaaagaaagcaccactaaattgtacatatgtattatataaacttaatsttttaatactgtttacttttagcccatagtttaaaaaataaaattaaaaaaarttwaaaaaaaaaaaaaaaaaa

SEQ ID NO: 5594 - DNA, 516 bp, Rattus norvegicus
caggagggaaccccagtccagggggtgcacctgcatccaagtcctgttgcatccagtagctgagcacactgccagcagggggcacggcgctcaggaaggaagaggtcacgaaggccactagacagttaaagactcaggagttgagaggtggcggcagacacagcaggcatctatatcatcaaatggtcttagacgttgtttctgctttgtywtgttwtgtywtgctttgtyttagacagctctgtctggcctgaaactctctatgtarccggtgttggccttgaactcacagacatccacctgcctctgtgttmtgagtgctgggwccacacatgcacccccacataggtcttagagattgtttttmatcttaaaaagtccattgaatttagcccaawwwwmwawmmmramwtgttaatttttctgttcttatgatgcttgtgattcttataagctctttaaacttagtgttttcttataaaagtgtttgctaatctcaaaaaaaaaaaaaaaaaa

SEQ ID NO: 5595 - DNA, 675 bp, Rattus norvegicus
cacgaggcgggttttaatttggtgttctgtaccccgattgagatgcagtatttgatgtaaagagagaattctggtmayrwskcaagaactagatattgctgtaaagcagactctgcggctatccttgaagccttgtgtttgtatgcctttgggcatttccctcatgctgtgaaagttctaaatgtttataaaggtagaatggcagattgaaatcagacactgmacaagcggagckgggcaacaccgggaagcatttatgaggaaatgccacacagcatgaattattttcaagattggcaggcagcaaaataaatagtgttaggagccaagaaaagaatattttgcctggttaaggggcacactggagtcagtagcccttgagccactgacaacagtgctcttctggcaaagtcttttgatttgttcataaatgtattaacggacattagagaaaagcttacagctagacttctgttgttatcactgtagctctgcttccttctaaataaagctcattgttggacgccccammwmmawwmaraaawaaatytsgckcgcwgtattsmcyaggaaaagaaagcattgaagtatgcatgtgtgcaccagggtgttattttaaagagatgtgtaactctataaaagactatagtttacaggaaaaaaaaaaaaaaaaaa

SEQ ID NO: 5596 - DNA, 600 bp, Rattus norvegicus
ctytcscttgggtctcytgagascsgagctrttggacttcctttgsggttaagtgcaggmagacsctgttcccttacagggagtgaagggagttcwagggcttggggaagaccmtgggggccaggcaacsscatckwsscysagttgaccctgtaagsccatgggtgagtgagtttgcctcattctggccmtgagtctatggcagctgcctccagggagatggggggctacatytgggctbtagagccccagctctytmccatccaagtgaccagatacccaactcacccgtcttcacccttagcaaaatgtattaaaaggctgargtgttrmmrwrraaammwwrrwvhwmwrmramtgcggtggcaaatgggtcagtggcttgggcgagggagaatggctcacagaggacaaaatggagaaagggcaggaggaagagatacagaaagagacagcccaacatgcaggcaggagaaatgggcttaggagagactgatcctgaggtggagcatggggcacttgagtgtgttagtttgaagtgggaaggatccttgttcaaattagtaaaggcgctcaatcctcaaaaaaaaaaaaaaaaaa

SEQ ID NO: 5597 - DNA, 498 bp, Rattus norvegicus
cccctcgcagtacatgaaggatctggacagtgccttggtgcctgtcatccatggaggagcctgccagctcagcgagggcccagtcggcatcgagctcatcttttacatcctggagaacatcgcgtagatggcactccgtctgttctgttcagacctgcagcagcagtcatatccaaaccatttgcackttramrctkgaagattmagckttkgytawcacwgksagsarggagggtggttgggggacagatgatccatgattctaagtcttctatgcattctccaagaagacctgggcagcttcctactgcacaacagatatgctatctttgcagctaactcccttctgttactgtctagacaagaattctgctcctctcttacgatgacttccggtcatgtgctcagatgaatgctcatatgggtacagccatcaccaaggtcacggtgggggagaaaggaaataaacaatgaatcatcaaaaaaaaaaaaaaaaaa

SEQ ID NO: 5598 - DNA, 565 bp, Rattus norvegicus
tacagcaagacgtctcttgccttttgttaatgcattgttgtaaagtatttgatgtacattacagattaaagacgaagagtgcattgtgtatattacaccaatgccactgtgtttcctcatcaatggttctaaatattgctccaatctcaaacttttgaaagatgtatgggtttccagttttcttttyttttctttctcccagtatgttttaacaaaaaaggaaaaaaaaacaggaaaaaaaaggaatatttagcagtattgttcgttctgatatgtgatttgtttgtggmaactaaacgcggcatccagcagtttctcccgagctgacacgtcattccacacccctcgtcaacaaaatgctttttcactgcctaaaattttagatgtagatatttgaaatagattttttttcakttataccagttttctttatgatgatacagtgttaaaagaaaataaattacaattgatctgtcaaaaaaaaaaaaaaaaaaaaaaaaactctagcggccgcaagcttattccctttagtgagggttaattttagcttggcactggccgtcgt

SEQ ID NO: 5599 - DNA, 421 bp, Rattus norvegicus
gccacagccacaaccttatgcagtgcatggccactttcagcccactcagacagggttcctccagcccggtagtgccctctctttgcaaaaacagatggagcatgccaaccagcagactagcttmtctgactcatmttmtctgcggcccatgcatccccaagctctgcatccagcccctggactcctggcttctcytcagctccctgtacagatacaagcagccggraagtcaggctttgccaccaccagccaaccgggccmtmraytccytttcatccaacacagccagaacccasgattbwatcacaagwaaccaccagataactccaacccaccctccatccctcagggtgggttytwatgtgtcccaaacgaataaaatgtacaaaatctammwammawmaaaaaaaaaaaaaaaaaa

SEQ ID NO: 5600 - DNA, 688 bp, Rattus norvegicus; identical to SEQ ID NO: 1504

SEQ ID NO: 5601 - DNA, 500 bp, Rattus norvegicus
ggcacgagaccacattccgtaagcccgaggtgtggtcggacaacttcatggatttcgtgaagcagtgtctggtaaaaagcccggagcagagagccacagccactcagctcctccagcacccgtttgttaagagcgccaagggagcggccatactgcgagacttaattaacgaggccatggacgtgaaactgaagcgccaggaagcccagcagcgggcagtggaccaggacgacgatgagaactcagaggaggatgaaatggactctggcacgatggttcgagctgcgggtgatgacatgggcactgtccgagtagccagcacgatgagcggcggagccaatactatgattgagcacggtgacacattgccatcccagctgggtaccatggtgatcaacacggaggatgaggaagaggaaggaaccatgaaaaggagagatgagaccatgcagcctgcaaaaccgtcttttcttgaatactttgaacaaaaaaaaaaaaaa

SEQ ID NO: 5602 - DNA, 517 bp, Rattus norvegicus
attcggcacgaggagcggatgaagctgcccagctctgtgggtcagaagaagatcaaggcgctggaacagatgctgctggaacttggtgtggagctgagccctacgcccacagaggagctgktgcatatgttcaatgagttgcggagtgacctggtgttactytacgagctcaagcaggcctgtgccaactgtgaatatgagctgcagatgctacggcaccggcatgaggctctggctcgggcaggagtgctggggggccctgccacaccagcagtgggaccaaccccagcgtctgctgagccaacagtgtctgaatctggacttggtcttgaccctagcaaggacaccatcattgatgtcgtgggtgcaccgctcacacccaattcgcggaaacgacgggaatcagcctccagctcatcttctgtgaagaaagccaagaaaccataaggggccatcagagttggtggtatggtgtaaatagagctgttaagttggmmwrmaaaaaaaaaaaaaaaaa

SEQ ID NO: 5603 - DNA, 516 bp, Rattus norvegicus
aaggtggagcgggaactcaccccggagctgctgcaggagtggctggatgagctgtcggaggtcatgcttgtggtccacgtgccccgctkscrcaksgaggacagcttcagtctgaaggagcagctgcaagacatgggccttgttgatctcttcagccctgagaagtcccaactcccagggatcattgctgaaggcagggacgacctctttgtctccgatgcattccacaaagcrtttcttgaggtaaatgaggaaggcagtgaagcagcagcgagtacttctgtcgtgattactggccggtcactgaaccccagtagggtgaccttcaaggccaacaggcccttcctggttcttataagggaagtcgcactgaacactattatattcatggggaragtgtctaatccttgtgtgaactaaaatattcttaatctttgcaccttttcctatctckgtgtttgttaatggaagtaaaaataaatatgactgccacctcacaaaaaaaaaaaaaaaaaa

SEQ ID NO: 5604 - DNA, 463 bp, Rattus norvegicus
attgttcttcaaaggtctcattggcaacgtacggatcgacagtgtcatcccacacattttaaaaatggagcctgcagattacaactctcaaataattgktcacascctttgaaagtggaggtcaccctgctccaggctaagtttaccgttccttctcggaacacatgaaaccaaatcgaactgtttcttccagggcatctgcgaatattaactttaagagtawccaaaatcaaaagtatttttcttttggattccttaagaagaatttaagtgaccaggcaggggtcaggaattatactaccctgtctgtcctataggaatgaatcaacaatggtacggggctgttcttggggaggatgacacttaagactctctcctcctgactgtytacactaagctttstcattstattttataaaacaaataaactagtctttcccccctgaaaaaaaaaaaaaaaaaa

SEQ ID NO: 5605 - DNA, 571 bp, Rattus norvegicus
gctccacctggatccagttgcaaagtgtgtttggaaaagttcttggttttaytggattctcagggagccctctgtgsccttttcctttatyktgagtgctgtttcctttmtaggaaagagcagcactktggacatbtgttttttcsscayrgcaygttaggaaggacgtgctgggcttccagttgcsttaatagargtactcaagtctcttgggtagagatytggaagcccccgggacaggaggggcamgtrttttcattcgaaaacttttwtgattaagsgactcttwacaaactgctatcttgagttytagtgccatgtasctgtagktcactgctttcctggtggatgagactttcttagrataacttctstgctgctktgccctgrccaaggctgccyttccccaagagkttarctgtgggattggaagatgagattyttgtaatatttctgtacagacctgtttccagcaacttcagtgtcaatgtttttgatttatbtgtagctcatagctstagctgytaataaagatcccatctcytgcwwdmwmwaaaaaaaaaaaaaaaaa

SEQ ID NO: 5606 - DNA, 600 bp, Rattus norvegicus
acgtaggtggccaggacaagattcggcccctctggagacactacttccagaatacccaaggcttgatatttgtggttgacagcaatgaccgggagcgagtgaacgaggcccgggaagagctgatgaggatgctggcggaggatgagctccgggatgctgtgctgcttgtgtttgcaaacaaacaggatttgccgaatgctatgaatgctgctgagatcacagacaagctgggcctgcactctctgcgccaccgcaattggtacattcaggccacctgtgccaccagcggggacgggctctatgaaggcttggactggctggccaatcagctcaaaaacaagaagtgagagccaggcagccctctctgmctaccccacscactcctgaaacatacctgwtgtctccktaccccaatttccccctttstkcctcatgaaatgtggscaaggtcctgggtgtcatgyccaytgcscagcaagcgcctttcctcctgagcctcccgccccsttccttgtgcaytgacrcggtcagcccccastgctgtcmtgatgatgagtcatkccaatykactgggtwtaaaccaraaaaaaaaaaaaaaaa

SEQ ID NO: 5607 - DNA, 600 bp, Rattus norvegicus
taaatgctggaacagaacccaggtcctctgtgagggcagaatggctcttaatctctgagtcctctctccagcccccacttctttcctttcatactagctgtgctgacgagcatgaagtaatactttcttggagccgtgtagctgtggattatgctaatttagtaagtgatggtttgtggttctctcacatccatgagttcactaaccctgaatagttagctaggttttcagtaggaagcctggtttccattttgttgagtggatttcaagtcccattaggagctattggttacaccaaccatgccattgctacaccctaacagttactgcaccagatcaacaacgaaaagcaggtttctcattcctgaaattgaaggattttgttaggtgatctttgactcttgatcattgtcagcccagataagaagattttatttaaactacatatgaatatttatacacacaattattcttattatactttttatttataattgcttatatttatttataagtttttatttacatttgtggttaatagaatgattccttataaccttttcagatatccttattgttaatttacctccatcctcttcc

SEQ ID NO: 5608 - DNA, 518 bp, Rattus norvegicus
gttggccctggtctccccaagctgctggaagcgaacattcgctgtcagggcaagcccctccactgaggacgcctctcccccaaattccagttcttacttgattttaaccattcaacttgctgttgggttttattctckrmykctkmtygttwtttttaggaccagttgtagtgaattgctactgaaagctaccccaggtgacacagagctctttkwaaaccgcagtcacacattagggttagtattaaactttgtttargtgtaccataattaacttggctagttgtttgaagtctatggaagaaatagttttatgcaaaattwwwwaaaaaagttccagtctgatcaggaagagggttcagtgcgttgggagccaggaasktggargagcctcasgtagagatgttgttcaccttgactgtgttatgcttgagcaagcccaggttgaccttgtgatgtgaattgacctgatcagactatattaaaaacgttagtmcgdwaaaaaaaaaaaaaaaaaa

SEQ ID NO: 5609 - DNA, 600 bp, Rattus norvegicus
atcgccacaccagctgtacggtgtctgacctcattgtgggtaatgagtactactwccgtgtcttcagcgagaacatctgtgscctcagtgactcgccaggtgtctccaagaacacagctcggatcctcaagacaggaatcaccttaaaacccatggartacaaagagcatgatttccggacagcccmtaagttcctgacccccmtgatggaccgggtagtggtggcaggatatgccgcagctytcaactgtgcagtcagaggccaccctaagcccaaggtggtgtggatgaagaacawgatggagatccacgaagatcccaaattcmtcataaccaastascagggcatcctgaccstgaacattcgccgaccttcacccttsgatgcagggacctattcctgccgtgcctkcaatgaacttrgggaggccmtggctgaatgcaaahtggatgtccgagtgccmcagtgacagctcatcacctgttaagtcatcagaacctggacaccagtcctggaacccttgggatgacagtcatctttytagaatgatcattgtgataaagtactgttgctcmawwwwraaaaaaaaaaaaaaaaaa

SEQ ID NO: 5610 - DNA, 501 bp, Rattus norvegicus
cgggtggaacgttaggttagtcccctggccagccagcctgtagttatctgtgtacacagtttacaggtacaaaaacttattttggtatttattacagaaaagtgttcagttaattgtgttattccttcagcaaatattsactgacacaaaatcctktgcagcattttacagcatatgcagcctygtgcaagtttagrtgagtggatttgtacatcttatggcgagtggccacccctgagatattacytcattatgcagaagtaacatatccttcatgamtattttgacaaaagcttaaaaccacatstgatggaagtccaactttcaggaaccaaggactgccagaaaatatctgcctytacgttatgcatgcatytagacgcttacctgaattstgccttttataaaggaacaaacagtatgaagaagtgaactgtacatttttaaacttgattgccattaaagcagaagttacaaggttgcwamaaaaaaaaaaaaaaa

SEQ ID NO: 5611 - DNA, 1175 bp, Rattus norvegicus; identical to SEQ ID NO: 1515
  misc_feature (79)..(79): n is a, c, g, or t

SEQ ID NO: 5612 - DNA, 504 bp, Rattus norvegicus
taacagatgccttggtgaccctcttagtgcccgtgctggtggctctgctgctcaccctgttgctggtttacattatgtgctgtcggcgtgaaggacggctgaagagagacatggccacytctgacatccagatgtttcaccactgctccatccacgggaatacggaagagcttcggcagatggcarscagccgcgaggtgccccggcmtctatccaccttgcccatgttcaacgtgcgtacaggagagcggttacctccccgagtagacagcgcacagatgcccctcatcctggaccagcahtgagagccctgccagctccagttgcaccactcagagctgctgacctgtgaacatagctacgactgatwccagctcctagtccacttggacctctggctccaaacaggcagatggatggtagyagggagrggcgtgggtgcttggagtcagcacccadgamtaaaaaattacctgctwmamwrvwaaaaaaaaaaaaaaaaaa

SEQ ID NO: 5613 - DNA, 600 bp, Rattus norvegicus
gcgaggggtggggkgagggggacamwykwsktttaaaaatactgaagctcgggacatttgctcttcagttcgtgtgctcttgagcacggtctgtctctsccagtatacgaacccgccctcacggtttcctctcctcctctcctcctccagttccttgggtaagtgtgtttccttcctgtrayycsgmwsgwggcscwstgcttcccccctcctyttccccttgscagykgcaatacccgggttctcttctctggggttctctcgggaagcctcgcccctgcctcggatgccstgcctsttgtccctcccagccttccccgcctgtgtactcttcctcgaccgccttgtttcttgttctctttttttcttaggaattmmcaagtgaattttattaatgkgggamwggawcmgatgyyaaaagctatscaggattytgkwtwtgtkttarawtktgtgtwccttccctttcctccctcttcccatgsgtgaaacgttvtgtgtaatyttcattaaattkggkacaaamccactcaccakarctgtggtgtcaraaaaataaatatattgtttctwacaaawmwraaaaaaaaaaaaaaaaaa

SEQ ID NO: 5614 - DNA, 1068 bp, Rattus norvegicus
  misc_feature (856)..(856): n is a, c, g, or t
  misc_feature (972)..(972): n is a, c, g, or t
cacgaggcaggsrgcggcggyrcgargctggsktcagccaacatgtactacarrkktagcagtttcacgcagaagktggctagtgcttgggcttcggaagcctatactccgcarggtkttaagccggtttccakrgaagcaccgcctatcatatttgccacaccgaccaaactgacctccagtgtgacagcatatgactatgctgggaagaataaagttccagagctacagagattcttccagaaggctgacggtgtgcccatccacctgaaacgaggccttccggaccaaatgctttaccggaccaccatggctctcacagtgggagggaccatstactgcctgatcgccctctacatggcctcgaagcccaaaaacaaatgaatttgcctgtgsasgaskggtttactttgtgacacaaacccyytgaattcatttcattttttccccccttggatmgkcwcswkracattttgcardcamaggaaaagataagaatmcmctggtttgtttatggcgtgcaratggcctgtcaratgtcagcttgtttwacagttagamctattgtttragraaatgachscaagccatsghtgagccatcgtgctcctggtytcccacgrgattbtgggtraaagttgttcacaaastcaytmwtggscagcagtgytcagggccyccgggactcggggggtgtytragtbtgaarcarrvaagcctkwtgggtgtaggtktgattgaggaaggrgdccaaakccagggcacaggtgggtgacatgagggcttragttwgccasccggggggttgctccmccttgcagaaaaatgstagtwgaaattatttgcagtytgcctntaawtgytgggcagtttgkwtcaaaggswtgtttgcctytcccagaccttwgggaagtgkgtytwtgtttmatcatgggaaagaacacctgtcagtgttgchctttwgamagctgnwccmgtaattytccbttaatmatsctgcggcwtgacgttwtgatttacttgactgcggaataaakwmwtgvgcaarrvmaaaaaaraaaaaaaaaa

SEQ ID NO: 5615 - DNA, 518 bp, Rattus norvegicus; identical to SEQ ID NO: 1519

SEQ ID NO: 5616 - DNA, 478 bp, Rattus norvegicus
cgttcatcttgtgacctgacccgtccttctgctgactgcctgctcatctgtgggctgagggaagggagaggaggggaaytagggcctcagagaccaacctgaggaagcagaactcagacytgggacagtgagtytggcttgtgatggggcagccttcmtactsctcacctccaccagtgcctttcgaagagagatattttgtgtacacagaagccattccgaggctgggacctgaccctgtggggatccatcccatckccagtcaacagcagagctgccacrcmtcctggaggcccmtaagccaccctgagatctctgcagatggagtcttctggktcastggcaagaggaggaagaggagcctttctgttcactctccyttgggccmygagggctgtctgggctctctcctcctctctctccttcctmwtgataataaacascctrtgagcacwwwrrmaaaaaaaaaaaaaaaaaa

SEQ ID NO: 5617 - DNA, 600 bp, Rattus norvegicus
  misc_feature (24)..(24): n is a, c, g, or t
ykywaasgggctgttctttawtanwgagtttcyywaaggggaaagtgcycartcccktggmamadttgtctgakccccahacarcatcccttccaasagccctcatcaraaaaahagtccccgcatycgcctgccgatgccttgtcggtcawacaggacgttgaacttgttcacaaactggktcattgkgttgcacgttttggwgatggtgccgakgtadgbcawaabccccacgtcattgcattgatcakaaaagkctgtyytgaacttgtcartgctgavaactggwaracagtggsatagggcatadgcctcccgcargatctyatggttgmagggaayctctcctgcttcaraggccttgacgtactctaaaatgagcttcacacrgstgtgcadcatcttgatggcgctgtgctgagctatgaggtgttcarccacagtggagttctccccactgcctgtagctgtcatccgggccacatggtctayaccgatacgttcagcttcctcagtggccagagtgtaagtgagttcagcaaacagcattgtggcctctccattgattatatcgatgacagactcaaaaacgccctcgtg

SEQ ID NO: 5618 - DNA, 600 bp, Rattus norvegicus
ctcaatcaagaccctgaacaagaagaggtggaactggcaccagtgggtgagggcgaagatggagctgctgacatccaagatcggatccaggccctggggcttcacttaycagacccaccaktggagagtgaggatgaagatgaggagggagctgcagcattgagcagccacagctccatccccatggacccagaacatgtggagctggtgaagaggacgatggctggagtgagcctgcctgcgccaggggttcccgcytgggctcgggagatatcagatgctmagtgggaagatgtggtgcagaaagccctccmrgcmcgrsrggcatcccctgcctggaagtgaccactcagagagctagctgcsttacctccctgcatwmcaggcccggaccagcacaggactaacagttbtggttttaacawccaccttmttcccatgtcctttttcacmccaaggcaagtcagacytmtcagagacccactttattcagttctgtacatatggggacattggcccaagcccagcccaccttagcctgtatcactmtgtggagaataaagcaccytwtgtmcmmmrmmvaaaaaaaaaaaaaaaaaa

SEQ ID NO: 5619 - DNA, 600 bp, Rattus norvegicus
gccagactctcaggcccatctgtctcccctgcacagagggaaccacccgagccttgcggcttcctcagacagccacctgcaaacagcacaaggaagagttgctccctatgaaggacgtcaaagctctgtttgtatccgaggaagggaagaagctgacccggaaggaggtgtacatcaagaatggggaaaagaaagccagttgtgagagagatgctacaaaggcccaargctatgagaaggtcaaagttgcctctgaggtggtcacccccaggttcctgtgcaccggaggggtagatccctatgctgaccccaacacatgcaaaggagactccgggggccctctcattgttcacaagagaagccgcttcattcaagttggtgtgatcagctggggagtagtggatgtctgcaaagacccgaggcggcaacagttggtgccctcctatgcccgggacttccacatcaatctcttccaggtgctgccctggctaaaggagaagctcaaagacgaggacttgggtttcttataaggagcttcstgctgggagggtgagggcagattaaagcagctmcaatmcaaawamaaaaaaaaaaaaaaaa

SEQ ID NO: 5620 - DNA, 580 bp, Rattus norvegicus
aattcggcacgaggcgtgctccaggatcacctgggctctctgctccgatagcccgagaaggacgccagggtttcccaggaatgagaggattgcctggtaccaaaggtgataagggagacattsstgytgkcattgcaggagaaaatggtctccstggccctccaggtcctcaagggcctccaggttatggcawgatgggtgcaaccgggccaatggvccagcaaggcattcctgggatccctggccccccggggcccatgggccagccagggaaggcagkccactgcaacccctcagaytgttttgggrccatkccaatggagcagcagtacccgcccwtaaaaagcatkaagggsccttttggttgaagctcctgctcgcactgagaggaaggactytaytaggaataaatggccaaagcttamarramwmwramarrwtgtgaatgtttrtactattsttgtgtttgttgttttgttsttgytgytgttaatattttktttaacaataaagaaagaaaactawhwrwaammmmamwhmcatggrkttccyctgrtgytgcaaaaaaaaaaaaaaaaaa

SEQ ID NO: 5621 - DNA, 600 bp, Rattus norvegicus
ctctaatccccattgctgtcttccccagctgggatgccacctttctggcctttctcctggaaatagctggggcatttgggtggctttcaagactggggcatggtaaaccagggccagagttggggagcttgsgactcaggtctgtaaytgcccagcccccttctctgctcttgtttccctccactgccacccaytcacggcccctcccccaacaccggaggrggtgttgattcctcctcacaaaagatagagccagggcgagtgaatcaggcaaagtgcttaccacaacgtgtgctgtgtgattgtgsccttgggagaacctgtttgtcaggactgaggtggcatttctatgtgcagcaacccttggtgtttcccttcctaagtggctctgggkgtgtgtgtgtgcctgtgtctgagtgaatatatgtgtgactgtggagtatgtgtggaaatayccgtggtttctacttctcctgggatgtcgacccaggaatagtggacatggtcacatcctctgtacagagctttcttttgtattaaaaaaaaatactctttcaataaatgtatcatttttgtgcmcaraaaaaaaaaaaaaaaaaa

SEQ ID NO: 5622 - DNA, 651 bp, Rattus norvegicus
ataggcggggcccgctggctattaagagcttggacagtcagtgkgtagggagagtactttgacagtgaggctggggagggaacattggcaaggaagggtaaattggtctgtggcacagtgacataamccaaagaggtcagttgggctagcatgtggaggatctgaggaaggaaggacgttagctgtgtgctaggtgacaagtttccactatggaagactagtgaacagagccaagtgttgaaagctgtaggccaaagtgctgatcaggaatgtgkgcassagaktctgtscggccctgtggtcgtagcatagcatcaaaagtttacacaaaagcctgtgytaagggaccctgcaaaccagctccagtgcaggcctccgttggcacactggctcccagccacctgtgtttggaacttccctgmtaagctcctccctcctcatgcccacattttgtccstctgagtctggtctcctacagtgcctctgctacccatgctttcctgttaagccccagctcacaaccctgctccatcctgcccaccagtgtgtttgctcataatctactgtgcgggtaaccacctcaaacctgtaatgagttataagccatacaataaaatattcatgrgtcmwwwwaaaaaaaaaaaaaaaaaa

SEQ ID NO: 5623 - DNA, 600 bp, Rattus norvegicus
ccatgctccaccaaggagccttggagaccacagcctgcggagcgtgtggatacagctctggccctggagaagcagccgtggtttcatggtcccctgagccgagtggaggccgagaaccttctgtccctctgcaaggaaggcagctaccttgtgcggctaagcgagaccagggctcaggactgcattctgtccctcagaagtaaccasskttcsatgcacytgmrrywcgmgragacccgggagamccaggtggtactaggacagcacagtgggcccttccccagcgtgcytgagctggtcctgcattacagtgcccgcccactgcytgtgcarggcattgagcacctggctytgctctaccctgtcaccagcagccagagctctcaaggaccytgcacattggctgctaggccagagaagggacagggggacccatgacatacagaaaggccctgytgccagacctgctgggttcaactgtggaatccacatggtkgcagctgaaagctgcaagttgacctctgatttacaaacaagtcacaggccataaattaataaataaatgtaataaaaattaatmctaaaaaaaaaaaaaaaaaa

SEQ ID NO: 5624 - DNA, 600 bp, Rattus norvegicus
aaagtttggtcggytggatttcgtttctccgcgcttctgtaagtccctgagtccgcgctaaggtgaccgtgccccywckdggwawbwyggsckrsactaatktcmcykmwggkswstgtgaggctcactgccctttttctgtaactatacctggctgctcactgcgctgctatgagactaggggtcctgtgccttytagatctttgtatcctcaaagcccagcacatagtaagtattcagtacttgtttmccatgagaatgaacatagaagtgtactttctgtctctccatgctgaaaccctttcggaaaccacgchtgattcgggcagcatgtagcagtatttatcttaggctgtctttmttgtccytggactcctccagacagcatggaggaaytctgttttaagattatcttggagtttaagtgattgccctggaaaaatgaaatgtaccamccatgtggaaatgacagctactgtacattatgtatgaaatgccaaataaagggacaagttgggrghtaaaaaaaaaaaaaaaaaaaaaaaaaaaaaaaaaaaaaaaaaaaaaataaagaaaaaaaaaaaaaaaaaaaaaaaaaaa

SEQ ID NO: 5625 - DNA, 777 bp, Rattus norvegicus
gggctcagtgctgacggatatgagaaatcttcggaacgaggagtgagaaccctgggctcgggctcaaggggaccagtattatgaagacctgtccacatggactctttcttcttcgtgtcgacttcttcaatgaaacgtctccctgcaaatgaagcattacttaaacmcgtagarcagcaactgtccttgtgggtcttgagttgacagctacagtaaacgaccgtaaggagcagttggggtgcaaggagctggggtgcagtgcccctaggacagatgtttgggaatcagcggcctccccgaggcccatagttccaggacacagccatgtctcagctgtcccaggaactctggtgcatctatagggctcttctgtctacctttcactyccccccaccccccatcagggktagtttagggttrgaagaggtcaacccagtgagccagccagctgccgtggggcaccagtcahtgcaccccccyttccccatgcctcctgcttatgtcacactgggaaccctttatagaccactggccctgtagtcaccatcacctgctgatcccaacagtcccccaccttcctgtggaatcctgggagcacccccccccttacccttagcacatcagcattcgtgagacttgcccttgtaacccctgactccttcagcccagaaccttgcggtcactctttatctaagtttgtagatggggcatagtgacttccagaaacccggcaagggaataaacataagatgtgctgtcaaaaaaaaaaaaaaamma

SEQ ID NO: 5626 - DNA, 792 bp, Rattus norvegicus
cacgagggsgascgggatagccaacggcctgtggagcaacatgcccaagttttattgtgactactgtgatacgtatcttacccacgattctccgtctgtraggaagacacactgyagtggtcggaaacacaaagagaatgtaaaagactattaccagaaatggatggaagaacaggcccagagcctgattgacaaaacaacggctgcatttcaacaagraaagatscctccagmtccgttctctgctcctycgcctgcaggggccawgatcccgccyccccccagtctcccgggtcctmctcggcctggcatgatgcctgcaccccacatgggaggccctcccatgatgccaatgatgggccmsmmtycksmtrsgakgatgcctgtgrgaccagctcctkggatgagwccacccwtgggagsccatatgcccatgatgcccgggcckccaatgatgagacctcccgcccgccytatgwtggtgcccacacggmytggcatgacccggccagacagmtaagagcagaagcgytcttymtccttktrtatttcttgttgtttcgccaggaratyttggtgcwrammmwragwrwwwmmtwkgygsmygatsaggaacttcccttcctaacagrgakaacgcttstggagggagaagtgstamaaaaaagtgcggttttcacytacwttgtgaaatgtgaaaataaagtcgycagctcttttdgtwaawwaaaaaaawwamwartagatttatttaaaagaaggtccaaccaagagacctttcgcggccgcaag

SEQ ID NO: 5627 - DNA, 600 bp, Rattus norvegicus
  misc_feature (14)..(14): n is a, c, g, or t
  misc_feature (212)..(212): n is a, c, g, or t
  misc_feature (309)..(309): n is a, c, g, or t
  misc_feature (311)..(311): n is a, c, g, or t
  misc_feature (315)..(315): n is a, c, g, or t
gcacgarcgahccntgcgsccthtgcagcbtgcwcagcatcggmragatcggtggygsccagaaccgcaabtacagyaagbtgytgtkyggmbtgctgymcrwtcgsbtgcamatcarcccggwccgggtytacatcawbtmttwsgrcwtgaacgswgccaacgtgggytgrwrygskkccrcywtsgyttgagbcckggcmycrmttacntgcaccghtstthttbgagyctygbtvcacgmmsygttbtgtgtwtawccaccsgtwaygatgkycmcmttccdgycgggagaaataaatgstttrnknhsmnmamamamararhaaaaavwvarcrrctcgargkgggrcccggtacccattcgccctatagtgagtcgattaccattcactggccgcggtttacaccgtcctcctgggcaaacctggcgttaccacattatctcctttgggaaatcccttttgccagtgggatatacgagagccggccagtgcctccacagtgcacctatgtgagtgcatgtagctacattgggaaccggtaattggaccctatatacctgtgcatggacctttttatatcacacggtgtgtctgg

SEQ ID NO: 5628 - DNA, 600 bp, Rattus norvegicus
tctagttgagcattkggggggggkctgggagttaagraagagatatggkatttgkaggagagggatcagaggtctggctgavmcavcartattaaagctaacagkatgtgaatgtcttccaraagaagttcttgcagccagctttgcgttccsggggtgccatggctgggttcgagttggcagacctctgcagctccagcctcawctcgtcstgctcagctgcctggggcaaatcctcaggctccagggcatcgttctckgtctggttgggctcrracagcasttctgccaagaagtwcytgsccagttccygtttccckgtggcagccsccakaswcttytgcagaamctgacggastcyggggtccragggcrccccggtgacrccgcccaaagccaggacgatgcakagcgcggmcagcgcgcactggagacggcaggacagcatctccyctgcctcagacagccgmgcttgagcgcsstsggycagtctagacgcaggtccgcagrcagcagagacgactccagtagcstctccttcagccgctatcgagctctccacggtctcccctttttaactctctctctgacgtcagcaag

SEQ ID NO: 5629 - DNA, 730 bp, Rattus norvegicus
ctttttacaaaagaaatgcagtgctaactttagttgagaatgagttcttgacaagatgtttcccaatacccaagatgccctaacgtaactagcaaatttattttagcgttttttgaggaaatsrygatskctttcttgaatgttgggtagaagtaaacaaagacatcaaacatcgaagtgaatccagcgttgctgttccaagtagccttggtggggcatgttagcagctggctcctgtgtgatctccagcwatcaaccaattggtgccctatgttcagagatgcccagtacagtgtccgkgcgactcatgtgtctattgtcgtgctatgaggagcaaggaggaagaagaatagtcctgaagcaggtgtggggaggtcaggaggatgtctgtgagaaggaagtcctgcagagagtggcattctggggaggaggaaaggcagggtgtggcttgtgtctgggtagagggtaggcatgtgacgtgtgccyggtgggaaaaataagtaggtggagagccagttascaggaaaaagattttgctccatatttaccaaaatgcaaagaaatttatattggraatgagtgaaatgaacttggacttttattgatgccctttttatgggggatgtaaggactttaaattgaaaagcatactaattgaaccttaataaatcattctcaatcagcmwwwrrmrawrwrararrmwmtatgctttaaaaaaaaaaaaaaaaa

SEQ ID NO: 5630 - DNA, 600 bp, Rattus norvegicus
  misc_feature (573)..(573): n is a, c, g, or t
gaggactttgccttttactctgccacgctttctgacctttcctacttagatgctagttccagataagttgtgtacattgcagacttcawtccacyactgcaccccttaccacagcatcttcttttycyccacctcctgggaccamcctaaggctgascakgmwgaaktmsscwygagtgttsccttggtgcctgctgctccarwtatgtccagcagaggscagtgacatcttggtawywtytkkytttktkktrvrgytgsrkarcwwtbtacattycctaaycagkstywmagssttgggcatttcatcccatttstgtgaacccctctcttgcttttctcaagtttaatttttgatcttgttctacctttctwttgtggggactctcccttccctccacctccagaatttatggtgttmcrktggtatctgcagkymygargtkkkttttttytttttgctgtctctggaatgtagactgtacgygkttaataacttgccttctctatccttgctcagaaatgtggataatgcaatggctgtgaccctggttggaaattaaacttgttttntgmarmwwwaaaaaaaaaaaaaaaaaa

SEQ ID NO: 5631 - DNA, 600 bp, Rattus norvegicus
ctcatctagctcagatatgcactttaccctgtgttgccccaaaacaatttttttacataatcatagtttgtttccagactgagaaattacactagacaccatactgaataaactttccctcgccgtgggttgttatttggtgggataaggctgtgctggagttgaacccagggacctcacatgaagtgctacgtccatccatgaggtgttatgtgcactcattgaatcgcatgttttgtgtatagatacgtgaaattatattacatggcttccacttacctargacacgccctccctccatccctaccctgacagcccatggtctttttaccaatttttatttagcattctaccttttgaaatgtactttcttactccaaataatatcctgagatctatccaarwrwwrartgtgtcagtaattaattcttttcttattctttactaccactccctccaagttgtttcaaattgttgtttccaaagaaaaaaggaaaaaaaaatcctcattcacgtgaaagatgtaggtgtctgctgaatgtggttgccctgtattaaagcttgtctcaactgaaagaaammwaaaaaaaaaaaaaaaaa

SEQ ID NO: 5632 - DNA, 600 bp, Rattus norvegicus
ttggaccgggagtctccattcgtccacaacagtgtgtacactgccctcttcgtggccatcgacagcggcaaccctcctgcgactggcaccgggactctkatgatcaccctggaggrcgttaawgwcaacgctcytgtmatttacccaacggtggytgaagtmtgcgacgacgccagaaacctcagcgtggtcatcctgggggcttcagacaaggaccttcaccccaacacagaccccttcaagttcgagattcataaacagaccgtccctgataaagtctggaagatctccaaaatcaacaacacccacgccctcgtgagccttcttcagaatctgaacaaggcgaactacaacctgcccatcatggtgacggattcagggaagccacccatgacgaacatcrcggacctcagggtgcaggtgtgctcttgcaagaactccaaagtggactgcaatgcggcggggaccctgcacctcagcctcagcttgctgctgctcttctctctcctcagcttattgtcaggtctgtgagawcgacacatctgaagcttgactccccggttgccatagcaacrggaaaaaraaaaaaaaaaaaaaaaa

SEQ ID NO: 5633 - DNA, 500 bp, Rattus norvegicus
catccggttaatgtggacttcctggggatctacgctcccccgacagacaagttctcacctagtgtgcatggactgttagttcatgcatgaaccagacatccawwtckkcamkgrgmggccrggaaaagagccgggaaaaccagaagcgagcatggaagtgaaaggacataagttgactgtcaccagaggcatgcagaaagactacaggaccaatatartgtttggaacagacgttccctgctggttcgtacacaacagtgggaagggtttcatcgacggacattacaaggattatttcgtgcctcagctctacggctttctcaaacggccttaatggctttggttttggaaactgtacatgtacgtttttctctcttgacactttctgcagttagtcctcagtttcagtaacttgaaataaacccagatattagggtggcctaaatgcccgctaacccggctgagaaaaaaataaatatttgcaaaaaagaaaaaaaaaa

SEQ ID NO: 5634 - DNA, 525 bp, Rattus norvegicus; identical to SEQ ID NO: 1538
  misc_feature (9)..(9): n is a, c, g, or t

SEQ ID NO: 5635 - DNA, 564 bp, Rattus norvegicus; identical to SEQ ID NO: 1539
  misc_feature (516)..(516): n is a, c, g, or t
  misc_feature (552)..(552): n is a, c, g, or t

SEQ ID NO: 5636 - DNA, 600 bp, Rattus norvegicus
ggcagaattgggtacaagtggttctatagatggtaataaccaacttgtaatcaaaggragrttccaacagaaacagwtagaaaacgtcttgagaagrtatatcaaggaatacgtcacttgtcacacatgccggtcaccggacacaatyctacagaakgacacccgaytctatttcttacagtgtgaaacttgtcattctcgatgctctgtggccagtatcaaaactggcttccaggctgtcacaggcaagcgagcacagctccgtgccaaagctaactaatttgctaatcaccattgattttttcaaaatgtggtggagatatggctggacaggttaccatcagagtggatgtacattgagttaaaaccagatagaaacggccaagtctctggcgagtgattgtctgaaatcttgcagatacggtattcagtgtgatatatcgtgctacttacaattgcgggaaatgatggataggggggcttaaagtataaatctgttaggagtattagttttcagaaacaaaaatcggggggcgaagcatagtgtaataaagggtgaagatgaaagggaaatgataactggaggggcccgggagatta

SEQ ID NO: 5637 - DNA, 600 bp, Rattus norvegicus
attgccttgwcatagccataartcagaattatgaactttgttacagattgggcgtactaaatgctcttttgactgtttccttaggaatatattgaaatgccaacggagttcggattatgytctkkaagaawgtgtaraccattgttttaggatgtgtacagttgtagaaggtgccmgctttamragttcatgktttggwtcytaaggkttttcyttkttcwttwttgktwataaatgcwtcaaagtaatttcattacatggcttgccstactaamawmwrwwawwamwrytgtgarmaaattttttactttttctaaaacckstgctgaaacaatgttttatkcccccgtcaratttgattckratggakacaagcttatccgttwagawttytttttaatttatttttammaygtawtggcttaaattaatttttccctgagcggtttgttctgtttcgaaggcaatcccgtcagttcgactatgctgttagtaggggggggccaactggtgatcctgggctgtgttaaccaaagcaaatgtgagatcagctggcatcctgttaatagctatttcaacaaaccatattttgggcctttg

SEQ ID NO: 5638 - DNA, 600 bp, Rattus norvegicus
gtttgcttgccttacactctctattctatattgtctcttattgtgacaatatctccatccatggcagccttccatttaacactgggagagtttaaacccagacacaccragggttcagataydygagrgaggagaacctggatgtgatgatgggcctggaactccagcaggccatcytgggctgtacagtgactccctgtmtgaaakataaaaatgctaacagatgggagcaacaggttggtgaagttaacacctttaatctcacttggtttttgtktagtttcttkagcttggttcctatttgagccactttgcttctttaaagagaaagtaagtgtgcttaaatagtggtgtgcktttgtaagtgttctctcatcaacattttacaaagttacaggcaagcatgagtaattttagtgtattttcagaaaagggmcctcaaatttatgtggatatatgtcagaaaagattgtgaattammctgggatgttatcaaatacaactaaaawtwtawaamamaawaaaaaawaaaaaacattgcggccgcaagcttattccctttagtgagggttaattttagcttggcactggccgtcgttt

SEQ ID NO: 5639 - DNA, 600 bp, Rattus norvegicus
cagccctctctgccatgcaagacaaaacgcaacacctagagaacagcctcagtgcagagacgaggatcaagctggacctgttctctgcactcggtgatgcaaagcggcagctcgagattgcccaggggcaaatccttcagaaagaccaggaaatcaaggacctaaaacagaagatagctgaagtcatggccgtcatgcccagcataacatacagtgccgccaccagtcccctgagccctgtgtccccccactactcttycaagtttgtggagaccagcccctctggacttgatcctaatgcstytgtstakcakycmctkaaraaatgaaggccaactgtgtgtttgcccwacatttggaaccagaaggcttcgaaaagcagcgtytctggcagtcaagataaaaaagttgatattgtgttttgtgggactgtatatgttgtcatttttaaaggggggaaataacatccaagtctgattagaaccgcccatcagttgttcttggaagtttttagaagacctcacaggactttgcagtttatttttcttggccaacacattaaaaccattcttggatttcaarwaaaaaaaaaaaaaaaaa

SEQ ID NO: 5640 - DNA, 600 bp, Rattus norvegicus
  misc_feature (307)..(307): n is a, c, g, or t
  misc_feature (447)..(447): n is a, c, g, or t
cccatgtaaccatgagagagccagagagctttttgcaccatgcatttttatgattcttttccaatccttagcgccatttcactaaggaaccttgaatccagccaggatcctccttttgcatgcgactctagatgcatcccatgaatagtttgaacccttccttgtcaatgcactttttgaaararaaaraaaaaaaaaacccacaaactttgtgtatgtgacmtaaagcatgtaactttaagatgctgcattytcaactraytamtaaaggcctttcccaadwaaaaaaaaamaamaaamaaccaanaacaaaatcacaaacacccccacgccccacacccaccccaatcccactaataataaacaaaatacactcggggtggccccggaacccaaatagccttatagtgggcggtttacaattacttgccggcgttttacaacgcngaactggaaaaccctggggtcaccaacttaatcgctttggagaacattcccttttgccaggtgtgcgaattgcaagaaggccggcaccatggcctttccaacagttgcgacacttgattggaattggaaaatggaagcgtaaatttcgttaaa

SEQ ID NO: 5641 - DNA, 600 bp, Rattus norvegicus
catcagcactgaggtccagtgccttccgaggctaagcacctagggagccccaagaggagcatcaagcctgctgctggggaacagttggaggagactgaggctccctgcggagcggacacggagctgtcgctgcattgccctytcttgtttgtttaaaaagaatgacgtttacatggaaaatgtaattacttgcagtatttatgtgtatatggagtkgaakkkwatatwgtgtayaagtcayycycataaattaagcawgaaaawtaawmrmwmammwamwwmcagtgcttaawgktgtcaactgktcttggattcgtgctgttctacaataacacacaaatcctgtgaggctgattaggaagaaagaccaggtgaacccsgctgcagtaaggaagaagccagaaggcagtcacctgagactgkggccccttgtccagtgatttkraacattaacgaattagaacatggraagggattgcaaagwtagaagcaaagmagktyttctttkgccgcagdwwaagatgacttgrcagagacagagaagcwakgkcyttccctgtccctamwactargaaacaramtggcagawaggkkggtgga

SEQ ID NO: 5642 - DNA, 515 bp, Rattus norvegicus; identical to SEQ ID NO: 1546

SEQ ID NO: 5643 - DNA, 600 bp, Rattus norvegicus
  misc_feature (299)..(299): n is a, c, g, or t
  misc_feature (325)..(325): n is a, c, g, or t
cccggcagaagcagctgggcgcctggggctctctgggtctggccttctgccgcctgcacaaacagtccagcatgacggtgatggaagcccaggagagcccgctcttcaacaacgtcaagctacagcgggaaacttctgtggagtcgattcagattgtattagaagaactgaggagaaagggaacctcgagtgggtggataagaaaaagtctagctttctgatcatgtggcggaagccagaaaaatgggggaaactcatttatcaatgggttttcacgaatggccagaataactttgtgntcaccctgtatgaactgaccagtggngagacacacgaggagaagagattcatgggctggatgaggcgacccttgtgcgtgctctggaagccctaaggacgagcacaagggtgagattattactgtcagcgatgggcgaagagttaaaatcttctaacaaagaactgggttcctttaattttaacttccactattcaggggtttaaaaagggacagaactaatggcccacagaatgtgttgtgacttcacacactcaaagggtcaaagctcagaggtcaaattaagggaaggtttcccaaaa

SEQ ID NO: 5644 - DNA, 600 bp, Rattus norvegicus
gwtcadwaaaaaawaamarmrwrarwwrwratctkgctccamwwmmwwaaaammaaagtgttgtgggagaagatttgaggctttcaaaagtgraaagggaagggctaacgtttaacatggagagtgggtggcagtgggaccagmtracccctgktggccaccctctggatgggcacttcytgctccaaacaatgacaggaagggcctggaccccaccctgsccactgtyttcccamtgactgaagagcaraagcactgtctgtaccagctccaagattgctagaggaaggatgtgccagcaggctcaccttcctcagcytgtggattytggcccaggaacgggcaacagaggagcctcacagactgactgctcaattccctgytgggcttcctgrccctggaagggaatgcagggcactttgtcttgtacatgtaccatttccttccttgtacataaacmccagmmctytcammaawaaamaaaaamamacacaacacacaacaaacataactacaaactccgaggggcccggtccaattcgctaaagagccgataatcaggcgggataaagccgcaggaaactcgtccattttccttgg

SEQ ID NO: 5645 - DNA, 600 bp, Rattus norvegicus
ccatcactatggtggctataaattatgtaaataatgagcaagatcaaattaacaaagactagttacccagcatycsgcatctagtcagttttgtcakggggcagytcaaagctgccacctgagaacatcaytaggctctcakggktcttggcaccactcamccaagttwcatccaccagattattttcagtcttsacaagtatcaccatgcmtwgtgggattttyagccmtgaatwaagggcgtgcgttttsscatatcarkctctaaaataacctttgctaatcaatgcrgwgagttgctaasgtttagtcwtgggkaaaatgtgtgtctgaayaamagcktctgktrcwcawaargttattatcrggtaaaatgtatatcttgaacataagaatagagcgcgcctttatcatgattcactgytagaattcgcatgacctttactgtgttagcttttgaatwtctttgggacttgctaacctatactcagccatcttygctgacatgcccttatmsatgtatacagctggtgtttaacaatgtgaagattccttacctgacttaataaaatacttcgatatamaaaaaaaaaaaaaaaa

SEQ ID NO: 5646 - DNA, 600 bp, Rattus norvegicus
ggtgaggaaaccccatattgaagaatcacagacttgttcctgcaccatctctctgtcctgggttgtctgtggttgtcacccasmatgcttyccagagtaaactgtcatgacattgsttttggggkccataccattggktgtytgacgcttgcacatgcgcacacgtgcacacgtwctcacacmcacamacwyrcrcayvcacaywmmcacwcawaswcacycmcacacwcmmsmcamdcmcmcmcmcdccacaaacacmctcayrycacaaayacgcacacacmcmccmyawacacactcacacacacacagacacacacgtataagcagcaccctggctgttgcactctcatccctgtaccatacgccagctccacagcagttccttcccagcttcctcctctcagacatagtgctttgtcttcagcagaagcgagacgtgttttcagatgttacttcagtaagcttccaataaaaatgcaccacmcrgcawwwmmwrwwaaawwawtggttttcaactgtaaatttatatttttacctggcatgcagttattaatttattaaatttggcctttrgaawtcraaaaaaaaaaaaaaaaa

SEQ ID NO: 5647 - DNA, 600 bp, Rattus norvegicus
  misc_feature (281)..(282): n is a, c, g, or t
  misc_feature (287)..(287): n is a, c, g, or t
  misc_feature (289)..(289): n is a, c, g, or t
  misc_feature (291)..(291): n is a, c, g, or t
tscacgcagcagttcaaagcagmgaaactcaaagagaagctaamaatgaaagagcgagaagaagcgtggsttaaawtarraaatctagccaaagcgaatccccaggtactaaaaaagagagtaactcggragtgttraggcttgcgtgaatgtwtgakgacatakgacctggctcaccccaggaagggaggccaacgtcactaacactgtctgtgcaaatgtscgcaataaaaacactttccawctytgwammvrdmrararararararararagagagnnagagngngngattgtgtatatgtttcgctcttttccttctaaccatcgttatctaaaatttatatttatcgcccgcctgcagctccggcttagctcgccctcccgtccgcaacacagcccacagcacgactacccgtcgcccacacctatctttgtgacccgcctgcacaaattacaatactaagtatcgatatttgacctatagtttgcctctactcgacccgcaacatcgctatcttactaaaagcgctctgcacacgtaacccgtgcagagacatacaatatctacctatctctgttttagatccggcgggtgtg

SEQ ID NO: 5648 - DNA, 600 bp, Rattus norvegicus
gagcttgctcasgaaaccccggctttgasaagggttcccargakatctgacastctcccgagacacccacaaagaggatggtgctgtgtttaaacraacacagcccakacccaagctgaggaagcccacatattctattakagryayakratataaatarccacacaggcacttgctgtcarcgttttgagtcagtgaawttcaaggaacggcctcaactcacgcgcgtgcgtgcacacacctcagaaaaggcaagacttgaaagttctgacgaattgccstgtgtccstgtstcttctccctctctyctcatmctmtatcccccctccyttccgtactgaagtggaatgktgataaaacgagttccagtaacccaaawmwwrwwwamamaattttcgtggtatctgtgaatgtgtaagagtaaatttkgatgtggggtggggkggktggaraavargraavtgttcccagagcagaaagcccccactgggctggtaaaccaasgaggcagtcttaagaagtagacttttgtgtcagccgaggttatatgtragtattaataaagaagagaattaawawwmmaaaaaaaaaaaaaaaaaa

SEQ ID NO: 5649 - DNA, 600 bp, Rattus norvegicus
tgacaaggttattcagccagcagggatatttcctgcagatgcatccagatggtaccattgatgggaccaaggacgaraacagcgactacaccctcttcaatctaattcctgtgggactgcgtgtggtggccatccaaggtgtgaaagccagcctttatgtggscatgaatggmgaaggctatctctacagctcagatgtttttaccccagaatgcaratttaaggagtctgtgtttgmaaactactatgtgatctatwyctcaaccctgtatcgccagcargaawyargccgcgcatggbttctwkkwctmratawagaaggtcamatcatgaaggggaacakagtgaasaaaaccarrscctcatytcattttgtaccadaacctattgaagtgtgtmtgkwcmgagaaccatctctacatkaaattggagaamagcamggacgctcgrgraaaagtyycsgracacccaccatgaatggaggsmaagksgtkaatcaagawtctacatakccyggykgaratttttgtgtttctttctccctcctttttttccttcttttcccggttttccaggaatcccccagggagagagagaaaa

SEQ ID NO: 5650 - DNA, 600 bp, Rattus norvegicus
aaactggtcgagcagctgaagatgsamgssagcatcgacaggataaaggtgtccaaggcagctgcagacttgatggcmtaytgtgaggcacatgccaaggaagatcycctgctgaccccagtcccggcbkcasrarrtccctttcgggagargaagttcttctgcgccatcctttaagtctctgarwggaggytgaakatggtcggggctcccgggacattgatgtagagwtcstarcagagtgggygcstttmtcgtvygcagcattkwaagasasgarkgagaaccatcctggacactccgggctgtgcatgtttaaagaactgtsccctcatgagaatgaaagcttgattccatgtsctaactytagagatctgaccctgcagaccggcctgkaggaggggaktgtataaaaaaaasgagattggtgtcacttcttttctgctacccccccaccmcccaggaccwtacatttctgcttcatatttwtaaacamacaamataaacattaaagytggtgwmmwrarmwrarawawrrmwramatcctgggaatgagaattgtccttcaagtaccctctgataagatgtcgccctgtgta

SEQ ID NO: 5651 - DNA, 600 bp, Rattus norvegicus
tgtggcatatggagctactggccaccccggtgtcatccctcccaatgccaccctcatctttgacgtggagctgctcaacttagagtgaargcaggaargaagtcgaggtggctkgagaaggctcctgctctgtyctagcctgctctytctgccactgggacggctcctccaatgtagggctcttgatcagtgtgctgaccccaccgsccyttgacattatctgttctttctgscmaacttgctctgtatgkgkcggccayttaaccgkccccatacatctttgcttgaggaaacttttagttgcagatccaaacatttcrgacygcattttgtgtgatgcatgkggtascmmttcctgatcwtakgacacaratctcgkttgmmcaawctatattgscttayctgcrcttaagcsagatatacmagrkgctcasacatgcgctgtacatggktaccyggagggacytgagccagttacctttgctgtcactttcttatcttctgttggctgctcactttaagcactgccctctttggaaatactatgtaaaataaaggctytgtgcttggcawmwwmmwrwmmaaaaaaaaaaaaaaaaa

SEQ ID NO: 5652 - DNA, 897 bp, Rattus norvegicus
acttgggcccaaacctgaagtagcccaacagacaaggaaaatcttgtctgcctgtgagaaaaaccccacagatgcctgccagctcaattatgacatgcacaacccctttgacatttgtgctgcatcttaccggcccatctaccgtggaaaaccagtggagaagtgtccactcagtggggcctgctattcccctgagttcaaagggcagatctgcagggtcactacagtgacagagattggcaaagatgtgattggtctgaggatcagtcctcttcagtttcgctaaggttctcccttcacgtgcrtggttaatcacacactgttctttaaagtctctagctgcaaaccctcactytcccctacagccacgattcgacttgttgaggttggttctccctgaaaacgtcatgttctttctcttcgtyggcamaksasragkykcaagsttgattwtcttgctcctkywkwyytctcmwgaartttactgtgcttgtgrkcatmgatgrctttgcgtttcagcttgggccttccaaggaacaaatgaaaactctgtgctggccatttgtttagcaaattctttagtatttattccttccttaactaccgcctttggtccaawyccaytagcaagcagcaggatgcaagaaatgacatttttcctcagccaarcgaactgttaactatcccatattttycttgtgcatttaatgtcataaatargywcswtctttatgtgggcccacacacytgcaggytgagaagaagtcatttagttttgcaaaatctgtmccagktttcastgwyytrtycctgtcctttataacttaccattgytvttatatcctgktgctcaccaaataaagtwaatwwytgrgvrwvaaaaaaaaaaaaaaaaaa

SEQ ID NO: 5653 - DNA, 600 bp, Rattus norvegicus
gtaagatgaaagccattggatggggtaacaagaccytggaccaggtyttagaagacgtagaccggtgctgtcaagccctttcccaaagactgggaacacaaccttacttyttcgataagcaacctactgaacttgatgctctggtttttggccatttgtacaccattcttacsrcacagktgaccagtgatgaactttgtgaraaggtgaaaaactatagcaacctccttgctttytgtasaagaattgaacaggactattttgaagaccggggtaaaggcaggttgtcttagaattgtgtgccgattagttattttacaaataactaacttytggaatatggattacttgaacaatatggtggtagttgcaggatctcaaaaccaaaaactytgttgtttgaaacctcaaaagtactgcataatgtcatgtacatgttcttkgtatygtyatttgkacaccttcactttgaattgtttgattygttacattatattcwawatcytsmcktttctttctttaagatcayataaaaataaactttaarmaamwraaaamraaarmmarammaaaaaaaaactcgagggggggcccggtacc

SEQ ID NO: 5654 - DNA, 600 bp, Rattus norvegicus
ataaacttaccgacggatttatgctgccagaccctcagaatatttctcttagaagatgacggccacccttcttggtgctgatttcattcctgaaagattggatgcaaggctcatcagcgtgcttcgtcttttatctcrgaggtagtcagggctgacttagctagtcccaacccataaactttctttcagaacaaaacctcggatggaaacactatattgcttgcaaatatagttagcctagaactttcttatgagagacagtacagtcatgggggtttacaccaaggagacgttcaragtggcggaggctggctgtgtctctgctgtcccacagctctagtcgatakgcaggtatccgtgagcagcatggagacaacactacagtaagagaaggaccacagcgttaacgtggcatrgatgcgaatgacacaccaggctgtgaaagtagacaatcagatcaccagcgatggtccctgtaggatggyrgggcagcaagtggactgctttccttctctacatttcatttgttatttgtattagttttataataaaacagtttaaaataaaaawawmwwraaatctgaaaaaaaaaaaaaaaaa

SEQ ID NO: 5655 - DNA, 600 bp, Rattus norvegicus
  misc_feature (343)..(343): n is a, c, g, or t
tcttatacgcgattgtaagcttgtggcccagcaagctactttactatttatttgttttggttagaagtggattaaattagtagaccagaagatagctgtaaatgtgtattatgataatttcctcttttattagaggcgttggccaagttttcataagatactgtttccctctgtgtgtattaagtgggccaaccaagcctgttatgagcattctagcttaacctcaagtcacagatgtgtgttgtgggtgatttcattttttgccttggtagtggaaatcaggtgattgttaagagttaaaagtgggaaccacaccttttttgtatgaaaattaatccatgtntcttcaggttggggagataggttttatttaaatccaaagatattccaaaatgtcctcaagtctgtgttttagttaactatgtcatgtacaaatgagtgtgttatatttagtcgatggtgtgctttcactgtgattttttggataaacttctcataaaggggtagttagtcattctaagacagagaagtggaatattttaaggggatgaaaaacaggggtgaagaaattggcgacccgtgtgttaattatccaaacaa

SEQ ID NO: 5656 - DNA, 600 bp, Rattus norvegicus
ggtcaatgaatatcagmtmtattttytgmctgtacattaamgtgacgtgtamtcttttkacacctgcaagtccatcttatttattcttgtaaatgttccctgacaatgtttgtmmyatggctgtgtttaamagacaatctmkacaataagctgtgaccctgaaaaaamaamamarmaacaacagaccatacataaaaaatacaaacacaaacaacacgcaaaacaacaacccaaaacaaacaaaacaacacaacaacacaggggggaccggaaaccaacacaccataagaatcacatcaacacaggcgaaaaaaccacgcatacggaacaccgcgatcccataaccgtagaactcccttcaagtgaagcgaagcgacgctgctcacatacgccattgctgcattgctaactcagtccactgatacgcaatatgagacacaaatacacgtgacgatacctgcactcgcctcttttctctcctctccgcttttagagaacgcacacgagcgacgacaccgataggaataggacacgacacacgaggaccacagcactgatcagaaataacagatacagaccacgcgcaaacatcggacactt

SEQ ID NO: 5657 - DNA, 497 bp, Rattus norvegicus; identical to SEQ ID NO: 1561

SEQ ID NO: 5658 - DNA, 600 bp, Rattus norvegicus
ttattctgtttgttttgcaataaaggaagtgagggtggctggctagccagggcaggcaggccacaactttcacttctaggaatgctttaararamamwaaarrrmaccttggggcaggaggcgagtatccggttggcagaggagcagaggcaggtctgaatgaaacctttctggggtcagctgtgaggatacaacaggaaaagcatgtgatgttagggggaacactgagctggccctgctkgaggaaatagggggagcttkgtggggaggaaccctgctgctttgaccyttgtcaccacttgtcatcatyccagatctgcagcaaatctgcttctycttttkratcccacartcacctgsatacacagkcgscccawtaggtagstgkgttcctyaamytggagtttctgagagkggttkgatkatcraatacttcggcttcagggcagggtacctacccaaattaaacttccgcctttgtgtatggtccaagggggctccgggaagcgtcttgtgagagagcacccgatacaaaagagggcacaacgtcgaaatgccgcgaatctacacaacaagagggggtacagagaaactctcgga

SEQ ID NO: 5659 - DNA, 600 bp, Rattus norvegicus
wykactgagasccaacatggrtgggctgaagaagadggacaagaagaacaasartwwgragarcamhccakcacagtgacaggcgtgscmastaccaatcagytgcaccagtgcwgttttcctgkttgmtgctttcagtacctctgtakgywabsgttttcacggwagggtctattmagasrkmavgrkkgggatggccatwkgctagttgtggtwagaaaccarktttagawttgcactgtatggctggatattcttagatyccagcagtmmgkyctytartcatctttgaagagctatgcatcataatcttcatgctagttgctgtttttcmtaccatattcctgacaataactcctaactmtagatggtacagttactcagtggtttktgscttgtctttgagatkactgtwatagttttattaaaagttgtgttwycctmmarrwrrrwdrwwwwwmwwggktatataatttaaaataaaraaaatcmcwtttwramaaaaaraaraaaaaawwrargggggcgggtaccaattggccatagtgatggttacagtcacgggcgcgtttaacgtctgaatggaaacctgggttccag

SEQ ID NO: 5660 - DNA, 600 bp, Rattus norvegicus
ttcatgtactggctgtcctccaacgtgttctccctgtgccaagtagcctgcctccggttkscasswgkgcgcacagcactcaagatcccccagcgagtwgtgcatgaccctagcaagttacctcccagggaaggcttcttgaagagyttcaaaaaaggckgraagaatgctgaaattgcacatcggcyccragagcgggaggakcgrmtscakaaacacttggasctagctgccagaggacccttasgacagacttttacccacaaccctctgstacagcatgatccamgtcgctcccccaamaccsscamsagsagcaccaasagcgtcmamgcmamcacamagaagccgwggcaggacacactcggctgatgcgttcwgtgcwcayygggacgagagccctgcctctgcacagactcctcggaacarrggwgrtgcygwcctcgccysagmmykgbgmwckgcagcmtytrsaagtsttcattttmaacatagtttccactawaramwmwwamwwrwrwgtgttaaaagggccctggagagccacctggatagagttagtaaacctctgtcttatctggrmaaaaaaaaaaaaaaaaa

SEQ ID NO: 5661 - DNA, 600 bp, Rattus norvegicus
tctswagaakytaaaagatgagytggccagcaccaagaaaaaacttgagaaagctgwwaacraggctctggctatgcagaagcagtmtragggccttaccaaagaatatgaccgtctgctaraagagcacgccaagctgcaggcctcagtacgtggtccctcagacaagaaggaggagtaaagacttgkyttttccctgcctgtagctggcttawacttgacccatsmttactgcttmmttggagcccagmctgtmcctctggwacttggttwattcccttccatttccccawttttyttccatggcttatagatcatkttgsccccattacacatactactcttmtaccmaaaaggrcctgattsttgttcattcacagtaatyttkscactkktctgcctggccagkssacttkccactcctagaagtgtagaaaagcaykggtgmcctgggctgcacytgtactccattttattttrccatgtatcctaaaagaggctgstgttaagcaggtcaactgtkttatcctgaggggamtaartgttgtymwrwyavmaaaaaaamaawaarmacatacctcactgggggtcagacccaaa

SEQ ID NO: 5662 - DNA, 600 bp, Rattus norvegicus
  misc_feature (573)..(573): n is a, c, g, or t
tgctatcatgtggcagagtttcagctaccccaaaccaagaataactcagctgaaaataatactgctcgctcctccatggcctatccaaatctcgttgctatggcatctcaaagacaggctaaaatagagagatacaagcagaagaaggaggtggagcataggttgtctgcactgaaatctgctgtggaaagtggtcaagcagatgatgagcgtgttcgtgaatattacctccttcaccttcggaggtggattggtatcagcttagaagagatagagagcattgaccaggaaatacagtcctgaaagaccaagactctccaagagaggatcaggttgtcagccatctctccagagaagctccatgaaaccctctcccactcgaagatgcgcagcccagtcttgaactggtttccagccggcactatacgggagtacggctgacagataaagacgggctacaattggaatccagagcacgggattaagagccacgaggaatacaagtaaaaggaacccacgaagggtgcgacccgcgccgagaacaagagcccccagggcggctatcttaacccncccaccacaaccacacgagacacaaca

SEQ ID NO: 5663 - DNA, 600 bp, Rattus norvegicus
aaatacgtcagcttctcatggccaaggaggtgtyccacccactyctggaatgtaattaargggagamatacactgtatgaaatgtgtgctatactatrsctkgtkgccaacatcttsasragsattattgtttctaataaaragtaatggctttttcagyaaawwrwrrrwwwaaaaawyysctgcktkyctacataaaacgtgccttttctaraaatttaagatgtaaatgtatttttacatgtaagtttgaaaattcaggagcctgttatgagatgatgttacttttaactgaacaataatttaactaagttgcttctaaagtgtttacaccttaaacttaacataaaccttcactcagagaacagttatgttgtatcataatataggaagaatgtttggaatatacactactggtagtttgtacacatcatatccttaaggcttggcttgtttaagaaaacctatttgcataaatcatatttagaaaaaattagtgcaattttatatttgaatattgttcatgttaaaaaaaatttgaattgcaaagactgggtatatattttgtttctgtttttctaaatgacctgctgtacttat

SEQ ID NO: 5664 - DNA, 994 bp, Rattus norvegicus; identical to SEQ ID NO: 1568

SEQ ID NO: 5665 - DNA, 600 bp, Rattus norvegicus
  misc_feature (87)..(87): n is a, c, g, or t
  misc_feature (100)..(101): n is a, c, g, or t
  misc_feature (107)..(107): n is a, c, g, or t
tgykmcattwaaatggcaaaatwkggtatykattwsmstmaaaaaaaarwmawmavhgaatcatamrmwawwwwmwamwvcwddmkndbhmhrwhbhvvnnchhrhnvadhtrwaawttrgammmkywskragksmayawgbtatgcrrcygcawstttkkttttyywttttccwawgcatcgtaagcatgtgtgtaatacgttamatatatctcctgamaccacaggaattcgagcctcggtgaacgtcggcatttactataaaggagttggtggaytwgkggtytcattcagtagttttkctgswtatgctcrmgtggaatccatttctmacatactcctgcagacatctgggcctggaatttytttttaaacrccacktttactatgtataataaamtatttcattagcttgaattgwawaratttwtaaaaakwcaawrarrrmawrwwrwwwaawwwmwtwwwaaaatcactgttgggctttgaaagcattgcaaatatatgacattgtgacmvwhdwrvmdaawwhtctctttagtttttaagtcttggaattaagatttctaaagaaaatgaactgataacattaattctctg

SEQ ID NO: 5666 - DNA, 600 bp, Rattus norvegicus
  misc_feature (595)..(595): n is a, c, g, or t
tcctgaactcatgaacatgtctcagctgattctccctccccttggattgaaaactgaattttattgtgacattaaaatggcaaaatttggtatttatttgagtaaaaaaaaaatcatcagtgaatcatacactattttaaaatacwwwmwwmrwawawwrwmattcttaacaagttgtaaattagaaaatttgggagtccacatggtatgcaactgcatcttttgttttccattttcctatgcatcgtaagcatgtgtgtaatacgttaaatatatctcctgaacacacaggaattcgagcctcggtgaacgtcggcatttactataaaggagctggcggacttgtggctcactcagcagcttgctgctaagctcgaagggaatcattctccagtatccgcgaactctggccggaattcctctacgccctttctctgttataacatcgtagcgagcggagacacaaaaccagaagcggcggactcctaaaaccgggcgcaaacacgatctcgcgtgcacaacagagtaaaaaaccgggcggggccaacacaggggcgcgcgcggaacgccagaaggagaaacaacagatataatngcgcc

SEQ ID NO: 5667 - DNA, 600 bp, Rattus norvegicus
  misc_feature (580)..(581): n is a, c, g, or t
  misc_feature (584)..(584): n is a, c, g, or t
tttttrrgtgagatthcttctgtagctawtcttkgaccaaackgtggatactgwtratattaatttatatttgtctcattttgtatgtatgtatggcgtgtwkgtgagtatgtctggtttataatctgacgrgactcatgaagctctgtwwggstgtaatttaattccscttcccttattkwkatytatykdtgtrctgtgctgattcaataraatgcactgaccaksamamwmaaraamamawmrmgggggggccggtacccaatccgcccgatagcgagtcgatccaatcactggacggcgttaacagcgcgtgacgggaaaaccggcgtgaccacttatcgctgcaggaatccctgtgccagagggtaatgaagaggcgacgatggctcccaatggccgccgatggaaggacacgcacgtacttggtgaccccgtactcggaacaggcgtttacctagggaaggaaccttatcaaatacgagtgggtgcctgcaaacaaaaggcccaaggagcgcgggcagacacactggcgggcacatgcgcatcgcgagagatgggtccacggcaatactttctnnggngcgccgacgcacgacg

SEQ ID NO: 5668 - DNA, 1083 bp, Rattus norvegicus; identical to SEQ ID NO: 1572
  misc_feature (896)..(896): n is a, c, g, or t

SEQ ID NO: 5669 - DNA, 600 bp, Rattus norvegicus
  misc_feature (31)..(31): n is a, c, g, or t
  misc_feature (70)..(70): n is a, c, g, or t
  misc_feature (78)..(78): n is a, c, g, or t
  misc_feature (83)..(83): n is a, c, g, or t
  misc_feature (85)..(85): n is a, c, g, or t
  misc_feature (88)..(88): n is a, c, g, or t
  misc_feature (91)..(91): n is a, c, g, or t
  misc_feature (117)..(117): n is a, c, g, or t
tggggcaggacavcarcykvwwaaraagstnksdttkyycykgsccayattgggrdrrwtggrmgchtcntaggtvankgghndnksnwkntvtwwwssvracccccstcycccatntacttwcaagcrmyctttyctaamcccaaccatgttttttygtgtgtgtcaattgtgccatttttattttattcctttccytactmtttacacmgaataaaaatgtrgaahtwmwwvrwmamaaamrrmackmgmggrsgrgcccggtacccaattcgccctatagtgagtcgtattacaattcactggccgtcgttttacaacgtcgtgactgggaaaaccctggcgtacccaacttaatcgctgcagcacatcccctttcgccagtggcgttatagcgaagaggcccgaccggcgccctcccaacagtgcgcgcctgatggcacgggaaatggtagccgtaccatcggtcaacccggctaacttcgggaacaacgccatataaccagtagcgagactggaagcctttaccaagactaacgacacggtgagtgtccctggccagcccataaaacgggccccgcagggaccctaggggcgcat

SEQ ID NO: 5670 - DNA, 600 bp, Rattus norvegicus
ggaacctacgaggattatgttgaaggccttcgtgtgtttgacaaagaagggacatggcactgtcatgggtgctgaaatccgtcatgtcctagtcacactgggggrgacagatgacagaggaagaagtcgagatgctagtggcggggcatgaggacagcaacggttgcattaactatgaagcatatgtgaggcatatcctgtcggggtgacgggcccatggggcggagcttgtccggatggtgcttgaatggctgaggacatatgcgtgtctcgagcctgctccttgccagtgtagattcctgtgttggcccagaggcatcctaatcacacaccttgcctgtctggtaactttggatgagttaggcttatcacataaacatggctctgtgcagaacaaaaaacactcaggggggccggtccaatgccttaggagagatcaataccggcgcggttaacgaggtagaaacctgtgtcacactaccgttgagatcctataaaggaagaagagcgaatattcaagtcatatgataaacgaattgacgaaggagcttcaacaaagataacacgttttcactctccgctccgagagtaacaggacta

SEQ ID NO: 5671 - DNA, 600 bp, Rattus norvegicus
  misc_feature (146)..(146): n is a, c, g, or t
  misc_feature (153)..(153): n is a, c, g, or t
  misc_feature (164)..(164): n is a, c, g, or t
  misc_feature (196)..(196): n is a, c, g, or t
  misc_feature (308)..(308): n is a, c, g, or t
  misc_feature (315)..(315): n is a, c, g, or t
gaaccactttgataaccagcatctcaacattcctaatggtcttctccattgaagattagtagaattttcctctttcagaaatcatactataccatgtaatgttttgaatactgctccttactgactgactcaatatgactcctatnttaaggngtatttaattntcttgaagtcagtgtggctatacctaatgtgntccaagtgtttccagtcagagtaaatatgactaccattaccctgctgtacataaatgtaaacttttaaagcaagttggagagcagaagaatgccagagaacttgaattcagnctttgangagtgttgatgctggtagaagctcactttgttgtctgatgcatcttgaatgatggctctttgctatacatgtaggcgttcttctctacagtttaagtatacatgatcttgcctagactcctgagtagctatgctattttgtgagctatcacatggttacatagcatgtaattatgaaatctactgttgttaagaagtcgatctactgatagggccatggtatattaggaaaaaggacatttgatttaaccttgcaaaaggatcccaaataatgctttttactgtc

SEQ ID NO: 5672 - DNA, 600 bp, Rattus norvegicus
ataaagaattcaamcctaarwwwrwmwwraaawrrmmwrrrarwrwctaagggctcctctggtagggcattttctgctgggcagatttgcctctcaggaggctgacccagacttgaccccccccaggccctccttctaacacagcctcgcctctgcttgggtgtgtytyygagcaggtagaggtcttcactatctctctgccaagggagggtatccctgggcttgaaggtcctctccatttatgaggtagcagttactttataatcttgacatggaatccctagctctctaagcacacacaaagaatwatygcggtctgtmsaaamamggactgccagaacttatgcttgggagmctgcattgtatttygcgcamgaagkggctgatggmgctggaagrrcsctaggrtcggcagtgaggctgcggcctcagtacgtcacccctgcagtacctggcgcctcacaccgcgacttgcccaacagccggcccggctaaacgaggggccgcccacgagcccgaaggtccccagaagcagcggccaccgaccgcaggggcacccagcggaacccgccccggcgcccaccgtcgcgcaaaacgccc

SEQ ID NO: 5673 - DNA, 1073 bp, Rattus norvegicus
gtgcatgcttttagggtgatcagagttagccaggcatggtcaccgtccagtcttgattttatcgttggccagccgagcctgcggtacagggctccagttccctgtctggcagatgtgaatacctgtgcccgtcctctctgtctataaaggctatgctaagttcttaaaaaggtacttcctgcaagccaccagtctcagtcagctccccctcccagtgagcatgttaacctaaaaataaaagttcatttaccgtaggcamgrgkgatccctaatgagtactggcttatgtgcgtyttcatgtatggatctcagygtcagagttcactttctccatagtggcaaagywacactaatatgggccgswgtgttacctggaatgtccmcatagtatagaactatgggtgaaaccatcttgtgaaaacagaattgtacacacggttattcagtgtcgcctctgagagaactcatccacagcagagcttagaaaacacgagcttyctcttcctyacacccatttcccgtyggatgattctgtgacttcactagaacctggtgttaargagaccaggtgtgttgcacccctaccccagtgtgtaktgacagtctggagggacmctgkgtggaacaccacagcccytyatgccagtgcatgaaaacaccttgttgayattctgscactkgggmattgtgaagtcacttayacgaaacacaaaggctttgtacttctctagggaaaaaaaagtatttwmgcctttttctytaattccttaccccaacaaatgacacacacaattgccttactaaaggcaaacccaatggtatttgcttgccactttatttataccctttcaggttattccttatcaagtatcaaggtaaacaccaatgggtgttatgagaagctattgccttggttcaactttatctgatatggtaatgttatccgaatatggttcgcattcttgctcaccataaatctttcaaatccatccgatagttctctcagttgaaaagaaaaatcccgcgcatgagcaatgagccaacggcacggaaaggaggcggagacggattaa

SEQ ID NO: 5674 - DNA, 600 bp, Rattus norvegicus
  misc_feature (197)..(197): n is a, c, g, or t
  misc_feature (345)..(345): n is a, c, g, or t
  misc_feature (381)..(381): n is a, c, g, or t
  misc_feature (425)..(425): n is a, c, g, or t
aggacatgcaataaagtcaggctgagtggaaaaagattcaagggcctaggtaggtgtcagtaagtgggaatactykgaaaaacaggsaaaggggratgktttcaagacatttatcctgctyaaaatcttagagactgactttaggaataaagtgtcagatmcarmwrmwrmwwwarwmrtcttttctatgatgcttngtttagatgtttataagaaataggtgtatttttccagtgtacatttcagaatcttaagaacatcgtgtctggttatagttactattttacctacttaaaaccaatgtgatggtctttagaattgatctgaccaagtctcttggtttcnggcaaactatataaggttctgagcaacgctttttangggcaagccatgttaactggactctgatgatgtaattgactggnggcgtttgtggcaacataaaaggttaaatttagggccaaacattatatataatgcgaccacaatttctgggaaggactgaatagttacaccaataggtagaagttatgtgggaaggttatgtggagtcctagaaaacacggagggtactaatagtggtttgatgttgtaaaataa

SEQ ID NO: 5675 - DNA, 600 bp, Rattus norvegicus
cctacggagcgccaggaagttgatggtgatccagtttacaggatgtttattggaaaaggattttgtttttttttaaaagagaacaaatctgacamcaaatacttttaaaattgtaaatagttttacgatttaaagtgttttgacggtgtaagtcgattgaaactatttatggctggttttaagggaaaagaagasrvccgcaaagraaggagaaaagcaagaaaaataytgaaacaggcagggagatatgtgatctcattacttmtgaaaattgtactgtttrtagtgtatkacagtatcaacgtgaatatccaattctgctaaatttcctgcactgtattaaacatgtaaattaacttttttgtctgcttagccagtstaaccacccggacagggagsytsccatgtctgaagaactgtgtgattcagtgatgacttgttctgacwtgttgtrkwtcagtagtgttcasgaggaaagcatggtgtaagggagatgctgtctgtccctttgtgccagcactgtatgtttgcaagacacgaataaactgccgcttttgcccaaacgawmwmaaaaaaaaaaaaaaaaaacccctcgtgccg

SEQ ID NO: 5676 - DNA, 600 bp, Rattus norvegicus
aacagcaaaaacgctgactgacgtgtcttaaactttgaaaatatattttcagtatattcaattgccaaagktttgctgtctcggaaaaggaactatgaaatcaactgacaagaaaactcatcctattgacaacagaatttaactggatcgcagacagktcttactgcaatttcttctttataaacatgaccatttgactgttcactgaatttatttgtatttamagkttccagagkttgacattataataggaacaatcttgctatatactytttaaaaataccgygctcttctttccggaattgttgaaagacamtatatgaaatggatgactctattgctcatcagctytattttttaaacacaccacttattttgttggaattgtcaaagactgtactyagatcccattgcttttgttaaaatgtttacaacagyaaatagtttaaattcaataaatattattggkcattgtaccattattgcatgtammmamwwrammawmrwatagaatgctgatgtgtctctaatgttgtaacaaactgctagaatacttcttgtcaatctaagaatggtttttgttatctctgattatgcaaa

SEQ ID NO: 5677 - DNA, 600 bp, Rattus norvegicus
acccacagaggatatytatttttkgtcactccatgggaggtcacggagctctgatttgcgctttgaaaaatcctggaaaatwcagatctgtatctgcatttgctccaatttgcaaccctgtgctctgtcyttggggcaaaaaagcttttamtggrtattwggrmccmgatcaaagtaaatggaaggcgtacgatgcgacctgtctcgtgaagtcctamtcgggtccmcagattgasmtactaattgatcaggggraagatgacsagttcctctcgaatggscagttactccctgrcracttcatcsstgcctgcrcagaaaagaaaatccctgktgttttwaggctacaagagggttmtgatcatasvhaytacttcatbgsaaccttcatcaykgaccacaksaggcatcatgccaagtacctgaatgcatgaagagcttcagmcaagagaatmtcatcaggmtgatwaaagttggaatcaacaggattgstgacaaaaarattttggatttcctctgaaaagatcatgctcctgcagttgaatcacttttytgaatarwcawatcmamcttthwrrwwwwwaaaaaaaaaaaaaaaaa

SEQ ID NO: 5678 - DNA, 600 bp, Rattus norvegicus
gggcattcttttggaggagcaacagtttttcaagccttaagtgaagaccagagattcagatgtgggattgcccttgatccgtggatgtttcccgtgagtgaggagctgtactccagagttcctcagcctctcttctttatcaactctgccgaattccagactccaaaggwcattgcaaaaatgaaaaacttctaccagcctgacaaggaaaggaaaatgattacgatcaagggctcagtgcaccagaattttgctgacgggacttttgtaactggcaaaataattggaawcaagctgtcactgaaaggagacatagactccagakytgmmrtrgascksmcsatcaaggcttccttggctttcttacaaaaacatttaggacttcataaagactttgatcagtgggactgtctggtggagggagagatcgagaacctcatcccggggtcaccctttgatgtagtcacccagtccccggctctgcagagttctaccggatcactcaaccagaattagaagagcttgttacacagttgccttttaaaatcagagtgacgttgagagagagagggagagagagagagagagagggagagagag

SEQ ID NO: 5679 - DNA, 600 bp, Rattus norvegicus
gagaagaagcgcaagcggacttccatcgccgcgcccgagaagcgctccctcgaggcctattttgccgtacaaccccggccctcctcggagaagatcgccgccatcgccgagaaactggacctcaaaaagaacgtggtgcgggtgtggttttgcaaccagagacagaagcakwwkcssatgaaatwcwmtsycacttwctswggagggtccctrtctccctcccttggagaacatgaagttgttgaaaagctgagaagtttctgctttcatttgggggcaggagtcccatgtaagaaaaatcacctaaaatcccagaagaaaggaagagatttaaagaywtaaagcccctcccaccctgttcgtttcaaataggtctgcamttatccgggaaagcagaagtgtttccctgttgttmttgtgtwgttcaaggatcatytattaccagggataaacgmtgagttgcagaaacttcaatttgcamtrtgagttyccaaaatagaaaatcatgwatggtatctcatactaataatccaaactgctgatagatttttkttaartgagaaagacagtktghgaawrraawaaaaamaaaaaaaaaaa

SEQ ID NO: 5680 - DNA, 600 bp, Rattus norvegicus
gttaatgcagcaattctraaaarggycatycagtggtgcacccaccacaaggwtgaccctcctcctcctgrggatgrtgagaacamagagawgcggacagrtgatattcctgtttgggaccargaattcctgaaagttgaccaaggaacactttttgaacttattctggctgcaaactacttagacatcaaaggtttgcttgatgtcacctgcaagactgtggctaatatgattaavggraaaacgcctgaggagattcgtaaaaccttcaatwtcaaaaatgactttactgaagargavkavgcccasgtwcscvmagagaaccagtggtgtgaagasaagtgaactgtgcctgtcactgtaacactagaasggtkgttccamatgctwrtkgmctgstcygtttatamttgktatattagaratcagtagacaacamagscttgkyctyaytgsatgtgtwkttccagwmcagatcagacctgtkgstgaktytyywtkacasaarttytttcyycmtatccgatawcggaywtggtcctsggacggcgttggktccccttgraggattccscttaggcggatatgggctagggcgga

SEQ ID NO: 5681 - DNA, 1286 bp, Rattus norvegicus; identical to SEQ ID NO: 1585

SEQ ID NO: 5682 - DNA, 600 bp, Rattus norvegicus
attgtagcttttaactgcaraatttmaattcaatgagaaaagctggttatactttttttttttttaaaactgaaactcattaggwtttbcagtgccaccaaaccattgtggatttttgctgctcccccctccccccatmtggrcacaccaggcttattaaagagtactttctttttaacggagaagaatcacagccaattccccaactgttttgtcccagctgrgtactatatgggaggtcctatcaatatygaccccccagagctgggggtcctaccaccacaagatctaaagctgtggccacctactgacctccagttgtgggtctttatttcttgtggtgaaatgatgtgcctttccttgcccagatcccttcctggtgtgtatcaacattactcactgtcttctaattcagtcatttttttataatatgtctgtaaacattgaacttacaaatcttatttatttacyccattattgtagcacttcacmgrttaaaaaaagtgtgactcagtactttcttaccaaatcctaaatctgtcttttttaaaaaataaaaaatwaaaaagaargrgaammawraaaaaaaaaaaaaaaaaa

SEQ ID NO: 5683 - DNA, 478 bp, Rattus norvegicus
cagccagcagcatagggaggagtcagtacctgaaactaagcagcacccagttaatttcaggctgttctcatgtcaaggccagtgtgaggatatcggcctgacaacgggggtctgcctcagctcgcttatgatttgtatccttgagtttggtatctttggcstattaagacacattatgaactttacaattaagactttaaaaatcatttcttgagtcmttactgatatctgaagatcatatwttgttagaccytggtgtggaactaaagaagtaaacactgctccaacgaagtctggaggtactaaaccgacatattctcttttcagtgcgcggstggtgagtctcttcccccaagaatgtgatgtacgcagacatgctcatgtgaamccagyttctgtacttttgggagacgatgggctgctgtgcccacctgtgtttaataaatattatctarccaarmaaaaaaaaaaaaaaaaa

SEQ ID NO: 5684 - DNA, 600 bp, Rattus norvegicus
  misc_feature (447)..(448): n is a, c, g, or t
  misc_feature (574)..(574): n is a, c, g, or t
  misc_feature (585)..(585): n is a, c, g, or t
tcattcgcactcttcctcaaaactagaaatgctgctcgtggcacagtcctgaaagtcactgcccgaagagaacacccagcacctcctctttacccatttatcatgtgccctggagcttaaaagagttgtggccaatggcagaggtgaagtgtctgagaagttagcatggctgaggggaagagaaaggcatttgtgtccaagaaaggctggcctttggcaggagggaagcaagaatagttgggaagtagtagcttgctgccagtgtatatgtatatgcatatgtatatgtatatgtatatgtatatgtatatgtatatattagttgggaactatgacctgctgtcctcatttggaactttcctcccataccaggcctgtcttgggtcccagaggtctgtttaaagaccaacttcaaatcccttttagaaaaacatcaaacttgcattnntgtagctactggtatctgtcagtacaagattttctggtgctctgcagtcttctgtccttcccacccatgtgcatgagcaaatatgccacttaccttgggatctgcagtcaggtgaagccaagcttnccacattctcntttgttgccatgagg

SEQ ID NO: 5685 - DNA, 600 bp, Rattus norvegicus
  misc_feature (334)..(334): n is a, c, g, or t
  misc_feature (382)..(385): n is a, c, g, or t
  misc_feature (388)..(388): n is a, c, g, or t
  misc_feature (407)..(407): n is a, c, g, or t
  misc_feature (580)..(580): n is a, c, g, or t
gtattcagttgtgtactcgtgtagtgtttaaaattgatgcatgtgtgttttataagtgagcaarktggtactttcacttctgtgctttcttggattttygtacaagagatgtgctgtgctaaacttgtgaaatacatcgaggtgtwctgtatcttgttctttgamtgggactgatggtcsgtatcgacaaagaaggccctggagagttagcaggacttaacacacacgactgacagagaaggcggtcctctcttsatcatgrcwgaaatcgtggatgggctgacgccggtcgtagctacactgcaagtttccgcaactttaaggagtcaaaaanggggggcccctggtcacggcgctgctcgtctagcacggcatagctttnnnngcngcgccagaaagagaacagnagcaacgaagcatagcacatcgaggaacgaagtcgcaggcagaacacagcacactggagaagacagacagagagccgcagaagaacgaagcaagcagcaaagcacacagagagagagaagacgacgacagcaacagcaacaagagaatcagcgacactaacagccagcacacngagagcagcaacaacaccag

SEQ ID NO: 5686 - DNA, 600 bp, Rattus norvegicus
  misc_feature (12)..(12): n is a, c, g, or t
mcmmwrgtbwtnymaawcmrgkktactwavctytymwygwrbsgkhcaagggtcacadraawytgkkgkkkbtcagmcammagcksccctagtwmchcagaascarcagwmcttrwgagradtstkgctagctyttkgrkgkycarwktymragggtggrrtartcttggtcgraavcaatgttctaaagaagactgaccmhcaraccytgttgytmyttgaacgaamtgatatamctgccctcccccatcatgtccaarawcgagsaaagcytttgatraagscatkgytkctgkrasctctcmaaggcacttgragagggagtttgaaatcctgacttcagaagcagggctcaragctttgagragratggtgcagascatycagcaaagcagagtcgtctccgttcaggtgcaaacggggtccmctctttaggaggacttccacttccgtctcaacatcccrtacytgctatgcagsaaamcctccatagttyaytcgaatggtmtmcagattgamctttgcaaatragayaaggttttgattttcttttttcttttcttttctttttttttttttttgttacgtccaatcctcgtg

SEQ ID NO: 5687 - DNA, 600 bp, Rattus norvegicus
  misc_feature (227)..(227): n is a, c, g, or t
aaattgatctcagagatgacccytctacwattgagaaacttgccaagaacaaacagragcctattactccagagactgctgaaaagctggcgcgggatctgaargctgtcaagtatgtggagtgytccgccctcacacararaggyytraagaatgtgtytkatgargcwatmhtrgctgccytsgagcctycdgaaacysaammsarmmgsargtgctgtmtrytntraaccrttttctccttcccccctttgctgctgcttcctgtcccrctactgtagaaagatcatttaaaacaaaggaatamaaccatcctgtttgaaarmmwmwrmrwmwwmwwamwcaacaccttagagcaaactctgtattcattctcgatcatgaatgcaactagaatattctcgtgatcagtaatcacattagactggttaacttctgctgctgaatgctgagctcaaacttggctgatcttatcgcccgaggtggcggctccacgcgcccgggcaaaactaccccgagaccaaggaagcgacctcccgggacggctcccaggggcctcgggcctctgtgcttcggaatatcattttcccaccccccgcg

SEQ ID NO: 5688 - DNA, 600 bp, Rattus norvegicus
cacctgaaattgchctggaactgctgatggccgcgaacttcctagattgttaaatrraataaattmtaataaamwrwwaawwwwwwwmmrwawwwaawammwrwarwwmarwwagtaawttttcacatgtagcatgttgsctgtatgaagytgaactctaaagtgaatcgctgagcaratttsttctgtcattkgcawagcagagttgaaatttgtttgstacatcaacwaattaaggaagtttcacaagccaaaaaataaataaataatgccagtttwwarrwrrwwwdvwwwmwcctttggatgtgacctttawagttatacctgatatagcaaatcctggaatgtaagcgtaaatgaatatattctacaggtaaatacaggggctaaggatttttatgtttttagtgtttttttaakwmccagttctgatcttaagccactgagcattattagaattatgcaaataattayatgaaaaacatgtttataacttagccgaaccttgatttttgtaactcaaagaataagagttgaaatttcttatgtgttttttgataaactgcagtattgtttaarwrmaaaaaaaaaaaaaaaaaa

SEQ ID NO: 5689 - DNA, 600 bp, Rattus norvegicus
tatatgtatatgtatttaaggtgyacatttaataatatcacagagaggatgcctgtyaatttataatgtatttgaaggtygtatgttttacatttgtaaaaatgggtcmcttgtttaaacaatcttttatgtcttrtcawacaagtttcaaaggtctgcattcctttatctgtaattatagtctcaaaatccaagaagttctgataacaaggttttcataagcttgataacaaaagtcatttgcctctggatgtattytaatctgacactgaatctgcttatcccattagtgtgaatattcatttattttgttgcataaatattaatgtgtatgattattggggtgtgctgccacaaactcttttsagggttgatatagtatggtgtatgcaytsaattacctttctaaaatctgaaaatttctcattctgraacatctasacttagggtttcagataaaagattgtggatctctgccttatgttaaataatttaaaaggtgttattttgtttttaaaaaatgtgaaatgcttttatattctagtttttcmctttgcatattaaatgmttttrmarttaaaaaaaaaaaaaaaaaaaaaa

SEQ ID NO: 5690 - DNA, 600 bp, Rattus norvegicus
  misc_feature (233)..(233): n is a, c, g, or t
  misc_feature (366)..(366): n is a, c, g, or t
  misc_feature (467)..(469): n is a, c, g, or t
  misc_feature (471)..(472): n is a, c, g, or t
aggtgacactkgactcctgacgaggaggcccgcctgaagaagagtgcagataccctctggggaatccagaaggagctgcagttctaaagtcttcccagtgtcctagcacttcactgtccaggctgcagcagggtttctatggagaccacgcacttctcatctgagctgtggttagtccagttggtccagttgtgttgaggtggtctgggggaaatctcagttccacagctctnacctgctaagtggtacttgttgtagtggtaactgggtagtgtgacattccactgtctccagaacactggcactgcttgcggtttgataaccgtgagctgtgcttgtgggtagaccctacagaacgattcagangcctcatgagctggcgatgaacgtcctaggtcgatgcgtagtctaaagggcgggacctggtggagggataccggcttagcgtaagattgactgacaccgcnnntnngctcgccactaacaacgcgcggagaagaaacagtaacggacaaccatctgcacagacaaagagaagagccgcctgcagccgacgagacaacaggacacagccaccgaccagcgcgcaaacagaaacca

SEQ ID NO: 5691 - DNA, 1400 bp, Rattus norvegicus
yyssggggcgctgagagtccgtgagctgcccagcgcctaaggcctggcttgtagctccctaccccgggctgccggccccgaagtgccggctgccaccatgaatagtgaggagcagtactacgcggccacacagctctacaaggacccgtgcgcattccagaggggtccggtgccagagttcagtgctaatccccctgcgtgcctgtacatgggccgccagcccccacctccgccgmcaccccagtttgcaggctcgctgggaacgctggaacagggaagtcccccggacatctccccatacgaagtgcccccgctcgccgatgacccggctggcgcgcacctccaccaccacctcccagctcagctcgggctcgcccatccacctcccggacctttcccgaatggaaccgagactgggggcctggaagagcccagccgcgttcatctccctttcccgtggatgaaatccaccaaagctcacgcgtggaaaagccagtgggcaggaggtgcatacgcagcagaaccggaggagaataagaggacccgtacagcctacactcgggcccagctgctggagctggagaaggaattcttatttaacaaatacatctcccggcctcgccgggtggagctggcagtgatgctcaacttgactgagagacacatcaaaatctggttccaaaaccgtcgcatgaagtggaagaaagaggaagataagaaacgtagtagcgggacaacgagcgggggcggtgggggcgaagagccggagcaggattgtgccgtaacctcgggcgaggagctgctggcattgccammgccaccacctcccggaggtgytgtgccctcaggcgtccctgctgctgcccgggagggccgactgccttccggccttagtgcgtccccacagccctccagcatcgcgccactgcgaccgcaggaaccccggtgaggaccgcaggctgagggtgagcgggtctgggacccagagtgcggacatgggcatgggcccgggcagctggataagggaggggatcatgaggcttaacctaaacgccacacacaaggagaacattcttcttgggggcacaagagccagttgggtataccagcgagatgctggcagacctctgggaaaaaaaaagacccgagcttctgaaaactttgaggctgcctctcgtgccatgtgaaccgccaggtctgcctctgggactctttcctgggaccaatttagagaatcaggctcccaactgaggacaatgaaaaggttacaaacttgagcggtcccataacagccaccaggcgagctggaccgggtgcctttgactggtcggccgagcaatctaaggttgagaataaagggagctgtttgaggtttcaaaaaaaaaaaaaaaccggaattc

SEQ ID NO: 5692 - DNA, 600 bp, Rattus norvegicus
amgggagactatatcaccattagaactgaragtgccttcaaaaatacagagatctccttcaagttgggccaggagkttgatgaaactacagctgacaacagaaaatccaagagcatcgtgacgctggagagaggctccttgaagcaagtgcagaagtgkgatggtaaagagacaaccataaagagaaagttgctggatgggaaaatggtagtgsaatgtataatgaagggtgtggtctgcaccagkawwtatgagaagrtctgagaamrtygytgactmatmcawatgkwgkktgctcatctgagactgsraattactmagmsagtyctkrgttcaccgcagctggtggtttggtttcttctggccttgccatatgttttatagcaaaggtttaaatgagaattaacctaaaatgtgatttcgacatttccgtttcatcatgtcttggcatgttatccttcgtatcgataagcaaagactccattaaatcacgtgcgagtgaagctaaaaaaaaatcacaagacacaacacaaacaccacacaggaggggacacaaggggccgaacaacgaaaagaggataactgagctggcgcgcgcac

SEQ ID NO: 5693 - DNA, 600 bp, Rattus norvegicus
atacatctatacggacacacgagtcgcasaagctagttcccatgcctgctggacctatgtgtatgcagatggctacatatacatagctgattccttccctttccactgtagctcttcgccttcgtcattgatacacgcattgctcttattcgtggacattacagctgcagttttgccttgaggcaaaaccactcatcccattgccaaaacagttagttgacagtgtctgtgtgtgttgtgtgcagttttcaggatgatataacagatacagtgtctacgctgctgcccctttggagagagcagggcytggttgtatagytgcccagytgctcagtccagtaaatccatggaccagcaactatgcagtcatcatttctgcctttatatgattggctgkatgagggggctaaagaacctatttacaaaagctcctatatacttycacattctatttatgcaactcatcttcacagatcattctaaaatgaacgaggkgatgtatgctgtaccacaaaccatctgtaacagttgtgttctcagtgctgtgtcattccaaataaatctttggtaatctccaarwwaaaaaaaaaaaaaaaaaaa

SEQ ID NO: 5694 - DNA, 600 bp, Rattus norvegicus
gaagatgctattaaaattgaacagcamctmtaawawwwmawwwrrawwtttttcttttggtgaatgcggaaaacacctatttgggttcctttgaattgggagscsctctcttctgtgtagaacasctgtyccaagatagcttagtgtttcgttttcctgttgcatgacagaattcwctattttttccagcagtggaggtgctgttagagtccagtgttctagaagagccagtgtctaaagcctaattttacttttctaattstggtagctaytgccaggaatttttgaaagttttgttgaagtagtctaatattttttatgtaaagagcattaaattttgctatgtwtaaatktttgtaacctaacagtgaatcaatattktctatcagtgccaagggcttcctgtagttctattcaagtgttmcaataaatatttgtagataatagtcgatacttgtgtatgcttattttaaagatctatttargtggaaawagttgtggatstactaaagaataatgmaatwamattatagcktcawwhrmdwrmmwwwwwamcatamawaaawmmwawmwttctctgttaamaaaaammaaaaaawc

SEQ ID NO: 5695 - DNA, 600 bp, Rattus norvegicus
agacagtgcytccctsacsagctgaaggacacaacctttgcccaggtgytaaaagatgacaccaccaccaaacgctggcttgcacaactsgtgaagaacctgcaggagsrccaagtyaccgatccccggggaattcccctgccccctcagtgatcctcgacattccctctcmctactcccytacgttggggagtaaggktggaacctatgaggaaaacagctcaggttttattgccgactgggaatagacaacctcaatgctgaactgtactggagaaaaggggcaaggtaccccactgaggtgtgtgggctgactggaggtcctggatccccctactgctcccaggaattgggctcctgacascagtctgctaccacagccccaggagggtgtcaacaccagcaaatgstgtatttgcagcatgcccaaratgaccctsctccccaacctmtgcytagccamtggtagagagaggagaggtggtaatcacagtaacactgtaggcatggagascacctgggaccaaaccatgtggctttttttwaaaaaaaaaaaaamaaaaaacaaaaaactttgccttccaaaaaaaaaaaaaaaaa

SEQ ID NO: 5696 - DNA, 600 bp, Rattus norvegicus
ttgattcctggaactcacccgatgggaggagaggccagttctcatgggttgttctctgggctctacataggaatacatwaacataaaacacaccacgtctcttattctgctgagctgccctcgaataccctggttgcatgcattgctgatttggggaacttagtcatcattccttgcagccttggcgcccagccagagttgagtctgmggymyghgatcgtgtgtccccctttgcckgsamgrskcggggtggcagcytgagccggtctccctttctccctagtgtagagggttcagccatgtgtcccctgttcaagctgctgtgtttacaagactgtctrcttttcgagtgctgctactgaactagattttccckgyrsgwrsttcysattgttagaggttatgagtatttattttaatttgctgtgaagttgttgttatgcttaatagtggattmmmmtmaaacwcarmacykktckkcykgtgttttaacttaacagcctgcactgatgtgaacagcacctcactgtggggtcacgtctggaaattgtaaccctgagccattaaatgtcagttaaatcgaaaaaaaaaaaaaaaaaa

SEQ ID NO: 5697 - DNA, 1226 bp, Rattus norvegicus
aaggaagagggattgtctctggctcgagaattcaattgtcccttttttgagacctctgctgcctatcgttactacattgatgacgttttccatgctctcgtacgggagattcgtaagaaagaaaagraktyrgyackggccatggagaaaaaggctaagcccaaaagcagcgtgtggaagaggctgaagtcaccgttcaggaggaagaaggactcagtgacctgagtgaagtgggcagcagcgctgtgagctgcagtgctcccccacgcagtcagtactctgcactagtgagcatgctgtttgctctcctgctatgtgcttattctaaatgccactggcgaggggacttgcctactgggagttgtcactgacttactgtctaaagccctgtgctaggtgactctgactcatgaactcatcagggcactgtccactccttagttgtcacattagaatttggttgkscattgttttggttatgttsctgatstaaatttattcgtgtaaattgtttatacccaggararwawrwraammrwrwgcacttgactgagtttacaaaggaamwmwrwrwwrwawwmttcccaccacccttcaacttgagcctcctggtaccgtctcacagaagaacctctgccttgtttagccacactgtgcatcctagagacagcaaagrttgaggagcgaaactgscactwraggtgagtaggtgtctgctgastggactcctgtcatggactgtggagtgccgagswykargctcacacmagaagacgaggccagaaacatscagggtcagaacagtgctyctacagtgagcgagagaagtgcacatwtgamcstgctgctcaggtggtaaggagacaggagcacatttctccctgaacatgcttggttcccccttccctmtctgccctctttacctgkgcaamctgattctgggtytgmtaatcactcaaatctwctttamatccttttktgkgytaggcatcacttctgtactcctcmtwmgtctgmagcakgaggactaccgtgagtttaccgtadattacagaatgagagcctgtmwyagaaaaacawaaccacaagthaataaaaacaaattctwycttrggmmmawwwwhamaraamwrwmarwamwatccgttgaaattagtgcggctatggtacagcttcataactgtgttgtccacgagacttcgggttcaacaatgtgttcaactgag

SEQ ID NO: 5698 - DNA, 600 bp, Rattus norvegicus
ttatccacaggttcatcggctcgagtagcagacactggggaagtagagttaggcagagtggctgttgatgtcattgctgatcaggaggtattacattgataagtcacccgtgcggatcgcacatcatgcttagtgctgtgtgaagttgcttgttttcagttccgaaatctgattcttgccaggcatagattcaaccttgacaagttttcttcttaatttattaagtgttagtttcagtcactatctagaaaggactatcagaatatttatgattaagatcttgaaactgattatcctataagttattcaaaataggcatataaataaatcattataattcagagggtttaggtgttgcaacctctataaatgttctcagataccactggatactttaaaaacatcatattataaatacattaagaagatttatgtaagaaatataagattattaaattttatagaggatttggttcagtaagacccagattctgtatgttttcattatgaaattctaattaagcataatctccatttttttctggaactcttatataataaatcctttgggttttgcaagagcaaaaaaaaaaaaaaaaa

SEQ ID NO: 5699 - DNA, 600 bp, Rattus norvegicus
  misc_feature (480)..(480): n is a, c, g, or t
  misc_feature (492)..(492): n is a, c, g, or t
  misc_feature (568)..(568): n is a, c, g, or t
  misc_feature (585)..(585): n is a, c, g, or t
gaatgtgagcccrtgccctacccagccctgtcagctacacaaaggccagtcctacagtgtcaacgtcacctttactagcggcactcagtcccagaacagcacggccttggtccacggcatcttggcaggggtcccagtctacttccctattcctgagcctgacggttgtaaatgtggaatcaactgccccatccagaaagacaaggtctacagctacctgaataagctgccggtgaagagcgaatatccctctctaaaactggtggtggaatggraacttcmagatgmcaaaaaggvtaacctcttctgctgggagatcccagtagagatcaaaggctaggctgcttggtgccctgtgtctgtgcagggtgagagtacatcggcggagggaggtgaaggtagtagaatcagacctgcaattgagtcggtgccataagacgaacagaaacttcagaatgctgctttatgcctttcaggctncaaaacataccntgcagcctactactcttgagagccagagccatggccccctgagatagccttatgttaggcttcaggaggggaaggngagactcgagagattanattagtgtccatggc

SEQ ID NO: 5700 - DNA, 521 bp, Rattus norvegicus
gcccgggtgtggcagtgcaactgcaaattccactggtgctgctacgtcaagtgtaacacatgcagcgagcgcacagagatgtatacgtgcaagtgaatgaggtcacaggtcagatcacaggcaggataccgtctccctgaaggccactgccaggagacccacagggaaccacagaagcactgtcctccctgcaggcccctgcctggatactcacagggaaccacagaagcactgtccttgtcttttctgctgagggggaagggtattctgggtttcccacagactcctgtgggaagcatctctcagaggcccacccgttctactccacacagatgctgctcagccaccttcccccagacaccgcccgagtccctccatggctggaacaaagttttctacagcaggagctctggagcctcgggcctcgtcatagcaatatttaacagtttattctgataagaaataatattaatttatttaattaaagagaattcttccacctcaaaaaaaaaaaaaaaaaa

SEQ ID NO: 5701 - DNA, 1400 bp, Rattus norvegicus
ggcccaggtgctggccctggccctgctgctggagctgcactgccagaccagagcttcctgtggaacgtcttccagcgggttgataaagacaggagcggagtgatttcagacaatgaacttcagcaagcattatccaatggtacatggactccgtttaatccagtgactgtraggtcaatcatttctatgtttgaccgagaaaacrrsrcwggtgtgaacttcagtgaattcacaggtgtgtggaagtatatcacagactggcagaatgtcttccggacctacgacagggacaactctgggatgattgacaagmatgagctcaaacaagcactctcaggttttggctaccggctctctgatcagttccatgacatcctcatscgaaaatttgacaggcawggacgagggcagatcgcgttcgatgacttcatccagggstgcatcgtcttkcagaggktgwcagacatattcagacgytatgaywcggaysaggatggctggattcaggtgtcttacgagcagtatctctccatggttttcagcattgtataaccaggccytgtgaacatccagcacggcatgcaaaaaactgragatgccaaattcsttacctgtgctagaacagggcatggctgcagtgagacgctgcccttyccsktgactgtatagmtaaytyktggggacctggctgtacatatgtgaatactytggtcagtgactctgtagtggcaatctagctccaytgttagaacacagacgttgggswygskgactgattgtvccatgaggtgagacctaataatggttcaggattstgctcccaaactatcatgttcttttctagatgcctctaattctgtagtcgagatgctctccttasccaatagaatgttaatataatatggaacttgcamaraarrmdwwwmawrwgccttactttttaaaacgaaattttatccattggaatatgtaacrtaagcaataaagtaatgwtwcrrahwrwvwmrwwwwrrmwrrtttttgttttgttttgttttgctttaactaaacaggtggaagaaatgtaccctttgttaccactctagttgttgtgtgaacatgggagagtgggacctaaaaataacgcagactgaagtctcacacaatagccaattttatttagagcatcagaaaatgtatactcttgagtgtgaagaagaatcacatgcgagatgttcaatcacaaagacatggcaaaagcatgttttttctgtgaaggcacatgaatgacagctgctgcagtaaactcctgtctgccatagctgggaaaagcacaacaccacatccaggaccaagtctatgtatgaagaacaggtcgtgtagcataaacaataaagtgttgatacaaaaaaaaaaaaaaa

SEQ ID NO: 5702 - DNA, 600 bp, Rattus norvegicus
aagttggtggccccacgttattgcataagctaaagcagcaaacacccccaggcgaagttttctcttgtttgtgaatagcccttgcagagtttgtaaatcrgcagatggctccccgacccctccttgttttctccagagataatgtgctatatttttgtatatacgataatatttgcaactgtgaaaaaaaaccaagttgtgctatactcccgtggcacmgtcacaaaatattrtactaatatgctgtacattcggaagaatktgacgatcggtatgttttagattgtattttgccttacaggaagcctttattgtaagacgctgacttccctttggacttgatgtatattgtacagttacmgtaaaattcaacctttattttctaattttttcaacatattgtttagtgtaaagaatatttatttgaagktttattattttwtaaaaaaagaatwtttattttaagaggcatcataaattttgccccttttwtgaggatktgagggttgctgcaaaggrgaggttacagatgctwtgttcaatwtaaaatwgaaaatwtwttaacgtttgawwttaaamwrammwwrwwwwrtcttgttt

SEQ ID NO: 5703 - DNA, 600 bp, Rattus norvegicus
gctggccagatctataagaagcacctggactccagacctgggccctgcccaccccagttgggcctggccctggctcaactagcttgctgctgcatgcaccgtcgggccaagaagaggccacccatgacccaggtatacaagagactagaagggcttcaggcagtacctycctggaagctagaggttgccggccatggctctccttycccacaggagaactcctacatgtccaccactggcagtgcccaragtggggatgaaccatggcagcctctggtagtgaccacaagagctccagcccaggctgsccagcaactccagagaagtcccaaccagccagtggagagtgatgagagtgttcctggcctctytgctaccctgcattcctggcacttgactccagattcccacccaagccctgtgycyttmagagaggctagctgtacacaaggaggcactaccagagaatcaagtttgaggagtggcccaggcttccagcctacgaccatggaaggctcatcgatgggcagttcatccctgctgtcatcagagccaccacagatcatcatcaacccagctccgaaaaaaaaaaaaaaaaaa

SEQ ID NO: 5704 - DNA, 600 bp, Rattus norvegicus
gtggccasaagtctctgcgctcctactggaggaactacttcgagagcacagatggcctcatctgggtggyggacagcgctgaccgccagcgcatgcaggactgtcagcgagagctgcagagtctactggtggaggagcgcctggctggagcgaccctcctcatctttgccaaccaagcaggaccagacaggagcacagaccctgtacacgcgacaccaccgaggcccctagagctggactcccatccgcagccaccacaggcgcatcccacggcgcagcgccgccacaccggacgacctgcagccatgccatcgacaggctcctccactgacataccaacacgcgctctatactgcccgcagaagcgacaccacgtacccagctcacgcctaagaccagacctcaacgaaccagcggaggatacgcacagcggccgacaaactccaaccacaggacgcgcagcacgcaccacgagacctcaagagagtaccataccacaggcggacccaccccgacacggcgcgagccggaccaacggggcaccgcccgaaaactcccgcccaacccacatcagcgcccaagggggccgaaccgtacgcc

SEQ ID NO: 5705 - DNA, 600 bp, Rattus norvegicus
cawadcmacatggghtgkggvytsggdmtgrwtgvrcdratmcctccccctasccatamcccctcctgtgtgtgtwtgggaaaaaatwgtktwtgggtttcatwtttgtwthactwwwwywtwgtkywgwkcttwytywytwwtcwgawtaawmamagattctwctammwraraaraamraraagcacaacaatcgmgggggggccggtaccaatcgcckatakgagtgatccatcactggcagcgttcacagtggactgggaaactgagtacccatatgttgagatccccttgcgtggtctacaaggtcgcgagctcaagggaccgagatggtgcggaatagaacgaatgaacggtgcaggaggtataaacatgtctaaattctgttttcagtagttttgtttagacgcagaagagagtaatataagcgaatcaagcgaacgtatagtgcgagaggacgagtgaatggaagacgatagcacaaagagacaagagcagatgaggatagacgaagcacgacgagaaagaagatgacgcaaaacgagcagagacaggaacagaatgagcacaagaggccacaagacaacatatgatgacaca

SEQ ID NO: 5706 - DNA, 600 bp, Rattus norvegicus
ctttgattccatactcactccacccagagctatwggaagcagcaaaaatcccagataaaacagaacgccttcatgccttgaaagaamttgttaagaaatttcatcctgtaaactatgatgtattcagatatgtgataacacatctaaacagggttagtcagcaaaataaaatcaacctaatgacagcagacaacttatccatctgttttwggccaactttgatgagacctgactttgaaaatcgggagtttctgtctaccactaaaatccatcaatctgtcgttgaaacatttattcaaacagtgccagatttcttttacatggagaaattgtgaaactgaaatactgtggatgtccacaactcaaatcaggaaatggggggtcaaggacattcattgcacacctggactcagaatcaccagcgagacgatccgggtataccgagtgaggatgctgaacgtcaacactcacgcgtagggaaagatcggcacaaccaaaaacatctgaaagatcctccaataagaaacgagttagataaggacaataatattatattttttcacactatacaccgcacaagaacagccggacacaaacacc

SEQ ID NO: 5707 - DNA, 600 bp, Rattus norvegicus
  misc_feature (594)..(594): n is a, c, g, or t
  misc_feature (596)..(597): n is a, c, g, or t
gatcgatcgtttttataaccacgggtttcctgaaattctcaattcmccaatatgaaggaamtgaaccaagcagacgttaatatgcawtaagtaatagtacggagattataactttaactgmccacccycagtttccaggtttgtatgctgtagtttttaattctacggttgcgtatgctttgaawtaacacatttraaaaccctttctccccttcwatctctgtctccattctgttagcgatcttgargcagwgckgtttagcataagttgtactgytgaatytggcttcatgggtgtaaacaccgatggtctgtcagtgtctaagattytgggcactgcaagctcggctcggtgcatttgtttcaggtaaaatctgtgcamtaaaatracaaactgkcwmmamaaaamaaammamamaccagagcacacaaacacacaaacacacacaaacgacaacacaaagaaaaacggggggcggaccatggcagaggacataaacggcggacacgcgagggaccggtcaaaacgtgcaccttgacggataaggcaactcctgagagagagtattaggtggcaccgcgagggagaacagngnnggg

SEQ ID NO: 5708 - DNA, 600 bp, Rattus norvegicus
ataccagccgctgtggctaccggctctgtgccagagcgtacctgaacggggatgggtcggggaagggaacgcacctgtctttgtactttgtggtgatgyggggtgagttcgactcactattacagtggccattcaggcagagggtgacactaatgcttttggatcagagtggcaagaagaaccacattgtggagaccttcaaagctgaccccaatagcagcagcttcagaagaccggacggggagatgaacattgcctctggctgtccccgctttgtttctcattctactctggagagttccaggaacacctacattaaagacgacaccctattcttgaaagtggccgtggatttaactgacttggaggatctgtaaatgttaactgatagctccacacaggagccgatgtgactgtcctttaagccatgccctttgggcggagcatgcttttgttcttatcttcctgcctttaatgtccgatgtgacaccttggatccttccccggttcgaaacgtcagactcttagctgttatttatatttttatatcttctgagaaattataataatttgtcaawrrrraaaaaaaaaaaaaaaaaa

SEQ ID NO: 5709 - DNA, 600 bp, Rattus norvegicus
ctgattgtcccccttggccctgcagaacgtgtatgcacctgaagatgacccggagatgaaggtagagcggtacaagcgctcctttgaccaaaatgaggagctcggcctcaatgacatgaagacagagggctatgaggcagacctggccccacagcggtagcagtgggcagcccacaggccagytgcagggcactcacactgcagggttctttgttactgttggagaaggctgagtgttcaagccctcctccgtggtgaggaggaaaccacctgagttagaaatctaagcacacgaggttagcagctgacaatgatgcggctgcaggcctactgtgcttcttgaccttcctttggcrgttttaagtcagtgtgagaagaacgccacaaacaccatgcgtctgccatcaccttttgtctgtcagctctmtggcctccagtgctggacctttgaagtctgaagtgtggagaagcgaaatacaagttgcagctggctttgggcttatgcagtgctaactttcagcatagaagaatkactgagggcaggcacaggtaaaggagcttacattaaagtgatggcttttwamcaaaaaaaaaaaaaaa

SEQ ID NO: 5710 - DNA, 600 bp, Rattus norvegicus
caccacygaatgracgagttctcccgcgggaacgtgccttcgavcgagctgcagatctacacctggatgsatgcarccttgaaagarctgactagtttagtaaagsaagtctacccagaagccagaaagaagggcacgcacttcaatttygcaattgttkkkmyggaystyrmmwgmccygrvyrycrwgkymrmgrgattrgcwgcaccatgtytggcaggaagggcactgatgactccatgrccctgcagtcacagaagttccaaataggggattatttggacatagccatsacgcctccaaatcgggcaccaccttcgtcagggaggwtgagaccgtactgaattttattgactttcttgaagttatttttcagccagtttgtaaaataaasttacttaatcctttcmwmmmmmvramwwwrmmawwaarmmwwtaaatgttcaatgaattgtaacatttatttaggaattagaattggatgtactttggtatattaaagaaagtccatatgttttaarmmmwwmwrwaaaawatgrwgaaaaaagtgctcttagcattctgtataaagcagtactgtgaaawamawrwrttcattt

SEQ ID NO: 5711 - DNA, 992 bp, Rattus norvegicus; identical to SEQ ID NO: 1615
  misc_feature (825)..(825): n is a, c, g, or t

SEQ ID NO: 5712 - DNA, 600 bp, Rattus norvegicus
acactcggctgaagcactgtgtggcagacagcaacatcgtcaggtggttctggcaggcggtggagaccttcgatgaggagaggagagccaggctcctgcagtttgtgacaggatccacacgagttcctctccaaggcttcaaggctctgcaaggcgcggcagggccccggctcttcaccatccacctgattgacgccaacaccgacaacctgcccaaggcccacacctgctttaatcggattgacatcccaccctatgagtcctatgagaagctctatgagaagctgctgacagcggtagaggagacctgtggctttgccgtggagtgaagagcagcccgtggccacatagtcttgctcacaaccaccagacccaaagcatatggcgtctgcgcgcctcccgcatggcgggcggaggcctgagattccagaaaccgagggaaaaggctcgtctccctcctcctttggagaaggcaggccaggggactttcataggtggctcccacccatttattcctcctttattatagttcgcccactcctccatcacccatccaataaaacgcagccaggtttcgccctcaaaaaaaaaaaaaaaaaa

SEQ ID NO: 5713 - DNA, 1400 bp, Rattus norvegicus
ttcgtggtcctgcccatgaatattctgggggcagtgctgctggccatggcacttgcgcggtgggcagggctggcccggcccccagggtgggtgttcggggtgacagtggctgccatggcggcggtgggcggggcctatgtggccttcctctaccacttccgcccagccaactgcttcctcatggccgacttcaccatcacccaacagcccacggactacaaggggctcacacagcgcctggcaagcgaggctggggacttcctgcgcaggaacagggacacgcccttcctgctattcctgtctttcatgcatgtgcacacggcacacttcgccaaccctgagtttgccgggcagagcctgcatggggcctatggagatgctgtggaggagatggactgggccgtaggccaggtccttgccacactggacaagctgggcctcgccaacaacacactcgtgtacttgacgtccgaccatggcgcacacgtggaggagcttggccccaacggtgaacggcatggcgggagcaacggaatttacaggggcgggaaggccaacacgtgggagggtggcatccgtgtgcctggacttgtgcgctggcccggcgtgattgtgcccggccaggaggtcsasgagcccacgagcaacatggacgtcttccccactgtggccaggcttgcaggggcagagctgccgactgacagggtgattgacgggcgtgacttgatgcccctgctgctgggccatgtacaacactctgagcatgaattcctgttccactactgcaatgcctacctcagcgctgtgssatggcggccccacaacagctcgtccgtgtggaaggcgttttacttcacaccgaacywcgascmmccrgrmtytaakggckgswwskccacacacgtgtgcatgtgccacggccaccatgtcacgcaccatgatccgcccctgctcttcgacattgcccgtgaccccagggagcgccacccgctcacgcctgaaacagagccgcgccatggtgagatcctgcgcmacatggatgctgcggcccgtgcacacgttgctaccctagaggaggcgcccaatcagctttccatgtcaaatgtcgcatggaagccatggctgcagctctgcctgccttccaagccccacccactcgcatgccgctgtgctggcgacgggtgagttgggcatgccaaacacacaggtatgcaagcatgggacactgtggcctggtgatttcacctcctgaactgatacctgacacaatcttgctgacatgtatgaaaacatatgaacatgtatgaacatgtgtatgctgagtacaaaacacaggaagagcccctcagcatgaccctgatgaataaatgatgtggacayggaaaaaaaaaaaaaaaaaa

SEQ ID NO: 5714 - DNA, 761 bp, Rattus norvegicus
cacgaggcttgctttgaagggccaatggagacggggacttatttctccacagaaggaggctatgtggttctagatgagtctttcaacattgggctaaagtywsrarkcgcatttgaagtccgtccccggagcagttccgggacccttgtccatggccacagtgtcaacggggaatacctgaacgtacacatgaaaagcggacaggtcatagtgaaagtcaacaatggcgtcagagacttttctacytcagtcacccccaagcagaatctctgcgatggcagatgkmacagaatwacagttattagagactccaacgtggttcagttggatrtagattcagaggtgamccatgtagttggmcccmtgaacccaaasccggttratcacagggagcytktgtttgtcggaggggtkccrgagtchttgctgacgccccgtttgactcccagcaaaccctkcacaggstgcwwcsgtcaytttstgwtcgatgggcgtccggtgagyttcagtaaagcagccctggtcagtggtrctgtgagcattaactcstgccccacagcctgacgcagcagcaagrccgctgaggagagttcttyccagcastgaawtgaacacgaaagtggggggcgggtttgggggcctggaactccccctccstacagaagctctcacctggttgaaggggatttcaataaatctgagactggctgcttcctwaaaaaaaaaaaaaaaaaaaaaaaaaaaaaaaaaaaaaaaaaaaa

SEQ ID NO: 5715 - DNA, 600 bp, Rattus norvegicus
cagacggttgctgaccaggtgttagttggaagctactgtgtcttcagtaatcaaggaggtctggtgcaccctaaaacttcgatcgaggatcaggatgagctgtcctcccttcttcaggttccccttgtggcaggcactgygrmmcgmgggmgcgmggtgattgctsccgggatggtmgtgaatgaytggtgtgcttyctgtgscctggacacgmccagcmcagasctgtcagtggtggagagtgtcttcaagctgaatgaagccaaacytagcmccattsccmccagcatgcgggactycctcattgacagcctcacatgagtcaccttccgtgctgtcgtgtgggctcctgcctctggactttggctcgtttyccacgcctgagttagtytgtaccagatgctgtcagtggggcktggcagagctcaccagrgytgaattgtttgcmcaacccttcacctgtgmcatytcaactattgttaccgaaaagcytgccgcktcacgytggsttcagttsmtgtggststtggmtggaagkwhtgctmtcktgtgccccaccccattaaaggaytgcctcccmcmaawaaaaaaaaaaaaaaa

SEQ ID NO: 5716 - DNA, 544 bp, Rattus norvegicus
ctctaccctgacattcccaaagacaaagcctttggcaaacactacagctcccarccgtgsgaagtttcaagaccgacagaacggggcgacaagggttatgtcccctctgtttttatacccatttcaacaatccgaagtgattccacggagccacagtctccttcagaccttctccccatgtcaccaagtgcatatgctgtgctgagagaaaacctgagcccaacgacaattgagactgcaatgaattccccgtattctgctgaatgataaatcaactcttcaaagaaggaagcagaggaaactagagactgttctttaccmtagatcacaatttatttcttcagctttgtaaataccggtttctagaaaatgataggaagttcgaagctctcttctcacttggtgccactcccagcctggagtgctgtgattaaaatgctaaaggaaacaagctccagataaacttgcaagaaaagacagctttaagaaaccagtgttggtaacaatataacagaggactccttctaaaaaaaaaaaaaaaaaa

SEQ ID NO: 5717 - DNA, 592 bp, Rattus norvegicus; identical to SEQ ID NO: 1621

SEQ ID NO: 5718 - DNA, 600 bp, Rattus norvegicus
gcaaatgatggggcaggggagttctccacgtgggtgacctaccccaagctttgtgatggacagtggcaccaagtgacagtgatcaagggcaggaacacactgcggcyagrdrtcgmcwsacrsrgsrrycacrysacasbccgtttsmcagagaccttggctgattctccagcgcttttgcaccttgggagcccgcccaagtytgaagctgccwggccagagccccctgccwaccgaggatgtckgasgaagstgctkttcaacggggcccctgtcaacatgactgcttctgcacgcatccagggagcagtggggatgagcggatgcccctcargaaccytagcaatktccaagcagggaaaggcactgacccagaggcaggccaaccccaktgtcttcccgctacgctggcattgaggttcccagacctagtgtttgsgtacactttwtgtgattaacaagtcatttytggtttacactgcggaacagacatatttawactttgtccctyttgcccgacagctttcagtamtgagatctgtaaaattgtgggtatggaattaaagtgacytgtttgamwwraaaaaaaaaaaaaaaaaa

SEQ ID NO: 5719 - DNA, 499 bp, Rattus norvegicus
cgctggtttgttgttttgttttgtttttcwkktgrmtaaacttcttttggaagytggtaggttcagccaasrykmkgcaggacctgacgtctgttcttstagatggtttaagtaatcgggactctagcacatcttgacctggggtcackacagctaagcttgctktgcagagcagatmcctgggacagccttcatccytcatggttgstgggacacttctgaggactccttgcttacttarctcagcgatgttcmagytgmtggctagkctgctcagtggcgcggytagacaaaagatstgygccctgtgtttcatcccagaatttgctgccagatcgtacggctggatgtgatgtggggtggggtggggtcmgatmtgrgacagcactcaactgagggcttgtgagacwgtgtccaagtytcaggytggggccattcmtataattgcartaaatggkacgtgtccatttggacmgcmramawaaaaaaaaaaaaaaaa

SEQ ID NO: 5720 - DNA, 600 bp, Rattus norvegicus
tttaccagcgtcgggatgatgagtgtcccagcacctcctcacctgtcagcttcccgggttctgatggasgggcgaagytcagcasctcacagcaggacttgggggaagaggaggcttacaccatggacaccaactgacgctgactytgtgacctgccaccccacagcaccagtgtcctccccagaatacctttggcactytgaagaccactcgtatcaatytaaaccagatgaagaaattaccttcttttwtgrgaagaggaaggaaaaacamrrmacrarsaaacaaacaaaaaaaaaaamaaccytgctttctytgaagggttcagaggctgaattatttttttcttttaaacgggtggtgagataaaaacctgtggagctgaaatgtggggtggatttggtgcacagtggcgcatgtytcgcagactacaargaytggagaggaacatcctgtgaggagtagtgcagccatgaagacccacctgcagggctgctytgaactcctgggtttgggattytggtgcccacactgctcaccccagtagtytggccacagtaaaccaagcctccmgtwaawwmraaaaaaaaaaaaaaaaaa

SEQ ID NO: 5721 - DNA, 600 bp, Rattus norvegicus
cgcacatcacttaggcctgcaccgctaaccaaccaaaggagacccaaaggcaytgcgggtctggagaaatacctatgagaakgccatggttagaatcacagggacagcatgcattcggactctgtcacaagcaagaatgttamgtgggagttcatcagtaaataactggaaaacagaaccctcagatggtgcagataaatcccgggaccacattactcggagcacgtttctacagtgtacacagacacagctcagctgtcctggaaccacagcagtcagtctccagggacttctaagtagtggttacaggttatcatctggataagcacagttcgttgtwccgtcttrtgcttgacatgttcatttggaaacaacacatttacctatctgacggcttagtttwtaatggctggacactattastatacggcaaaaatgcctacatctctggagtagccaccaagcgggcgccatgtcagtgcatgtggagactgtactgtttktgtktkctttytggytgttaaatatgaaggtattyttagtaattaaatataagttattagctgaaaamaamarrahawaawgagaacattgcggccg

SEQ ID NO: 5722 - DNA, 600 bp, Rattus norvegicus
ctatagtgtagcgttcagccctgacggaaagtatttggccagtggatcctttgacaagtgtgtccatatctggaatactcagagtggaagtctcgtccacagctaccgaggaacaggcggcatatttgaggtgtgctggaatgctcgaggagacaaagtgggtgccagtgcatctgatgrctctgtctgtgttttagatctccgaaagtaaacacaaaawrwaraaaamaaaaccattctaatggagcagcagtgaatgtgtgggattgcagcaccctttcctatgatgggctccaaactgtgtgaacttgacttgttcgagtctacttggaaatcacctgtccctggccacaggattatttccccccytcccctaatctccatccagaagtttaaaacacaaacaaatacaaarwmawamrmawrrttgtatcacaggaatatggtttctacctagaatgctcagctggggaaggatgaagcaagccatcagctacatggtacatggttggtttccatccagaacaggctctaatgactgaacagggaaggaagaacacaaagctgtgccaaaaaataatgaaaaggttaaaaaaaaaa

SEQ ID NO: 5723 - DNA, 1400 bp, Rattus norvegicus
aaaagagcatagacaacagattctcaacagcaggatgtgggtgttcaagtttttgctgctacccgtggtgagctttgctctatccccggaggaaacgctggacacgcagtgggagctgtggaagaagacccacgggaagcagtacaacagcaaggtggatgaaatctctcggcgtttaatttgggaaaaaaacctgaagaaaatttctgtccataatcttgaggcctctcttggtgcccatacgtatgagctggccatgaatcacctgggagacatgaccagcgaagaagtggttcagaagatgactggactcagagtgccaccttcgcgttccttcagtaatgacactctctataccccagagtgggaaggcagagtcccagactccatcgactatcgaaagaaaggctatgttactccagtcwaaaaccagggccagtgtggttcctgttgggctttcarctctgcgggtgccctggagggccaactcaagaagaaaactggcaaactcttagctctgagtccccagaatcttgtggactgtgtgtctgaraactatggctgtggaggcggctatatgaccactgccttccaatatgtgcagcagaatggaggcattgactctgaagacgcttacccgtatgtggggcaggatgaaagttgtatgtataacgccacggcaaaggcagctaagtgcagagggtacagagagatccctgtggggaacgagaaagccctgaagagagcagtggctcgggtaggacccgtctctgtgtccatcgatgcaagcttgacatctttccaattttacagcagaggtgtgtactatgacgaaaactgcgaccgtgataatgtgaaccaysccgtgttggtggtgggctatggcacccagaagggaaataagtactggataattaaaaacasctggggagaaagctggggaaaywmrgrckatgttctcttggctcggaataagaacaatgcctgtggcattaccamcctgsccagcttccccaagatgtgattcaagccagccagcccatytgttytcacattccttcctcaacagtgcaagcgaacggtggctttggagtgacacctbtgvttcccttctctccacccaaggccctttthtttgtggacacaactgggcattttytgagagttgtggccyctgtgmtgatagacgctggagtcctccagcaggctggaggactaaggtgaccttcccaagcccctgtyttctatatacaccmgtgcagatttcagtcttccmctgagatgcacaaatctattcatgattctttgacaaacttacatgatgtaaaaaakgtttccttctttgcatttgaaayaaagtatctcgtttmcwawwwrawramraaaaaaaaaaaaaaaaa

SEQ ID NO: 5724 - DNA, 528 bp, Rattus norvegicus
agcagattcacgtcgtaagggtcgcaacaggcggatgcatgtctctgagctgcgtgctgaacgtggaccacgtagcgcagctcactggtgactcggctgtccccatactggggaccaggctggatatgacacaccgaagagggggcagatagatgccaggaagacagatgagttgtggctggggcacactgagatcgttgggccaacggagacaactaacccatacatgaaccytggcccaagtgtagcttatktattaacaagataacccgtgaatgtattcctggaagagtggcccaagctcaattcaggatctaacctggagggaggsgacaagaagtggggctccagagtggagcggaaccagagagatgtcttgggtggcagccmtggggaaagcattctctwtcttgggcatcgaggagaaagctgtgaacagattrggctgtccagtgtggggtgaggcaggccaactgtastaaagtaatacaataaacacattatcagctgaaaaaaaaaaaaaaaaaa

SEQ ID NO: 5725 - DNA, 839 bp, Rattus norvegicus; identical to SEQ ID NO: 1629

SEQ ID NO: 5726 - DNA, 600 bp, Rattus norvegicus
tgtctgtgagtttgtacataaccctaacctcatattgttgctgagtttcattttgaggaaggcaagtwtgattttctttcctttaatgtagatgctcgggtttccattttgttgctgcaykgcasdwggcscatggccctgtgggtgtggtccttctgattctagcacagcgtaaaaagagcccacagaggccagagaggcwcacttggatttcttwytgtttgtttgtttaacttagttcttttwacttgtttgttcttgtgattgtagtgatggcttcaaagatacagagtaagtggaggagtgggctgctggtctactgggcactctacttcctgttacaggataactgtaaatgtacatattttaattgcactggtaatgggacacgccagtgtytagaccactgcaccaacagcctctcctggctacagggtgcctgataataatgtcttgattttcctttgggactcagctatgtaggtcttcccccgcccccgccccccagtargggagtacaggtgatcactgtcattgcaattgcttttcttttttaataaatttataaaaatwctwaaaarwaaaaaaaaaaaaaaaaaa

SEQ ID NO: 5727 - DNA, 600 bp, Rattus norvegicus
ctgcgcctgctgctcgataagaagtatgcactgccctaccgggtgctmgacgctctggtcttccattttctggccttccggacagagaagcgccagctgcccgtgctttggcaccagtgcctactgacactagcacagcgctacaaggctgacctggccacggagcagaaggaggccctcctagaactgcttcggctgcagccccaccmmcagytatmyycggrmaysaggcgtgagcttcagagtgcagtccccagagatgtggaagatgttgttgtcaccatggaatgagaacagtcacctrtgttagtccaggggatgtgggaggaccccagctggtgtagttaargacytagtcaggacactgaaaggttaccgtggcatctgtggctccagtcttrgrcagggaggastgcatctgrttggmtttytcgccartccctgctcacttytrgaacctaactggagtcaccccggttcrrtaccccacagcccacstggcacmtsgymtgagggccgctctcyccaggtactgtgtaagctcactgggttkcggataaaccagawtcagttatttawwrrdaaaaaaaaaaaaaaaaa

SEQ ID NO: 5728 - DNA, 702 bp, Rattus norvegicus
actyaygwggacaagtgtggccgtggtttcaaccgggtagacaacctgcgttctcacgtaaagaccgtgcatcagggcaaggcgggcatcaagatcctggagccagaagagggtggtgaggtcagcgtggtcactgtggacgacatggtcacactggccactgaggcactggcagcgacagcggtcactcagctcacagtggtaccagtcggggccgcagtgammgctgatgmrwcgsaggytytcmamgctgagatcagcamagctgtcawkcmagygcaggawkawsmtcccaacacccacatchtgtatgcgtgtgattcctgtggggacaagttcctggatgccaatagcytggcccarywcgkycgrrksmamasagcacaggcaytggtcatgttccagacggatgcggacttytaccagcagtacgggccaggtggcgcgtggccagccgggcagatgctgcaggctggaragctggtcttccgtcctagggatgggactgagggccagcccacactggcagaaactccacccacagytcctgattgcctaccacctgccgagtaagcaggtggccctctgactgtttatttaaggatgggtggcaccccaggactcgaattccggtgctcctgccccattccctagagagaataaatttgattattttcwamwrwmmaaaaaaaaaaaaaaaaa

SEQ ID NO: 5729 - DNA, 600 bp, Rattus norvegicus
ccgcctctgccacccgtgccagatagactacgacttcgtggggaagctggagaccctagatgaggatgctgcccagctcctgaggtccctcaaggtagactcccaactccacttccctcctagttaccggaacaggaccgccagcagctgggaggaagactggtttgccaacatccccctggcctggaggcaacrgcwcwmkarrctctacgagsccgactttgttctctttggctaccccaagccagaaaacctgctcagggactgagctcccataagccctcacgctgccacaagaaactgagatggtcctttgagaatgggaccccgtggcctcctggttctctcctggcttcctgtaccttccctggtgtagacaggcagaggatgacacaacccaagcacctcactctccagagtttcgcgccccacccccacccccacccttttgcaatctgggtttgtttactccacagcctgtactcatgggacactgtgttaatactgttttctacsaytaatatatttcagatatatttwwtaaraaarwrrrarraarctggagtaaagygtggagcccgcaaaaaaaaaaaaaaaaaa

SEQ ID NO: 5730 - DNA, 596 bp, Rattus norvegicus
ctcacagcactgcaagcagtgacgaacttcggtgctccggctgaagtcttcgactcggmagaggctgaggtgttccagaggaagcttgatgaaacgacaagattgytcagggagctccaggaggcacagamcgagcggctgagcactaggcctcctyccaatatgatctgtctcttggkyccttctwacagagaaatgtaccttgctgaacaagtgmccaatamccttaaagaactcacacagcaagtgactcccggcgatgttgtaagcatacacggagtccgaaaagcaatggggatttstgttccttcccccatcatgggacacagcctcgtakatttgacagaagagtgcgaagaccctaaggaghccagtactgccgagagtgggcccgccgcgagctgaactcgcctgctatttgatatattatktacatatttttcattccgaamttggaggtgctttcagaagatagtaactatttgtaaattgtgttttaattaagctttggaacagttccttttaatgttccaaagaytggacttgtattaggaaataaagctgaacctgggamwrwrraamaaaaaaaaaaaaaa

SEQ ID NO: 5731 - DNA, 600 bp, Rattus norvegicus
gtggcagtccatctcagagatcgcctccacttgcaacacaattctggagtcactgtcccggkagggacagcccatcytagagagtggagaccccaaggaaacttcaaagtgtaattctgmrcsagaacctgggagcytgtcagaaaaggtctctcacctagagtccatsctgaggaagctccagkaggacytgcagagggagaaggcggacaggrcrgcmykrgrggaasaggttcggagcctcagacacaacaaccagaggytgctggcggagtcagagagtgccgccacccgcctgctcctggcctctaagcagctgggttcacccactactgaccttgcytgagttccmkcytggacctgcttgggactgcytggcccytcagagcagytgggtcatactagtgaccttcctcaggacgtctyccctgcgctgaggcgcatctaagcaytgcccccgctttcaggcccatttggtggctgatacctrtccctgtttgtaaatattctgtaaagaaaaggggacatcagagtttaaaaaacaaaaaaacagaaaacaaaaaaaacacaaaaaccctgarmaaaaaaaaaaaaaaaaaa

SEQ ID NO: 5732 - DNA, 644 bp, Rattus norvegicus
  misc_feature (22)..(22): n is a, c, g, or t
ctagcctggctaccaagagtgngaagacaggagcagattgctgctgctctggggctagacgctgtcctctctgctgcttcactggcagactgggctctaacccaagtggaatgcaactgagaggttcttccggggccmgcctkmcvycacacacagscmykagkgwymcaytkgttcykgaatgtctctgcggtacaaagatgcacttttcctcatggggcaaagtctgcctcttctgccaggcagwkcccatgtgcccctmttcagacygkywctkwkggcttrgaccataatcctctgctgcccagggcattggascccctstgctagraagctgtaagcagtttgagtaatcatcggctycttcccagcacattgrtgaggaaacaggccacgacttgtcactcagcactaacccccagttgttgarcagccttctccagccytgctttaggatgacaaatgaataacacctaggcatagaamccarwmwmwmwsrwwwrwwtgtattatgttcttcaacattaaagatttwahcwmcaaarrawmwmmwrmarwmwwraatctaaagbaatyygcymactattttgmttsttcagagramwrctaataaaaatctmaaaggtwmraaaaaaaaaaaaaaa

SEQ ID NO: 5733 - DNA, 382 bp, Rattus norvegicus
agcaaaagttccaggtggtcaagcatgtgcgtaggcaccaccccgaccaggctgaccccaaccaaggtgttggcaaagaccctaccactcccacagtgcatctacatgatgtgaaactggaagatcccagccctccggctcctcytgctccccctactggacctgagggytgagccccttccccatctytggtataggaaaaagatacaggccaagatatgcaaactggaactatagctagcctgaggaactcagggcgtgagggaggactggctttgggatgtcagtgtggctggaacacactctctacccttgggactctagcctttgaaatgaacagttatataaaagataggcttggrctwaaaaaaaaaaaaaaaaa

SEQ ID NO: 5734 - DNA, 499 bp, Rattus norvegicus
  misc_feature (65)..(65): n is a, c, g, or t
gataaatccagaaaggtctgggtctcccccttgtccatctcagtccacactggaagctaatctgnccgtgcccccctcccccacttccctgcccgaggaggagcagctaaaggtcacgtgtctaccctctgtgcactgccccacgatggcctcgcggtgtcgacaccgacaccgacttataagggccatattttcatctcatctcacctctaaacttgctgccaaccccagacctctgtgtcctttgccagaagctcttccggacatcactgtagtagacaaggtcagttttttccagccaggagaatttgggctttgttctggccataaattcctggcacttgctcctccccaaccgctgctctttatctaaagtaatccgttcaccctgacctccgtaagtgtctattcttggcgtgggatgcatttgttatgtgataagttattcacccgggtatgcaataaagatgtggtcgcaactaaaaaaaaaaaaaaaaaa

SEQ ID NO: 5735 - DNA, 506 bp, Rattus norvegicus
ctaacttcgccgagggacaagccttagagcacagcccacagggggattaatgtggcctggccccttacccctctacctcagtggcccctcaggattggaatggccgaaaggggagggcatccatctctttcccatagttttggggcctaataaaggggctttccttggtacccccctatggtactaggtactakgtacctctgacctatgaacctgggaggtgaggaagagagggtccagggaaggggtagaagaatgtattcaatggttccctcctcatccccagcagtttacctgwcaatgcctacccatgagagggccctttgctgtggcccctttattcaagacagtgggatctacctgtggcctggcctccctagtgtcattcacattgaatggggatgaggtcagacagttgctcatagagccatatatgagcccgagctgtgggctggaaatgtccttaataaacatccttatttttcwrmaaaaaaaaaaaaaaaaaa

SEQ ID NO: 5736 - DNA, 600 bp, Rattus norvegicus
tctgcaacmccaagaggaaggttgactggctgacagagaaaatgagagaagccaatttcacagtgtcgtccatgcacggagacatgccccakaaagagcgtgagtscatcatgaaggmrykmsggkcaggtrmcagcsragwrbtcrdchcbasrgatgtctgggcgmggggcctcgatgtccctcaggtgtccctcatcattaamtatgacctgcccaacaacrgasraskgtacattcacagaatcgggagatcaggtcgatatggacgcaaaggtgtggccatcaattttgtgaagaatgatgacatccgcatcctmagggacattgagcrgtactactccacccrgatagatgagatgcctatgaatgtggctgacctcatctgaagctggtgctggtacaccaarggcctgtttggagctcctctttggacatggaagcttctatttaatggggtttatatgaactgtcttytcatagccytcaggaggaccctcggcctctgccatcttttctaatgcacgtgtaaataatccaatgcgctaaatcttttacattaaacatggaaattttcmmvmraaaaraaaaaaaaaaaaa

SEQ ID NO: 5737 - DNA, 839 bp, Rattus norvegicus
  misc_feature (104)..(104): n is a, c, g, or t
  misc_feature (139)..(139): n is a, c, g, or t
caakktttkttkthyttttttkwkkbbkkdkwkywdtaktttccaacttttawttgagwwwwwmaraaagtacatgtatcaaaagagcattcarattgacaganagggarggctggtgackgctactggggatgggtancaagctgaadgcttctacttggstccaractgttccgastctgggcctccaatttgggcacgggcctckamagtgaccggmatggygatytccgctgattgkgtgamtgctttgggcagcggagcctycamsgtgagtgtgccytcaggggacasggaagakgacaccavggtggggtccacacctgragggagcgtgtatttccgggtgaagcaycsasagatgtadccatgttcatcctgcctttcttcstgcktgccagtgatytccaccamgccttccttggkcttmactgtgagctcctyargagcgaagtggttgacgtccarkgacacgcgccarmgatcggscgtctgtcggatctctgwvasaccgctrctgagttgccggttgagcgcccggctgaaggcggscsyggccagggtcactgctgcggggccctcggcggtcgcggcgggcaragggcgcacatagccgggccaaccagcggagctgaaccactgagamcactcatcgggaaaccgaggcaccccgaaagcttgatcgaagaggcggctgtgggcagggtaccagtcccggaacggctcccmkctggggctccgcagtagcgagaagggcacgcggcgctcggtcatggtcttggctgagctggtcagggctsaggatctagaagcactgggcwcswsghbycgwgaagtgc

SEQ ID NO: 5738 - DNA, 600 bp, Rattus norvegicus
cgcmccagccaccgtgacctgaccaagccattgctccagcttmagagactaaggaagaagtgagggswsgagktggactgtgatccggctggggtgctctcttgccattgagggtcccaggcggtcccttctgttatccctcctgctcatggctaagtggctggtgaaccacagccatatatgcattcaaccykgcwcsscstytgcctyctyctccgcccaccbtagcttmsatccctcyacacaatcchtgcstgaktwaagcyttgtcacatcthtaaacacaccaaacctctgtywhmraarwrarwramrwrwawrmttwkgaggrwrrrctrwrrwammwgrwrmmarrmawrcattytkggatagcrgagatgatgaattaatttgatagagaggtgatctccccgsccgtcaccattcaatbtgataaaagtaccgagctcggaawwwmmamrwmmarrwwtcgttttgtatctatgacatccttggcctcagaccttgggcccatcccttccttatacccagttttgttatctacaaaaacaagacaccaaaaaatagcttggcttcccttctaaaaaaaaaaaaaaaaaa

SEQ ID NO: 5739 - DNA, 686 bp, Rattus norvegicus; identical to SEQ ID NO: 1643

SEQ ID NO: 5740 - DNA, 600 bp, Rattus norvegicus
rsamraksctttttgctgaggctacccggatcctcttmttcagcacacccaaaaagatgacagactatgccaagaagcgaggttggctgytgggccctaacaactactacagctttgccagccagcagcagaagccagaagwcagcaccatcccctccactgagcyggccaggcaggtcatcgagtatgcccggcagctggagatgattgtctgagcctcggccaaggtggtgggcatggctggtccarcagtcttagcacgggctggccctcaataaaggcagattaacctcmwawrrrmmmwarwmwmmmcagtgggatggtggagataagaatttgggagtttgggggcctctgggccttctgggtgagtgtttcctcccagttgtcactgctytgggttttcagcatagctgcccagtggcccgcaggagagcacaggccctgactgaggtgctcttctagccagctgtgggtgccttttggtactgggcaaggggattgttttccagtgaagcaccatgtgtctcagtttttaaaaaatgttggccatggattaaataatttttaaaatgamamawraaaaaaaaaaaaaaaaaa

SEQ ID NO: 5741 - DNA, 542 bp, Rattus norvegicus
gcggccgcagtctcagctctgggcatctggggaacccaagcggcttcgcccaggcattcgcgcgggcgcccgcggtctgggtcccacctcctctgctttcgcacccttgaagttttggagcaccaggaaaagagggcaaggaaggagaggggaagcgaaagcatatcctaaaacatttacttaaaggaggaaagaaaaggggtcgcagaaatggctggggcaattatagaaaacatgagcaccaagaagctctgcattgttggagggattcttctggttttccaaatcgttgcctttctggtgggaggcttgatcggtaagtgtgagagctgcaaactttccccctttcgctttcttcgggccttccctcttttgcctcttgggctacttgttacagtatcgctgccttgcctctatgatctaattagtccggctattgtgcttaagaaagcagagctccatggggctccatggggcacaatccagtctagtggcaaagagaaaaggaggggaaaagttttggcctagtttcagtatccact

SEQ ID NO: 5742 - DNA, 549 bp, Rattus norvegicus; identical to SEQ ID NO: 1646

SEQ ID NO: 5743 - DNA, 678 bp, Rattus norvegicus
  misc_feature (166)..(166): n is a, c, g, or t
gttcccgggctccggtgccttccgtgagttggtttcctgttctaactgcacggattaccaggctcgtcggctccgaatccgatacgggcagaccaagaagatgatggacaaggtggagtttgtccatatgcttaatgccacaatgtgtgccaccacccggaccatntgcgccatcctggagaactaccagacagagaagggcatcgtsgtgccagagaagttgagggagwwsawkycsscasgackscaagaactgatcccatttgtgaagccagcacctattgaccaggagccatctaagaagcagaagaagcaacatgaaggcagcaaaaagmaascaaaagaggtcmccytggmgamccasctgcmgamcatggaggtcactgrgscctgaacactgcctcctcccagtttkccagacttacttgctrcctrctgggatcccaggtctsccctggaacagagaggccgagtaccactcctcaccctgtcccatctgactgcacagcatytgggwccatytvccgggtactgcgcgggtkttcccatcatctsgaatgggcccagggtctcctcmctgatgactggtgaagccacgcaataaagcatctytggggrgggcacaagacttccccagtytcctcmmmarrmwwrdammwwraaaaaaaaaaaaaaaaa

SEQ ID NO: 5744 - DNA, 600 bp, Rattus norvegicus
gttccaggacasactccacagcaggaagtgaccacggctcccgctcagtagtgggaactggagtcctgcttccctagatcacccagaytggacaacgggggacggggggtgacaggcagatggtgatgcattgtccctcacccccaggcaccaggacctactggsccagtgggccaggcgtcgtcaggaggtaggagacttggactccttaagccagtctcccactgcctcctgtcagtgggccagggraccagagcttccaccaagacacttgaagtgacsattcctccttggggccctgcctggggtaagacagtctmtatgcaggaccctgcggccttccctacacgctgtattgtgtagagccggtggccctaatcttcattgtaatgtacatttcctgccccttctccagccttgatttgattttattttgacccaccgcttccatgctttytgggtacccctcagagctgtggtggggagttggasaagagggagtggataagtaagacagggcttctcttaggctcactggccacaccagggcaccccaaccaataaacagaaagtgttmcagccaaaaaaaaaaaaaaaaaa

SEQ ID NO: 5745 - DNA, 600 bp, Rattus norvegicus
ctggataccctggatgagtcttgaggtaataccactacaaacttcacccaagggactgcttcaccctcgacttcttcagcataaattcaacccttcatacatcctagaggagggacaactgctaccttgtgggactgcacggtttgggtattcytaatgaccaggcagatgccttaaataaacaataaatgtcttaattatacaccccaagtaaatacgggtttcttacattaaarrawrwawwwatmtaattatttgttaagttgtaaaaaaaaarrwrwarrttwtgtatatatccaaagatatacaatgtgtacattatttgtaaaaagtttagaggctaccctgtaagaacaaatataagtattctattttgtcaataaaawramwwwwrawaaatgatttaagtactaccctgtcccccacctcttttgaactgttccccatatgcttgctaaggacatgttcctcacattggacattttctggcttgccattttttactgactttaggcatggagacaattacctgttaacctctaattcttgaactgttagcaaagtaaatatcattgttgaattgaaaaaaaaaaaaaaaaa

SEQ ID NO: 5746 - DNA, 600 bp, Rattus norvegicus
accatgcmtagtgtgtgtragggctcagtytgccccagcctcactcggtgggatmtggaacaccaagtgctacgaactatctagaaaccacgatcctctcagtggtgagtgtgccacactgtcaccgccttccacytcccagcctgacaccccgtgtgccgagagctactgcagcaggctgggctatgtgtcmtgrwcmagagmtagmytgcagtgcagacgctctggmtgatagctcacccttcctgtctgcttcagtgccgtcggatttagccgcagaggacacacataccacataccacycaggcttccaccacccacggccaggtttccttcaagkccaacytgrgccyttkgcctgtgctcacccagtgctcaggaggccthtcggccaggycggcggctgcatytggttttccagtgaagcaggagtgtgtgggtkagtragttagcmcttcacatatgtctctatgccgacttcawagcctmcttaaaaatwcatttacagagtcccttgttactttttccaagcctttsttcaaatattttgtgtkkacattaaaaagttykcagagargcaaamaaaaaaaaaaaaaaaaa

SEQ ID NO: 5747 - DNA, 656 bp, Rattus norvegicus
  misc_feature (624)..(624): n is a, c, g, or t
attactcctcgcagcagtccagtcagacctcctgcgctccccagcagagctacggaggggctcttcaggcggaggtggtagctgcggaggtgctcctccggcggcggcggcggcggcagcggcggctgctactctagcggtggtggcggcggcagcggtggctgcggtggaggctactccggaggcggcggtggctgtggcggcggctcttccgggggcagcggcggtggatgcggaggcggctactccggaggtggtggcggcggttccagytgcggaggcggctmckmrgggggcggctctggaggtggcaagggtgtgccagtctgccaccagacccagcagaaacaggcrcccacctggccgtgcaagtaaagtccccgggctgcagcggagacarcggagytggaagagttytccgtggrcgcctwtgggsttamytttytcatgaaattkmccgrggkyyycaaacycccsvytykargstyaccccctyaccctcacccccaagaagaagcctttgrgtcgctcaagktgtatcttgttctgtcgatttttcctyttggkttytgaatgrttccctcccaattccmgtgcctactcmgtcaataaatttgcaattcntgggraaaaaaaaaaaaaaaaaacctcgtgcc

SEQ ID NO: 5748 - DNA, 600 bp, Rattus norvegicus
gattgttttggctccttgtagtgactcttcgtgttttaatcaagtcagattgttgtatttattccactattttgcatttaaatgatgacataaaagatataaaaaatttaaaactgctatttttcttatagaagagaaaatggatgttggtgattgtattttaattatttaagcatctctgtttacctgcctgrgacaacattttatggcagtcttatgtgcaaagatcctaaatggacaaaacaaaatttaaactgcttacaatgatccaggagttgcattatagccaatagtaaaaataataatgataataataattaataataataatgaaaccatgtctatagctgtagatgggcatcacatctgtaaagcaatcaattgtatatttttgtgatgtgtaccatactgtgtgctccagcaaatgtccatttgtgtaaatgtatttattttatattgtatatattgktaaatgcaaaaaggagytatgattstgtgactccaatcagttcagatatgtaactcaaattattatgcctttcaggaggatggtagaacaatwttaaacaagcttccactttwaaaaaaaaaaaaaaaaaa

SEQ ID NO: 5749 - DNA, 600 bp, Rattus norvegicus
tgtaaaggtcattttaamcraaacaaaaamccaaagccagctttgatattaggaatcaaagtacaggtttyrsgarkgcagaagagccttcctggaaatagtgatgttgtttaggaagtctcttctccctccagctttccctgtmtgactgtctcagtttgggcaaagagctttagttcgctttgaccgatggcctagaagtaaaatcaagcaataagtcaccagctggagatctagacaaacttccatagttgttttgaaataaaaatttytaagtgdwwrwrwrrwawmaaawwwrwmawmmattatcacaaaagccaatttagaataaaacattttccgttgagagacagaactttaaagacattacttagacattagacatgcccttcctggccccaggatgaaatctcattaatataagattgacagtttcattcatttataatttgattctgtggcctttagtgcattcacactgttgtgtaatctcatccaagtcatttccagaacattccatcattccaaatagagactcaactcataactactcttacttacatctttatgaatatgtattacaggaccgcatacagagag

SEQ ID NO: 5750 - DNA, 600 bp, Rattus norvegicus
  misc_feature (20)..(20): n is a, c, g, or t
  misc_feature (46)..(46): n is a, c, g, or t
  misc_feature (87)..(87): n is a, c, g, or t
tkccsttccaytwccrykwnkccttcatgcawccshtartccctkntraaggcctgcrccagttgtgcccagggccctgtmwwtykntacccgttatttcmtatctcakgagatcamctytragagcmccatgtcayatgcccaatggcccaatawaggttttgagcmycmmwrmwrmwdmmarawhvmmavwrwmwrwryycactrgggccktatcccaggcaggtaccacactaggtctcctttatgctctaggatgacacttgggctatttaacccgccggccagaatccattgttccmtgatccccggctccagttggccacccttcatggggacaggaactrcaaaaggtgccacactgtccmtaatgaatatttagcacagcctcaacatggactctaccccagccagtgaayaccaggctaaaattaccacccygtgaytgtgagctgtctcctaagctkccaatcagggcaaggtgctctcagatggcctagtggcttgaatgggacacttatggaagggtggatgaataatggattstgggtggmtgggacaaatgaccatcaaaagacarwmwaaaaaaaaaaaaaaaaa

SEQ ID NO: 5751 - DNA, 680 bp, Rattus norvegicus; identical to SEQ ID NO: 1655

SEQ ID NO: 5752 - DNA, 679 bp, Rattus norvegicus; identical to SEQ ID NO: 1656
  misc_feature (660)..(660): n is a, c, g, or t

SEQ ID NO: 5753 - DNA, 1007 bp, Rattus norvegicus; identical to SEQ ID NO: 1657

SEQ ID NO: 5754 - DNA, 709 bp, Rattus norvegicus
catcttgggaactgggagcccgctgatgagggtcacctcgatggacactcgaccttacgttcttcaaatttcacactccccaccttttacgtgggcaacttctccatcccctcgggcatcccagacctgccgcaggacaccttcatccagtttcccggatggcccaagggccaagtatggatcaatggctttaacctcgggcgatactggcccacaaagggcccacaaatgaccttgtttgtgccraggaacatcytgaccacttcagcyccaaacaacatcacagtgctagaactggagtcgtcaccctgcagtaatgggaccctagagctatgwacagtagagtttgytgacacyccgghtattggctgwcctcagtggccattttycagbccagtytggtcaagactcagggctgacccgcbtgcgacgactgatcctstgggcacacaaccmtactcttgmtacgtggmccacccttatggtacagaattgtggaatgtgtgtatcctgmtggtgactgcagccctgccttgcctgaccacccaccmtsgtgrccaccaggaaggctgaagagagtggataccataggaatacacagctggtgtrccgagttggaacaaaamttgaataatgtccsttattytgasttgaartaatcatgtytttctgatgaataaaatttgawtgcaaaaaaaaaaaaaaaaaa

SEQ ID NO: 5755 - DNA, 600 bp, Rattus norvegicus
tcaacaaagacaagtttgcgaaggccaaagagttakgtgccactgactgtatcaaccctcaagactacaccaaacccatccaggaagttctccaggagatgactgatggaggggtggacttttcatttgaagtcattggccgtcttgayaccatgacttctgccctgttaagctgccattcagcatgcggtgtaagcgtcattgtcggggtgcctcccagtgcccaaagcctytccgttaaccccatgtcgctgctgctgggaygcwcmtggaawgswgcwwtmytckkcgggtttaagagtaaagatgccgtcccmaaacttgtcgctgacttcatggctaagaagtttccgttggagccgctgattactcatgttttaccttttgaaaagataaatgaagcatttgacctgctccgtgctggaaagagtakcyktasmgtmytgacgttctgagaacacatgaatgccttcccggtttctgactcctccgcctaccgaatcaagcgccagccacatcacaaccttaaccttgctcttcagagacacacagccaataaagcacctgtgcaagcwwwmmrwraaaaaaaaaaaaaaaaaa

SEQ ID NO: 5756 - DNA, 1150 bp, Rattus norvegicus; identical to SEQ ID NO: 1660

SEQ ID NO: 5757 - DNA, 656 bp, Rattus norvegicus
cacgaggagaccagcaagacagatatcacagagctccggcgcacactccagggcctggagattgagctgcaatcccagctgagcatgaaagccggcctggaaagtaccttggcagagacggagtgccgctacgccctgcagctgcaacagatccaggctctcatcagcagcatcgaggcccagstgagcgagctccscagcgagatggagtgccasrassaggaatacaagatgctgctggacatcaaaacacggctggagcaggagatcrccacytaccgcagcctgytagagggccaggatgctaagatgactggcttcaacactggarsmmawagyrbtrccacmwmcaasacawccrcctccccswccwyttytggtcgcccggattkscrmragkattaaytcagcctggcgtccyttccctggccttcaggaggagagytgwtrscacctktaggatgagaggactgaaggatgtgaakcccagtccycttgycccccctgagggtggaccctcccccatctctcttgawtggaatcctcttcctccmtaccytgttctywmtattctttggyttctcaatgtctytaybacaaagaatagatgmttcaataaagtttcktgatkttcwrmmaaaaaaaaaaaaaaaaaa

SEQ ID NO: 5758 - DNA, 1089 bp, Rattus norvegicus
cggscgccctcccgtgagagctcacgcctcatgtttgagtaccagacgctcctggaagagcctcagtatggagagaacatggaaatttatgctgggaagaaaaacaactggactggtgaattttcagctcgttttctgttgaagttaccagtagatttcagcaacattcccacgtaccttctcaaggatgtaaacgaagatcccggagaagatgtggctctcctttctgtcagctttgaggatactgaagccacccaggtgtaccccaagttgtacttgtcaccccgaattgagcatgccctcgggsrckmskcggctctccatatccctgcttttccaggaggaggatgtctcattgattatgtgcctcaagtgtgccacctgctcaccaacaaggtgcagtatgtgattcaaggctatcacaaaagaagagagtacatcgctgctttcctcagtcactttggcacaggtgtcgtggaatatgatgcagaaggcttcacaaaacttacactgctgctgatgtggamagagwtktgttttcttgtwcacattgacctgcctytgtttttccctcgagatcagccraccctcacgtttcagtccgtctaccactttaccaacagtggacagctttactcccaagcacagaamaattacccatacagccccagatgggatggaaatgaaatggccaagagagcaaaggcttatttcaaaacctttgtccctcagttccaggagrctscawttrccaatggaaagctytagsaaacaccagtgwtgagagacarccaaccagastgmtcagtccacatgcgtgtcagcgctcagbctsstkcctggaagccgcttggaatrtcttcatggcgvcmttttgctcacgcagcagcthtgchtgmtccacacagccytgctytghtgcagcccaaacccgagytggytggtagcaccytgagtcytagcacctcaccghtggytgctcctcctccttccttaggtttcttagctgaaagaaataaactgcthyacgmtggagamcwtyyccagkgwrwtaaaawrwwrwrahwgcgmaaaaaaaaaaaaaaaaaa

SEQ ID NO: 5759 - DNA, 600 bp, Rattus norvegicus
aaatggttgccgagtcatgttaattggtgaaaagagcaatccagaagaagaggctgagttgaaaaagctgaaggacttggaggtatctgtggagaagacagctaaccacctggaagagttgaataaagagctttctgacatccagcagggttttctggctaaggaattacaagcggaggctctctgcagacttgataggaaaataaaggccacaattgagcaattcatgaagatcttggaggagattgacacaatggtcctaccagaaaactttaaagacagcaggctaaaaaggaagaatttggtgaaaaaggttcaggtgttcctagcagagtgtgatacagtggagcagtacatytgccaagagacagagcggctgcagtytacaaacttggccctgcctgwwtgaagtgtagtagagaggggctgtactggcctgaagrgcagcttcatagccctgccctccctagaacagaagmtgcttgtttctccatggctgtcaggggcaactagccaaatgtaaatttcccttccctactcctccgtcggttctcaatgaaaaagtactgtctttgcamcctgaaaaaaaaaaaaaaaaaa

SEQ ID NO: 5760 - DNA, 1400 bp, Rattus norvegicus
aggagcctggccagcagctctacaatgtggaggccacctcctacgccctcctggccctgctgctgctgaaagactttgactctgtgcctcctgtggtgcgctggctcaacgacgaaagatactacggaggtggctatggctccacgcaggctaccttcatggtattccaagccttggctcaataccgggcagatgtccctgaccacaaggacttgaacatggatgtgtccctccacctccccagccgcagctccccaactgtgtttcgcctgctatgggammstggcagtctcctgagatcagaagagaccaagcagaatgagggcttttctctgacagccaaaggaaaaggccaaggcacactgtcggtggtgacagtgtatcacgccaaagtcaaaggcaaaaccacctgcaagaagtttgacctcagggtcaccataaaaccagcccctgagacagccaagaagccccaggatgccaagagttckatgatccttgacatctgcaccaggtacttgggagacgtggatgctactatgtccatcctggacatctccatgatgactggctttattccagacacaaacgacctggaactgctgagctctggagtagacagatacatttccaagtatgagatgsacarrgccttctccaacaagaacaccctcatcatctacctagaaaagatctcacactccgaagaagactgcctgtccttcaaagtccaccagttctttaacgtgggacttatccagccggggtcggtcaaggtctactcctactacaatctagaggagtcatgcacccggttctatcatccggagaaggacgatggaatgctgagcaagctgtgccacartgaaatgtgccgctgtgcmgaggagaactgcttcatgcatcagtcacaggatcaggtcagcmtgaatgaacgaytagacaaggcttgtgagcctggagtggactacgtgtacaagaccaagctaaygacgatagagctgtcggatgattttgatgagtacatcatgaccatcgagcaggtcatcaagtcaggctcagatgaggtgcagkcaggtcaggaacgaaggttcatcagccacgtcaagtgcagaaacgccytaaagctgcagaaagggaagcagtacctcatgtggggcctctcstccgacctctggsgrsamragsccarkwycagctacatcattgggaaggacacgtgggtggagcactggcccgaggcagaggaaygtcaggatcagaagaaccagaaacagtgcgaagacctcggggcattcacagaaacaatggtggttttcggctgccccaactgaccacmacctccaataaagcttcagttgtattttmmmmrwmaaaaaaaaaaaawaaaaaaaattggaagc

SEQ ID NO: 5761 - DNA, 1205 bp, Rattus norvegicus
ataaggaagagtcagtaaactttttactcaactaaaaaggcaatactttttttaaagaaaccaaaatttttatattttatactgcactttaatgtactttctataactaggtgcaaaagatcagccatggcagtggaaatcatagtcttcggctggcgtgggtccaaacccaggcttgtgattgggtgtgctcttgcacaaacccagccttgtgattgggtgtgctcttgcacaaaaagccacttkragcccaaatgcctgccaggttttcctctaactcttccccttttcagtgattctyctattgaaagggaaataacaghgctgggytggttttykbtwtgktttgbtttgktttgktttttmatgkgcagactgtctcatctgttttccarsactgtcattttcttcagtttgwgtagtataaatgtcttcatgacatgattgaaaggggcagatctgtgccccaagcaggtgagcagagtcaggcctggkttacactycggcacttyccttytaccatgtcttctcawgtcagtcagtggtctgagaaaggaakaggcmggtgaagkargcakggtgtgragaagcasagccggwgctagctgtgtgtttccatwtgctgcarrarraagtgcytratkgwtgatgaggcakrgatttacatttaattcargccmaaamtcaatakgacgaatawagtgaagskyamrarkgsktatcaatkacaaaggatatgcakykgctcactttgsctmttmamgtmgcatcactgtgmgcagkcagggawgttcactgtktgaagtccytasgaggaaaagtgtcagtgaytytaaagtggacccgtgsggtcctttkkktggmttattttgatmttagttttgttggrgaaagatttwaaawcaaardccmmcaaawaggaaggaattcccaagcattcagtgtgagtcccatttgtgagttaarggtgccayttargaccagytkrcatytwakgatggcagkgtacatgtkargtyttkcagccacaattyyaatycccttcarkkttactgcttttgctwacaaatacttgctytttyactwagaagkwacttgtagaaatgtattttgaaaacatttyacactymaactttgtwtccatttaaaataaccttttttcaataaagcmctwttgtttvgwthdwaaaaaaaaaaaaaaaaaa

SEQ ID NO: 5762 - DNA, 872 bp, Rattus norvegicus; identical to SEQ ID NO: 1666

SEQ ID NO: 5763 - DNA, 600 bp, Rattus norvegicus
gggattgtggtgagggcaatgtcactatgmccagtaataragtctcccatatcccctcctaagtaggtccccctgggccccacagcacggagatctgctctccagcatggcactgcccaccaagacgcacactgtggccatgccgagagctgaaagaaggagaactcaagagggamcttctgatattgggaacagttctcagagtccccaaggagtcaagaaatctccacagacagactggctgctgggaaatcaggagtgacctttccctaacctattcctaaccacaagagccttgtgcaaaagctagratgtgactctcttgtctttcaatggccagggagaggcgttctgcctctgcccacagcsgtgagctctgtgaagaacatgtgtgaaagccagagtccgctaarragcgttaggataccaagtccatgatggatcaggcctgaggtagragggagggatcctgtactgcccacccctttgccttttcttggcagccccgagcctgtgraagtaccggctcccctaccagcacccgcgctccgcagacccagaggatgcaaaggctcgagctgcaggggcacggggaaggag

SEQ ID NO: 5764 - DNA, 600 bp, Rattus norvegicus
gggctgggataagcgctactgcctggacagtctggatgaagacagcttcgrcaysatccacttctttggaaatgagaccagtcctggyrsgarkgactttgagatytatgcgrmcccccggacagtcggccacagcgtggtctcccytcaggacactskrmaacgakgccgagagcttttcttcccagagacagcgcatgaggcawkwcgkyrcsmrcagstgagcattggaccttcaaagagctctgmccaggcctgaagacagamccatgggatgccacggttcccctcccastggcccaacgcmtagcatcbtgaggggcactgcaggtcacmtacacaggaccaggtytgtgggaaccgtccccagccaggtgsctcctgacgagacgcatccctgcacthtaccstgatggccctggcctctgacgctgctggttttggggacagaataggttttaccacagggtggcatgggacttatactbtggagcctgctagccacagactgataaggggtggattggcaaggaaggggcattactcaaaggacttcgtcatagacattaaagttcmcargvcaaaaaaaaaaaaaaaaaa

SEQ ID NO: 5765 - DNA, 960 bp, Rattus norvegicus; identical to SEQ ID NO: 1669
  misc_feature (425)..(425): n is a, c, g, or t

SEQ ID NO: 5766 - DNA, 600 bp, Rattus norvegicus
garcggcaggtgctttygggagaccmgatccccaaggtcaccatstcmactttgccacctccctgaagcctaggattcccatcccgacgcrcaagctawtaaacagattgtcamrgmvmwarrammaammmamaammwcagrsrrsrcmcrrwaccmmayycsmccayasyacacaaagacgacacaacacacaaaaacccgacggggcggcccggcacccacacgcctacagacagcgatacacatccaggccgataatacacaagcacagactggaaaccccgctatacaccccaacagcaggacaaccccataccgcgcgtaaggaaaggcgccgaggcaccaaagtcacaaaacgcagggcctgaccacctcgacaacgccaatggaaccccaatccaagcgaagaaccgttccgaaccatgtttgaaatgaagccccagcccgagaaaagggaaaacccaaggcgcgccaaaccaggccgaaaggggacgtgcataccgccaccccaccaccagccagccagcagcgacccagaagccacccccgaacaccgcccacccacgcgcacccacccacaaaccacaaaccagacgaaa

SEQ ID NO: 5767 - DNA, 600 bp, Rattus norvegicus
twactcctgcttgggctgctcctccctaggaccttgtactccagtttggctgtatattgtggtggtgattagcttcccacctccagcccttcttcctgtttcccaggaccacccagggctaatgactcactcattcctggttgccttctccaggaaggcaggctgagggttctgaggcagctgagaaaratggtccctttgtgaggaaggmtggtggtccaaccccacgtccttctgaatggaaggtgaagacctcctgtcatgtmtgccaggccatcytgaacacttgggcaagaagagctaaaagcctttgagtcttgcttaactcctagcactgtctccatgtcccccagtccctcaggtcatgattaaacattttgacttaaramwwwrrwmwwwammcatttccttaaatggtaagtttttacagaagtagtggtatgttacagatmcaaggggactaaccgggtgaggaagagacccagtaaccctactgctaagtgctgtgtgacttcaggcaaatctctcgcctctcttgtcagagctggaagaatagtaaaawtaaaagatggtgtttgtcccardwaaaaaaaaaaaaaa

SEQ ID NO: 5768 - DNA, 600 bp, Rattus norvegicus
tggcagctccaacccgttccttagtcgcctcctcaaccgggacactattacccgaatctcctacaaaaatkmkgcckactttcttcaagacctgagcstggagctcctgttcccggaatcctttggcttcatcacctatcagggatctctcagcactcctccbtgctctgagactgtcacstgratcctcmtygrcagggctytcaatatkacctccctccagatgcactccytgagaytcstgagccagaatcccccctcccagatsttccagagcctcagtggtaatggccggcccttgcagcccytggcccacagagccttgaggggcaacagggacccccggcaccccgagaggcgctgccgaggccccaactaccgcctgcatgtggatggtggtcctcatggtcgctgagactccccaacgaggattacgcccgcctgttctgagtttcctcaccaggggaggggaattcaccccaaaacaaagctattaaagggactgaatgtttmmarwwwmwmrrwrrwwwrawwawcagctgcgattgagaaatatctagatattaaaaaataatccttcccgaaaaaaaaaaaaaaaaa

SEQ ID NO: 5769 - DNA, 600 bp, Rattus norvegicus
atcttcgggccatgactggccggcccctcaactggtactggaagaccatgtgggtgtttgtgagcccactgatcatcatcggcctctttatattctacctgagtgactacatcctcacgggaacgctgcagtaccaagcctgggatgctactcagggccatgtggtgattaaggattaccctacatatgcactcgctgtcattgggcttctggtagcctcctctactatgtgcatccctctggtagccctggggacttttgtcacacgccacctcaagagcagagaacagtttcccgaggcctgagaactagaagtcccacagaccacctaagtttcacagctactctctctctctatgtattcagcagtggaagtgctacagccctcttttagagccacaagtattttctgctccctgaatttataaaacaaaaaaattaattctaactcacacttaggtttttacttttgtttttgttttcaagacaaggtttctgtgtacccctggctgtcctggaactcgctctgtacgaacaaatctacctgtgtcccgagtactaggaataaagatttgtgccactaaaaaaaaaaaaaaaaaa

SEQ ID NO: 5770 - DNA, 992 bp, Rattus norvegicus; identical to SEQ ID NO: 1674

SEQ ID NO: 5771 - DNA, 811 bp, Rattus norvegicus
cacgaggccgaaggccctgagtgctccctgtgtttcgagtaggacggcataagcaaggacaaggacacaacgcccgggtcttcacgtggccccccagaggtcccggaaaaagcgctgtccctacaccaagtaccagatccgcgaactggaacgcgagtttttctttaatgtatacataaacaaagagaaaagactccaactctcccggatgctcaacctcactgaccggcaagtcaaaatctggttccagaatcgcagaatgaaagaaaagaaactgaacagggaccgtctgcagtatttcactggaaaccccttattttgagagctccaggatgtactcccctccccagaaccccactcacccaccctcctccccatcagcytgccctccgcaggcccaatgtccttgggttcaatgacgcctcttctctgtggaacttcaccattccttctcgcattcaactcgggacctcmctgcgaccactacagcctgaggaagasgcctggaacttggctgagcggatcctaatgakgggaacatggtaaatgcawacatccctttacagttttaccgccaatgtgctgttgttcctcttctccctctcctagtcctcgtggacgcggcgagatctgtagggagttaggccatggggctaaaaggagtcggtgttttgttttaagtttaagaaatccctttcttccccttcagtgaacacagattatttaaactctgggaaatgtatctttgggcatgagtcactgtttttttgtgtgtgaataaatggtttctagcaaaaaaaaaaaaaaaaaa

SEQ ID NO: 5772 - DNA, 571 bp, Rattus norvegicus
  misc_feature (14)..(14): n is a, c, g, or t
ggcacgaggcttcntgcggcrcmkwvggsacbakggcggatcctcgcgtgaggcagatcaagatcaagaccggagtgstgaagcgactggycrargaaaaagtgatgtatgaaaaagaagcamrgcmgcaagaagaaaagattgagaaaatgaaggctgaagatggtgagaactatsccattaagaagcaggcasagatcctgcaagagtcccggatgatgatcccagactgccagcgccggttaraggctgcttacactgatctccggcagatactaragagcgaaaaggacttggaagaagctgaggagtacaaagaagcccgcatagtgctggattctgtgaagttagaggcctgacgtttttctytacggcgtgattttttgcattaaatcctggggkycattctacaattcgtcattttcggccactgctgtgtttaataatatgaaaacgtggttctttttatgcagttgcatatatttttctttgcataacttaatgtgtcaaataaatgagttcatctwawwwwawwrwwwrwwwwawactttammaaaaaaaaaaaaaaaaa

SEQ ID NO: 5773 - DNA, 600 bp, Rattus norvegicus
cttcatcaaagctattgtggacctgacaggactytagccaccctactaagagcagcagytcagtgacgrgctgtcacattaggccagccagggccttcccacacgagggtgggcaggtttggtgtgaatgccgaatgccggggaggacctcagcctaaagccaatcaccatcacacagacaggcaggaaggagcctccagttggtcctcaactgkwaaactgagttggagggtcagctgagctcagggtcctgggggaaccagctggggatcttctcttgctgtattttctgtctggggaagggagacaccctttggtggggtactcagaaagggcctctcaagagagagcctcaagagctgcaccaggagcaagagtgattggccttccccagcccagcctttgggraagaggcaggggctgcccaggaaaggcatgcgcctgcagagtgcagcccaggagagaagcgctctgsgacataggcacgcactggagcagggcstgcctgggmtgcacagccmtgccaggtgrcctgtatggaggagaagtgattwaactattcagatgtcwvmwrarwrrwrwwaaaaaaaaaaaaaaaaa

SEQ ID NO: 5774 - DNA, 538 bp, Rattus norvegicus
ttttcatctttattcccctcrrcmcsagrgacaytgccatgtataccacaaaacctaaacatgctccaatgacccagcccaattcskscatysaskcccaggtgagarttcagacaaygtmsrcagaggtcacagcawacatacggttctgttatatctcatatatgaccccttcatgtcgtaassaagacattttcksywmgaggttttcattttagtatatcttaaatcttgtskkmackwgsckcmatcttyttbttgggtaaggaytayamtttcgtgcgtctgctgttgctgtccacagcttttcttgataggcctagtacaatcttsggmacagggttgctgtgtgttgaaggtytgacagtagctyttagtyttgcctatyttaggtagttgcgctgtgcatttttattggtgtaytaagatttgttcctgawaccttcaatttgaaaatttttytgagaaatggagcagtaatgcagcatcmccttattaaaawacatttgaagccttwwmamaraaaaaaaaaaaaaaa

SEQ ID NO: 5775 - DNA, 600 bp, Rattus norvegicus
  misc_feature (62)..(84): n is a, c, g, or t
acacattaaavccttggtacaggcccttaatcccatcagatttgtagatcttaaccaggcannnnnnnnnnnnnnnnnnnnnnntttcagctccagctttgcccacatcagctgctagacgggtacgggcaaaatcaagagggtacacaaagcacaaggatgtggccccagcagcaccacctgatgccaggttccctgcaaagtaccgccaaaactgggtcctctykkcmacaccacccaaaaagatctgcttgtatttatctttgaaggcraagttkagagcctgggtggggaagtatctgatgacattggccaggttgccacgccagaaggacaggactccctgttccttggggatacgaaccacgcagtctatgatgcccttgtattgcttatctgccgtgatttgcttgctggcgtgctgcacctgcagcagcagcttgacccgctcgatgggtgctaccgccgtcttggagatggccgcggccactccaccagccaagaagtccttggcgaaggacacagcggcatctgtcatgttgaagcaaaaaagaagaggcaggcgactgcaggacaggactgcckgamwwccggcttttg

SEQ ID NO: 5776 - DNA, 1400 bp, Rattus norvegicus
  misc_feature (1052)..(1052): n is a, c, g, or t
  misc_feature (1068)..(1068): n is a, c, g, or t
  misc_feature (1076)..(1076): n is a, c, g, or t
  misc_feature (1079)..(1079): n is a, c, g, or t
  misc_feature (1092)..(1092): n is a, c, g, or t
  misc_feature (1122)..(1122): n is a, c, g, or t
  misc_feature (1236)..(1236): n is a, c, g, or t
  misc_feature (1299)..(1299): n is a, c, g, or t
  misc_feature (1315)..(1315): n is a, c, g, or t
  misc_feature (1352)..(1352): n is a, c, g, or t
cctcctgtccctgctcctggccgggtttgttccgccgggccggggacaagagaagtccaagacagactgccatggcggtatgagcggtaccatctacgagtatggagcccttaccatcgatggggaggaatacattccttttaagcagtatgctggcaaatacatcctctttgtcaacgtagccagctactgaggtctgacagaccaataccttgaactgaatgcactacaagaagaacttggcccattcggcctggtcattctgggcttcccttgcaaccaatttggcaaacaggagccaggcgagaactcggagatcctgcctagtctcaagtacgttcgaccgggtgggggctttgtgcctaatttccagctctttgagaaaggagacgtgaacggggagaaagagcagaagttctacactttcctgaagaactcctgccctcccactgcggaactcctgggctcacctggccgcctcttttgggaacccatgaagatccatgacatccgctggaactttgagaagttcctggtggggccagatggcataccaattatgcgctggtaccaccggaccacagtcagcaacgtgaagatggacatcctgtcctatatgaggcggcaggcagccctgggggccagagggaagtaactgatgccctaccccaccccaccccatcccctgcccatcatgcaagggctggggaggggcdmkkcaggaaggaagcaraawwcggmaysaktstacasryacaksccagrywcsmkkcmtwdttacataaaagrcamgmkkggcacastgtgtgcykgyacsastgtgcacaycgtggcaactgtcccactgtgtsccatgcactgcytgcctggaacccakggacagaccatctgtgctcacggtttgrtacaacacckkcacactkthdccagcttcmcgwkbsawatrarcccawdgcwrrsvmragktbtaagkcsvrbgrksytgmdcaaachtraacatcawtyttggggccagmrkytsscayrwgscmacatgacacatccgggywmankawgmmhycrgchtcnwkvaksmnksntgaaggassctcntaagtsdccarscmcrwvscacagkgykcnygrrrarabccgrgmcaaykgtgagcmckatgrccatgtgcyccamgtcagrggtggtgtmycyatgaakgaggggcccvaagccyttgtgggcggscctcccytgagcccgtntgtggtgcsagccmttastgcattcaggcttaggytsccaggcagggacacsatccccctstntggrggacatgcsttnttmtcamthtgtcmmstggcatytbtsgcaccccatntgmcmartaaacgtctttbtgcmrmraaaarwhwrwmwwrrmrgccgc

SEQ ID NO: 5777 - DNA, 550 bp, Rattus norvegicus
ggctacggcggcggaagttccagcggcggtggtcacggcggcagttccggtggtggctacggcggcggaagttccagtggaggccagagcggaagcggagggttcaagacttccgggtccggtggcggggaccaatcgtctaaaggsscamgrbrckarkaaarccagagtgatcaagackwttattgaggaggtgacacctgagggtagagtcctttcgtctrtgwytgwrtcagaarscamgaarswcttctmmtaagctgmttagaagagtctctaaacacagsccaactgyacagacgtgtggaaaacaaaatgtccaggaaaacacttstgtcttaatggtmtatggaaataggttcgctccttgaaattaagggtctaaaaggtgttttgtggtttctgtatttcttcttttcatttatcagaaagtgttcttttgtggagaaaaaaaaraaaamwwtytcatytrctaatgaatttctcatttaytaatgaatytcaataaactttctcactcatgcaawctdhraaaaaaaaaaaaaaaaaa

SEQ ID NO: 5778 - DNA, 845 bp, Rattus norvegicus; identical to SEQ ID NO: 1682

SEQ ID NO: 5779 - DNA, 775 bp, Rattus norvegicus
  misc_feature (49)..(49): n is a, c, g, or t
acgttaacatccggaacatgtgcccgaggacattagacactactacacntaccaagctcgctcaccactcccccttgcacggagaacgtcaagtggtttgtgtttcaggattccgccaccatctccaaggcccagsytgagagaatagagaatgcggtaatggatcaccacaaccagaccattcgaaatggttaccgcaggacgcagcccctccacaacagggtggtggaagccaatttcccatactccccggatgaagtctctaagaaccacttttacatgcacgagaagatttcacacggtttgaaactaamgaaaattaagaagaagakaaaccwcagccattgaaycggamaygagacrctgacmccaagggctcaccctgcccctttkytaaggaatcbtggmaygwgggtytccttgcamcctscascawggagrtytytgaytaacccagagggwgttyycatccmtgagaggaagtggagckgcvtcasccagaagagaagggatktgggtgagaccgaatksacttggatggatskmcamggaatcagacctyccmtaatcccctgtcaatcatccacytaaatttggggthtgcggatgcagctcatggtagagaccttrtcatgacattgagtttgatccccggchccagaaaaaaaaraaaawmwttcactttgathtacgttayaaaycaccccgaacctccctttttaatgtahwaaagtgatwttggagatwttcawwwwwwaaaaaaaaaaaaaaaaaa

SEQ ID NO: 5780 - DNA, 676 bp, Rattus norvegicus
agcaggcaagaagggaaaagccctgtaaccccctgtgggttgttgggtccaggacagtacaagccccaaraatggttggcagggtgggagtatactgcaggcactagccatcctggtcatccccagytcctgtrawatctacccttcakgctctttccttcttccccctgggctgaccaaaaatgtgctatctactgtgagcccctttcccaagaccctgtgggacagagrkcaygrkgtgaatgtaaaaatgccacctcactytcaggcaagctwtgtgggtaaagaaagaggggtcagggttcaasttgacagtgtcctttgssagkwrkgagrgcyysttgssswctrywrccakgcmywgwgkgymygtcctccagtattgcacctgtagcaggaggtaggsscaccccagtgcaggggcaaagcaaaccysatgtcasttgttdtrymtkwtmtaccccacccccacccctbwccrcctthtttttttttktttykymacattggcarararacttaaaggtcstacacagtwcccccctgtgtgtttgagttcyttcattagcagttcaggctggttggacaggtktgaatcaaakygtactttgttccattgttaattgaraaactgtttcaataaaatattsttttstdwarawwaaaaaaaaaaaaa

SEQ ID NO: 5781 - DNA, 600 bp, Rattus norvegicus
tctcagcctgagctatgcgcaaacccctgaggaagcctgggkgcagaagctgatgcgacgtytggaccagcctccagccccagggaaacaaaactgcaggaagaatcgaggaacctctaagtctgggaagaaaggaaggggctccaaaggctgcaaggggactgaacagasagactccaagasggyaysmsrgtgacatgcctgkagtccakgaagtcctccgtgaacttcaacctgagtgcttcacagtccaactcacaggcaaagagggagctasagagcakaaagactcaggggccccagagcagtcacctcatgctggccttgtcacacccttgtctgcttcaaccatcacatctgcatggycgtccctttcttctatggcggagcggccttccctgggatagacctagggagtcagaagaaagagtgtctcccagggaaggaagaaggagacagcrggactgtcccctytaggaggtcmctcaggtcccaagacctgcacttgctctccatggcacccttcctttttccttgcacctatgatatatacctaactgaataaaaagctggtccagcctcaaaaaaaaaaaaaaaaaa

SEQ ID NO: 5782 - DNA, 600 bp, Rattus norvegicus
cataaaacattacaaccttmrsrymkyaaagactttcattctggtcctacttctgctttttcactcaaaaaatggtcttacaaatgatgccttgtttacaaaagttctctaccacaggttctagtagtgtgtaaagtgtcagtttcttgcttgggtatcttgkagcctagcacactggctttaaaggacacagccaggaagctgatatcttgacagtgtttgtagacctttgttataaaaaaaaatgaatgtcctggtawgggttasgabggagttcaacaacgagkaaacaagaatgttgtgctgtttgagtttagagttgtttaaaatgtcatctcaagtcaagtcactggtctgtttgcatttgatasgtttttatactaactagcattgtaaaattatttcataattagaaaacacctgtggatatttgtataaaagtgtgaaataaatttttttatgaargtgswmawmrmwwrwwaamamarmactatgtatgtgaaaccacaatctaagattatacatgacaacccgagttacctttctttgtatttyagcagccaaagtaaagctttcmmtgtkwaaaaaaaaaaaaaaaaa

SEQ ID NO: 5783 - DNA, 600 bp, Rattus norvegicus
  misc_feature (324)..(324): n is a, c, g, or t
  misc_feature (574)..(574): n is a, c, g, or t
tctytgbtgcctytytcatgacaatccctasggaagtaggggaccaaattaagctgyttttccgbggctccttcaragtcsatgggcavcavctgkggkgagtgtggtcttggdgttraattttgagggatkadtraaggcmdatgggtttgggcyccatgrkgctcacttaagggagttagttgatgavaccaaggtaggaaktwttctgmggarakctktggsakwgctggggtgtkactgyggccatgcctgagctgattggcaatgccawaggtgctgtatttcyctgycgakkstwgccctaaacadatgggtctgcantaaggaattggytgaggtgggatgtataagctggcagctaraaggtagcttctggctttcagctgtcgtgaaagggtagaagcaacytggagttttatggatttcagctagatycaggctggratggtttggccacagaaaagcctggagggcgctgacagcctaacctcaggtagagtgctacagarcctgcctgtatgtggggcagggatttgccagggcatagctggtgctcaagatttgtgggtanagcatggagggagacatggagacttg

SEQ ID NO: 5784 - DNA, 754 bp, Rattus norvegicus; identical to SEQ ID NO: 1688

SEQ ID NO: 5785 - DNA, 600 bp, Rattus norvegicus
gwrykakscgatgcttggtgaagaagagagctcttattgcaggaggtgtgctccagaaataragctggccctcagactgacggagtactcccggacactgagtggcatggagtcmtactgtgttckagyttytgcagatgccatgkaagtcattccatctacactggctgaaaatgctggcctgaatcccatctytactgtaacagagytaagaaaccgccatgcccaaggagaaaaaactacaggcattaatgyccgaaagggtggratctccaacattctggaggaaatggttgtccagcctctgttggtgtcagtcagtgcgttgaccmtagcaactgaaactgtgcggagcattctgaaaattgatgatgtggtaaatactcgataatytggatgaggctggctgactggcacgagtatggagagaagtattgtggctagagtggaagatgatggccttgttccttgtctgggagcttgcttcttcagagtttttggacattgtcttgcagttggcatttgttgggaattgtattgaaacaatttaatgaaaatattaaatacytggtttymamstccaaaaaaaawwaaaaaaaa

SEQ ID NO: 5786 - DNA, 600 bp, Rattus norvegicus
tcamcaagaatacgtttcaaagtagtgmcaaggtgaagtccttgtagcataaccatwgtmtgctctttgtctgcgttcaggargagtgcagagtccctttccttgtgattcctagagaactttccctgcwgagttgagttagatcthtggggctgtcagggtagccctcaccctttacaggcagggctgggtttcstcctcstyygaaatgcaggattgsctccctgatcgtactcyccattwtaccacatgtataacgagccaatwtcaaagtaaagatgtaatgaaaatacactcmtatattactgtaggagtgcttytagatgcccacacctcatttccatatttgtcattagctgtktccatcgaatgtktcaatgtakycttacaaaaatawagcmgcdtrgarrgamaarararraaaamaraagacgaaaacacaagaaaaactcgaggggggcggggaccattcgccatagtggggcgttcaatactggcggggtaaacgcgtgtgggaagccggggtccacaaatggtgggaaacccgtctaacagggtacaaagcggcgaggttccaatgggcacaggagaagacagaat

SEQ ID NO: 5787 - DNA, 600 bp, Rattus norvegicus
taacgctgtgtgtatgactgtgtgactgggagcctggactggctgacaggccatgagatccctctggcatctccaggtgttttgtagcaaacagccacttagtgctttgtcctggactccactcagcctgaggstggggaatwyrrmaggsagacsscamgagktggagattagaggtcccctccagatwgcaggaggtttytaggaaggtctccatagcagacttgcagtgcgtcctgctggttgacaaacaacatargctacagggacgagrscaygwggcccaamggcwgwgscgamtgaaggctggctggaggcactgtggacgaagcctttggttttccactccatacctgctcataagacttgtatagcagtgycagctacctaaggaggggcaggcaggaaggsccagggcctgcccctgtcctcaccaactctgggaagtccgctcttcctgagggggrtaggcaccttmtcagcktgctatgcccttttccccatacctccaggcagggttkgaaatgaaggactwtwtwarcctttcctyttgdtttwaaaaaataartktktdaartbtgvaaaaaaaaaaaaaaaaaa

SEQ ID NO: 5788 - DNA, 600 bp, Rattus norvegicus
cccatgttgtatgtttttcctcaacccaggttggagcatagcgagtgggagtcagcccggaccccaatcattggcgcctgtggctctcaggagcaggtgctgttgatggatctcccaggcagtagctgtcggaggacccggascagtgctggatggaagcgggttctgcgttctctctgccgttcccggacccgcgtgccactgmtmgcagccatctamttcctaatgawtcatgttttactggttctgtgtttcacgggycacctataaacttgttacttgvmaamwmwmrmamwwrwaattccttcatctgtagtgtcaggattgttgatcccagggcggcctctcgctttgagcccaccctcttggaaagtgcctgtgaaaagaggtggctgtgaggacaggcggcggtaaggcctggcctgccacatccgctctccttaaacacgtcggcttctgagatgtgccgtgttcactgcttcttcagatgatgcagatccacatcccgtgtggccttgcaggatgctgagagaggctttctagccgtgccaacaagatggttccaataaacacagtaatctggaaaaaaaaaaaaaaaaa

SEQ ID NO: 5789 - DNA, 559 bp, Rattus norvegicus
  misc_feature (17)..(17): n is a, c, g, or t
ccagcccgctcgcgctntggacagacagacgttcccagcttatcctgccccatcgctgtcatcgcagtccccaaaggccacccagcccacargactgggagcccatcrgaccaggtgggtgcacaaagggccgggtatggcctggggmacggatgtttgcaggaaccggaccgttcattcccggcctgtcgmtatggcgatggcggggaaggcaggtktaaatggtgttggctwacagggtatatttttgrtaccttcaatgagttaattcagtcgcttcacacaaggaaggactcacccgtgttactgccsctgtgctttggtmtytgcttcctgtcccagaggcatgtgccggccaaggcggtggccccmccatacgcaggactggggggcaggggmwccggcacacggcactgtgccctccccctcccttccttgggcagaatggacttgatgcgtattctgyggccgctctctgcayggcggcattctgtcatttacacatgttgttccaattaaaargcaaattatactccarwwmmaaaaaaaaaaaaaaaaa

SEQ ID NO: 5790 - DNA, 556 bp, Rattus norvegicus
gcacaaaagctcctgggtacaggtcacactctgccttggctgtgagtcatccactgaatcagggtctttggagsasgarscaaccatggatttctagcagtcgtcttagctgataagcatcattatcaggcasccagtgagcaagtgggagagcacggctatgagagaacacakccgtgggaactgagaaagggtcacagagctgtgccaagtgggatgtctgtgacactcatttaacasaaattgttaggctgtaggtggaggaagattcttacgccatcctaatagcaagaattagattggattgcaaatccctgtcctgacccaagtacaccatggcccgagagcgtcaggcttgtccagccattggccaaatcagatgttcgttccctccatgctgaagcttgcagactaggaagccccccaaccctgagcatgaatcctaacctccgatcgtggtctccaagcctgaagaacatgacagaactctccctaatattcattgggctttcagaatcataaacgtttgtactttcaamaaaaaaaaaaaaaaaaa

SEQ ID NO: 5791 - DNA, 600 bp, Rattus norvegicus
atcgtcctgactgtggatggggacgccgtyasgrskgaaagccctcacacccactccacctcggcagacactaacgaccccatttatgtgggtggctacccsgcccasgtcaaacagaastgcctgagcagccggkcytygttcmggggctgtgtgaggaatctcgasctgagcakaggctcacaggtgcaatccttggacttgakcagagcmtttgacctcsasggagttttccctmactcctgcccggggcytgagccstgatctgccgccagactyttcccttggaatyatcgccagtgccttgaggagaacagtctgtgaagtcaagcgtcyttcattcscattccagctcaggttgcatttccagaggaaaatgctgtattwatgttgaagtaaagccagatggataacrgatacctmtattaaatggtctaaagtgtcarwrrwawmmmwrhwmwmmwwwmctgagttttccagatggaacttggtgggtgtggagttttctgttgaagacttgatagtgtttgtgggtttgcattttgggcataaaaaaattaaaatgtcacagcaggctgtwttaaaaaaaaaaaaaaaaaa

SEQ ID NO: 5792 - DNA, 600 bp, Rattus norvegicus
cattgcttgctgctcttasggttgargtcacacagctgggccaccttctcccactctgtgcctggggtctccwccttggattctttcamaaaagcctcttccgatgccctgwwgktgakmkwgkwcwkstywacctgttcactttggsgmtgstyycacksctccwggtctwwyytgksctkctcysgscamtccwgttcggtmrccwtcgaggcagcatccaactymwgcagccttttcytcygctcctctctccacttgcggatgctctcarsctcstgmstcaacctgtccgcctgggcaatcgcagcgtagccatcggcaggcccgttagcctcctgaaacacatctccattgactgtagtccccatgtcctccgaaccacccccgctcgcgagtccgggctgcgcagaggccacctggctggcggcaggtgccccgaaacccgagtcattctcgatgccagcaatctcgctctcctgctgggccaggaaggcggccgccgggtcctcctcggcggcctcgggggccccgctctccgacgacgagaagaagccgaagtcctcagccatcttccccgcgtggctgctgtcagctccc

SEQ ID NO: 5793 - DNA, 600 bp, Rattus norvegicus
tggagaaagcaaagcaggaacaacgacagaagattgtgcaggctgaggggragscggaggctgctaaratgcttggagaagcactgagcamraatcctggctatatcaagctccgaaagatccgggctgcccagaacatctctaaaacgatcgccacatcacagaaccggatstatctcacagctgacaaccttgtgctgaatctgcaggatgaaagctttactsggggaagtgacagcctcattaagggtaagaagtgagtgtggacatcaagaaccccaccaccagagaagytggcacacttctccagtttggaggggccagctarggggtcaagcataccccaccstgacccaagcatcatgtgatggattcttctgtatctgctctcttggattaakgaagactgaagaccaaccctttcagaggggttttcctccttcttgtattggctgggaagggggggggacaggagacagtgtgatttctcagtgatttcctgtagtgttgtccctctccstgaatggggggagataaccaccatgccaggaagtctcaataaaatttttattacttaaamwwaaaaaaaaaaaaaaaaaa

SEQ ID NO: 5794 - DNA, 968 bp, Rattus norvegicus
tcatcggagagcgactcagatgacaaccagaacaagtctggcagcgaggcgggtagcccccggaggtctggtaggcaggagtccgatgaggattccgacagtgaccagccgtccagaaagagaaggcgctccggctctgagcagtcrgacaatgagtctgcgcagtccgggaggagcccctccggaggctcagagaatgagaacgattctcgcccggtttctccaagtgcagaswcgrrscacgaatcagagcakggctctgacaacgaakgttctggccaaggctctggaaatgaatcggmaccagagggctcaaacaatgasgcctcagaccgagsctcagaacatgratcagatgatagcgactaggttcatttcatcaaagactccatarggtggggggagctttatatatataaaagctgtgwtaaaaamcawwwmarawarwmrwwwgtgaaattttcttaaggcaattttttttttctacttgtatatttactaacttccaagagacatttcctgtgctggagagtccagtgtctgaccctggagcaatgagactcctgcgttgtggtgcagccccacctgccatatgtgaaaactgcagtgataacagwtgstaaagcattcmtgcaaggcttgcccaggctagccccatmtcstyyccggttagcagcatgctgctatgtacgrttttgttgcaaacttgtaccaaatgttgcagaagccgagatatatgcckttgttcccttttgagttgagactgaaagttttattkccagaggaagacatgtccctgtactgaactctgaaaggcaggtgtttacagtgtgaggctccmccatgagtcggagtgvccaacactggggagggtgaggggtggagagtgtttttctgttgttagagtgggaagagcttcccasccgcttaataaactctttmccaacwrwraaaaaaaaaaaaaaaaa

SEQ ID NO: 5795 - DNA, 993 bp, Rattus norvegicus
gcggccgcgcacgacagttttttttaactgaaggaattgtgtcctccagatcctggggaatatggtggacagggagtcaggggcaggctgaactacagccaggcacttagaaagcactgttggaaccatagccttggtaggtaatccatattggatatcaataaggaccatggatatttaaagagagaagatatatatatatatatataattatacacacattttatcgtacagatttttcataacaattttctttcccagtttgatactgtagatctttattaatgcagagtaggttggacagtggggtggggaacggaggcccagggtgccaacagcctccmtcagtctttctgtggtggtgctggcaggccgggtmactggatgagtggtctccagggtaggcargtgaccactgactggcttgctgcccgctcctggcctctggtggtcctcctgggtggaggccccatactcttggcggccaggggagacagggctgtcagtaccactggagcacctgcagaggacacctbccaggagggggctgggaagggtgtgagcatgccccatggcttygtgtcactgaaatttcattgkcacrasttamtaatatatggatgtttttatttaaagrtaaaagtgagttttctgtcttgttcctctgacttcttaaagcaagctttaactaykkcamraggtktcagggacacatgccgatcatkccraggcctggcatcctcagccgcctkccamttggcaatttcatttcaatatttattttwwwtktgtgckwtktttcccccatgttataaattattgvgaagrgatcaagatcacagactkttggccccgthtgcaccmtgcctcatggccmccacstaatttattgctgtacatgtcsccgtgactgcttttgtatcwttgcaataaagaatttcctgtktgaraaaaaaaaarmmmaaaaaaaaaaaaaaaaaaacatatgcggcc

SEQ ID NO: 5796 - DNA, 670 bp, Rattus norvegicus
tgaccactttgactctctgactagggcttagaccttttggagctgtggggttggacccagagacacagtggtgctctccacatccacagggacagcctctctgggtggctttttgctgggcagtgtcacttgggagggcayrrrkctgggagccaatgagcgagatcccagctacacgtctggtgccctggctgtttctttcctcytcccccagatgtcttgacaggatcactgagactctttktgactgagggtggtcaaactgccaccggagaagatggggtctcagctcgagagmtaaggggragggagggaaagatgaaggcytcaattttgctgctgtacgtctcacacagccactgttggtttggggggcagggaagggmccaagytgcagacacacatggtcattcatttcagtccacaccccgttgtagacagtttgtgtatgtgtgtgtgtgtgtgtgtgtgcgctcgtgcacgcacatgcacactggcccactcacatactcagcttggagctggcagtacctatggcagcaggaccatytagtytttgaacytgrwmawacttgtgcttctttgtttttgtaatccacaycaaaatcactttctttaattgttcctcctgawtamacagtttatttaaggtaaaaaaaaaaaaaaaaaa

SEQ ID NO: 5797 - DNA, 663 bp, Rattus norvegicus
  misc_feature (272)..(272): n is a, c, g, or t
  misc_feature (640)..(640): n is a, c, g, or t
aaacagccggtctccaggtagaaaggaggcttggctgtatcctgttragacgggactgtctggtctcatttccctctctaccttccaagytaccctttctcctgctaacccttctcagctctaagggttggagtcataactcacattcttcattcctaagaatctggagctagctgtttgcctttgactccctgacttcaagccagggttgtgccttactgtccctttthtgggcctcattstgccaaagctggwccaaggtkccacctyknyamgmkscskagbtcagagsycaarawwsawagytsasmtacttttmvckktttctmttcvttawctacaagtcaattaagtgaagsagggtatacatrccctcaccbtaccycagggrccatggttchtagatctcactgcctcmtatttytggcctcccttttcccctcccttcagbtaagacaagytggtgtggagtagaagggcaactagttctgttatktattgaacatttggggtttcagttgcaaagccagawbtacagmtamytggcatttcggcgagggmccatttcagaccaaaatgwastgttaattttttttaattaaagtatattaaaggttawwtaaammrwramwrwrwmwrnmwwwwaaraaaaaaaaaaaaaaa

SEQ ID NO: 5798 - DNA, 771 bp, Rattus norvegicus
ctgacttccasctaagtcattycctaracaaaagccatggagcagaaggkgggagtggytctccaragaagcaactgcaggtmgaccaggactaccttattgccttgyccctgcagcagcagcagcagccacagggcatgctgggtctcartgacctggaactggcccagcaacttcaacaagaagagtaccagcaacagcaagcagttcaacctgtgcggaccagggccccttcatccccgggtrraggagccacatctggacssccagctggggagcggaggcagaggtcgaaractgagtcaractgtgttctgytmtgactccgcccmatacagsytgccccgccccttytttmagaggcyttgaccggsaggaccccsccccacctyaatcsttgaggcatacaggataacctgthtgcgctattggggatcasaacagtggktkccaagatcagayttggtaccgtmtttgccsttgtactgmtatsttytcttcctytcatccagggccacatggktatgggttgggtraagatctctggttcccagtcccctttcctggattagtcacatggatatgccgacmcaggytgmtaagtgmgacaccmatstcctgtgtcmttgcctgtytggttgttcctgggcttaacygcacaggcctgtctttgttttagggtttggtttgggtttatatstwtattattwttaatgccttcytaggggtttggaaataaaactcmtttcytgaraaaawaaaaaaaaaaaa

SEQ ID NO: 5799 - DNA, 1400 bp, Rattus norvegicus
gtggagaaactcgggccacccaaagagcccccaccttaattcccttctcaggtctgtgagtcatcacaaacatctccacaatagagcatctgcccaaaggtctatttacctccccctcctatctctatctcagcaccccggggtggacccgctgccaaaaattccagctcccagtcctagggttcaaattccacaacgcagagggacagccggtggtccaatttacattcctttctaccttccctgctaagccgggctctcggtttagtactaatgtaagyttttaatcgtcctccatccctgcgaagtggtaccctcccgcgaccccagaacttcggacgctcaggcatgaggrtcttcgctttgaaactggcccagggtaattttggggactgtgatggaaatcagtaggtatttayataaacgcaacctaaggctcatcgcgggtcctttcgctaaagattgatactaccttctagttgagcccgtatgcmgtgcaccgacagtcccatactcctggagatgacccctccatctcctccatctgttctgaccccggcaaaggctagttacctcacgatcttagtttgtctccccgccaccctaagtcttctatcgggcttcctgcttttctaataattgtgcctgtttcctggactccagcggatttcaaggtcccctgcccacgtcttaccaagccccctgggtgaatcgccagcccaagcttgtcttaccagctccttccgaaacaactccttagcctccggggtctgagcaggggaccggatcccagacctgtccaattataggactcccccctgccccgccccctcctcagggctagggcgggctgggccaaccccctgtcacgaggcgggttgctctcccccccccccttcacagcagggcagaggaaagaggtggagttttgatgccttgtgaccccccccccccccaaaaaggagctgactcctcattgaataatccaggccttggtgctggggcactgagtactgcttctcccctttcccgcggggtctggtgcattccgttgtacggaaaagggctggaggcttaaatggaaataggtggggggctctatctgttaagaggctcagcttctgggrtgaaaactgagttttagccctggcccctctktrktgattcctctgccacggtgaactctccccatccccgggctggggacatgctcctttccttcaggagctgttcagtggtggctcccaatggatttgaagccatacattgtcaagccctgggaacccaagtgttgatgctactgtcctgtttctggcggttgccggatgtataatcttgggagggggagctatccccacccctactgagcacaactttcaagttgttttgcgatcggatcc

SEQ ID NO: 5800 - DNA, 600 bp, Rattus norvegicus
aaaagtgttaagcctcaccagtagtttttcccaagagaccgtcaatctcgaagctggcttcctccttaaagtaaactttgcccaagcgaccagcaaattagaaacgctattcatctctgacataggacacaaacaccatgagaaggcctttcatgcaccaattcaatatactgtgagacttaggtttctttcacattttatatagcttgaaggcagtaaatggattcgcactcagccacagccaatagcagcataggatgtcaaagctacttagttacctaacactgcactcactcatgaaacctttcctctgtgtctgctactgtgctttaagaacgggtagttcaggctgggagatggcttagcagtaaagagcacacacactgccctcgtaaggacagttcagttcccagcacccacatcatgatgctcagacccagttccaactccggagacgtgatgccctcttctggcctccaggggtactgcatgcacatatacaagcgtacacactttttaaaaaatataaaccaatgatatggcggattaaaactgatgacagtgttcatctgtttgacaaggaaaaaaaaaaaaaaaaaa

SEQ ID NO: 5801 - DNA, 600 bp, Rattus norvegicus
tctggggatggtacagggtgtgacaacatgacgtgcatcatcrwkkgcttcaagccccgaaacacagtagagcttcasccagagagtggcaagaggaaactggaggargcactctccacggagggggctgaagagaatggyaacagtgacaagaagaaggccaagcgggamtagcagtcaaccggaccctgcccacctggactgttctgascccttggacccgagactgagttttgtccttttyttttagccttascagtggsymtgaggtgtstmgggggytgggcggctttcctcagcccattccaaagagggctctccctytggacgcggcagcctgggagccthtgytgtcctctccagcctcctccttactccttgggctcatcgactatcggttctgtrcctgtgctctgttgtgttggagsgaaggactggtagttytgatttttactctgtgaacactttatttaaggacattcttttttattggcggctytgtgacccctakccgcttgcacccgctctytgttgtacactttcaagcaacactttttcagaytaaaggccaamcaaaagctwaaaaaaaaaaaaaaaaaa

SEQ ID NO: 5802 - DNA, 600 bp, Rattus norvegicus
cagggkyccatcaaagcatctctgtgttacaacccattgtgctcatatctggagaatgtggaggacacaggaaaccctcaccatacatacggttctccagtcacactggggttcaggctgtsccgcytaaggcatgcggacacggtgcaggactcagtctgaattcagggcacagatttcagtctggaagaaaggccagtaaggaatcagcaggttctctkccgccaaaacttccactttgtgggcctcctcccagtcatgggaggagagcagccagctggggcagaggctgcccctgacaytgctgcaccagtgttgggccaygagctgtcagtgctgtgagacacaggcggctagccagaaactgtcattgggacccaccagcctcagcctcatasttactctctgtaccgccaccaagagtgtgggtttccttcagaacgcaccagatggcacttgccacaccgagcagcaatgggtagcactctggtggaaagaaattcccccttttatatgtgcactactctgtcatatgattcttataataaatttattattcctgtgwwwrwmarrarwwramwrmaaaaaaaaaaaaaaaaa

SEQ ID NO: 5803 - DNA, 600 bp, Rattus norvegicus
gcccatcccagaagtgtcctgagccctgtcctcctccaaagtgcccagagccttgtcctcctccaaagtgcccagaaccttgtcctccccaaaagtgcccagagccatgtcctcctccaaagtgccctgaaccgtgcgctcctcagccatgccagcagaaatgccctcctgtccaaactcctccaccatgccagcagaaatgcccacccaaaagcaagtgaaagctttagcaatcatcaagaccaagagaagacaaggtgcatcatgtacttccaaagcaacacctccatcttcccttcaaaacctctcatggatgcagaagaaccttccccaccctttaccctccctctacataccactgataatttctgattggaaaggagcttctctgagtgtattcccctgctgctatcaagagattgccagaaatggccctttggtagtctagtattcctgatgctcagaaggaagaatagcaggtggtgtcccaatgccmtccagtggaaccttctcactgttcctgtcacttaggcaggggattacacaacttggacaaktgttactgatgtaataaaaaaaawwaaaaaaaaaaaaaaaaaa

SEQ ID NO: 5804 - DNA, 985 bp, Rattus norvegicus
cacgagggacgggaagaggaccagcgatcttgggaaggattgaactaacttgtggacatgtggaatcctagtgctgggccaaatccatatccaccccaagttgtgtgtccaggaggttccaatcctgcctgcccaccatcccaaaatcctgcctttcctcctggcccctgtcctcccggaattcctcagggaaacccagctttccctccgtgtcgacctccttatcctgtaccgcaaccagggtgtccaggataccaaccctcaggtccctaccctcccccgtacccaccagctgctcctggcatgtgccccgkgawtsmwcyrrctystggcatggkarkcccaggaatagtgatagacaagaagactaggaagaaaatgaagaaagctcacaagaaatcacacaagcatcataagcacgggaagcactcctcctcctcttcctcctcctcctcctccagcagtgactctgactgaacacagggcctggagccwcswcccstcaagcctcaccagctccagtctcccaccaagcttcacctgtcatcttgtactgaggggaaattagcgccccgccccamtccttcytgtgccttctccccgctgttgggraagatgactgccgaggggtagcaaaagctaccttctccctgcttgatattaccgtagcttatgaggtggggggggcactgtcttttaagatatgcaccatgtgatttttcttttgtaacttgggtttgtgacaatttgtgatgagaaacctgtacttttgtaatggcgacmcacgagagcgatttggwagcaacsgtattcccggccttactgatcmcagtaactgttgagccactggraagtgyagtccctttctttacttgatgagctcttttggaacccaatttyttcctcagttcagtatgttgtctcagatggctctgaggaccaaataaacgcwactctcccaaaaaammaaaaaraaaaaaaaaaa

SEQ ID NO: 5805 - DNA, 702 bp, Rattus norvegicus
  misc_feature (678)..(678): n is a, c, g, or t
catgtatatgcaaatagtcacctaagaatgagtgagcttggagaaccagccactgcatatacaagtgtccgtagccagacattttcatgttaactggaatattggctagttcagacctaacttcacctagtgtatkkaaaaaaacaaaacaaaaacactaaattcacatcgtttgttgagttgctctgaagaagcctgcagtcagctgagcgcagacacactgctkaggtacatggggcaggggacgcctgcgctgtggtggggccskcwcsmssbgggctgvtggcctctgtacactgcagtgttcttratccgcctcagtgcaggggtgtgagttasccttacrttytgaggaaghtggscagccsgacthtrttyccttaamchttctttttmytwtgktgscactttrawaaaktgkccagcawccagccbtggycagagattccacgttccctgtcytggagcrgytattgcaaatgtggacttytaagaatskccatgttttccktcttgcaagtgcytgttyaragtttcaaagtttcaaaatgccaaatattttcatggtcacttgcatgtatwatctaggaadtaattcaaasagattttgamaaacaattgtmtttaaccagcctcamstygtgcmaytwtgrtatmthtaataawtaatttgwrhcnrwaamwaaaawaaaaaaaaaaaaa

SEQ ID NO: 5806 - DNA, 1400 bp, Rattus norvegicus
  misc_feature (1271)..(1271): n is a, c, g, or t
  misc_feature (1373)..(1373): n is a, c, g, or t
  misc_feature (1375)..(1375): n is a, c, g, or t
  misc_feature (1377)..(1377): n is a, c, g, or t
tgatgagcttgcccttkttgatgtcatagaagataagctaaagggmgagatgatggwtcttcagcatggcagccttttccttaagacaccaaaaattktctycwgcaaagrttatagtgtgactgcaaactccaagctggtcattatcwmcscrkksgsccgycagcamgaggkagagarccskctcaatttgstccagcgaaacgtgaacatcttyaarbtcawcattccaaatgktgygaaatacagtccacagtgcaaactgstcatcgkctyawamccagkgsayatcttgacctacgbgscytksaagawcagsgsytyccccaaaaacagardkatykrragwggtkgcaatctggattcsgyysgkttccgttacckratgggagaaaggytgkgagttcatccactgrgctkkmacgggtgggtyctgggagagcatgssgactycagkgdgcytgdktggagtggtgkgaacgtcgccgrsgtytccctkaagtytytgaacccrcakytggscmcggatgcarmcaaggrgcagkgraaggatgtscacaagcmggkgkttgacagygcatmcbaagkgatcaagctgaaaggttacammtmctkggccwtkggcctytccgkggsagayttkgcckmvrgsayrwwgaaraaccttargsggrbgvdkyccawttccmccatgattaarggtytytwtggaaymargraggawgtytycctmakcgtccmatgwatcmygrgrcaaaawrgaatctcrraykkkgtraagrtsacrctgmytcytgacsaggaggccckcytgaaraaragtkcakataccctctggggaatccvkmasgarbtkcagttytaamgtyttyccagkgtcctarcactthackgwcsaggctgcagcagggtttctatggmgaccacgsacttctcatytkagctgtggttagtccagttgryccagktgtgwtgaggtgktctgggggaaatmtcagttccacwgctytrccctgvtaagtggwacttgtgtagtgrtaacctggttagtgtgacratcccactgtbtccargacacactgccaamtgcatgcaggctttgattaccctgtgagcctgctgcattkststkvtacgcaccctcaccaaacatgcctagrccatgagttcccagttartwataagctggckccagtgtgtaagtycatcgtgyatatcttgtgcataaatgttybacaggatayyykctgtattatatstsyctgtastgnacabygcamtmyyaygtgaaatgtaagatmtgcatatggrtgatggaaccaaycamtcaagtgtcatgycawggaaaacaccaaataarccttgamcvgtgnrnrnwmaavmaaaaaaaaaaaaaaaaa

SEQ ID NO: 5807 - DNA, 824 bp, Rattus norvegicus
cacgaggccagattatacctgtccaatcacattctcctccccgaccgacatcaccattctgctagacagctcggccagtgtcggcagccacaacttcgaaaccaccaaggtcttcgccaagcgcctagccgagcggttcctgtcagcgggcagggaagatcccacccaggtcgtgcgsgtgkccgtggtacagtatagtggtcaagkccagcaacagccaggtcgagcgtctcttcagttccagcagaactacacggtastggccagctctgtggacagcatggatttcatcaacgacgccacagatgtcaacgacgctctgagctatgtaactcgtttctaccgggaaaactcctcaggtgccaccaagaagagagtgctgttgttctcagatggtaactcacaggggsccacagcagaggccattgagaaggctgtgcaggaggcccagcgtgggggcattgagatctktgtgrtggtggtgggaccccaggtgaatgaaccccacatccgtgtactcgtcaccggtaagaccgccgagtacgacgtggccttcggcgagcgccacctattccgtgtaccgaactaccaggccctastacgtggtgtcctvtaccagacagtctccaggaaggtggccctgggctagagggccgcacacatggctgtgcgcatgcgtggagacacacttcaacagcccttsttgccyttcccactgaccaaacaggaataggaaatgtgacccaaatgttcctgaccagttggtcaactcgactgtcttaaagggaaagctgaggtgcamamwmaaaaaaaaaaaaaaaaaa

SEQ ID NO: 5808 - DNA, 600 bp, Rattus norvegicus
ctggataatgtgmtaccstctgctcagctgatgatggataaggcagtggttgcagggatccagcaggctcatsccgagcagctggcaaacatgaggatccaggmcctcaaagtcagcctcaaacccbtgcactbtgtgaacamccccattctgaggawgakgawgckactrrgctccaagccaaaggatggtgtttatatccacgaccatgagaatggagtcgaggattcamatgttgccttggraaagcttcgcgatgtcattgcccagtgsatccttccccaggctgkagrgaatgaakaygagaagctcaatgaggtaatgcaggaggcctggaagtacaaccgggagtgcaaactcctgcgggacgcgctgcagagttttagctggaatggtcgtggattcacagataaagtggaccgattaaagctggcagaggttgtgaagcaggtgatsgargagcagaccyttccccacgagccccagtaggaaccgcttcaaactgtttttaacaattggaaaaaktattccttaatgtaaaaagymatttttatgtaaattaataaatcataatttcawwwmaaaaaaaaaaaaaaaaaa

SEQ ID NO: 5809 - DNA, 600 bp, Rattus norvegicus
gtcctagcagatactctggaaccttgcatctctaccccaaagcccaccaaggaccttgagcagctactcactgactcacccatatcacttcaaggagctgccaccacgttcaaactcagagctttaaggcttcactgactgttcctaaaactatccttacactctaaagaggaggggaaagagatttaaaatatttatacaaatcagcaggtaatttgggtagaaaacataaatggtttgttattaaatttagaaattgtagcacatggaattatayagcccttcctggttttctggttccccacatcatytagggaaggawgactcacagaatggtttccagaatgttccgtagatgagtgtacttggagcctcctgttcctgtcattaagaaaggcctgtccctgggtcattagcaaygtgtttccttgctgggaccaggcaggacccttgcctytggtgcaaccttgcccaggctctgtgttgactgccaaccactwttgattcaagaagcttcttccctgggagctgctatttttccaaaattcacattgttaaataaaatattttgggctctcgrrwaaaaaaaaaaaaaaaaaa

SEQ ID NO: 5810 - DNA, 600 bp, Rattus norvegicus
cctgtagssacgaagrsgckcckgsgsygmrgygacrgmrykwkykggwtkggskysgggtggcsygtgcswrsagagacatgaggctgagctggatcctgacagtactgtycatttgcctgagtgccctggtcacagscacagggsccgaaggcaagcggaagctgcagattggagtgaagaaacgtgtggwtcactgtsccatcaagtstagaaagggagatgtcttacacatgcattacacgggaaagctagaagatgggmygsagtttgacagmarcytaccacagaaccagmcctttgttttctcccttggcactgdbcaggtcatmaagggytgggaccagvgrctactggggatgtgtgaaggggaaaagcggaagytagtgatcccgtytgagctgggrtatggagagcggggagcccccccaaagataccaggtggagcaaccctggtgtttgaggtsgaactgctcaagattgagagacgttcagaactgtagcaggctgcaraggggtaggaggcccctatcagggaccagactgtktaaaaacaaacaaaaaaacctttaaaacccmwrraaaaaaaaaaaaaaaaaa

SEQ ID NO: 5811 - DNA, 600 bp, Rattus norvegicus
  misc_feature (8)..(8): n is a, c, g, or t
cgaggggngacagaagctgctgctgccacggrggtagaagtcagtttaacatcagcacagataaccgaagacttcaattgtgatcaccctttcttattcctcatcaagcacaatgctaccaacagcatcctcttctttggcagaatgtcttctccttaagtgtggtggctgtgccttgtgtccagaaaatataacaaagttgctgcagctactttagcctggraacaagtttctatcgcttcattttcttttctatctcagagtccctactaagaatgcattagtgagggaaggakagctctattatctctatcccttcttgctttccttcttttttctatatatacatacattatctgaagaaaaattcaacaaacagatgaagggatgtttaaacacagtttcttctactgtaacatgaatctgtgacctgcgttaagtgagctggagaaaaatcakaccttcttttaaaactgattagtataatcatctaattgctttaggagatatctggacacttcataagcttataaatgttgtgaagttacaaattacattttcaataaaataatgatcttttctawrwaaaaaaaaaaaaaa

SEQ ID NO: 5812 - DNA, 667 bp, Rattus norvegicus
ctgtattgaacccgaacaaaaccaaggtccaggggggctgtgacagtgcccatccccacttggctctctcattcccttacggacagcttacctgtggattcaaacaggaccgacatcagagscacagkacagtctaccttaactacatggcagtggaatacaatgtgtccttcccacaagcagcacagtggacattctcagcgcagaattcatctcttcaagagctccaagctcccytgggccaaagcttctgttgcggaaatacaagcatagttctttctccagcaattcacctggacctgctctccctgaggctgcaggctgctcagttgccggacaagggacacttcgggccatgcttctcttgcgccagtgaccaatctctcttgctgcctctcatcattggcctggtcctcytgggcctcctcaccctggtgctcattgccttctgcgttacccggagacgacaatcaacctaccagcccctctgagcatttgctccagtccactctgtaggccaccaaggagcatcctcatttcttcagcatgcaattgactcaacagagttatctcccttctctgtctttaagaacaaaattaagagatttttataataggggtggggaattaataaacatgcatggtacgcaaaaaaaaaaaaaaaaaa

SEQ ID NO: 5813 - DNA, 1400 bp, Rattus norvegicus
cgtacacggctggacttccacccctacgccatcttcctcatggagaggatttttgatctgcagcttccaaatttcaaccccagcgaggagaaggccaggatgaagccgacgctcatgcacaaagacctgcaggcgctcacggaagccatgtataccaacctgcgcaccgtcctgctgggtgactccacagaaggaggcagtggctggcaggagaaaggtctgcttgagttctcctacagctccctgctcagcgctggctacctgaccctgtatggagtggaggcctcaccacgcacccacgagagtcaggccctcgaccgtgaccactcagccgacgttttccgcaccttccgccagctggatctgatgctccccaaactggctcgaggctccttgtcagtgggggataaagaccatgcatgcagtgtcaaaagccgcctgtggaagctgctgtctccagccggactggcctccagggctgaccggagcagctggttggagagttacctgagacatcttgaggagatgggggtatcagaggacatgcaggcccgggcactggtgctgcagctctgggccacacaagggaatatgggacccacggctttctggctcctcctcttcctcctcaagaacccggaagccctcgakgctgtccatgcagagctgaaacgcatyktctggcaagcagagaagcctgttttacagakgaccgyactcccgcagaagattctagacagcatgcctgtgctagacagtgtgctcaatgagaccctccggctcacggccgcccccttcatcacccgtgaggtcatggcagacctggccttgcctatggcagacrggagggaattctctcttygacgcggtgaccgccttctcctctttcctttcctgagyccccagaaggacccagaaatctacacagaacctgaagtctttaaatacaaccggttcttgaacccagatgkgtcagaaaagaaagmtttttmcaaagatgggaaacggctaaagaattacaacatsccttggggcgcagggcacaaccagtgcctggggaagaghtatkccatcaacagcatcaaacagtttgtggtcctgctgctgactcatttcgacctggagctggtcagtgaggacacagaggtcccggagtttgaccttagcagatatgkctttggcctgatgcasccggaggaagatgtgcccatccggtaccgtaccaggctgtgacctgtggrgcagacactacactmathtggggcctcctgacttcctgttgttccyccagaatgctgtgtccagaggrggggacagtgagaacaccgrgrgcaggaaaagctaataaaagctctgtgtctcgctgtgaaramwwwrmwwmmaaaaaaaaaaaaaaaaaa

SEQ ID NO: 5814 - DNA, 600 bp, Rattus norvegicus
ctccctcgggttgattcgatgcttcccaggtwtcgttgtactttgcatttcttatggcacaggaacagacagccctccgaaatcttcaamtmcgaaattctgttgtcaagatatggcaggtggtgacttcctttgtaattctaaaactcagatgwttgaggatgggttagacccagtgcatggcaaaaacaaaggcctgggtgtaccgtggtgtgtgctgtggtagcttttcgtttctgacgtttcctgtggctgtagaacgtcagccactgctcagcggccatgctgccacccttctgttgtaaacgytaggaaactgaagttgttacagtgagcgagcagcaaacattgagagcttcacacactcacccgtgtgaaaggactgaagcccaagcccagcaccccacggggctcagsccggcctgctcactgtcaccttgaccttgttttctgtaatccctgtctgcaacgcaactggagtttatcacttgtggactttggaaagctttgagtttgaatgttggggttgtaatcagaattcaatttagttcctctataacgaacatgaaggctttaaawrwraaaaaaaaaaaaaaaaaa

SEQ ID NO: 5815 - DNA, 600 bp, Rattus norvegicus
ggagcaggatgtggcgcctcactaggctttgtgtgagtgggtgkttgtgtgtgcagtgtgtgtgcatacgtgcgcgcatgtgtgcgcctgtgcgtgtgtactaacagtcattgtacagatgtgtgggtttgtttatgatacactgcagccaggttatttgttggtttatggacatactgcccttttttatttttcccagtgtttagatgatctcaaattagaaaacacttakaaccatgtgcaagattaatgctaagtaagcttcttagggcctttgctaatagatagtaactcaatccggtgttgatcttttcacaagtaacagaaccaagaaacttttctatatwactacaatcacataaaacagatttgcataaattaccatgcctgctttatgtttatatttaacttgtatttttgtacaaacgagattgtgtaagatatatttaaagtttccgtgatttaacagtctgtttccaacttttcatgatttttatgagcacagactttcaagaaaatacttgaaataaattacattgccttttgtccmttaawmarmaaawaaaamawggccttwmcmgrraaaaaaaaaaaaaaaaa

SEQ ID NO: 5816 - DNA, 664 bp, Rattus norvegicus; identical to SEQ ID NO: 1720

SEQ ID NO: 5817 - DNA, 524 bp, Rattus norvegicus
agacccagctgagtgagctccgctgygagatggaggctcagaaccaksrgyacracrkgttactggacatcaagactcggctggagcrgsasdksrssacttaccggaacctgcttgaggsccaggatgctaagatgkctgytattggtgtcagggaagcatccytgagaggaggcascagcggcggtggcagcaatttccacatcagcgtggagraatcggtcgacggaaaagtggtttcttcccrtargagagaaagctaagaatccggtgcaggagaaaagaaccwtkccaccccstgctttccytgggctgagagaggcactkgacagagaggytgggaaagcagactccagtccatscctttgaggatctctctgctttcytgttcytggctctgcrtgttcttcctagtgtagcttccttttgagtgtggtggtgcaggaaacaacagaccttgtaggtggctgttccytcaataaagaatcacattttcttttcmcmaawaaaaaawaaaaaaaaaa

SEQ ID NO: 5818 - DNA, 586 bp, Rattus norvegicus; identical to SEQ ID NO: 1722

SEQ ID NO: 5819 - DNA, 600 bp, Rattus norvegicus
tacataaactcgagtccttcatcctctaaaatgtttttgacagatcatctcataaaaataattcaggaaatctgtagggaaagtagttatgttttacaagagccatttcaaagtcttcctaaaacttggatgatagaacctaatgtttattttgtgtctaatcgagacatttcaatttcattagatgttaccacgtttttattaattcaaattatatcgcatgtgactcttttgactttcagggtttctcaaaaaaaaatgtatcattttgttgcatgtactgtatgttcagaggcaatcagttgtatactcaatatggttttactgtgccttacatgaagagaaactatacagaatgtatgacatggggtgggaaacagcctctactgcactgttaggcgacagcacacagcatgtcccagaacatttctgtgtttaattacccaaccaaagagatctaaagtatgtatgttgtactgtaatgggggttaggcctggacaatttaagtgttttatttgttttctgaaatgatgtgaacttatttttctaaacactatgctaaataaactttatatttrtacataaaaaaaaaaaaaaaa

SEQ ID NO: 5820 - DNA, 474 bp, Rattus norvegicus
ccaggagagcaggtgacagaggaacaattcacagacgaacagggcaacattgtcaccaagaagatcattcgaaaagtcgtccgacaggtggactcctctggtgccatcgacacccagcagcacgaggaggtggagctaagagggagtggactccagccggacctgatagaaggcaggaagggggctcaaatagtgaagcgggccagcttgaaaaggggcaaacagtgacctctcctcaagtagccccttgggagggagcagtgactcagtcttcgctaatcccaggcccacacttcgtggaccagaactactgtgaatcctgagaagcatcttagagtaaaaactagccttggaatccagattcaagactcctccccacccccatccccaaattgtatgacgttaagtcactcaactaccccagcttcatactcctcaaggaaagatggaaacattaaaaaaaaaaaaaaaaaa

SEQ ID NO: 5821 - DNA, 578 bp, Rattus norvegicus
  misc_feature (12)..(12): n is a, c, g, or t
acgttataagtntgaattgtcactgaagaagcaagctyttcctcgtttcaaatgatttggtcacatttatttgcctcttcgttttgatggtggtttgattcttttttctcctaatgaagttagtaaacttgtgcagtagtaacaaggacattacctgaggtgtcttgtatgattgtggtttagccagggtggacacagcttaaatcacaaactaaagatcaaagtacaaagacgtgtgcagtctacgctgcctcctcccgagataactttcctccctcctaaccgcgtagcataatgccaccaattcatggggcygtaaatgaattctgtgggttaatgcaccagacttaccagtgtccattttcatccaagattcttactctctaacgttcttggtcctattgaaacatttcagtatctaaacatactgcaatgttaatacccaagagaaaagccattacgtgtatgctggtcacatgakcagtktggtacagwtttgtyactsttgwtgttttgtttcgtcgtttctgttttttaaataaactatcatgccmttcarramaaaaaraaaaaaaaaa

SEQ ID NO: 5822 - DNA, 600 bp, Rattus norvegicus
ggctcagaccagctgttaatcttctcctcacagcctacgagrccggccggccgaagtgtccttgtgggtatttccacagctcggctgytgacagcagggatgatgtccctttgattttcttctgttccacagaattgtggtctgtcttgaggttctgttgtggggstcagtggaggagkccaakrtwtgscmckcrgywygwsrcwacacatcatgggcttgtccctgcagctgtggagggctggktsccttgcgstggaggktggcatcytgggmacrwksagcgctcccccagctgttcctggacaaggtkaagagaccccatcytggacacttcctataactgggtagctgcgcacagctgagccctcctcagaggtgacggtggtctacacacattctggcgttcctttgaggataactgtcactttagcatgtagagtaytmttaccgaccccacgtgaccttccggytytatgatgttccatgatygrywygmkgtcgacattcccmtgtkaagagagatatatcacgctgctgacgatcagtgtcacaatgacccawtaaagrgtcaaaammcaaaaaaaaaaaaaaaaaaaa

SEQ ID NO: 5823 - DNA, 600 bp, Rattus norvegicus
acgtttcaacgatatcttgggcagacactcccgtaagcgatgggaacgctttgtccacagtgaaaaccagcaccttgtcagcccsgmsgcmwwggattttctggacaagctgctgcgatamgaccaccagtctcggctcactgcaagaraggccatggagcacccttacttctacactgtcgtgaaggaccaggctcgaatgagttcggctggcatggcagggggcagcacacctgtcagtagcgccaatatgatgtcagggatttcttcagtgccaaccccttcacccctgggacctctggcaggctcacccgtgattgctgctgccaactcacttgggataccygtaccagctgccgytggmgctcagcagtaatgaccccatctgtcttctgatgcctgggcaraggtgggacgtccaccctmtccttaatgcagcttgcgcctggttgggaggggtsasaacacttcagaagcmccgtgtmtgaaccgttgcttgtggatttagtagttgagtcataaaaaaaattataggctgatyttctttcwtwwwytyywttttttttttwaaaaaammraaaaaaaaaaaccttcctcgtg

SEQ ID NO: 5824 - DNA, 490 bp, Rattus norvegicus
taggaggaagaggctcggaaacaggaaaagtgtggttttcacctctgctcgggytaccacagaggcatgaactctgtctcgagatgctgcagatatggatgccttcctctcatacctgtcagggagcctctmtaagagggtacaggcaccggactaccagtcataggcaggttcattcaggtatagagagataccacctctctatacacgaataccagmgrmrcgaggmccsyrgktswtsawgwaagggctgagtckwkggcctktcaaagctgtagatcaggagatccctgttttagtgkktagttatgaagaagckgasgacrrgctytgccgcccttcgcctcacactgtcatgttccctcccacatatacaccttgtagtttttccctctaggaaaaaagggctgctaatagggttttaattattttttgctcmatatatgtttgaaaattaaaaggttttgmcctthaaaaaaaaaaaaaaaaa

SEQ ID NO: 5825 - DNA, 554 bp, Rattus norvegicus
tataccgtgaggggcaggtgaaggaggctgctcccaagtactacgatgccattgcctgcctcaagaacctgcagatgaaggagcagcctggatcacccgactggatccagttggacttgcagatcacaccactgctactcaactattgccagtgcaaghtggtggctcaggagtactatgaggtgbtggatcastgstcctccatcmtcaacaagtatgatgmcaatgtcaaggcttasttcaagcggggtaaggcmcatgmtgctgtgtggaatgcscaggaggcccaggctgactttrccaaggtgttggagctmgaccctgccstggsgcctgtggtaagcararagctgcgggccctggaggcacggatccggcagaaggatkaggaggacaaagcccgcttccggggcatcttttcccactaacaggacctcagttytgccstgccmtgccaagcmcactgmtsccmccmcststcaatcccccmctgccmccttgtgcttctgtgtatataaaggcsktatttmtctctmaaaaaaaaaaaaaaaaaa

SEQ ID NO: 5826 - DNA, 637 bp, Rattus norvegicus; identical to SEQ ID NO: 1730
  misc_feature (24)..(24): n is a, c, g, or t

SEQ ID NO: 5827 - DNA, 600 bp, Rattus norvegicus
gktggaaggagggtacgatgcaggtgccagatttggagctggtgccaccactggcagcattcytmctccacmtcctggatgccctcccaacgmtgctcagcttgcagtcatgcagggakccaaygtccttgtaactcascgcaagggaaacttcttcatgggtggctcagatggtggctacactatttggtgaggagctgtgsccactcctgtgycggggaagacatcaywtwyttywkyhyttytcacaatgwawctgctttagtcatattaacctgaagttgccgtttagacacatgtttttggggtgtctttmtggtgtccaaactttgaggcacttttcaaatttaataaggaaccatgtwagggtagcagtccctccctaaagcattctgaggtagggaggtgyccattctycaaatgaatgtgagggaagcggccscaaggctcttccttaattcctctggagtgatactgtgccatgctggtctttgcttctaggaatgaaacatcaaattasgtttggagggaactttgatcttcctaagaattaaagttgccaawttawwmdrrwwrrwmwddrrwhhhhwmmwmrwraaa

SEQ ID NO: 5828 - DNA, 600 bp, Rattus norvegicus
taaagagcatctcatccagaacatagtcgccaccgctctctgggtgctcattgcctacattctctataaaaagaaggttywckggaaaatctgacagcacccgctgaaattcattgctggaggaagctasagggtcagggaggagagcggcagcctccctyccgaaggggacatgcttccggatgctgtgcccaagccggtgggcttagatatcaggaaggtgcctgtatatttttkactcacatatttacatatttgacttgttgctctccggtttctccattttgtatgaaattgatatattyggmacrwgkgtggagatcttgtttaacttytcagaggggatttactytggaaattttgcctctgtgaaaraggccgaggttggtggaccatgcttgactcagtggtagaaccttytccaagtytggagagcaccttgggtttggtcmtggmatcmcmmcmmgcrmmcassamggaccagttcttacytcctgaaaactgcctttccatgtgtawacgcttgccgacaatkacwgccgccatggtttcgtggtgacagactataaagctttttgaatkgmmaaaaaaaaaaaaaaa

SEQ ID NO: 5829 - DNA, 960 bp, Rattus norvegicus
gcggccgctccccactcatccatgctgtggagaacaacagcctgaacatggtgcaactgctcctgctgcacggcgccaacgtgaacgctcagatgtactctggcagctcggctctgcattccgcgtctggccgcgggcttctgcctctggtgcgcacactggtrmkcagcggggctgacagcggcctcaagaactgtcacaatgacacacccctcatggtggcgcgcagccgcagggtcattgakakcmyarggssrvasrmskctcggkstgctkcagggtcacrgcctgmtccmymcycagwccawrgtgsmamcaactmscctgagagcagswgccrwctcagctccwrtggcctccagtcctctccgagctcctcaccctcgctgtctcccccgaaggatgctccaagcttccccatgactccccaaaactacttccttcctgcaacatctgcacctgccttcctgcccttcccaggggtcctccgaggccctgsccggcccgtagccccctccccagctccaggaagcagctgagacggatgggggagcagacccggactcatgaggaagggcttccstgccctgtggagaccactcttctggaaactgtgaggaccttgttstgcttcccccgcccagtcttcgggaccaggttttgcaccaaggcacatgcacmtactactgagcacagatactcccagttgcgcccattgcccaggactctaagccccatttaatytcaggcacgaaggttccctctstggaatccactagatattcgattctttgagtggaggaaccaaaggacagcccctcctctgccatcctmtaccccgacggacccggaggaacagaggggattgggaggacattgatcacgatgtaaattattaggtttgggtcagatttcttttgtaataaactatttttgtwtcwtaaaaaaaaaaaaaaaaaa

SEQ ID NO: 5830 - DNA, 600 bp, Rattus norvegicus
  misc_feature (58)..(58): n is a, c, g, or t
gaagaatgttctgaagatcagtgacttcgggatgtctcgagaagaggctgacgggatntacgcggcctcagccggcctcagacaagtccctgttaagtggactgcccctgaagctcttaattatggacgctactcctcagaaagtgacgtgtggagctttggcattttgctgtgggagaccttcagcctaggggcctcaccttatcccaacctcaccaatcagcagacacgggagtttgtcgaaaaggggcatcgtctgccttgcccagagctgtgccctgatgcagtcttcaggctcatggagcagtgctgggcctatgagccggggcagaggcctagcttcagcaccatctgccaggagctacagagtatccgaaagcggcatcggtgagaccagtggcctgttcgggcaagagtgtacgtcctcagcagttcccactcactgttggacagctccaagacctgggttccaacactagcagcagggcttcgggcagggtgcggctccaggggagggtcaccatccttcttcctgcacaaattcatctcttggacagaaaaataaaacaaattgtgttcmtcaaaaaaaaaaaaaaaaaa

SEQ ID NO: 5831 - DNA, 600 bp, Rattus norvegicus
ctctgcgcttggcgctggcgctgcaccctggggccgctgcaacctgtgggcgcctggctgaggcctcgttgctgctggtgacgctggacccacgcctgtgtcccttgccgcggtcacggcgccacacggagcmcagggtgggaggtggtccagtgggcacatgtcgcaccsgacggttgcacgtgagcttccgtgaggtgggctggcaccgctgggtgattgcgccgcggggctttstagccaacttstgccagggcacgtgtgcgmtacctgaaacactgaggggacccggcgggccgcctgcayttawccacgctgtgctgcgcgcgctcatgcacgcagctgctcccacyccgggtgtaggctcgccctgctgcgtgccagagcgtctgtcgcctatctccgtgctcttcttcgataatagtgacaacgtggtgctgcgccactacgaggacatggtggtggatgagtgtggctgtcgctgaccacccaggacaccctttcagggacggccccacgcgaaaagcagggaccgtttgttcatgttttattggtgacaaaaagcttaaaacaaatttgaccaaaaaaaaaaaaaaaaaa

SEQ ID NO: 5832 - DNA, 902 bp, Rattus norvegicus
cacgaggcccttcactggcgagaagaagggaaaaccctttattcagcctaagagagaaattccagcacaggaacagatcacactggagcctgaactggaggaagcactgtcccatgccacagatgctgaaatgtgtgacattgcagcgatcctgggcatgtacacactgatgagcaacaagcaatactatgatgctatctgcagcggagagatctgcaacaccgaaggcattarcagtgtaktgcagcctgacaagtataagccagtaccagatgaacccccaaaccccaccaacattgaggagatgctaaagakggtgcggagcawtgacaaagagctggaggaggtgaacctcaataacatccaggacatcccgatacccgtgmtaagcgacttgtgtgaagcaatgaagactaatacctatgtccggagckkcagyswggtggccacaaagagtggtgaccccatcgccaatgcggtggctgacatgttgcgtgagaaccgcagtctcctgagcctgaacatcgaatccaacttcatcagcagcacagggswcatggctgtgstgaaggcagttcgagaaaacgctactctcaytgagmtcsgwgtagataaccagcsccagtggcctggagmtsctstrgagwtggagatgscmactgtgstrgagcagtkkccgtstattgkccgsttcgggtmccacttcacacaacaaggrccgygagctcgggcagccaacsccatgaccbgcaacaatgagctgcggygtcagcaaawgaagagataacaycaccyttcyttttaccwcawgagatgagagcvtgggacacgtagatcctcatctytctctcmttccctgtaaataaaatccctyktgttcamrmaaaaaaaaaaaarraaaa

SEQ ID NO: 5833 - DNA, 600 bp, Rattus norvegicus
tgtccttgtcccaacctttggggacatggggcagacacacatactagggtaccagaggtccccagtcgattcctggcagtgtggatgttcagcaggtcccagaccagactatggacttcctcccttccagattcctgttcccacacaacamtactaggctcaggccagcagctcaccctacacagagcctgtggaacccccaaaggaatccactaaggcctgggaagtgtcctaggggtgaaagggggggccccccttcctctcttcatcctggagtcagcaggaggcttctgtgggaaatggtactgtaacagctggctctggctcttctgcctcctaaacctygagggcggccacccagggtcctctgggtcaccgcctctctgcaagtggtggattcttagagcctggcactagaggtgacagatgggaggggtgtkccagcagcrccctttaggkatcrcctctacrgaacvtgagagccagsgaggggtggggscatccaccccctccccgcatcgtttagttctgtaaataatgtgcactgattaaatgtacagccggcrarwrwrrmmrarwwwrwaaaaaaaaaaaaaaaaa

SEQ ID NO: 5834 - DNA, 806 bp, Rattus norvegicus
gctggaagaagctaagagagcaagcaaaagtgcaacagatgttaaggtcactgcagacatggtaaaggaggcgttggaagaagcagaaaaggcccaggttgcagcagagaaggcgattaaacaagctgatgaggatmwcsaggggacccagaacctgctaacatcgattgaatctgagacagcagcgtctgaggaaaccctgaccaatgcctcccagcgcatcagcaagcttgagaggaatgtggaagrgcykargcgtaaagctgcccagaactctggggaggcagactatattgaaaaagtcgtatatagtgtamaacagagtgcagacgaggttaagaagactmtagatggcgaacttgatgaaaaatataagaaggtagagagtttaattgcccaaaaaactgaagagtcagcagatgccaggaggaaagctgagctgctacaaaatgaagcaaaaacactcytggcccaagccaacagcaaacttcagctgttagaagacttagaaaggaagtatgaggacaatcaaaagtacttagaarataaagctcaagaactggtgcgactggaaggagaggtgcgctcactccttaaggacataagtgagaaagttgccgtttacagcacctgcttataacagaggatggggctgtagggtggctcagtgaccaaagtaaacatgcgcaaactgctgcctcgacctacagataactcatcctcatttaatgtctttaaccaccttcttttgtatggagctaaataaaatacattggttttrtrwaaamawaaaaaaaaaaaaaaaa

SEQ ID NO: 5835 - DNA, 600 bp, Rattus norvegicus
tctcttaaccctgttacaagctgcttgtagacctgttaatatagtaatacttttatgataaactgagttaaaggactactcttttgctgttttatcatgtatgcattattttgtatatgtacagggcaagtaggtatataatttgataaagttgaagtcctaaaatattattaacagaagatgtaagaatttctgcatggtttaagtctttgtgtatcttacttgtaaattatttgccctgaaattttagaaaactgtttctgaattttaaacttgctggattcgtgtagccagcattgcaggttatcagagatcaaagagtgtwataataataccttttgtaaattgtaagcaaaaagttatttttatattatatactgtctaattgttcaccctaatggttcttgttttcgtctagtcatggagattcagtaagtgccttggaacaacattgacttcccttagctcgcgtgtgttactttcaagtttgaattcaactggggttwgaagactatcagaatctatgtatgtttcaggatatttgttgacctgccattaaaaaacmmwcagtkttacactgctaaaaaaaaaaaaaaaaaa

SEQ ID NO: 5836 - DNA, 723 bp, Rattus norvegicus
tccaggaataagtgattgctcaagtcttaccaaccgaggcactacagatactgaaacccagtagcaagtgacatacccatgccatctctcctgacacccagcccattttcctgttcctgaatcaaaggctctagagtcaccagtcaattcacaggacagtgctgaaattctaattttgagggtgatcaaatgttgattagagaaagtaatttcaacaataggactgtcggtaaccatcctaatcaattttgaactacatatgcatagagattgcggagaccattacaatctgtgactatagcgttgacttctgtcatctcttttgaaagacttgtttttgactcaaaggaaccamaktgrcagmsctgaatggttgataagcataaggccataattagctgtgtgtccctgcatatatatgtgtgtatatgtttgtatttgtatgtacatatctattttcaaactgtgattgagtatttaaatattcctactgccattctctaagtgaatacacatgaagaaatgcctttgaatttcctaatagaggatagccagcccttgggctgcctgtcacattttaccgcattcctcatttttctcatgatttgtgtagcagggaatgtgttcaaccatgatgagttttcattgttcaaattctttgtttacagcttttctccttaaagcaataaaccatcagcaaaagtgaaaaaaaaaaaaaaaaaa

SEQ ID NO: 5837 - DNA, 674 bp, Rattus norvegicus
ctcccagcagctgagagtgaaatgcagatcaggcccattgtgatgtcacagmamgakgggasaggccaaagaagaaagtgacatttaactcttcckccawcatcttcatcatcaccagtgatgagtcmctgtcagtcgaggacagcgacagwagcagcgcatctaaggtcgatgtaatccargtgcgtcctttatgakaacggaagacagtcttacctcagctgcgacacagtggscctgtcaggagtgccccccasagttcccatwtggtataacagtgacagaatctctgtggccctgcagggaatccgaatggcccatgcgmtgtctgtcttcaagaagtgacggagcaagacaaattactttaactcaatgggtgctttttaacttgagaaactcctggtggcacaagatgagcgtctggcaccaccgtctcctatgccaggatttaatatttgaacgactgtatttgccaaagcacataatacattttgtstatcaaatgtgtcccactataaaactaactgtctcacatacacgtgtacaatgactggacatctggagtatgttgcagtattgggtcctattktgtgccatgttgtgtgtttgaccaattcaatctactgagataataaatcaacccccacttttatctgaaaaaaaaaaaaaaaaaa

SEQ ID NO: 5838 - DNA, 729 bp, Rattus norvegicus
cacgagggcatcctgttcccctagcctgtatttctcaattctgatcattcagtcaggtgcagcagcagcttttcactgcacaactaaggccaggccctccagaggcagctggtgccctgcggcagacctcaccctgatgatttactccggtttcccagggcacagggtgagggaagactggctgccagagtagccaccaaggaatgagactctgcccaggagggctgggcaagtgggtgctagagcctgagctctcctgccctgggcatcccagttggtgctatctgttaactgattgtgctcatggacatggacacagacctactatgctctgaccctgcaggcgccttgggaagcgcccaaaggactccctttcattttggtgcatcactccacggctcccagcactgcagcctggtgggccagtctccatttcagcatcttgcatgrmcaggcactggggtggggtggcatgccccaggacccttgtttgtgtcaaaaatggctttcctgctccttttgtggatcctgtttctctcccagmtagggagtgtggtgggtagccagcatttcatggtaccacttttgtgagcactctgcttctgtcccgctcatstgcgctgctctgctttcctcagacccttttttgccgtgcaaagggaattcttgaaattaaataaaaggtatccagawwrmarawwrmawrwwmmmaaaaaaaaaaaaaaaaaa

SEQ ID NO: 5839 - DNA, 746 bp, Rattus norvegicus
ccacccagaactgaagaacataattaactttgcstatcacttcctgaggccacaggtcagtgtctccttgaacgttcaaatgggtaaaactggaaaaacagagtgaaatgggtttccatctgctgtttcatcttcagggagtgccccatgacttgtgtcaggaacactgcagtgtctcacgtcrgcagtcaggytgggtacccagcagctagcttgggtgctgaagcacggtccgtaragcccctgccacatgtraatgtggactcttrmmtaggcccagswacacctgtaggttattgcagtcctabtggccgccattgtctgtcctttggccagatgttacttgtttcctgttytagacagagagcgccccttaaataaaagcgatgaatatwtagggccacagaggtagaccctgagacwasccctggtttttctsttctagatagcraggttggctttggcaaggytggcagggaaaggaaatgagacaatatgtctttgccttcattgaggttctggtatagtctaattttgattcaagatgattgatgaaaattgcattggaattagtgtcagaaatagatgagatttttttgcaaattgaataatttaaaatctgtgattaatttttaaatgaaattcctgattgaggcggttcaratgtgttttcaaatactatattttwwwttatcaaaaaagcaataaaggaatttrmagtttwmmmrrrarmmmmaaaaaaaaaa

SEQ ID NO: 5840 - DNA, 414 bp, Rattus norvegicus
ctgtagctagaggtggtgggtcaggaacactcggccctggaggtggtcgcttgaacacttctgtgctggcaggacctaaggcagtgtgcactccggttaggtaattctcagatttctcaaggcagttatgttcctacgttctgaccaaacagtttgaggktttttttgtttgkttgkttggktgttttttttttgttttgttttgktttgttttttgtgatgtctaaagttcatattctcaataagttcctctacccttctttatggttttagttcgaaatctcctttgtctagtttaaaatggatggcttctgtcccgtccagaatccctcaagtcttaccaagctggtgagtgcactgcggagagtcactgaaataaattgatttccccmatcmaaaaaaaaaaaaaaaaaa

SEQ ID NO: 5841 - DNA, 600 bp, Rattus norvegicus
agttggctcggcagagaggggctcagaacctcatggacattctgcagtcgcacatgatgatcccaatgtgacccgggccacagtctcccaccttgctgggttacttgtcaacaaargaggaaagaaactttctcttttcactcctgtccattgaagaarggagtgggaggagcagtttgtggtttgttggtgttgatttcttgagtgtgygksykyrrrggttgtttctcatttgtttttctcacccctttttggtgtgttggacaaagaaggggctcctacaggcaccagccacctaaacggttcagtttcctctgcactggggctgcacagaagacctcagggcaggggcttaaagctctagcctcaagtgaggtcatcacctcctgggctcctgggagctggtgaccttggtgctcagagagccctgaagtgtgagccatctactttggtcatgggagggggaggggaaacatttaaaatcagttaaaaggataacatgagttttttgttttttttttttcatggaaggtttccagttttgttgtacagtttgaaatatatatatttattgctttatggaaaaaaaaaaaaaaaaaa

SEQ ID NO: 5842 - DNA, 643 bp, Rattus norvegicus
ctacagcgtcagaaccgagatgcccagagcgctatccaggatctcctgagtgaaagagaacagttccgtcaggaaatgawmtycasscayrarkttttggaagaactcttggtctcctwacagtgggggagagaacagacatactcccytaacacacagccccacagcacggcagrcctagcactcacaaaccacaggytggcaraggcggtrcacgctcatctgctgggaaacgttggcatcagccatccgaagaggactccagcaacagcagaagtytgcagtaccccagctgagaagatggctgaaaaggttctgcggattttggatccagttgcctgtacagaaagctctccggacaatgcatttgccgaatccacattactcactacaaagaaaaatattggacgtttccatccctataccagatatgaaaatataactttcaattgctgcagtcactgccagggggagctccttgctytytagtgtgtgctgactggaggagagccgattggaggccggctcagtccccmcagtcattattattgagatgctagaaataaaatcaattcgcctttawawaawamawrmmmawraarmwaaacaattgcggccgcaagcttattccctttagtgaggg

SEQ ID NO: 5843 - DNA, 600 bp, Rattus norvegicus
ctgatttgcatactcgtgtatatatttacaaacagttggcccttgctaacgaagaaaacctcattacatatacaatttgtgaataaacaggttgaaattatttacagaatttcctaaaaccacaaggtattaagaacttattgcatctgtgccasagacgtactgttgtttasaaagtccaagccgagtaaataacggmtgccttctcgcatctcagcttasgtgcatgctcttccasggctgaascggaggggasgggaccattgtgasagccgagtgtccactgactctcttatgatggctgcttagcatcccactggctgttcagaaaggctttctcacataactcttgtacttagacaggcaagttcccagatactttaagaacaaattttgaaagacctaagtcacccccccaccccctcagaacagagcacctgtggggcccttacattccagttctggctgggcagacccacatccccactccctcattggtcagctggctgcctcaccacacggccgaaaagagcgtcatggtttttttttttagaaataaagtcacctgtttagagcgcggtcaaaaaaaaaaaaaaaaaa

SEQ ID NO: 5844 - DNA, 524 bp, Rattus norvegicus
cacgaggacgtcccctcctatctacccaaatctcttttgcaccttgtcctaattgggaaccaaattgaacggatcccyggctatgtgtttggccacatgaaaccaggcctggagtacttgtacctgtcatttaacagactttctgatgatggtgtggacctaktctcgttctatggagcatatcattctctgagagaactatttctggatcacaatgacttcaaatccataccccctggaatacaaggaatgaaagcattgcattttctgaggctgaacaacawtaakatacggaacatccttcctgaacaaatctgcaatgctgaggaagatgaggactcagctcttgaacaccttcatcttgaaaacaattacatcacaastagagctatgtcgccctatgcgttttcatgcatargactdtactcaagtgttgttcttaaaccacaacgcrtcargtaacttcaagtttctctttgccatttataaattttacccaagcmwmrmaaraaaaaaaaaaaaaa

SEQ ID NO: 5845 - DNA, 568 bp, Rattus norvegicus
cacgaggcttttctccatgatgcttggctccggaatgccagaactgcagtctttcgatgatattgcatatattcgaaagactctagccttagacaaaactgagcaagaggctytggagtatttcacaaagcaaatgamkgacgmrsatcatggtggctggacaacaaaaatggactggatcttccacaccatcaagcagcatgcattgaactgagatggcagctggggactgcgagctggtgcctagcttctccactgcatggcagtgagtggcagcaggcacackgtggcatgggatggcacagtcaggaacaacatcaggactcgrgcaagaacataaacaacgtgctytataattgaaacactgtacacgcaaacagggtttgatagcaytaaastrgttcatttcaaaattcagmtttagaataatgagcaatttcatgttatgccttaagtccaaaaaaaggtaaactttgaagattgtttgtmtcttttttaaaaaaacaaaacawracaaaaatccccaaaatacatacaaatgwtggrgrcgaaaaaaaaaaraaaaaaa

SEQ ID NO: 5846 - DNA, 600 bp, Rattus norvegicus
  misc_feature (298)..(298): n is a, c, g, or t
tcctgtggagacttaatgttmttaatgaaatggaaagacacagatgaagctgacctggtccttgcaaaaraagctaatgtgaaatgtccmcaaattgtgakagcattttatgaagagagactgacgtggcatgcgtatccagaggatgcggaaaacaaagaaaaagaaagcgcaaagagctaaaggagraggcartctctgtcatttctctttgtatataataccttcaccttcctgsctcctctcgcttctcccgtccctttccatcctaaacatatccataaaaatgatgtgcttntcaawmamwrwrmwmmamrrgagagatgttggtattggttcccttgtaatataactgatggtctgactcctaagtgtagctctgtgaaagtcaggcattacatccttcacatgctgtgtggttcccatagtgttctctttcatcctgatcttttccttctgttccctgtaacttttaatcaccttagagtcgtgatctttggggttggttgctttggggaattttattataatgacgatgacttcagtttcttggttgttaattagaatatattgatgacccgcaaaaaaaaaaaaaaaaaa

SEQ ID NO: 5847 - DNA, 524 bp, Rattus norvegicus
cacctactggtgcagcaccttactgggggcctcatcgatcccaagaggacaggacgcatccccgtccctcaggckgyrckmkgcgggatgatcagcgaagacctaggtcagctcctgcaagacgaatccagytacgagaaggatttgacagaccccatcaccaaggagaggctgagctacaaggaggccatggggcgctgccacaaagatcctctaagtggcctgctacttctcccagccatgctggaaggytaccgytgctaccgagtggcctcccccaccytgcctcgytcctgtktgcgttgaggagggctctscaggrgggaagttmgaatgcaggcgtgcaccgccttgtcctggagcagcataatcscaggcagcggtcctcctcctgwccakccacctcactgtgcagtcacttgtgttgggccctgtccccaaacatgggaagctctgttatccctcccaccccctgcttctaataaatgaattatcttggwrmmrwraaaaaaaaaaaaaaaaaa

SEQ ID NO: 5848 - DNA, 600 bp, Rattus norvegicus
tgacattgggatagtaacaagcattgaaataaaccacaagcasgtggatgttgcaaaaaaaggacaasaggtctgtgtcaaaatagaacstatccctkgggaatctccaaaaatgtttgggagacacttskaagctacasacattcttgtcagcaagatcagccgscagtccatsgatgcactcaaagactggttcagagacgaaatgcagaagagtgactggcagcttattgtggagctgaagaaagtatttgaaatcatctaactttcccacwtgrgacagaatttggagtaaatgtaatattatgttgtgatattaccaacagawcagacatttggacgctgatggacttaggtgtataaaatgttttccatgagaaaccaagcaacttacactggtttgacagtggtcagttccccgccccacagtccagcgtgcctgcactcacctgcccttcctytaagacttggctgctgttttaaagtttgcccttcctcaaatttggatttttattacaaatctaaatctttcaattttatactgattaaatcagtcctgcagtatttgmttaamwaarmwwmwaaaaaaaaaaaaaaaaa

SEQ ID NO: 5849 - DNA, 557 bp, Rattus norvegicus
gcccacgggtgtaggcttggctgcagggtgagcagtttctgtcattgggcacgagatgaaaattmrygatsrcacttacatatacacacacaccccctccccactggccctgtcccatctcaggtaaaaaaaaaaaaaaaaataggcttctacataccccaggccaggtttgagtgttgtcaggatgagcggcagccarcagggcctgggtttctacccttctccctctcccaagcctggccacagcrtccacgcacctgtcagaytaggcaggacagagttkggggtgggggggtctgaggtttccatcatggaagccactctgccctcacatcaaagcacgttcctaagatgtcccatgctgtccaccagctgtcctgtacggtaacagggaagaccctaagagtctttgtcacgtagcgctgaaagccaggcccgcaggctggagctgtctagatgctggtgtctcactcattttaaaacccaaactcttaataaaarttttctamactggaramarrwwramaaaaaaaaaaaaaaaacctttgcggccgcaa

SEQ ID NO: 5850 - DNA, 600 bp, Rattus norvegicus
tggaaggcaaggaactgctgtgctgctgtggagccattgaatgcagagggcggcttctctagaggaagactcttcctcactctgaggatcccttccccaggaactgggtctttctgactccacgtctctgatctggcttctccccagctcctagtagataaaagtgggggtcctagatcaggacgttgccagcgtggtgctagcaggcactagggtgggatgaccaccctagcatcagcctgaggtccttctcatcccgtatgtgttcatgattcacatgcgccgtgtatctggtttgtatggtttcttgaaagtcttctaacaagatgataaawtdgarmwwrwrrwwwrwmwwmtctcctcagccccatcttgaccttccagggagatgtcatttcccaatggcaactatcattagtttaccccttgattttatttgccttgtgtaatttttaacagcaacaaaagttccatgaccaggagggaagcctaagaaaaataacccttctcaagtcttaatagtctgacacagtcatgttttatttaacctttaatatactttaattaaaaaaaattaacggtaaaaaaaaaaaaaaaaaa

SEQ ID NO: 5851 - DNA, 530 bp, Rattus norvegicus
gcaaacacattatatataactccacaatgtcttctgtttagtgtatgggaaaaaggtgtccaaatgtccacctggggccagcacagtggcaagggtgttctcagmtgagctgagcgtcaggctgcctgctgaggactgwtggtggatttctctctttgccttaaacctctttatttcactgcsccaacactttctctttgtacatattcgtgccaaccttctgaaaaggaagctataaaaacagaagttgtaatttaagagtgtgaataaccatcttctgcttggggatcggtgaaacacatgccttttagcaggaagcaaatctgtccttttttaagtttataaaatgtgcattttacagtatcaaatatttataatcttatttgaaatggatgaatgttccctacttacaactgtggttatcaaaattgtgaccattccaacctgtgcatttttgtgtgtttaaattcctgaaagttacactaaataaaaagaaacgactctttattwwraaaaaaaaaaaaaaaaaa

SEQ ID NO: 5852 - DNA, 746 bp, Rattus norvegicus; identical to SEQ ID NO: 1756

SEQ ID NO: 5853 - DNA, 600 bp, Rattus norvegicus
ttgagaccgataaggagtactacacagtcamggaygaccgggacakcccagtgttttggtacgctccggagtgtttaatccagtgtaaattttatatcgcctctgatgtctggtcttttggagtgacactgcacgagttgctcacgtactgtgactcagattttagtcccatggccttgttcctgaaaatgataggcccaactcatggccagatgacagtaacacggcttgtgaatactctgaaagaaggaaagcgcctgtcctgtccacccaactgtcccgatgaggtttatcagcttatgagaaaatgctgggaattccaaccatctaatcggacaacctttcagaaccttattgaaggatttgaagcacttttaaaatamgaagcatgaacatttaaawwmmmawwwawmaartccttctctcccaagccatttaaaaacgytttttaagtgaaaaagtttgtattttgcctctaaaggtgatcaacaaatactcgagttacatatatacatgtatatgtcacatggtcactcagtgtgtgaaactttctctttaaaggtgtaacatcttaaatttagtgatgaataacgaccacca

SEQ ID NO: 5854 - DNA, 424 bp, Rattus norvegicus; identical to SEQ ID NO: 1758

SEQ ID NO: 5855 - DNA, 816 bp, Rattus norvegicus; identical to SEQ ID NO: 1759

SEQ ID NO: 5856 - DNA, 805 bp, Rattus norvegicus; identical to SEQ ID NO: 1760

SEQ ID NO: 5857 - DNA, 600 bp, Rattus norvegicus
acagargacatgcttyaygwdatagctttgrmcccatctttaatygagaaatgtttatctktataaaacatatttttggmtawawatatatwtakryayrdkkgtatctacagaaagkctmtaaacgcatttgagtaaaatcctggttcccttttmwacgcctgtcctmgcacchtgcgcttgttctgtmtgctgttgtcacagcacatgcagtgctccwtcsrtccytgtttytcactctgtcaccagstaaacaatgtccgtgccatgttgagtatattcgvtacaagcctcagcctgtkggtargttsccatgctgctggaaagctgttctttctcttctmtaggtgtttaccttcttcctgggaaaagtagtcgctctcggtagcagtaccaagtttcagtggaaccaaatttytgccmttaaaaytggcattatattgaacgatacaktgagaaatcagtcgaataaaaaatttttactttcmmawrrmwrmwwmmwrracagttccttcactgtaatgtttatgctgttttgaacatatactctcattaaagtgtactattaaaarawrarwmwawwwawrawaarccctcgtg

SEQ ID NO: 5858 - DNA, 1400 bp, Rattus norvegicus
gaagccagttctccgggcgtaacctaggtgkgrgaytaaaagctttccywatkgayttaactttggataatggcaagatgtgatgrgtagtgggwacacagcgtgtgcttgaatgkgaggaaaaagctccagtgacccataggagatggtcsttaagtggactccatmtaatcccmyrasrgtcgtgaacagcatggtgaagagcgtgaarctgtttmtgtattcctttcatcstgaaagacmtacagcttaggagaaagttatgaycaagcagagtaaactacatgctgtattttaaggtytaagttwaactgatcaacatttaaatggactggagctgttagtacataaagtgtgatggactktgttcccaacactttcatatctccbtgccctwtcagmcttyctmcttktagcccctttycataatctttggtttgtatgtggyttctcagwyaatacatagctaatagctcttattwttcttatgtttwtaactgctttaggcctatttcgatgtaagggtgaacattcatttgatggaaacasttgtgtatatttaargacccagttgctcctctggagcttgtacgtycamgaatgatyaatctgtgtaataaactgattactacagtcwtkmchwwwaawwwwrwrwraawarrmtttttgatttaaaaactyggtctagctaarattagtggtggatttttcctcatccctgaaatgttttcatttatatttgttgcatttcaaaatcatgaaacaattccagtttacatactaaaagagatgtgagagtaattttattaamcaagatagaggsgtaasyttaaaggcattttcatgaaacttacatgtgcaccattccaggammatsmctgttaarctwamgmmwykwkcttkkttartrraagtgagcagcacttcaytrgamccttacgrcagtctcttggtacatmsgrcakaggacacaargkgttgctgttgatgagctaattgattgtaactataacgagtaactgaccaaacctgggawacatgagcacaatcttgtatcggagagtctacgttattactytgcactaacatttgcaggatgtccmttggttttaaattgwacwgwawgtggctttttgaagtcttcctttgactctagtaaaawgtagtttggaatttgtaaacaactgttaatccagaaacattcatgtkaactaggcaagttatctcccctcatcccttttcctaacctaaatgtaagccaggccagcttkaaggccatggctgacgctytctagtcatcaggttytttkaaawgcatctttacactcttgcmcaaaaattkaggaataaatghccmctgctyttggttttrrraaamaaaaraaamaaaaaaaaaaaaa

SEQ ID NO: 5859 - DNA, 584 bp, Rattus norvegicus
cacgaggagatggccaagtctacttcttcaagggcaaagagtactggcgccttaaccagcaacttsgagtggcaaagggctatcccagaaatacgacacactggatgcactgtagtcctcggactccagacactaactcattaactggggatgtgaccactcctgcaaccgtggaatcagtcttggatgttccctytgccacagacgytgcctccctctcatcctcagytaatgtcaccttgytaggggcctgagaactagtcagtgtytgctccttagggttgtgcagatgggcacttgacctagtgcccctagatactccaattytggatgccacattccagtrttcctagaaggtgactgcttaattytgagtcattccccagtccccatttcttcttgtcatatggctgtttcaagtgtgacatctattttctggtggagggaaattgttgatcaggacccccccccccccagggtctctctacatagcactggctatggttatcggctatcctgaaactgtgtagttatgtagactaggctaacttgaactcacagaamccaaaaaaaaaaaaaaaaaa

SEQ ID NO: 5860 - DNA, 724 bp, Rattus norvegicus; identical to SEQ ID NO: 1764

SEQ ID NO: 5861 - DNA, 674 bp, Rattus norvegicus; identical to SEQ ID NO: 1765
  misc_feature (654)..(654): n is a, c, g, or t

SEQ ID NO: 5862 - DNA, 600 bp, Rattus norvegicus
aggtggctgcagagccattcttaaaggggcccragagatcatacggcaacggacggctgacgaccggaaggaaaatgagtgagtcyttggtggtttgtgatgttgctgaagatttagtggaaaagytgagaaagtttcgttttcgaaaagaaacccacaatgctgctattatwatgaagattgacaaggataaacgcttggtggtgctggatgaggagctcgagggtgtctctccagatgaacttaaagatgaactacctgaacggcaacctcgcttcattgtgtatagttataaataccagcacgacgatggccgggtctcctaccctmtgtgctttatcttctccagtcctctggggtgcaaacytgagcagcakatgatgtacgctgggagtaagaacaagmtggtccagaccgcckarctaacyaaggtatttgraataagaaacaccgaagacctractgaagaatggttacgtgagaaacttggatttttccactaatgtgaacttctgtgtttctwaagtattwatgtattaacctgaccatrctggaaccagacataaatagttatttatgccwaaaaaaaaaaaaaaaaaa

SEQ ID NO: 5863 - DNA, 600 bp, Rattus norvegicus
gattacttgaacgatacactcaatgccctgtatctgggagcacttgcggaggtgtcctggccctagagggctacttcaatgtcttgactgacagaaactcttgtgtgttaaatgaagctcgaagttctctaggaaggagtcctcagaatggcatgtattggsccactagcagggattgaaaacattttaacagaaatcctttttcttaggcgtaaaagctgataaaaggggtgacttcctggttctgatcaaaaccaaaccaaaccctcattgcagcaaagccttgcaagatactcccttgctcatttgccatatttasatgcyttagtgsagtcagagccatgtttggtatgtgtttyccatgagctaagtmtaatttgtcttttcatctcatgawgcatkktttctcttttgtcaggataacatcatatagcatcttatttgttcttcctaatctctatgtacatatctatctacctgtaaccgtagatagctatctagatagacaccaagcttcttatactccgggctagtatgcatcattatcgggtctctgccttaaaacacatccaaatttatattaaaaaaaaaaaaaaaaaa

SEQ ID NO: 5864 - DNA, 600 bp, Rattus norvegicus
tgggccctctggcctggctacctgctgtaacacccaccatgaatgcaggagatggaggctctcccgtcckgcwcgwksctcagagataagaaacatgttcagaaggaarmrarwmwmwrwrwrgctctgggcacccaagcatggggcttytytggaagggcagggatggcactmtgcctggtggtagsccaagggcgtgggaatrtagcccttgcagggagggtgggccctctcccccacytggccyttgggmtgaggtgttcttactagtggagggaggcttgaggawccggtyggsgagrgcaagagcatctmtmgytaccctcbtgaggaggggagcccttttarggcatgtatataatgttcstaggtgkacataaaagtccttaccctgttaggggtstgrgctatatttatggctggcaragrccagtgtggaagggmtggsttcggstsatstgchtgacaccaggcactccytgcccastgattctcaacatsttcctctccctaaatcvtatytaagaacytttggaagsttascsatttttacttaktaaawtgaacgtcktttkacmcaarmawaaaaaaaaaaaaaaa

SEQ ID NO: 5865 - DNA, 438 bp, Rattus norvegicus
  misc_feature (276)..(276): n is a, c, g, or t
cgcggtttggagtcctgaaaaaggtatgtgttggggttgtcgccaggcttccattaacagaagaggccttgggggtgccttccctgctctcaggccccgaggggctgtcttttaagtcctccaggcctggttccatctgcctgccaacacccttggaaaggaatccacagcaggttggrgacgggaccacatcaaccccagagttcccagggttccagcactaccaagttggaattccagattggaggggtgaggtggagtcgggtagagaggganccaagatagacaagcagggcagagaagcacattcaaaacttaatggcttggctatcatcaaacaatcaacttaccttgcatctctgtgggtaattcccccaaatcttgattttttttttgattctccctttcagtctccttatgaaaaaaaaaaaaaaaaaa

SEQ ID NO: 5866 - DNA, 1351 bp, Rattus norvegicus
ccgagagctcacagccaactttaatttttcctgatgaaacttcccagacaacgcgttttcgcttcccgagcgcctgtacccatccttctgcctccagcctstgccccagaactcgcacctgtgccggagccccatttctccctcccacactcgccatctcycaggccgtttcgtctgtgcagggmtggttcgttctggctttttgtttttttgtctgtttgcktggtgttggttyacttgttttctgggggaaaaagccatatcgmtrcaattctayagaggttgagatcgttctcactgycaagtcctgtctgggctgggtttgctgcctctgggacccactgctagaaaggggctcctgtactcctccacggatctagtttcctgcctagtcctgggtaaacttagccgsaagccctargtcccattgtsggcgmtgaggtgtctggcctsaggtcaatggtgcaaggagccgccwccgggttcgccagcctggagtgctgggctgtgtttaatcagggagtccaggcctggkttctcttttcwtccttcttttcttccttggccaagagcagagtatggaagcgtggacattcaggttagctaaagggcttgacctggctgktysmragastgaraaagaaataatcagaaagattaatttttttccttcttctgtacgatcgcccaactttaagtgaaaattaaaatggscaagagaaagaaacctttcttcccgtttgcccaaggtcttgcttgcctgmctaaaatccttctttcacctttgaatttccataccctggctgttgataaataatgcaggkttgtttatacatgtggaattagtggagtttcgtcattaaaactgttaccagttggtaacacgtgaaaagcacaccacaattctccctacttaatggagttgggcttttwtgyttgyytgtttrtttgtttggctttaattcactktttattktgttttatwttgtaggcyttctgaaattcatggaagcttaggtgggctggggcaagcagaaaaaacgagagaagggagatattgtytggatttccyttatactgtgaagttacmtgcataaaagggtcaaacctgtaggtgcmgaaaagaaaaaaaactataaatacaaayctgtataaatgtctattatgaaaaattkccaatcttgtttaagcaaatgcattctatcgttattataaatgttagttctagctttatttacttcaaatcttaaatcagaataaattaatattgtattgctdmwrwrmrwrraaaaaratgatgtttatgttcttatagaataaaagctgtggaatgaaaaaaaaaaaaaaaaaa

SEQ ID NO: 5867 - DNA, 691 bp, Rattus norvegicus
gccatcagccacaacaggacatccaggcccaagatgtcgttggtgatgccagccatgccccccaatgagaccgtgtcaggccgggggcccgctggggactatgaggagatgatgcagattgagtgtgaagtcatggacaccaggggattcacatcaagacctccacggtcccccctcacttcggaagcagccgtcccsgtccccaggcaataccacaggtggccccttgccaggctccgcagccagtccggcccgtcaggcctcccrccagcccbthtacctcaatcatccctgasttswtcagcccatattggyttagaaccgggktgggsagcctratsctggggctcgrgrcakttggtaaaggaaggtggggtgtggggattaagcacttggcgggacatgggtggktggttcacctctyttstcactctctccggaatatagagctcytbtggttcctgcacccccagtcstctttytyygagggcactgcgtragggtggctcctgtaccctcttbtgtacctgtaccwttatmtattcrggagtaaaggtgggacttgstccmcaggtgrgacaagggatggtctcgkgtggcmcaarrmarwwawrwrwrwrmahatctttyttrttrtkattrttaaataaacarcytggaggggtgthaarrraaaaaaaaaaaaaaaaaa

SEQ ID NO: 5868 - DNA, 600 bp, Rattus norvegicus
tacgaaaatgctctgaaggagtacaactccacaagagactatagaagtgaagctgtagacaagatccaaagtacgttgcattgctgtggggtcaccaattacagggattggaaaggtacaaactattactcagaaacaggatttcccaagagytgctgtaaactgraaggctgttatccacagagagatgcagataaagtcaacgaagagggttgtttcataaaggtaatgacaactatrgagtcrgaaatgggagtcgttgctggaatttcttttggagttgcttgctttcagctaattggaatctttytcgcctactgcctctctcgtgccataacgaataatcagtatgrgatagtwtaatcagtatgaacacgggctymtaystskysarttctwaggttacctttgtgagttataacagcgcctggatggagactgacacattagcctgaaaagctacaccagtagactgattcaatcaagatatttgtgtattgtgttctatgtccactttctgtcctattcttacacccctgtatctctaaaacactggaagagctagtaaattgtacwtgaawtaaaaaaaaaaaaaaaaaa

SEQ ID NO: 5869 - DNA, 600 bp, Rattus norvegicus
gctaatttttctccaggttcctcagagaaagggctggactggtgggagctggtatgggaaggtcaaatgaagccaaacagactcccccrgcgggccrscayrwskcaggaggttagagcaacagctccakcatctgcctacgaagaatgtgaggaagggatatgaggaggttatgtagacaaaataaccggtttgcaaaggactsgagaacatgcatkctttggktagctggtctgagaagtgggtgtttatctgtgaaaatgagatcatagacttggggggagkccaggaggtctgckacctcccggaatgggcagatttactgtwggcattcaaaacatctaactaaaataaaaggaattgtctgtcammaaaawaaaamawwwaatgtatccaggtgtgtccaacttgggaagggacactggtatgatagggaagaaagaaccatagaaatgtcacagktgtaagattaattaatattggaagcagytaattaataattaaatattaaaatttcttatttwwrwwaaaarwrwaawwawrwmmwmwawwwyattaaaacttctgaaaaaarwawarmmwaaaaaaaaaaaaaaaaaa

SEQ ID NO: 5870 - DNA, 600 bp, Rattus norvegicus
marctcccctgccctcataaaagtgrscaygttgcaakaaaaattgtggcagrttmmvrrawrwwrvmwwrdwrraaagaaagaaagaaagaaagaaagagagaaagaaagaaggaaggaaagaaagaaagaaactgcagaagtcaatcagagcagatgggtaactatggctgcctgcttggaagactccatccagccctccatggaggtttgtggattgggaggaggatgaaagacacctgagctgatgttcatgctttgcttggtcacagctttgtttacatgagcttcacacggsaaaacttcacaaagctttagacttcaggcttgcacgtgtttccttttgtgtttatgtttccactgtggcctttatagatactccagagaaagcaccaataatatagacgcattaacacacacatacacacattctctctctctctctctctctctctcacacacacacacacacacacacacacasacassgcgcgcgcvacttatttatgttgtttctctacctttagacaggatcccgctgcataccctaggctgdcctcacattgatagtcgcccttcccagccacdtctvacactcga

SEQ ID NO: 5871 - DNA, 600 bp, Rattus norvegicus
tgctctgtggcacactggccacacccctgatcaggtacgactgctgtggactgatccacggaatgtgggttggcgagacaagacatcctatagatggcggctgctccaccggccccaagtcggctacattcgggtgaagctctatgagggtccccagctagtggcggactctggggtgakkmwygakrcgtccatgcgaggggggcgtcttggtgtattctgcttctcccaagaaaacatcatttggtctaatctccagtaccgatgcaatgacacagtgcctgaggactttgagccattcaggaggcaactgctccagggaagggtgtgaggaggtggccataggattcagatcctgattggagaccctttgccgttggactctgttctggagaccctggggtctaacctacagcccctcagcctaacagatggttctctggtacccatcagggagctcagccctagaggggtagtgaccccattgtgcaggggttgggagcctttcaaggggtattactactcaggttttaaccccaggaaagacaacaacacattgccataaagtttcagttattttctaaaaaaaaaaaaaaaaaa

SEQ ID NO: 5872 - DNA, 718 bp, Rattus norvegicus
cacgaggcaagtgcgttgcttacagcaaatgctgtttctctgtgtcctgacgtcactgaggagaagggattgtttacacacggggatgggagcagactttccactactgtgcaataragataccgctctcttcagagtaactgtgaacctttttttaaccaacactarctagtttwaaaagtcgaaatatttatgatgacgattgtatagcttttaagttatttttctaacgtgkggcttttctgtagccatggtagcgccmtagatgtgcatctgggctacccasagtgctgtctstgggcacaattgtggcaggtgtcattcatctcggttttggacactaggcatgagtcctgtctcctttctccttattctccmtccacaagctgctcmtgattcctgtttcctgacaccgagtcccctstacccttttgmtatgcttcctttgaacccagttaaagtctctcctgtcagtattctcagatggactcagatccctcagctccctgacttstgcgtaatcagataacggttctttttaattcccaggcagcactttggtcccggctccctactcatagtaaaccagcsttaaatgccccacacaagagggtggtwccataggggctaccctgctmtayttaaaagcgtacacaatcaatgtactatgcaagtttacaataaagacagtgcaactttwaaaaaaaaaaaaaaaaaa

SEQ ID NO: 5873 - DNA, 750 bp, Rattus norvegicus
cacgaggcgtgccagcacctctgggatggcctcgcagaaccgcgacccagctgcagccagcgttgccgccgttcgaaaaggagcagaaccctgcgggggcrcsrsscggggscctgtggscaasakgctacagcaggagctgatgamcctcawgatgtctggtgamaaaggaatttccgccttccccgaatcakmcaacctgttcaaatggrtaggaaccatccatggarccgccggcactgtmyatgamkacytgaggtataaactctccctakagttccccartggctacccttacaacgcacccacagtgaagttcctcacacbgtgctaccaccccaacgtggacacscagkgcaacatctgcctgracatcytcaagracaagtggtctgcactgwatgatgtcaggaccatcttgctcwccayccagagcbtgbtaggagaacccaacatcgagagccctktgaacacacatghtgcagagctctgraaaaaccccacrgcatttaagaagtrcytgcawgaaacatattcaargcrrgtcwccaaccaakagccctgacgccagctctccagctttctmttgtgtcgtmtcttttcttagatgtctgtcctttctccgtggtwtmtragmtrtgctgttttgtttwatktgtttttttaaattaagtctgcttgaacccatacaatgtatattaaataaatgcacgttgattgtttttgtdwaawaaaaaaaaaaaaaaaaaa

SEQ ID NO: 5874 - DNA, 600 bp, Rattus norvegicus
tggaggctctacagttcatcagagaagaaacgggtctaaagacagcctgattgaagaaaaatctcagctttytacaaccaacctggctggaaaacatacmgcaaaaacaataaaaaccatycaggctgctcggctcaagacagacgtcactgggtgaaggggtgtagggaaacgtgtgtcactggtacttttcaaactgtgaattagataattacccacgtatcttggactcgtgtccttagcacaagaaaattggcatcttttaaggatttatgtacagcattcttgtgctgtgggcctttggaaggacaaccttatgaactyrcwsgakrccmccatctctttcctgaaattytgaccatccaactgtgtttytcacctytccaccacagccaagaccaraggcttcaratgagcccctggactcccagctgccatcagactgtagtgacttttattcccmcaactgtttgtaatattgtattttgtgacatttaagtcccaatggttatttacaaataatgtaaaaagctgttaagtgttgatttgaawwwaarwrwmmwwrwmttgtgttttctgaggcaaaaaaaaaaaaaaaaa

SEQ ID NO: 5875 - DNA, 600 bp, Rattus norvegicus
tggagtgcsccaagcatgagttactacagccattcaacgttctmtatgagaaggagggtgagtttgttgcccagtttaaatttacagttytactcatgcccaatggccccatgcggatarscagwggtccctttgagcccgacctgtacaagtctgagatggaggttcrgsmygmrgagctgaaggctcttctccagagctctgcamgtcgaaaahcccagaaaamraaraaaaaraarvccyycrwgactgcagagaacgccaccagtggagagacattagaggagaatggagctggsgaytgaggtgrgtcccctccccagsttgtcactcbtgcctcaccccctcccacsgcaccscaggctctgtcaagtgcagktmgtyttytccacccaagactaccagcagagcggggttmtgccctcatcccggtcccccrcccamccgcccactcctttyawcaaaaaawccagcymmgactgacthtgstgytgsgagvccaggbttcccamccaccgargactacttttmgtagaaaaagaamytgaatawtaaamtcmggdgtcaaaawmmammrwmrwmaaaaaaaaaaaaaaaaaa

SEQ ID NO: 5876 - DNA, 709 bp, Rattus norvegicus
  misc_feature (18)..(18): n is a, c, g, or t
  misc_feature (69)..(69): n is a, c, g, or t
acagcgagagatgtgagntctgcggagctgctgccgtggctgccatgctcacctcctgcgccctcactntgcaccgtatcccacaatgaccacgcatggctggagatcctgcagccctgcttttgagccccaatccggagctgcagcaccggggcactgtcgtggtgctgaacatgatggagtcctcgaaggagatcgccagcaccctgatggagagsgaggtcctggagatcctgtcagtgttgsccaagggckagragagcccagtcaccagggctgctgcagcctgtytgragaaagccgtggaatatagayttatccaacccaaccaggatggggagtgaggttctgccctggacccacagctcatgtgthtgctacccatcacagctbtgagagtcaggatagaagcagcgtggccaacaggactgggatgctggacactggccttcytccccagytgcactttggtgttctctatcbtggggacacgcaccacacagccytgccytgccagcaytcagaagggccctgtctgtactgtagagagytgggaatggggagcacgcatcccattcaagtctgtggattatgggcatcaagaaggaagggcacagtagcatcctcacaagccgggagcatcaccagagcytgccagcaggytagtccctctaataaatcatgtggaactaaaaaaaaaaaaaaaaaa

SEQ ID NO: 5877 - DNA, 600 bp, Rattus norvegicus
tytggaccgagggaacggraaacggcgtraaawcagttwagccctttgtcmtcgtgtamcagtctcmtatacccccccacacaccacatgccaythgtcmccgccccacccccacccccgtggagggactgctcttcccagaatgacatgacacaggtgcacacacgcaggtcttcccttcactcagtytacactgattttactgtgacctctgaagccgtatggataaactggatttwttwtttwwwwwwawrwwrdvwmwmarwwwmarwawwaactcaccttccagtgggagatcatcaccctgagagtgcactcggggttccttgtgttagaaatttaagaactgaggcaaggagcccctaggctttgctgtagggctcaaaggggagccagggtcccatctcgaagttctctgctggggaaggacctgtggctgtccgaggatcgcaccagcatgtccgatagaggaaggggttttctaaaccgtcaagtacttctataatagtctgtgttcaaagtgtaaactgttacagtaatcagccttgtgtatatgaaaacaataaatactatgcaaaccaatagaaaaaaaaaaaaaaa

SEQ ID NO: 5878 - DNA, 600 bp, Rattus norvegicus
atttttccaaacatttgctttgcwtgaggtagtccactgtctgattggaatcgtacccacttctgtgcttgtgactggggtccaagtgagttcacgaatcttcatgrthyrgmwcgawkagmkcryrgtgmtwwwwctgsymtccwgrackrwgaccgagatcactcgctattccttctacacattcagtctcctcgaccacttgccgcacttcattaaatgggccagatacaatttttttatcatcttatatcccgttggagttgctggagagcttctcacgatatacgctgccttgccttacgtaaagaaatcagggatgttttcagtaaggcttcctaacargkrcracgtctctttcgactactactattttcttctcataaccatggcctcgtatataccgctgtttcctcagctctattttcatatgttmcgtcaaagaagaaaggtgcttcatggckaggtgatcgtaragaaggacgattaaatggtccctacaaacaaggtgcttttttcagaaaaaccggattacttgagtccaagttttaataataagmmtmrwsaacttcwtgaaatammaaaaaaaaaaaaaaaaaa

SEQ ID NO: 5879 - DNA, 600 bp, Rattus norvegicus
caacacgccggtggctggggacatccgagcagatttccagtgtttccagcaggccagggctgcaggactactgtccaccttccgagcgtttctgtcatcacacttgcaggatctctccacagttgtgcggaaggcagagagattcagtcttccaattgtgaacctcaagggccaagtgctttttaacaactgggactcaatattttctggtgatggaggtcaattcaatacacacattccgatatactcctttgatggtcgggacgtgatgactgatccttcctggccgcaraaggttgtttggcacggctccaacccccacggtgtccgcctcgtggacaagtactgtgaagcctggcgaaccacggacatggcagtaacaggatttgcctccccactgagcacagggaagattytggaccagaaagcatatagctgtgctaataggctaatcgttytgtgcatcgaaaacagtttcatgacagacgcaaggaagtgataacctccccatggttcttaaaagagtattytaatatttyttatgtgaagagttgacactgaagtytaaaawrwwrwaaawwwwaaaaaaaaaaaaaaaaa

SEQ ID NO: 5880 - DNA, 600 bp, Rattus norvegicus
acgataaggggaaagataaagtggaaatttctgaaaaagccaaactggaaagctcagatcaggcagaagaaggcttagatgtgcctgatggcaaaaaagtgacagaggatgatgctaaggagtcatctgctgaggatagcgaggaaaaagtggcccagatgctcctgtcacaggagagtgacgactattcccagccgtcgacttccagtagcattgtttacagcagccaagaaagtggcaaagagttgaaggaggacacacaagacaaagaggaaagtatggaatccagcttctctctgaacgccatcgagccatgtgtgatttgccaggggcggcctaaaaatggttgcattgttcacggcaaaaccggacacctgatgtcatgtttcacgtgtgcaaagaagctaaagaagaggaataagccctgccccgtgtgcagacagccgatccaaatgattgtgctcacgtacttcaactagacggcgggcagacgcagacctttacacttctaatgtatgacccccaaattagacaacatgggtattattttcatacattaaagccggagcattgtcttagtctaaaaaaaaaaaaaaaaaa

SEQ ID NO: 5881 - DNA, 600 bp, Rattus norvegicus
tgatcaatcggatttttaggatatgcaacctaactagaccacaagaaggctatctgatggtacagcagttccagtacctaggctgggcttctcatcgagaagtgcctggctccaaacgctcgtttttgaaactgatactgcaggtggaaaaatggcaggaagaatgtgaagaaggagaaggccggacgatcatccactgcttgaatggcggtgggcgcagtggcatgttctgtgcaataggcattgtcgtggagatggtgaagcggcaaaatgtggtggatgttttccatgcagtaaagaccctgaggaacagcaagccaaacatggtggaagctccggagcagtatcgtttctgctatgacgtggctttggagtacctggagtcctcrtagttcggtgatactttgcagaacatcacgtggagatccgtctgttgagccagcagctgttgcacctgttccacctgcaccgagagattttaatgtgggggggtgggaggcttttacattggagaggcaaacgtatttttcttataaagttgtgtatcttaataaaaamrramwmrawcagtttctgttaccgtaaaaaaaaaaaaaaaaa

SEQ ID NO: 5882 - DNA, 600 bp, Rattus norvegicus
ccaaagcacgtttagtatgtgtcagtgagggtggcgcttggctctgcgcccatacccacsaksagtttctctagcgagatgcactgaggtcagacccaagcttggagtcctgaccttrgcatactgctcacacggggttaagtggtccagtttggcctagtaaggttgcctaccaatgggstcaaaagtcacyttttaaacaggcttcatttcaagtattaatatacagacaagacacttttgcattaccttgctttatatagttagctatccagggaagccggggtgacttaagagtaatggtctagaaaagggttttctctgtacccagacccggctcgatgggctaagacctggtaagacagagtgggtgctccatgtrtaatcgccaaaccacacacctgaagttggcacctcaccgccttttacttcatcgtgtgtttccccttctcaaggcaktctgagaggagcagaatagcatcagcccatgtttggtaagcactttatgcycctcgacagaacaggcggtgttctctacggctctctctacagctgcgactcaggttagtcagtgagccatcaaaaraaaaaaaaaaaaaa

SEQ ID NO: 5883 - DNA, 600 bp, Rattus norvegicus
ccattagckccacctytagccttggcctagaaccaacatcctttgggcttaggmgagttggcttttgaccctagaggcgaggttaaggaggggatgasgacttgctwtscaatcstgctgttctcaggattatggtccaaataaacagtatggtccacgggccccaggtggaaggaccaaaccgggtmtatmmtggamwmwmmrrawwmmmwragaggtggtctctgccctgcccccktgctctacctggcttctctggccccagcctttggaacgttmaawrarwmmwwwmwwmagctaatgcttgttgagtacttgccccatgccaggcacctgacggtgctaagaatacggttgttwacagaaacccatyccatgccccctggaagcccacatggtaacaagacaacttccaagggtctcggtctcagaccgggatgtgaagcacaacgggagatgagggtgcgaggcagctggcgagttgtcagaactagtgtgtcctccagtcggtgccacccaaagctgcagaaagaccgaatgaaaagcctgaggaagcttaggtgccacgtgggtggaaactttaagaaaaacaaaaaaaaa

SEQ ID NO: 5884 - DNA, 588 bp, Rattus norvegicus
cagtgcaaccagtaagttgatccatccagatgaggatatatcactggaagaaagaagggcacagttacctaaatatcagcgaaatcttcctcgaccaggacaaactccgattggtaatccaccagttggaccaatagggggcatgatgccaccacagccaggcataccacagcagcaaggaatgaggcctccaatgccacctcatggtcagtatggtggtcaccatcaaggaatgcctggttatcttcctggcgctatgccaccatatggacagggaccaccaatggtgcccccttaccaaggtgggcctcctcgacctccaatgggaatgagacctcctgtaatgtcgcaaggtggccgttactgatcttacttcaagtctaataggtttggagattaaaccttttctcaacttgtgctgtttatgtagacaagcttccgtctataaggcttcattgtgactttaacaaacataatcttcccacataccaggaactattggacatttatttgacatgggagaaattatttggaataataaaacaggaacttttcctgaagttgcaatttaaaaaaaaaaaaaaaaaa

SEQ ID NO: 5885 - DNA, 412 bp, Rattus norvegicus
cgaggcagatgaatgatccagcactgagacacacaggcctctactgcaaccagctctcatccactgaccttctcaaaaccgaagcagatggaaaccagcaggtgcagcagcttcaggtgtttgctgacgtccagtgtacagtgaacctggtaggcggggacccttacctgaaccagcctggtcctctgggaactcaaaaacccacgtcaggaccacagaccccccaggcccagcagaagagcctccttcagcagctactgactgaataaccacttttaaaggaatgtgaaatttaaataatagacatgcagagttatacaaatatattatatatttttttgagatttttgatatctcaatctgcagccattcttcaggtcgtagcatttggagcaaaaaaaaaaaaaaaaaa

SEQ ID NO: 5886 - DNA, 537 bp, Rattus norvegicus
ataaatttaatcatcagagctgagtgacaacccaagaatggtactggtttcatgtgtgatgacttcaatgggctgagcatgaatgccagagtggagcatcgttaccctcagagagtccatgtccctcctcgtttaaagactcttttttgagacttactaaacactttaggcaaagtcagaaggatctgcagcaaaataaaggcctgttctgctcttatttaaagtgaaacactgtgtacttgcttttctccaaagtaaaattaggttatttataacttcaatcgccttggctaggtttccaagtcactgatttctgctgaagattttactacattgttgcacaattttaagataatttcttttgtcttggtgtcaatctttttcactggataaaaatttaactgggttaaagaaaaacaataaaaaaaaaataaagacaccgccatcacctatttaaatatcmamwrwrwrwrwmrwaaagttgttcttttgagtgcaataaagatagcttaacaccgtcaaaaaaaaaaaaaaaaa

SEQ ID NO: 5887 - DNA, 591 bp, Rattus norvegicus
caggatggctgtgacagtcatctgtgcagggtcaccgagagaggggagtacatttgggagaagagggtcacgggctgccccccattcgatgaacgcaagtgtctggctgaaggaggcaaaatcgtgaaaattccaggcacctgctgtgacacgtgtgaggagcccgattgcaaagacatcacagccaaggtgcagtatatcaaagtggsagakkgtaagtcggaagaggaagtggacattcactattgccagggaaagtgcgscagcrargctgtgtactccattgacatcgaggatcttcaggaacagtgctcctgctgctggccctcaagtacagagcgcatgcgtgtgcccttgctctgcaccaatggctcggwtgtgcaccasgaggtyatcaatgccatgcaatgcaratgttctcccsgtaattgtggcaagtgaggcctgtgcagccacggcagactcytactgckacccatgskgtggcctgaccagccagagaacctctctctcmcctgtgcatcctgccctttgtgccctcctgkgcccacaataaaggccaagttctcctcttaaaaaaaaaaaaaaaaa

SEQ ID NO: 5888 - DNA, 347 bp, Rattus norvegicus; identical to SEQ ID NO: 1792

SEQ ID NO: 5889 - DNA, 600 bp, Rattus norvegicus
gaggttgccaaggtctcccatccctgtgttgtttctaggaaatgattsamkwggggaagagaaaaggaaagaaaaactggtcacgaagtattcagcaagattccaggattgaacctgaagtggggcagaaggggaggaggtagggcatcctgagctggcaaggtttgagcccccgatgtctgggcacttsccagatgtcaagatctgtctcctccactcagaaattcatacacagycacccrtaaaacccttacagtttaagtgaggagagggaggagcctcgtgaakgatcctagaatytgrcaagtgcctcasagagaggaatctcatrrymawatwwtaagrwwwwwscsgattcacctcttcgaccttcagtttcttmatttatggataaagggattgagcaggtaatctccatcatcgagactcaaggggaggtggcgagcccaggttratgaagggtgtaggaccctcccatctttctsttsttaccccaaaccccaagtgtctctcacatgtttctactcagaggagctgatcctggctccaaagcttcctatagattacccacgwaaagcgttcaaaaaaaaaaaaaaaaaa

SEQ ID NO: 5890 - DNA, 1182 bp, Rattus norvegicus
tttttttttttttttttgcagtgaaagtaaatggctgccctacgaggcaggccagcgcttcctggagttccagttcctcaccggaggccttgttgaccmsgaagtmcwtrksargatsarcaccraaraagccakccrcwwwsgtttcawcgatggycgtrcarctcadaggytgmakgacatcarcagmtatgcsaraatcctcacctgccccaaaaccaaattaaaaatctcctacaakgatgccatgaatcgctccatggtggaagacatcactgggctgcgccttctggaagccgcctccgygtcctcgaagggtttgcctagcccttatawcatgtcggccccaggctcccgctctggctcgaggtcmggatctcgctcargctcccgctctggttcccgtagtgggtctcgaagaggaagcttcgatgcgaccgggaattcctcctactyctattyctattcatttagcagtagctccattgggtacwmgwkgkycagaagtagttgccatgccttagaatcatttgtatgaatttctactttatcttaaaaaaaamaaaraaaacctkktgcctgaggtatagccgtagaaccctctgtgcttaaaasryasswgsaagaraattccgatagtaaaggttcgcttagctctgtagttttcagctcaaccaatggacttccatatagtgaatgagaagtggtgaggatagcacacgttgaattgggaatttmcttcctccatattttgatcaattctctgtaacttttcttggcctataaggtccaatttctgtgtstggagatataagagattacactgaskactggtgtcwtggtccktatgttgcctctcacttaaatagtkycactttstgccttaggagcaaamtggcccctccccactccaagtagtttggcccaagtttcmtttagtktkcggacatagattgaatcacccatatattcytgaakacacttgtttggtttggtattactctgactassttcataatagcgcagtctttgcyttwtgttagccaaggttttctgtktatttggcttgtcattttccatgtgctttamaaaggtgtctttatgaagtttgctgttctsacaataaactttthgmcyhtgrvaaaaaaaaaaamaaaammaaaaaaaaaaaaaaagtraaaa

SEQ ID NO: 5891 - DNA, 862 bp, Rattus norvegicus
tcagatacagctgctgctttagtcgtctttctttgaatgctttgtttagatgtttataagaattaggtttattttcccagtgtaaatttcagaatttaaagaaaattgtgtctggttatagtttactattttacctacttaaaaacaaatgtgatggctctttaagaattggatttgaccaaagttctctttgttttcagggaaaactatataaaagctttctgagccacagccttttaaagggggaaaggctaatagtaaaatttgactttctgactgcatgcaactttgagctgggcttgccttctgtggtaatacatgacagagkcrywmgasktttttagctgccctaatmrgyayrwgrtgaataaataaatgccaatacccataacaatttttstagtggggacaaaggtcatttgattaatstaggttttcataccgacccgatyaykaratgcacttwaaaaaaaactgcatttaaagcattggccttagcagaattgactgacttagttcctwactggtgagtgaattcagttccctaccaastaatgcgcagaatstaagaatcccatcctgcacacattggttggagccstgagtggagtatcagcagcaccaastgataagagcacargagaagtggggaacatmtggagtcctgttggacgtgacagtgtttcttgatatgtatgccacagtgccttggtggccagcttgagtcytacctactcagcctttgtccccactcctcctgtgttagctttcatcttgcatattcttttttttstactttgttaacctactttatgctttatctcaataaaatgsttrmcaarrraaaaaaaaaaaaaaaaaa

SEQ ID NO: 5892 - DNA, 524 bp, Rattus norvegicus
gagatacagagccttaagggacttggcctcagacacctcttcagagagacactagcggggcaccgtgcccgcccaggcccctgacgaccgcctgagcaagcctgagaccttgttgcagacccaccagctcccagaggcctcagacacaggcaaggcttgtgaccccaccatgcctctstgagccctaaacatggcagaggagggagytgggcccagggtcactttcaaggacatccggggaccttgcaaggctttgtgktgctcatccccaaccttcagaggccttgagggcttgtactgcgtggaccaagatagaccctgggtgaacatgatgtcgcatggaggagcacccctcccttgctcctgggggagagaggacartgagaagggcaggggggcttcagtagcattaccacatgtggaggacagtttgggaacgggagaaagagtacaagtgtatttatgaattgtaaccacatgcaaataaagacaagatggagatccwwwaaaaaaaaammaaaaaa

SEQ ID NO: 5893 - DNA, 600 bp, Rattus norvegicus
ggcacacgaaatatttaaatggaggaaaagtccacagtgaacttacaatgaagggaaatcgtctatgtgttatgaacatctgagtctctcytattttattttttaatttgtcaaagaagyttccacaaaattagaaaggacaacagttctgagctgtaatttcgccttaaactatggacactctatctgtagtgcatttttaaacttgaaatatataatatccagccagcttaaacccatacaatgtatgtacaatacaatgtacaattatgtctcttgagcatcaatcttgttactgctgattcttgtaaatctttttgcttctactttcatcctaaactaatacgkgccagatataactgtcttgtttcagtgaggagcmccctatttctatgtcatttttaatgkatctatttgkacaattttaaagttcttattttagtatacatacaaatatcagtattytgacatgtacgaaaatgttacagcatcmcmcttatattttatgaacattgkactgktgctttaatatgagcttctatataagaagcaatctttgaaataaaaaaagattctttttwwaaaaaaaaaaaaaaaaaa

SEQ ID NO: 5894 - DNA, 437 bp, Rattus norvegicus
cactgagaacaacttcaagcrsswcgwsrcgcgggtacagctgcatgtactgggccgggacgccgtccatgctgccctcttccccmcactggctgtgagcgtccmwccrcctmmtggcacagrccytccaacacmtcmttaycaggaghtggcccagctcstagcccaaccggaagtggrcctcawccatcartaytgccagggttactggcgccatgtgccccccamccccagggaggctccaggagctctcagrcstcytgaactycaggwccagaaaaakccgaggaaccgccsccaccatcctccggacacatgaggccagctgctggaggcmwacataggaccagcctagcccctcatcccttttaatataaaagatatatatatataaawawaaaawawmwawattytwtrcawaaaaaaaaaaaaaaaaa

SEQ ID NO: 5895 - DNA, 845 bp, Rattus norvegicus
cacgaggatgagaactacagccgggccctggatggggaggggctggtggaacagccatgcccagatgtgtactggttcccactgctgaccgagcagatgtgtgatgagctggtggaggaaatggaacactatggccagtggtctggaggccggcatgaggattccaggttggctggagggtatgagaatgttcccaccgtggacatccacatgaagcaggtggggtacgaggaccagtggcttcagctgctgaggacatatgtggggcccatgacggagcacctgtttcctggctaccacaccaagacacgggcagtgatgaactttgtggtccgctaccggccagatgagcagccctcacttcggccacaccatgactcgtccaccttcacgctcaacgtygccctcaatcacaagggtgtagattatgagggaggtggctbccgcttcytgaggtacgaytgcagagtctcatccccgaggaagggctgggctctcmtgcaccctggtcgcctcacacamtaccacgaggggytgcccaccaccaggggaactcgatacatcatggtgtccttcgttgacccctgacactcaatcagtctgccaaaccttctctgccactgtgccttgttgggccacctgggttgtcattctcatctcctgagtgtgtctatgtgcctgggacagaatgtgctggccccaacagccctcccaggaggtccctagagtcttctattttcccattgacccttctgagggtcccctgcctgataaattattaagcttcctcagcctcactttcaataaaaggatgtttgtaamwrwwraaaaaaaaaaaaaaaaaa

SEQ ID NO: 5896 - DNA, 412 bp, Rattus norvegicus; identical to SEQ ID NO: 1800

SEQ ID NO: 5897 - DNA, 527 bp, Rattus norvegicus; identical to SEQ ID NO: 1801
  misc_feature (73)..(73): n is a, c, g, or t
  misc_feature (150)..(150): n is a, c, g, or t
  misc_feature (505)..(505): n is a, c, g, or t

SEQ ID NO: 5898 - DNA, 1400 bp, Rattus norvegicus
gtggactacgtggagagggccgtgtctgacaccaagaaggccgtcaagtaccagagcaaggcacgcaggaagaagatcatgatcatcatttgctgtgtgattctgggcatcatcatcgcctscaccatcgggggcatctttggatagawmccaccccacccacggctccattctggatgggtctccctgaggaggcccctggctgctgcacctagctgggttgccctccccactcctgccttctggctgggagtccttttccytcccatccaacaccgctccctctctgccatgaggctcccgtscccaccaccctgccccaagccgtgtsgtgtgcatgatcttgtgacagtgtgtgtctgtacaggaggcagaggggagcaggatcgggaacagccagaggggctgggtacaggccagtgtgggcaagactcgggccctggccaggtccgccttccttcaggcctggggcctacgcttccctgggactcaggctcctttctggaccccaaccttgccctcactcgccctgccctctggcttcctcagctctccccaccatgccaaggcacctggagggtggggaccagctggtcacatggtgctgcttttcaggttaggggtggggacagctcagcactgagtctttgttagctgcccactgccaggatgctcagggtgccacgrstgctggtgtgctaggagcacccagtacccctctttggcaaagcctgacagtgtctctggcctcagctgcccttaccacagccctgggagtcctgttcctgggctgggcctgagcctagtgatcctttgctaagaagctcagtggtgccatctccagccttgctctgagctggagaggtggagcaggccatagtcctctgcccacagtctctaacgggcatgttaagtcgtggccggagttgcatgttrgggacagcggttccctgctccctttctgctctgaaaagccaggtgtcactttgggcctgcagtctcaccctgccctgtctcccattgatrtrccacgtggtgtcaggtgtactggatgcagtattcagcasccagctggggagggggytccccactttcctcccctgccaacttggggcttctcagagtcaaaaatgtacccccatgccccaggacccctttctcatccacaggcaaggagtatgcatgcgactgcatgcagcgggagctggggccgtgtctgtgtgccccttcccctccgctttgctcctgcccagtgactgaccactgtccgtgctgccttctctcatggccacttccctttaccccrtcaccaaaggtctcggtacaaccagctgcccattttgtgagatttttatgtagaataaacatttgtatctggarwraaaaaaaaaaaaaaaaaa

SEQ ID NO: 5899 - DNA, 1400 bp, Rattus norvegicus
gcagcccttcctcagggagatcatcgaggccatgctgaaagcttatcagcagacgctgtttgtcactcacactgtacatgaactgctctggggctacaaagatgaggtcttgtcgctcgtccatattttcagacctgacgtctcccctaactttggcctgttctatgagagaaatggaactaatgatggggagtatgtttttctgactggagaggacaattacctgaactttacaaaaattgtggagtggaatggaaaaacgtcgctggactggtggacgacggacacgtgcaatatgatcaacgggacagacggagattcttttcacccattaataagcaaggatgagaccctgtacatcttcccatctgacttctgcaggtccgtctatataactttcagtagctttgagaacgtagaaggactgcctgcttttcggtataaggtgcctgcagaaatactagccaattcctccgaaaacgctggcttctgtatacccgagggaaactgcatggacgcgggagtgctgaacgtcagcatttgcaagaatggtgcgcccattatcatgtctttcccacacttttaccaagccgacgagaagttcgtttcggccataaaaggcatgcgtccaaacaaggaagaacatgagtcatttgtggacattaatcctttgacaggaattattttaagagggsccaagagattccaaatcaacacgtacgttaagaagctggatgactttgtggaaacgggaaacattaggmctatgkttttcccagtgatgtatctcaatgagagtgttctcattgacaaagagactgcaagtcaactgaagtctgtgattaacacaactttgattgtcaccaacataccctacatcatcatggcactgggcgtgttctttggcttgattttcacgtggctggcgtgtcgaggacaggggtctacggatgagggaactgcagatgaaagggcacccctcatacggacctaatgggacttacctgttgcctgagcttggtgagagaatgtgagaactgacctgacctggaccaggacagggaaaagcytgcatcctcacgggctcmtggcctgtcaagaagggagtgaagccgcagcactggcacgcgagaagaccctcctggacagaggggaccgagcaggtgacatggctggcaattacgctttataaaatcatgtctctgaaactgtgtcaatgtgtcttagggagtatttaataaattrtrtagaaacctttwrwrahhrrrmwmwrrragctgtggggttttgtaacccctgttgtagatacagtgtctgagtcacttgttaatgttaacttggcctgacccgattcagtatgcctcactctccaaactttgtgtttaaaatatgaaaaaaaa

SEQ ID NO: 5900 - DNA, 1271 bp, Rattus norvegicus; identical to SEQ ID NO: 1804

SEQ ID NO: 5901 - DNA, 600 bp, Rattus norvegicus
tacctccattccctcgacctcatctacagagatctcaagccggaaaacctcttaattgaccaccagggttacatccaggtcacagattttgggttcgccaagagagtcaagggcaggacttggacattstgtggcaccccagagtacctggccccagagatcatcctcagcaagggttacaataaggcagtggactggtgggcattgggtgtactgatctacgagatggctgctggctaccccccgttctttgctgaccagccaattcagatttatgagaagattgttkccggaaaggtccgcttcccgtcgcacttcagttccgatctcaaggaccttctgcggaatctgctgcaggtggatctsacmaagcgstttggraacctkaagrayggsgtkartgacatcaaramccacaagtggtttgctackaccgamtggatcgcgatttaccmgagaaaggttgaggctccwttcataccaaaattcaraggctytggcgataccakcaacttcgatgactatgaagaagaagaratccgagtsystataacagaaaaatgtggaaaggagttttstgaattttagggaggagaagga

SEQ ID NO: 5902 - DNA, 600 bp, Rattus norvegicus
agcatctgtcatctcagatcgaggagtgcatcttcctggatgtgggaaacactgacatgaagtacaagaaccgtgttcggagccgaatctctaacctgaaagatgccaagaaccctggcctacgccggaatgtgttgtgtggtgccattacaccccagcagatagctgtgatgacatcagaggagatggccagtgacgagctgaaggagatccgcaaggctatgaccaaggaggccatccgagagcaccagatggcccgtacaggtggcacacagaccgacctgttcacctgcaacaagtgcaggaagaagaactgcacctacacgcaggtgcagacccgtagctctgatgagcccatgaccacctatgttgtctgcaatgagtgtgggaatcgatggaagttctgctgagtccttgtactgatgtagccctggccatggctaaccctgaacctcctgcaacgctcttggtggacacagcttctctggagataccctgcaggtggcatgccccgttccagcctgcctggtgtgcacctgcctgccctttgcccctcatcattaaatgtttctttttgccttcaaaaaaaaaaaaaaaaaa

SEQ ID NO: 5903 - DNA, 735 bp, Rattus norvegicus; identical to SEQ ID NO: 1807
  misc_feature (287)..(287): n is a, c, g, or t
  misc_feature (390)..(390): n is a, c, g, or t

SEQ ID NO: 5904 - DNA, 1400 bp, Rattus norvegicus
caagccgtcctacgcagctctggttgccctggtcctggcctccatcacctatccacctggtgtgggtcgcttcatggcctcccggctgtccatggcagagcatttgcactctctgtttgacaacaactcttgggcactgatgacccgaaattcatccccaccctggcctgcggagccggacccccagaacctgtggttggaatggtgtcacccacggttcaccatctttgggactctggccttcttcctggtcatgaagttctggatgctgattctggctaccacgatccccatgcctgctgggtatttcatgcccatattcatcattggagctgccattgggcgcctcttgggagaggccctgtctgtcgccttcccagagggcattgtggctggcagagaggtcaaccccatcatgcctgggggctatgctctggcaggtgctgctgccttctcgggggcggtgacccacaccatctccacagcactgctggcctttgagctgaccggccagatcgttcatgcactgcctgtgctgatggccgtgctggcggccaatgccatctctcaaaactgtcagccgtctttctacgatggcaccatcatggccaagaaactgccgtacctgccgyggatccgtggccgacagattggctcctaccctgtgactgtggaacacttcatgaactgtaacctcaccacgctggccaaggacacgcccctggaggaggtggtcaaagttgtgacmtctacagaagtgtctcaatatcccttggtggagaccagagagtctcagaccctggtgggcattgtggaacggacccacttggtgcaagccctccagacccagccarctycctgggctccaggccaagagcgctttctccaggacatcttggcaggtggctgccccacacagccagtgaccctgcagctgtccccagagacctccctgtatcaggcacacagcctctttgagcggctgacccttcagtcgctgttcgtgacgtcacggggcaaagctgtgggctctgtgtcctgggcggagctgaagaaagccatttccaccttgatyaacccmccagcccccaagtgagccagcgttggggtcagaacaggaccccagctaagagctgcagaggctgcacagagccccaccccatttccctccctaccccacccctccagcccagcccggctccccagtgcctcaggcagctctacccagctgaacgggactccgtattcatcatggcctacaccgagagcacaacatctctctggtctggaagggacaaatctcaccctggtgcatgtcccttctgggattatctattcacaaccagtagctcctgagaaaataaaagtaaagctggttcccrgaaaaaaaaaaaaaaaaa

SEQ ID NO: 5905 - DNA, 1400 bp, Rattus norvegicus
gagacgaaactgacaccttctgggcaggcattcaaaaccatagtgaagccagggcttggccaggttgggataagatttatcttgatccaacactacaacctaggggctggccagggtgtctgtcagaatgtgtaaaccccaacaagaaatccaggattagagctgggtggggggtgcaatcaccacaataggaaacttagaggtctgaatttggggaaatatttccctgagcagagcctgtatgagggttctgggaactgagtgtgagcctgcagcagagagaggagcagtacagggaactggggcaggcttctgtgaggtcgcttcccttgtggtcttttccccagggtcatccaaaagattggacagtttttctctgctgtgtatgtttccatagattactccaacttgaagaaatgccaacacattacagtgggtaagagatggtaaggtatagctagactttggtcagagtgtccatgaattgtcttgtttctgcacttaagagttgttgttgttgttgttgttgttgttgttgttgttattattattattattattattattattattatcattatctagagtgagggtctcactatgtaactctggctgtcctagaacttactatgtagaccaggttggccatgaactcacagagatctgctggcttctgcctcccaagtgctgggatcaaaggtgtgtgtcactatgcccagcttaaaattttaattactaggatgagcacaaaagctcccttgcatagagtcttggagcgcccacctgaaaggtggtggaggcatgtggagggactcatgggaacaccatgcacgggctttagttttgactattagttttacagagctggtttttagttagsgaactttyctttcgtcgttttttgttgttgtttcgttgtttgggtttttttttcatttgtttgttttaatgtatagagctaaatgctttaatttattgtgaattctccagtatttaaggtacagaactaagttttgaaagtatgctagctacacttcaatggacagatgctccaaggtgtaatgagctttgatcttgagatgtaatactttacttagtatcttaaaggcaacaggcttctctctagaacatctctgctgttccgctcttcctcacttgctgtgttcccggtttcccacggtgcaaagcacagctcagcatttactgctgagtgagctctgatgctccgttctgaggcttctgtgctakgtcaaccctcaaagtgtgaaatgtgttctcccgggagagccttgtccacgtgaccgtctgcatggtgtttttctcctctgggatctcttctagagtcggtgagccaaggtctgaataaaggttttcttgcacttaaaaaaaaaaaaaaaaaa

SEQ ID NO: 5906 - DNA, 600 bp, Rattus norvegicus
attttaaaactagatttaagaagttaaatcttagaaaatcctaggttttagaaatgataattacaatttggaggagattaatcaagagcttactgattttaaaatatattgtattcaatactttttgtatcatcacagaagatactggcccagcctatcaaaaaagtgcaatatatatatatatatatagcataccttgacaatgtaaaggttgtattgacttactagctgtattgaaatgctgggaaacctgaaagaaaaggctatttacaactaatttatagttattaagcattttaaaagtttaatttgattaaatgcttaagttaaaatttggtgaaattttaatgtttaatttgtcctgaaattttttatgagacatatatacccgatttaattttagtgttttagtgtaagctaacagatgtacagaaggcattctgagttgggaaggaacctggtcaggttttaggccagtaagattcttaattctcatgggtatagacttcaggataaatgttacatttgtgagacttcataaattaactcattttcttcagactcaaaggaagaagtataaataaaacttggagtaatgag

SEQ ID NO: 5907 - DNA, 1400 bp, Rattus norvegicus
ttacctgagagatgagcactttctgcagcgccaccctctcctgcaggcgaggatgagagcagttcttctggactggctgatggaggtgtgtgaagtctataagctccacagagagacattctacttggcacaggacttctttgatcgttacatggcatcacaacagaatatcataaaaacacttttacagcttattgggatttcagccttatttattgcttctaaacttgaggaaatctaccctccaaagttgcaccagtttgcttatgttactgatggtrcttgctccggggatgaaattcttaccatggaactgatgatgatgaaggcccttaagtggcgtttaagccccctgaccattgtgtcctggctgaatgtttatgtccaagtggcctacgtcaacgacacgggagaagtgctgatgcctcagtacccacagcaggtcttcgtgcagatcgcagagcttttagacctgtgcgtcctggatgttggctgcttagaatttccttatggtgtcctcgctgcttctgctttgtatcatttttcctcgttggagttgatgcagaaggtctcaggttatcagtggtgtgatatagagaagtgtgtcaagtggatggttccattcgccatggttatccgggagatgggaagttccaagctcaagcacttccggggagttcccatggaagactcccacaacatccagacccacaccaacagcttggacttgctggacaaagcccaagcwamgarrgccatattgtcagaasaaaataggatttctcctcctccgagtggggtcytgacacccccacacagcagtaagaagcagagcagtgagcaggagacagaatgaccagacctgccatcgcctccaaagacagtggtgtggaagcasctgcctggagctccttgtgctgccttggaggwmrrgagmsmctgmagrwscwmwgcwctgwgragaggtgtctcttccagagcagcasgggtctacaakatgccttggacggaagtgctttgawtgaatgctaggtgttttaactatagggtcgagtacaccarccacctccagaacaccactgagtgctccaraagctgctaaggagggtgstacttggacccactggactvttcacacagacggcaaaagcttgaagttaaggaggccatggtgcttgctggcctctgctgggtgtmgcagggttgctgttgatagggtacggcgagtggtcgtgagcaagcatgggatgcagakccacagcctggcctgagytgcccttbtccactgtcagytgacagcatatcctgccttcatgaacactcttgttttgkaagtgctgctacgtytatcaattttaataaagrtartkctatctytgrrrmamaammaaaaaaaaaaa

SEQ ID NO: 5908 - DNA, 600 bp, Rattus norvegicus
gcctggtcagcattcgtggtgtggacagtggactctacctcggcatgaacgagaagggggagctgtatggatcagaaaaactaacacaggagtgcgtgttcagagaacagtttgaagaaaactggtacaacacctactcttccaacctgtacaagcacgtggacaccggaaggagatactatgttgcattaaataaggatgggactccaagagaagggaccaggactaaacggcaccagaaatttacacattttttacctagaccagtggaccctgacaaagtacctgaactatataaggatattctaagccaaagttgacaaagacagtgtcttcacttgagcccttaaaacataaccactataaatgcttcatgcggtgggttcttattgattagcagtgccgtcacctcagctccactgttgccaaactttgtcgcatcgatatgtatgatgggagcttggatgaggacttgccgatttgctctgcacttactggctggtcctcctggagggctgcctagggccacttgcttgatttattgtgaaagcagggagagaggctgcgggtgccgaaggttggccatgagtgagtagaggg

SEQ ID NO: 5909 - DNA, 1223 bp, Rattus norvegicus; identical to SEQ ID NO: 1813
  misc_feature (825)..(825): n is a, c, g, or t
  misc_feature (930)..(930): n is a, c, g, or t
  misc_feature (1065)..(1065): n is a, c, g, or t
  misc_feature (1163)..(1163): n is a, c, g, or t

SEQ ID NO: 5910 - DNA, 600 bp, Rattus norvegicus
agacctcgaagaagtgaccctcccttagctgttttgacacaggacaatatgacagtagatgacatagaaaacatgattaatgagaccagctataatggctttcctgttataatgtcaaaagaatctcagagattagtgggatttgccctcagaagagacctgacaattgcaatagaaagtsccagaaaaaaacaagaaggtgttgttggcagttctsgggtgtgctttgcccaacacactccatctcttccagcagaaagtcctcggccattaaaactgagaagcatccttgacatgagtccttttacagtgacagaccacaccccaatggagattgtggtagacrtcttccgaaagcttggtctgaggcagtgccttgtcactcacaatgggcgcctccttggcattataacaaaaaaagatatcctccgtcatatggcccagacggcaaaccaagaccccgcttcaataatgttcaactgagtcctgtagatgaggagagagaggagacagaagaggaagttcgtttgttgaatagcacaattctttaatctgckggactcgtccacttttttcttctttaaaaaaaaaaaaaaaaaa

SEQ ID NO: 5911 - DNA, 1400 bp, Rattus norvegicus
ctggggaaaagtactaatttgtacacattggacttgttttaatactagaatctaatgtgccatatgtttgtttcacacattttacctttgaaatagaagtaaaaaaagtataaacatatgatactgtcttactactgacacagatttcatacctcagaccctctaagaaccaattcttttattcatccaactcatactttaaactgaagactattgataatactccaggtttgttttttcttttaatctttcagatcactgaatctttaagtacccatgtagtacttgaaaatcaagtctggccacaactgtacttcagaggaccctagtacagtacaacccaagtgcactttctaatgtctctgggtcctgaggaatcaagatacaaattaactatgttctgtaagcagaccgttaactataggagccttcggtttaactatgttctgtaagcagaccgttaactataggagccttcggttttccctcatacaagtgtctaaccacatctcaacagttcactctgctcttctgcatccagggctgatgtgttccctctggaatggtacatgtcttccagggtcttttgaactggcaggtatctatttttttaagccaatctggtctaataacactggcttcttcaaagccacagcatttctaatccagctgtgccgaagcttcagactaaaacagctgcattgaaagaagaggcactcccttcaccccccccccccacctaaaggtgtttacattatcttgtggsaykarcttatttagagatgctataatttaaaataggcggtatttwaggtagcgtcmrykrgcatttaagaaaatcattttttctaaactccataytttttgaaaagaaatctggtcttgttagaaaacaaatttctactttgtcctcaatttagtttcagtkkyackaggttgatagttatctcgatgacaaaggccgtagacagctccccccatttcttcattgagttttgcatggccatcacacaggttagttrggtttaggtcaagggctgaccatacttctaggtcttttgctagtaagttcaagttagaattagtgacagaatcataggaattttcagagatcctctaytaagatttcttaaaactgcagaccctgcttttgyttttgtactggttaaaactatacattcagattgctatgttcctattttctataatagtttgtctattttacaataaactagttgttaagasccyyamhvvhrwrawamrrwmtctgagttaagtgttttcagtatacaagctttctttccacatcttatcctttctgatgaccctcggatttatggaaatgtgttttatgcatacacatggtatgtaatatattaatatatattctgttccctttt

SEQ ID NO: 5912 - DNA, 600 bp, Rattus norvegicus
cagttgtcaaggagataattaactgtgaaggggtttgtaaggatatgcgtgtgtcaaggaatataaagtggggcatcytgtctgtgctggaaggggtgtttctggcatcaacaaatactcgtaatgctgaatccttccatgttctaagatggcttagaagcaaatcaagtggtatcatgttcaaagacagtaacgaaagacagggctgtgttccctgacgagattttgttgcatgtgataaacagatgcttcaccatcatgccaaacaaaggaaaaargagaaatagctttacaaaaaaaaattaacaaaggacatatttagggaatttcaaggttttgtactaccaacagtatcccgggtcccttcattctttcaactatcagtaaactaatgagaagtaggtctaatcatataagcgtccttgagagaatttcctgaggcaaatgttaactctttgtctgtagttgttgttactattatcctactatacctgagtgtagcagtgtgaagtacaataattcatattcttcaaaaaaagaaaaaaaaaggatccgcggccgccgaattcagcttggacttaaccaggctggaacttgcta

SEQ ID NO: 5913 - DNA, 600 bp, Rattus norvegicus
accgccgaaaatgcactctccctggccaaggagcagatcagacggttggagcatagcgagtgggagtcagcccggaccccaatcattggcgcctgtggctctcaggagcaggtgctgttgatggatctcccaggcagtagctgtcggaggacccggagcagtgctggatggaagcgggttctgcgttctctctgccgttcccggacccgcgtgccactgctcgcagccatctacttcctaatgattcatgttttactggttctgtgtttcacgggtcacctataaacttgttacttgamaamwmwmrmamwwrwaattccttatctgtagtgtcaggattgttgatcccagggcggcctctcgctttgagcccaccctcttggaaagtgcctgtgaaaagaggtggctgtgaggacaggcggcggtaagctggcctgccacatccgctctccttaaacacgtcggcttctgagatgtgccgtgttcactgcttcttcagatgatgcagatccacatcccgtgtggccttgcaggatgctgagagaggctttctagccgtgccaacaagatggttccaataaacacagtaatctggaatcc

SEQ ID NO: 5914 - DNA, 600 bp, Rattus norvegicus
cttgaaccaagaactttgagtcccttttacaaagcttcgtacttgaggatgtgagtcttttccccytggcttcacccagaggctssaggaatgactgactgctctgacatcaataatcatggctgtgttctggacttaaagtgacttctagttccaaagttaccttggcttagtgattgcatctcgtttgtggtagacatcatgagcagggatacactcaaatatcacttacaggctgcagaaaaaaaaagactatctacaaaaggaggacagagaccctgcgggccttgcatacttaaacatctagacattctttgttagcacctaaggagtcctctggtatttgaccaggtcctgtgcagtgccacattgttaatttctgcgtagtgatctarawrwrmarwrwmwrmaattatttcccatgctctcttctgaatggaaatttatctgcattagaattttataccaggagctgggaggtaactcagtagtaaattaccttcaagcaaaamwmrwrmmraawwgaatttatagcgccccagcgagttccgtgggcctggagcctgctggaagcggaacggtaaattcgatatcaagctt

SEQ ID NO: 5915 - DNA, 600 bp, Rattus norvegicus
aacctgagcagtttcgcgggtggcgccgggccccctgggggcgcggccacagtggccttcgccgcggagccagtgcccttcccgccgcccccgggcgcgctggggccgccgccacctccgcatccaccgcgtctggccgcgctcaaggacgagccgcagaccgtgccggacgtgccgagcttcggcgacagccctccactgtcgcccatcgacatggacacgcaggaacgcatcaaggcggagcgcaagaggctgcgcaaccgcatcgccgcttccaaatgccgcaagcgcaagctggagcgtatctcgcgcctggaggagaaagtcaagaccctcaaaagccagaacaccgagctggcgtccaccgcgagcctgctgcgcgagcaggtggcgcagctcaaacagaaagtcctcagccacgtcaacagcggctgccagctgctgccccagcaccaggtccccgcgtattgagcccgagcgcgggacgcatgcgcggactagatgcggtggggggggcgccccggactctttcgagactcggtgcccccggactcgacaagctggacccccctttactctggatggggaccccgagcgcac

SEQ ID NO: 5916 - DNA, 600 bp, Rattus norvegicus
cgggacattgagcacctcaytggtytggatttctaccggaagactasccgtagctattcggaaattctgaccctcaagacatacctgcatacatatgagagcgagatttaactttytgggcctgggcagtgtagtmttagcaactggtgtatatttttatattgtgtttgtatttattaatttgaaccaggacacaaacaaacaaaraaamaaamaaataaaaaaaaaaaccacttagtattttaatcctgtaccaaatctgacatattaagctgaatgackgyrckaktttttttccttaattcttgatttagacagagttgtgttytgagcagagtttatagtgaacactgaggctcacaatccaagtagaagctacgtggatctacaaggtgctgcaggttgaaaatttgcattgaggaaatattagttttccagggcacagtcaccacgtrtagttctgttctgttttgaaagaytgattttgtaaaggtgcattcatstgctgttaactttgacagacatatttatgccttatagaccrakcttaaatataataartyacacattcagatttwmhmwraaaaaaaaaaaaaaaaa

SEQ ID NO: 5917 - DNA, 600 bp, Rattus norvegicus
agactctgagattgaccaactcttccggatctttcggactctggggaccccagatgaggtggtttggccaggagttacttctatgcctgattataagccaagtttccccaagtgggctcggcaggattttagcaaggttgtgcctcccctggatgaagacggacggagcttgttatctcaaatgctgcactatgaccccaacaagcggatttcagccaaagcagccctggctcaccctttcttccaggatgtgactaaaccagtgccccaccttcgactctgatgtccttcccaaagccctcttcacctgtggtctgacctgatcctgggccttttggacacaggtcagccttctgctgttttctggctgtcttagccttttctctccggttctggggattcagaggtgcagagaaggattaggtgaaaagggagaaagttttggcattagatgcacttaacccgacttccagcttctctcctcttcccagtcatcactgagaaggattagtattgaagcaaactgcaagtctccagtgtcagattgcatcactagctgctatagtacggtaggatgcagtctgtgcatgttttaactat

SEQ ID NO: 5918 - DNA, 600 bp, Rattus norvegicus
tccatcttcttctgcaacggctccgtcactctcagcctctgtcacatgtaccgccaacagagacggcaccatggctcgtttgtgccgacctctcgggcacgagaggatgaagtttaccacctgattctgctggccctcatgacaggcatcatggccgtatgctccctgcctctcacgatcagaggattcacgcaggccatcgccccagacagcagagagatgggggacctccacgccttccgttttaatgccttcaaccccatcctggacccctgggtcttcatccttttccgaaaggctgtcttccaacgcctcaagttctggttgtgttgtctgtgtgcccgttctgtccatggggatctgcagacgcccctctcccggcccgtgtcggggagaagagacacactggctcccgattctctccaggctaaggaagggaactgggtgcccctgtcaacctggggtacggggcaggtggcaccattgactgctgtgcctctgtctggtggtgatggctgttctgtgggaatgccatccaaaacagaggctgtggttgcctgctccctctgctgatacctaagctggtcctgcttgccatcc

SEQ ID NO: 5919 - DNA, 600 bp, Rattus norvegicus
tatggccgtgcagtggactggtggsggctgggcgtggtcatgtacgagatgatgtgcggccgcctgcccttctacaaccaggaccatgagaagctgttcgagctcatcctaatggaggagatccgcttcycacgcayactcgggccggaggccaagtccctgctctcggggctgctcaagaasgaccctacacagaggctcggtgggggctccgakgacgccawkgagatcatgcagcaccgcttctttgccaacatcgtgtggcaagatgtgtatgagaagaagctgagcccacctttcaagccccaggtcacctctgagaccgacaccaggtattttgatgaggagttcacagctcagatgatyaccatcacrycgcctgatyaagatgacagcatggagtgtgtggacagtkaacggrggccgcactttccccagttctcctactcagccagtggcacagcctgaggcctggggtggtggctggyakccctgcacccctctgcattgccsagtccaraagccccgcatggatymtckgtacctgatggttttgtttctcggatgtsctsgkgaggaacctcgccagcctcggaattc

SEQ ID NO: 5920 - DNA, 600 bp, Rattus norvegicus
ctttaagacaattcagcaaataaaaagcaccatagagaaactagatgaacctcatgagaaatacaggaagaaaagatcgagtagtgcaaaatacggaagcaaggaaaatccaattgtgggaaaaatatcatagtgtttgatcaactgacggagaactggaaaatactcttatcatcaagtttttcaattcaccccatttgttccagtgtgtaagagcagacattggctttgaagacacctgctcttgcaatgtatttaatatttaatgattgaaattaactggggatcckgmyrcwrakgtgtttattactaaagaatttgaaaaccaagatttccttcatagccatgcatccaaatccatgtctctgcaacttcctttcaacagaaaggatctttctaaggaacgttcccaagaagctttgtaataagggagcacttgctagcaagaagccatctctacttggagcactcctgtgtcactcactaccatcagtgcctgccctgtgctgccaacattgagcttccagagaattccagctccttgtcagttcggaacttttcattaagttcatctggaccttcacctcgtgccgaattctt

SEQ ID NO: 5921 - DNA, 600 bp, Rattus norvegicus
cctcttgctgtaaaactagcattaaacaatcattgttgttaawarrmwwwmwwwmaaaacaattatgtgaaatatgtagctgctcttcatgaaaagcagctttgcctccttttctttggactttgaagctagtgcattgaaaaagtgcacctaccccttccctgttcgaatgctgtattaatgtagtataattattactggttttgtaaatttttcttataatgtcctctgactttaaaacatgtttccttcctcctgtmaarwmwwrwamwwrrwtgtatggttagcctatttttaaatgttttgcccagtttctcttcaatactttgtgtatataaactgatcttggtaatactgtacatagctgtttaatatatccagaatgacttctgactattcaagttttttcacaaaattacattttacctgtgatttagccatttgactaacagtgtttggctagtagatgttgccctccaaaatgagggggaaattgtctcattttgtttttcattaactttgcggaaacacccattgcactgtctgtttgaaacccccctgtgcttattaacattacggcgattaaaagcacggcacacc

SEQ ID NO: 5922 - DNA, 600 bp, Rattus norvegicus
cagaaggggaatccagatcccttcctcatcccccacccccaccccacccctggttattaagctttttttttttttttcttttctgtaaagctytgctgtcccataaactgtagcttccccacgactaggaatttaaccatagactagttcaggaataagcatcagcttcacctctttgactggctccaaagaaaggcttttctttacgtgagatagaaaagctgaacacagacacagccataagcaaagtaagaacgctttctcatttccaatactgggtgttgaacccagagccttttatataccaagcaagcgctttacagtgaagtcatccccacctctgttttcactccttgttctgaggcagtgtctcgccgtgttgcccaggctggtcttgaacaactgactcgctgtatagctcaagttatctaggtctaatagttgggataagggactcagcaaaactttttacctgttataattcggagtatagtgttgcttgtaacataaactcaaagatacccagcggaacccagaactatgtccccagtacgtttaacccagccaagcacaagaggcttctgattgtgggtggtggtg

SEQ ID NO: 5923 - DNA, 1400 bp, Rattus norvegicus
  misc_feature (1105)..(1105): n is a, c, g, or t
ttgcatgcaagtaatgtggtgaatttgtaatttargggttttctggsgcttctgwgactgtggatgcttaaattcaggccttaatgktgctctagctagcatgtttccttctaatgtacatagwcagcctgtatccactaatctctgcttgkcttctcctccgwggtcttcacaccgtatccactgatggtcagytagtgtcagaggtcacccaggttagcatcagttcccatgtgtgccgwgcggattgtgagccgwgtggttgcttggwtgsytttcttttatgtactttgattarctgwggcacttactgagtaaamwwamrwwrmwrmagactgctgtgtaacaagccacgttttgtgtttagtcagtattacacacgggaccttgttttattcttctagatagcagctgtcccaaagaaaatatttcttctttgcctattaagatttagctattatctgccagttgttaaggggtttgattccaaactcaaccagagttgaacgtaagaaagctgctgtactcttgctgtccatctgttacgtcctccgttgttggctcctgaytacgtacccasggytgytraagragacttgttttaathtgttttaaaaaggawaatraagttttaggactttgatggtggggaagctgacaagttcagaccccagtctgtcatttgctctwagcttggatccttttgaaaagttaagaatatatgaaggtaaattagaaaaagtaaaaatattgataaaatgtcatttatcttatgtctattttakgttgttatttggcctattaattttaattktttgaacattttcttatttcttgtaatatgaatgccgatatttaaagtttgactcacttgggtttcttttgtgtttcttagttgttatctctaagcctaactaacttttaagattatttgtgatatggatttatataagctgttaaatatatatgagctgttaaaatggaatgcaaggttttccaaagaccaggtctaactgtaatgattggtttattgttcwacaatcccagcccggcattttccgtgtmmmtcataamcaataaacaggatatactcarkddhhhwdhnhwwwwdwwraaaaaaaaaaagagagggaaagagagaacaaaaaacaacggagcccacaccgaagaagaaaggagaagcaacacgaacaacacaacgaaggaccaagcagacacacgaacagacacaccgcgacgctccccaagccccggcgggaactctccacacagagtccccccccagaacggggcagccccacggtggagcccccctccaaggcagtgcccccacggcggcgcacacggccgcgtgccaaaaaccccctctgcaccggggcgcaccaccgcagtcggcccag

SEQ ID NO: 5924 - DNA, 1400 bp, Rattus norvegicus
ttgtgtggacgatggagccattgcccccgacactgacacagcctctggggaggtgcctgaggctgggccctccctctcctccaccatgtgccaaatgggaaggcccaggccctcccccaagtcccccagatgagtcccctgatccccctgatccccccgaccccctcggagccacatgaggcagraagccccatcgctgracagccacacttcttggaactgaactgaactctgtgggcccagagccyctggcacagcagaggcccctcctggcctcatgagggtcactggcttcaggaacctgggcccccatcttgcgtctccccttcccccaagcctggcccctagagggggcctctaattcaaaccttcgcgtgacattttcacattatttaaaaaaaaacmrramywwhwwwwdddddwwmwwwrwwwwarwmamcatcttaggcttttactgctgtgaacagacaccattaccaaggcaaatcttataaggacaacatttaattggggctggctttcaggttcagaggttcagtccattattatcaatgcaggaacatggcagcatccaggcaggcatggtgcaggcagagctgagagttctacatcttcatttgatgtctgctagcagaatattggcttctaggcaactaggttaagggcttaaagccacaagcacagtgacacacctattccccttctaatagtgcactccctggactgagcatatacaaaacatcacagtcccaataactagtgccaagggacataaaatgttctgccagtggttaaaagtatcttctgtgctttttgaaatttcttgggctactccaatgaaagctgtgtatgtatctctccctgcacagctttcattggagtagcccaagaaagctgtgcagggagagatacatacaccgttctttactggtgatagcatccccaaagtttaccaaagaatagctcttgcttaatatctagacatgctctcaatttgttagctatgcattttctccaccgcagccacctgaggttagcaatcagcgggtgcatgagttcactccacwgggwwgcwamcgaakkrrttcgcrgmskccacaactccagtgctgttggcccatggggaacgggcggagtggccactgaggagtttctccctgtcaccccaattmtggaaggctttgtcattcttcgaaagaaccccaactacratckykgrawwatggctgacactagagaccctggctgcagctgactttttttagcaggctgtactgcccctgccaggggcagatactgttccagatctttgggggaattgttacctcctgctgttttgttactgagtaagataatcttgtcgaataaagacctttatccccaaaaaaaamaawaaaaaa

SEQ ID NO: 5925 - DNA, 600 bp, Rattus norvegicus
  misc_feature (582)..(582): n is a, c, g, or t
ggaytacaccgtgcacgtgyakctgaatgactatctkgacatcatctgcccacattacgaggacgactctgtggcagatgctgccatggagagatacwcgctgtacatggtggaacaccaggagtatgtgacatgcgagccccaktccaaggaccaggttcgckkkaagtgcaaccagcccagtgccaagcacggcccggagaagctgtctgagaaattccagcgcttcacgcctttcaccttgggcaaggagttcaaggaaggacacagctactactacatctccaaacctatctaccatcaggaaacccagtgcctgaagttgaaggtgactgtcaatggcaaaatcactcacagcccccacgcccatgycaacccacaggagaagagactccaagcagatgamccsgaagtgcaggttttgcacagcattggtcacagcgccgccccccgcctcttcccattggtctgggcagtattgctcctaccactgctgctgctgcaaactcagtgaaggtatttgcttkccctggcttacggattggmacgggactaaggggcagggttaagcacccccaaagncccagtcctggggaacct

SEQ ID NO: 5926 - DNA, 600 bp, Rattus norvegicus
aactgtttgaaaaacagctacaactgtatgaaatccacggagcccagaaaatcactgatggtaatgaaattagcactggaaacatggtcagttccattgatagtgaaaaacaagattctcctcctccaaagccaccacggactcgaagttgtcttgtagagggggatgccaaggaagaaatcctccagccaccagagcctcacccggtgccgcccatcctgacaccgtcgcctccttcagcattcccaacgttacactgtgtggcaagacagtgacaggtaccacccaaagccagtgctgcacatggcttccccagagcagcccccaacggacctcaacagaaactatgataagtcagcggacctaatggggagaagcgaatctgctgttgagcacacagataaaaagttagaacaaaatttaagttttgagattaagaaagtccctctccaagaagggcccaaaagttttgatgggaacacactcttgaataggggacatgcgattaaaattaagtctgcttcatcttctgtagttgacaaaagctctaagccacaggagttaagttcaggtgatctaaaggttcacgatgtgtctcag

SEQ ID NO: 5927 - DNA, 1400 bp, Rattus norvegicus
tcatgctggacgtagaggwagacagactggcctctgaaggccgagggcctgtggttgtccactgcagtgcagggattgggagaaccggatgtttcatcgctacatccattggctgtcaacagttgaaagaagaaggagtcgtagatgcactaagtatcgtctgccagcttcgtgtagacaggggtggaatggtccaaaccagtgagcagtatgaatttgtgcaccacgctctgtgcctgttcgagagcagactttcgccagaaacggtccagtgactctgaagatctaccagagcgtcaatctatcacgggtgattcgtcaagttacctacwgagggctccgagaaggagctccccacgatggatgaggaggctctaaagccagcctgaggcgtggattgwggaagctatggtaacttgaaagattgccacctttgtgtataggactgtgttctaggcatccccctagktactccgaaggacctgtgctgatggaggtgtgacagtcctcatgcagcctgaggaggattctgttttgtctgtgtcgactctcacacagaacctgtatgtgtaatattcagagtctgtgcttatggtgactggaggagctgcggaagatatcgttatcctgtgttagatgctttaatgttcacaaagcctgtcttgtgactggactgtcagctgttcaactgttcctgtattaagtgctattacctatctcagttaccagagtcttgctgctaaagttgcaagtgaccgacaatggatttttaaccatgacgtttttwgtytttgaaaaaaaaaaaatcaaaggcagtaactattttatatggagatgtgtcttgattatctctaataagtgtgtatttatagtatctcctatggatcaattacagagcacaatgattgtcactggatatatatgtatatgtacattacaggtatatgtacgcatatatattctattatyaagcatagaggtagctcctgttttacaactctaactactatatttctacattgtgacttgttttactttaaaaggggataaacaaatttatagtaactataaagtatcaataattttaaatactcatctctcwttwactaagaagggattyttgaawawagtgwytacttggtttctctctcccagtaagaagcaggtgcctttggggatgctccaacctgtttcatccccraaagtttttytgaggacaccgtcatgcacgcatgmccttaaatttctaaaaggttttyttcctcaagagaccaatgaaggcaagataaccgcactcagcaaacatgagatgttctgctcagatgtgaattttcaatgcagcaaagttgactttcgtactcccaataaatgactcttaacagcmaaaaaaaaaaaaaaaa

SEQ ID NO: 5928 - DNA, 1400 bp, Rattus norvegicus
aggatagacagggcagtgtctgagggagcctttttgtccttgattatctctccaccctgttggtatcaccaaggcctccaacaaatgtacctgcttccaccagtcagccatgctgcctggaaaccactgccaaccattcactgtgtgtccattttatcagcaacaagaagggaagatttgtggtggcgaagacaggctgagaaatgcccaccatgaataaccttttttctctctcacgtgattaagagcaaaagactagactcagctataggggggtataggcacaaagtaaaacgtcctaactggcaaatgtttggaattaaaaggtgcttaagaaatgtaggtggcatgcactgggtcgtttggcaccattaaggtaaaaatccttgattagcacaagcgactctgccctaagacttattagtttgacatacaggacacgcccacccgccagtctcattttcagtgtgttctgattctggatcccacagaaggtgagcagagcaggagaaataatgattgcaaatgctaaagcaattcccaccctgatttagcactccatcctctacttccaatgaagttcaggtatgagccatggtggatgggagaatgtgctctctcagcagctcagtgccctggctctcatgtgtgagccactctgggactgatgtaccagacctaattcaaacccaactctcccctcatacatcaagttgggagctctgctcttcttagggtgttttgttcttgtttgtggtccttggtggagccagtcgggcaccttgaatggataggtattcctacgagcaaacttctacatctcaaaggcagtggtcctagcagcacgtttagccatgctggcccatcgcccctaagaggaagctcagcccgtgtatagggagactccttttyttttyttytwttgkgttatgtcttgtgaaccccaacatctcctccttggagagggggcgccttcctttctgtgcactgcctcacagacttgttttctcacktcagagacagggtactgtgcccctcttgtggctctgtggccctctgggccctgtgtacctgccatctgtagctcttcgtcctgatgctgtgttaatgctgtggccctccaagctcatctttcaaagccttcttaattgttacagcttttactaaggggaaaaataatccctcagagaatcctatgtaccagagaagaacctgtgaaatgtacgtgtgttgctgtcgtcctgacctgtatgtgtgacttaataaattctcaacagcggagtttggttcaccaaattctcatgtatgttggaaagagaaggctgacgtctagcmkctgtcgccgartgtmttkstatactctttgaagaataacattttaataaaaattataaagctgt

SEQ ID NO: 5929 - DNA, 600 bp, Rattus norvegicus
agtgatggaggagatggggtagtgtcccaagtcaaaatttcaggtgtgtccacgctgtcatcgggtctcctcagcttgctcctgccctcccttggctttcttgtcttctattcggaattctgaacgttgtgacatttgctgttctcatcctcgctcagaggatgctcttcatcgtgggatgactgtaattccttctaatccctgcggctccatcctaagccaaataaattagactctaacaagctcttcaaccgatttcccaacacattacgamtgaggcattcaggaaccccttcatccaaaagaataacttgcaaatggaaataaaaatgatttttaactcgttmmaawawrmmwwawaaammatttaacctgawwmwrwraaarwwrmatgatttaattcaatgggcaagttacagtgttcagttcaatgccataggctgtagagtgaagtaagctcaccatacacaggtgctttacatttaatgacaagttgtgaaatatattagaggttgaattgttgattgtatgtggtatgtgtaagagtaaggccgyctcttgtattagcctatatgtttggggtcctgcctatctttgaaa

SEQ ID NO: 5930 - DNA, 600 bp, Rattus norvegicus
aggcccaccctaggctttcctttctccagcacagcggagattgacgtggaacagcccaccccacgcaggcgcaagagcctggagactaggacgtggcagggtgtgtcctaatagggggagtggcggggggctgggacttaagttagggacgtgttcatggtggggcgtggcctgtttgaggacctagtcactcagcgaaagtttggtagctaagggtgtggcgggtgccggggacaaggcggggcttatagtgtagcgtcgctgggggcggggccctgatgggtgtgtgatcttggcaggggcgtggcgtagcggggccaggtggggctccgctgggctggccagggcgtttccgttgcacggagagtactgcctgtctctcggcgtgtgcatctgtcctgctctcaaccgcagcctgcgccctaccttctggtgagtgaccatagtaccgggagcgactcctccaccaagggcgcaggacccttttgggggcgggagaccagagctccagtgaccatctctctcttttcccctcttccagcagctccagcctactcctgaccgacagcatcatggtaagccgtgcgcccgccaccaggg

SEQ ID NO: 5931 - DNA, 600 bp, Rattus norvegicus
actggagaccggaccaccgatgggggttcccccgccaccccctcccccaccggactacatgttaccccctagcctgcatgcaccggagcccaaggccctggtctctggcccacccagtgggccgctgggtgactttggagccccatctctgcccatggccgtgcctggtccccacgggcctctggctggctacctctatcctgccttctctaaccgcaccatcaagtctgagtatccagagccctacgccagcccccctcaacagccagggccaccctacagctatccggagcccttctcaggagggcccaatgtaccagagctcatattgcagctgctgcaactagagccagaggaggaccaggtgcgtgctcgcatcgtgggctgcctgcaggagccagccaaaagccgccctgaccagccagcgcccttcagcctcctctgcaggatggcggaccagacctttatctccattgtcgactgggcacgaaggtgcatggtatttaaggagctggaggtgggtacctccttacagacccccaacccctggctctagctactaatcttggctgcctggcatcaccctttgatggacagccc

SEQ ID NO: 5932 - DNA, 1400 bp, Rattus norvegicus
tgccaggcagcgggcagtaggcagggatgccactgcctccaaaagactccttgcattaggtgatccaggagccctgtccctaagcccctgcccctgagctccagagctgtgtgtttgggatgatgggcaaggatgggcggggactgcccgggacaggttgccttcgctagccactggcatgtgtctgccacttggagtgccccagagggtgacttctaaccactccttcctccgtctgcccccagctttttttcctggtatctgaggtcccaggaggaggcttgggattccttggtgggcctgaatgtctgttgggtcagaggtcatcctttccctctctcctgtgatcagaggcagaggaaggtctgtaggcatcaatgaaggcaggggaggggggtctccagactcccctgaagcagggaaggaagtccacattgcaaactgagtttgctaaattgggtctctagaggacaccatgagatcggatagggcaaaaagaccgcctccagccccccccatctaattctgatccactccctggaaagggactttgttgtgatcatccttttctgcatcccagctacccaaggaggaggaggagtctggccctgccctccacsagctggctgggctggtacttatctgcaaggttgcagtcaccaggattctcttccttttacctagacagtccttggaaagtgtgtgagagagaaatgggcaggagacagactgaggactgaactgggatgtggggattagcaccaaagctctttctcctgacatctccttcctgatcatctggtcatcttcatgtatcttgcctcactcctgagaagagctgttgcttgccctctgtcccagccccactataggagcaacgagaggcctgcaagggcttagagtcctttcaggtggggatatgggtaaacctaggagaactcacggatctttatatgacgacagtgctgaggactctctcatggctctatccttttgggtcccttgtcacaaccyttgaagctggcctcagtcccctggmtgctgctttgcctccaaaagtcactcttcagggccaagcactgargggagaggcctaagctatyctctgtttcagactgggcatccactgtctttcctgctttcgtgtcagatttacagttacgctaggcctgcccaactggacaaggctgtctcctgtcttcaaccaccytggctcagaccccacctctgcccctgaaatgcgtgatcccaccaaggccagagacccacagccccaagacaagaagtgcccttataaacccctgcagccctgcwgccctgaaataaattttgcaattagtttccagtarmmwwwrwrawwwrawtgtgaagcaaggtgtagtccctggggtaggttgggg

SEQ ID NO: 5933 - DNA, 867 bp, Rattus norvegicus; identical to SEQ ID NO: 1837

SEQ ID NO: 5934 - DNA, 600 bp, Rattus norvegicus
aggcaacctatgagaacgtggcaagcttagtttatgagaatgcatccgccatcagggcccatgagtctgaggtctcagcttytgggtgctgaacctagacaaagcaatactcaggcctggtctgggcctgtgctggagcccagatacctggacctccaagtgaactgaggattggagtcctagcctcctcaacccttgggaggaagcactgaaaacccatctctgttgtccaagggcaggaaggactgatgtacttcaacttgtgagccctgcctgagagctggaacctgagaacaggggtgacggtaggtttcctgttctttgagtggaaacagctacagcctgggtaggcaggctctcaaagaaacaggctggaacctggattcaaaagaaggaatcagggtcttgaattctactacctgaagagcaaaggcaggcgggtacctgccccttttttacttcagaaaccaaatcagtctcctttaatccaaggctgaagggagtccctttgcttgtggtctccttgtgccccatgtctgtacattttttccttctgtataatttattaaactcttctccccgaaaaaaaaaaaaaaaaaa

SEQ ID NO: 5935 - DNA, 600 bp, Rattus norvegicus
aaagagacaaccgttswsgakccactggtgagagtagagctctatggtgttcctgaagacacaaagcagcaagagaccagctatgtggagaacaatggtattaatccatactggggggagacattctatttccagatccaggtgcctgaacttgctatgctgcgttttgtggtaaaggattatagcaggacatcccgaaataactttataggccaatacaccctgccttggacctgcatgaaacatggctaccgacatgtatccttgctctccaaagacggcactagcctccatccagcctcccatctttgtgtacacctgcatgcaagaagacctggatatggatgagccctgagaaacacagggagggtcttgaagcagracaatctacagatgcactcttttccaacctacaacttcctcagcatccagagccagccaaaggatcagwggcggaccaaggttcccargtgmmggttgaggaagaatcctgacccagaactatgactytagagaacagtgcacagccgagtccccactggactgctgctccttagctggtctaaatagagcttcwmwrwmmaamwwraaaaaaaaaaa

SEQ ID NO: 5936 - DNA, 1400 bp, Rattus norvegicus
tgagcctgtggattcagaggccttgatgagctgcctacgagagaagagtgaagaggaaatgctggctattaacaatatcgtcaggaccatctctggtgtggtagatgggaagttcttacccaggcaccccttggagttgttggcctctgtggattttcaccctgtccccagcatcattggtatcaatagtgatgaatatggttggataattcccatgctccaccctgatagcaccatgaaggaaataaacagagagaccatgcgggctgttctgaagaacacagcagtacagatgatgctgcctcctgagtgtagtgatttgttgacggaagagtacatgggggacactgaggattccaagactctccaaatacagttcaatgagatgatgggggacttcatatttgtgattcctgctcttcaagtagcacactttcagcgttcccatgctcctgtctatttttatgagttccagcatcagtccaacttcctgaaggatatcaggccacctcatgtgaaggctgaccatggtgatgagcttccttatgtgattggatacttattctgggacatgaaatttgtcttcactgaggaggagaagctgctaagcaggaagatgataaagtactgggccaattttgcacgtcacgggaatcccaacagtgagggtctaccctactggcctgcattggaccatgatgagcagtacctgcagctggacatccagcctgttgtgggccgagccctgaaggccagaaggctgaaattctggaccaagactctgccccagaagatccaagagctaaagggttctcaggacaatcacacagagctataatgtcctgtgtcaagaaaactgtgtagacttgagtacagggtttctgaagcctctaaagtctacacttgaatggatatatcacatctgttggatgaccctgcaattaaggttgaagtcgaccatgtctagataagctctctgaacctggtgcaaaatggaagactccctttctcagtggggtttcctctcctttacccaatcttatctggaaagtgttctaagcacaagtgcctgaccttatctagagaatggccttgcacaaagcttcctgcaagtgccacaaggttcagcacatacatcccactcagtccttcccaccatatgataattaggtactgttatgaccaatcagccactcctgcctgtaaccccagaaatcctctgaggaaagtcacataacttatggccagattacagattcaacttcctctttcaggatatgaacttgtccagcaggttcttggcatattcctcttcatgtaaatgaaacattcccaccctaataaataatctaccttcaccctggaaatccctacccacaccccaagatctacatagtgct

SEQ ID NO: 5937 - DNA, 600 bp, Rattus norvegicus
tagaccaggctggcctcgaactcacagatatctgtctgcctctgcctcctaagtactgggattcaaggcatgtacggcaactgcccagctaaaatattatttataacatgcactttctgggttttttgtttttaaaacatacttttttttttaacactgggccatttctaacatttctgcacagaagtggatttagctcagattaacttaattttgaaaaggtaacagtactgtttttttttccttaatgctcttatgaaaacaatgttgaatttacagagggctttttgtgtttttgtttttttgttttttgttttttgtttgggagctggggaccgaacccagggccttgagcttcctaggtaagcgctctatcactgagctaaatccccagccgacagagggcttttttagtagtgtgtagtgagtatcagctgattcgagctaataactttaccttggggtttttgtttgtttgttttcctggtctcctttgcctgacctctttttaaattatgtgtaattcaaaagactattcaagtgatggttagtcatgagtcgtgacgtttgactggtgtgaagtaaattcttgttcttaag

SEQ ID NO: 5938 - DNA, 600 bp, Rattus norvegicus
gagtggaagcagctcaacaggaggggaaagatatctggaatgtacaatattgatgcagttcaagccatggccttcgatggctgctatcatgacggtgagactgacgtggaccagacttccttctttctacactctgaagaggactccatgagaacaaagttcacaggaagtccctgtgcagattcatctcagataaagagaaaatccctgggaggaaatgttggtagaatcatcctggaaaataaccacgtcattgatacctactctagaattgtcttccccgttgtttacataatatttaatttgttttactggggtatatatgtgtgaagaggactttttgcttgctgactttttcctttctttgcagtactcaggatgttgcatgtgctagataattattttaccatccacagcctgaagaggagtgttttctataaacttccgttggagtcagatggtgttatttacctcctggatataagttgggcagttaaactgggatagagccagtcatgtctcttggcctcaagaagatgtaaagatgattgattaacatttattgaaatgttcggagtcttggggaattttggctttttt

SEQ ID NO: 5939 - DNA, 1400 bp, Rattus norvegicus
ccagtgccgcctgaaattactaaagctggagagaataaaagactatcttctcatggaggaagaattcattagaaatcaggaacagatgaaaccactagaagaaaagcaagaggaggaaagatcaaaggtggatgatcttaggggaaccccsatgtctgtargaaccttggaagagatcatcgatgataatcacgccattgtgtccacatcggtgggctcagaacactacgtcagcatcctgtcatttgtagacaaggatctgctggaascgggctgttcagtmctgctcaaccacaaggtgcatgctgtgataggggtgctcatggatgacacsgatcccctggtcacagtgatgaaggtggaaaaggccccccwrgaaacctatgcagatattgggggactggacaaccagatccagkaaattaaggaatctgtggagctccctcttacccaccctgagtaytatgaggagatggggataaaaccacctaagggggtcattctctacggccmgycaggracaggkwaaactstattggccaaagcmgtakcgarccasacttcagcgactttcttgcgagkggktggctcagagcttattcagaagtacctaggtgacgggcccaagctggtccgggagctcttccgggtcgctgaggaacacgcaccgtccattgtgttcattgatgaaatcgacgccattgggaccaaaagatatgattcaaactctggaggtgagcgggaaatccagcggacaatgttggaactgttgaaccagttggatggatttgattcgaggggagatgtaaaagttatcatggccacaaaccgaatagaaactttggatccagcacttatcagaccaggccgmrktgacagaaagatcgagttccccctgcctgatgaaaagaccaagaagcgcatcttccagatccacmcaagcaggatgacgctggctgatgatgtamccttggatgacttgatcatggcaaaggatgmcytctytgggsctgrcaysarggcaatytgcacaraggctggcttgatggctctgcgggaacgcasgakgaaagtgmcaaacgaagacttcaagaaatytaaggagaacgttctgtataaaaaacaaraaggcacccctgaggggctgtatctctagtgacacagttktcttcagggaacttaatgagtttcccccacctgggaaratgggaagctgccccaaggaatccatctwccagttaagttttgytagtagaaagcccgtgtcgtggaggacgctgtgygsyctgtcbccaatmtgttgttggtcaktgtsccstgcagctykccgctcmcaataaaggattgtmmtggwwwrmwwwmwawwamwrhaadraaammatgaaaaaaaaaaaaaaaaa

SEQ ID NO: 5940 - DNA, 114 bp, Rattus norvegicus; identical to SEQ ID NO: 1844

SEQ ID NO: 5941 - DNA, 1400 bp, Rattus norvegicus
tgctggtggtcggcctgccactgaacgtctgtgtcatcgcccagatatgcgcatcccgccggaccctgacccgttccgctgtgtacaccctgaacttggcactggcggacctgctgtatgcctgttcactgcccctacttatctataactacgccagaggggaccactggcccttcggagaccttgcctgccgcctggtacgcttcctcttctatgccaacctacacggcagcatcctgttcctcacctgcattagcttccagcgatacctaggcatctgccatcccctggccccctggcacaagcgtggaggtcgccgtgctgcttgggtggtatgtggagtcgtttggctggttgtgacagcccagtgcctgcccacagcagtctttgccgccacgggcatccagcgcaaccgcactgtctgctacgacctgagcccacccatcctgtccacccgctacctgccgtatggcatggccctcacggtcatcggcttcttgcttcccttcacagccttactggcctgctactgtcgcatggcccgccgcctgtgtcgccaggatggcccagcaggtcctgtggcccaagagcgtcgcagcaaggcggcccgtatggctgtcgtggtagcagctgtctttgttatcagcttcctgcctttccacatcaccaagacagcctacttggctgtgcgctccacgcccggcgtctcttgcccggtactggagaccttcgctgcagcctacaaaggcacccsrcsmkkcgccagtgctaacagcgttctggaccctatcctcttctacttcacacaacagaagttccggcggcaaccacacgatctcctacagaagctcacagccaagtggcagaggcagagagtctgagaccccaggggaggccctgaagcactggctgcaatgtgtttgcccactggggtcatggtgcctgaagctttctcccaatcggaaaccataccgagaagaagcaaaacttggcccaacatgcctggccctccaaaatttctatgtcaaccacaaaactaagacacctgtgtttcggggactggtcagttcatgcttgttataccagaattcaggatgtcatgacaggataacaagctctaagccagcctggtctacatggtgaaaccccatctcagacaatcaagggttgagctaggtcctggaatagcactgcaaattctaacaaaggtcttcccgcctgaccgttcttgtgtttacaaggtagaggggaccactggtacaccatcacgaacgtgaggcaaggcccctcctgtagaggaagaagctgggaaagctcacattcccatccatttgccaagacttttgcacaggagagagaaataaatgtgttcttgtgtttgttaaaaaaaaaaaaaaaaa

SEQ ID NO: 5942 - DNA, 600 bp, Rattus norvegicus
ctggttggcagtgagaaagtgaccatgcaaaacctcaatgaccgcttggccacctacctggataaggtgcgtgccctggaagaggccaacagtgacctggaggtgaagatccgtgactggtaccagaggcagcgccccactgagatcaaagactacagcccctacttcaagaccatcgaggacctgaagagcaagatcctggcagccactgtggacaatgccaatgtcctcctgcagattgacaatgcacggctggcagctaatgacttaaggaccaagtatgataatgagacgtccttgcgtcagttagtggaaagtgacatcaacaaccttcgctgtgtgctggatgaactgactatgtccagggcagacctggagatgcagatcgagagtctcacggaggagctggcctacctgaagaagaatcacgaggaggagatgcttgccttgagggtcagacttggtggggacgtcaacgtggagatggacgcagctcctggcgtggacctgagccgcatcctgaacgagatgagggaccagtatgagcagatggcagagaagaaccgcaaagatgtggaggcatggttagaagccacctct

SEQ ID NO: 5943 - DNA, 600 bp, Rattus norvegicus
wwwtywwytwwwwwamgkgatkrgtyggaagaggatgaagacrrymgcaaarkaagtaaagaacgttcgagagtaaactcctcaggtgaaagtggtggtgagtctgatgaatttttgcagtccagaaaaggacagawaaaraatcagaagaacaagtcagttcctaccatagacagtgggaatgaggacgatgactcttccttcaaaattaagacggtggcccagaagaaggcagwaaagaaagagcgtgakaggaaaaagakagaagaggagaaagcaaagttgcgaaaggtgaaagagaaagaagagctagagaagggcaggaaggagcagagtaagcagagggagcctcaraagagaccggacgagkaggtgttggtgctcaragggactcctgatgcaggtgctgcctcagaaragaaaggagacattgctgcaacyctggmmgawkdcwatkaaggagwcaaaaagaaaaaagataagaagaaaaagaaaacagaaaaagatgataaagaaaaagagaagaagaaaggsccaagcaaatccactgttaaagctatccaggaagctttggctaagctcagagaggaggaggagaga

SEQ ID NO: 5944 - DNA, 600 bp, Rattus norvegicus
ggataaagactcaacctcctccaaacttgagcggagggtctcagatggtcacagaagcagaagcctaaagcacagtaataaagacgtgaaaarraaaraaraaaawaagccagacgacaagaatggtaaagaggttgacagcagccatgaaaagggcagagggaatggcccagtcacagaaaaaaaamwaarwaraaggctgtgtgaaaaccgaagaggaagcacgtcacaggaaatggccaaggaggataagttagcagcgaacttgtcaggcactgccagtacttcctctctgcagagacccaaaaaaagcacagagaccgcattgatccctgaacaagagccaatggaaattgattctgaggcagctgttgaaaatgtgtctgaactttctaaaaccgaggacatcagtagtaatagttctcagcaagacactgactttgaaaatgttacaaaacataaagccgctgctggagttttaaaggatgagttaagaacttctatggtcgattcaaaaccagcagcagctgtgacctgtaaatcagggcgtgggctaacaataacgagcaattctgaaaagcatgctgaccataaaagcac

SEQ ID NO: 5945 - DNA, 600 bp, Rattus norvegicus
ctgtctgaagcaatcagcatacgagactttctggttactttcamacagcccctggcccgccaggaagagcaggtccggatggtgagacaattccatttccatgsctggcctgaggttggaatccccactgagggtaaaggcatgattgacctgmtckcggcagtgcagaagcagcagcagcagacagrcaaccaccccatcaccgtgcaytgcagygcsggarcmgggcggacaggtacattcatagcactcagtaacattttggaacgagtgaaagccgagggactcctagatgtgtttcaagctgtgaagagcttaagacttcagagaccacacatggtgcaaaccctggagcaatatgaattctgctacaaagtggtacaagattttatcgatatattttctgattatgctaatttcaaatgaagatccctgccttaaaatattttttaatttaatggtcagtatattttgtaaaaaaaatcatgttaatttatttcctagtggatattaatatccgtcctgattcctttggtatatattttgttatgttctaaaggctacctgctgtaagattattaaatcataaatgtccttttt

SEQ ID NO: 5946 - DNA, 416 bp, Rattus norvegicus; identical to SEQ ID NO: 1850

SEQ ID NO: 5947 - DNA, 600 bp, Rattus norvegicus
kgragatgtgcgtccgaggttatctggctgtgcgcccctatatggatgcagtcgtctccctggttacactcatgttggacacaggcytgccctgtttccgtggccagacaatcaaacttttgaaacacmggywcagsccgaacatgacagagcgggaggctgcaaattttatcatgaagatcatccaaaactgtttcctcagcaacaggagccggacctacgacatgatccagtactaccagaatgatatcccctactgaggagactgtacctgaagccttgagtgtcmcagagcagcttgwrctgtcaccataagcctgggtgtggaggtgacaggcacatggaacttggatgcacaggtgtgagtctttttcacactggayacaytccctatttgttsacccatcttamtatgttggtacatgaagtattttcctgtgtaaacatgagmaattgacataaaaaataarwrmmmwaaaawrwrmwamwwmwrytygwkrggksrccmrgacttygyccttagtcaaaggtaccctttgaatccctggtccttccaactcacacctagcttagtcttgctttgatttggtcctgaggatc

SEQ ID NO: 5948 - DNA, 600 bp, Rattus norvegicus
gacccccggggtgcasgagctacctgtccagcagcccgagcaccacatcctgaaggtgtccatgaaagagctcaacaagagtgcccctctcctcaccgagggacaggccatctgcttcaccatcctgggcgtgctcaccagsctggtkgtgctggrcaccgtggscatcgtctttctcaacaagtgcgargcctgggtgtccaacctgcgctacaaccacatgcttcgcaagaagaagaacctgctgttgcagtacaacagcggcgaggagctggcggtcaatatcatcttcccggagaagatcgacatgaccaccttcaacaaggaggctggtgatgaggatatctaagcagcgtgtcccctccccctcccccaggcccttctacattatcggggttcctcacagctccctctatgcgctctatgcttctttgtggtggagttcgctcttgtgtggaatctagtgaacgctacgcttacatttattttctcgtgttgctgtgtgacaagctgccgctaagaacccctccctccctccctccctccctccctattaatgcatgatataatgaataataataagaatttcatctctaaatg

SEQ ID NO: 5949 - DNA, 600 bp, Rattus norvegicus
tatctgcaatatagtaacagccttaataatacatgcattttcattttctacagctgttctcaactatgtccacaatgtatcatcacctccatactcatagctgtattcaaacaggaccttttggttgttttgaaatgtttctgaaccccctcttgcctcctgacacagcatcattgtgacattcttcccagttgtgttaggcctttgtcccaggccgtccattggtctgtcagcaatactcagcgcaaagcagagcgagaagcattgtgtctctgaagtaaagaaagtgatggtcatattataaagatatgttcctctttaawacatcggtgtaaccctttgagaactatcagaccagcttacagagtcaggatgatcagtcttgcaatctggtcatttgtagaagtggccaaaagggaaagccatcacatgttcgagaagttcagacttgtaaagcataccttacaatcccatgtaattctttaatgactgacagtaytgcataaatgcttttataacaaacaacagtggtgtgacttgccaaaacttttctggcaaataaaaaagatattttgttamcawtaaaaaaaaaaaaaaaaa

SEQ ID NO: 5950 - DNA, 600 bp, Rattus norvegicus
gtggtgtctacacagaaaaggatgccagtctggtcatccagcargtcttgtctgccgtgaaatacyttcatgagaatggcatcgttcacagagatctaaagcctgaaaacctgctgtacctcacccctgaggagaactccaagataatgatcactgattttggcctatccaagatggagcagaatggagtcatgtccacagcttgtgggaccccaggctatgtggctccagaagtgctggcccagaagccctacagtaaggctgtggactgctggtccattggtgtcatcacatacatactgctgtgtgggtatccccctttctatgaagaaacagaatcaaagctttttgagaagatcaaagagggttactacgagtttgagtctccattctgggatgacatttctgagtcagccaaggactttatttgccatctgcttgagaaggacccaaatgaacgatacacctgcgagaaagccctcagacacccttggattgacgggaacacagccctgcaccgggacatctacccatctgtcagcctccagattcagaagaactttgccaagagcaagtggaggcaagccttcaatgcggccg

SEQ ID NO: 5951 - DNA, 528 bp, Rattus norvegicus; identical to SEQ ID NO: 1855

SEQ ID NO: 5952 - DNA, 600 bp, Rattus norvegicus
aaccgtcccgagttcatcaaccaggtctacaacggctctgtggatgagggctccaagccaggtacatacgtaatgacggtcaccgccaacgatgcagatgacagcaccacagccaacggcatggtgagataccggattgtcacccagacgccccagagcccatcccagaacatgttcaccatcaacagtgagacaggggacatcgtgactgtggcagcgggcctggaccgagagaaagtccagcagtacacggtcatcgtccaggccactgacatggaaggaaaccttaattatggtctctcgaacacggccacggccatcatcacggtgacagacgtaaatgacaaccctccagaattcaccaccagcacatttgcaggagaggtccccgaaaaccgtatagagacagtagtggccaacctcacagtgatggaccgagaccagccccactcacccaactggaatgctgtctaccgaatcataagtggagacccctccgggcacttcagtgtccgcacagaccctgtgaccaatgagggcatggtcaccgtggtgaaggcagtggactatgagctgaaccgtgccttcatgctgaccata

SEQ ID NO: 5953 - DNA, 600 bp, Rattus norvegicus
scactaacttggaatcaatggacactagttagacgtgtgttccacatgaggaccattacatttgaccgcacagtgcactgaacsgacaagttgwccatagacacgggagagaagtgtytagagckkcmgsatgwtmcacttttwttttcattcatgggaagtttgttcagctttctwccattgttgtktttgtagcttttacttcagaaatctgtatttccataatccagaggttgtaagvscactgwkggttttagtggttaggkcaacgtttgaaatgrgaactaaagtttggatytatggaatgtggaaatagggtccagtatctgtytgccctgtaatgtgtrggattaaaatgttaaaactttawrammrwrrawwwmdwrvhhwhrwrmmttctctcatttaaaatcaattstgcaacacaarrammawrwwwmwwtccttgtataacctcttctttcagtgacataaaatgatkwdaaytkgcarawaaaraawawmmawwtaagatatgctatatttcggagagattggcatcgtcacaaagataatmmwgtrccactttataaggcttaamaawaaaaaaaaaaaaaaaaa

SEQ ID NO: 5954 - DNA, 600 bp, Rattus norvegicus
gccctctccatcgactacaagcagctccagttccgacaaagcactagcattcggacatgtcagaagctcctgaggcagctgaatggaaggctcaacctcagctacaggacggacttcaagatccctatggaggtgatgcacccgtcacagatggagaagagttacactgcctttgccattcaagtgatgctccagaatgtctttcttgtcttcagaagcaatttctccagcactgggtggaatgagactattgttgaaagtctcttggatgaactacatcagcagacagagcttctggagataatactaaaggaaaagcaagaggaaagattgacttgggtgacatccacgactactttaggcttgaagagctattactggagggtacaaaggtaccttaaagacaagaagtacaacagctatgcctggatggtggtccgagcagaagtcttcaggaacttttccattattctaagacttaatagaaacttccagaactgaagacctgtcagccaatgcctccaagagcaggtgatggttgcaggcaatcttaaaacattagagtctgactctgtgactggtagtgaatctactgcattt

SEQ ID NO: 5955 - DNA, 399 bp, Rattus norvegicus; identical to SEQ ID NO: 1859

SEQ ID NO: 5956 - DNA, 600 bp, Rattus norvegicus
ggactgatccgtagtracaacacccctccaggrctagcaaggtcatttttctcagatcctgggacggtcccattatttcraaatgatggagagagggtgtgggagcatggttaacgttgaacatrattgtcaaraagcytgcttrgaggcaragttgatcactgagccgtgttggttattcagttgctattgctaacaacatgcggaagcctttctgtcttgmttcatcccacagggatatyttaaacgatttccccytcatttaacchrcttgaaatccttattgcttacagtaaagcatgttyccaatytggtwctgkctsctskagagcycakaaggagagggaaatttgagggtattytgtcatggaattcaggcatcracaggttgtytgaaacactatgcagtcagggaacacagccttttttctaagtgagatttacccaatagytggaagtcagaattgaytaccttagctttcctttgtgagttgtttcaatatgttycctagaaattagttttcttataatcctcctttgtatcatmcaatgtaatgacttartaaaararwaawwrwamawhraaaaaaaaaaaaaaaa

SEQ ID NO: 5957 - DNA, 600 bp, Rattus norvegicus
cccaccctccttcctcagggcacttactaaaagaggggggtgtcccctcgggctccctccccgcctgtggcctcacatctctgcacatccaccatggccaccactgacatacaaatctatttattcccaagcctggatggccagagcggrgatttggggggctgctggggtccmtgccaccctytttcacggcayttagacctgacggggtccttggggccactgctcagggcgaccccccccaaccttcccatctctgcttggccatgccccaccctgtgttcagagattgaaaattcgtcgttaccccgcgccccactttttaaggcactttttagatctatttccccttttctccttaaagacagtttatatagagatatatatagagagagatatataaaatattcttttcctcagaggagccggcagcagttgtgggtggacgtagccaagatcagaggtaaccccaggaactcaggcagagacaggcgagggagcgagagaaaggccacagcttaatgtcacaaaacagcaataaaaccccaagactttagaaacacgaaaacagaacmttaaaaaaaaaaaaaaaaaaaaaaa

SEQ ID NO: 5958 - DNA, 1400 bp, Rattus norvegicus
tgctagccgttgggccctatcgtgcctggatccttgccccacaccctgagttctgagggcagtgccctttgatccttggggaggacatctctgaggactcctagagaatcacagaggacctttacttgagaagtagccaaagggagcactcccaagcctggcctgggaaagcaggagagagttctagagaggtttgccttcttgtyaccwtgttcagaccaytatsccacagaaccctagtcctacgaggaggcctgaggtcaagccttttattccaggaaaagggactcctgccctgggtcgtcttcatctcactcttcctcctgcccttgaacccctacatgccctagggcctctcccagcccgttgctgcaaagatgggggggggggagtatagagccactttgactgcagtccccaccagcggtggtgaggacaccttaactgcctccaccagcytgctgacagacactaactctgtaccggttcaccaagcatttcataaataaatgtgtrgaaaarrmmawrmwwmwwmwwrraratggatgttgtcttaggtgctccctgcctcagttctaacttctttcttctgcttgcatctctgtgcttgcttgccccccctttctccctccctccctttccttcttccttttccttccttcctccctccctttccttcttccccttccttccttccttccttccttccttccttccttccttccttccttccagggggtggggtggggttgatttccaaatagagtttctctgtgtagccctagctgtcctggaactctgttaacaaggctgccctcgaactcggagagatccacctgcctctgcctcctaagtgcttggacataggcttgggccacagctccatctctgtgcttctcagcagcttctgagttcattcacctaactcctgaagatctgggctaattctgtgtgtgtgtgtgtgtgtgtgtgtgtgtgtgtgtgtgtgtgtgtgtgcgtgatacatatcttcataacttttcatatgtctgaagtattttgcaattagaaaactgctgaacacagatagccacagaagcaggaagaaaataaggagaatggagaattaggaaggcatcatagaaggcagtgggggtgggtgagaatgtgaccagaaggtattaggttgctctcccatccctctagttctcttgagaagtgaattctagggttagtgagagatgcttcagcagaggaagatgcttcctgttaggcttaacaacttgagttcgatccccaggacccacagtctaggaggagaaaacagtctcctgaaagttgtcctctgacctccacacacagaccatggcattcctgtgtgtgctcacaataaataaattcattttcaaaatcaaaaaaaa

SEQ ID NO: 5959 - DNA, 1342 bp, Rattus norvegicus; identical to SEQ ID NO: 1863

SEQ ID NO: 5960 - DNA, 600 bp, Rattus norvegicus
gcccaacactcgcctggaaggyycagaagtgcaacttgtagagtatgaggcctcagcggctggtctcatccgatccttctgtgaacggtttccggaggatgggcytgagttggaggaggttctwacccagctgsccacagcagatgctcaattctggaggratcaggtccaggaggccccatctggccaggcttgagaagatctgtgtggmmtytcccctttcatcaaaccagggctgtctgtggccctgaattgtgtttagraggtggggraagggcaggagctcrgactttggtgctacctcagctgagggtggtgatgctaacccyttccatttgtcagcactttccwgttyaccattatgtcctcatttcctggatctgcactgccatctgtggygggagctcaacagggtgcctagtctggttttccaaatgggaakgtggcagttytgagaagtaactrttctagatccagcaggtggcatgtgacagagccagggctcaaagcattctcaccaaatccagtgctcttcgtgtattaccttttatagccagaaaaataaatwtgmcaaccmmmawmaaaaaaaaaaaaaaaaaa

SEQ ID NO: 5961 - DNA, 600 bp, Rattus norvegicus
gcaatgctggtgcttgtsamgksgytaacaggaccaagagaacacatcgtggrcctggagatgctgacagtcagtagwatwsggmmckwscgcacaagctytgtgttaarattracaataatagtgggsccgttttcattttaaacttttattcacataaagcctaccacaggcatttaaatcagccaaagaatatcattacattaaagtytatdttatttatagctctatctagtayatctatattyaaacagctagactatggtaggaagtgggcatttaatccataagagtcaayatttatctttatcaytgtgtgtaaattagacattagtccaayattcttcttgaagagagctaagcatatattatctagtgaaayttggattctttcctacaaaaatgggrccaagcaatgatactgttctgtggtgaatmgagaaatatacacctccacaaacaatctcatgaggattggccatctaaacatcaagagcaagaagggtttyttttttaacttytttgtaagaaaatggaaaaaagtcaataaagatatatttctttagaaaawraraaaaaaaaaaaaaaaaaaagtgagcg

SEQ ID NO: 5962 - DNA, 1400 bp, Rattus norvegicus
gcacggaacactgccttacagtcacctgtgttgtagcccatgatsmtggggrtacacagttyccaaaacgagccktaaacattgtaaaggggaacccataaaagtgctaagttatttmagacttcaacsmayraggtgggtgttaaaamwwmwrwmwmmwrwttttctaaccaaggggttaggacttactctytytgatacgtmtgmtgytggctgcacaccctgcagccgtctgmtgctctgaagagtacagtacactggaagaaagctacccctttaagagcaactgtccagkctgaagaaagtcacagtggaccagagatktstcttcttaaccccttcccmttgtccctttccskcacsactcacatgcagtacatttatgtgacccttytggtttgtaagggtwccaaagggtccctgktgtgcytgctggtaacctsgtgtttccagtacactaaagaacrkakmskcctcagaacaatgcgggtacccagtytcaraaaarraaaaaaaaaaaaaggtggctcctgcgttgagccagcaacttgcaggctcacacagatgtcctcagactccgctccrtctctgctycctgcccctcccattcttcccaggggttatgagaaaccctgccttagactctgcagtgaagatggtgttccgaagaatgacctggatgggccatgctcaactgtgattcctcccccgctgtccactcgctcgctcgtcgtggaaccarcccgtatctgcagcggcctctgkgctccaaatgtggttttctagcaaatgctaatgtggtgatcaacttgcwttgtwttctttccctcccagttaaactcaggcacagcatgtcttcagaagtatctaggcagttggtataygtgggtacttattaaagtggacagtawtaagtaaawrwmmwwawwawaaaactrsckgmykyawgykwawtscmtttrataagccaaaaatctggggtgtagaaatctgggggaaaaaaaatcatatcctgggatcaacttcccaaggtawattttttaagttaatttgggaaatgaacagcatttcactttgccgcgagtcttggccacatttgacctatttgagcygtttatacatttgaagccactgttgttggctgtgtgacagtgtgtgtatcttgaagcacaactgggtttgcactaaagaatcatcattgtaataacmctatttggtagcctaacttcattttsgtattyttaactgcacaggaagtcgataatttgtcacmacggggttttgaatgtttgctttcagtgttggctatttctatgttttataaaccaaaacagaatttccamaaacaatgaaggaaaccaaaataaatatttctgcatttggarwrarwrraaaaaaaa

SEQ ID NO: 5963 - DNA, 600 bp, Rattus norvegicus
acaagaagggcttgtccaaaggctgctttggcctcaagctggaccggatcggctccatgagcggtctgggatgttagtgcagcgacccctggcggcggattgggaactgcactgtgcactgaggtcatccttggtcatcagcctccagcatctggaaacacctccaacgcaatgtggcttttacatttctttttattttttcctcctggtactggcaatacacaacaccagctgttttattattatttggggaggggaggggatgattttattgtttggggttttttttttgaaaatgaaaaataaaaaattatatattatatatatattatatacatgagacacacactcccacaccgacttgatgacaagggacggtttttaaagtgactgacaaaaccagctagctgtaaaaacattgctgtttgtaaattcacatcatgcataaatgtatttatgttgtaaagctatttatattgtttataaagagatatttataaaaattttatttatgtaactaaatgaaagaagccaaccattgtaatgtttttgtcctaactagttgaaaaaaaatgttaaaaaaaaaaaagccattccatg

SEQ ID NO: 5964 - DNA, 399 bp, Rattus norvegicus; identical to SEQ ID NO: 1868

SEQ ID NO: 5965 - DNA, 600 bp, Rattus norvegicus
tgattacatttatctaagcaacacacatacatgttcagttgtaagacggtaactaaatttctgtgacaaatatgctttttttaatagcaagaacattatagagttaatgcagagtcctaaagataatctagtagtcgctatgttttttttcgtaagtcttcactttagatgctgttatttctagcacagtaagcaggcagagtctttcaaatgctcgaacactggaatctttggttgctacmckaksagctagmwwgcarmcmagmagscagccwyyymmrgmawgbdhwtrcgwcarmavshhgmrwamcmysamaggtttctaagcatggaggaagagaagcagcagagcagaagattggagcaacatttgtttctccccagatctagaccttttagttcatatgtacactagccagtggttgtggacaaccatttacttggtgtaaaggacttactttccgtataaactggctctgggtagcactgctgatcctgagctgtagccgctgtaattgtgaatattaactgaggtagtgaaacatggtgtccggttttctattgcatttttttcaagtggaaaagttaactaaatgggtg

SEQ ID NO: 5966 - DNA, 406 bp, Rattus norvegicus
  misc_feature (4)..(4): n is a, c, g, or t
  misc_feature (224)..(224): n is a, c, g, or t
caantttgcaaacaacccaagtcagaagacagggcaggccctgctcacccacctgtaccagtcctctgccaggcgctacgctggtcccctgcatcatcagacacagcgcttccggctggacaatttgctcaacatggcctacggagtcaagaggttctccccaatcgccatcgatggcatgagtggcctggcaggcgttggcttgtctggaggcgctgcaggcnttggctggtgcatcttcgtgtacaacctgtccccagaagcggatgagagtgtgctgtggcagcttttcggaccctttggggcagtcaccaatgtcaaggtcatccgagatttcaccacccaacaaagtgcaaagggtttcgggtttcgtcaaccatgacccaattacggttgaggccgccat

SEQ ID NO: 5967 - DNA, 337 bp, Rattus norvegicus; identical to SEQ ID NO: 1871

SEQ ID NO: 5968 - DNA, 834 bp, Rattus norvegicus; identical to SEQ ID NO: 1872

SEQ ID NO: 5969 - DNA, 600 bp, Rattus norvegicus
ctacgcccggttcccaccactgctcaagatggccaggggcagcgttatcctgctagcctggctcctgttggttgcaaccctgtcagccactctggggctcgggatgccamcaaaggagaakakaggctggaccctgaacagcgctggctaccttctgggcccacatgccattgacaaccacagatcatttakcgacaagcatggcctcacaggcaagagggagttaccactggaagtggaggaagggagactaggaagtgttgctgtrcccctgcytgagagcaatatcgkccgcactataatggagtttctcagtttcttgcaccttaaagargccggggccctcgacagcctgcctggcatccccttggccacctcctcagaagacctagagcagtcctgagaccacacccactgtgcacctgtgtcctctgctataatttaaagtcattctaggctaaaaagaatcttccgccaactcctcaagccaacactttgttctctgctttgatgctgagttattacaattaagatgttttgattggagtaawkatattgtgtgacawaawaaaaamwarmaagtaaaaaaaaaaaaaaaaa

SEQ ID NO: 5970 - DNA, 600 bp, Rattus norvegicus
tttgacccagggtcattcagagcgctgtaaagattaagcgctgggcactagcccggtcctcacaatccagccagccacagcacagtgaccctccctctgtagaggctcacctttcagggacgaaccaggctgtagcaaccgtggagactgrgyactgarsaagacaagcaagcttcagtcttytggcgggaaggaacaagaacggtaggcattcagaatggccttcgagaaactcattttatgcactagattgtgagggatttgctcccaatgtttttttttttcttcttcttcttcttctttttcaaagtcattcccttctaatcttgtccagactttsaawwmaarwrwrramrmggtgacaagaacctttacacctgctccaccgtggggagactttccagtcaaggagaacacgctcatcctgctggggcactcactgacaaatggtattcatgaacgagaaggctgtgcacatgcaaccgacatgtgcgtgtgcacacatgtgcgtacatccggtcgttgcctcaagtgtactttgcacttcagttaaaatgtgcagaacttccagaaactggaagaagaagaagaagaaaaaaa

SEQ ID NO: 5971 - DNA, 600 bp, Rattus norvegicus
ggtttttgaaatcccaaagcacatccccagtgacacacttcatccagcaaaactccaccwckaggtccttctcaagtagtgccaagccctgatgactaagtactaggatacaggaacctaggggggccatccctattcgagccayttcagatagaactggttttcacagagtcatctgccttcgccttcctctccctgtgtctccctcctttccacatctcaccysaatkctcctccaggactgtcagggagtgtctatcagattgactttgctgctgctattgagtctttcctgggttttgttaaaggagtttgttccttcacattggtgaagccctgcactctgttttatttcagacatggttcttctaagcagtttatccctgagattttaaaaaccctagtctaaggttttatttttagattattatcactgcatacatacagtaagttatttttttcttccaaaaccgcttaagcttttatcatcttcagtcttagaaatgtcataccgtgtctaagagaatgacatccatccatctttatttctgttaactctccaacctccccttcccctctcctttccttccatctcctctc

SEQ ID NO: 5972 - DNA, 600 bp, Rattus norvegicus
acacgctcatgagcatagacaccatcatcaatgggaaggaaggcgtgtttcctggactcatccccattctgaactcctaccttgaaaacatggaagtcgacgtggacacccgatgcagtattctgaactacctgaagctaattaagaagagagcatctggagaactaatgactgttgccaggtggatgagagagtttattgcaaaccatcctgactacaagcaagacagtgtaataactgatgagatcaactatagcctcattttgaaatgcaatcaaattgcaaatgaattgtgtgaatgtccagagttacttggatcaggctttagaaaagcgaagtacagtggaggtaaaagcgacccttcagactagacatccagcaaagtggatggcagctgcagccctgaccccgagcccactcagacgctgtgaagaccaagatggcctacagtgttccagttgcccacaagtgactagaagcttccttcagtaggtgaatctgagtttgtatatgtatatactaaagtatttttatgattattaacaatgtattttaataacactgtatctacagtcatggtgaactggcttgtacattttt

SEQ ID NO: 5973 - DNA, 1400 bp, Rattus norvegicus
gctgtcagaactaaaggaccagatgacagaacaaaggaagcasaaacaaagaattggccttctaggacatcctcctcacatgaatgtcaacccacagcagccagcctaagcaaatgagacggagggactgtactcaaccctttttaaattattgtcagcgtgggtctggctcttggttctgatctgccctctaaggttacatgtgcgcttartacatttgtaaatactcggttttgtattgtatgtatatgattgcaattctcagaggtttggactttcgtattgtaattagctctgttggcatggtgacttgtcactcctgccaaaaatattaaaaatgccttttttggmaggactacagaaagtacctgatttgcacttgaaccagattatagatttaaaaagtatwtgacatgtattttgttatttaaaactagaatagccagtatttatgttttttataaaactgtgcaatacaaattatgcaatcaccataactctgtaactcctgagtgtcttaagggagtgcgcatctttgaagctgatctgttaatacttatgtaataaatggttaaatatcaaatgatgatgctgctgccaaaattatattaatagcaagtttctggcccctgggcaattttgtaccttgtaattatcctatggtgatgctgtttctcgttgctaatggcattagtgcctcgtatcctagtgataactccaggtctgtgaaccattcaaacaacattcatttttgagacaaagcaactttagtttcaagggtaattttaagcttcaaaattaatcatttaaagtatttctttaagagagccatgttagaggctcacacgttagcttgaaagragtcgatgaaataatttttttaaagggaactttttacacgacgtttggaatamcagcatattgctgaccagycagtgtcatctcccaggtgaattttratgtcacgtwatagtcaaatgagctagctkatggtttmtagattctyttcatctkaaccaacatgatgcagtaggtgagaagttattatgcatatatacacatatacatccatataaggcaaagtaggagctgtccccttaggatgcatagctgcccccttagggtgcagagctcaacactgacagtgctgttctgagagagccacgtttgggttttatttctttgtcacatgatttcttttctggatgtgtgcaagtataacaggaagtgttttmtacctgttgcttgttttgtacctgggtctcgttttactagaccatctctgcacaaaagtttaaaaaatgamccgtaagcagagttctgaagcaagtcaagtttgtaagtgcawacctsaaattatttaataaatgmcgcagaatmctaaaaaaaaaaaaaaaaaa

SEQ ID NO: 5974 - DNA, 277 bp, Rattus norvegicus; identical to SEQ ID NO: 1878

SEQ ID NO: 5975 - DNA, 600 bp, Rattus norvegicus
acaaggcagaataaaaaaatgaagaccgtttacatcgtggctggattgtttgtaatgctggtacaaggcagctggcagcatgcccctcaagacacggaggagaacgccagatcattcccagcttcccagacagaaccacttgaagaccctratcagataaacgaagacaaacgccattcacagggcacattcaccagtgactacagcaaatacctrgactcccgccgtgctcaagattttgtgcagtggttgatgaacaccaagaggaaccggaacaacattgccaaacgtcatgatgaatttgagaggcatgctgaagggacctttaccagtgatgtgagttcttacttggagggccagcagttcamasgaattyatttaagmtaawsrctgastsmaagcckwskwwgsykagcttcccggaagaartcgccatagctgaggaacttgggcgcagacwtgctgatggatccttctctgatgagatgaacacgattctcgataaccttgccmccararacttcatcaactggctgattcaaaccaagatcactgacaagwaakrgttttttagttgattttgaaatctagtaaaacttt

SEQ ID NO: 5976 - DNA, 343 bp, Rattus norvegicus; identical to SEQ ID NO: 1880

SEQ ID NO: 5977 - DNA, 600 bp, Rattus norvegicus
ygrctaykwrkttattatttattatytatttatttgcttatgaatgtatttatttggaaggccggggcgtcctggaggacccagcgttgggaagctgtcttcaggccaacatgttttctgtgaaaacggagctaaactaccagctatccccatctggtcccccaccccygcctcgttgcctccccccttttcttttgcttatgtttaaaacaagatatttatctaacccagttgtcwwaataatgctgatttggtgaccaggctgtcgctacatcactgaacctctgctccccacgggagccgtgactgtaatcgccctacgggtcattgagagaaataaagttcgcttggaaaagaaawrwrawwwmtgaagtctgcgtctgtcgtctctctgcagcctcctaaagtctktgggtccagatctcagtttttatatcccccrgggmcattaagacccctaagacccyccaagaccccygtggaacaaaaggcagtccacaaccctacctctccccggaaacaggagcctaagcctaattacctttgcccctggtcctgggaatttcccactctgggaattccaaatacctgctggaaagt

SEQ ID NO: 5978 - DNA, 600 bp, Rattus norvegicus
gtcacgctgtggtaccgcccaccggatgtcctctttggggccaagctgtactccacgyccatygacatgtggtcagccggctgcatctttkcagagctggccratgsrgggcgamctmtsttccccggcaatgatgkggatgaccagctgaagaggatctttckactgstagggacaccsactgaggaacagtggcckgccatgwccaamytgccagactatwagccctacccaatgkacccagctacaacatccttggygratgtcgkgcccaaactcaatgccacggggagagacctgttgcagaacctgktgaagtgtaacccagtgcagcgcatctcggcagaggaggccttgcagcacccctatttctctgacttctgtcccccgkagactytytgaccctggcggccaggytggggcctgacctatttaagcctccctyccargarggtgggagagtggggtatkggatgytgagtaccagctgtgytgggsccagccaggggcgagttaccytggkccgsrgtttccctcccyccatggacyttatttaatttcataaattggktcctttccmmmaaaaaaaaaaaaaaaaaa

SEQ ID NO: 5979 - DNA, 600 bp, Rattus norvegicus
gctagacgtaaagtctctttctactaatgctttgaagtcaatttccgaaacaagtataattaatagtatgttaatttctccaaaaaaaagacatgggtcctcaaaactgtgtaccagttcattaattctcctgatcaagagtctaagtttcatattcttaatcagttatcctatctcggatcccatcaacccattgtcttgactgtatgtgcaacccattatgaacctgcttatctgataatgaggctgcctgaaattttgtggtaatctcaaacatttgatacatttaaacacgggctcagtcaaattgacaagctaacatctgacactggcttgtgaagcttttttgtcatccagcgaggcttacagaattttctgttaagacatttaacagagctgtattcattgggctctttaataagcatataatcttccattaccaaatactttgttagaagacagaagagcatttttccagcgaacaaactatatttattacatgtatagcacatatttgcatgagaaagaaaaacattagccaaacattttcctgtatgctttactggtttcttgtttgtgcgcattaaagcatttaattgc

SEQ ID NO: 5980 - DNA, 600 bp, Rattus norvegicus
  misc_feature (571)..(571): n is a, c, g, or t
gagggttatatccaacagactcactgagccccctttgctttattatacaggcatgtggaaatatccattaatgtsamkakkgcctgagttcagttttagtatctacacagaccagtgttctgtctgtcaatattgattttatttccaagtaagttctttcagctaacaacttcatttttcatgattaagaatttttaagaattgacaaggtagacmaagaaagtcagataatgcaaagaactggaaacattgtgttctgtggatcactttggtcacattgataggtaccactgtttaacttgggaggacagcttgtgaaggaagtgttctcctcaaagcctgtgggcacccgtgtataaaggaaagtccttgggatgtgttctcctatgtcccctctcagccctttcataatgttattatgcactttttaatgtttgtaaaattttactaataatttgtgtgaattgctttgagatataataattatcacccaaccacacttttactgacgctgttgatggactatgctgtgttttgacatcacgattcttgtatggggaatgtctgtggnctatgtaaccccctctggtcagtattatg

SEQ ID NO: 5981 - DNA, 600 bp, Rattus norvegicus
caccaagattgccaagcgcatggccacactcatcttcacagactttctctgcatggcccccatttcattctttgccatttctgcctccctcaaggtgccgctcatcactgtgtccaaggccaagattctcctagttctgttctaccccatcaattcttgtgccaatcctttcctctacgccattttcaccaagaacttccgcagggacttcttcatcctgctgagcaagtttggctgttatgaaatgcaagcccagatttacaggacagaaacctcatccgctacccacaacttccatgcccgaaagagccactgctcctcagctcccagagtcaccaatagttacgtgcttgtccctcttaatcattcatcccagaactaaaaatcaatgtgaaaatggatcctcaccttgaaagacaattatgactccttctgaagagcaggccatggactaartggcartsytactgcacatctcatctaatttaatctctctgggtststgcatggcagactgatcagggaccattaatswccmctktggctcmtctmagmactkaawtaatggtaacagcaaataaaacaaagcaaaaccgcaca

SEQ ID NO: 5982 - DNA, 600 bp, Rattus norvegicus
tgatccaggaggctctggttcgaggaggactagactccttagcagcagatgctaacttcgtcatggcaacaggccaggccctggcagatgcctgccagatggaaccagaggaagtcgaggtggcagcaacagagctactgaagcgagaatccccaaagggcgggccatgcccagggagccttgagcccaaagtcctcccctgggcagcctgaaccagcagtgggggtcccaaaaagacccttattgctccaggtgtgaggcctatacagaatgamasaagcttagaactgccatkaccaaaagtcagaaagcgagggagtggagaaaggttagcgcagcctagsagcctcccctccctcctcagtagccagctgcatggactgagtagccgtggtcaggaaccacctcaaccaggsagggggccatggatgggcaggatcgacccttctccttaccagcaagaagcaggacttggcagggcctctgtggtcactcacaaaggcctgatyggtgccagggtctktctgtcataaagtcackccatccaaccagcktgacattaaagtckccaggcctgactttgrmammwrrmaaaaaaaa

SEQ ID NO: 5983 - DNA, 600 bp, Rattus norvegicus
aacacaaattaagaccattgtggaaacattattacctcaatacacaagctgttgtatttgttgttgacagcagtcacagagacagaattagtgaagcacacagtgaacttgcgaagttgttaacagaaaaagaacttcgagatgccttactcttgatttttgctaacaaacaggatgtcgctggggcactttcggttgaagaaatcaccgaacttctcagtctccataaattatgctgcggaaggagctggtatattcagggctgtgatgctcgaagtggtatggggctctacgaagggttggactggctgtcccggcaacttgtggctgccggagtgttggatgttgcttgattctattgcagcagttgtttcgagcttatggttaaaaagttactttgcatgtaaaaaaaaaaaaaaaaaatgcattctaagaaattctacatctcaagtatgataatttagtatgtgtacgtatgaatcctggactgagaaatgtaccattgcttttaaaaattattctgtggcaaatttaagtgatcctgttacattggttaaatagttttgctttgtttttttttggatataaacttttaaaagg

SEQ ID NO: 5984 - DNA, 600 bp, Rattus norvegicus
ctatcgtaactcccagaatcttgtacctgtgttggggctgcaggcagaagtccttggtcaggctggggtgagccctgcaatcttgggggacytgagggcacctgacaaggactttctccttcctctagagaggtymtacccactagccacagccctcccatctgacctgtccacacaggcagtgtatcagaggaaaraaarrraaaawaaccaggcacacatggtcaaaccagcaggtctgaaagcacaagaagctggggcaggggcaggaagcaggggtccatcccctaacccttctcaaaaaggctgggtcgtgagggacccctaatgcagggacctgaagcctcagtttccccatcttgcccttccacagaacagcctctgtaggtagagctgccccccgtcctaccctactctygtggctgctttctttggtactcttcccactcccaccgtagctgtgacgtgttgtagytkytwkctgttkstwwavtsttcccactcccaccgtagctgtgacgtgttgtagtttttagctgtttgtaaaatgttaaaaaaaaaaagttaaaaggaagttaaactaaaaaaaaaaaaaaaaaa

SEQ ID NO: 5985 - DNA, 600 bp, Rattus norvegicus
ccgccgcctgctgggccggccgaggatgcagcgcagcgcctcggtgtccaggctcgctctgctccagcgtgcttgctaacttcccttggctccgtcccagcctgccggggccgcaccgtgtcctctcgctctccgggtctggttctctaagctctctgggagctgcctccgggttccttgcagcccgctcgcgagcccgcgctccccttctgcgccccaccctcgttctcaccatgctgcccttcggcctcgtggccgccctgctgctggccgcagggcctcggccgagcctgggcgacgaagccatccactgccctccttgctccgaggagaagctggcgcgctgccgcccccccgtgggttgtgaggagctggtgcgggagcctggctgcggttgttgtgccacttgcgccctgggcttggggatgccttgcggggtgtacaccccacgctgtggctcaggcatgcgctgctacccgccccggggggtggagaagcccctgcgcacattgatgcacgggcaaggtgtatgcacggagctgtcggaaatcgaagccatccaagaaagcctgcagacctctgacaaggatgagagtgagc

SEQ ID NO: 5986 - DNA, 600 bp, Rattus norvegicus
cagtaaactatttcaccaagagagggtatgcgtgggatggcaaaagcgtggttccagaaaagccaaagaaagtgaaggatcctctcattaagaaaaacaacacatatgctcctacagcaaccagctatacccctaacttagccaggggtgaccccggcttggccactattgctaaaagtgcgaccatagaaccgaaagaagtcaagcctgagacaaaaccgccagaacccaagaaaacctttaacagcgtcagcaaaatcgaccgactgtcaagaatagcctttccgctgctatttggaatctttaacttagtctattgggccacgtatttaaacagagagcctcagctaaaagcccccacaccccatcaataggttcttttagtcgtattctgttgttcagtcctctgcactgagaatcgctttctgttctcaacgcagtgattcctgtctgccttactgcctctgtcttaaaagaattcgaaggtttccttatttccatatttcatatcgaacaagagacccctgtctgacagttcagagcagggcagagtattcagctcggggacaggattctgagaggaagccagagagcaaaatc

SEQ ID NO: 5987 - DNA, 1400 bp, Rattus norvegicus
aagctgctgaggctggaggatgatggcacacttctctacaccatgcgcctgatgatctctgctgagtgtccaatgcagcttgaggacttcccgatggatgcccatgcttgtcccctgaaatttggcagttatgcttaccctaattcggaagttgtctatgtttggaccaatggttccaccaagtctgtggtggtggcagaagatggctccagactcaaccagtaccacctcatggggcagacagtaggcactgagaacatcagcaccagcacaggtgaatatacaatcatgactgctcattttcacctgaagaggaagatcgggtactttgtcatccagacgtaccttccctgcatcatgactgtcatcttatcccaggtgtctttttggcttaatcgagaatctgtcccagctaggacagtttttggagtgaccacagtgctgaccatgacaaccctcagcatcagtgcccggaattcgctgcccaaagtggcctatgccacagccatggactggttcattgctgtctgctatgcatttgtcttctctgccctgattgaatttgccacagtcaactactttacaaagagaggatgggcctgggatggcaagaaggccttggaagcagctaaaatcaagaaaaaagaacgtgaactcatactaaataagtcaacaaatgcttttacaactgggaagttgacccatcctccaaacatcccaaaggagcagcttccaggcgggactgggaatgctgtgggtacagcctcaatcagagcatctgaggagaagacttctgagagtaaaaagacctacaacagcatcagcaagatcgacaaaatgtcccggattgtgttccccattttgtttggcactttcaatctagtttactgggcaacatatttgaatagggagcccgtgatamamggggctacctctccaaagtaagacaggaaaccatacttgcacagaaatgaacctgaggagaggtcaarstctacaagagactatttgggcgctgtctttcaggaaatttgcatgtttaataatatgtaacaaaataatattgccttgatgtttctaatgtgtaaacttcaatgtttcaaggatgtccccttaataaaaccaagcaaatggcctctacamcaacgggaggcaatgactgactctcagatgctcagcgtcctaacatcaatagtttacaaacaagataagtatatttttaactgttctgagtatatgacgtttttatacttcgaatgccatttcgtaccatttttcccagccaacagaacattttagggaatccctgtgatgaccacttgacaggtgaaaaagcaaagatcctcgggtacacaaagtccatgaagagcaaactgtgggcatttaagtccagtacgaat

SEQ ID NO: 5988 - DNA, 600 bp, Rattus norvegicus
agggatgaagaatatggctatgagtgtttggatggcaaggactgtgccagtttcttttgctgttttgaagactgccgaacaggagcctggagacacgggaggatacacattcgcattgccaaaatggactcctatgctcggatcttcttccctaccgccttctgcttgttcaatcttgtttactgggtctcctatctttatctgtgaggaggtttgggttttatcgataggggtcttattcgctgaatctcacgaagaaaaaatgtcctttctaagtccaacgatctaataccctatgtgggtcactgaatgtgtttctccgtctcacctagtaatacataggtcctacgatccgtgcccaactctcctttggttattgtaatttgaattttagcgtgcactgtctttcaaacctgcaaggcaagttaagttagaacaagagctgttagactgagcaagatacctttgagcaaaagcactgcaaactgaaatctgtgagtgtttaaaggggcatcattagcctttgattcacgtataacttagtacaaaaggtatacagctgtgtgctacgttcgcttggggtacgttgtgtaaattgaa

SEQ ID NO: 5989 - DNA, 600 bp, Rattus norvegicus
acaagcttctcaccaaaactcagtaccatatttccacgcctctctttactccccagaatgagatcttccaagatccacaaataaaccaataccattaccaatttctgaatctgcaactgcaatcaattatcattattaatttgtatgctgaatgagacgcatccttgagacccctaaaaatctcatctcctctttgtcatcttgtgtcactgcctttcagaggtgatttagttgcgtaaaaacaaaagtaacttgatttgttctggttacgtacttggtgcacccagagaaaattgtatttcgctagcagctgtggcccttggatactgagagtctcctttaccaaaatgggagaattgaaaggaaggatttttttttccaatcacagtgttacgtggtgatgttcccatgttttgtttacaaacattgaaatcagtgtatttcaggcagctctggtacaaatgtgatagtgtattgctgaagtgtttgagacgttattgtgcttctgtagtaggggctgatgaaatcaaactgacttatcatagcattgcatgtaatacctaaattgtgtgaaacacttcttctgtgtgtagtcgtgcc

SEQ ID NO: 5990 - DNA, 600 bp, Rattus norvegicus
ctctctttactccccagaatgagatcttccaagatccacaaataaaccaataccattaccaatttctgaatctgcaactgcaatcaattatcattattaatttgtatgctgaatgagacgcatccttgagacccytaaaaatctcatctcctctttgtcatcttgtgtcactgcctttcagaggtgatttagttgcgtaaaaacaaaagtaacttgatttgttctggttacgtacttggtgcacccagagaaaattgtatttcgctagcagctgtggcccttggatactgagagtctcctttaccaaaatgggagaattgaaaggaaggattttttttccaatcacagtgttacgtggtgatgttcccatgttttgtttacaaacattgaaatcagtgtatttcaggcagctctggtacaaatgtgatagtgtattgctgaagtgtttgagacgttattgtgcttctgtagtaggggctgatgaaatcaaactgacttatcatagcattgcatgtaatacctaaattgtgtgaaacacttcttctgtgtacttgtataaattaatacaagcatgttgaaaaggcaaaaaaaaaaaaaaaa

SEQ ID NO: 5991 - DNA, 303 bp, Rattus norvegicus; identical to SEQ ID NO: 1895

SEQ ID NO: 5992 - DNA, 600 bp, Rattus norvegicus
acacacagctttgtcataaggtgcaacctggctccagttcaggagtatgcccgggatgtgggcctcaagactgacctagtgaccatgaacccctcagtcatccagcgggcctttgaggacctagtgaatgccacgtggcgggagaagctactgcagcgactgcatggcctcaatgggagcatactgtggatacctgccttcatggcccggggtggcaaggagcgtgtggagtgggtcaatgctctcatcctgaagcaccatgtcaacgtacgcacagcttacccttccctgcgcctgctgcacgcagtccgaggatattggctgaccaacaaagtccacatcaaaagaccaaccactggcctcctgatgtacaccctggccacacgcttctgcaatcagatctacctttatggcttctggcccttcccattggatcagaatcagaaccccgtcaagtaccactattatgacagcctcaagtatggctacacctcccaggccagcccccacaccatgcccttggaattcaaggccctcaagagcctacatgaacagggggcattgaaactgactgtcggccagtgtgacggggctacgtaa

SEQ ID NO: 5993 - DNA, 600 bp, Rattus norvegicus
gcgaagaatctgtgttccttgcagctgaccgaggaagagattgctctgttctcctctgctgttctgatatccccagaccgagcctggctgttagaaccaagaaaagtccagaagcttcaggaaaaaatttattttgcacttcaacatgtgattcagaagaatcacctggatgatgagaccctggcaaagttaatagccaagataccaactatcacggcagtctgcaacttgcatggggagaagctacaggtatttaagcagtctcatccagacatagtgaatacactgtttcctccattgtacaaggagctctttaatcctgactgtgctgcggtctgcaaatgaaggggacgagaactctcagagtcatggaatgcatcgccgttaagacaaaagcaatgtgttcatggggacttaaggaaaatgtcactactgcaacattaggaatgtcctgcacytaatagamatatttttcaccgytacagtttgaagaatgtaaatatgcammwrarwrrrrmwmwwctgtttgttcgtttgttgtttgtwtgtttttgaaatgatcmtaaatatacaaatataggccaaaaaaaaaaaaaaaaa

SEQ ID NO: 5994 - DNA, 600 bp, Rattus norvegicus
aaggagaaacaagccagctccaagagcggccataagaaacagaaaaacaaggacaaggagtattatgtgtaaacatcacaccaccagtcgtatgcgaattgaaaacagaattatttctatacacacacckgamkastttgacaatgagatttaacttgttggatatgttcggtgagttggggtataccacgactatggtgggaaaaaccatttttaaaaggacacatacgatggtgtatctctctgtaatggtgagccatggtgcarggtcatagcctttgcctgaagmcagaaaattctytctgccctgctgtatcataaagcacacacttagtgccctgragcaagtccatgactccacttgactttggaagyttccttctctccgggwccttttgaaaggggyagaagactatgtgacttacttgktccttsgawccaagtgagtctgtaatgatgywtgtgactctsgamtgtaacaatgttggcttatttttgtytgtttgtttaattatgtaaaaaaacaaaamcaaaaaawtgagaaaagaaaamtgctttwraaaaatacaaacaaaacaatmcaaaamaaaaaaaaaaaaa

SEQ ID NO: 5995 - DNA, 600 bp, Rattus norvegicus
cttcagtggtcacgattgccagccctgccaccgcttctgtgccacctgtgctggggccggagccgatggatgtattaactgcaccgagggttatgtcatggaggagggaagatgtgtacagagctgtagtgtgagctactacttggaccactctttagagggtggatacaagtcctgcaagagatgtgataacagctgcttgacatgcaatgggccaggattcaagaactgctccagctgccccagtggctatctattagacttgggaatgtgtcagatgggagccatctgcaaggatgcaacggaagagkcmygrgsagaaggaggcttctgtatgcttgtgaaaaagaacwatctatgtcagsrgaaagttctacaacaactgtgctgcaaaacatgtacattccaaggctgagcakccaccttacatccctgttcctgtagacttatagattattccatattattaaagaaaaaaagccaaaaactgcaaaccacctctctctttcttgctatcttttttttttctctctctctatctcaagtttgtgcagggagatggtgaactgttttgtcagaactgaaaaaaaaaaaaaaaaa

SEQ ID NO: 5996 - DNA, 600 bp, Rattus norvegicus
gctgatggggctgcagagccaggtgtagtggggcagatgctggaggcagctgaagagcgtccatggctttgggtggtctacattctgactgtagcgttgccagtgttccttgtgatcctcttctgctgytctggaaagaaacagtccaatgctatggagtacaagaagacagatgctccccagccagatgtgaaggacgaagaaggkaaggaagaagagamgawcmmggkagatgaasagsaagaagaggasamkcttgmwkwgmmacakaasagtkatgctsawsaagmtgstsgcactggcmsycaagatgaggaagatagcamgcctaaagcakaggaggatgaaattttgaacakatcmccamgaaacagaamgccackaagagagtgaaacartcttaagaacttgatctgtgatttcctctccctccccttcccctgcaaatatggtcctaggagagggcctggtgtaccttaggtgggagctcagaaaacctcaagatgtcaccatcaacaggttccagtgaatactagcctgtaattttaaacatctagcagtaaactattgcagttgtaatgtaaaaaaaaaaaaaaaaaa

SEQ ID NO: 5997 - DNA, 544 bp, Rattus norvegicus; identical to SEQ ID NO: 1901

SEQ ID NO: 5998 - DNA, 600 bp, Rattus norvegicus
cctccctaacacccttacttagtagtgaggaaactttgtgtgggggagatgtagcctgtgccccagaacaagctttcttttttctgactggatcatctcaccttttctggttccctcccactccagccataggcctgttctttttcttcctttctgaaaaatgtgaccagttcaaattatgtccmaggacacgggccagcgccagctacctctgcagactctmcaagcggaagaggggaaggctcakaagggagggccatctcctgtagctcccggcagttggttctggtgacactgacatgaaccaggttccagaggctcacacccactctctgttaagcctcctctcggggaaggggactctgggactgggggctgccactgagcacacacactcctcccattttccagaagtgaacatttcacttttggtgccgaatgtgaatctgggtgggaagagcgggagcccttctaatggatttttttttacagagttatggaatccaaggtctgatccctgraaacttgtgtcacttccaaagaatcatgggctttttcgaattaaaaaaaattacactttwmaaaaaaaaaaaaaaaaaa

SEQ ID NO: 5999 - DNA, 600 bp, Rattus norvegicus
ctggcacatccyaccaacaacccagtgttgggcaacaaatgatctttgaggaacatggctttaggcgaaccacgccacccactgcggccacccccgtcaggcttaggccaagaccatacctgccgaatgtagatgaggaggtccaaatcggtcatgttcccaggggagacgtagactaccacctctatcctcatgttccggggctcaatccaaatgcctctacaggacaagaagytctctctcagacaaccatctcttggacgccattccaggagagttctgagtacatcatttcatgccaacctgttggcactgacgaagagcccttacagktmyawrttmcrgmmcttmttaysagtgyswctctagatractgtgacatctagaagcgaccatagcttcgtgtcagatgcctaccctcccaggacagatagatggtacaactctggctggaggttgtttggctgttttctcatggtgactcagacagcatccctgagcttgcttgactcagtagagaaaatgaaattacttttgttattgttccacattggagacagatagatagaacagtgatcttcggaaaaaaaaaaaaaaaaa

SEQ ID NO: 6000 - DNA, 600 bp, Rattus norvegicus
gaatgggaaccgaacttcagtggatctgcggatacgaaggacccagcactcagtgctgtcacggaagtttgtggacgtcatgacagaatacaatgaagcacagatcctgtttcgggagcgaagcaaaggccgaatccagcgccagctagagatcactgggaggaccaccactgacgaggagctggaggagatgctggagagcgggaagccgtccatcttcatctcggacattatatcagattcacagattactaggcaagctctcaatgagatcgagtcacgccacaaagacatcatgaagctggagaccagcatccgagagctgcacgagatgttcatggatatggccatgtttgtcgagactcagggtgaaatggtcaacaacattgagagaaacgtggtgaactccgtagattacgtggagcacgccaaggaagagactaagaaagccatcaaataccagagcaaggccagacggaarrwgwkswyhrtsykcwkckgygryrgtsrctkwsmttgctgatccttggmwytawtcatwggcwwsassrttgkcawakgattgcgtagatggcgctgggtgcttgcctctccctcagg

SEQ ID NO: 6001 - DNA, 600 bp, Rattus norvegicus
cgtttatcccccgattcaagttcacgtcacactgggggaggaggatttgactgtgaagatgagtgaccggggaggtggtgttccgctgaggaagatcgacagactcttcaactacatgtactcaactgcaccccggcctcgtgttgagacgtcccgtgcggtgcccctggmtggatttggttacggattgcccatatcacgcctctatgcacagtacttccagggagacctaaagctgtattccttrgagggctacgggacggatgctgtcatctatattaaggctctgtcaacggagtccatcgaaagactccctgtgtataataaagctgcctggaagcattacagaaccaaccacgaggctgacgactsgtgtgtgcccascagagarccgaaagacatkacgacgttccgaagstsgkaaskgcacatgggacgcctggcaaagccaaatgtggtttttgccmwacktggaagagaratgtatttggaaccacattgtaccaaawatgtcawgtgtgatttttcacaatcagtgtttgstaaagctcctaaaggatcaattawagcaactttattywrawawrwwwwrwwaaaaaa

SEQ ID NO: 6002 - DNA, 600 bp, Rattus norvegicus
  misc_feature (480)..(480): n is a, c, g, or t
tggaggttgtgtctacagcacaatcctgcccscaggactccagcttacttgctctgagcctgccaagccaagctctctcaagtcagacagttaactggctctgggactttctccagcacagatcctttgtctagaaaatacggactgtttgcaaamcraattcwgagcagaaacrmcaaagggaartttttgaargkacaaggrtratggmtggarsawgatgtccccagkcytgatgggacagccatgcttgcagttgtgctagaavtggcaacccstmtccmtcvwccaktabtggggctcccaaagattsttchktgtmttcatcacccacagagctgtagccarctgtggcattaccttgttttgcsscamrwkkccagcccsgcccstaaaccttactggcygtagcagrsamkagbtykgmacsargmttctgytstrakcmwybamgcyrwktctccytcaaggccgcyttcntatgcctccccctcctccacaacccgttaacattgtcttaaggtgaaatggctgtaaaatcrgtatttaamtamtaaatttatctgtattamwmwwdmmmwmaaaaaaaaaaaaaaaaaa

SEQ ID NO: 6003 - DNA, 600 bp, Rattus norvegicus
ttcaagaacatgtgtaaactcaagccactgctggagaagtggytgaatgatgcagagtcctccccgkcagacccttcagcragcactcccagytcgtaccccactctcagcgaagtatttgrsargargargargaawcggaccagyatcgagaccaacatccscctgactttggagaagcgatttcaagataaccctaaacccagctcggaagagatttccatgattgcggagcagttgtccatggagaaggaagtggtaagagtctggttctgcaatcgacgccaaaaggagaagagaatcaactgccctgtggccacacctgtcaagccgcccatctacaactcccggctggtctctccctcagggtctctgggctccctctcagtccctcctgtccacagcaccatgcctggaacagtaacgtcatcctgttcccctgggaacaacagcaggccctcgtctcccggctcaggactccatgccagcagccccacggcatctcaaaataactccaaagcagcaatgaacccctcctccgccgcctttaactcctcagggtcatggtaccgttggaaccatcccgcctacctccactga

SEQ ID NO: 6004 - DNA, 600 bp, Rattus norvegicus
catgctcacatgatggctcacctattggaaaggcattctgccattgttagttttcagctcaccggtgggattctgggacagccttttgctcgttgtgccaaactgcaagaagggtagttatggttttgactctgacctcagccacaatcctgaactgatccaaattctatgagaagactgaaatctcgtgtctctaccaaagccttattttgttaaattagcacagttttcttacagcatatccatttttgcccaactttcttttagaaattacttcccttttctacaacaaaacctgtctatccttaggtcctacaaagtcccttcctctctataaatggctaagctcccctctggccatgttgctccattcacgtgtactcttttgttgcccacatgttcccaagttcaagaacacttgttttttttctgttctctgtgggttttcttgtcctgtcccctctccttgctcctggccacagagaagtacacacactgtggccactttcttgtacatagtcctttcctactctgcactatgaccgttcatctttaatgtgtaatttcccagcgaaatgtttaactcaggtgtgcattttg

SEQ ID NO: 6005 - DNA, 600 bp, Rattus norvegicus
gtgctttcgcaccagttgtcagaccccagacctccccgcctyccacctgcaccagcamcaacgggaacagcctgcaagcgatttctggcatgattgtccctcccatgtgaaagaattgccttgaagaattttattaatgaagaggytggatcctgmtacgaaagtaatctgacatgagtcccagagtggaacttttaactcaggcctttttaagaggaaatcacacaataactgcagatttttaaacaaagtcaccgaccttgcaaatactgagattggaaaggggacctgccagagcggggtgttggatagagtcggactccccgagtgtctgggggatatatttattctgtattgataaaaaaaaraamaarmmcaccttttctttttttctttctcttttctttctttaagcttaactctgcaaccatttgtcttttgtaaaccattaagctacacacaagggccactctaaataagactccatgttttaatttatgatgtttttaaagctatgtaaggggagaatgaagtggtgatatttacaaaaaaaaagaaaaaaaaagaaaaaagaaaaaaagctaaaaaaaaaaaaaaaaa

SEQ ID NO: 6006 - DNA, 600 bp, Rattus norvegicus
tgccccagaactactgcttggtgctaaggaatactccacagcctgtgacatgtggtcggtaggctgcatatttggagaactgctgacacagaaacccctgttccctgggaagtcagatattgatcagataaacaagattttcaaggacatcggtactcctagtgagaaaatctggcctggctatagtgagctcccagccgtcaagaagatgaccttcagcgagctcccctataacaacctccgcaaaagatttggggctttgttatcagatcaagggtttgatctcatgaacaagttcctgacatactaccctggcaggaggatcaacgcagaagatggcctcaaacacgaatatttccgagagactcccctccccatcgacccatccatgttccccacgtggcctgccaagagtgagcagcagtgtgtgaagcgaggcacgagtccaaagcctcctgagggggggctggggtacagccagctgggtgatgatgacctgaaggagacggggttccacctcaccaccaccaacgacggagccgtcagctgtaggccatggtgtagcctcttgttctgagagggcggcttgatgaggaggcc

SEQ ID NO: 6007 - DNA, 600 bp, Rattus norvegicus
caacccaccccagcaagacagyagcgwtgcttgtagcacacttcccaaaagtagcagaaattttgaaaagccagtttcaaccactagtaaaaaagatgcgttaaggaagccagctgtggttgaacttgaaaatcagcaaaaatcttatggcctcaacttggccattcagaatggaccaattaaaagcaatgggcaggagggacccttgccggtaccgatagcactggcaatgttaggactggattatggaaacacgaaactactgtgtaacattgctgggcttcctaggcagaattcatataaactgtgatactcacattccttgaagctatgagcatttaaaaactatttacagccagcatagggattcaaaaggatttagaataaactttgaagttttggattttacttatttttatccccaaattgttgctattttttaggatctgaaacaaaatctttctaaaacattgttttagttgtcaaagcaccaacaggacattttgggatgtgaaatgtaatttcttggaatctgtaaattgtacttaatatttcaggcttgtatttaatataataaataggtgtttgttaaaaaaaaaa

SEQ ID NO: 6008 - DNA, 600 bp, Rattus norvegicus
  misc_feature (519)..(519): n is a, c, g, or t
aggaacccaatccgrcckmkgattcctgaattcctgktgctcttgaagctgccasttgraaggattgggtgcaggccagaaatggggcaccccctccaagactgggsctgcccgtggtgctcccaccagtctccggagatggtagcaatgtttatcttcctggagttcctaacctcccttyttcwctgactttccctggggccagacytctgctggagagttcctgragagtcagaagctttgcctagaggacttctagaagagctagcccccgggatcctgtttcaagattcartgccmccaagatctgggtcaaccaacttaccccaacttcacccctgcctggactgttgatacgctctyttccaggtttwtatcaccggagcaartarttgtctmtattgrgactataactcgaaatcctcccggaggggcaggaavgacatctgtgacaatgcttggctcgctgctgaccytgcttgagggaggggcacatrtycacactdyamtagkkcaccntgccccgatkcctgtggggacagggacagagatgagagttytaktaaatwktgttcmahccmmaaaaaaaaaaaaaaaaaa

SEQ ID NO: 6009 - DNA, 1400 bp, Rattus norvegicus
ctctggaatttgggacagaaacagcatttggttgcattgttcttctctcattccccacacagtgtgtcaagagctagttccagtattgttgtcacagggataaataatatttatcagcagtttttgaacagacaaatttctatttctatcttggaaaaaaaaaggcaaatttgccacattctcaggttatggctaggggtgtcattatggttcaaatcctgctgagtattacatggtaagccttactggctttatccctgtggatttggtggcctctgaagtattcttgaacattgtgttctgtgtcctggcattgagtccagcataatgtccgttattcttagttcagtgcaaaaagacttaaaaagtcagaatcctgtggcccatcacaaggcaaaggttatcctaaatctctttttgattagaaaatcccaggattatatctgcaataaacctattttcaagatgagacattaataatcagtgtgaaattctgagtatttaatggtagctggttttcagacatggtactatcaaaaggatagaaagtaaagagagtgtatatctggggttcccagcccacccccagtgttttttttctggaagaaaaaacatccttgaagccaaatgttctgatttaataaaagcataagtcataaaagtacatcttaaagtatttttaagagcctgtcaaagcgtgaatgtgctttgattcctaaaagagtggttcttatacatggcaaatatattcttgtatattgtattcgattctaaatccgtggtgagtattcaccctctaatagatggacaaaagcagtggacttttaaagaccaaaggtgtctacgagttattctgttctggttcacaagttctagagaaggggaaagcttgtgtgcacaatgattatgcagagattaaaattcctaaacaatttcacctgtagctggcagtgacaaacgcttggtcaataagtgccagaactgttcctgcacaaagtgtcccaacttctgaattaactcgttaaagaaatttcttgaaaggtccttgctgattggggttggtgggaaaagccaacagtgaacaggaagtgataagcattagaatgaaaggggagagaggaataagtgacagcaagagagagagagagagagagagagagagagagagagggagagagagagattgagactgtgaggaaccacacaatgtaaatggttgtatattttgtattagaaattactgtgtgaaatatatatgtagtctgtatctgagttctaatagaatattttaaattatgatttaaaatattttatggtgtaagagtatgtatttatttaaatatattaaacttattgtattcacatgttagtatgttttggcaataaatgtgtttctactt

SEQ ID NO: 6010 - DNA, 600 bp, Rattus norvegicus
ccaaaccagctgagcagccccagcctgggtttcgacgggctgccggggcggagacgcaagaagaggaccagcatcgagacgaatgtccgcttcgccttagagaagagtttcctagcgaaccagaagcctacctcagaggagatcctgctgattgcagagcagctgcacatggaaaaggaagtgatccgcgtctggttctgcaaccggcgccagaaggagaaacgcatcaacccttgcagtgcggcccccatgctgcccagcccgggaaagccgaccagttacagcccgcacctggtcacaccccaagggggcgcaggaaccttaccattgtcccaagcttctagcagtctgagcacaacagttactaccttatcctcagctgtggggacactccaccccagccggacagcaggagggggtggcggtgggggcggagccgcgccccccctcaattccatcccctctgtcactcccccacccccggccaccaccaacagcacaaacccgagccctcaaggcagccactcggctatcggcttgacgggcctgaaccccagcgcaggccctggcctctggtggaaccctgccccttaccagcca

SEQ ID NO: 6011 - DNA, 600 bp, Rattus norvegicus
aaggtcaccggcctgcagggtcaatcttgatgtcattcgaggccttccgaatttggcttcctttcttggctctgaaatgaawtttagttgtcatatacagatggtgtctagcaatcacggctgcactcggtrtggcttggggtatgktggcttgagcttttccagytgctwttggattacacttgctbtgwgttgtcamtgctgtccmtvtgctgggtccccgctkycatwaaggtatcgcagtcmccacmtggtgttctttctagccatytacagtacagtcatgcactcaaattaagrttaaggaaaamgatatttttaagtgagtaacttcatgcvcaataaaaaaaagacatggctttttytaawrwrrwhwawmwrwratttaaaaaaaaaaaavmmawraacttaacaatatttaaaacctgctacaatcagtgctgaaaatagtattttcccccttttctgcattttactattgtaaatatgttttctaaatcaaatactttaaaagamgaaatgttggatttataaatgctattttttattttacttytataataaaagyacaagcacactgttrammwmaaaaaaaaaaaa

SEQ ID NO: 6012 - DNA, 600 bp, Rattus norvegicus
  misc_feature (366)..(366): n is a, c, g, or t
  misc_feature (572)..(572): n is a, c, g, or t
ggacgacatctctgactctgccaaagatttcatacgtcatttgatgragaaagacccagagaagaggttcacctgtgagcaggccttgcagcaccchtggattgcagkagacacagctytggataagaatatycaccagtcagtgagtgagcagatcaagaagaactttgccaagagcaagtggaagcaagctttcaayvskassgctgtggttcggcacatgaggaagctgcagstgggcaccagccaggagggacagggacagacagytasccacggagrgytgstgacacccacagytggggggccagcagmtggmtgctgctgtcgagaytgmtgtgtggagscaggctcagaactgccccntgcaccacccccaagctbtasggccatggaytgmacatcaaggagtcagggtttygyccgtgaggggttggaggcagcctgcttcctcctcaccccagaactggggagtttctgaccccatacttcttccctcccctctcactcttcactgcattttccatacaaatgtttctattttattgttccttcttgtaataaagggmagntwrwvcmramhwvwwaaaaaaaaaaaaa

SEQ ID NO: 6013 - DNA, 443 bp, Rattus norvegicus; identical to SEQ ID NO: 1917

SEQ ID NO: 6014 - DNA, 1400 bp, Rattus norvegicus
cacctgcttcttcattggtgtgctggtgggagccgtggtgtatggatacttgtctgacaggtttggcaggcgccggcttctgctggtggcctacgtgagctccctggtgctgggtctgatgtctgcagcctccatcaactacatcatgttcgtagtcacccgtacactcaccggctcagccctggctggcttcaccatcattgtgctcccactggagttggagtggctggatgtggagcaccgcactgtggccggggtcatcagcaccgtcttctggtcgggaggcgtgctgctgctggcactggtgggctacctgatccggagctggcgctggcttctgctggctgccaccctgccgtgtgtcccaggcatcatcagcatctggtgggttcctgagtctgcacggtggcttctaacccagggtcgtgtggaggaggcaaaaaaatacttgctgagctgtgccaagctcaatgggcggcccgtgggtgagggcagcctgagccaggaggccctgaacaacgtggtcaccatggaaagggcgttgcaaagaccctcatacttagacctgttccgaacatctcagctccgacatatctcactgtgctgcatgatggtgtggtttggagtgaacttttcctactacggcctgactctggacgtgtctgggctggggctgaacgtgtaccagacacagctgctgtttggggctgtggagctcccctccaaaattatggtctacttccttgtgcgccgtctgggacgccgtctcacggaggctgggatgctgctgggcgctgctctgacctttggcaccagcctgctggtatccttggagactaagtcatggatcactgctctggtggtggtggggaaagctttttctgaagctgcttttactacggcctacctgttcacgtccgagttgtaccctactgtgctcagacagacaggattgggacttactgcactcatgggcaggctaggggcctctctggcccgactggcggccttgctggatggagtgtggctgttgctgcccaaagttgcttacggggggattgccctggyssctgcctgcactgcactcctgctgcctgagacgaaraaggcacagctgccagagaccatccaggatgtggaraggaaragtacccaggaggaaratgtgtaggtccgggactgagttggactagcgacagttctccacaggagctgggcacaraaggcagcctyttgtgaytgggacatcagactcctccacctaaggatggagctgctcctgawgccctctgcctgtgctctccagcagcagaacaacttcccgcagcactgggccgctgggattctggactcccctctcatggccgggggcttctataaataaagacggttgctcatgg

SEQ ID NO: 6015 - DNA, 600 bp, Rattus norvegicus
gtctgggccgtgtcttcccccatgacatcaactggaaacaaagtggatccatttatagatgcgtcccaggccagcagaggagcctctgcccgtgcttaattgttccgcctgsactgwsscaagagccccgtccttcacacagctgttaccagagctcggcccagcctagcacaggtgtagcaactagcaggtgacttcagtcccctctgctctcggctgctcttggtcccaggtgcccagccttcctgcagccctgtgtcctgccctggactcaggctctagcatcagcagtatctgcaagggatgttgtttagggagcaggctgatgaccaagccctgagtcacctcwcacgcaccacaccattcagactcagaggaagacacatcacaggtgtacctggcagagtctgctcctcttaaggtagggcatcccaacttggcctgaactgagctcaggtctccagytcccaagggcccctcccgccagaagcaaggcctgtaggttttgcttttgtttttgttwtattttgcgctcttttcactagatacaagcccctggcatgtatttatttattttttwattaaagtwagatgaaatgc

SEQ ID NO: 6016 - DNA, 1400 bp, Rattus norvegicus
gtctctacataggagcagaacatgaagagacagagctaggggcaagcaaggcagatcctagaggccttggactctgtgtggggctgttgaagagtctctcttgatggctggatttaaatgtgatgatcctcagaggtgccagctctaagagctttacaggaacaacggccagagaacttaacactgatggtaacacacgcctgcaatcgtggtagttgggaagcctgagctactgtgagctgtccagggcagcctagagtagagaaggagatcatggcagggatggactggtaggatggcgtaggaaagaatgagcagtgaagtgaatgagactggtcaaagcctgggtgttggccacaggcacagtggtaacccgggaggtaggtaatggtaggtcatggccctggggatggggtatctagaattcattatagggcagctggattccagtgcccactgccctgtgagggtgggaggatggtacatctctgggtgtcttcctggcaggagaatggtaaggatgactatgtgaaggccctgcctgggcatctgaaaccttttgagaccctgctgtcccagaaccagggaggcaaagctttcattgtgggtaaccaggtgagcatctcttgcattcccttttccttatggataaaaccaaggagccgtcatttgtaaaatggagcagagatatggggtgggggtgggggtcccttagctctctgccccccwgcctktyccagcyakkgakscmmacwcmtystgssymwscagatttcctttgcagattacaacttgctggacctgctgctggtccaccaagtcctggcccctggctgcctggacaacttccccstgctctctgcctatgtggctcgcctcagtgcccgccccaagatcaaggcctttctgtcctcccctgaccatttgaaccgtcccatcaacggcaatggtaaacagtagtggacgaagggacaggaactccttgtcccccttttcccagactaataaagtttgtaaggcmrarrwammwwrrmwrmwrtttcctagtgaaaggggctctgggaacttcaggctgggaaagggtagaagaccagaaagcttacacacaaggtgggaccaggacatcttcctgcttagtatatgctgaccttttgaaacagaaaggtgtgtgtgtgtgtgtgtggtggataggaagtaaaataaaccagcatctaatgaagagggtttcatgttgatttgccagtcagtcccaggaacactcacgacctgggtgcaggcctggtagaggattataaactattcaaagggcctctgcttggctggcgatgcatgagtgagtgtcaatctcccaaatgctgtgatcacagctgaggagtgtcatgctcaggttgtttctgcag

SEQ ID NO: 6017 - DNA, 336 bp, Rattus norvegicus; identical to SEQ ID NO: 1921

SEQ ID NO: 6018 - DNA, 600 bp, Rattus norvegicus
agcctccccctcaaatccactggataaaagatggcacacccctgccccttgcccccagccctgtgctgctcctccctgaggtagggcatgaggatgagggcatctacagstgcgtggcsacccaccctagccatggacctcaggaaagccctcctgtcrrcaysagggtcmcrgmamsmggtratswwssmyawgctscaggctctgtggatgggtctgggctgggaacgctagccctggccttagggatcctgggaggcctgggaatagccgctctgctcattggggccatcctgtggcgaaaacgacaacccagactcgaggagaggaaggccccagaaagccaggaggacgaggaggaacgtgcagagctgaatcagtcagaggaagcggaaatgccagagaatggtgcagggggaccttaagagcgcccaggcaaaccctgtctccttcagcttccgacctcagctgtgctggctccagacgagctcccccactctacgatcccaattcaacctcgagccactttcttctccaaccagagcccacatgatccatgctgagtaaacacctgacacwtgwwaaaaaaaaaaaaaaaaa

SEQ ID NO: 6019 - DNA, 600 bp, Rattus norvegicus
ctcagcaacgtcaccagggacatgctctgcatcaccgaggagacctttgggccsstggcgccagtcatcaagttcgataaagaggaagagsctgtcgccatcgcaaatgcagctgatgttggattggcaggttacttttactctcaagacccagcccagatctggagagtggcggagcagctggaggtgggcatggttggcgtgaacgaaggactgatctcttcagtggagtgcccttttggtgggktgaaacagtcgggccttgggcgagaagggtccaagtatggcattgacgaatatctagaggtcaaatatktgtgttatggaggcttgtagggttctcacttctttaataaattacctagawccatarrramawwmmawmmawwtttttacaatgaacaagtaggttatcagagttatgaatttttaaaaattcagccggtcctgtcttagatgtacaccctaacccttcccttatctaactaggaaccaatggacaccatatacctgtggctgtgggtcccagccagtgctgagaccccagcacaaccccactgcctccatacaaagtacagtgtgagtgttcacatgccctct

SEQ ID NO: 6020 - DNA, 560 bp, Rattus norvegicus; identical to SEQ ID NO: 1924

SEQ ID NO: 6021 - DNA, 600 bp, Rattus norvegicus
ctgagctctgtgggtacctttaagatgcgacacatgccagaggtgccagtccggattcgaataggtctgcacacagggcctgttgttgctggagtggtgggccttaccatgcctagatattgcttgtttggtgatactgtgaatacagcttctcgaatggaatcaacggggctaccataccgaattcatgtcagtctcagcacagtaacaattcttcggactctgagtgaaggctatgaagtagagcttcgtggaagaacagagctcaagggtaaaggcacagaggagaccttctggcttgttggaaaaaagggtttcaccaaacctcttcctgtacccccaccagtgggcaaagatgggcaagtgggtcatggcttgcaaccagcggagattgcagcattccaaagaagaaaagcagaaaggcagttggtgcgaaacaagccataagatggaaagaactccagcatttgaatctcctcttgacaaagcaacgctgaagctcattacagatcaaggatattcttcttcttgagcaagatattagtgaatgattgttcttctgaggttgcctaatgtccagggatgggtcaagcctagtgt

SEQ ID NO: 6022 - DNA, 600 bp, Rattus norvegicus
gcagagttctctcaggggccctggcagccttggccagggacagcgagggcaggggactggggaagggaacagaawgaggaggcagaaaccaggtgggggcagcaaggyrsgdkgagatggtctctaagcyttstggggccttctcytggcccgacgcctgtgaagggagrctgcaagcttttgagtctgacttgagggtgagagcaacaggaagttggggcttggggtggttggggcagggcagccaagctgctaggtgggggssgagagagattaatatagcgactgtagttatagctaagacttaactggggaaggggtgctgacttctggaacrctgggaccaggaaggggacaaaccctaggcccctgtctgcactgggggggaccaggtcttgctccaccttgacccctggggctggagcctgtatctaccctccacgtggagcaagttaacctttttcatgtaaagttctttacaataaaatttttttttcaaaataaaatwaarrvvkdwawwwmawwwwramwwatcaaacagacgctgcattggaatgtggggttgtttcttttgtgatcttcagatggtgtcattccccg

SEQ ID NO: 6023 - DNA, 577 bp, Rattus norvegicus; identical to SEQ ID NO: 1927

SEQ ID NO: 6024 - DNA, 1400 bp, Rattus norvegicus
gtggaccaggagggaattccagctgcagcacggtaccgagcaaaaacagaggcgagtgaagcagctgcagttcactacctggccagaccacagtgtcccggaggctcccagctctctgctcgcttttgtagaactggtacaggagcaggtgcaggccactcagggcaagggacccatcctggtgcattgcagtgctggcgtggggaggacaggcacctttgtggctctcttgcggctactgcgacaactagaggaagagaaggtggccgatgtgttcaacactgtgtacatactccggttgcaccggcccctcatgatccagaccctgagtcaatacatcttcctgcacagttgcctgctgaacaagattctggaagggccccctgacagctccgactccggccccatctctgtgatggattttgcacaggcttgtgccaagagggcagccaacgccaatgctggtttcttgaaggagtacaagctcctgaagcaggccatcaaggatgggactggctctctgctgccccctcctgactacaatcagaacagcattgtctcccgtcgtcattctcaggagcagttcgccctggtggaggagtgccctgaggatagcatgctggaagcctcactcttccctggtggtccgtctggttgtgatcatgtggtgctgactggctcagccggaccaaaggaactctgggaaatggtgtgggagcatgatgcccatgtgctcgtctccctgggcctgcctgataccaaggagaagccaccagacatctggccagtggagatgcagcctattgtcacagacatggtgacagtgcacagagtgtctgagagcaacacaacaactggctggcccagcaccctcttcagagtcatacacggggagagtggaaaggaaaggcaggttcaatgcctgcaatttccatgctctgagtctgggtgtgagctcccagctaacaccctactgaccttccttgatgctgtgggccagtgctgcttccggggcaagagcaagaagccagggaccctgstcagccactccagcaaaaacacaaaccagctgggcaccttcttggctatggaacagctgttacagcaagcagggacagagcgcacagtggasgtcttcaatgtggccctgaagcwgtcmmaggcytgmkgccktatgaymccmrcactggagcwgtrtatctacctmkacaactgtctgaacagcscavtgctgaacgsgctgcccagagctgrgaagtggcctgcgccctghtaggygtcatgttscagcaaakccacccaggcctgacttccmtaggagagtggatccaccgggcctcacactgtccaagggcagagtccaggaataaagagacatggtcaaaaaaaaaaaaaaaaaa

SEQ ID NO: 6025 - DNA, 600 bp, Rattus norvegicus
cgtgtcagggccggtctgcattcagggccctgtgtggcaggtgttgtgggtctcaccatgcctcggtactgcctctttggggacaccgtgaacactgcttccaggatggaatccactggactgccatacagaatccacgtcagccgaaacactgtccaggccctgcttagccttgacgaaggctacaaaattgatgtcagaggtcagaccgaactgaaggggaagggcttggaggagacttactggctgacagggaagacaggattttgcagatccctccctacacctctgtccatccagcctggagacccatggcaggaccatataaaccaagaaatccggactggctttgcaaagctcgccagagtctgctgagccaggrgttcaggggacactgggccaggtcctgatagcaagtcggtgggaggtgccaaggcagccaagatgccccatcacccctgcctcctacgaatgtctgcctgccaccatgagtggtatgaggagctgctgtcttccctagtgactctgggggtgtccttgcctcctgtcaggaaaacaataaaaatggaaatactcccttccaaaaaaaaaaaaaaaaaa

SEQ ID NO: 6026 - DNA, 600 bp, Rattus norvegicus
ttgctaaagtgaaaaaaagctattgcaccttttagcaaatactaccaaactggcattgagttctataaaararwwmwwwwrmmmmwrwmarwmawwrwmttatatgcttagcatagatttgcaactaagtagtatatgtgttcctagaatgcagctgaagacctgttacgtagaggaaatacgaggggtggtgttggaacacagccgccacctgtggaatgattcacatcctctcaagttaggaggatacaggcctgcttcattaagaagctattagggtgggggtggggagaacacttaacaacatgtggggtggggagcatacttttaaccggaacatggggaccagtcagggctgtaccctttttttcttccatcctatagagaatcttaacaactggctgaagctctctcaaatgcgagagattcatcaccttataacacctttatagtgtactttatcagattttgtttgcaagttccagtttttaaaaatgttaggtactctggggagtctgatctgtagatcgttagtccgacatctctcatgtctcatctagcgatcagcaccgcgcgtactagtgatcgagctcgtcagct

SEQ ID NO: 6027 - DNA, 600 bp, Rattus norvegicus
  misc_feature (586)..(586): n is a, c, g, or t
ccttgccagcctaaggtgccagagccttgccagcctaaggtgccagagccctgccagcctaaggtgccagagccctgccatcccaaggcacstgagccctgccaccctgttgttcccgagccstgccagcctgttgctcytgagccmtgccagcctgttgttchtgagccctgccccccaactgycactccatcaccataccagcagaagacaaagcagaagtaatattgyccatagccaagcytgaagatytgatcaccagatgctgaggstgcttwccatcytgcttatgagtcccattsccttgtgctacacatgctgtgacctccagtcttaatcctccatccttgcaccacctrrrrrgttgtctctcatcctcatcctcaagaagttctcgagccactcaacattacccaaagtctcatgaatggmtaatctttsgattcatytgaatgggggtggggaataagacaagtatatgwtcmatattcttcccctcwwwaaacaccttttadctcmaaaarrrrrrrmmmrrwammmaattcgccctatagtgagtcgtattacaattcactggccgtcgttntacaacgtcgtgac

SEQ ID NO: 6028 - DNA, 600 bp, Rattus norvegicus
ttttcccttcttttcgtacaaggaaatgagcacgcccatggacaagaccttggtactctgggcagctgcttacagcgattcaccacaatgccattcttattctgtaacgtcgataacgtgtgtaactttgcatcacgaaatgattattcatactggctgtcgacaccagccccgatgcccatggacatggccccaattactggcagagcccttgagccctacgttagcagatgtaccgtctgcgaaggtcctgcaatggctatagctgttcacagtcaaaccactgctatccccccatgtccccagggctgggtttctctctggaaaggtttttctttcgttatgtttacaagtgcaggctctgagggtgctggacaagctcttgcctcgcccggctcctgcctggaggaattccgagccagtccatttatagaatgccatggacgagggacctgcaactactactcaaactcttacagcttctggctggcttcactaaatccagaaagaatgttcagaaaacctattccatcgactgtgaaagctggagacttggagaaaatcataagccgctgtcaggtgtgcatgaagaaaagacac

SEQ ID NO: 6029 - DNA, 290 bp, Rattus norvegicus; identical to SEQ ID NO: 1933

SEQ ID NO: 6030 - DNA, 600 bp, Rattus norvegicus
ggaaggtgggcagaaagagacagtcaatggatagcttgggtggattgacagttggtgaacggccggtgcagcactcctttgtgcaaaatctacaggcacccttttcttccacggcatgggtagcccttgaaccaagggtccatggcttagggagcagattgtcaggtagactgcagtccccactcaccaccccccaactggcctccctatgtgtggcatgcctgcccaactagacaaagtggccacagagaagaaagcactgggtggaggtgggcacagatgtgggtgccctccccaccttcactgtcccataccgatgggtcagaaaggtgccaatggccttaatcctcaggttacaggcaaacaagcggtggaggtaaacccggagcaggggccctggagagggacctgaggagacccaaggacaactatttttcgagagagaggaatgaaaccttgcaggtactgccggagaagcaagaaggcagagagagattccgaaggaaaagaaaggccatgggaggggttggggatttagctcagcggcttgcctagcgagcgcaaggccctgggttcggtccccagctccggaaaaaaaaa

SEQ ID NO: 6031 - DNA, 600 bp, Rattus norvegicus
gtcacaggggccttcacttcagatgtgccattggaactctggaagggaggtgagttgggagacaggaaggcgtcgatgctagctatggtcacggtataaaaggccaaggcaagtggcatagacttagggctagactagaggggttggatatccccaggaagagaactcagtggtccgtgtgggacaccgtgagatgacactgcttccctagaggccagttgacatctatttcacaattgtgttcaaagtcctgaggcacagtcactcagtggcaaacacagggtctgagataatctttacacttgacttgattgggcagtcacctaagggatgtgctcggtgtgtgtctgtaaggacatttccacagagagtcacctgccttgactgtaggcagcgccatcccttgggcttggtcccccaattaacaaaaggagaaaactagctgagcacccacagttcatctgtctgctaagcttacgactgtcccagttggatacagtatgacatgggcaggtgtccctcctcacccatgagccccacttcaatagctttcgtcaactattttgtcacagaagggggaaagcagttcttatggagctc

SEQ ID NO: 6032 - DNA, 600 bp, Rattus norvegicus
  misc_feature (367)..(367): n is a, c, g, or t
cctgscamgwksaagatgaagtactggggtgtagcctcctttctccagcgaggaaacgatgaccactggatcatcgatacggactacgacaccttcgctctgcagtaytcctgccgcctgcagaatctggatggcacctgtgcagacagctactcctttgtgttttmtcgtgaccccaatggcctgaccccggagacacggaggytggtgagrcagcgrcaggaggarctgtscctagagaggcaktacagatgsatcgagcacaatggttactgkcaaagcagaccctcaagaaacagtttgtakcaaystcaaggatgtataaagttggaaaacttstgmttagctctmawmmarwmwwmawmwnwatywatsytagaagkttagtttccccacctcccctcccttctytaggtggacattaaaaccatcgtccaaatacawrrraawrmhwraawmcattcacacaaacgtgtatcttactgagaagttcccygagagacgtttgaggcytgggatkccaaacttgatttattaaacgtatagtcmccmwmaaaaaaaaaaaaaaaaaaaaaaaaaaagtgtggctgccgcaagctt

SEQ ID NO: 6033 - DNA, 1400 bp, Rattus norvegicus
acgacttggatttcaagtctccygctgacccttcccgatgcatcactggggaccagcttggggcactctaccaggactttgtccggaactatcctgtggtctccattgaagacccattcgaccaggatgactgggcagcttggtccaagttcacagccaatgtcggcatccagatagtgggtgatgacctgacggtgaccaaccccaagcgcatcgagcgggcagtggaggagaaggcctgcaactgtttgctgctcaaggtcaaccagatcggstcagtcacagaagccatycaagcgtgcaagctkgcccaggagaacggctgkggggttatggtgagtcatcgctctggagaaaccgaggacacgttcattgcagacctcgtagtgggactgtgtacaggtcagatcaagactggtgccccatgcagatctgaacgtctggcgaagtacaaccagctcatgaggattgaagargavytskgsvasraggctcgcttcgcgggacacaacttycggaatcccagtgwgctgtgaccccmtgcttgcctgaacaccggaacatcatctcattctcctggagcctctttcttgctgtcccgaccygccatagttaccttgataccttgagccccaagtcacccagaacacctcgactcacctgctctggctgttcttggcttccacaaccccttgctgtctcctactcttcctcctctctgggccccatttttggggggattccagtctgcccactttcccttctattctctctaatcttaaaaaaaaaaaaaaaaawgrcgackakaagaagcgggtccacagaagaaccgccagcgtccgasaggagcttcaggattggtgtgttggggcgtttaaagtggggccacgtggcacgtgtgcttccctgccatccatggtgtgttaagccttgaactatgcacagagctggtgtttggggarwgstgratrwgyktgygkycrcawwkgwttktttktttwtttwtttattcacttawttatttctcagcctgtcagtcgtctgccattactcttacagtctgaaagcatcagtattttyacgtggttccatttcaagatgacctargatgggaggttttgttagcatgggaaaggtcacagaaaggttagcaatggtttttcatttggtgcactaactgaagctcgrtacwtkacagaatggggctgtrwaccckgrgacwkttctcmtataactctctcccccagccstaggttcctcagystktttctccggbtgcaccagagcgmtgcctcawtcccccgtgccatgtcccacagttgccactgtctctgtggctttgraatgaccaccactattaaagtctgaaycacmstgyrcvscaaaaaaaaaaaaaaaaa

SEQ ID NO: 6034 - DNA, 1400 bp, Rattus norvegicus
ttctaccttttctggcttagtaagttatgtgttagccttggcctatcggtaacatggtgtggaaatcatatgcaattttaaaattttttatatttttgcaataaactacatttcaacttctttgacaactgtcagccagcagcctgggtagttgagtggcttttggggcctggtaatttagctgttgtgatgattgggcagagagccttttaggatgaaagctcataactgcgtctttcattatcctttctccatcatcaccgcttcccgctttgtatttagcaacctcctgggttccttacagatcgcattttgacgtttaatgtcacaagggttgtattggttctcaaggcaatttcatcttaatctgacaatttgttttgtcctctaaaagtcccgaatcttctattcagaaaaatgaaagcttccctatcaaaagacatttgggattcttagcccacgcccacagaacatggctttgctctgtaggtcccagtgctgcgaccctgtgtgtgtgtctgtggtcccctgcccttccctgtcctgagcaccagccagcgagcacattggtcagcagccaatcaagtgcgtttgccctttccaaccttcaaaaacttcaacaacggtggtggaaagaagtctgtgtataagcaaagccatacatgagtattaatgggatttttctctatcctacaccttattaggccttgttcttagctttaaagtcagcccacagttaaaagtacacaaagtacaaaattttttttggtcaacaagatacttacttttatgccaaatacgatgaattgttaaaaccaaagcaatatacttttatgtgattttcaggccccttgaccaaatgtctaaaggcattaattctcaccagtttaattcatgttgaaatgggtaattttactttggggaacatgtttctaaggaacagaggtatcatgtatgttaaattcatctgtgactgtctcgatcttacaagagaatgtttacagtcctacgtgtacgctatactgtwaccwacacctttagccgtgcttttgaaatgtcagtcttgcaaaatctttamgtaggaaaaaaagctctctacatgaaggtaacatgttttytatttcagagttcagaagccatgtgttcaaacaagaaacaaatcccaaaaacagaaaawcaagaacaaaagccwcccaaattcckggctcatccttckgtgttcttttctctcttttccaagttctctttggttgcattgcataggytgagtgttgacgttcacggaaaccaatgcctgtggaataaagagccccaaccaaggctacagaggccagctgtgttattttcagtattgttggttatatttaaattttccttataataaagcacacttttataat

SEQ ID NO: 6035 - DNA, 418 bp, Rattus norvegicus; identical to SEQ ID NO: 1939

SEQ ID NO: 6036 - DNA, 1400 bp, Rattus norvegicus
actctgatctgaagaaatctgatattgatgagattgttctggttggcggatctactcgaattccaaagattcagcagttggtgaaagagttcttcaatggcaaggagccgtcccgtggcatcaacccagatgaggctgtagcatatggtgccgctgtccaggctggtgtcctctctggtgatcaagatacaggtgacctggttctgcttgatgtgtgtcctcttacacttggtattgaaactgtgggaggtgtcatgacaaaactgattccgaggaacactgtggtgcccaccaagaartctcagatcttctccacagcttytgataatcagcccaccgtaacaatcaaggtstacgaargtgaacgacccctgayaaaagacaatcaccttctgggtacatttgatctgactggaatccctcctgctccccgtggggkamcccagattgaagtcacctttgagatagatgtgaatggtattcttcgagtgacagctgaagacaaagggacaggaaacaaaaacaaaatcaccatcascaatgaccaaaaycgcctgacccctgaagaaattgaaaggatggkcaatgacgccsagaagtttgctgaggaagacaaaaagctcaaagagcgcattgacmcgaggaatgaaytggaaarctatgcywmctctcttwagamccagatcgragaymaararrwgytskraggtmarctktctyytgarratammgrvacsakgraraaagctgtagaggaaaagatygaatggctggamagccaccaggatgcrgacattgaagactttawagcyaaaaagaaggaactagaagaaattgttcagccaattatcarcaaactctatggaagtggagsccctcccccaastggtgaagrggatacatcmgaaaaagatgagttgtaggtgcactgatctgctaragctgtaatattgwaaawactrgactcaggaactttcgttgggrgaaaattgrgagaacttaagtctcgaatgtaattggaatcttcacctcagagtggrgttgaaaatgctawwrcccaagtgsctgkttamtgcttttcattarcagttgctcacgtgtyttggggtcagggaraggaggaattggctattttaaaaktggggaaaagytgggtcagggtgtgtgttcmccttggatatgttytatttaacggwtggktcatgcacatytggtgtaggaacttttttytaccataagtgacmccawtaaatgtttgttwtttmmmmwrrwmwarwwwwwrwraaaarmwtgtaattawatccatcttttattttagataactaaaatttaagrctggaaaaaaaaaaaaaaaaaaaaaaaaaaaaaaaaaaaaaaaaaaaaaaaaaaaaaaaaaaaaa

SEQ ID NO: 6037 - DNA, 600 bp, Rattus norvegicus
tgcttcccatttgcagcagcaagaaggccggtgccacggccaagggcaaagtcggcgggcgctggaagtaaacgagccaagaggtgccctgcagcagagaccatcaaccctgactcttgccagggtcccttattccagctctgtattctccaaccctcatgcccaggcacttttgggaactcagggcccaccctgctgcaatgtcctcgcctctggggtctagaaataaagttatcagactcccctcttctgtctgtgtgttgtgttatcatgcacaggggacctggagaggttgggaggtagtgctgcaggacaggagcacatggggagtgcgcctcagacagccccgggaaaactgaggtatcttactgctactcagaacttggtctgtagcctcaaaagtcagagactttttattcctaggccctctttgtccccgatcccagaacgagccctccagttagaaaagactgcctgagcagcccaaaaaacagcactgtttaaagaagaaacagcccagcctcgggagggttagggaggaaggctgggactgcctggagacgttgcagacacccgaaagggggggagcgaggggagctc

SEQ ID NO: 6038 - DNA, 600 bp, Rattus norvegicus
gtcttcacatctcttctacctggcactctgcttgctcacctttaccagctcggccacagccggaccagagaccctttgcggggctgagctggtggacgctcttcagttcgtgtgtggaccaaggggcttttacttcaacaagcccacaggctatggctccagcattcggagggcaccacagacgggcattgtggatgagtgttgcttccggagctgtgatctgaggaggctggagatgtactgtgtccgctgcaagcctacaaagtcagctcgttccatccgggcccagcgccacactgacatgcccaagactcagaagtcccagcccctatcgacacacaagaaaaggaagctgcaaaggagaaggaaaggaagtacacttgaagaacacaagtagaggaagtgcaggaaacaagacctacagaatgtaggaggagcctcccgaggaacagaaaatgccacgtcaccgcaagatcctttgctgcttgagcaacctgcaaaacatcggaacacctgccaaatatcaataatgagttcaataccatttcagagatgggcatttccctcaatgaaatacacaagtaaacattcccggaattc

SEQ ID NO: 6039 - DNA, 1328 bp, Rattus norvegicus; identical to SEQ ID NO: 1943

SEQ ID NO: 6040 - DNA, 600 bp, Rattus norvegicus
gtcatatctggatggggcaactgggaaatcatgctaagctgagacagattccagggcactgagtcaattagtgctggatcatatggtcaaactgtcaagagcccacccccacccccaggtcacacatcaaatgagtggcagcagcgttcctctctcctctacaaggagggaggtgtggatccaagggaggaaaggtggtggtagggaccttggtgatctatacaggcctcagtgacaggtgacacaagcaagcaccctcattagtccccaaggagagcattccagactggcagtagcctggaccagaaagactcttgactaggtgaggcakagttcaaatgagtcacctgggttctcttssstaaccccagccctgtgggtccctgggagagataacacccaaggggccctggaagacatttttgtwaatgttctgctctttccactaattgttgggagcacttcttacgtagccctccgctcccctcagtacatctttccccatcctcccacccccaacaaagctccctggcaaactccctgggaaggggcttttatatattaaaaaagaggcttttattggaaaaaaaaaaaaaaaaa

SEQ ID NO: 6041 - DNA, 600 bp, Rattus norvegicus
tgccacgtcacsgcaagatcctttgmtgcttgagsaacytgcaaaacatcggaacacctsccaaatatcawtaatgagttcaataccatttcakagatgggcatttccstcaatgaaatacacaagtaaacattcmramawwrwmwwwarrarwrwwwrwtaaaaaaaaaaamaaaaaacaaaaacaaaaacaaaaaaaaagcttgcaccttgcaaaagtggtcctggcgtgggtagattgctgttaatcctttatcaataacgttctatagagaatatataaatatatatataattatatctcctagtccctgcctcttaagagccgaaaatgcatgggtgttgtagacattcggttgcactaaattcctctctgaattttggctgctgaagccgttcatttagcaactgtttataggtggttgatgaatggttccttatctccatttcttcctatgtagcttaagccgcttccttcacagaatctaataatctcgtctaggccattagccctgccctttcttaacattcttgtatttgttgaatttggcctcctcgaaagcaatagcaactgggtggcccacccaagttttaacgccc

SEQ ID NO: 6042 - DNA, 1103 bp, Rattus norvegicus; identical to SEQ ID NO: 1946

SEQ ID NO: 6043 - DNA, 1400 bp, Rattus norvegicus
tttcaagggtttgtggaaatcccggtttcaacctgagaacacgaagaaacggaccttcgtggcaggtgatggaaaatcctaccaagtacccatgctagcccagctctccgtgttccgctctgggtctaccaaaaccccaaatggcttatggtacaacttcattgagctaccctaccatggtgagagcatcagcatgttgatcgccctgccaacagagagctccaccccactgtccgccatcatccctcacatcagtaccaagaccatcaatagctggatgaacaccatggtacccaagaggatgcagctggtcctgcccaagttcacagctctggcacaaacagatctgaaggagccactgaaagcccttggcattactgagatgtttgaaccgtcaaaggcaaattttgcaaaaataacaaggtcagagagccttcacgtctctcacatcttgcagaaagcaaaaattgaagtcagcgaagatgggaccaaagccgcagtagtgacaactgcaatcctaattgcaaggtcatcgcctccctggtttatagtagacaggcctttcctgttctgcatccgacacaatcccacaggtgccatcttgttcctggggcaggtgaacaagccctgaaggacggacaaaacaaaagccacgcaaagccaagatgactttgctccgaagagagactcccttccccacatctttcatagttctgkyaarkatttttawacactgctttccttttttgaaactggttcatggcgacagttaagtgacacaagtgtttctggtcagggctgtgtcagaagaaagggcaggatggctgggatgctgtacggaagaacgaakaggcgggtttcaggacgtctagaagatttctttaaaytactgatcagttacctaggttaacaaccctctcgagtatttgctgtctgtcgggttcagcatttttgtyccgttcttgtgtatatgtgtgacgttccgggasaggtttaatcagtgtgatagraggggggaaaaagacatttwatagtagtttttwtktttttayggamrrcagwrkcatttgcctttttwwttyyktttctctcacttccacccgaaggccrgaaggtggtgaggtggtgagggrtggagctagaaaagccgtagcctcttcgtgtgttgtttcygttgctgttgctatcgctgttttatatactgcatgtgttcactaaaataaagttggaaaactaamrwmwmrvwrramamaatttgctgtcgagccacgtgcctgtcactactggtctgtactctttggattggcwttkwtttttgtattttgtataaagtaaaaagaaatwmamgtgkkccrmgtagtaaaawwwwwaaaaaaaaaaaaaaaaaacgcctcgtgccg

SEQ ID NO: 6044 - DNA, 600 bp, Rattus norvegicus
ccatgtgactttactggctcactgaggcagtgcatgcatgtcaggctgcctttatcttttctataagttgcaccaaaacatctgcttaaaagttctttaatttgtaccatttcttcaaataaagaattttggtacccagctcttgttgtgattgaggatgagcgcaccagcttcccttgcgtcggctatwtwwyywywytkywwygcctgaaagaatatttattaaactcgtagttggggaaagatagtgaaagacaggtgtgttcagacaggactaagcagtcctggttctgagttacctgccagactgccatgggaacatattcttgagtgtcgctgctgtgtgcctctgactgggtcagtgccctgctggcatccatgcaggtgagaaccaagctgtgaagcatcacttataggaaacaggattggtgtcagctttatcactgtgggagattggagagtattcatagcatgagttgactgaggacaaagttggaagctggccttaacagaagtttatctagcactagaagcaagttggaaatttttgcccttctacttaaaaagatgttctggtcacggatgaaatgggatgtgaaa

SEQ ID NO: 6045 - DNA, 1400 bp, Rattus norvegicus
tgttgatcgacgatgacgtggagtgcaccatggtggagaagcgggtgctggcgctcgcctgggagaatcccttcctcacccatctcatctgtaccttccagaccaaggwccwcctcttctttgtgatggagttcctcaatgggggcgatctgatgttccacattcaggacaaaggccgcttcgaactctaccgggctacgttttatgcagctgagatcatctgcggactgcagtttctacatggcaaaggcatcatttacagggacctcaagctagacaatgtaatgctggacaaggatggccacatcaagattgctgacttcgggatgtgcaaagagaatatatttggggagaaccgggccagcacattctgcggcactcctgactacatcgcccctgagatcctgcagggcctgaagtactcattttccgtggactggtggtcttttggggtcctcctctatgagatgctcattggccagtcccccttccatggtgatgatgaggacgagctctttgagtccatccgggtggacacaccacactacccgcgctggatcaccaaggagtccaaggacmyyrtggagmagctcttcgagagggaccctgccaagaggctgggagtaacaggaaacatcaggcttcacccctttttcaagactatcaactggaacctgctggagaagcggaaggtggagccgccctttaagcccaaagtgrwatsyccttcagactacagcaactttgacccagagttcctgaatgagaaaccccaactttccttcagtgacaagaacctcatcgactctatggaccagacagccttcaagggcttctcctttgtgaaccccaaatatgagcaattcctggaatagtgagctcccagacctgcttttaatgccccggcagagtaggcccatctgccctggtttgcatcckcactgcccatgaagaagagtgggtgactggtgattcctgctgctgccccctcttcctcggagagtctggctcctgttggctgggctcacagtacttcctctgtgaactgtttgtgaatttgccttccttttgccatcggagggaaactgtaaatcctgtgtgtcattacttgaatgtagttattraaatatatattatatatatgcacatatatataataggctgtatatattgctcagtatagaaagcatgtaggagactggtratgtgttgacctttttttaaaaaaaaccatatgtatacgtgtgtatgtatacatctacacacgtatacatatatgtatgtatgtatgtatgtatgtatgtatatatgaccaaaagaaaagagagcacaagctacctgaaccacaggattgtttatgtgtgtataaataaacactgaatggtmmmaaaccggaattc

SEQ ID NO: 6046 - DNA, 600 bp, Rattus norvegicus
cagaatgyctcgaastattcgtcctccccagagccccagtcccacatctgctctcttatttattgcatcccctcatcccaggccctgtccttccccaccctcccagtgaccagaaggccctctttggtccagactcaccaagatcacagattygaactgcgtctgctctgtgtgcagtgctaggtctggagtagccgtccacccacaaccctgaagcagcyysgarttcttttattacaaagaaaaaaaacccacgaaaactctggctgtgcccactggacatggmatcttgactcctcccttctctcattcctcctggcccgccattcctgcccggctacctaagagaagagaccagagtttcttccacaagggctggtgccccgaggcacgcccttcatgggargatcctggggatgctcargctgtccaactgtggcggtttgctctggaattgcacattcctscttgctttggwtttagctttttttgagcatgccmaagttgtgtgcgtttgtatmtcatggamgmmmtcgytttgattttgaactcttaacatttaaaatargaaaaaaaaararraaraaaaaaaaaaaaaaa

SEQ ID NO: 6047 - DNA, 600 bp, Rattus norvegicus
gccattttatatcctcaagccccagatgccatgggaactgtgggacatcattcaggaaatctctgcagatctgattcagccaaatcccccatcctccggcatgctgggtatcatcatcatgatgacgctgtgtgaccaggtagatatttacgagttcctcccatccaagcgcaagacggacgtgtgctattatcaccaaaagttctttgacagcgcttgcacgatgggtgcctacgacccgctcctcttcgagaagaatatggtgaagcatctcaatgagggaacagatgaagacatttatttgtttgggaaagccaccctttctggcttccggaacattcgttgttgagtacctagccaggcacccttatccttctccatacgtcattttatggctactctcctggttaccgctgcttgaaggagtgtttttattcaacaggcccagcctgcttcctgcgctctagggaattttgttggcaagagttctggggcctccagcctgcctccctggggccaccgaggatgggagtccagattcttgccacactcattcctcctagacagcgtcctctcctccttctgcatgggtagggaaag

SEQ ID NO: 6048 - DNA, 240 bp, Rattus norvegicus; identical to SEQ ID NO: 1952

SEQ ID NO: 6049 - DNA, 1400 bp, Rattus norvegicus
gtacaaggagagaacgcgggaagagagtttgatactcctctgtgatgtccctgccgggcctaccagacatgcacggctgcttgaactccatcggactctaaagacaaagatcactgcccgggccatcttcctgagaaacatcccttagcctgaaatccacaccaaagggagagttccagaaggatccgtgtgaaggtcccataccctggtcccttgtgtcatgtggaaactattgtggtcttagagagaagggtgcatgtatgcaggatttttcttttcgttccaatagtaaattaaaagcaggcagctccaggctccatggactatgtaatgaaggacaatgtcttctttgaagaaaactagagctcgtgtcttcgtttgaagccctggtgtacagtatttccaagtaaaagagagagtttgagaagtgcgcggcaccatttaacactctggaacattccactctgagcattgtttccctgactgccccgcaaacccatgttttcaagttaacgtgtatagtgcattgtttcaccctttgctttgcaggcactggtggcttgccatttgctaatttatttatcccagaggcatctgtatttgctattgacatggctttattagataccatagtgactcatataagctggtttcttttataaaaaaaatcacatgactgtatcatttcccagtgaagccattttacgattagcaatatgggttgtatatttggctgcacgtctttggatatctatcggttgttgacctgaggctatcaaacagctgcaatgggtttgttctgttgagtcagggtttccgccagactgaacaggatccagtgggctattttattgtcagatattttttcgtggttcatttatttttactgtagaaaggaagatagaatatttatctaaatgcacatgtataaatgatatacattatctccatgtatatagtacatgtatgcacccagccatataagtgcacacacatacatacgcatgagtgtacatgtgtgtttattaattggcagtgacccaaatctcttccataagatttaaaagcaagttcagggatacatggacagagaagaaatgggtcgaatatatgttatgtggataattaaattatacggaaatgctaagaatcagtttatggagtcaatgatgcaacttgaggtaatcttagaatttagaaaatgagtttactaaaaaaattggaggatcaaaaattggattttaagtatcagattttgagcttgttttaatggtcagtgtatgcaaaaatgcataggaaatagagtgcaaatgtattactactatcttcaataaattttaactgaataatttcaattttatactgatagaaataaagctctggttgtatttaaaaaaaaa

SEQ ID NO: 6050 - DNA, 797 bp, Rattus norvegicus; identical to SEQ ID NO: 1954

SEQ ID NO: 6051 - DNA, 1400 bp, Rattus norvegicus
tccggacacccccaggtgtactactatggtgtagaagaaaccgaggacgagtccgatgcccagcaggggcaccagcagcagcagcagcagcagcggcagcagcagcggcagcggcagcagcacgaacaagaacgagaacatgaacagcagcagccagagtccagccagaggcagcaggggtccagtgggagaacgcaacgtgcagctcgccatgaacaggatagcgacagcaccaggcaacggggctctcaccaggcgcacagctccgctcgcacccaggaggagatcgcacgcggaaggtctggagccactgcaagtgagggtccggggccccagagggaggctgccagggacagctctgagcacgcccagtccagaaggaccgagaccagcagccgtggacgctcaggacactccactgggagagcccacgaagaccgccaccagcaggcaacagaccgctctgcccgctccgggtccaggggaggccaggccggctcccacagtgagagcgaggcctccggtggtcaggccggccgcagaggcactgcagccaccaggcacacatctcgccccgaacagtctccagacactgctggccggaccggatccagccgtggacagcagtccgcccaacgacatggtgactcaaccccgggcagcacaagaaccggctccagaggaagaggagagtccccagctggccagcagtcccccgacagagccaggcacatcgaatccaggaggggtagaacccgggaggccagcgccagccagtccagtgacagcgaaggccattctggagcccatgccgggatcgggcaagggcagacctcaaccactcacaggagggcaggctccagctcagggagccagcaggcctctgttgaaggttctgatggctatgattctgttgttaaatctaaatatcttagttttagtcaatcatattgctattattattaacaatgagagcagtttgcaacaattaattgctgaaatataacctcacatagggattgttcattttagtatttgggtttttggttccttattctccttaattcatatcaggtatttccttttcctttatagttcctttactctatcatattttgagcctaaatcgcttaggatcaggaatttaaattttaaactcatcttgtttcctatcacagttctttctttcgtctttaaaatgtttaaattggttcactgaagactagacacaattttacccaaaaattttaaaatactcaaaaatttataatgagtcttttgtatgcataatgccctgcctgcactatgaatttatcatgtctatcctttgtactttcttcttcactcattctttcccattggacatttctgataaaccaaattaaaattgtctaataaat

SEQ ID NO: 6052 - DNA, 686 bp, Rattus norvegicus; identical to SEQ ID NO: 1956
  misc_feature (19)..(19): n is a, c, g, or t
  misc_feature (34)..(34): n is a, c, g, or t
  misc_feature (44)..(44): n is a, c, g, or t
  misc_feature (85)..(85): n is a, c, g, or t
  misc_feature (161)..(161): n is a, c, g, or t
  misc_feature (209)..(209): n is a, c, g, or t

SEQ ID NO: 6053 - DNA, 600 bp, Rattus norvegicus
cactttgaaaggggatcctttgagctgtgacggagacagtgatgtcatcacaaggccactctccaccttaagagatacagagctcctggagacttcagcctgagtttctcaagcttgtgtggattttctatgagtaaagccactgcttcatcttgccatggccaccaggttcctttgctacctggtcctttgtttcttgagagcaggtgagtttccagagataaagaatcttcagcttttgatcattgcttgtcatggttacaattacgttctttattctctattctgtttctttttagaaccaacaaatgctggtgtcatccaaacacctagacacaaggtgacagggaagggacaagaagtaactctgagatgtgagccaatttcaggacattctgctgttttctggtacagacagagcactgtgaagggactggaactcctgatttactttaacaaccaagctcctatagatgattcagggatgcccaaggaacgattctcagctcagatgcccaatcagaggctctccactctgaagatccagaccacacacccccaggactctgcagtgtatctgtgtgccagcagcttagacac

SEQ ID NO: 6054 - DNA, 914 bp, Rattus norvegicus; identical to SEQ ID NO: 1958
  misc_feature (26)..(26): n is a, c, g, or t

SEQ ID NO: 6055 - DNA, 740 bp, Rattus norvegicus; identical to SEQ ID NO: 1959

SEQ ID NO: 6056 - DNA, 600 bp, Rattus norvegicus
aagtcaaagcttttattacccttcacagctattcccaactgcttatgttcccctatggctataaatgtaccaagccagatgactttaatgagctggtgagttcctacattgttattttgagcttaatggccacatctgttgcgtggacaagtgaagttccattcataaagttagatacggaggtggaggaatgtcagtgacaggctactaaggtaaccagacacacacccaacgcagactaggctcactcggtaagtagaattcattatttggccactggtctccttgtttagaaacagaaagggaaataattttggtggcctgagaaattactcggcgggtccaactatttgtttcctgacagcctgaactagtccctgtgtctctcatggttggagagaaccaggtcctgtgtgagctgtcccctgacacagacacattaaactaaacaaatgtagctttaaattttgtaggaagtaagctggagagatgtctcggctgtgaagagcttgcctttacagaagatggctgcctcttccaggggactgagttaagtccaagcaatacatggtagcatgcagacatagaagcaggaaaaca

SEQ ID NO: 6057 - DNA, 503 bp, Rattus norvegicus; identical to SEQ ID NO: 1961
  misc_feature (419)..(420): n is a, c, g, or t

SEQ ID NO: 6058 - DNA, 524 bp, Rattus norvegicus; identical to SEQ ID NO: 1962

SEQ ID NO: 6059 - DNA, 426 bp, Rattus norvegicus; identical to SEQ ID NO: 1963

SEQ ID NO: 6060 - DNA, 1319 bp, Rattus norvegicus; identical to SEQ ID NO: 1964

SEQ ID NO: 6061 - DNA, 536 bp, Rattus norvegicus; identical to SEQ ID NO: 1965

SEQ ID NO: 6062 - DNA, 600 bp, Rattus norvegicus
tgctcaatgccatgtttgacwtcagcgagaagctcaactctstggcgmttactgaggaggagctgggccttttcacggcagtggtacttgtctctgcagassgctcgggaatggagaattccgcttcggtggagcagctycaggagacgctgctgsgggctcttcgggctctsgtgctgaagaaccggccctcggagacttcccgcttcaccaaamtgmtgctcaagctgcyggacctgcggaccctgaacaacatgcattccgagaagctgctgtccttccgggtggacgcccagtgacccgcccggccggccttstgccgytgcccccktgkacagaatcgaactctgsacttctctctcctttacgagacgaaaaggaaaascaaaccagaatyttakttataktgttakaaratwttmyaasmtragmctstrrmymmctgagccttcyysbwaakaavwvktyccccccacccccatgstcccttcctcccgtatttaaaccactcttgctctcccaccctcctctggcccstcgatttgttctgttcctgtctcaaatccaatagttcmcwgctgwraaaaaaaaaaaaaaaaa

SEQ ID NO: 6063 - DNA, 600 bp, Rattus norvegicus
ggcgccatcattaatgaaaaatggattgtaactgctgcccactgtcttaaacctggtgataaaattgaggttgttgctggtgaacataatattgatgagaaggaagacacagaacaaaggagaaatgtgattcgaactatccctcatcaccagtacaatgcaactattaataagtatagtcatgacattgccttgctggaactggataaacctttaatactaaacagctatgtaacacctatctgtgttgccaataaggaatatacaaatatcttcctcaagtttggttctggttatgtgagtggctgggggaaagtcttcaacaaagggagacaggcttccattcttcagtaccttagagttccactggttgaccgagccacatgccttaggtccacaaaattcagcatctataacaacatgttctgtgcaggttaccgtgaaggaggcaaagattcatgtgaaggagatagtgggggaccccatgttactgaagtagaagggacaagtttcttaactggcattattagctggggtgaagaatgtgcaatgaaaggcaaatatggaatatatactaaggtttccaggtatgtcaactgg

SEQ ID NO: 6064 - DNA, 600 bp, Rattus norvegicus
ttcttccttccgcattcgccatcgascccacgaccagctaaggttacgcataggcgtccatactgggccagtctgtgctggggttgttggcctgaaratgccccggtactgtctttttggagacacagtaaacactgcttctcgaatggagtctaatggtcaagctctaaagatccatgtctcctsgaccaccaaggatgccctggatgagctaggatgcttccagctagaactccgtggggatgtggagatgaagggaaaaggaawaatgcgaacttattggctcttaggagagcgaaaaggacctcctggactcctgtaaatcccaagcagacaatttcttgctgttggtacttggatgggcaatggtcactgtgtctccacttgacagaaacagacgtcatatgagatggaaaatatgcatatacacaatccccctgccttatctggaagtcatataagccctctgccgctcagccttgtacatatgcctgcccctccctatcttggtcctcttcctgccttctgtaaatacctgtatctagaccagaatattttgtccaagtataaaacaacamcavcaaaaaaaaaaaaaaaaaa

SEQ ID NO: 6065 - DNA, 600 bp, Rattus norvegicus
ttgcyttcatgcctttttctgcagggcccaggaattgcatcgggcagcagtttgccatgaacgagatgaaggtggtcacagccctttgtttactgcgctttgagttctccctggatccctcaaagatgcccattaaggtcccccagctgatcttgcgctccaaaaatggtatccacctctacctgaagccgctggcttctaggtctggaaagtaggtcttcagagaactaggcctgggcagcacaagccgtgactcttcctgggatgttgccctcctagatagaatgtggagtcatcatggatccctgcctgtggraggytttggaggcaaaagcatggacactgacagtctcctggaagacattctcttgtaaacatgtgtgtggaatgattcaacgcccaggctccagaacttatttcttcactccacaacatttgctgaacgttttgctgccttgagaaactccattgatttcacatagctacatttatttaaccatcttggtgtgtatttggaatacgatggacatgaggaaaattgctcaaactaaaactgtacaaaataaataatactttaaaaagcaaamwmmmammammaaa

SEQ ID NO: 6066 - DNA, 1241 bp, Rattus norvegicus; identical to SEQ ID NO: 1970

SEQ ID NO: 6067 - DNA, 600 bp, Rattus norvegicus
gagttgccgcccctgtatgcagctgacagagatggcctgaaggagcaactgaggggatacatccgctgggaagaagctgcaaggaatttgcttggcctcctcgaagcckcgrggaacagaagccaccagccacctcaggatcagcctctgggcagtctccagcctacttgggatccagaggatggcagctacttcagtgatgctcaaaatgctaagttggtagactctctgctccaggttctcaaggggaaggaaggaactgccagctgaagggaccatgacaagggcggcttccaaggagcaaaacaaaaccccccagagactgccttctgcaaacattgattctactggaccatcaacaagattccctttgtgcaatttacgtaactattctcatgtcactcaactgcaactaaactcrtgatttttgagcagcatcttctggtttgaacctgtttctgtgaacaactacctaggaagagctttccagtgaacgctttttccagctaggcttttttgctgattggatttggggctcaatctgctaccattcacaataaaaagcttcagtaatcacactgtcaaaaaaaaaaaaaaaaa

SEQ ID NO: 6068 - DNA, 1400 bp, Rattus norvegicus
atgttctgwtsttgraggryygyktgggctcagaagtagagaatgcctgtgccarcccmgcksctgksastktsrtyykyctggagaamctccgctttcatgtagaggaagaagggaagggaaaagatgcttctgggaacaaggttaaagctgagccagctaaaattgatgctttccgagcctccctgtccaaacttggagatgtctatgtcaatgatgcttttgggactgcacacagagcccacagttccatggtgggtgtgaatctgccacagaaggctggtggatttttgatgaagaaggagctgaactactttgccaaggctttggagagtccagagcgacccttcctggctatcttgggaggagctaaagttgcagacaagatccmgctgatcaataatatgctagacaaagtcaatgagatgatcatcggtgggggaatggcttttaccttccttaaggtgctcaacaacatggagattggcacatctctgtatgatgaagagggagccaagattgtcaaagatctcatgrccaaagctgagaaaaatggtgtgaagattaccttgcctgttgactttgtcactgctgacaaatttgatgagaatgcaaagactggccaagctactgtggcctctggtatacctgctggctggatgggcttggactgtggtactgagagcagtaagaaatatgctgaggctgtggctcgagctaagcagattgtttggaacggycctgttgggkwatttgaatgggaagcmtttsccaggggaaccaagtccctcatggaygaggtggtgaaagccacgtctaggggctrcatcactatcataggwggyggagacaccgccrcttgctgygscarakggaacacarrggataaagtcagccatgtgagcaytgggggcggckccmgtytrgagctcctgraaggtaaagtccttcytggggtggatgctytcagcaatgtttagtattttcctgccttttggttcctgtgcacagcccctaagtcgacytwgtgttttccgcakstccatttggtkttagtgcagctagtggccaaracgcagcmccaggaaccywaagcagstgcacagcatytcagstygtytttactgcatcgggrttcatbtactagttcaagatcccvkywmrakkyckyagtgvctwwwwyywttktkywttkywgdgggcatmtwtttwtactctgccygtgaaaggaagtgrgctgtaaaagcttagctctmttcgctgtatgtagcctctggttagctytgtcactgttcatgacagcatggaamtaacgrtgrgattccagctgtaggtttkggrggytgatbatwttgaaccaataaaagrtcccmctgaaamdrvaaaaaaaaaaaaaaaaa

SEQ ID NO: 6069 - DNA, 1400 bp, Rattus norvegicus
ctggaggaactccatmwrsycwagggagstcccatagatcccaccttctacctgagtcgcactgtgtccaatgtcatctgttccgtcgtctttggaaaacgtttcgactatgaggaccagcgtttccggagcctcatgaagatgatcaatgagagctttgtggagatgagcatgccctgggcacagktrywtgatatgtactggggagtcatacagtattttccaggaagacacaaccgcctctacaacttgatagaagagcttaaggacttcattgcttccagggtcaagatcaatgaagcatcctttgacccctcaaatcctagggacttcatcgactgctttcttattawsatktwccaggatammwgtgacccacactcagaattcaacctcaagaacttggttctcaccaccctcaacctcttctttgctggcacggaaactgtgagttccacactacgatatggattcttgttgctaatgaagtaccccgakktrsaggsyaagwtccatgaggagattaaccaggtgattggaacacaccgtaccccaagagtggatgaccgggccaagatgccctacactgatgctgtcatccatgagatacagagattgacagatattgtgcctctgggtgttccccataatgtcatacgggacactcatttccgaggctactkyctacccaaggkkasagatgtgtatcccctgattggctcagtcctcaaagatcccaaatacttccgctacccagaagctttttatcctcagcacttcctggatgaacaagggcgcttcaagaagaatgatgcctttgtggccktktcywcwggwargygcatctgtgtcggggaggccctggcccgtatggagctcttcctctacttcacctccatccttcagaggttctccttacgttctctggtgcctcctgctgatatcgacatcgctcacaaaatctcaggctttggcaacattcccccaacatatgagctctgcttcatggcccgctgagtgcccacttcgagaccaaccaagagtcaattgagagaggagctctgctggagttcacgcacacccgatctccctccaaccctccctactcatctaagagaagtcgctctcattgctgtgctgagaccacgggtcaggagaggtgtctgcaaaaacatggctggatggtatcaagcagggttctagccacagtctcggtttcggagagccctgaatttctcaaccttggtctcggtgggcagcaaacttacagatgctgtgggtttacataatctattgactttgccctgatattgaccagaatgtactccgcaattctttcctgtttgcttttatttctcctccccaataaagaactcaagactattgaccatagcaagctt

SEQ ID NO: 6070 - DNA, 1222 bp, Rattus norvegicus; identical to SEQ ID NO: 1974
  misc_feature (397)..(397): n is a, c, g, or t
  misc_feature (1132)..(1132): n is a, c, g, or t

SEQ ID NO: 6071 - DNA, 261 bp, Rattus norvegicus; identical to SEQ ID NO: 1975

SEQ ID NO: 6072 - DNA, 600 bp, Rattus norvegicus
gtaaattattttaaattataaggactgcatgataatttatcgtttatacaattttaaagtcattattattaaattttcaaagcatmmwrwrwammmamamwwrarwmawwwmwctcaataagagtacccacaaagtttaggagagtgcagaatgaactgtcccccagccactcctggcaacacggcccatctgtaaccttcattcccagccagagctgctccagggctggctaactagtttcagacactgctcagcacccagcatgattagcaagggaagtcagcctgcaggctctggtctacattccggagccaactctaccaaatccttggattatctgctgcacagcatgcctccatgggttttgattgcctcacttgaggagggaagagtagttaagactggtcagaaagcaggatgctatgtacactggctgcagtctcccacctctgagagacccaggctggtcctcggaggatattgggaactccctgggtggataagtagaggcttccaggtcttctggcttcagtcagttggaagagcagtctgaaggagctgtaacaaaatcatctcctgaggcctgtcatggcagatct

SEQ ID NO: 6073 - DNA, 231 bp, Rattus norvegicus; identical to SEQ ID NO: 1977

SEQ ID NO: 6074 - DNA, 600 bp, Rattus norvegicus
ctccctgtgtggctgtgagctctgagcgtggctattcctactcctcagtgtgcctgtagcttccccaaagcaggggtytaggcatagtactggagcagcctttccagagcctttgttccagctcagcccttcacccctagakaggccacagccactgtgagcaggatgccagcagatgtgggatgaagctgcctgtgctgcagggtgggggcacaggctgggctcagggccgagaaggctcggcgcctgghtgcgcctcctgtmagttaagtcaatggcccttacccgatgttcctgataatcttgaaaggttcttctggaacccccgtgtcaccttagtcacgagagcrraaagtgcaatatttcctttcacctggttgggaaggggggttatttctgaaagaaaaraatatataracagatcttctacatttatatttttaacctgttcaaaaaacaactttccaatattgccttgtcttctgagctcttgctacagtcgcctttgmtactgctttaacagagaatctgcaggtgttgataaagaacaggactgttttattaaaarctttactmaacttgraaaaaaaaaaaaaaaaa

SEQ ID NO: 6075 - DNA, 600 bp, Rattus norvegicus
aacagagcattgagaagaaagagtcccgctaaaggagcggggtgtgtgtgcatgtggggtgcaggtgagagtcagtgcatcagaacagcatatggggaaagaatttattttgatttcctatgtaaaatagtgagacagtttggttaaatgatacaaaatgtacatcgtgggtgtcctgcttcataatcctgacaggtgatctgttgtcttcctagtgtgaatatgtgttgcatatgctttacaagcacatagagtagacatgataactacattgggaggtcttgagttttaattcaattatagtaaacactgcggaagcaagatttacacaataaaatgtataaagcaagtatagcaaaatgatgagtataataaaatgtcttgagatatacagcatatcgatgaagtaacaagatcattaaatgtcaaggtcactcatgtcagaacactgtccatagaaacagtgtggaaccaacaaccacaataaaaacaaaatcggatggtcaaaatgaaagccatcatttagaacactatggcttaagcaatcatgtttataaaattctacttatctttacatctctaggaatgaggaggaagatg

SEQ ID NO: 6076 - DNA, 1400 bp, Rattus norvegicus
caagggttaggcattgtcttcagcaatggagaaatatggaaacaaacacggcgtttctccctcatggtcttaaggtctatggggatgggaaagagaactattgaaaaccgaattcaggaggaagttgtttatctgctggaagcactgagaaaaaccaatgggtccccgtgtgaccccagcttccttctggcctgtgttccctgcaatstgatctccagtgtcattttccagcaccgttttgactacagtgatgagaaattccaaaaattcatagagaatttccatacaaaaattgaaattttagcatctccttgggcccagttgtgcagtgcctatcctgttctatactatctcccgggaatccataacaaattcttaaaagatgtgactgaacagaaaaagttcatcttgatggaaataaacaggcatcgagcatctctgaacctcagtaaccctcaggactttattgactatttcctgattaaaatggaaaaggaaaaacacaatgaaaagtctgaatttaccatggacaacctgatagtcaccataggtgatctttttggagcaggaacagagacaacgagttccaccataaaatatgggcttttgctcttgctgaagtacccagaggtcacagctaaaattcaggaagaaattactcgcgtgattggtagacaccggagaccctgcatgcaggacaggaaccacatgccctatacggatgctgtgctgcatgagatccagagatacattgattttgttcccattcccttgcctcgtaagacaacgcaggatgtggagttcagaggataccacattcccaagggcacaagcgtaatggcatgtctgacttctgccctgcacgatgacaaagaatttcccaacccagagaagttcgaccctggccactttctcgatgaraaaggcaacttcaagaagagtgactacttcatggctttctcagcaggaagaagagcctgtattggagaaggtttagcccgcatggagatgttcttaatcctgaccagcattttacagcattttaytttaaaacctcttgtcaatccagaggacatcgacacaaccccagttcaacctggtttattgtctstgcccccaccctttsagctctgtttcattccagtctgmrgcsgcawagtytttcacacagatgactgagaccctgcttctacttgtgagcaaacaggtcctcctgtcctsktgtacctgtaactggcagtccttcctgaatggcagggatgctacctctgaactgtcctacatttttttcaattctttgtgaaccagttccaatttttcatatgtgaaaaaacttcactgttttagcactaataaagtttttttkyagtgtatgtcaraaaaaaaaaaammwmgtgccg

SEQ ID NO: 6077 - DNA, 600 bp, Rattus norvegicus
gggcatatggattggttcaggagagaagaaatatgggcatctttgcgtcacacgtgtgtccatagtgggtcgtcttgtgtgtctgtgcatccacacggtacgtgagcaccccgccccacccccgcycaaagtctgtaratcccgttcgggtttgackgcmggggagttcaaaatctggggckattcgaaagcaagaacaaaccactgtctctgcttctgcttctgaaacgagaatctggtaactgcattttctgtcccacgagatatgcaaaagcaatgcaataatayccwttttaaaatacgattgtgagttgtgtcacagcattaaaattctattttaaaaaaaacatgaaatttaaggggaaaaactccaagaagacattttgactttcgatatattctgtgtaatgttttattgcattgataatgtttctgttgaagaaactgttatacttgaattcaggtcagtttcagtatttttcaaatatttttttaaaactgaattgcaattgtgccwwgcaaatataatgacttaagtttgttttaaaattcacttcttgtatattttgctgcatgtaaagtaaatcattttgtatttgg

SEQ ID NO: 6078 - DNA, 1400 bp, Rattus norvegicus
gacaagatgatccggaacccagctagtctcaagactgtggcaaccatcaccgctgtgccttcccaacccctgcttgaccgcwckaksccagacttcacggcctttaccaccgtggatgactggctaagtgccatcaaaatggtccagtacagggacagcttcctcaccgctggcttcacctccctccagctggtcacccagatgacatcagaagacctcctgagaataggggtcaccttggcaggccatcagaagaagattcttagcagcatccactcgatgagggtccagatgaaccagtcaccgtcggtaatggcatgagaactcgatgttcctaggggaggagaggaatgaaaaggaccagggtcaaagsrsrarsagaggttgaccacggtggaatgtgccagaaagatcagcttcttggctgagaaacaacttcccacctgtgaagaatgaactggacctgctgcccatgggcaaccgccatttctcggccatggaagtgtgtagaagccgtgggaaaccaaacgcgtaatgattgacgataaagacagagaaaggtgatgctaaacagaagcgaagctgaaaccgtatgcgttgggaaccagggtgaactcagttcccatctgagagggactggagttccccgtctgcaggaagaaaggaaggaggtggagggaagagagggaagccctgggctgtgccatgctctccctcgccaatgacattcttttctttcctccattcgtactcctccctcagagcccctcctccctcccccacatccatttcccttgctcatgactcatgtagggaagtttcttcaaaataaaacccagctcctgagtcaaaacctggtctgagggagagcggttctccatccctcggtcccagagaacagagtgatatttaaaatgccatcgatggtgaggttattggaagaggaaggaccgttagcacacaccatcatggtaaataagtggagcctaagtgtcagcagacatgatgaaagccaagtcaccttgaaggtgacttttctgggaaggtcttaagcatgtaatgtcccttaataggagggaaagggacaatctcagggcagccttgtccaggtagaaatattttgcccccctgtctgttgttggtgaggggtcacaccagccagggagacctctgggaagaagctgccacacacaaggactctggaaggatccacatgtgagcccagccagggtcatacggttcccaacctgaggaaaaggtttttcacacactccttgctttctgctgagataagaaaggtgtcactctgcagagtgtgactttttacaggttaaataaagctgtatatgtctcattgttaaaaaaaaaaaaaaaaaaaaaaaaaaaaaaaaaaaaaaaaa

SEQ ID NO: 6079 - DNA, 1400 bp, Rattus norvegicus
tggagccctgcttcaagctctctgttcactgccgcrattctcatgcttctcatggggtgggaagsgrrsrgagccccccacgtttatacattaggcggggtagactgcggggtcctagcctcttcctccgayttkmmttykgcagrkstttcactacagattgggctgctgtgggagtwsggmckyamwkgttttyytttttgagttcacgttggatccttgtacaacttctgcggaaggacacagtacacgctttccttcctcgagcagagctagggccctacctgagcaagtcggmtgtggmccgggaggcagctgagactcctgctgtcctccagcctttcagaggagatcmtattccagccaaatgcagggaaacactttattttgtkttaggktktgtttttccttgagagcctttttttaggccccacagacagtggtgggcggggaggcgataggaaacacatccccagtgtgcatttaacattcatmscmtacaaccacagacgtgtctggggggagcctggcaaggcgttcctygtcaccatcgtgtttgcaaaggttcaaamawgcaaaaawwwaaaaaaaaaraammwmrwratatttttttttaaaaaaaagaaataaagattcatcccctggcctctccttctgctccgaagtgggaggcaactcaatgtgcctggggctcgttgtgggcccacagagtcttgctgtcatccccagcggtgcagtgtggcaggtgtttgtaagctgtgggttctggccacctcggtaactgmaygrsrcaggtgagggcctgtgccacgccccacacacctcagggccaagcgggggcgtggccggcccttcaggtctagccagtgggcctggtagcacatgtctgtcctcagcgggmcagatgctttctctcctggtttscagctgtcttcrrawcsmssmtgactcgcccttcccactccttcaagtcsccctcrcaaaccaatgtkgcaagactactggacttgtatccatggtactctactcagtcctmttatswmascwysmtsagsggcmksrmvmssgwswcywcctctgggcagcmctatytaggtagtaagtgggggcgggaaagggtgcatasctgttttagccgaaggactcgatgtggacgtcctcagatatagctaggctaarcggaratcgacgsyccgggrttggtggtgttggatraracattcatttttmccttgtggacgytaktgytgyaragttcactgttswacmcagtctgtttyctatttgttaaggaaaactmcmgcmycattgcatacttcttgatggtaataaatttgaatamtcrgawwwmwwmmhvmmmrrraaaaaaaaaaaaaaaaaaaaaaaatcatcatgcggcc

SEQ ID NO: 6080 - DNA, 600 bp, Rattus norvegicus
tttacatttggcttaatttttatgttgggtcattactcgagactgtgcacactgatagaggacacagagatggagaaattctctttttattaaatattttaggtgtttaaaaggccacaatgtggaaaatcaaaattgttataaggtacctaagcaatagcatagtttttcataaattatttgactatttgcaaataamacragkgtttcaaccctgtttacmtacccacttatwttaatgacccayagattcttttctagtgacttgtgtgacargagctaaggcagacatagtwagtagatctgttaagacacagacagcamgaataaagactgtgcgaactggacagtcacccttttgagaccaccctttcatgctcctccatgttcattagccccttccctgctttccttagtgackgacacttggtgcttactgatgtgtgaayaactattttgtcaagagatggtgtttattaaactgggacaaggaaaaagaagtgtgttttttaataatgtgttacactgtgcttatgttgtttctaataaaaacawgtgttttcmgcrgaaaaaaaaaaaaaaaaaaaaaaaaaaaaaaaa

SEQ ID NO: 6081 - DNA, 1400 bp, Rattus norvegicus
gagctttgacgctaccaccatggatcacaatgggaccatgctgttctttaaaggggagtttgtgtggaggggtcactcagggatccgggagttaatctcagagaggtggaagaatcccgtcacctcagtggatgctgcattccgtggtcctgacagtgtcttcctgatcaaggaagacaaagtctgggtgtatcctcctgaaaagaaagagaacgggtatccaaagttgttccaagaagagtctcctggaatcccatacccaccagacgcagctgtggaatgccaccgtggagaatgccagagtgaaggtgtcctcttcttccaaggtaaccgcaagtggttctgggactttgccacaagaacccaaaaggaacgttcctggcctgctgttgggaattgcactgcggccttgaggtggcttgaacgctactactgcttccagggtaacaagttcctgagatttaaccccgtcacaggagaggtgcctcccagataccctctggatgcccgtgactacttcatatcctgccctggcagaggccatggtaaactaagaaatggaactgctcatgggaatagcacccatcctatgcattcgcgttgtaacgcagatcctggcctgtctgcactgctgtctgaccatcgaggtgccacctatgccttcagtggctcccactactggcgtctggactccagccgtgayrsgwggcatagctggcccatkgstcatcactggccccagggtcsttcagcagtagatgmtgcmttttcctgggatgagaaagtctatctgatccasggcactcaagtatatgtcttcctgacgaaggggggcaataacctaktaagtggttatccaawscksctgragaakgaacttgggagccctcccgggatcagccttgataccatagatgcagccttttcctgccctggttcttccaagctytacgtcacatcasgacggcggctttggtggctggacctgaagtcrssassmsrsgcgacatgggcagagctttcytgkccccatgagaaagttgatggtgccctgtgtttggaaaagtcycttggkccmtactcatgctcytccaatggtcscaacttgttctttatccatgggcccaatttatactgctatagcagtatagacaaactgaatgcakccaagagtytgcctcagccccagaaagtgaasagcatccttggctgcagtcaataaaaagccctgatgggaattagcccagcccaccccacctytccatttccattmtaataaaaccagatggtttcttcamawraawmawrrrrwawwrawwatgaagcaaccttctttatttgtattaaaaagttatcaagtcttttwwmmmwaaaaaaaaaaaaaaaaaaaaaaaaaaaag

SEQ ID NO: 6082 - DNA, 1400 bp, Rattus norvegicus
ttgacaaggtacgcttcctggagcagcagaacaagatgctggagaccaaatggagcttgctgcaacagcagaagacatccaggagcaacatggacaacatgtttgagagttacatcaacaacctccgtcggcagctggaagccctgggccaggagaagctgaagctggaggtggagcttggcaacatgcagggcctggtggaggacttcaagaataagtatgaggatgagatcaacaagcgtacagagatggagaatgagtttgtcctcatcaagaaggatgtggatgaagcctacatgaacaaggtggagcttgagtcccgcctggaaggactgaccgacgagatcaacttcytccggcagatccatgaagaggagatccgtgagctgcagtctcagatctcagacacgtctgtggtgctgtccatggacaacagccgctccctggacatggacagcatcattgctgaagttcgtgcccagtatgaggagatcgccaaccgcagccgagctgaggccgaaaccatgtaccagattaagtatgaggaattgcagaccctggctgggaagcacggggatgatctacgtcgctcgaagacggagatctctgagatgaaccgtaacatcagccgcctgcaggcggagattgacgccctcaaaggccagagggcaaccctggaggcggccattgctgatgcagagcagcgtggggaactggccgtgaaggatgccaatsccaagctggaggatctgaagaatgccctgcagaagsccaagcaggacatggcccggcagctgcgcgagtaccaggagctgatgaacgtgaagctggcgcttgacatcgagatcgccacctaccgcaagctgytgkagggcgaggagagcaggctggagtctgggatgcagaacatgagcatccacacgragmccaccagtggctacgcagragraytsrgywcaksytacgggggactcactagccccggcttcarmtatggaatgagctctttccagcccggcttcggttcygttgggggatccagcayttmtakccgcaccaaggctrtggkcrygargaagattgaaacccgagatgggaaactggtgtytgagtcttstgacwtcatrdccaagtgaatgkccastgaartcattsccrgcbtgaggtcmtgcaghtgmtyaggggtcaaggggwgacagctgtatggcagagtgcagggaaytwgsgaccagccagagtaccagccmtaaacctbtgrccamccttgggaggaatttmtathtgggatatrmcaatgcccaactcaaktgtatttwccaaaataaagcctcagtgrmtgtwwmmhmwwwwaaaaaaaaaaaaaaaamtcgagggggggcccggtacccaattcgccgagt

SEQ ID NO: 6083 - DNA, 600 bp, Rattus norvegicus
gaggaaccgaggttcaagtcacggaactgagacgcagctaccagaccctggaaatagagctccagtcccaactaagcatgaaagagtctctggagcgcaccctggaggagaccaaggctcgttatgccagccagttggcggccatccaggaaatgctgagttccctggaggcccaactgatgcagatccggagcgacactgaacgccagaaccaagagtacaatatcctccttgacataaagacccggcttgagcaggagatcgccacctaccgccgccttctggaaggagaggacataaaaactacagagtaccagctaaacactttggaagcaaaagatatcaagaaaaccaggaagattaagacggtcgtggaggaagtggtagacggcaaggtcgtgtcctctgaagtcaaggagatagaagaaaacatataaacagctgccaatggggaggctgcttcagctgtggcgtccagaaaccgcatcaatactgtgcggtgacagtctatttatttaccgggctctgtaattaaatataaacgttttcactctggggagctgtaaagggcttgtaagattaaagccagtgaatcctgga

SEQ ID NO: 6084 - DNA, 600 bp, Rattus norvegicus
gatgagcccattgctgaagcaccattcaagtttgacatggagctggacgacttacctaaggagaagctcaaagaactcatttttgaagagactgctcgattccagccaggatacagatcttaaattggtcaggacaagggctcagaggactggacgcgttcagatgtcggtgtccccccagttcttgaccctggtcctgtctccagcccgtctcagcttacccactcttgactcctttgagccgttccgaggggcagtctggtcgtagtggcttttatactttcacggaattcttcagtccagagagttctcctgcaccaggccctgcacagttgcactcagtgcactcaagtgctcactgttgtttagtcagtaactgctttctggtttgaaagatgcagtggttcctccctgccctgaatccttcctacatgtcacctactgaactgtcagcctcctcagagcaagtcttaacagacttgttccagttatgcccacccaccttacattagggaaggctaagacataaggcaccttaagtcagtgacagctccaaacttacacgccatctgttggctgtagctgtctgctcagatcgga

SEQ ID NO: 6085 - DNA, 1400 bp, Rattus norvegicus
acccaaggcctatggcacaggttttgtgggctgtctgcgggacgtggtagtgggccatcgccagttgcatctgctggaggacgctgtcaccaaaccagagctaagaccctgccccactccctgagctgccaccagagctgccaccttccctactgtaattattttctatttttgtaaacttgttgcatttttatatgatttttttgactgcacgttggccagaaggactgctggcctggcctcctttccgtccggcagctgtgctacagagacaaagtggtgctaagggaactcttaagtagaccgtagcacctagagccctgggctttgaaaggcagccttaggacacactcctctgcctaaggtaccgtgcctcagccccttgcactgtatgttcctacctgtccacttgtattggtcctttgggtctcctggcccattgctaggccctgtttgtgtgttattaatgtgttattggatgagaactgtatccctgagcaggagggtgctgttggggttgagggggcccttcattaaaccaagtaacattggswcswkkgtakgttcccacttaarctgctctccygtgtgtgctaagggccagcctcaccccaagctagcctgkacccctartgckccctgtgamartactgtgatataaaaaacctgataattggggcatcatcttacttcccaaaatgtgtttgcctgtccctggaggctgtaaacasaagccakgctccawctasgttgtccyggcyggtcctcagttggccttccccayctaytcagttaycctgaacatggtcatcctttccccaaaacatcakgccacttasgaatccctaasagggagtgcgtcactacsggatgtggttgacctccattgcttacctgcctaakcagccagctacatctgtctctcaaagatgtccagccagactcctaactatattcttcaaccattgattttgtttgawttctgatgtggaagtrcggtcaktcctgttctarcgcacagcaawctttarttggtytracgtsagggcwacccacagttggyccactgtaacgatggtcatccttgtttgagtgacagtwactrccgggtgtccasccaaggrcaggtactakaatggcasrgatgactatagagccaaaaatgactgaaactgaagcaactgtctgctcctccatcccctatctttaatgyccagcacagtcatctygggagaaaaaccagacaaatctgggatgggggcagtctgrcckwmttcctgmttcsgtgatcaaggctaragggaactgcatggtatcytgttactaactccagtatgtgtcaatgtcaaataccatgaaataaagtctgawamccttwaaaawaaaaaaaaaaaaaacaa

SEQ ID NO: 6086 - DNA, 600 bp, Rattus norvegicus
ctgttctcgtgacctggaggtaaccggaacagcgtcttcattcactgctgtcgggataagcctcagagctgggcggtgtacgaagtcggcttttcaggggagaaggccaaggccgtggtgcgggggctccagcaccttcccacggcagcaccgcccaaaggaccccaccccccctaagcaaaagggtgttttccccttgcttgtataaacagtcatttgcacatgttctgtctgagcctggccgtctctatggagcagggccccagggatctatggcaggaatggccagtgtccccagtaggagccggaaggtggctgcaaggttcccagcagtgcagatctggtccctattgcccttcagggacccttcccctgctggaactgaggagcaggtgcaggagccagtgcagaccacaccacctgccctcagctagccagacctgggggcgcaggctgcttgcctggtgctctgggtttcatagtttgatggttcttgtcagcatgttgcggttttctaggttttgatttctttattactatttgttgtgttttcccacggggaggggaggaagaagagcgtttacaactgcgcagctcacg

SEQ ID NO: 6087 - DNA, 1400 bp, Rattus norvegicus
atgggtgtgcctgaaaatgttctgcagcccactcaccytgtgtacaacatcggacctgataaggtgatccaggccaccacacactttctgcagaagccggtcccaggctttgaggaatgcgaagatgcggtgacctcagatcctgccactgactagaggaccccatggctcccccaaatcccccgtcagacaaggtttctccgtttgggtacatagcacagtccgtgctacttgagccttggccactgtggagttgtggtttctttgtcctttcctgtcaaacaaaacaaagccatcagctctgggttggaatacamaawrrwrwrawwwttaaaattattttcatacctgtcaaaccaaaactctgggagccgatgtagtaagcagggttggagagcaatgcatgctgggaagcagcagcctcctccagcagccaggcccacaatgctgaaatggaaggtgtctgtgagtatctccacatcacagccactgctgtgcctcscacctacacaccattcagtcagcagatgggctcctctctggtataaatgtcagctctgtgcaagggcggmgctgtgggtccagccaatayacgctctctggaaaacagcactgggctccagtgggcatattcatacttgtctcttttaccccagtcatttgcgaaggacaggggccaggaatgaagaagggtcttagattgagccctccccacaacctgaggagaactgatctcatatttctccaaggccatgtttgtatgagcaagacttgttttgccctaagtatgacgactagacccaggtaatcaattmtgagtgkwrrakcrrcckcwaggtgaactctgtgccagaggaagcagcctccccagtgyccagccccygcctctccccatcatgyrscasgagaggccctcctcacggcagtgctgcagcccaggctccttctagtcctttctccccacccaccctccaagacagtgctcttttctcatccagggtgttaacactactaaggcttcaccgtaatcgatcactcaggatttactcstgccctgcccactccaggctctctgaaacacagtcaagtgctaggcaagctagctgctgctgggacagtgaccagcaggaaggcaagtgctgtccgtgtgctgaattctggaactgcctctgcaccggctgagtttgctcacctatccactgctacagtcatagcaagctcatgccgctgtcccagcctgtgcgagcaggcagacgggagcttggagatgcagcatgaggttcttccccaaaccactggccatttgctgcctctgattccccattgctttggtgtactgggctatgtattacctccttgaaataataaaagagtaacatttwmaaaaaaaaaaaaaaaaa

SEQ ID NO: 6088 - DNA, 1400 bp, Rattus norvegicus
ccatcgagctactggtgatgagtttgcagtgaagatcatggaggtgtcagctgaacggctgagtcttgagcagctggaggaggtgcgggatgccacacggcgagagatgcacatccttcgccaggtcgctggccacccccacatcatcactctcatcgattcctacgagtcttctagcttcatgttcctggtgtttgacctgatgcggaaaggagagctgtttgactatctcacagagaaagtggccctctcagaaaaggaaaccaggtccattatgaggtctctgctggaggcggtgaactttcttcatgtcaacaacattgtacatcgagacctgaagcctgagaatatcctcctagatgacaatatgcagatccgcctttcagattwtgggttctcctgccatttggaacctggcgagaagcttcgagarmwgwrwrgramwsmrggatatctagcaccagagatccttaaatgctccatggatgaaacccacccaggctacggcaaggaagtcgacctctgggcttgtggggtaatcctgttcacacttctggctggctcgccaccattctggcatcgacgccaaatcctgatgctacgcatgatcatggaaggccaatatcagttyaskwsrcccgagtgggatgatcgttcaaacaccgtcaaagacctgatcgcaaagctgctgcaggtggatcctaacgcacgcttgaccgctgagcaagccctacagcaccccttctttgagcgctgtaaaggcagccagccctggaacctcacacctcgccagcggttccgggtggcagtgtggacaatactggctgctggacgagtagccttaagcagtcaccgtttacggccactaactaagaatgcactcttgagagacccctatgcactgcggccmgtamggsgcctcattgacaactgtgccttccggctctatggacactgggtgaagaagggggagcagcagaaccgggcggccctsttccagcaccagcctchtaggcctttccccatcattgccactgacctggaaggagactccagtgctatcacagaggatgaagttaccttggtacggagctwggaccttctccctgggcaagccacgaagtaggactccccaggaggagattttctttttctatcattccaaccacttgggactcagatcttagccctgccttgccaagtctacaactgrgmaygmkgcttgtcacagaaaccagccctttacccctacctacctactctggacttggagatcggggcrgagatggaagggaacctcttcccagcattgtgcctggccttgccatcaccgcctgtgctgcatctgaaataaaacctgctacaagccwrrrararmmarwaaaaaaaaaaaaaaaaaa

SEQ ID NO: 6089 - DNA, 600 bp, Rattus norvegicus
cgggaggagctggagatgctgccaaccctccccgggttgtgctcgctctgctgccgccgccgcacggagcagcctcgccgggggcccagtgcgccgcgctcgcagcccgtagcgcccggggcgctcgctcgggggccgcgcagcccaagacccgaccgcggataggaggcgagggcggcgtccaggcgcctcggcgtgcacaggcaggatgagcatcgagatccccgcggggctcacggagctgctgcagggcttcacggtggaggtgctgaggcaccagcccgccgacctgctggagttcgcgctgcagcacttcacgcggctgcagcaggagaacgagcgcaagggcgccgcgcgcttcggccatgagggcaggacctggggggacgcgggcgcagccgccgggggcggaacccccagtaagggtgtcaacttcgcggaggagcccatgcgctccgattccgagaacggcgaagaggaggaggccgcggaagcaggggcgttcaacggtgaggaccggacccctcgcaccctgagccctggccgccacgtccgtctcactctcgaaccgcccttgctcttgaaccctgtgctgagctc

SEQ ID NO: 6090 - DNA, 600 bp, Rattus norvegicus
caggaggcctttccacatggcagtgggyawgmartsgwsmmrrwywktgawttmtgayytktacttsacywytgswtmtcctcmtggctgtytgctcaggggccatttcccaggctgttgtgactcaggaatctgcactcaccacattacctggtggaacagttacactcacttgccactcaagtactggggctgttacaaccagtaaytatgccaactggatycaagaaaaagcagatcatttattcactgstatagtmrstgvcaccarcaacagggctccaggtgctcctgccagattctcaggctcyctgcttgarggcaaggctgcccttaccatcacaggggcgcagattgaggatgaggcaacgtatttctgttctctctggtacarcrrccrytwysryddtggmrkgtgsarmwraggaagtaggacaaaaaccactcttgtacagcgtcccaattactgttgtcttaaatgtggctacatctttctagactgttctctgttactgtagagaagattataaaagttgttgtctcaagcaacaaaatgttttatttcaacaaattttataataatgatgccttgatgacaag

SEQ ID NO: 6091 - DNA, 600 bp, Rattus norvegicus
ggcatcctcctggccacgggtcttcatgtgcacagaaactcagcccattctgcaggcgtgggagccatctttgatcgggtgctgacagagctagtgtccaaaatgcgtgacatgaggatggacaagacggagcttggctgcctgcgggcaatcatactgtttaacccagacgccaagggsctctccaaccctggagaggtggagatccttcgggagaaggtgtatgcctcactggagacctactgcaagcagaagtatcctgagcagcagggccggtttgccaagctgctactacgtcttcctgccctscgctccatcggcctcaagtgtctggagcacctgttcttcttcaagctcattggcgacacccccattgacaccttcctcatggagatgcttgaggctccccaccagctagcctgagtccggatgcacacggagggagagtgtcgctgaggaggacttgagccgcgcgggggcgagaaccatggacaggtgcagagcaggaggggacttgcccatcctgccaggggtctggcaacacttaacagggtttgcgtggtccccaagtcagagcagagggaccccagatccctgtga

SEQ ID NO: 6092 - DNA, 1400 bp, Rattus norvegicus
gtggcccttcagaggaacccacctgccagtccagctcccctaagaattccacgctcttggtggaaggctgcttctgtcctgaagggaccacaaagtttgcccctggctatgacgtctgtgtgaagatatgtggatgtgtgggaccggacaatgtgcccagagagtttggagagcactttgaatttgactgcaaggactgtgtttgcctggagggtggaagtggtattgtctgccaaccaaagaagtgtgctaggggcaacctgaccacatgtgaggaggatggcacctaccttgttgtggaggccgacccagatgacaagtgctgcaacaccacctcatgtaagtgtgaccccaaacggtgcaaagctgaacgcccctcatgtctgctgggattcgaagtgaagagtgagcacgtgcctgggaaatgctgtcctgtctactcctgtgtgcccaagggtgtgtgcgtgcacgagaatgctgaataccagcctggatccccagtgtactctaacaagtgccaggactgtgtatgcaccgacagcatggacaacagcacccagctcaatgtcatctcctgtacccatgtgccctgcaacatctcctgcagctctggctttgagcttgtggaggttcctggggaatgttgcaagaagtgccagcagacccattgcatcatcaagaggcccgagcagcagtacatcattctgaagcctggggagatacagaaaaaccccaacgacaggtgcaccttcttcagctgcatgaaaatcaacaatcagctcatctcttcagtctccaatatcacctgccctgactttgacccaagtgattgtgttccgggctccatcacatacatgccgaatggctgctgtaagacatgcatccataaccctaacaacacagtcccttgctctgccatacccgtcatgaaggagatttcctacaatggctgcgccaagaacatctccatgaacttctgcgctgggtccystgggacttttgccatgtactctgcccaggcccaggatctggatcatgggtgttcttgctgcagggaggagaggaccagtgtacgaatggtttccctggactscccagatggcagtaagytgagccatagctacacacacatcgagagctgtctgtgccagggcaccgtctgtgagytgccacaggcccagcaaagccgcaccaggcgttytagtccccggcttytagkaaggaagtgaacgggttacaccgtgcacatctcttcccatcttgagccatcctgctgattctctgagcttccccacttcctgcttgacttcttctctgcacatatttattttcggagtttctgttccattctttgctttctgataataaactcaggcatagccaaaaaaaaaaaaaaaaaa

SEQ ID NO: 6093 - DNA, 1400 bp, Rattus norvegicus
ctgaccgtttgacaaatacccgaaaggtctctcagggcatggggagtatgtaataaatgattcttcccttagaatcttaatcattcctgggacttaggggggtgaagtgtgtgatcacagattgccaagcatacccaccctgtttggctctgggcaggaagcactgctcttcctggttccctcacaaggattttctgagatgtggagtggtttacctagcctctgatgaagccacagtgggcttctctaccaggtggcaataacctatggtcaaaactcaaggctggcacaatctgttcgattcaaggctactaagacttaatgctattgaacctgtgttctcacaggcttctgtttactgctgacctagagctcagaaactcagaccccactgtctcagtgtttcaagctgcttgccttattcgggcaatagaaagcccggagtgaaaagccctgggtttccaggttgacctctcacttcctcactgtgccactttgtttctgtatctgtaaaatggsggysrcaatcctacctcacagggctgtgtggggacaacaggaaaacatggctgcgatgtatgagaaccactggaaagcgcgtggctgggctgtgaccacagtgtataggaagtaggtaccctgctgtccttcctgtttccttatgaagaacctaccaggtgatcacacccgtgctgggccttgctacaagggagggcagtggagaggaacaggacattctttctgttgtgagacaactgcatcatttgcaatatgcaggggcctactatcttgttgcctgcaccccaggtctatttgtgctggggttggggktgcacagagcattgagctgcttggccgctstgtgsmrtaaatctagagaattcctggctcacttcttctratctcacacgctcattataaggcattaggamtkyggmwsgartggccaggaagttgatgttccttctgtcagcaagaggtacattagagatggagactacactgggtagattctagtttttaattcttattaatgtggggsgaataaattaataagtataatatgattctgatgtctattagactttctctgtgctctttgtgagtaaggtggsccacggagkkatgagggcatcmctgttagtttggtgaggtggttagtgactgatgtacaggaagtgtyttytacgtgggcactgacgtcagtagccatctatgcatcctaaatgcaggatcctcttgattctttctgccaatcaaatawatygttgctcttggttcaggtttgtgtcagaaactttaaaaacatacctattrattctaaattatccaaagattatgtacaaattttaaaataaatgtctttttcagmaaamaaawwwaaaaaaaaaaaaaaaaaa

SEQ ID NO: 6094 - DNA, 600 bp, Rattus norvegicus
tgaccagagcaggatgggagtctgcagtccagactgaggtgacgacatcaccaccactctcccatgacccactgcctcagtgggccccaaaaccggctccctcatcttctcctcctctgcctggctmtaatcggatgttccttttctagctaagatgattttttattttttcagattcctaacmccawraaawrawwmwrwmawtgattttctagcagcatacctgggagattcagaaccagcgtggttgccctgcgcccacagggcachtggtccytgagacccagacaagcattccatggcacagtgmtaccctgcagtcttcacccagttgtgttgtgayagcwmtgtsmtsytkdwwhkwytkwttkggwycagatgtcctgtgggaggggtgtcatctgagagcaccttcyttttcactctaacccttccccgatgctgctgtcagtcaagctgtcagcatcaaaatctctcccttttttgaaattaaaaccaacgtaccagcawwwrwmawmwrmmmwmmmmwvdmrtsyckgatgtaccatgtttacactgaccagtgcactcagaaaatcagattaaagtgtatttaagagg

SEQ ID NO: 6095 - DNA, 600 bp, Rattus norvegicus
accgtgggtgttgactttaaaatcaagactgtagaactaagagggaagaaaattagattacagatctgggacacagcagggcaggagcgattcaacagcattacctcagcctattacagaagtgccaaggggatcatactcgtgtatgacatcaccaagaaagagacgttcgatgacttgccaaagtggatgaagatgatcgataagtatgcttcagaagacgctgagcttctcctggyyggaaataagctggactgtgaaacagacagagaaatctccaggcagcraggagaaaagtttgcacagcagataaccgggatgcggttstscgaascsagtgccaaggacaatttcaacgtggwtgagatctttctgaaactcgttgatgatattttgaaaaagatgcctctcgatgttttgagaagcgagttatccaatagcatcctctctctacaaccagagcctgagatcccaccagagctgcctccacccagaccacacgtccgatgctgttgatttgatactttggagatggtgcaagccattgctagaaggggaaagcattcttgctctgcactacaatcacgtgacaacttcctt

SEQ ID NO: 6096 - DNA, 600 bp, Rattus norvegicus
aggttggcccgagagcacagaatccgattttttgagacaagtgccaaatccagtgtgaatgtggaygrsrckwksagttccctggcccgtgacatcttgctcaagacaggaggccggagatcgggaaacagcrgcaagccctcaagcactgacctgaaagtatctgacaagaagaacagcaacaagtgctccttgggctgaggracatttcttgcctcctattcaccctgaacctggaggctagacctgagggaggtggactgagrtwgactgatggaaamcagaggggaggavctgtggtggtvcctgraggggtggatgacakgggaggamggaaagatgaawtgggcagggaaaggagggcraggamccaaggacgtgaaaagtkaararaaggggtttkaraaragaaaaagaaraaggtctcaggtytcggmccgtccaacattaatgtcagtatgctgatctctccattcctggttcagggttcgggtcccraraggmtggctcgrccctacthtragggtctctcactccmcasatstttgttagtattaaaggccmctgtttggcwmrrawrwwmaaaaaaaaaaaaaaaaa

SEQ ID NO: 6097 - DNA, 600 bp, Rattus norvegicus
gggcttctccacccgaggactcatgtatacacccaccgttggcatcattgtcaccatcagttggcccagggacactggggttgtggggaaggattggggagaaggcatcagtgggcaacccagtgtttttgtttgwacatcatgggagcaacaggccctcctgtgagttagggatgggcttcgggtgtgattgatgtctcwacaaagcttgagacttagcccmtaggatactckactcactccgytaggaagtcttttgactcaccgaccaaactcccctaaacgccatytgacatgcttggtccagktgacagwcggtcgctcagagtcagagtcacatacccctgattctgtatcagtgtgtcctccttcagtccccagagccaaaatsattytgcakccctahtgarmamarmmwhwwmmwrgggtgcgtacgacctacggtgcctgcttcaggtccagatgtgtttctaggcctgccagtggctgtcttcatacaaagtgagggcgtctgactactgkgaggaaagagtcatttttttttatgttgctttatcattaaatagtcmaamcmwwrraarwwaamaaaaaaaaaaaaaa

SEQ ID NO: 6098 - DNA, 600 bp, Rattus norvegicus
gaagagacacctacagggccctggggatgggttctgaaccgtgtggtgcatgcaagctcttaagaatagtggaactgcacagagacagcaccgtcagagccaacccttagaatatctgccactgtctcagctcatcagaaggtggaggctcagagcctgtggggggagggaggggcgcctgggaccagcgtatctctagagctgtggggcttccctcaggctgtgtagagggcagggggaggccattggtgcagccggagtgcaaggcaggctttctggacaaagtgctatttcagatgtgtcgggggagacaagtgtaggcaatgtacaatggctgtgagggacacacacacacacacacactacacacacacataacacaccacacacacacacacatacagacacccacagacaccacacacacacacacacacacacacacacactacagacaccacagacaccacacacacacacacacacagggacctctattcttccctggaatggcctggcacaaattctctgtccctttcacacttgtccctagggcctcagtacctcctgtattccatttgtatagatctccttgaattc

SEQ ID NO: 6099 - DNA, 1400 bp, Rattus norvegicus
cactgagttgagtagtgttggttcaccttggtactaaactgaatcgtgtccctctggagcatcccctggtcaagcagggtggagactttggccatccacaaggagaagcaaccaggatgcagcatgcgggagacacagccattaattgcaaaggacagatcctcctctctcacctttggcctgctcactcttacagaaacctgtttgtccgcctccttttttatttagcacaactccaggcatcttggtaagtctccagggtcatgggttcywcgrkgccctkwwkkakwagcmcwgaskysaggtggcatttgttacamacctcccamtactgcwttactggyatcacamrgtcagcaggtgatgakggytacttcatttcattgtgagscgtgatttccgttgagttttgattgttggtgccataaatgtcctaggatgctggacggacacatcagccttgtcagcagatmcktctttgagccaatgtakacagtawgctgggcactggttccaaagmcamcttaraatcwtcctacacatatccagacctttttttargttgcccaaacttccttagaataaagcattttagctctgagaactacttgataagtctgccaggaagcccccamgtcaattcttcaacaaaaatactatcttcsctacytaattyyttttaagtcatgatatyttatagttagaggagagagagrcaatctaytcccatgactamgacacaaacytacaagaaagggktactcagtcaagcctgtgcctgacttctggaccaggccchtgattttcatggatagtccaaagkwmggccrrkggttcccactgactycaagccatcagcagcacccaaacccaggagcaacaaatattcagagmaagaggatgtttatctcagctatgagctcathggcaggttgtactcatgcatctgttaaaagcaccaccacatcmttttgcamgtctgtktattaccgcttcatycaaatacatwttgtggtcaagatssacacagtgctatgaatacagtactttaaggtctgcattaaacacatcagaatatttcctgmcacatctatgtacaacccctgaatatgtatttttccttaacacaagagagcctgttcaattaaamaamaaamamwmwvrrggcrracaawmrmwawwgsyrwamaccggcgcgttaacgcgaggtaactggatcatatgctggagccttgaatgaaaaagcgcatatcaagccgggagatcgtatggcgagacctcaggtctttcgtttctccgctctttttttcttatacgacaaactaacgatacactcaaataaacagaaaacgcgaccaaagagacaaaacgacgcagaaacacgaaataacaaaacacat

SEQ ID NO: 6100 - DNA, 486 bp, Rattus norvegicus; identical to SEQ ID NO: 2004

SEQ ID NO: 6101 - DNA, 600 bp, Rattus norvegicus
atatccttagcccctcggataagcttaaaggaagaggatatatattcaaggcgattatcgcaagatagcacactgaacatcaccgaagaaattaatgaagaagatttaaaggagtgtttttttgatgatatggtaaagatccccacggtgacaacatggaacacataccttcgatatttcacgctccacagaggcttatttgcagtgctgatttggtgcgtgctggtttttctggttgaggtggctgcttctttatttgtgttgtggttgcttaaaaacaaccccgttaatggtggaaacaatggcactaaaattgccaatacctcctatgttgtggtcatcaccagttccagcttctattacattttttacatttacgtgggagtggctgacactttgcttgctctgagcctcttcagaggtttgcccctggtgcatacgttaatcacagcatcaaaaattttgcacaggaaaatgttacattctattcttcatgcccctatgtcaaccttcaacaagctgaaagcgggtgggattcttaacagattctccaaagatatagcaattttggatgactttctgcctcttaccattttgact

SEQ ID NO: 6102 - DNA, 600 bp, Rattus norvegicus
caccaactaaacccaacattattccatacacacaaacagacatatgtatgtgtgcgcacacacacacacacacacacacacacacacacacacacacacacgcacgcacagaggctacagtggctggtgatcaatgctattcaaaccctgtggatgggcagtcacaggaacatgggggctctggaggactgggccttgtaggagtgttcagagaagggtgtctagagcacagggagaatgtggtgactggagcagaaagtggatcatgaagaccacctctcccagcccagctccttcctaaaatctgcaggataaaatctctgcaatcccacaggtaaagatctggttccagaaccgtcgggccaaggagcgtaaagtaaacaagaagaaacagcagcagcagcagcagcaacagcagcagcccatgcctcccacacagttgcccctgcccctggatggcacccccacaccatcgggccaccctgggagtctatgccccaccaatgctggtcttctgggcaccccctccccagtgccggtcaaggaggagtttttaccctagcccctcccagcctggggtccaggatctagggacttgaa

SEQ ID NO: 6103 - DNA, 1400 bp, Rattus norvegicus
tcgcctgcctgggtgccctggcgacactctttgtgttgggtgtctttgtgaggcataatgccacacccgtggtcaaggcttccggtcgggagctttgctacattctgctgggcggtgtcttcctttgctattgtatgaccttcgtcttcattgctaagccttccacggccgtctgtaccttgaggcgcctcggtttgggtaccgccttctctgtctgctactcagccctcctcaccaagaccaatcgcattgctcgcatatttggcggggcccgggagggtgcccagcggccacgcttcatcagtcccgcctcacaggtggccatctgcttggcacttatctcgggccagctgctcattgtcgctgcctggctggtggtggaggcacctggcacaggcamgrrgacagcccctgaacggcgggaagtggtgacattgcgctgtaaccaccgtgacgcgagcatgctcggctcwctggcctacaatgtgctcctcatcgcgctctgcacgctctatgccttcaagacccgcaagtgcccggagaacttcaacgaagccaagttcatcggcttcaccatgtacaccacctgcatcatctggctggctttccttcctatcttctatgtcacctccagtgattatcgggtgcagaccaccacgatgtgcgtgtccgtcagcctcagtggctctgtggtgcttggctgcctctttgcacccaagttgcacatcatccttttccagccacagaagaatgtggtgagccaccgggcacctaccagccgctttggcagcgctgcccccagggccagcgccaaccttggtcaagggtctggatyccagtttgttcccactgtttgcaacggccgtgaggtggtggactcaacaacgtcgtcgctttgaagatcccacactcctgccctgacatggctgctcccaaacccagcatagaccytcatccacgamcaggaggaagttggytgggagcactsmaataacacccaccccatgcmtgcccccagagccacttacccacctcytggattcccagccctttaggtcagaagccagagtccttagctggggagcctctgcaatggccagtaactgtccttgtagctatgccccgtgtttgccaggcctgggactcagagggggagatgaccagtgtctactgtgttmtagaacagtgtggctgaggacgacaggcccaacccccatgcaaaggtgcttccagaccagcccctgccccaggcctttttaattttttataagttactctgggatagagaggatggttactgtggggatyattccctcccctccttacccagtagtttgtcccgtggtttattttgtattacctgtaaataaagtgtctttmtttaaaaaaaaaaaaaaaaa

SEQ ID NO: 6104 - DNA, 600 bp, Rattus norvegicus
cgtcctgttccaaccccagaagaatgtggtcacacacagacttcacctcaacaggttcagcgtcagcggaactgcaaccacctattctcagtcctctgcaagcacatatgtcccaacagtgtgcaacggaagggaagtcctggactccaccacctcatctctgtgattgtgatacgcagttcagttctcatgtttttaggctgttagacaaagtgctcacatgctgctccagaacatggaaacagaacaaaacaacaaccctagtatctttttttttctttttttagaaacagtacaataaattatttttgaggacwrwawrrwawrwarwratgtgctacaactttctaggctgattttagtgccctaattaacagccccttccccaggacatggaaataaccattgtttacagagctgagcattggtgacagggtctgacagggtcagtctactaaaacgaaaaacaaaaaagacaaaamaaaaaaaawamagtggcaatattaggtaaccttttttcctatgaagtcttttgtaggttcttgttgtaactaatttagggtgagtttctacgttgtatattaaagttacattacgtgt

SEQ ID NO: 6105 - DNA, 600 bp, Rattus norvegicus
tgctcttggcacagggactgatggacagatagagagattcgaatctgttggaatggagacagcgatggatgaagacatttccaaaagttacttgccacagactgtaagacaaggtggmkamwtgscacagkgagggaaccggctcctgcgggacctcagcgggactgcgaagkmamgskaaaatgctcgtgacttcagatsggaaataakcttcagtccctgataaccattgcctttaagracaaaagtcacaactgggccatctccattccagagtatctggrattctccttccaagcactaccatgaacctgactttatcctctgaatagctggaggackctgcgctgtttcakaatgtttgcactgctgaaaactaagtgtgtctgagtttgtaaagcttttgttttgctccatagaaagtggggaatttaaatgagccgrgcygagccgtggcgtcgctcagctgtgctggtggtgagactgaccattcagatgccgggagcaaaggtctaaccctcctcagccagcagcttcatgtcagagttccccgggcagactgcccagattgtgtcacctatcaaaaaaaaaaaaaaaaaa

SEQ ID NO: 6106 - DNA, 600 bp, Rattus norvegicus
  misc_feature (583)..(583): n is a, c, g, or t
ctatgtttcctgtcaaagaggaacagcaaatgttctttatgtgtttttccccaccgtcagcacagtgtttacaagcttttaaaatattagtctgttgcaatatgctgttttatcactgagcaaagtcactcagggacacagacagccttggtattcattcctttaaatcaacaaaagcttctggtcttcttgagaaggggactaagagagcaaggcagaggtcaagctaagtgtggggatttatcttgccytggtgcgtctttgttcaggtatcaatttgttcctgggtggtctgataggtctattaaataggaacactattttttccattcatggcagacctaagggttgcctgtgatgtttctcttcagagtcgtgtgcacaggcagcctgggcttttgttgttacttgctgtgccctgaatgctggtttaactggaaactgtatggaaagatctgctccctgtatgtgcctttctttcagctttctctgaytcaaactgcgggactgctctgtacatgtaagatatattatatatatttttcacaagtgaaaaataaaacattaaaagtgttctttcmmnvwmdwvaaaaaaaaaaa

SEQ ID NO: 6107 - DNA, 1400 bp, Rattus norvegicus
ccctcctacctgtacataatccacaagcaggcacctcccctggaagatattgctggtgactgcagtccaggcatgagggagctgatagaagccgccctggagaggaaccccaaccaccgcccaaaagcagcagacctactgaaacacgaagccctgaatcccccaagagaggaccagccacggtgtcagagtctggactctgccctctttgaccggaagaggctgctgagcaggaaggagctagaacttcctgagaacattgctgattcatcatgcacaggaagcaccgaggagtctgaagtgctcaggagacagcgttccctctacattgatctcggagctctggctggctacttcaatattgttcgtggtccaccaaccctggaatatggctgatggatgactctattggcaacagtagggcggatatttctctcctggatgttggtttcacagatcctacacagcagctctggatagtgaattttacccaatttttttaggaagcagggaggaggtctctagtgacacaagaatgtcaaagccctggccccctttgtgaagctcctctggcatgttccagagcccaaggttctcatttctcaggtggtgggactggacaaaagggagtggtgagctcaggaaagaatcatttctgatgacaattctattcactttgcactttaatggacattaaaaaatagctctcacaagatagtaacctaaaatacctgtttttggttcttatataaccatgggttcttcattcaactcagaagacctgatctgtgtatatatttgtgtgtattatatggtaactctttgtaccttggttggtagagtctagtataagtttagttaatagtattttgggtggatagaacaactctaatattacagcaattcactggactagtgtctcacaaatgactgatttactcagagccattaagcagcaggccactagtgagagtttctgttatgttcctatggaaacactgtgtattgtacgtgctatgcttaaaacatttaaaacacaatgttttaaatgtggacagaactgtgtaaaccacataatttctgtacatcccaaaggatgagaaatgtgaccttcaagaaaatggaaacakktgtaaattctttgtagtgwtwccywtktaattaatgaaactattkttctktaaagtgtwtctatattaaaaatagcwtactgtgtatgttttattccaaaattccttcatgaaycttkcmtatakatatgtgtatatattttaacattgtaaagkmtgagtwykcttatttaaagtatatttttacattatgcaaatgaacttcaacgttttagtccaatgtgactggtcaartaaaccaartaawctgwgwawwwwrwmwwaaaaaaa

SEQ ID NO: 6108 - DNA, 1400 bp, Rattus norvegicus
ggtggcagacagaggtaggcacatggctagtagagccctgcttggagctcacttctgcttcaggcactctaagtgaccttcccactcatgacaagccaactggggarcymcmsacracagakcactcagggswkcarymsatggyrkktsagstgswgccctacccagaaagtagccctggaggtgaccacaacctggcaccacccaacattaccacggggcccagggctgggtttcgagtttcacactgggtagtatgcattccttctgcactgtcccatccttctcacctcaaccttttaagggatatggaaaggtctggtgctctgtcttcccccacgctctccattttctccagccaatgcaggcagcagcagtaacagacttcttagaaccttcacactgtatctaccactacatagggtgacaaaagagcaacttgtaggccagaggggtggggtgagccctcctgtggtctgtacctccacccctggtctagcgggaggaatccttgaagacctgcatcacctaagtgaggaccctacagggtaccttatgctctgctcccagaccctgacttaacattgggccaacaacgatcctcatcccccaaagtcatctacagatggcaggtggaagagggaggttctccattccacacccactaccagtgtgcatggggagggaatggggatgaactaggtcaatccagggacactagagaggctaaggctctagccctattacccagccatgaagccacccaagtagtggagccaggacataagttattgttcacattaaagaatcatgttccctgtgtacatttaagcaaagaaaagtcttggattgtatggaataaaacttgtttgaaaatttggaatagtgctgttgtcggcttatttttctggtacttgtatttcacatgttaaatgatctttatatgtgttggattaacaagtattttgagttttctgagaacaaacagaaacattaatggtattgaagtgtgttagtagtctggccgtgtgyyyaaacttctgttttgcagcaaaagtggaaacctgtctgtacagcgagtgtaatgatttcctgtatcgtggyycaaaccagggcctctctagttgctgttagcaatgtctcttcgtttccaggcttttttaaaaaatggttctgagctccagcctgttagtgcatgcagccatcacggcagccaagcatctctgagtgaggtgtttttgtttggttttggtttttaagatcatgtatttgctacaaagtattgtacttgtctcaatgggaatggtmkamarmaamagaaaagaaaaggccttatgtgatatgtaccatagttaataaatcaatcttgtaaaaaacataaataaaaacaggcctgagag

SEQ ID NO: 6109 - DNA, 600 bp, Rattus norvegicus
tgttctccctgatywaatacacgccactgacctacaacaagaagtacacatatccatggtgggrggmtgccctggggtggctcctagctctgtcctccatggtctgcattcctgcctggagcatctacaagctcaggactctcaagggcccactcagagagagacttcgccagctcgtgtgcccggctgaagaccttccccagaagagccaaccagagctgacttytccagckayassgawkwygyccctccymagrytcmcagarstggagtctaactgstagggacgaggcctttgacacacctgcgagtctgtctgtggggacagctacagacacagagggcagaaccacccctccgtgctggggcagagagacaaaagggggtatttggaagctgccttytgaactgggaacctcctatcttgatacccstattccagggtggtacgcacattgtgacatgcccaaatcaacaacacccctttgaggcagcttakgaaagcccagggaggactggggaggtgaaagcctggcttgtcactgggttsgyttycttccattaaatycaacttcctcccacaaaaaaaaaaaaaaaaaa

SEQ ID NO: 6110 - DNA, 600 bp, Rattus norvegicus
agtgtcccagcgacgatgaggacattgacccctgtgagccgagctcaggtgggttagccaaccccacccgagtgggcggccgcgaaccatacccaggctcggcagaggtgatccggkagtctagcagtaccactggcatggtggtggggattgtcgcagcagcagctytgtgcatcctcatcctcctytatgccatgtacaagtwcagaaaccgggatgaaggctcatatcacgtgratgagagtsgaaactacatcagwaactcagcacagwccaatggggctgtggtcaaggagaagcagcccakcagtgcgaaaagcgccaacaaaaacwagaagaacaaggataaggagtattatgtctgatctcaagattcgaaaaggacacttgyatagaaatagtcttcattttatctgagacataatataaacttatttactttcctttttatgaagcacatacaaaagaagacagggaatgckatcaggagggaaaactctttttaaaaaaaaacaaacaagtatgtcatgctcttgyytctcmraawwaaaacatacacaaaaaaaaggaaagagagaaaaaaaaaaaaamstcgtgccg

SEQ ID NO: 6111 - DNA, 600 bp, Rattus norvegicus
ctccaccccatcccccctttctttccttttcttttctcttcttttcctttctttcttttttaaattctgttttctctgcttcccttcctttgggtttccagagtcgctgggagaagaagggtgggcttgggtggctggggccgggcagtggggctcattcccctggtgccgcaagtcccctcgtgaggagaaactcctgcctgggtctgcccaaggattgggcttggacctggccaaggcctgttgtgtgtgtcgctgccgggcaacgtgcattgctgggaagccgctggaggagcggggtggggggcggggggagggggaaaggcaaatgcagatatatattaaaaacaawtrrccgaggtaccagagctgcgtctgtggcaccagctcgctgcaggcgcagaggatggtgggagtgaggctgtgtctgcggatggctggggtcacttctccgcccatgggctccctgctcccccagttttttttctctttgttaacaaatgtgtctgagtcttggaaaacaccccaaacccggaaatgtgtgggaaaaagaaaacaaaaactttccaaawwmmaaaaaaaaaaaaaaaaaaaaaaaaa

SEQ ID NO: 6112 - DNA, 600 bp, Rattus norvegicus
tcattataaaatccatgtggatgaggacccttaaaaagtaaatttgcatgtaaaaaagccttamacsaragctcttcagagaatgggcttgagagctgtaataaacatactatggcgtccctgtagtcatttagttactgtcaactaaattccatggataaatcctgtgtaacaggtaggagtgaaatattcatgcctgtccaacactttaaaaaaattgcttgaaatccggtggttatgtgtagtcctggctaccggggaccctgaggattgcttgactccacaagtttgaagagcaaatgttatggagctttccatctcagaagattagtgacctgaaatgaagaattcacagctgaaggccttgacttcaggtatttggaaaatggtgcttttctctctgcaacagtgtgtgctagatacaattgtaatcataggcatctaagtgaacaraggagtgggatggacttagcaaaacacaaaactctactgttgtgatacttttatactattttaataatatccaaaagggatcaacacawwtcaaaaaaaaarccgaaataaaagatttawatgaactgtaawmwaaaaaaaaamaaa

SEQ ID NO: 6113 - DNA, 1400 bp, Rattus norvegicus
cctcaccattcctcatcttggccttcttggcacttctggatggagctctccaactttgcatcctatggccttcgaaagtgtctcctgagagtgccatggggacttcgcttttgacgcttctcaaagacccttacatcctggtagcagcaggttccatctgcttggccaacatgggagtcgccatactagagcccacgctgcccatctggatgatgcagaccatgtgctcccccgagtggcagctaggtctggctttcttgcctgctagtgtggcctacctcattggcacgaacctctttggtgtgttggctaacaagatgggtcggtggctgtgctcccttgttgggatggtggcagtaggtatcagcttgctctgtgtacctctggctcacaatatttttggtcttattggccccaatgcaggccttggctttgccataggaatggtggattcctctctgatgcccatcatgggatacctggtggacttacgccacacctctgtgtatgggagtgtctatgccatcgccgatgtggccttttgtgtgggctttgctattggcccatctactgggggtgttatcgtacaggtcattggctttccttggctcatggtcatcattggtaccatcaacatcatttatgctcctctctgctgcttcctgcagaacccgccagctaaggaggagaagcgtgcaattctaagccaggaatgccccacagagacccagatgtacacattccagaagcccacaaaggcgtttccactaggagagaacagcgatgatcctagcagcggggagtaactgcggagggcgatatctgagcctcacatctacagggaccagtctactacagattcaataattttmactttcctctcctccaggscactgccttcctcccttcttattgatacctttcctttactcacctgtaagtgcaacccaccaytytccctctgtgstttgacaccacccatggcccactttttgtgggaggacagtgctatttcctgccaggccaaagcgaagctgattaaagctgagttgtgacaagttctgcaaggggtgactcacttcctgcaggcaggactgaacaatgtgcgtgcgaaatcagggggacaaatgacaagcctgcctttcttctctgattgttttttttttttttttgacatattaccaatatgtcctaaaatttgacttgtgtcctgtgaaatgctttccccttattttttccagtttagcttctatacatacgggtttttgcttattttatgtgctaaaattgtttaccttcattaagtgaggccttcctactttcttcatcgcccaattgagaggaaataaacaactttcttaggcttgaaaaaaaactttagagcacaatggatctcgagg

SEQ ID NO: 6114 - DNA, 600 bp, Rattus norvegicus
tagtggaagaggagcccaagctggtggcccagctgacccaggagtgtcaggaacagcgagagaggctgccccaggagatccgtcggtgcctgctgggcgagacatcagagggattgggggatggccccmtggtggcctgtgccagcaatggtcatscagctgggagtggtgggcaccagtccggcgctgactcggagasccaggaggaaaacacccagctttgaactggcggagcaagaggtgsccacaagactgggtgggcamtgggctgtgggtagaagacactaatactttgggttttttttaaccttttatctttagaaattttatttttttaaaatccgaggcaaatcskmaywcgtrtacacccttcattttcttgggacctcttcagttgtcagcctccccttctaacttcaggcctakggaaagggctagggcttgttccctataacattcacctaagataggygctccccaattcccaagaggcagcaagtggagccctggaactctgagtagtagaaaccaatcctttatatttggggattttttttatatcaataaaagtggacttcmgggaaaaaaaaaaaaaaaaaa

SEQ ID NO: 6115 - DNA, 1400 bp, Rattus norvegicus
ctcaccccatgaccttaggtgctgggctcttgctgcacagtgaagggccaccacacaggtggctgtgaggtccagggaggacaatgttggctcactcctgggtgcaccagatagggagcaacaaggagcatctgttcataggaaggcttctggccagccccacacctcccgccatgagactccacgaggccctctctcagtgtcctgctgaattctggtggcccaagtgtttctgacccctggtttggatgtagcatcatcaggatacagggagggggttgtggctaggactgctgtgctatggggtgggaagggtaaaaagtagccatacaaacgtagttagcattagaaagcatgacgtcactgtttctgtgtttgaggggatggcatcttgtctagggcttaggagcagatggcattgcaattctgccttgcgtggcatcatggctgttcatggcttgtggcaaagggtgtgacactttcctagacaatggctaatgggacgtgccagggcccatcactctctgcagagcatgttaacgtgatatggctgcagatcaggcagctgcaggctcgaccctcacatctgcttcctgacctcccccagctcagccaagtcagtgaactctgagcatgccatagaatcaaggttagaaatgacccgtgatcccagggggatgagagatgagcacagggcaggactgtcgttcagcagctctgtccttcacagcaggagttctcagtggagtcctcatcctccttgggggtctatcttagactccctttgactctgaaacccgttgaaatagcctatgtgctctgatgagtgcagcccataaagtggtgaccagaaaccatggttgctctgggctcacctccctgagatctcactctgttctcctcctccgatygrmastgakgccttctgataggccacagtgaggaaactgacttagggaaaggacagaagggtctgggttcagtcststcttgagcaagagggaccagatgattsagagccagggattcaactgaggtgcagagcagaggttctgtcagtgcccctgccagggcctcagggcctggcctcttggtcaccatgactccaggattcactgcttggactgagaatgctgaaggccctgtatcttattgttttaatgctgtgtgctgaggctgctcttgagggacctgggggaaggcagtgggggagagggctggggaggggcagcagggragagggctggcatgctgcttgctctagccaatgctatgcttgctagactttgtctgactaaatttgggccaccaaatgtatgcacagtcatggcttggaagtgtccgtagatgggaatgcaataaaggtatgtcttctgcttgggaaaaaaaaaaaaaaaaaa

SEQ ID NO: 6116 - DNA, 1400 bp, Rattus norvegicus
acctccttcttgcctatccagatgcactggtaccgtgccacccacaagcaagccatcgactgttatgccaaggagacttgctgtgacttcttcacgaaccaggcctatgctatcgcttcctctatcgtatctttctacgtgcccctggtggtcatggtctttgtctattccagggtcttccaggtggccaaaaggcagctgcagaagatagacaaatccgagggcagatttcatgcccaaaacctcagccaggtggagcaggatgggaggagcgggcacggactccgaagktcctycaagttctgcttgaaagagcacaaagccctcaagactttaggcatcatcatgggcaccttcaccctctgctggctgcccttcttcattgtcaatattgtccacgtcatccgggccaacctcatccctaaggaagtttacatcctccttaactggttgggctatgtcaactctgccttcaatcctcttatctactgtcggagtccagatttcaggwwtgccttccaggagcttctgtgccttcgccggtcttcttcgaaaacctatgggaacggctactctagcaacagcaacggtaggacagactacacaggggagcagagcgcatatcagctggggcaggagaaagaaaatgaactgctttgtgaggaagcccctggcatggaaggctttgtgaactgtcaaggtactgtgcctagccttagcattgactctcaagggaggaactgtaacacaaacgactcgccactgtagtgtaggctttctactctttaagaacggcccctccctgacaggacactaaccagastattttacttgagtgtaataactttagaataaaattgtatagagattttgcagaaggggcacatccttctgccttttttattttakktttttaagctscaastgagagagagagggagagagagcagagagagagagagaagaaagagagagagagagactgtatttcagtgcttaatgttttccttgtacagttcagttcctctttgccatggaacttaaaagtttctgtctgaagtgtttgttggtctgtctgtttggayggtgtttccatgtatctacctcactggtcaagtattaaggataatatatatatatattgctgctggaaattcatatgtaaaggagagagttttcttcctgtacccttggacttgaaatatcctgtgtcttggacctttctgctgtgaatgtggactctctctcactccacttattcgctcaaatggagtgttgwaggcagggatttgagggacaacatcagttgtttttytgagcaaagtytaaagtttacagtaaataaattgtttgrccmtgamwwmawwrmaammwrwwtctccaaaacctcttgactctgg

SEQ ID NO: 6117 - DNA, 1400 bp, Rattus norvegicus
gctgacaacatggagraatgcttccagacaaagagagcatcaatggcaaaggaattaagagaaggaagcatgctcaatgagcatgtgtgtgcagtaataaraaagtttggatcccggaayctscaggcygywctcawcrtbarmctrwgycaaaagtttcccaaagcaaatattactgagattcggaagctggccctggacgtggcccacatccacgagcagtgctgccacggcaacgcgatggagtgcctacaggatggggaaagcgtcatgacacatatgtgttctcaacaagaaattctgtcgagcaaaacagcagagtgctgcaaactacccaccatcgagctcggctattgcataattcatgccgaaaatggcgacaaaccggaaggtttaactctgaacccaagcgagtttttgggagacagaaattttgcccagttttcttcagaggaaaaactcctgtttatggcaagctttcttcatgaatattcaagaaatcaccccaaccttcctgtctcagtcattctaaaaactgctaagtcataccaggaaattttggagaagtgctcccagtctgaaacgccatcgaaatgccaggacaatatggaagaagaattgcaaaaacacatccaggagagccaggcactggccaaacaaagttgtaatctctaccagaagttaggaccctactacttacaaaatctgttcctcattggctacacgcggaaggctcctcagctgacctcagcagagctgatagacctgacagggaagatggtgagcattgcctcaacgtgctgccagctcagtgaggagaaacggtccgcctgcggtgagggactggccgacatttacattggacacttgkgtytaaracatgaggcarrccctgtgaactccggtatcaaccactgctgcagttcctcgtattccaacaggaggctctgcatcaccagctttctgagggacgaarcctacgtycctsyaccattctstgmagacaaattcatcttccacaaggatctgtgccaagctcagggccgagcmcywcrgwccatgaaacaagagcttctcattaacctrstgaaamwwawbcctkwratgacmgaggagcascmcgcggctgycactgctgatttytctggcctmytgswraagtgytgcaawgmccagsatcaggamgcctgtttcgcamaagagsgtccaaagttgwtttccaaaactcgtsaggcywtgggggtttaaacatctccarkaggaagaaaggmcaaaaaaatgtgtcsacgctttggtgtgagcttttcgstttgatggtaaytggtggagacttccatgtgrgatttmtatscctwaggawtaamgactttkcrrstgttwmaraaaaaaaaaaaaaaaaa

SEQ ID NO: 6118 - DNA, 1400 bp, Rattus norvegicus
ccactatagagtacagtgacggaaggccctcaaagcggcatgatatcgcacgctcccattctgaaagtccgtccagactaccagtcaaccgagcgggaacctggaagcgtgaacwcrgcraaywttmcysrkcccyycctcgagtgagcacttggagaagaactggaagctcatcttctattctttctgcttcttcagagtccagtgaaaaagcaaaaagtgaggatgaaaagcatgtgaactctgtgccaggacccagacaaatgaaagaaaaccaggtacccacaaaaggaacatggaggaaaataaaggaaagtgaaatttctcccacaaacacggtttctcagaccacttcctcaggtgctgccagtggtgctgaatcaaagactctgatctatcagatggcacctgctgtttctaraacagaggacgtttgggtgagaattgaggactgccccattaacaaccctagatctggaagatctcccacaggtaacacccccccagtgattgacagcatttcagaaaagggaaatccaagcattaaagattcaaaagacacccaaggaaaacaaagtgtgggcagtggcagtcctgtgcaaaccgtgggtctagaaaaccgcctgaactcctttattcaggtagaggccccggaacagaaaggaactgagactaaagcaggacagrgtagccctgcccctgtagcagagactggtgagacctgcatggcagagcgcacccctttcagttcaagtagctccagcaagcacagttctcccagtgggacggtcgctgccagagtgacgccttttaattacaacccaagccctargaaaagcagcgcagacagcacttyagcccggccatctcagatccccackccggtgggcagcagcacaaagaagagagactcgaagactgacagcactgaatctagtggagcccagagtcctaaacgccaykmkgggtcttacctcgtgacgtctgtttaaaagagctagaaggagaaatgtakgaaaagctggtgttaatcacaactgctgtatagagactttatttcaaaggaaactttaaaggttgaaaatttttgwaaataggtttgattctkgttawaggggttktgttctgsaawccatatttgatagtacacagtcctcactggtcattttgggaggcactcctgttaggtaagaaaaaatggtaaagccacgtatatctatctgtacagtgtgttttacatgtatttaagtagcatccgttccattgtcctttaaatatcgcctgtcttaaaataacactacagatagacactatgatatattgctgttatcaatcatttttagattataaagtaaattcacatcacggagaaattggtaattatgcaaaaaaattagtcc

SEQ ID NO: 6119 - DNA, 600 bp, Rattus norvegicus
tgccacctgattggtcaatacccggagacctacagtgcttgtatagcccggaacccagtgatcaacattgcctccatgatgggctccactgacatccctgattggtgtatggtggagactggcttcccttatagcaacagctgcctcccagatctgaatgtgtgggagsagatgctggataagtcacccatcaaatacatccctcaggtaaagacmccagtgttactgatgytggsccaggaggaccgacgggtacccttcaagcagggtatggrgtattaccgtgccctcaaggcccggaatgtgcctgtccggctcytgctgtaccccaagagcaaccacgckctgtcagaggtggaggcggagtcagacagcttcatgaacgctgtgctttggctgcacacacacttgggcagctgaagccctatgttcttcttgagctgggcarcccgtcttgcactttgctcttggtaagctccaggatctgaccgaacagccaaacagtctcctaggctgtggactcagygaatgggcagaggrctaagaactatgttawcataataaaggaagmcmcmgarmmwrraaaaaaaaaaaaaaaaa

SEQ ID NO: 6120 - DNA, 600 bp, Rattus norvegicus
aattcacttttgacctgctaatcaagtcccatatggtgagcgtggactttcctgaaatgatggcagagatcatctctgtgcaagtgcccaagatcctttctgggaaagtcaagcccatctatttccacacacagtgaagatttggaaaccctaatacccaaacccaccttgttcccttttcagatgtcttctgcctgttatataactctgcactacttctctggcatgkgccttgggggaaattcctctactgatgtacagtctgtcatgaacatgttccccaagttctatttcctgggcttttccttctttctttttcttcttctctgcctcttttaccctcccatggcacattttgaatccgctgcgtgttgtggctcctgcctgtgttttgagttttgttgtatttcttcaagtctgtgatgatcttcttgtggcccagtgtcaactgtgcttgtttatagcactgtgctgtgtgccaaccaagcaaatgtttactcaccttatgccatggcaagtttagagagctataagtatcttgggaagaaacaaacagagagagtaaaaaaaccaaaaaacaaaacaaaaaaaccaaaaagc

SEQ ID NO: 6121 - DNA, 600 bp, Rattus norvegicus
cgttagtcaaacaaataaaaggagccccatcacaatctcacggtattgcaagggccaggtcgattaggtggcttcataggagaccctccgcaactgtgtggtcagtggctggctctcatacccactaagatacatcatagctccatgtcggtggtttatgttgactctaactaaacaattttagagaggagacaaagacaagcaagacaaaggcaggacaagacaagacaagacaagactttcagaacgacaccagagaaaaaccgtcttcacaaagtacgtaccgtcgtccggactacgaaaaatatcactaagggtaactttgacattcatttacagacaccggaacaagagagatacccatttctataataagtggtacattttgttctttttataaataacataaaatcatataaatatattaatacaataactttttttaaccgtaattttgaattggtgtagtcttcggataacatttatgtccaagataaattcacatggttaattgtatattatatacaaaatttatatcttaaaaattacaaaaatttatataaaagtttcatgtattttagacccccaagacccaaaaaa

SEQ ID NO: 6122 - DNA, 600 bp, Rattus norvegicus
acgcatgtaattataaaaacagatgctgagtttgtgtgtgaacggacactgaaatattttctgggcattgcaggaggaaagtggatagttagctattcttgggtgatcaagtctatccaagaaagaaaacttctgagtgtgcatgaatttgaagtcaaaggagacgttgtgactggaagcaaccaccaaggtccaaggcgatccagagaatcccaggaaaagctctttgaaggcctacagatctattgttgtgagcccttcaccaacatgcccaaagatgagctggagaggatgctgcagctgtgtggggcttctgtggtgaaggagcttccattgctcacccgtgacacaggtgctcatccaattgtgctcgtgcagccaagtgcctggacagaagacaacgactgccctgatattgggcagctgtgcaagggacgtctagtgatgtgggactgggtgttggacagtatatccgtctaccggtgtcgggatctggatgcctacctggtacagaatatcacctgtggccgtgatggtagcgagccacaagactccaatgattaatttaagaaatggtcttcccgtcccgggagcatctct

SEQ ID NO: 6123 - DNA, 1400 bp, Rattus norvegicus
cagcaatgggaagcacaatggtagagaggaagaattcttcacatatcgttcctcagtcacctataagtgtgatcctgacttcacactccttggcaatgcctccattacctgcactgtggtgaacaaaacagtaggtgtttggagcccaagccctcctacctgtgaaagaatcatctgtccttggccaaaagttttgcatggaacaattaattctggattcaagcatacctataaatacaaagactctgtgagatttgtctgccagaaagggtttgtcctcagaggcagcggtgtaatccattgtgaggctgatggcagctggagtcccgtaccagtgtgtgagctcaatagttgcactgatattccagacattcctaatgctgccctgataaccagtcccaggccaagaaaggaagatgtatatccagtgggtactgtgctccgttacatctgtcgtcctggctatgaacctgctacgagacagcccatgactgtgatttgtcagaaagatctcagctggagcatgcttagggggtgtaaggagatatgctgtccagtaccagacccaaagagtgttagagtcattcaacatgaaaaggcacatcctgacaacgactgtacttacttctttggtgacgaagtgtcatacacatgtcaaaatgatataatgcttacagctacttgcaagtcagatggcacctggcatccccggacaccatcatgtcatcagagttgtgattttccgcctgccattgctcacggacgttatacaaaatcttcttcatactacgtcagaactcaggttacatatgaatgtgaagaaggatacagactggttggagaggcaaccatctcctgctggtattcacaatggacaccagcagctccacagtgtaaagctctatgtcggaaaccagagataggaaatggagtactgtctactaataaagatcaatatgtcgaaactgaaaatgtcaccatccaatgtgactcgggctttgtcatgctaggttcccaaagcatcacttgttcggagaatggaacctggtacccaaaggtgyccagatgtgagcaggaggtccctaaagactgtgagcacgtgtttgcaggcaagaagctcatgcaatgtctgccaaattcaaatgacgtgaaaatggccctggaggtctacaagctgactctggagattaaacaattacagctccagatagacaaggcaaagcacgttgaccgggagttatgagcgggtgttctctcaaggaggaagaagtacctcatgggctttctgacttcagtgccaagcagaacgtctgcatttttagcaacctttgtaactttggcaccaatgttcatggtaataaatatctgcttagaataattcattaaagcataatgtaagc

SEQ ID NO: 6124 - DNA, 1400 bp, Rattus norvegicus
acatgccccctggcattgagcccagcccggacaagatgctccagggccgcctttttgcttacccagacactcaccgccaccgcctgggaccaaactatctgcagatacctgtgaactgtccctaccgtgctcgcgtggccaactaccagcgcgatggccccatgtgcatgcatgacaaccagggtggtgctcccaactactaccccaacagcttcagcgcaccagagcagcagggctcggccctggagcaccatagccagtgctctgcagatgtgaagcgcttcaacartgctaatgaagacaacgtcactcaggtgcggacattctatacgaaggtgttgaatgaggaggagaggaaacgcctgtgtgagaacattgccaaccacctgaaagatgctcagcttttcattcagaggaaagcggtcaagaatttcactgacgtccaccctgactacggggcccgagtccaggctcttctggaccagtacaactcccagaagcytaagaatgcaattcacacytacgtacaggccggytctcacatagctsccaagggaaaagmtaacctgtaaagcacgggtgctcagcctcctcagcytgcaytgaggaratccctcatgaagcagggcacaagcctcaccagtaatcatcgctggatggagtctcccctgytgaagcgcagactcacgytgacgtytttaaaacgataatccaagyttytagagtgaatgatasccatgcttttgatgrcatttcccgagggggaaattaaagattagggcttascaatcacttaacagaaacatggatytgcttaggacttytgtttggattattcatttaaaatgattacaagaaaggttttytasccagaaacatgatttgattagatatgatatatgataaaatcttggtgattttactatagtcttatgttacctcacagcytggtwtwtatacaacacacacacacacacacmcamamamamammamaamacacatacactatacacacacacacacacacacactaaaacacacatacacaacacacacatacactacacacacagaacacacaacacaaacatacacacataggcacacacacacacacacacacacacacacacacacacacacacacacatgaatgaagggattataaagatggcccacccagaatttttttttatttttctaaggtccttataagaaaaaccatacttggatcatgtcttccaaaaataactttagcactgttgaaacttaatgtttattcctgtgtagttgattggattccttttccccttgaaattatgtttatgctgatacacagtgatttcacatagggtgatttgtatttgcttacatttttacaataaaatgatcttcatgg

SEQ ID NO: 6125 - DNA, 421 bp, Rattus norvegicus; identical to SEQ ID NO: 2029

SEQ ID NO: 6126 - DNA, 600 bp, Rattus norvegicus
ctcggagctgacggaggaaagtattgtattccacttcctgctacctggcaccttctgaaaggaaggtgggcttacctcctgtcacttagcaggagtcagaacccttctggtagtcactgtataaccttcacctaggagtggttggtgtctaggaagccatgcatcctctgaagaaagaatggcactagaaaaagtattacttcgaaatcgatttctttccattgtgacaaccgaatttcgcatcatcctttgaattgccccaagtgcaccgtgtttcctctgggggaggggtctgctgctctcattcttctggctgctgtattgttgggtttcttcttttccttctgctgggactgtgtggggagcgggtggggtggggggtgggagggctgtggagaacccttcccttgtgcagggcatccatccgtgttgtgaacccagagctgggggccaaagctgcttttgtattcagtgtgaggtggtgtttacagccgactttgacatcagtgggtgtgttctcagtggtgtgtctgtacctgaactatttaatgttgtgtcatgtttatataaagaatatttatgcatamwwwaaaaaaaaaa

SEQ ID NO: 6127 - DNA, 1400 bp, Rattus norvegicus
  misc_feature (1322)..(1322): n is a, c, g, or t
  misc_feature (1385)..(1386): n is a, c, g, or t
cagggtcccaaaggccgtcaccatgccgttcggcaacacccacaacaagttcaagctgaactacaagtcgcaggaggagtacccagacctcagcaaacacaacaaccacatggccaaggtgctgactcctgacctgtacaataagcttcgagacaaggagaccccatccggcttcactctggacgatswcakscagactggggtggacaacccgggtcaccctttcatcatgacggtcggctgtgtggccggcgatgaggagtcctacactgttttcaagracctgtttgaccccatcatccaggaccgccatggtggcttcaaacccacagacaagcataagaccgacctcaaccacgagaacctcaagggtggagacgatctggaccccaactatgtgctgagcagccgcgtgcgcactggccgcagcatcaagggctacactctgcccccgcactgctcccgcggagagcgccgtgctgtagaraagctgtccgtggaagctctcaacagcctgacaggcgarttcaagggcaaatactaccctctgaagagcatgacagagcakgagcagcagcagctcattgatgaccacttcctgtttgacaagcccgtgtcacctctgctgctggcctcaggcatggcccgagactggcccgacgcccgtggcatctggcacaacgacaacaaaagcttcctggtgtgggtgaatgaggaggaccaccttcgcgtgatctccatggagaaaggrggcawtatgaaggaagttttccgccgcttctgcgkgggcctgcagaagattgaggagatcttcaagaaggctggycmccccttcatgtggaacgagcacctgggctacgtgctcacctgcccctccaacytgggcaccgggytgcgcggaggcstscacrtgaagytggcgaacctsagcaagcmccccaagtttgaggagattctcacccsccttcktctgcagaagcgcggcacaggtggcgtggacaccgctgcggtgggcsccgtgttmgacatctccamcsccgatcggbtgggmtcttccgagswckarcmggtgcrscwsgwggtggatggcgtaaagmttwtgktggagatgragaaraagytggaaaaagscmasyccatbgasgacatgatccctgcgcaraartaggcbccgcrcagagcgcrccagtcagcggyytgcakytggagccccsccccbtggaagtccamccaaccgactykgccctytgggttytggccaatragaacstgcmtbtccggggccccgcccgcctgytggaactcctgcamttggrsgbtgnttccccmcsccctgccttaaataaaagbycrtggtggtcttdaaaaaaaaaaaaaaaraaaanntagttgtgcggccg

SEQ ID NO: 6128 - DNA, 600 bp, Rattus norvegicus
ggatggtaactacctacactgttttaccaaatcaagagactawgtctggctgaaagaaataaattggtgataagtggaatwcgagmacrakgasgttgktttwaacatttaaaaaaatcaaagccacacaamtgttcatttgtgagggaattggtaatgccgatggacagatsaacagactgtatcatgacatgtatttgtttgctgggtaacagaatcgctttacatastccacttacacctgcactgaaaggactctgmaaagtggmaamaaataagcaaaaccgwatgatcagatgctgtccttgactgtcctcacaggatcactataargtccactaaacygkcwcsrrskcttctcatcaagtcctctaacaamccwtggggtaagrgggtatagaaaagaaggaaagatgaagataccaagatgcactttgtaaaaatctgaaaaacagttgaaggatgctctcggaaaatagagaaagtcaggatccaattwtgttacattttgaaaaaatgaaatggagataataaagtaataaattttaaaatgccawwrrraaaamwwmaaaaaaaaaaatttaaaaaaaaaaaaaaaaa

SEQ ID NO: 6129 - DNA, 600 bp, Rattus norvegicus
gygctgcatcttcataaaccagtggcaggtcaaccatgatgagaagcagtggaaagacccctttgtgttccgcccagagcggtttcttaccaatgacaacacggccatcgacaagaccctgagtgagaaggtgatgctcttcggcttgggaaagcgccggtgcattggggagatcccggccaagtgggaagtcttcctcttcttagccatcctcctgcatcagctggagttcactgtgccaccgggcgtgaaggtggacctgacacccagctatgggctgaccatgaagcccagaacctgtgaacacgtccaggcctggccacgcttctccaagtgaagatggccgagacatcggccgccacccttgttccttttcctttctttttaaataacagctttttcaagatacaattcctccaccatttaattcagctccaatcaattttcaatattgtctacactgttccctgcaaacccatacccattaagatttatgactattcctcctaccctgtttcgcttgctgtgccaygtgctaatctagtttttgactcaatagatttgccaactctggctgtttcatataaaaaaaaaaaaaaa

SEQ ID NO: 6130 - DNA, 1400 bp, Rattus norvegicus
gaagttgggctacagtaagcagtggccagaagccatgaagataatcacaggccaacctaacatgtcagcctctgccattatgaattacttcaagccactgactgaatggctcgtcacagagaacaggagacatggagagacactgggctggccggagtacacctggacaccaaacacsrckmgkgcararggctccctcccaragtccagtcgcgtcaacttcctgggtatgtacctggaaccacagcaggcccgtrkgggccagtgggtgctgctcttcmtaggcgtcgccctgctggtggccaccgtgggtytsgcccacsgaytctacaacatccataaccatcacagcytccgccggccccayygtgggccccagtktggstccgaggtggagytcagacactcytgaggtgaccctgccgtcaagkccaacagaggagtgtcmcrwddaaaaaaaattakatgggggacatggtgtttgagtggaacatacccaagctgggcsttcttcctttgytgttcccatccaytytgccccccagcccagcccccattbtbtagatacccakcatstaacctgkaattccctgcccggtctctgtgaatacaattaawggtcctccccaamammwrarwmwrwrwmccttgtgggaagccagggacaggaccggytgcttgcctttctgtctaacagtccagcaggacccttacctgattaccttctcagtctttctccaagctctggaccctatccccagcaacctttcccaccagccttcctgagagaccaggakaggtggygtgtgtcctgcctacccatgcacctgccagggaggaacctaggaaacaggggaaggaagcaggtaccatgggctgcctcctgctttacatgcagattcactatggatggttcattctgttccacagtgatctctgtgtgaatggatgtctcarggggaaggccctggatgcccttycctgctacaggragagggccctggaagggtytgactcacagagcatcccagagcccagctggttcctaagtaracaggytgggttccacacaggttgtgcccagggaaagagcwttaatcagtgcccgcacagtgggttcactgttwcagcccmcctcctcatcccagaacacgtcccctcagcytaagccatcctttggaaggcctacatggattttgggggcgtcacttgaagtaactttttgtytacatatttatgtagtaaatttggaaaatytgaataaaaagtccatgatagcaacawmaaraaawawaagcattgttggcactttggtatcatccagccttttttattttatttaattttatttttctccacatacgatataaacgaggtaccactaaaaaaaaaaaaaaaaa

SEQ ID NO: 6131 - DNA, 1400 bp, Rattus norvegicus
aataggccaagagtcaactgtaaacagcttcacttaaaaatcgaactttccagaaaggaagggtaggagttgagtttgctgtccaaacaggtgctaaaactgtccgagcagttttcagattggaaaggtaggtgcatgcctttgttaattaacttctccaataataattgagccttacagcaggagtgggattcctttttctcagaattgacagatgcattgttgatgacggttttatttatttatttattgtactatatgaatattttaaatttatcatagtgaatctatatttaacatatttaacagagcaaaccaatgtgttatctgagactgacctctccatttgtactagcactttatgagccaatgaaacatacgcgtagactctgagattctgaattgtgagttacttctgggaacacagcaaagactgatgtggtggctccttaactcgacaaggacacaaagaaacgcaagaggagaagtgactaatgccaccaatgctccccctaaaaagattttgaaaagattagtttttttttttttttaaaagaagctactattgtgttctgagtgttttaaatggcagaggctttccccggggcgaatttgcacttctgtaaatatctatgtaagaaccagctcaagaggaatacaactttatmwykmsgcttttggatrgcgaggaakagcatatgccactttgtatttatgtaaactaattggccctccttgtcatttctcatttcatgcttgaaatagctttctgaaacaaacaaatgactgtccaggctggagatctgcakggtggagaatgagttgtaaattcacaggtcacagcagyccctccgatagctgggctcatcattggtcctttatctgcccaggtctaaccaagtcggctgcttaaggggctacttttgtagtgctttaatccgaatttagtatcctctcttttaaaaaaaaaagctctttaawgttagtggtaaactagctaatgaacggtacctcatcgctgcataatacacttctgttggtgggggcgtagacgagcccttcccggtgcgagcaccacaaagccatctgcatagctagtcacaaatgctgtttttctttctctgtgggtttgaatctagtttccttgttatcatagcctggactgcaaaaagatccatccagtcccctcttgtgggggcattgcaacagtgtttctttttgtttttgttttgtttttgaaatgtttacaaggtgttctttggaagcagttgcaacacgtggatggaactgaagaaaaggctgactggcttgctaacggtatctcctgcagggggtttgtactgcggactttgaatgttttctcagctctaaggcttgtatgctttcttacatacaataaa

SEQ ID NO: 6132 - DNA, 1400 bp, Rattus norvegicus
ccaagttctttgagatccagaccatgcccaatggcaaaacccggacctcccttaagacgatgagccgcagaaagctctcccagcagaaggagaagaaagccactcagatgcttgccattgttctcggtgtgttcatcatctgctggctgcccttcttcatcacgcacatcctgaatatacactgtgattgcaacatcccaccagtcctctacagcgccttcacatggctgggctatgtcaacagtgccgtcaaccccatcatctacaccaccttcaacatcgagttccgcaaggccttcatgaagatcttgcactgctgagtctgccccttgcctgcacagcagctgcttcccacctccctgcctatgcaggccagacctcatccctgcaagctgtgggcagaaaggcccagatgracttggccttctctcgaccctgcaggccctgcagtgttagcttggctcgatgcccctctctgcccacacaccctcatcctgccagggtagggccagggagactggtatcttaccagctctggggttggacccatggctcagggcagctcacagagtgcccctctcatatccagaccctgtctccttggcaccaaagatgcagcggccttccttgaccttcctcttgggcacagaaactagctcagtggtcgagcacaccctgatcgctggcttggcctggcccttgcttgcctgtgccrgatcaggtggtgggagggagcracagttcttactttataggaaccacataggaaagcagggaacacgccaagtcctccaggcaacatcagtgtcaggagacacacataaacaccaggtagctccatggaccccagagaaactgaggctgaaaaatctgttttccactccaactctagtgtgagtccctacttttcatagccatgggtattactatgtcctaccttgttatagtatcccatggggtttctgtaccstttgggggaaaacaactctaatcctcaagggccccaagagaatctgtaaggagaaaaataggctgatctccctctactctccaatccactccaccacttcttgatataccttggatgtatccattcctcacagcaaatgctggccagtcaggccttggaccagtgttggagttgaagctggatgtggtaacttggggctctttggggctgggggggttgttaacatcgtctctcttccatatctcttccttcccagtgcctctgccttagaagaggctgtggatggggtgctgggactgctgataccattgggcctggccctgaatgaggaggggaagctgcagtttggagggttctgggatccaactctgtaacatcactatacctgcaccaaaactaataaaaccttgacaagagtcaaaaaaaaaaa

SEQ ID NO: 6133 - DNA, 600 bp, Rattus norvegicus
cacattgactacagagccccgtggtgttttggaagccatgacttacatagagcgagccctatggccaactctgcgctctccatgctggctgggatcttagcaagaacatctgtccggcttctacagtttcttgttcagactggcagaggaccagcgtccttgttccaaacattccaagagaggttgaggtgttccctaacctgtcttcgtttgcatccgctggtagcaagtgattctcttgcctcttcttgctgtctggggatggcctcggacctctcggagagcagagacacagtgccattcctgagtggcatcatccagagagccaggagattccatagcagggcggagtttctgtagaaagtccttagggagtgttcgtgtctgactcaggcgcctggcacatttcagggagaaactccaaagtccatgcaaaaaattttctgaggaatgcacaaattgaaaacatactcgaaggacaaacacttgagtttttttttttttaaggacttttttttaagttgtaaaatgcaaaactcaaagcaactgttactactgtacattaggatatgtttcatgaatatgagtctacccaccttt

SEQ ID NO: 6134 - DNA, 600 bp, Rattus norvegicus
gcatgcccttggtgtgcacagcaatcttctataccctcatgacctgtgagatgctcaacagaaggaatgggagcttgcggattgccctcagcgaacacctcaagcagcgtcgagaggtggcaaagaccgtcttctgcttggttgtcatcttcgccctgtgctggttccctcttcacttaagccgaattttgaagaaaaccgtctatgatgagatggataagaaccggtgtgaactgctcagcttcttgctgctcatggattacattggcattaacctggcaaccatgaactcttgcataaacccaatagctctgtattttgtgagcaagaaattcaaaaattgttttcagtcatgcctctgttgctgttgtcaccagtccaaaagcctcatgacctcggtccccatgaatggaacgagtatccagtggaagaaccaggagcagaaccacaacacagaacggagcagccacaaggacagcatgaactaaccctgtgcagaagcaccgagcagtgtgccttcgagtcccaggatgaaacggtcacgcagcagctgcgctcccaaaacctcccaggtctctcccctgctttttgtctaagctt

SEQ ID NO: 6135 - DNA, 600 bp, Rattus norvegicus
ccgttaattttgtaaatactgctcgactgtaactctcacatgtgacaaaatacggtttgtttggttgggttttttgttgtttttgaaaaaaaaattttttttttgcccgtccctttggtttcaaaagtttcacgtcttggtgcctttgtgtgacacaccttgccgatggctggacatgtgcaatcgtgaggggacacgctcacctctagccttaagggggtaggagtgatgtttcaggggaggctttagagcrcgatgaggaaragggctgagctgagctttggttctccagaatgtaagaagaaaaatttaaaacaaaaatctgaactctcaaaagtctatttttttaactgaaaatgtagatttatccatgttcgggagttggaatgctgyggttacctactgagtaggcggtgacttttgtatgctatgaacatgaagttcattattttgtggttttattttacttcgtacttgtgtttgcttaaacaaagtgacttgtttggcttataaacacattgaatgcgctttactgcccatgggatatgtggtgtgtatccttcagaaaaattaaaaggaaaataaagaaactaactggtt

SEQ ID NO: 6136 - DNA, 926 bp, Rattus norvegicus; identical to SEQ ID NO: 2040

SEQ ID NO: 6137 - DNA, 600 bp, Rattus norvegicus
gcctcctgctcaaagtgaaccagattggctctgtgaccgagtctctgcaggcgtgtaagctggcccagtccaatggctggggtgtcatggtgtcccatcgatctgrgsagaskgaggacactttcattgccgacctggtggtggggctctgcactgggcagatcaagactggtgccccctgccgatctkagcgcctggccaagtacaatcagatycttagaatcgaggaggarctgggcagcaaagccaagtttgccggcaggtccttcaggaaccccctggccaagtaaggcatggaccggagatccctggagctaccagatcctctgtctccgtcatccaggcggctcaaggctggcccagtgcttgcccctcccatgtcactgcttccttagatgtccaccccgaccacctggagccctgctggagcccccagctttgtaatcatgtgatcagtctgaatcattgtttctgtcacctgactttccagctagtgtctggagccctctgaactccagcgtaatctctagagtgcccacaccatcaagactccccccagtggtttacttgcaaaaataaaagctgcagaagctcaaaaaa

SEQ ID NO: 6138 - DNA, 600 bp, Rattus norvegicus
ttctagccatgctgtgcatgccgctttctctgtcggggggtctctataaatktgttgaactcttacgtacattccaaagaagtttcaaggaaccacaagtatatgtatacaaatacatatatgaagtatatatgttaaawtgraattatctctatcaggaatackgcctcagttaattgaattttttttaaggawacttttttttaagcggagaattattggggtktaaaagatgttatattgkgtttgmmtattttccagcttgtattttcacataatttawatttyttaaatgctgaaaatttaaaagcgagatttaaaaaggaaaagcaggkgctttttttttaaaaaaargaatcagaactgaggtagcttagagatgtagccatgtaagtgtcttaaatgttttgtttttaaaaaaaaaacaaatgcaaaaaaattcttmtgggggagttttttgtttgtttcttttmgtagctgatgctggcacattttgctggaaagttttttatatactgtagcctgatttcatattgtaytttaaactgtgctcgwrmykaawkvgacaaagaaattcattcataaaaaaamaaaaaaaaa

SEQ ID NO: 6139 - DNA, 569 bp, Rattus norvegicus
tttttttttttttttttggggaggaagaagccccttataaaatagccaacagtgggtggcctgacagacagagctgttggtggcagctgggaaaggaaacctcattgccaccatgaacttctccggcaagtaccaagtgcagagccamgagaactttgagcccttcatgaaggcgatgggtctgcctgaggacctcatccasaaagggaargacatcaagggggtgtcagaaatcgtgcatgaagggaagaaagtcaaactcaccatcacctatgggtccaaggtgatycacaatgagttcaccttgggggaggagtgcgaactggakaccatgactggggaaaaggtcaaggcagtggttaagatggagggtgacaataaaatggtgacaactttcaaaggcataaagtccgtgactgaattcaatggagacacaatcaccaataccatgacactgggtgacatcgtctacaagagagtcagcaagagaatttagacaaggctgtatttcatattcttttacagtataaaattaatacaataaagttacctctgttttgaamywmgtg

SEQ ID NO: 6140 - DNA, 600 bp, Rattus norvegicus
atggatctatctggtggacgcaggccttgaagaacaacctaaattatgaagagagttttaaaatgttaaactgtaatttgtatttaagaatttgtagtaaaggtgcccaagaaattatattggccatttattgttttgtccttttctttaaagaactgtttttttccttttgtttacttttagaccaaagattggattctagcaaatgcacttggtatactaagtattaaaacaagcaaacaaacaaacaaaaaaaggaaggttgtttagtttggcaacactgcccattcaattgaatccgaaaggacaaaattaaggattgccttcagtttgtgttgtgtatatttcgatgtatgtggtcactaacaggtcacttttattttttctaaatgtagtgaaatgttaatacctattgtacttataggtaaaccttgcaaatatgtaacctgtgttgcgcaaatgccgcatcaatttgagtgattgttaatgttgtcttaaaaattcttgattgtgatactgtggtcatatgcccttgtttgtcacttacaaaaatgtttactatgaacacacagaaataaaaaataggctaaattcatatat

SEQ ID NO: 6141 - DNA, 600 bp, Rattus norvegicus
gcactatgacctgtcctatgacacgggagacaaggccttgcagtgtggacgccacgtcgatgtctttaaattatggctcatgtggagagcaaaggggactactggatttgaagctcacattgataagtgtttggagctggcagagtatttatacaatatcattaaaaaccgagaaggatatgaaatggtgttcgatgggaagcctcagcacacaaatgtctgcttctggtttgtacctcctagtttgcgagttctggaagacaatgaagagagaatgagccgcctctcaaaggtggcgccagtgattaaagccagaatgatggagtatgggaccacaatggtcagctaccaacccttaggagataaggtcaacttcttccgcatggtcatctcaaaccctgcagcaactcaccaagacattgacttcctcattgaagaaatcgaacgcctgggacaagatttgtaatcactttgctcaccaaactttcagttctctaggtagacagctaagttgtcacaaactgtgtaaatgtatttgtagtttgttccagagtaattctatttctatatcgtggtgtcacagtagagtccagtttaaaa

SEQ ID NO: 6142 - DNA, 1400 bp, Rattus norvegicus
gtaagatctgtggcaagagcttcaagaggtcatccacactgtccacacatctactcattcactcggatacccggccctacccctgtcagtactgtggcaagaggttccaccagaagtcagacatgaagaaacacactttcatccacacaggtgagaagccccacaaatgccaggtgtgtggcaaagccttcagtcagagctccaacctcatcactcatagcagaaagcacacaggtttcaagccctttggctgtgacctgtgtgggaagggcttccagaggaaggtggatctcaggaggcaccgagagactcagcatggactcaaatgagtaccctggcagtctgcaacaccaactgtctaacactactgtgagggatgtcttccctgcctccctccagccccttctcaggccctgagtccagtgtgcaaagctcatcttggttattccccttcgtcttccttcccggagctcctggaggagatgaactcctgtttctaaggtcagcccagtgtgggatccacagaaatcgtttgtgctttgggcttccctacagctgaagccgggaatcaaatgagatcttgcacctcccagttcttcccttttctgcccttctcacaggcggggaagaactctgggcagctgctaaaaggggaggcatcaccgcttgaactttggacaccaccgatgcttttattgagaaagactgacctttctggggagactgctgacctctttgtcctccaccagacaccggtttagggaaggaaagtatccctttgaaatcatcagaagcaccatcaggcctgccaggagaaggagcaggaaaaggcggacttggcgatgagagggagtcagaggtcccgtggagccaatcagagtgggtgaaacggcagaggagcagctcctctcagaggaacgggctcctcttttactcagcgcgtggttgttggccacaggttatcagagtaaaaaaccgcattaggtatgggagagccagaggttaaaatcgacgctcctaacccccaaaagctatcagtaggaccccaacatagctagaacccgtgttctccgcctccaagggagttctgaaaaaggccacacaaacattcgaacttctttttgacacttctggagtttttcaagcgtaaacgaaacagaactggagagttatttcaaaaattcatgagcaaatccagtttttattgttaggtggaattttataagatgcccaagctggcaggtgtggagcaaaggctgtggcctcaactgccgccccttatcatctaggaagaacgcatttcctgtgcgggtgtaaatgtttctaaatctcctgagtgcattgtgaactagcataatcatatttattagaatgttgttttaacttaataaagtattaag

SEQ ID NO: 6143 - DNA, 1400 bp, Rattus norvegicus
attttcaacatcttttactggatcacatacaagatcattcggcatgaagatgtccacaagaaatagatgtatcctattgaccctgggaccttctttgcctaagtgttgtgcttgtaaatacacagtaatagtgtctttatattgctttgacagagaacattgagggtggggggaggaaaatcatgagggtggggtttctggcacctacatgacaaaggacaggttctatgggcaaggaagaaaactgcacaaaattaaggtgttgcagaatcacatgagcataactcccatccatagtctatagcattgttctttcagaggacacatcactcagacatgatatgcaaggtcaagttcttgagggctggttatcttatggtttgatttgacaagttctggttctgaaaggttagtttaatgcacacacacacacacacacacacacacacacacacacacacacacacagaaaatgcttaccatctgacaatagtgactaccatatagtaaattgaggaccaaactttttcaggaaaatgctgcctcatttttaaaacaagcctcctgagctatgatatttacaatgtctgtaattagtgtttcacccaagaaatccttttgtgggttgtaaattctttctacaaatccaggaaacaacaacaagataaacacaaatgactaagagcagatttctactctgctgtctgtgtaggtgtgcactttgatattatttttctttcctagatataatgtgggggcttccttgtgtattgcgtaattgatttactggtatatcctcttaaaagaaatgctcattttattttagatcaagttagcatattatgtatattttttcactttggctatacttatgtgtgactttaagtgcccaagtgtaatttagctattgcagctgctatgccacagtatttatggagacggtgtgttgtgattggtgtatctcagagtagctcaaacttcccatttctgccctcattgtagctgtaactactagtcctaatgttgactgacctgtaatttgtactttcaatccaagtgaatatcgttttaaatatccttgattaactgaaaaaaattcaaactgtactgtgattttcataacccgttgccttttcggtatcagagctacgtggtttgaatcctggctacatgttttaagtaagaaaaaaaatatgtatttttgcttactcaaaagacaacctgtaaagttatatggaaataattacattttacatgtgctgtaaaagggattattttaaaaaagcatttgttcagtttcaataaaggtaagtgtgccaccaaaaaataattcccatgttgctggtggtggtagttgttgaatagctgttggcattggtgaaaaaggagctggaactggc

SEQ ID NO: 6144 - DNA, 600 bp, Rattus norvegicus
  misc_feature (331)..(331): n is a, c, g, or t
gtgaacgcytaaaatataggaaatgraaraagctagtttttatamcataaaacagtataatttagcttatcggccytgcagcatagtccagcagaawtaaagtagcacctgggggcaggsgtacytgcaagtgacacgggagggacacttgggaacttgttatgcagtcmagagagtgaagtaaccacttymccaatttggagawswattmkgwygagkaattgaaccatacttcaaatagagtgtcccagaagaaaagastggctccctgyttggaggmtggcagacttcagactcagcstgtrtgtcccttcwccaaggytttgccgtntacacagcacctcghtatccrcaggbtggagactgcctggggttgayttctgtttggggakttactggccagggcttttgaacaggagtgttccacagaagtaccagacattatttatwtaagaatgagcgcttctttttaacrktaccctttcaraaatttytaahtactttgtaactscatgattaacttggtgataaaagcagttattaaaagtytaccttttccrraarrmraarrmarraaaaamamwwwrmrrmckcawgctt

SEQ ID NO: 6145 - DNA, 600 bp, Rattus norvegicus
agcaccaacagaaaccaatgagaagtcttcaacgcatttgtcatttctgagctgcctgcattgtcctattcttggcccactgagcctgtgcatatatgacagracagatactckkagwytarrmarrrawrwawwrwtgatgcaggccaccagtcccttttcttcttctttttcagtctggtctcactaagttatccaaactggtcttgaacctgccttatagcctagggcctataaggtcacaggccagtctaccagcacatgtgagcagtagcactctgctgccgcgaggtgttagtcagggagtgtgtgacacgccacagattttttttttttttttttttttttggagctggggactgaacccagggccttgcggttgctaggcaagcgctctaccactgagctaaatccccaacccccacgccacagattttgaagcagtagatacggcaaggggagagagaggcaaaggagaacttgggtatcagttcaggattgggaatctaacctcacgcctgtccacagctcctgtccctatcgagcctcagatctgccaggccgcctgtgcagtgatgaagctgtcatttgacgaggaag

SEQ ID NO: 6146 - DNA, 600 bp, Rattus norvegicus
ttgagtctgatgtctgagtgagggaagagagagaggttaaggtgggtacgggagggatagggctgtggsccgcgtggtgcgcatgtcatggaaagagtcgggggtgaacttggctcccattcgctttttcttcttcttttaatttctctatgggatcctggagttctggttccttactgaaggcaaccctcgtgsmcagcaccatttctcctccctcgcgcagttctctccttcccgcatctgtccaccattcctgtttccatgagagaatagaacggggcctcagtgtgggaggatggagaggagaccaaagcgctgcctgtgtgcttctttctagcgcagaagggctcttagcagttcactttgagcgaggctttcctgatgctgctctctttgttcaggtgaggaagcgaaggtgttctgaggaaggccattgaacctcctgttcataagagagaagaggctttcactgaattcttgccgcgtggttgacatctgcagagggaccatgtaccgagcagagggcaggaagtcattgtgtatatataagccaaaaagataaataaaaatcttcttcagctccaaaaaaaaaaaaaaaaa

SEQ ID NO: 6147 - DNA, 600 bp, Rattus norvegicus
taccagccacagcccctggctcattggaacctgggagcctccagcacacagagtcaggaccctggggctaggcacaggctacagggacagyggsrygmkggaagaggtcagcagggaarcctgtgggacacaaggttttccaaggtcctgcacctggaggcgggtctccagcctggaatcagaagtgtgaggttactggcagctttggttcctgctggactggcttctgtggccggccttggccaggtttgggggacagsccagcttgggctcctctggcttmtattttgaaatcctggccatgggaccccagtgaaaaggatatcttccaggcccagcttttgaccttagtgtgggctgggatcttgttcatcacatgacctcttgcggtggtcacagggagtaaaaatgtgtccctgtcctgttgtcagctagttcctagttgtggttgctgtggccttgggttgggacacagaaattggaaatcgaggttggggtggggccatcccacttctttgcsscaataggctggggtttcttttcataggggcattggaacattaaagcaacgttttacrgcgmaaaaaaaaaaaaaaaaaa

SEQ ID NO: 6148 - DNA, 600 bp, Rattus norvegicus
tcttctcattcccaractattttcagtcagcytgctctatcaggactggtgaccarstgyyargacagggtcggcgcttctgtctagaatatgcctgaaaggattttattttctgataaatggctgtatgaaaataccstcctcaataacytgcttaastacatagagatttcagtgtgtcaatattctattytgtatattraacwaaggctatataatggggacraatstatattatactgtgtatggcattwttaagaagctttttcattattttttrtcacagtaatttttaaatgtgtaaaaaattaaaaryyagtgactcctgtttaaaamtaaaagttgtagttktktattcatgctgaataacctgtagtttaaaaatcygtctttctacmtacacagtgaaatgtcagactgtaaaattttgtgtggaaatgtktaastwttaktkttctttaaatttgctgtyytggtattaccaarccacacattgtactgaattggcagtaaatgttagtcagccatttacagcaatgccaaatatggataaacatcataataaaatatctgctttttcatcaaaaaaaaaaaaaaaaa

SEQ ID NO: 6149 - DNA, 600 bp, Rattus norvegicus
gggaggtactcatcctgagctgctggtggcccacgcatatacccgctacctgggtgacctctcagggggtcaggtcctgaagaagattgcgcagaaggccatggccttgccaagctctggggaaggcctggcttttttcaccttcccgagcatcgacaaccccaccaagttcaaacagctctatcgtgctcgcatgaacactctggagatgacccccgaggtcaagcacagggtgacagaagaggctaagaccgccttcctgctcaacattgagctgtttgaggagctgcaggcactgctgacagaggaacacaaagaccagagtccctcacagacagagtttcttcgccagaggcctgctagcctggttcaagatactacctctgcagagacgccccgaggaaaatcycagatcagcactagttcatcccagacaccgctcctgcgatgggtcctcacactcagtttcctgttggcgaccgtggcagtgggaatttatgccatgtaaatgcagtgttggcccccagaggctgtgaactctgtctcatgtagccttctctctgcaggggagaatcttgcctgggttctcttttctttggg

SEQ ID NO: 6150 - DNA, 600 bp, Rattus norvegicus
aactgtggagctggcctaaacaatgacagtcccgaggccctcgaggtcccctctttgcaggactttaatgttttctccacagattcctgcctgcagctttcagacgcactgtcgcccagtttgccaggctccctggrcagtcctgtagatatttcagctgacagctttgacttttttacagacacactcaccacaatcgacctacagcatctgaattactaagaacattaaagcaaaagaaagcttcacaaaacammwcgystttggccaggtgctttgccttcttttattccgggagttgattttcgttctattctcttctcgatctacccctgttctcttaaatgttcaggactttctgttttacacccagtttgaaagccatctcttccaaatgatgttggcgttctaagtgttttacaccgaacccaacaagcttctatgtgattttcctgaaaacaaaacacgwggcctgcaagaaagtgaccataagttgtcttgtcactttctttttatttttgtaccacattaggatgcattgtcatgcgtatttttggtagartaaactctcctctgctaaaaaamarmamraaaaaaaaa

SEQ ID NO: 6151 - DNA, 600 bp, Rattus norvegicus
cacagtgagaatgcgacagccaaggacattgcccctaccttaacactctatgtggggaaaaaccagctggtggagattgagaaggtagttctccaccccgagcgctctgtggtggatatcgggctgatcaagctcaaacagaaagtgcttgtcactgagaaagtcatgcctatctgcctgccttccaaagactacgtagcgccaggccgcatgctatgtgtccggttgggggcgcggaatgtcaactttagatttactgaacgtctcaagtatgtcatgctgcctgtggctgaccaggagaagtgtgagctgcactatgagaaaagcacagtgcctgagaagaaaggcgctgtaactcctgttggggtacagcccatcttgaataagcataccttctgtgctggccttaccaagtatgaggaagacacttgctatggtgacgctggcagtgcctttgccgtccatgacacggaggaggacacctggtatgcagctgggatcctgagctttgacaagagttgtgccgtagctgagtatggtgtgtatgtgaaggcaactgatctgaaggactgggtccaggaaacaatggccaagaactag

SEQ ID NO: 6152 - DNA, 600 bp, Rattus norvegicus
ccaatgtgggatccaatacatatgggaagakgaatgtggcagargatccmaatagggaatccctggatttcttactcctgtwaarksmaygwrctcccgtatctcttattacttcctgtgtaaatgctctgawgattycctgaataatgtwacagtgcctttgcmawtyccgcccaagtgaraawgtwcaacaacgtgccygtgcttgctgtgtttgtaaattcttattctaagamgtgctttaaactgagtgttgataaaggtcagggtgaatacctctctaatcacaacatgttcttggctgtacatcgatatcktaggaacacttaaaatttctgtttttaccttgtamctctatgactcaagtttaacaataaaggagggcgtgggatggtggacttgaaaagtcattaacagctcatagtaaatttctgattctagacattggaaagcaagcattctaaatacctgctaagatgacatttcaaaataaattagcaaaatcttgtacttatttaattaaactttttaattctatttcttgttgtccttgttggtagtaagaggctgttttaaaggataaaggttgtttgtatccac

SEQ ID NO: 6153 - DNA, 1400 bp, Rattus norvegicus
gaagaggaagaggaagaggaggaagaaaacgagaacgaagaagcagaagtggatgaaaatgagcaggtcgtcaacggcaccagcaccaactccacggaggtggacggggggaatggccccagcggaggagacaacggagaagaagccgaggaggcaagcgtcactgaagcaggtgcagaaggaacaacagcaggggycagrgagctgaccagttatggcaccacgacagctgtccttctgaacgggtttcagcagacgaccccgccacccgaagcctatgggaccacctccccaccagccagaaagagcagcacggttgagtatggggaagaatacgaacaaataggcaacgagtacaacactgcgtatgaaacctatgacgagaacaacggggagcctcgcggggacacttaccgagcttatgaggacgaatacagctactacaaggggcatggctatgaaggctacgagggtcaggattattactaccaccagtgaaggccctccggaggactccccattctgtctttgcatctggataccattttcaaagctcaactcaggaaggtgcaatatatatatataacagatgtgcattttatagtgtggaatggtgctacggtcwcagagtgattwccacwratgytkscgkyygyarmggcytttttttttttttwttttaatttttccagrtgcgtcattgaarggtcatcgtaaatcakggctgttgatcaagyagcacacagatctatgagctgggaccaggtggaatgcttcgaggttgtttttctatagtgttwgtgctgtgtacaccattgctaaccaccctaacataccytgtacaagaagrctcctaacgagagatttattaacaacactgtatacgatgtgtgtagttcctttatcasacccsytacctaatactgtattaggtttgattytcatcctcatgtattttacgtgacttgtgcacatgygtkttyatcatraataaatatgcaatcattmavrwrwrwwawaawwaaaaagaaagggagagyrttggaatgagtgtgggtctcaaggagcagggaacaatttggctaraaagcaaacgcttatctccatcagggtttaaaactcagaggatccggaaacactctttattcagtacatctgaacggctaaggttcgaytacggagggcagaatcatytgtatacaggagggagtaaatgaccccttttagagttgccakatttaccaaacatgaatacacggtrtgaracgcccacctyagcttgaattccagatgaacaatggctggtttttaatacaacccctyccctacagataatttgtctctgtgaaacatttggaacaaacttatgctaaataaatgacttattctttatcytcgtg

SEQ ID NO: 6154 - DNA, 600 bp, Rattus norvegicus
aaaacagtggaaactgatgaagagcaaggggctatacatagttctgtcagccagtgcatcgccaggaaacattccccactgagacagtctttttctagcaactcctgggagatagaggcccaggcatttttccttttatcagatcatccacccaatgtgatttcaccacaactttcattctcagggttggatgagcttttggaactggagggaaattttcctgaagaaaatcacggggaaaaatctgtgtattatctaggagtctcctcaggaaacaaaagagagaatgatatgcttttgactgatgaggcaggggtattgtgcccattcccagctcactgtctgttcagtgacatcagaatcctccaggagagttgttcacactttgtagaaaataatttgaatttagggacctctggtaagaactttgtaccttacatgccccagtttcaatcctgttccactcacagtcataagataatagaaaataagatgtgtgacttaactgtgtaatcttgyccaaaaacttccaggttccattccagtagagtgtgtcatgtataatatgttcttttatagttgtgggtgggagagaaagcc

SEQ ID NO: 6155 - DNA, 1400 bp, Rattus norvegicus
cccatccacttgtcatgatcatccacgggtggtcggtggatggcttgctagaaacctggatctggaagatagtgggtgccctgaagtcccgacagtcccaacccgtgaacgtgggattagtggactggatctccctggcataccagcactatgctattgccgtgcgcaacacccgtgttgtgggccaggaggtggctgctcttctcctatggctggaggaatctatgaagttttctcggagcaaagttcacttaattgggtacagcctgggagcacacgtttcaggattcgcaggcagctccatgggtgggaagcgcaagatcggaagaatcacagggctggaccctgcaggacctatgtttgagggaacttcccccaatgagcgcctttctccagatgatgccaattttgtggatgctattcatacctttaccagggagcacatgggtctgagtgtgggcatcaaacagcccattgcccactatgacttctaccccaacgggggctccttccagcctggctgccacttcctggagctctacaaacacattgcagagcatggcttaaatgccataacccagaccatcaamtgtgcccatgagcgttctgtgcacctcttcattgactccttgcaacacagcaacctgcagaacacaggcttccaktgcagcaacatggacascttcagtcagggtctatgtctgaactgcaagaagggccgttgcaacagtctgggctatgacatccgcaggatcggccacgymaagagcaagacactcttcctcatcacccgagcccagtcccccttyaaagtttatcattaccagttcaagatccagttcatcaatcaaatggagaagccaatrgagcctacttttaccatgacactgctggggacaaaagaagaaataaagaaaatycccatcaccctgggcgaaggaattaccagcaataaaacctattccttacttatcacactgracaaagacatcggcgagttgatcatgctcaagttcaagtgggaaaacagcgcagtgtgggccaatgtctggaacacagtgcagaccataatgctatgggacacagagcctcactacgcgggcctcattstgaagaccatctgggtcaaagctggagagacgcagcaaagaatgacattttgccctgataatgtggatgatctccagcttcaccccacccaggagaaagtcttcgtgaaatgtgacctgaagtcaaaagactgaagaagcaaaagagcagatgagtcaagagacccaagcacaaaataaatagactattctttatctgtaatggttgccttattcggaagccaaattacacaaaggatcatgcataaacttaaataaagctgatatgtaaaggaraaaaaaaaaaaaaaa

SEQ ID NO: 6156 - DNA, 1400 bp, Rattus norvegicus
gtcagtagaggtacaaaacctagactgagtaattcttagtagacttcaagttttatggcttaattcctctgtcttttaaaaacgtgtcacatattataacattattctctagacagatgktgaaatgagcttgtgattcasgtgacatatgaattgagctgagagaaaataatgccctggctgattttatttctctgttttgctttcttgagaaaaggaatacttgtcccactccgtatctgagcctgaccaagaactaaactatgtacttcaggcttaccttgaactctcaaccatcctgcmttggcttcytgagtgykgggarskkrataabcwtrmkkyyrywatcagrtttttyttwktywttttcaccaatagaacacattcaatgcccaatcgttagcatttcgtttgagactcatcttgaccgtacctytgtcacacgtctaacacatyacatyrryykctarttwakamgtgatcrastwcrwaktckgsamtkcgsmamgtasragttttagagcaggaccattttttttttaccacgtaaaagtygaaattactaggaaatgtrtatatckatgcttgtacactgttgcgtgcaaagtgaggagccttctattgtkatagccatagacagtaccaggctcgttgccgctcttttgttttactataaaaaaataatgaagaattatttatgaacaagatytcatatgttcagattgctyktrcyattcatcaatatmaaabstyrwrmmraaaaaawaaammaagttctatcymaraggctgttgctgggaacagaaactgtgaaatgtgtgggtatctgaacacctacacacaagcaaagccccacaagagtctttgtcattcaatgtcattcagaaaggaaagagtcaagrgatatmccataatatgkcagagragtagttccagryahgskggawkgctagccctkgctaggaraaagttggttgtgcmtatgtaatataggacaaaagtgmctggtttcattakgctcagtgtcattstmhcamtrarmyraydywcsdbaygwvrccagcatccccattattgctaattcwtggcagtatatacgtacatatcksmrygakgsytygactytaaattttatttattagctgtaaakaatskgyrsgwgkgtaaggaagcttgtaaacactggaaacgctgttgtggctatctggggtgtagatttgtggtgctaactctgtgtccacctccatcagtgattgtctcamtgagccaactcmctctgatgaacagcacaatggaatagcttttgaaggaagaaaataaactcacctgtgtgaagaaawrrrawmwrmwwtcaataaaatcgagaacgttttwtcmdrwwwmmrmraaaaaaaaaaaaa

SEQ ID NO: 6157 - DNA, 911 bp, Rattus norvegicus; identical to SEQ ID NO: 2061
  misc_feature (532)..(532): n is a, c, g, or t

SEQ ID NO: 6158 - DNA, 600 bp, Rattus norvegicus
gccaagtgcagaagcaaaggagtgctggcagtttcaaacgtaatagcattaagaagatcgtgtgaagctttctttctttcactcttcaaaccaacctaacatggcttctcactcatgactctcccccaccttgcactgctgcttcgtgtcttatgaacgcatctggtctgctgtgttgccagacggtcacctcttggagcattgcctaagtttaatgctgcttctctttgatgttttccttctactttggcatgtgtctggttgagcacttgttctgaggactgcagagaaagcaggaggtcaggaagcctgactgagagcgtggactgtgggcgtggatgaaccgtccagtgccgccactgctgccagccatgggccatacacagaagacgaccttctgtgttccggtcttacagagtgaagtggtcgtcttatttacacacttacaagttcgggggagaaataatattttaaccccagtgtatttaatcttctagctgtgggcttttttaccttatgaagttgaaggaaccacagaggccaagcctcagcgaagccacaggccaggggctgggggagggggacaaactagtattttgt

SEQ ID NO: 6159 - DNA, 600 bp, Rattus norvegicus
  misc_feature (101)..(101): n is a, c, g, or t
ttcaaggcccctgcaaaggacggrtttyctgagcacggccagkaaggggcaagagggttcggwtcagtggcgctttmtcccggytccttggcctgwkmbrnkdkgmwtgmtgwtgraatgagtgggcaccccctctatttagcatrwrkkwgsmycwggcagggtmtsymcagmhtkryywysrkccctccccacccagggtccacccaacccggtgaagagaccaggagcattgtacgcatacgcgggtggtatttttatggacmccaatctgcaattcccagacacctgggaagtgggacattctttgtgtatttattttcctccccagragctggggagtggtggggggctgcaggtacggtttagcatgtgtttggwtctgggggtctctycagccttgttttgggccaagttggaacctctggccctycagctggtgactatgaactccakaccccttcgtgctycccgacgccttycccttgcatyctgtgtaaccatwtygttgggccctyccaaaacctacacataamacatamakgakgaccattaaatwkgcvmaaaaraamvdddrmrwmmraaaaaaaaaaaaaaaaa

SEQ ID NO: 6160 - DNA, 600 bp, Rattus norvegicus
cmsctcaagrkmyrgaaacgttatcatgaggatatcttcggtgcggtcttttcctayggagyraaaaagggcaacrccttggaggagcccaaaggcacaagactctgacacccagaagagttacagcatctggccctaaataaaatgacagtgaggggtttggagagacagaagtgcgatcccccccaamcccctcacatcatctcccctcctctaccctaccaagtagtattgtwctattgtggactactgaatctctctcctctcccccgtcccctattctcccttccctcccgttttctctgcccctcccccacattctctttcctttgcctcatacttcctcagagcygrsassagrggaaaatgaaccacccgactgaagcactttgkgtgaccaccaggaggcgccatcccgctgctctaatatttagctgcattgtgtacagatatttatacyttgtatttaagaaaacataccttcgtccactcccaacgaccgcttggcccttccgtgtataattccttgatgaagatatttatataaaatgcattttattttaataaaatgagtgtttgatcaarwwwwrmarmraaarm

SEQ ID NO: 6161 - DNA, 557 bp, Rattus norvegicus; identical to SEQ ID NO: 2065

SEQ ID NO: 6162 - DNA, 600 bp, Rattus norvegicus
tgcgcagcgtgcgcctgctgtccggctccaaggagaaggaccgcagcctgcggcgcatcacgcgcatggtgctggtggtggtgggagccttcgtggtgtgctgggcgcccatccacatcttcgtcatcgtctggacgctggtggacatcaatcggcgcgacccacttgtggtggccgcgctgcacttgtgcattgcgctgggctacgccaacagcagcctcaacccggttctctacgccttcctggacgagaacttcaagcgctgcttccgccagctctgtcgcgcgccctgcggcggccaagaacccggcagcctccgccgtccccgccaggccaccgcgcgtgagcgtgtcaccgcctgcaccccctccgacggcccgggcggtggcgctgccgcctgacctacccggccctctgcttaaacgccccwcccaagtgaagtgatgcagtggccacaccgagctccctgggaggccatggccaccattgggacagctagaatagggcccacacggggggggggaggcctcccatgagggccgggcctgaggaatcaaaggctccgggttggaggggtgggggttgggagggcagagctgg

SEQ ID NO: 6163 - DNA, 600 bp, Rattus norvegicus
cgacatagtatttaatacattcaggatggggaaagcctttcagaaggaagataccgcagaaagatcggttgttgctccttctctggaaggatacaaaaatgatgagagcggcttcatgaaggatgacgatgacaagaccacaaagaacacaggctccaagcagaatctcgtaactcacggtctgcccctcagtctggctgtaaaaccttacctcgctctgaaaggaccagcagtcttcccagctgagaatggagttcagaatactgagtccacacaggaaaagagggaaatyggggatgaagaaaactcagctaaatttcccataggaaggagagattttgacatgctmaggtgtatgctgggacgagtctaycgaccctgttggcaagtctgatacctgctggtccacaacatcctttcagaagaaaacgattcattgcaagtggagagaaaagcccttaatgttgatgtaacttgtgtatcatcctaaatgtctgttttaaaagaaactggttacaatatgtaaatgctatgtaaatgatatgctttgacttgtgcattaaacttcacaaaaattctgcwtaaaaaaaaaaaaaaaaa

SEQ ID NO: 6164 - DNA, 600 bp, Rattus norvegicus
ttagtcagatatatgtttaattctgtctkagcaagttagaacctttttcttggtatgtataaatggatacctattaatttaatactttgtagaatttgtaggaaattatatttttggtgagatagaattagtmgtaaaaaaatcmctsttataaaatgtgtttatttttcattaaaattgcrccatatttcctgcaaaatattwggagagatctggaaatattgtaaaagttgtaacaacttaaacatctctatgatgtttttgtytaatgtattwtgcatstagtytsratgtattgtgatttttaatatggactcmcataacataaaatttgtgacaaacttgcttaaaagaaacatgtrtattgaataaatctcmctatattccttaamwwrrwwawawrwswgcttctcattttaatatggattgtacaagatattgtgctctttttcttagactgtttgtctctaggtttttgtgtgtgtacgcaaattgttgctagagtaatttcatcaggaatgctggtcttagtttttatatttttccaaagtataatactataagttaaaatagcaaaataaatgcttttaatatatgttt

SEQ ID NO: 6165 - DNA, 600 bp, Rattus norvegicus
agcgaaggactcggtctgcctggccaggcacaactgggagtggcctgcttgaggacccccagccccacacctccccgacctcgacctccctggagcccagctcaaggacgcattgaaactttcaccgaagatcttccaaggacacgttacaggattctgtaatagtaaacatatggaaartattagacatatttattgcctgtacatactgtaaatgcattgggatcaaactgtctccccaggaaactgcacatgggtcatgtgaatatttttccttctytttttttttttgccaaggctaatccaattattactgtcactgttaccataatttattttgtcaactgatgtatttatttgtaaatgtatyttggtgctgctgactctgtttttttgtaacataatgcactttaggtatacatatcaagtatgtcgatgaatttaacmcgaaaaagtgtctmtattttgtggttcattttgatgagttctgaaatrtaattatctagactgatctccctctgsgcatgtaaaaatggcagtattttaaatttgtaaagaatgtctaataaaatataatctaattacmmmrwramwwaaaaa

SEQ ID NO: 6166 - DNA, 1400 bp, Rattus norvegicus
tccgacacccccctccagaggagccgctccactgttatttattcactttgcccacagacacccctgagtgagcacaccctgaaactgaccgtgtaaggtgtcagcctgcacccaggaccgtcaggtgcagcaccgggtcagtcctagggttgaggtaggactgacacagccactgtgtggctggtgctggggcaggggcaggagctgagggtcttagaagcaatcttcaggaacagacaacagtggtgacatgtaaagtccctgtggctactgatgacatgtgtaggatgaaggctggcctttctcccatgactttctagatcccgttccccgtctgctttccctgtgagttagaaaacacacaggctcctgtcctggtggtgccgtgtgcttgacatgggaaacttagatgcctgctcactggcgggcacctcggcatcgccaccactcagagtgagagcagtgctgtccagtgccgaggccgcctgactcccggcaggactcttcaggctctggcctgccccagcacaccccgctggatctcagacattccacacccacacctcattccctggacacttgggcaagcaggcccgcccttccacctctggggtcagcccctccattccgagttcacactgctctggagcaggccaggaccggaagcaaggcagctggtgaggagcaccctcctgggaacagtgtaggtgacagtcctgagagtcagcttgctagcgctgctggcaccagtcaccttgctcagaagtgtgtggctcttgaggctgaagagactgatgatggtgctcatgactcttctgtgaggggaacttgaccttcacattgggtggctttttttaaaataagcgaaggcagctggaactccagtctgcctcttgccagcacttcacattttgcctttcacccagagaagccagcacagagccactggggaaggcgatggccttgcctgcacaggctgaggagatggctcagccggcgtccaggctgtgtctggagcagggggtgcacagcagcctcacaggtgggggcctcagagcaggcgctgccctgtcccctgccccgctggaggcagcaaagctgctgcatgccttaagtcaatacttactcagcagggcgctctcgttctctctctctctctctctctctctctctctctctctctctctctctctaaatggccatagaataaaccattttacaaaaataaaagccaacaacaaagtgctctggaatagcacctttgcaggwgcggggggtgtctcagggtcttctgtgacctcaccgaactgtccgactgcaccgtttccaacttgtgtctcactaatgggtctgcattagttgcaacaataaatgtttttaaagaamaaaaaaaaaaaaaa

SEQ ID NO: 6167 - DNA, 600 bp, Rattus norvegicus
gccttaacttcatattgccttcttttctacccttcctgccctgraaatggaagctgtccgccaagccagcytgctccagaggtakrcamgtcaksgmgkawykwkrggsmaaatggcyttggagmraraaggcrgggcactmcggytactgcagggacatgcagttgrgaacttggctcattgagctgtacagacagtggtgcagtgccagttttgcacatggagtcctggccacctgggggagcctgckttggtactacagaacttcactttgtggacacaccttcctcttactgagtytaagatgtcctgtgcagaggatkctttccaagcacggtgctccaccttytggcagcctcccacacgctgaatctgtcttccaggagctgcccctatgggktggsctsswgcccagccctatctctatagtcacatcsttgtctgtaagaaagccaggaatacaggttttcttwatgawwwwrrrwwwwaawwwwgtttttattgagcctgataaaatacagttatctgatggttcctcaattatgttattttaataaaataaattaaatttarrwwwaawrrmaaaaaaaaaaaaaaaaa

SEQ ID NO: 6168 - DNA, 600 bp, Rattus norvegicus
atggaacctgggaaatggagagtaatgagaactttgaaggctacatgaaggccctagatatkgaykwkgccacccgcaagattgcagtgcgtctgactcagacgaagatcatcgttcaagacggtgataacttcaagacaaaaaccaacagcacgttccgcaactatgacctagatttcacagtgggggtggagtttgacgaacacacaaagggtytggatggccggaacgtcaagrmsctgacstgsgrwgamcasstgtgtcgwcawgtgtkcaraawgrrgwgaaggagartcgtggctggaagcagtggktcgagggagacaagctrtacctggagmtgacmtgcggtgaccaggtgtgtcgacaagtrttcaaaaagaagtgatgggcmcaggggaagcstggaacatgtgtagagttmtmtkccattstgaaaagcagcawtgrgactccmtgrttcctgacagagccccccttgcatcastgcctggrtttgaaacagggtgtgttaaaggaacctaccccctcccccttagaacctattattaaataaaaaaacaaaacatcmwmwmrrmmwwwraaaaaaaaaaaaaaaaa

SEQ ID NO: 6169 - DNA, 600 bp, Rattus norvegicus
attcaggctacttggtgtcagtgctcagccaggctgagggcaactttctggcctctctgattaaggagagtggtactacagctgccaatgtctggattggcckscaygaksccaaaaataatcgccgctggcactggagcagtgggtctctgtttctctacaaatcctgggacactgggtatcctaacaattccaatcgtggctactgtgtatctgtgacttcaaactcaggatacaagaaatggagagataacagttgtgatgcccaattatcatttgtctgcaagttcaaagcctgaaatcayctgaaaaaaatagtcatacagakccagacaagwaaatactatggagtcaaaagtgaaactagaccatctatcaaaagcaaagtcaaccccctcttcctagacaaacattcttgcctcactgccctatggtatttttatctccattattgtatgtaaccctgcacatttaaataaaaataccttcacaataaaaaaaaaaaaaaaaaatctcgcggccgcaagcttattccctttagtgagggttaattttagcttggcactggccgtcgttttacaacgtcgtgactgggaaaac

SEQ ID NO: 6170 - DNA, 600 bp, Rattus norvegicus
mstgactkaggryacctgamtmtaacckcaytgtgcyttstgccgggggytctgcccaggascytmtgggtttgctttctccaggctctctagatgcaygakscaatacagtgacstcmtgtggytgtatcaatcagtycayttgactatgtgattggaaatcattccyctgttgcactgsccacacaatttaagtgcmtagtcrscatcsascgagcacagagattgaggctggtttagcaggttacggttcagttttgcttgtctccccgggcaagagaaggggacttaggaggaaggtgatgaggtcccagggactcctgtcacccaggmctctccctctkacagaggaaagacytagtagcktaaaaggtctgggctgtgtgggggtggggcggtcataccactccctcaaccatgccstatgcctgtaagcccccatcaccacctccgtgcagggtcctagctggctgggtcctcttstagccttgtgcctgctccttttctgtatcccttactctgttgtctgttactgatttttttgataaaaagataataaaacctggtactttytarawmrmmaaaaaaaaaaaaaaaaaa

SEQ ID NO: 6171 - DNA, 600 bp, Rattus norvegicus
tgccagtcagagctccaccctttccccctcgtcctccctcctgccgtmtaacaccttcccttaaatggaacctctgcygmssgggctctggcctgcagcactgattcagacgtggcccagcttgtcatgattcaagctcagcagcaagggtcctggtacctcccttgctcttgggcstrmktwwrmytctgttgtcctggbmcagcmccacccctsgtstagaccactctcttacctgcatcctgtagagtagacagcagtggaccctagcggcctttgctcacaggcatgtactcytacgccatgytggccagcccgtgggtgtctgtccaacccytgagcaytccytccccaggatcgtgcaatagtcagagggktccctcccaggggatggggytatgggtgcttggcccagctgtctcctctccatgcaastsctgyytwarrcagsasttgccatgsarrgtgacatsgacavccatgkrcmaagcmmcsryagccgytgcytctytgccgcytgtacrgaggaaaytgamccttttttcatattctaataaatcaatgtgagtttttrwwarraamaaaaaaaaaaaaaaaaaa

SEQ ID NO: 6172 - DNA, 600 bp, Rattus norvegicus
cccctcccttacccccgcctctgtcccaatttttatctaggtacagaaagattcacttgcacaaaatcagcccatagtgtttatagacttggtggcagcttccgagaagtcctaccagtgaggacctcttgtggccagtgtgagggcagccactagtgaccgcctgggttttatgtgtgtggtgatgggaggaaagggaggtggttcctttcattagggatccatggccacctgctttaataaaattgtcctgcagtcccttcagagctgcgagctgggaagggtcaacgtttatacgaaccgctttccagtgttaaagaaaatggtgggtctttgggtttgacttcgaatgaggaagcactttggagaaaccacccactttttgcactagtttttaatttgttacctcttcacctttgatgatgtagtgactcaaatttgtcattaaaaaaattagattccattctctggaatactttttaggagtatggcagagaggaaacagtgggacmmaatcattaaagattcatatttaaaccaatgcctctcaagctgcagatttattattaaagattcatatttaaacaaaaaaaaaaaaaa

SEQ ID NO: 6173 - DNA, 600 bp, Rattus norvegicus
acactctgtccatgttttagctgtgcacaggccatgtcctttgagtgtgtgaactacaccactgggcatagccatatggaacagtcttgacaagaaagcctcattcacaaaaccccacttcctgtacctaaatgatacatacagtggctacatttcatagttgaggaccctcttgttcttgtcattgttgtacaatagaatgtaaaatcctatgaatgtatttccttaggaaaactattgtaaaagttttttttttattaggagagaatttctatttatttaatactgaactttgacctactttgtggtactacaaagtatacaaatttaggaaatttgtatttccgcttctgtattttcttgaaaataattttattacagtgttcaatatactatgtattaataatctttttatgaaaggaaatttaaagaactcatcaaaaccagaaatatattttgagtggttaaaattgtgtattaatgttgtgaacataatcatagttgaactttaattctgatctcagaataatgtgccttaaaatgcccccatgtgttgggcagcatctgtacaaggagtccattagcaaagctgcagtgact

SEQ ID NO: 6174 - DNA, 600 bp, Rattus norvegicus
ccctattgtaaagacagtgaggggaggggctctggagatcctggcaaaaagaaacagcacatttgtcatatccaaggatgcggcaaagtatatggcaaaacctcacatctccgtgcacacttgcgctggcatacaggggagaggccattcatgtgtaattggtcatactgtgggaagcgctttactcgttcggatgagcttcagagacataaacgtacacatacaggagagaagaaatttgcctgccctgagtgccctaagcgtttcatgaggagcgatcatctgtcaaagcatatcaagacccaccagaacaaaaagggaggcccaggtgtagccttgagcgtgggcacattgcccctggacagtggggcaggttcagaaggcagtggcactgccactccttcagcccttattaccaccaatatggtagccatggaggccatctgtccagagggtattgcccgtcttgccaacagtggcatcaacgtcatgcaggtgacagagctgcagtccattaatatcagtggcaatggtttctgagattagacgccagggccagagagacatatgggccaatacccaagcctgggatgcaagtag

SEQ ID NO: 6175 - DNA, 1400 bp, Rattus norvegicus
ttggatttaaccaatccttcccctatcttccctgtacaattccagaccctccccaaacagagcaaaccccacagaaacaaacaaaacaccccacctgtctaggcttccataggttgcatctttgtatcccttgggagcctctaagactggtcctacttggtcctaagaatcccaaggatttctgggagcttccaacatgttgattagcatatcatttgcatacactgtcttttttttccctcggtttcttcctttctgttccattactcttcactcttctgtgtttttttttttttctttctttcttttcgraagagttagtttccattggtcctcttatcacacttttatttgcacgacattatctgcaggtggtggggagcytgggcttttggggaactaggaccccaaagttgcctcctcccagcccctctagtctagtttgcttcccttaccccatttccacacctcttgtaccctcctctccctcccccagctggtgtgtaagtgtcwyggrgttcagtgtgttatgatgggaccaataattctgccacttggggtctctccctasattcctgctccccagttttcgtgtggggcattcagctgacatttcccgggggtctccctccctcccatctgcctgatctgctgcctcctcccaccaggagaactggaggctgaccacaatctggttctttgaggaggggtggctctastgtgtgtgggggtcatcactgccttggggaggagtrggacaaaacagaaccccccctaattcctgcctgaaatctctggcctcatccttgctagaggttggactgaaaactttcctccccaatcctggggggtattaccccccatcactgcccagctcctctgactgcccccctgtattcagggtgggggtactagtcactgccaatatgtgtatgggacttgctggaggatggggatccttgtccttctmtagggctgctgagccctgagagagagagagaragagrragagagararrgaragaragarmkagaagcaagcwawwkccctgwygsrwamaawrawararaaaggatctaatckkkaaaaatggcacagttttaggggtctgagggtacagccccttaacctgcctcttgggggggggtgttccccaaactcttcccccacacacaccaggttttytgtgtggaggggaaccaaggagatbtaaactgtggtgtgaaagggtaggagagatgctgggggtgggggtgcttgtgttttasacccccaatattatcccagtgtcccctgccttccttcttcccctgccccatgcccccaattctgtggcgcatccagccgaattstgaaaatgtacaataaacgtgtawtgrgtaaaaaaaaaaaaaaaaaa

SEQ ID NO: 6176 - DNA, 600 bp, Rattus norvegicus
  misc_feature (317)..(317): n is a, c, g, or t
gcatatgaagagatgtgtggtggtctcagaagaggaaacccattctgtaatggggcwgagaagaaaacacgttttcaattgagtggagtttgagrgggtgcaggaggccatggttaggagctatgaggtgagttttgctaaaagcaggagggcgtactcctggcccctgcgaattgaggtaatgtggggaaagccaagtattgtggtttggattgtgaacaaaatgtcccttgcggactccctcaagagacagctagatcatcagaagacagagtckgcasgwstgtagggmtggtctaccttctcccccctttstntgccctctccctccasactcccgtytgtcccggaatacwtggaggctgggtctggagccccgatcctgtacsctcwgctgtgtcygtsatsttrgwartgcctgtgatcgwgtgttgcyattttgtctgactgtggtccctccctcttccctccagaccccmtamtttcctgtgcccttcggtattgtttgaagaccccctccccgaggaagagcaaatatgagaaattcccctcccccaaataaactcctcaactmcstwvwmraaaaaaaraaaaaaaaaa

SEQ ID NO: 6177 - DNA, 600 bp, Rattus norvegicus
tcaaaaargkgtttatttttyyatatkgkgccaataagcattgtaatyytaakgkggwgmcctcytcasacagaagtagaaattagttgtaacttcagcaaagcacagtgttgatggasttgtacaagtttgccagcgatgcaagtctcmaaagacagaaaggctgctgtgaggcagtgcaggcggctgctgctggaggcagaraaactcctgtgkgtcttgcgcttccyttggttgcttttatcctaakgatgtactgagagtttggwatctgmmtctatttgwatcctagcrscatgtttcctgkgttgkgactatmymsarmkgtttttaaaagttycaakgkacttcymtggkcttmagtcattgtawgmkgwkttgkgwwagctaccwttttwaataamagaatgtatcttcaggaattttgtcacattctttcattaatatttatgctaaccacaccatctctattaggatgagtgtgatcaagctgtttgggtaaacacttctatctctctcaggcacagtgcaaattgagtgtgcgcgcaacacacacacacacacacacacacacacacacatacctccacacacattttt

SEQ ID NO: 6178 - DNA, 600 bp, Rattus norvegicus
gtcccatggtgaatagtaaggttacctctctcaaaggccaaggggaggccacatgagacaacacgtttttcacacagggtttcactgtatagcccaggccagcctcaaacccatgattcccctgcctcagcctactgggttacaggtgtgcactgccatacctggctcacgtttgttttttaatgttctggtgtaacatgtattccctgaagccattgatctatctcaaagacacagtgttgtacgcatacatgtgcgcacgtacacacaccaaactggaaagcgacccctctccatagtgtgataagtttattataagtttattataaggaccctatgctgtttttagaactcatctttctgacttctgtatatgatgcactgaaggttaatatgtaatattttaatttattttatgtggtaagttaattttggttttctgtaatgtattaatgtgattagaagcttttttccttaatatctgaattatacttaaagagtagtgaggaatataagatactgttgtgtattgtaccttgtttggaaggatgaaggaatgaacccttttttttttcctaaaaaaaaaaaaaaaaaataaaa

SEQ ID NO: 6179 - DNA, 1400 bp, Rattus norvegicus
aggaatcattttaagatcctgagtttctaaagaaaatcttagtctaagatggaaagagagtaaagagctaacacaggtgagtctgggcaaggaaccctagtacagtggggttgggtcagcacctttgccagaaataaccaagctattcagaaatacactaggaaaggagagttgcctagtaacccacttctggtcatattcagtattcatgccttgaactgaactcttgctcctagaggatgctataactaacaaaccgagcaacttaaacagcctgacagctctcaccaaataccttgctatctcaagttatggatgcaagatggctcccagtgtctatctgtgattctagaggacacttgaagggcaccaacacttaacaaattctgtgggggtaaatttattttaatcactggatgctggaagacacacacagagacacaaacacacaaagagagacagagagagagaaagagagagagagaggtagagagagagagagagagagagagggagagagagggagagagagagtgttttgggttttgttgttgttgttgttgttgatttggaattatatcaagatataagataatctcaaatgtatctttagtagttctgctccctggacccatgagaagacaggaatgaggattctgtgcatgtggtacttacatttcaaaaggagtatctaataaactggaaactgcttaaaagaatsagaskatcagcactgataagaatataaagcttcaagctatgaagagtgattcaaagaaggaaaagaattccctcaraactgggaggaccttttaaaaaattctgagtcmccgtttctaaagtttcaccttcctaacttcatgtawtttttaatagctcaargagtccaattactgctgcwcatatactcatgagtgtgacaccatscactgttactgccaatatatgaaaggccatacccctaaagaaaattgacttaagaactcsttgttwagggttgggtacttctgtgaccctcccacattcatgctggaatgttgastggcttcatttttataaggcwaaagatcttyccrctctcttytgagagagaataaatcagttttgctcartggagtgattctgagtatactaatcacgatcccaggacaggccccattctcacaagcagttagctaacacaaatagaactccatattttatrgcagttttyatcttttgtycttggttttagttcttattttcaagacagrgaaaaacacatgaagttggaagggtagmagtggggggsggcstgggtctgggaggagttgggggatagrgaaaaathtaataaamatatatgaaattstcgaraatgawtaamtmttttaaaaaacttwmaaaaaaaaaaaaaaaaa

SEQ ID NO: 6180 - DNA, 600 bp, Rattus norvegicus
  misc_feature (399)..(399): n is a, c, g, or t
  misc_feature (409)..(409): n is a, c, g, or t
  misc_feature (448)..(448): n is a, c, g, or t
ggaggaggagracaggaggaaggctgawgatgaggcccggaakaagaaggctctgtccaacatgatgcattttggagggtacatccagaaggctcagacagagcggaagagtggraagrgacagacagagcgagagmasragragaagattctggcagagaggaggaaggtgytgsccatcgamcacstgaatgaagmccagytgagagagaagsccaaggagctatggcagagtatccmcawcytrkagvccgrsamgkkcgacctgcaggaaaagttcaagcrgcwgaaathygaaatcaacgttbtgcgaaacagratcaaygwcawccagaawgtctccmaaamtcgtggraagvcmaaastcaccgggygttggaaatagatggaactgtgtwngacaaagctntgytccttgcbtgtgcccwtgccmtgtgaatcccagctntaggtcwtrvcaggcaccygwtrcagacycctgtbtggaaagtaggagctgacstagstwgaagccagtacthtgcstgaccymtatgcccacrccacgtcmggaataaaaarccagcacmktgwrvmmvwrrvamaaaaaaamaaaaaaaa

SEQ ID NO: 6181 - DNA, 600 bp, Rattus norvegicus
cactgtgggtctcctgcttctcctgagaagctgtgtcacctctgcagtggtgagaggtgacccactaaagctaccacccttcactcctcggacaggcaggagccacctacttccatgggaggacttatcccaagagcctttgattcacattcgagtgtgaagagattgtgacaggggttccgttgtgaccctctctcccctaaacccatctggaaggagacagatgctgcctccgaccgaatcaaaacagccaacggagctgtcacaaacagcaagggttcacgatcattcctgaaaacacagcaaagaggatatgcagccaccaggttgctgctgtctacgggccaaccaagagggtcgggtcagtggaggtttcccagtgtaagtcagtgaggagaggccatgtggctaagggaaaggagtagacacagcaatggggcaaagcaggtgacattggtcagagagaaagagagaaagagagagagagagcactcccaagggtttgtgcaaacacacttgtgtaaacttgtggagttgtcttgctgatgaagccagaagtgtatgctggtgtgaagaagccagaatgggctagcagggggg

SEQ ID NO: 6182 - DNA, 1400 bp, Rattus norvegicus
gctytgkccatcamctycagaggsagstttgagcagaaamtgmactgkgctttcaacatgkatgatctggatggkgmcsgcragatmacmarggtggagawgytggagaktatcraggctwtctacaagawggtgggcmctgtgatcatgatgaaaatgaakgaggakggcctcmcgccrgaacagcgartggmcamgatyttyagcaagakggwtaagaacaaagawrmccmgattacattggatgaattcaaagaagctgcaaaaagcgacccttccattgtattactcctgcagtgcgacattcagaaatgagctgatgtcaatgctatggactgcacagaagtcttgatgwtccattcagtctgcagctacacacacacacacacacacacacacacacacacacacactacacacacacacaattgcttggactacctatawatggacttgcttcttgwgtttgaaacacttgwgtgcatgagaatgtcatttgctaatgaattttaaaagcatatattataaaaacccahsrkrcccggatccwcaatgwgatatgwgtaatatcatttcatcaaattacatcttcctccaaagcctgggcagaagcgtgctgcaaagaattctatgatttcttgtacatgttttgctaatgcttgwgwctccttgattatataatattagtagcactgagaccccccacggtaatgtaacttattatgggctgcgtcaccattctcctgtaaaatagtactggacagacacmrgaggggccyttggcttcctgwctggcccacatacaatacacagcttgtattatmagtgaatataaatgtactacmwttgcawgccttkggktwwgccttaawtcttacctcawttgtaacctcycgatctggaaararctgttttgsatgaatrcagtatacmrcttaaaaawyctgstaamctattcattaagkataacbatctawatatctatrgacmcmaavgkrwtawatattkrmcataawmacmtaataawgggaatgtatkgatttgttysacgtttcaraggsttycagaaaggtggcaatagakgtcccwaataaatttstaawawttgatttagycccytaatwhttaayttaccmytttyagstcarkgtwmawmggsgtcarctwgtgrkgmcttactaaatstacccttacacacatctttggaatttgcagaatgactgaagggggggggggrrggaaagtcactttccaacttgtcatccagcccctcccccaaagagggctaattaatatggcatgtaacatttaaagaaaacaggagatttgttcmttytggaaaacaatgctcattatgtgacaataaactttatctcagtgtgraaaaaaaaaaaaaaaaa

SEQ ID NO: 6183 - DNA, 1400 bp, Rattus norvegicus
cccaagctgatagcagacagtgtcctgatgttacgtgacagaagatgggaggaagtcagaggtgccctgatgtctgcattcagtcctgaaaaattgaacgagatgacacctctcatcagccaagcctgtgaacttctcctgtctcacttaaaacactctgcggcatccggggacgcattcgacatccagaggtgttactgctgttttaccacaaatgtggtggccagtgtggcctttggcatcgaggtgaactcccaggatgctccagaagacccctttgtgcaacactgccagcgtgtttttgctttcagtaccccaaggcctctcctggctttaattttatcatttccatccataatggtcccattggcccggattctgcccaataagaaccgagatgaactgaatggcttttttaacacactcattaggaatgtgattgccttacgggacaagcaaacagcagaagagaggcggggagacttcctgcagatggtgctggatgcccagcgttccatgagctctgtgggtgtrgaagcctttgacatggtcacagaagccctgtcctctgctgagtgcatgggggacccaccccaaaggtgtcatcctacatccacagctaagcctttaactgtggatgagattgccggccaggctttcctcttcctcatcgctggccacgagatcaccacaaacacgctctccttcatcacatacctgctggccacccaccctgagtgccaggagaggcttctgaaagaggtggacctcttcatggagaagcatccagcccctgagtactgcaacctgcaggaaggtctgccctatctggacatggtggttgcagagaccctgaggatgtacccaccagcyttcagrttcacaagggaggcagcacaggactgtraggtgctgggacagcacatccctgcaggttctgtgctggagattgctgtgggtgccctacaccaygacccagagcactggccgaaccytgagacctttgaccctgaaaggtttacagcagaagcccggcttcagcagaagccattcacatacctgccttttggagctggtcccaggagctgccttggagtacggctggggctgctggtggtcaagctgacactgctccaggtcctacacaagttccgctttgaagcttgccctgagactcaggttccacttcagctagaatccaaatctgctctatgccccaaaaatggagtctacgtcaagattgtgtcacgctgacatagaaggcaggygygaaagaggaagcactttgtaatagtgacgtctgtgcatcactgttaggagggcgccatttatgtcacagttctaaatgttgaataaatgtttgtcatgcttcawwwwramrwwaaaaaaaaaaaaaaaaa

SEQ ID NO: 6184 - DNA, 600 bp, Rattus norvegicus
gagatctttgacatgttgctggctacgtcaagtcgattccgcatgatgaacctgcagggagaagagtttgtgtgcctcaaatcaatcattttgcttaattctggagtgtacacatttctatccagcaccttgaagtctctggaagagaaggaccacatccaccgagtcctggacaagatcaacgacactttgatccacttgatggccaaagctggcctgactctgcagcaacagcatcgccgtctggcccagctcctcctcatcctttcccatatccggcacatgagtaacaaaggcatggagcatctctacaacatgaaatgcaagaatgtcgtgcctctctatgacctgctgctggagatgctggatgctcatcgtcttcatgcccccgccagtcgcatgggagtgcccccggaggagcctagccagagccagctgaccaccaccagctccacttcagcacattccttacaaacctactacatccccccggaagcagagggcttccccaacaccatctgagaactcccaggctccccacaaggttctgcgaatccctgaaacgttttacccatgtcctgtatgactttagcagaattc

SEQ ID NO: 6185 - DNA, 600 bp, Rattus norvegicus
tgtttgactgcagcatcgccragaacatcgcctacggagacaacagccgtgtcgtgtctcaggatgagattgtgagggcggccaaggaggccaacatccaccccttcattgagacactgccccaaaagtatgaaacaagagtaggagacaaggggacacagctctctggaggccagaaacaraggattgctatcgcccgagccctcatcagacagcctcgggtcctactgctggatgaagccacgtcrgctttggacactgagagtgaaaaggtcgtccaggaagcgctggacaaagccagggaaggccgcacctgcattgtgatcgcrcaccgcctgtccaccatccagaacgcagacttgatcgtggtgatcgacaacggcaaggtcaaggagcacggcacccaccwgcwgctgctggcccagaaaggcatctatttctccatggtcaacattcaagctggcacacagaacttatgaacttgttacagtatatttttaaaataaattccaatcgkkktyttggtaaagtttccttgaaataataattccattgagtgtgagatcaatttaataaaaaaaattgtaaacaactttttag

SEQ ID NO: 6186 - DNA, 600 bp, Rattus norvegicus
gcagcytgcctcctcatgatctttatcccgcatgagctgcactggttgaacgttaccctcgcctgtcttgrccgtatgggggccaccattgtgctgcasatggtctgcmtggtgaacgctgagctgtaccmtacattcatcaggaatcttgggatgatggtatgctctgccctgtgtgacctgggtgggatcttcaccccyttcatggtgttcaggctgatggaagtttggcaagcchtgcccctcattttgtttggggttttgggcctgactgctggggccatgactcttcttctcccagagrccaagggtgtggctttgcctgagactattgaagaagcagagaacctgggkaggaggaaatcaaaggccaaagraaacrsgatttaccttcaggtccaaacaggcaagtcctcaagtacctgacagggatgctgtgccaggagctgagtggcagagagaaaggaggacttgccacttggaggattcccagaagcctttgcctttccagactcttgtatatatgcaccaggttccaaatgaactaccaaccttaaagacttttctgaaagcccaaaaaaaaaaaaaaaaaaaaaaaaa

SEQ ID NO: 6187 - DNA, 600 bp, Rattus norvegicus
agttgggtgaagttgcctcctttgggggcagtaacattgagccgagtgtcaggagctgtttccagtttsccaataataaacctgagattgaagccgctctcttccttgactggatgcgtctggaaccccagtctatggtgtggctgccggtcttgcacagagtggctgctgctgaaacagccaagcatcaggccragtgtaacatctgtaaggagtgtccaatcattggattcaggtacagaagcctgaaacactttaattatgacatctgccaaagctgctttttttctggccgagttgctaagggccataaaatgcactaccccatggtagagtactgcactccgactacatctggagaagatgttcgtgactttgccaaggtactgaaaaacaaatttcgaaccaaaaggtattttgcgaagcatccccgaatgggctaccttccagtgcagactgtgttagagggggacaacatggaaacgtgagtagtggcagaagcaaagcaaactttaaactttcatttgctatatccttggaccccctcccggccaaaaaaccgtccttcgctctcaaatgcaaacagtctcctaagctaat

SEQ ID NO: 6188 - DNA, 600 bp, Rattus norvegicus
gctctttgccmctgaaagctttagaaagtgatggtttgatgtctatcacagaaagattcctcttctacagragaattggtgtgatggggatgattgtattgcacgtagttaagctgaagaaagtttaaawtttataaactattgccaagaaattgtgttttagtaatgggctaatgattttgtatgatcmmaatcrtrgctttgtaaacttctttttgaatatttttgtwtgttgactttctaggtcttcgtatgaawttgttwtttgtytttggtgtgtgtgtgtgtarttactctgttgcacttatcttyatctagagattgactaatacctcattctttttgtaaaagcagccagtaatttctgtgcaaccttactatgtgcaatatttttaaattttaagaaacgtgtgcttcwtttgttgttagagttatttcwttagttctgcactttkccatgttatactccatatgagtattaatcctatggatgcatatgaaaactagtaatgtctcatacaataktgtstrtgagtgagagaaactataaataktwacaacctgaaaaaaaaaaaaaaaaaaaaaaaaactcgagactag

SEQ ID NO: 6189 - DNA, 600 bp, Rattus norvegicus
gccaggactcaatgcttccattctccctttccttgcctcttacaaagcacctgcgtgtccatctcatgtgcccatgggtcatcatgctsccgtcataccttgagcgtgtacacatgtgtgttctatgcactcgccctgccctacctacccaacagaggacaagatggtcggcccctagctcccttctcccccacctagcctttccccacgccctgctgtgcagctgtgtgcgttggtgtgtttctgtgtcgctggcgtgtcatgtgatgtagccatgtttgctgacatgagcccctgcccccttctctttttctccattggtttctagaactctcttccycccctcccctgagggacaggactcctggggcytagctgggggcccgagmytggccaccctcctgttagccctcagagtcttatttctctctattggtgaccaagttgcaaatggataaaatacaggaaattytgaccccctgccccagacctgcatgtcctgtccccagtgcccccgaaccccatcytgggccgggttgggcctggtgggacgggagaaatagcaactaatccaacagcgrrraaaaaaaaaaaaaaaaa

SEQ ID NO: 6190 - DNA, 600 bp, Rattus norvegicus
gccgggcagcgtggcctttgcctccgccttcgcctgtctaggcttgctggctctggtggtgacctttgcctgcaacctggcgaccatcaaagccctggtgtcccgctgccgggccaaagccgccgcctcgcagtccagcgcccagtggggccggatcaccacggagacggctatccagcttatggggatcatgtgtgtactgtccgtctgctggtcgccgctattgataatgatgctgaaaatgatcttcaatcagatgtcagtagagcaatgcaagacgcagatgggaaaggagaaggagtgcaattccttcctaatcgccgttcgcctggcttcgctgaaccagatcttggatccctgggtttatctgctgctaagaaagatccttcttcgaaagttctgccagatgatgaacaacctgaagcggagtttcattgcaatacctgcttccctgagtatgagaatttcttcccccagggaaggataactgaatcattttggattgtatcttctttcggcctcatattttaagttttccttgccattaaacacaccgagacwrgmtycctgggtttatctggccattaaacacaccgagac

SEQ ID NO: 6191 - DNA, 600 bp, Rattus norvegicus
gggtgtggcaatgtctactgagtgaaggtgaagaggtcaagatggactccaagatccaggttttatccaaagggttgaaccagacaatgttcctggctgtcgtgctggggagcgccttcagctttctggttttcacggggctctgcatcctattctgtgtcaggtgccggcaccaacagcgccaggcagcacggatgtctcagatcaagaggcttctcagtgagaagaagacttgccagtgctcccaccggatgcagaaaagccacaatctcatatgaggcctgggccccacctgcagccctgcctgtgtcctgtcgctgacccaggcctgtggaccagatgaatgtagcccacacagtgcctctggcctcctgcttttctcttccacaactggccacggtttctctgcctctgttcccaagcccgttggctgagcttgcgctcggctgtgtttcagacactcaagcacacccagccagcttattgatcctccgtagctgcctttacgccagagcccagcccttctctgactaacatcctggatcttctttccagctgtctgcttggatctaagggcacctgacctggatggtgggactg

SEQ ID NO: 6192 - DNA, 600 bp, Rattus norvegicus
acattatcccactgtcgatcatctctgtctactactacttcattgcccgaaatctgattcagagtgcctacaatcttcctgtggaaggaaatatacatgtcaagaagcagatcgaatcccggaagcggcttgccaagacagtactggtgtttgtgggcctcttcgccttctgctggctccccaatcatgtcatctacctgtaccgttcctaccactactctgaggtggacacctccatgctccactttatcaccagcatctgtgcccgcctcctggccttcaccaactcctgtgtgaacccctttgccctgtatctgctgagcaagagcttcaggaagcagttcaacactcaacttctctgctgccagcccagcctgttgaacaggtctcacagcacaggcagaagtaccacctgcatgacctccttcaagagcaccaacccctcagctaccttcagcctcatcaacggaaatatctgccatgaggggtatgtctagacaaaccttcagcctcgactcttaaggaactcctggtactattctacagatatctaggatccctgaaattgattgttgtctctataccttccaaagacccttc

SEQ ID NO: 6193 - DNA, 880 bp, Rattus norvegicus; identical to SEQ ID NO: 2097

SEQ ID NO: 6194 - DNA, 600 bp, Rattus norvegicus
caactgaagaccaagatcaatgtcaaggtatgttccaccaagtaggaagatattatccaaatttacttgtggtatataggaatcctggatccattatggattgatacccatttgttactatcagtagaagtattgttacacacttttagaaggatgaagaacagaccctggtaaaatgagtccttgtagagtaaaggcagagtaagcaagctaagttaacaattggtcctgaattactacattcagggagcacttttcagtgcttctctgagcacagacagtttatattattaaatgtgtaccacctatgcaatcatatttaacatttcatgatggaatcttatttgttcttacactttgacttgataaaaaaaaaagattggtttcttgcttatattggtataaggtggtattgcagctgagctctttctctacaccagtgcgtgttcttgagtcccctgggacctctgctttccatcacaatccatggggttaaggattagctgcttttccatcagatggaagatttggttacaaagatctctgcctggagcagacactatattcagttgtatgtccaatggtgaccctgttgaattc

SEQ ID NO: 6195 - DNA, 600 bp, Rattus norvegicus
gtcaagacaaaaggagagcaatcaaaagtcaaaaggctctgtggtgtgggaggctctgctgtgccaggctgtgagagatgagcagcaggacctggagctgtaggtggtgagagctggcagccaagcaagaggatcctgtggtcagtggaggtagccagatcttcccacctcccagagagggttggggatgaagcmtcattgtgactggtccacctgtggatggryggacasrcagacacacacacacacacacagaggcctcctttatcagtactgggtgctgtgtttccccagggttcccagaaagatgtgtytcctagctgaccccgcactcaacacttcagggctttgccttctggagtggagactctagtaaattaagcttctttatggggtgggaggctaggctagaaagggagatgactagggtgtgtgtgaggtagtctgccatagatcaatgaggctcatttggagccatatgttggcacaaaaaaccatggacaccacattgctactgtaccctcccctaagataacctttattgakaactaagacatatgtacaaattaaarwwrwrwrwrwraaaaaaaaaaaaaaaaa

SEQ ID NO: 6196 - DNA, 1400 bp, Rattus norvegicus
aacaactccagcctttaccgctcctggtttctcggcttctcatcgcagtcagtcttggactttgcgggttttgccgctgtcagaaggacgtctcggactttctgcttcaagtgcttgacaactcaccctttcagcagggtatcggagcatcgctacagaatgaagctggtttccatcgccctgatgttattgggttcgctcgccgttctcggcgcggacaccgcacggctcgacacttcctcgcagttccgaaagaagtggaataagtgggcgctaagtcgtgggaagagggaactacaagcgtccagcagctaccctacggggctcgttgatgagaagacagtcccgacccagactcttgggctccaggacaagcagagcacgtctagcaccccacaagccagcactcagagcacagcccacattcgagtcaaacgctaccgccagagcatgaaccaggggtcccgcagcactggatgccgctttgggacctgcacaatgcagaaactggctcaccagatctaccagtttacagacaaagacaaggacggcatggcccccagaaacaagatcagccctcaaggctatggccgccggcgccggcgttccctgccagaggtcctccgagcccggactgtggagtcctcccaggagcagacacactcagctccagcctccccggcgcaccaagacatctccagagtctctaggttataggtgcgggtggcagcattgaacagtcgggcgagtatcccattggcgcctgcggaatcagagagcttcgcaccctgagcggactgagacaatcttgcagagatctgcctggctgcccctaggggaggcagaggaacccaagatcaagccaggctcacgtcagaaaccgagaattacaggctgatactctctccgggcaggggtctgagccactgccttgcccgctcataaactggttttctcacggggcatacgsctcattacttacttgaactttccaaaacctagcgaggaaaagtgcaatgcttgttatacagccaaaggtaactatcatatttaagtttgttgatgtcaagaggttttttttttgtaacttcaaatatatagaaatatttttgtacgttatatattgtattaagggcattttaaagcgattatattgtcaccttcccctattttaagaagtgaatgtctcagcaaggtgtaaggttgtttggttccsygtgtgtgtgtgtgtgtgtgtgtgtgtgtgtgtgtgtgtgtgtgtgtaaggtggagagcgcctgattaccgcctgtggatgaagaaaaaacattgtgtcttctataatctatttacataaaatatgtgatctgggaaaaagcaaaccaataaactgtctcaatgctgaaaaaaaaaaaaaaaaa

SEQ ID NO: 6197 - DNA, 600 bp, Rattus norvegicus
catttactgactaccgtggaaacctgaacacggaaggacccatctcttcacttgttgcatttgctgtgttcctgtgtatgctcgtttgtacataggggccactgaaaggatatcttgcttggttgtttaaggaagccagtgtatatcagtggtcttagaacaatgaacctggggttctcgggtccacagtgacctgacatctaacctgcaatggtcgaatgcactgttgaaaatggtgttttgtgtacatttgcttcaagaacacatccatgcttttcctaaaagcaggaaccaagagttaaactgtctcttctgttttgtttaaataaatgaacaaatatgcttttgatcataagtgagaaagtttagatcttttcctaagaatagtatatatatatatatatatgtatatatatatatatatatatgtatatatatatacttttctgttaattagattttttaaccgataagaagagtgaactttataaactgaaatctccatcattatcatctcgacaggataaaaatgtagtgctcttaccctgtaatagtaactgaataaaaagatgtattatgctgttgaaaaaaaacctcgtg

SEQ ID NO: 6198 - DNA, 600 bp, Rattus norvegicus
ctacaccaaagttgctgagtacattgactggatattggagaagatacagagcagcaaggaaagagctctggagacatctccagcatgaggaggctgggtactgacggggaagagcccagctggcaccagctttaccacctgccctcaagtcctactagagctccagagttctcttctgcaaaatgtcgatagtggtgtctacctcgcatccttaccataggattaaaagtccaaatgtagacacagttgctaaagacagcgccatgctcaagcgtgcttcctgccttgagcaacaggaacgccaatgagaactatccaaagattaccaagcctgtttggaaataaaatggtcaagggatttttattaggtagtgaaattaggtagttgtccttggaaccatyctcatgtaactgttgactctggacctcagcagatcacagttaccttctgtccacttttgacatttgtgtactggaacctgatgctgttcttccacttggagcaaagaactgagaaacctggttctatccattgggaaaaagagatctttgtaacatttcctttacaataaaaagatgttctacttgaaaaaaaaaaaa

SEQ ID NO: 6199 - DNA, 600 bp, Rattus norvegicus
gttttgttttgttttgttttgttttgttttttaagagcagctgccacttggcaaggatttcgtccctccctgctttaccagtccagtgacatcgccatggtgtcgtggtgggcagggacgtccttgctcaggtcactcctggtcaggcaggtagcagtggggcccagggacagagggagcaccaacactggtttctgcgcagtgttaggaaacccaatcaggttatttgcattgctcccaagaagaaaatgccagctcccctccccactcccgagagggtcagggcgctctcagagcccagctggcagcataattgtccacctcttaggtctagtactgttcctgattctgtgaggaattcgatccggaagatgctcaatctgttactatctcgtaaacagttaaaaatgccgtgcagtcttcttaaccaagcaccttgttctgtcattcaacaagtactgtatctactttcgactctttgtggggggaaaaaaagacaaacctaagttgcttttgatcttcttcttcttcttcttcttcttcttcttcttcttcttcttcttcttcttcttcttcttcttcttcttcttcttcttcttc

SEQ ID NO: 6200 - DNA, 600 bp, Rattus norvegicus
ccagttggtaaccctaacgtcagtgcatgtgtttgctttatgaaatagagaagttttctacggcatgtaatggattcctaatacccaggagttaaatttgaaatttctagcaaacaacacagcccttaaaaatcattcccggcctctggtagcacacactgaagtgaaatagcacagggactttggaggcttaggcatcctacaccctccacaagtcttcaaagagggcaactcctttgaactcagctacaaccagctggagttaccagacacattcccatgactttccaaatactttgagggggaccagccttgtaggccgttataaaagtaggtaatggagggttataaaagatacctggagaaggtgcaaaaacatctgtttatagtgtagagaagctgaagcattcttacagggtactgagtccacagtccccttaagtgtatgcagagaatgtctaattttttagtacaccatataatacccaaagtgctcatcatagagttctgccagtttacagttcttgggaaatttttttttaaactgagccgctcccttcctttacctgcctttcaaataaaatgcctcttcagagtcaa

SEQ ID NO: 6201 - DNA, 600 bp, Rattus norvegicus
gttcagatatgatttcgggaaaaaccgagtccttgacaragrcaggagacaccctcagttgggaggcaagtttctcttaccttggactttctcacacagcaattctcacccccamsmmytcsrcwckmrsctgtcwtgtaactgtgcaaacaaaagtgtgcatggtctttgtcagttgatacctttgtgcacctctgtgcagaaactgctgtctgtcccggctgtggtacccgatcagtggggtagatccmcgaaaggtctcattttaggccgctttgggaaggtaaccagatcggtagctggaagcactctccagtaggtggcgaagggtgagtgggtctgctgaagcctgcatatcttcacccacctcaaacccaccgggctgcacaggggacaggcacaggccacccctgagggacagggaagctctcttgggataccacctgagtttacattcagtgtgctcaggtcaagtctctcgctcggggctctgtttcggggagaatggtttcattccaacgcactcattatcaggattctgttttcttaactatactccattaaaaaggttttttttacaaaaaaraaaaaaaaaaaacc

SEQ ID NO: 6202 - DNA, 905 bp, Rattus norvegicus; identical to SEQ ID NO: 2106

SEQ ID NO: 6203 - DNA, 600 bp, Rattus norvegicus
agggcaagaccaaggcgagccaggtgaaaccgggggacagtctgcsscggcgcgggcccggggctgcggggccgggggcttcggggtccgggcagggagaggagcgtgccgggggcgccaaagcgtcgcgctggcgcgggaggcagaaccgcgagaaacgcttcacgttcgtgctggcggtggtgatcggcgtgttcgtggtgtgttggttcccgttctttttcacctacacgctcatagcggtcggctgcccggtgccctaccagctcttcaacttcttcttctggttcggctactgcaacagctcgctgaaccctgttatctacaccattttcaaccacgacttccgccgcgccttcaagaagatcctctgccgtggggacagaaagcgcatcgtgtgagcgctcgggctgtgccctgcttacagaccctggtcagatgcaggccctgggcttcgagggggcgcgtctacgcatgcagcccctagcactctgaaaccctggaccttcctgctctgtgtaatacccagtttggaggggacttggtggcttttgagaccttttgttaccatgtgtaaagttctggctgagagggacatat

SEQ ID NO: 6204 - DNA, 1400 bp, Rattus norvegicus
cccccacctggagtattttktgcgcttcgaggtgcccagtggagacctggctgccctcctcagctctrtgcgtcgggtgtctgacgacgtgcgcagtgccagagaggacaaggtcccctggttcccaagaaaagtgtcggaattkgacaagtgtcamcacctggtcaccaagtttgaccctgatctggacctggaccacccgggcttctytraccaggtgtatcgccagcktcggaagctgattgcagagattgccttccagtacaagcacggtgaaccaattycccatgtggaatacacagcggaagagattgctacctggaaggaggtatatgtcacgctgaagggcctctatgctacccatgcctgccgggagcacctggagggtttccagcttctggaacggtactgtggctaccgagaggacagcatcccayagctggaggacgtgtcccgcttyttgaaggagcggactggcttycarctgcgacccgtggccggtctactgtccgcccgtrattttytggccagtctggccttccgcgtgtttcaatgcacccagtatatccgccatgcctcctcacctatgcattcacctgagccggactgctgccatgagctgttgggacatgtacccatgttggctgaccgcacatttgcccagttctcccaggacattggacttgcatctytgggggcctcagatgaagaaattgaaaaactctccacggtgtactggttcactgtggaattcgggctatgtaaacagaatggggagctgaaggcttatggtgcagggctgctgtcttcctacggagagctcctgcamtccctgtcagaggagcctgaggtccgagcctttgacccagacacagcagctgtgcagccctaccaagatcaaacctaccagcctgtgtactttgtgtccgagagcttcaatgacgscaaggacaagctcaggaactatgcctctcgtatccagcgsccattctctgtgaagtttgacccrtacacactgsccattgacgtactggacagccctcamaccatccagcgytcyttggagggggtccaggatgagctgcacamcctggcccacgsamtgagtgccattagctaaatgcatagggtaccacccacaggtgccagggcytttcccaaagtytccatccccttytccaacctttcctggcccagaggctttcccatgtgtgtggctgggccctttgatgggctcctcttggacccccatcctcccaacactgcttctcaaccatgtcttactactgcatgcactccagggtggtcctgcattcctcctgccctccatgctctatactaccctgattattctctcaataaaggaaggaaagaatctaaccaaaaaaaaaaaaaaaaaa

SEQ ID NO: 6205 - DNA, 600 bp, Rattus norvegicus
tgacacactcacactgacacactcacagagtcacacacacatacagagatatctgcaaatacagctcagggtttgaaagaataatatataaccgaagactaagaaagtgtgtgagcccagtatgcattcacagaactccaggtattttgtgggaactgagtgactttggaagtgaaagcagatgcagcagcattggaaagtagcccagaactccacactggctgaaacttggattttattcaccaagctgcatgtccttggttctggaaagcaatttagttcttgttcttctttcggtgagcatgaaactggactgctcaggagtatggaaactgtaaaaacttcagagtcagcaaaaggaaatcatgacttcactttagcagaggagattttaaaacttctgacttttgagaccacatcttaataactacataagaaaccctgagttatgatgacccagctaaacaagttccccaaacactagcatcatcagctgcgacagtgttcactaaccctttgcttgaaattgatgtcacaagcttcaggcaggtaccctgtctgtcctgtcccagtgctagacagcctgatgtgatggaattc

SEQ ID NO: 6206 - DNA, 600 bp, Rattus norvegicus
caggctgagtggaaacattgggggaactttgaggaaaaagtagccaccacacttaaggccccaaaggagcagtttcacctgtctgtgtccctaaatagctgggccacactgatctgtcattctaaatagggaagggaatggaaatatatatgtatacmcataaacttgttttaatggaggacctttggttcccactatgtagactactgcttctcaaggcacctgcagattttgatttttgttcttgattctctctcwattgckgtcgttgacagagaagtctgacttaaaaaaaaahcaaactaaacaaaaaaaaaaacttttgatgagtgacttgagtgtaaaaccatgtagttttaacagaaaaccagagggttgtattgatgtttaaaagagaaaaaaaaataatgatgtaagagtctggtataaatgaccaggagaaaggacaaaaatgcatccattctggacatggtgaaatccaggtctcgggtctgatttaatttatggtttctgcgtgctttatttatggcttataaatgtgtgttctggctagaatgccagagttccmcaaatctatattaaagtrttattgccaatttt

SEQ ID NO: 6207 - DNA, 600 bp, Rattus norvegicus
gaggagacctgaacatcaacatgacctccccgatgggcaccaagtccattttgctaagccggcgtccaagagacgacgactccaaggtgggctttgacaagtggcctttcatgaccacccacacctggggggaggatgcccgagggacctggaccctggagctggggtttgtgggcagtgcaccacagaagggcttgctgaaggaatggaccctcatgctacatggmrsccagartkcsscakasrtcgatcaggtggtgagggattaccaatcgaagttggccatgtccaagaagcaagagctggaggaagagctagatgaagctgtggagagaagtytgcaaagtatcctgagaaagaactaggrccacgcttccgcctccatctccccttcctccctgtctctgcctctccttggtccacagttctggcagccaccagccacccagcaattcctgttaccctcacacaagcagtcccagcctggtctgaagctttgcttgctctcaatgattattttcactacaatggaagcaatcatttttattctgtagcccaaatatagcgttcctaccaacawmwaaaaaaaaaaaaaaaaaa

SEQ ID NO: 6208 - DNA, 600 bp, Rattus norvegicus
gcaaagctacagagtatgactgagacactgcccatgtcaccttagcagcaactcagatcactgaactcactgtgtccagattttttctttaacctcctacttctgctgtctttgggcagtctgggtactttttaaaatagagaactgagtgagcgtgggtgatgcgctcttatgtgaggaggagggcacctcttgagtccgtgatggctgtgaaagcagagggctgggggggagcgaaaggaaacacctatgttctgtccgcctgtcctcctggtttgttgttgacaagcgcctcctggtgccatggcatcctgctgcccctttctgtgagctgataccccaggctgggactcccggctctgcactttcaacctggttaatgtccacatagaagctaggactaagcctataggcttctctttaagttaaaaaaaaaaaaaatactaagaattaaagggcaaaacacactgaaaacagcatagcctttccatatcaaagaaaactcgggtaacagccttttcggtgctttaagctgtcttaggctgatcatttatataaactctgcaatggttcaatcaatctgtaaagacagctgagaac

SEQ ID NO: 6209 - DNA, 600 bp, Rattus norvegicus
atccagagactcagctctagaatacttctgttccctttaagagaaggggtctgctggagggtgaagctgccctgagttcagsrsgakgagaagcaggggggctgtgagtgagtgctttcctactatgactcctcccacaaactggcgctttcactgaactcttgccacatagactctgggtgaagggggttgtcttgacccctccagggcaawrgatrsrcyytycymmmrtcwwgccttgcctckywscystakscwscasmctccagskcwaaggaacacaacagtacatccctgacagggcaaggatggtagagcacatcagtctccatttggggccctggcctgttccccagggctgccaagtgtgggtaccaacactttcttgttcccctccaggaagggtgctaaacccgaaagcttctgaccaactaaggcaggaggggatttgaaaggctgcctataaacactggttgggagggagcctttggtatttttgtatgtacgatagggagcagaaacctgggggctggtgtattaaatatgtatatagagattcatccataaagtcmcwrwawrrrramaarwaaaaaaaaaaaa

SEQ ID NO: 6210 - DNA, 600 bp, Rattus norvegicus
ctgccttggttacgcaccccttacccacactgcacttcccaggagtcagggtggttgtgtggcggtgttcctcataccaggatgtaccaccgaatgccaagttctaacttgtatagccttgaaggctctcggtgtacttactttctgtctccttgcccacttggaaacatctgaaaggttctggaactaaaggtcaaagtctgatttggaaggattgtccttagtcaggaaaaggaatatggcatgtgacacagctataagaaatggactgtaggactgtgtggccataaaatcaacctttggatggcgtcttctagaccacttgattgtaggattgaaaaccacattgacaatcagctcatttcgcattcctgcctcacgggtctgtgaggactcattaatgtcatgggttattctatcaaagaccagaaagatagtgcaagcttagatgtaccttgttcctcctcccagacccttgggttacatccttagagcctgcttatttggtctgtctgaatgtggtcattgtcatgggttaagatttaaatctctttgtaatattggcttccttgaagctatgtcatctttctctctctcccg

SEQ ID NO: 6211 - DNA, 600 bp, Rattus norvegicus
gaatacatgaacaaaggaagtttgctcgacttcttaaaagacggtgaaggacgggctctgaaattgccaaacctcgtggacatggcggcacaggttgctgcaggaatggcttacatcgaacgcatgaattatatccacagagatctgcggtcagctaacattctggtggggaacggactcatttgcaagattgctgacttcgsakwggcccggttgattgaagacaatgagtacacagccagacaaggtgcaaagtttcccattaagtggacagcccccgaagcggccctgtatggaaggttcacaatcaagtctgacgtgtggtcctttggaatcttactcacagagctggtcaccaaaggcagagtgccgtacccaggcatgaacaaccgtgaggtgctggagcaggtggagagaggctacaggatgccctgcccgcaggactgcccgatctccctgcacgagctcatgatccactgctggaaaaaggatccggaggagcgccccactttcgagtacttgcagggcttcctggaggactactttaccgccacagagccccagtatcagcccggtgaaaacctgtgagagcctgcgctt

SEQ ID NO: 6212 - DNA, 600 bp, Rattus norvegicus
catattcctcatctttgccatgcccatgcgggtcctctacctgttgtattacgagtactggtcaacctttgggaacctgcataacatctccttgcttttctccaccatcaatagcagcgccaaccctttcatctacttttttgtgggcagcagtaagaagaagcgcttcagggagtccttaaaagtggtcctgaccagagctttcaaagacgagatgcaacctaggcgycaggagggcawtggcaacactgtatccattgagactgtggtctgaggaccgcagggggagtcttagacagaaacagctgaatgtgggtggctttcgatttgtgcttggaatgcaatttaagtccatttaaatctcctaaatctgataagaaggaagcattctacatgcatgggggtctaatcgatgatgagcttgtgttgctacttagtatcttctggaaatgcttccatatgtgacgggactctgtcttttctatcattatcaaagactcattcttctcttagctgtccagtagtgttcaacagttaactataaaaactgccctagcaggaactatctgaattgtgactcagagaaaaaaaaaaaaaaaa

SEQ ID NO: 6213 - DNA, 1400 bp, Rattus norvegicus
cagccagggacggcatgggaggccccactggcggcgggttcgatgaacagagccggtgaaatgggttcccctctttagaccagtagttctcaaccgagaccctccagtacagttcctagtgctgtgatgacccccaatcatcaagttactttgtggctacttcataactgtaattttgctactgttatgaatcatagtgtgaatatctgttgatatgcaggatatgcaatgtgcatcccccaaggagggcacacccacaggttgggaaccactgcctttgatatggaggcgctacacttagaagctatggtgtgtcttggaactgtgctagtaggtcagtcgccctgttgggggcagatccctgtgtgttgctggctgagtgggcctgcagaacacctccttggtgaggaaatcccgtgggtcactgcctgattgagtcaagggaggaagagacactgtgttggttatggaggacaggaccgtctagtctgaggaagaagctctctgctgagctcctggcctaccttcccctgtcctcagggtagggctattaaaaggccaccttgaaggtctgggggtggttgtgcgagaaccctatggaggcctctgtctttttcagtcttgtttgctttctggcctctctagtagtgcctctcctttccagggggttggactgaccattcgttatcggatgtgaccaagcagaacggagggagacacggctttgtctcccttcagaaggtcgaaactggctcctggacgcagaagtcatgtgtggctattgtccagggctctcatctgttgaaaactgtgtcttgctgtcaagattaattctctcccctggggccacagagaggagggcggatggagagaggatcctcctggagggtttagattctgaatgcaccataaatttgcaaggtcggaaacaaggtccttctcaggcgtctatacttggcctaggtctgctcacaagctgcctytggtgctccgaatcccttctgcctggcgctgggctcactgtrtgcyttmmcctatgaccykttaatcagcagagcacmcggagcacstaatytgcytbgcmacatchtaytgacctsgccacaccacatacctcatgcagaaccgaatgtctckccakkaaacgcccaagccagccattcataaaawmmwrwmwmwrtgtgcactggaacrtgtcmtccctgtacccaaacccamtttgtgtgccagacagtgactccacagggacgccaggcctgtgatcgcattgctcgttgcagagsgaagccccgggttgtccgtctcagggattactcccacccagagcagcacacagtgttcccctgttatktcagaamtkatttttaataaagatctrmtattaaaataaaaaaaaaaaa

SEQ ID NO: 6214 - DNA, 1400 bp, Rattus norvegicus
gccacatgttccttctgattgaggatcaaggtgcccaggggtatgagctgttcttcaagactcgggagctaaaaaagaagtggatggaacagtttgaaatggccatctccaacatctacccagaaaatgctacagccaatggacatgattttcagatgttctcctttgaggagaccacttcctgcaaggcctgccagatgttactcaggggcacattctaccagggatatcgctgttacaggtgccgtgcacccgcacacaaggagtgtctgggaagggtgcctccatgtggccgtcaagatttctcaggaaccatgaagaaggacaagctacatcgaagggcccaggacaagaaaaggaatgaattgggccttcctaagatggaggtgtgtcaggaatactacgggatccctcctcctcccggagcctttgggccatttctgcggctcaaccctggggacattgtggaactcactaaggcagaggctgaacacacctggtgggagggaagaaatacagctacgaatgaagtcggctggtttccctgtaacagagttcgtccctacgtccacggccctccccaggacctgtctgtgcacctctggtatgcgggccccatggagcgagcaggcgccgagggcatcctcaccaaccgctctgatgggacctacctggtgcggcaaagggtgaaagatacagcggaattcgccatcagcattaagtataatgtggaggtcaagcatattaaaatcatgacgtcagaggggttgtaccgcatcacagagaagaaggctttccggggcctcccggaactggtagagttttatcagcagaattccctaaaagattgcttcaagtcgttggacaccaccttgcagtttccttacaaggaacctgagaggagagccatcaacaagccgccggttggaagcaccaagtattttggcactgccaaagcccgctacgacttctgtgcccgggaccgatcggaactgtcccttaaggagggtgacatcatcaagatcctcaacaagaagggacagcaaggctggtggcgtggggagatctatggccggattggctggtttccctctaactatgtggaggaagactattctgaatactgctgagcccgatgccctgcaggacacagagagaggcagatgatggctgagcccaggatgccagcagggttgaggggctgtgagctgttctcattggcagaggatctggatggagctcagatggctagtggccagctagcagggttcccaggatgaagcccagagatggttaatttatagcacactgattttctcgagtcctccaagaaagctgattctaataaagtgaggacagcaggaaaaaaaaaaaaaaaaaaaaaaaaaaaaaaaaaaaaa

SEQ ID NO: 6215 - DNA, 600 bp, Rattus norvegicus
ccaggagggaatatgtgggatcacatactctaatgaagttgsagatattttaraggttgacacamtctttcawatgatgaacacattgaagtgcccaagcttgaaagacaagcccaaggttatcattattcaggcatgccgtggagagaaacaaggagtggtgttgttaaaagattcagtaggraactccgaagagggattcttaacagatgcaatttttgaagatgatggcattaagaaggcccatwtagagaaagattttattgctttctgctcttcaacaccagataatgtgtcctggagacatccygtccrgggatcyctcttcattgagtcactcatcaaacacatgaaagaatatgcctggtcttgtgacttggaggacattttcagaaaggttcgattttctttcgaacaaccagactytagactacagatgccaaccactgaaagggtgaccctgacaaaacgtttctacctcttcccaggacattaragaatccaagacttcattcttatgtacctgtgttgggaatcatgccaataagaagccaataatccccaaaatgatacaataaatttcaaaacaaaacaaaaaaa

SEQ ID NO: 6216 - DNA, 1400 bp, Rattus norvegicus
  misc_feature (1069)..(1069): n is a, c, g, or t
wagacccagatgggaagaacaacawtacattcttggaaaccttgaagacggagcggctgagtccagacctcctgaccctggggactgcactgcctacatcactccctgtcaccagcagtgcttatgggggagctgactttcccagtcctttcttctctcccactgggagccctctcagctcagcagcctattcttcccccaagtttcatggaagcctaccattggctccttgtgaggccagagagtgtgtgaactgtggagcaacggctactccactgtggcggagggacaggacaggtcactacctgtgcaatgcttgtggcttgtatcacaagatgaatggtcagaaccggcctctcatccggcccaagaagcgaatgattgtcagcaagcgagcaggcacccaatgcactaactgtcaaacaacaaccacgaccctctggcggaggaatgccagtggagacccggtgtgcaatgcctgcggcctctactacaagctgcaccaggtgaaccgcccactgaccatgaggaaagatggaatccagacgaggaaccgcaaggcatctggaaaagggaaaaagaagcggggctcaagtctggccggagcaggagcggctgaaggaccagctggtggattcatggtggtagctggtggcagcagtagtgggaattgcggagaggtggccccaggcttgacactgggcactgcaggtactgcccatctctaccagggcctgggacctgtggtgctgtcagggcctgtcagccatcttatgtctttccctggacctctgctgggatcgcctacggcctccttccccacaggtcctgtgcstaccaccaccagcactagcgtagtgtctccactcagttcttgaaggtacacaaaatgcctttggccttgtggcagaggasaygmksscmwmskyyyyywyytttatktkttggagacaggatcttgtgtakctcaggctgcctgtgaactatgtagctaagggtgaccccaaatttcmcattctcmtgcctctacctcctgagattaaaggcatatrkcmcmadrvwwrrmahnddmmdhdrhhdmrrttttktttttkttytkaracagggtttcamtatgcagccgakgctggctttgaattccctatgtagtccagactaacctcaaacttgagattytcctgcctcagttcccgagtgmtggaatcacaggcathtgcwaccactcctgttwctccctmstyttaragccaccagcctttacagcccaaccatytccttgccctgtaccstcaaagattttgtaaaataaaaccvccaargmcctgaammwrraramwrwrarctggtatttggctaaataaatgtcagtgtcaarwrrwrwmmaraaaaaaaaaaaaaaa

SEQ ID NO: 6217 - DNA, 600 bp, Rattus norvegicus
gaaaagaaagcttccaaagtccttggcattgtattctttgtgtttctgatcatgtggtgcccgtttttcatcaccaatatcctgtcggttctttgtgggaaggcctgtaaccaaaagctaatggagaagcttctcaatgtgtttgtgtggattggctatgtgtgttcaggcatcaatcctctggtgtacactctctttaataaaatttaccgaagggctttctctaaatatttgcgctgcgattataagccagacaaaaagcctcctgttcgacagattcctagggttgctgccactgctttgtctgggagggagctcaatgttaacatttatcggcataccaatgaacgtgtggctaggaaagctaatgaccctgagcctggcatagagatgcaggtggagaacttagagctgccagtcaacccctctaatgtggtcagcgagaggattagtagtgtgtaagcgaagagcagcgcagacttcctacaggaaagttcctgtaggaaagtcctccccaccccccgtgattttcctgtgaatcataactaatgtaaatattgctgtgtgacaagacagtgtttttataaatagctttgcaac

SEQ ID NO: 6218 - DNA, 1400 bp, Rattus norvegicus
ctggtcctggggaagctcaagtgggacctggctgctgtgattgcgcacgacttcctggccttgattctgcaccgcctctctctgcccagtgaccggcaggcactggtcaaaaagcatgctcagacctttttggccctctgtgccacagattacacctttgcgatgtaccctccatccatgatcgccacgggcagcatcggggctgcagtgctaggcctgggtgcctgctctatgtctgcagatgagctcacagagctgctggcgggaatcacaggcactgaagtggactgcctgcgtgcctgccaggagcagcagatcgaagctgccctcagggagagcctcagggaagctgctcagacagcccccagccccgtgcccaaagcccccggggggtctagcagccaggggcccagtcagaccagcactcccacagatgtcacagccatccacctgtagtttgggacaggccccctcaggtggccaccaagcagaggaggggcccctgccaccccctcsctscctctaggaacaattcatgccatatctgaagcccgagggggctctttttcccctcacaaagccsarggggccaggtcctgcctatccccacagtgtgcactaaggggctgcttggtcatgagggtgtctacatggccagtcagttcctcttccttcccactcaaccagcttggctgtcctgggccatgatggtcagagagatacaaacaggtagaacccacacaccagcatttcttttgagtccctcctctgtctggggcgccgatcctttcagttgccaaaacgccccagtaccttcmaaaggtgttgttgcccctmgcagggtcactgcatttggatctgggtcyttcagaaatccmgatagacgcctatgaggasccaamctagatggmtgctgtgtaatccctactccagctgctcttagcgggaaccagcmtaggccttggctagaagagcaagcgcccgtaaacwgtkgstwkgmttccwgctakscwtctrtggttragggtcttrakkskscygatggtcatyttaattwattgctttgaawacmccgtaaragggyacagtdaggcctgtaccccacaagtggtggtaaccctggcggttgykctttccctcccctytgctaccgctttgtrgcccaggagctgctacagcctgggagggggtcmtgccttcctcwccgtagccmtccagstcatcttcagcggggagggtttaatagggatggatsccgtggaggtgactggactatcyggagagagggcgasccccatkgacacaggtstttcctcagrccacmmggtttggsvygsyggcccatttctatcatgctgccttaataaarrtttcmgrwthmwaaaaaaamaaaaaaaaat

SEQ ID NO: 6219 - DNA, 600 bp, Rattus norvegicus
tcgtctggtttggctgggccaactcctctctcaatcccatcatctatgcctttaatgcagacttccggaaggtgtttgcccagctgctggggtgcagccacttctgcttccggaccccagtgcagacggtaaacatcagtaatgagctcatctcctacaaccaagacacggtcttccacaaggagatcgctactgcctatgtccacatgataccgaatgcagtatcctccggagacagggaggtgggagaggaggaggaggaggggcctttcgatcacatgtctcaaatctctccaacgacgccagacggtgacctggctgctgagtctgtctgggagcttgactgtgaggaagaggtttccttaggcaaaatctcacctctcacccccaattgtttcgataaaactgcttagaaacattctcatgggcatatacaatggtggccatatttccaagcatgcacaaatacccacgtgcgtacacacacacacacacacacacacacacacacacacactccagtgtgcatatgctttctgtagtctgctgcatagaaacaaacgattcttagctgagaaatgacgaggctgttggataact

SEQ ID NO: 6220 - DNA, 600 bp, Rattus norvegicus
cacagcctctaggatggaaagtcacgggcttcccagcaaagtgcatctgagccccacagcccacagagccctgaaaaacaaagggtttgaaattgtcaggagaggcgagatcgaagtgaaggggaaaggaaagatgaccacatactttctgatccagaacctgaatgccaccgaggatgagataatggggcgaccttcagcccccgctgatgggaaggaagtatgtactcccggaaaccaagtcaggaagtcccctgctgtcccgaggaacacagaccatcagcaacaagtctacaaaggagacccagcagacgcttctaatgaagtcacacttgctgggagcccagtggcagggcgaaactccacagatgcagtcaataaccagccatcaccagatgagaccaagacaagtgtcgttgctagtggccctgtgctgtctgctttctgtgttgtgctgtgatcacgagaaaaagtgatcctatgggatccatttcctgtattccatggcagcaaagggaattaatttataaaaatgcttaagttcaaaatgtttttgtttccatatctcccttggggcccctttgagaataaaaaaattag

SEQ ID NO: 6221 - DNA, 1400 bp, Rattus norvegicus
atcttagtgttggtgaggacagcacgggtagctggtccaacttaagttttgaggatgaccatcaagatgaaagcagcagtttccatcatctcagtgaaagcagtaatggtaacagcagtagctggagcagtcttggtttagaaggagatttgtatgagaacaatttatcctttccaacatcagacagtgatggaccggatgatagagagagcgaacaggaggatggtgctgagggtttgcagccgagtggaaagactctgctgatcgtgaacattgacgtggagcctggggcggtggaccctcagctcagggtcattcttcagtggctcattcctcggaggcggaagttagagaactttattttcagtactctgcaaagaaggagtttgtcttactttcaaagcagttacaggagagaggatggaaagtgggcgatgtcctgcaggctgtgatgaaatactacgaagtggtggccaaggcctcaagcgaggacacgtgcacgtcgctgtttgattggcttttagaaaatgcctagcacaccgcagggcagtgtactttagtgcttgttttaggaagtaaagaagttgatgatttacatgtaggataaaattcaaatacagaatattaacattttaattgaattgagaggaaagtaagcgtttaagtgctttctgtcattacactgtatatagttcatacttttttgtaatcttgtcaagatatctctttacttattcttctgtatatgtgtatgtgttatgacatgagatatattctgtgaagacctatcctcacccgatgggcattcattgtctgacagcatttgtttggattcacatagtgctgctgctgctgctgctgctgctgctgctgctgctgctgctgctgctgctgctgctgctgctgccaaacagggctgaggcggctggcctggcccacgtgatcacttggttcctttgaaaacaagtggtgtctaatgataagtcatctgacwtggaagaaagaaaactgaggctgatattttkttktttatttatttctgataagtttgtattctttatgkactgttctttaaaatcagttttacttcccagttcagctattggkacttgtagattccccaatctttaagctcgtacatactgcattagtgacttargtttytgtgaacaccgttatgtgttcccctggctttccatcaagtgatgttatttgctaatactgccaattgttwtgaratgagaaggagaagggcgtgtktgcgtgtgcaagaataaacgctaaccttcccactarttcattcgtttactttagagttttcttaaatagaaacccattwttaacactaaataaatgtytaaatattgtscdgtrmvraawwrrrrraaaaaaaaaaaaaa

SEQ ID NO: 6222 - DNA, 600 bp, Rattus norvegicus
rcgmgatgcttaccgtgaggcccagcagctggtgcagcgagtgcccaagatgaagaacaagccacgctcacctgtggtggagctgagcaaggtgccactgattcagcgtggcagtgccaacggcctctgattcacccatctgctgcccgcctgcccacccgccttttataaacctctaatttattttgttgaattttwawwawwwrwwwwmrmaaagcggaaaaggttttattttgtaattattgtgatttcctgtggccccagccaggcccagccccagggaggggcctgcttgcctcagctcctgctgccaccaacccagccactgtctagcacccctgccccgcccccaccgcatgcccctagggtccttgctcccagtatcttcctactgggaagaggagcaaccctcagcagccctcttgcccctccatggggtgaagccacagtcggtgggtgtgtcacttcaggctctgtgggctacactcagcctgaggcccagctgggtggcccagcacccctaccctaggaaggtgcaacacagggatactacttgaactttcctatcatagctcccatgccacagagggacccgaattc

SEQ ID NO: 6223 - DNA, 600 bp, Rattus norvegicus
caccttcttctggttcttycacgtggactatgkttggatcctgggaagaaatccttacctccctccagaaacaataacctacctmaaatatatycttacttctaatgacatcgacatcgccaaaataacaacmamagaccaagcaaactgcccggacttyctgtaaargggggtgggcaaccgctccaggttatttcttcgctttggctccctggssccacccccactcctcatmaggaccgagcaaccccgcmrgcactagagggaaagtattgctatagaagccaatggaggggactsatgggaaggtggcccaaacccaagaccccacattgttactcgccagcccaataataaacattttgctgatctgcgcgacacaaaaaacaatcttttcaaacaccacaggaccacagaacaaaaacaaaaactcgagggggggcccggtacccaatttgcccctaagtggagcggtttacaattaactggccgcgttttacaacggcgggatggggaaaccctggcgttccccaactaaaaccttgcagaaaacacccttttgccgctggcggataaacaaaaggccgccccaccgccctt

SEQ ID NO: 6224 - DNA, 600 bp, Rattus norvegicus
ggcagaaaatttcaggaatagtggtcttacccctcccgtaaccattgtccagccgtcatcttctgcagggcagatattggcccagatttctcgtcactccaaccttacccagggatcagcaccaacttggacctctagcactcgcccaggtttctctgcccagctgcctactcaggctacagccaagactcgttcttcacaatttggtgtgaacaactttcagacttcgtcctccttcagtgccatgtctcttccgggtgctcccactgcctcacccagtactgctgcctaccctactcttcctaaccgtggatccaactttcctcctgagactggacagacaacaggacagttccagacccggacagcagagggtgtgggtgtctggccacagtggcaaggccagcagccccatcaccggtctagttccaatgagcaacatgttcagccaacatcagcacaaccaagtagccagcctgaggtctttcaagaaatgctgtccatgctgggggaccagagcaacacctacaacaatgaagagtttcctgatctaactatgtttccccctttttctgaatagaactattggggtgaggataa

SEQ ID NO: 6225 - DNA, 1400 bp, Rattus norvegicus
agggacttaaaattaggtggatccactttggcttttcccatatcatttcctaaccatattgaccaaaaccttttccccagtgagtattagtcattagaattacattcattagtatcattcattaaccagccccttaattagattcattaatttaaatgattttaatttaatcacttatacactctggcatcagggttatctacttccctctgacgtttgtccttaacatgcattcttcggccattgctcatctttaaagggggctaattcccaaactacttaactttgtccaaataaagactgagtcctagactatcagtatcatttaaacaaagaaagcagtctctaagagctcctagatttacccctatgtattaaatatatgtaaaaataaatgtgcatctgggcagcttagacataagtctgtgccagatgtctccaaagctgtctgatacttaactttcaggcttagctggtatcaaatgccaaggaatttttgctacctaaacccatctgcaggaaataggcccaactaccagatgagaactaggtctctagttaccattcatttcattmatttctgccattccatatccataaacagcaccactaacatcatgcacaagattagattcctaatattcttgactgtatatttgtatgatattttaaaacctcctaaatggccattcacagttgctttgcactggccttctgataaaatgttaacacacctattgtaatatacaaaaaacattctatctactgatttggactgaatgtatgtacataggctttacaaaaaagtcagacgtcgaagcagtggtttacagatcagtgattttcagatagagtttctttcagttgccgtggaatctttcaaaagcactcttagtgtgaacttamtgaactctaggggtcctggtgatcagagtcgcctagagaggaaacctttccttktattaatatgaagcaagataccagactatcttgattctcacttccagtgtttcaagtggaaaacgtatttccttgttgtctctgtaaatggaacatccttaattttcctcttaaagaatattgtaytgttagatgtttgttgaactggtagcatcattgagactgctgtgawgtctttgtcagtaatctgtataatattttgtatacaagtactggtaagattgttattaagtgtagctccagtcattaaattactatagcaaagtagtacttctgtaatatttacaatgtattaagcctacagtatattttatttcattgatgtaattttattgttatttattcaagagaaagcagttcatcatgtctattgtctaaaattacctggaatcaaataaaagttctagattatcacgaaaaaccaaaaaaaaaaaaaaaaa

SEQ ID NO: 6226 - DNA, 1400 bp, Rattus norvegicus
cttgtgtgaaatccaagactgtcttgtaaacatggaaagagttcaacttttaaaaaaaaatttagatacataaaactgtttaaagttatatgattcataagagtttatctaatacccccagaaatttctactcacatttatcacatagcttggtcatttacatactatggaactcataatattatttaacttaggggagcacgtgaggttcgtggcacgagatggaatgctatcagcagagtagacatgtttttccagggtcttgttttttgtttttgtttctggtctcttcctgtttgggcggagggtaatataatagataatatacataatagaatacactctgatacctgacttagccgtgttttgacaacttggaaacttgattcaattatttataacacagctgaaaatttaaaatggactccacacatttaaatgcagtttcaggccaattttctaggtacaattaccacagacaggtgagctacagcataaattccaaacatggcagaaatggaaattacctataaatataaatgagtttagatattgatgagcctgatgctatttcccgggcactccactgttcccctcaccttaaggaactctcaagtcctgctcttccactgcaagcacagctggtccttaaatctacaggcctctggctacagtccgaatttgaacacagttctgtcaccgtgtgcagcagcagcagccatgtgcaaagttctagatcaaggaacaaaggtagcacatgttcctgacagtgtggaaacataaacataaatgcgaattaaatagaaattatcccttctgaattctttttgttcctttcatttctaaataggttgttcctggagcctgaattaataaaaagaacacagcacacatttttcaggcgatgagggtttcacatggtgataatgtgaatacattcagtttttatttgattctcataggtcaagttttactgttcggtaagagttgtaaattagattaaaaccctgatgcataagttgtaaacaaaytyrrywyragrgcaagtttgaaaagcacaagagctaataacaccactgaggcatatagacaagtctcttatgggcatatgcagctccctgaagcgcatggatcaagctaccgcctcagagcacaccagcaccaggggcgcatgctaaaggaagagctcccctccccaccccccatgcttcacgatccatgttgacttcagtctgtsccattctgggcatcatagttctccttcagattattagcagttccacctcttggcacgtactacttttgctctaagttggagtgagagtactggtttataagattactggatttgtacaatatttaagattcaataaattctaagtgaaaaaacaaaaaaaaaa

SEQ ID NO: 6227 - DNA, 600 bp, Rattus norvegicus
ctactccaatccccgccaagagactggcatagctggacatccaacataccaattttctgctaatacaggtcctgcacattacatgactgaaggacatctgacgatgaggcaaggggctgatagagaagagtctcccatgacaggagtttgtgtgcaacagagtcctgtagctagctcgtgaywacattgaaacttgagtyygtttcttgtgtgtttttatagaagtggtgtttttttcccaaaaacaaaagtgcaaagctgcttgaatcagaaggagattaacacastgaaccgsyacgagarskywwwkytkwyttttttttttwwyttgaaaagattgcaaagggmcaatgaagtttttaarasccatgtccacccwtcttcatggagcgctcagagtgtcctctttytgcctcccccatttaasttccatctcccggtcacagtgggtttwgtctttmtatccaacaaaagttaatgttcagctgttggtcytggtcatttgccaactaattttaaaataaaarggcactgcacwtaawwwrmawaaarrrmmmmawarrrtgttttggttttttcatttttattttttcccctttt

SEQ ID NO: 6228 - DNA, 1400 bp, Rattus norvegicus
aaaaggtgtttctcagcaccaccggaggggcatgggtgatcagccgagtctttgattcagggtacccctgggacatgatattcatgacgcgatttcagaacatgctcagaaatcttctcccaactccagttgtgagttggttgatatcaaagaagatgaacagctggttcaaccacgtgaattacggtgtggctccagaagacaggactcagctgagagagcctgtgctgaatgatgagctcccaggccgcatcatcactgggaaagtgttgatcaagcccagcatcaaggaggtgaaagaaaactctgtcgtctttaacaatacaccgaaggaggagcctattgacgtcatcgtctttgccactggatactcctttgcgttccccttcctcgatgaatcaatagtgaaagttgaggatggccaggcatcactgtacaagtacatcttcccggcacatctgccaaaaccaactctggccgtgattggcctcatcaaacccctgggttccatgatacccacaggagagacacaagctcgatgggttgttcaggtcctgaaaggtgcgactacattaccacccccgagtgtcatgatgaaagaagtcaatgaacggaagaagaacaagcatagcggatttggcttgtgctactgcaaggctttgcaatccgattacataacgtacatagatgacctcctgacctcgatcaacgcaaaaccggacctgcgggccatgctcctgactgacccacgcctggctctgagcatcttcttcggcccatgcacaccttaccatttccgcctgactggtccaggaaagtgggaaggagccagaaaggccatcttgacccagtgggaccgaacagtgaacgtcaccaaaactcgarccgtacaaraaaccccatctacctttsamrmkktgcttaaactctttagttttctggctttgcttgtggctgttttctttattttcctgtaagtgaaagrtctaactggcttyccaaatgtgtggagtataaccttccaacttctctaatgtamcaatttcrcsttcgtaaytgtrarccacgtccagagacacccaacccctacctctccccaactcacctcattggcaccttcattgctgggtctcttgctagtccatmaggtttagtgcaagaaaataatgtccagcaattctgttcacttaaaatgttggaaggatccaggccccctttcaggaagaatctgcccccagagaggactctgagcattctytcaatmtaaaaaactgctttccctagatcttaatgaaaagcccaacttcgcggaatattggtctgcactaaaatagttctctgtgtattagttgmctacaaataamatggaagaaactamrwrwaaaaaaaaaaaaaaaaaa

SEQ ID NO: 6229 - DNA, 1400 bp, Rattus norvegicus
acttggccaactgaggctgggctggacccctattgtggaatcgcggacacttcctacagttgtcgaacgcaatccgtctacaccaccttgtgtcactacctaccaccatgggtttggagctctacctggacctgctgtcgcagcccagccgcgcggtctacatcttcgccaagaagaatggcattccctttcagttgcgtaccgtggatttactcaaagggcagcacttgagcgagcamkwskcccaggtgaactgcttaaagaaagtgcctgtcctcaaagacggaagcttcgtgttgaccgaaagcactgccatcttgatttacctgagttccaagtaccaggtggcagaccactggtacccggccgacctacaggcccgtgcccaagtccacgaatacctgggttggcatgccgacaacatccgtggcacctttggagtactcctgtggaccaaggtgttggggccactcattggggtccaggttcccgaggaaaaggtggaacggaacagaaatagtatggtcttggctctgcaacgtctggaggacaagttcctmagggacagggccttcattgctggccagcaggtgacgctagcggatctcatgtctctagaggagttgatacagccggtggctcttggstgtaatctgtttgaggggcggcctcaactgacagcgtggcgagagagggtggaggcgttcttgggtgctgagctatgtcaggaggcgcacaaccccatcatgagcgtcctgggacaggcagccaagaaaacattaccagtaccccctccggaggcccatgccagcatgatgcttcgaattgccaggattccctgagtggttttttttccctgagtatttttattgctataaagactcattttgtattttrmmwmwwwrwwwwrwwwtgtttttgtttcttctygkccsarmmwbdhwwwkkwkyywkhwwwwwmwrrmwmmwtttctggctctgggaggagctttgctcaaaagggacaccacytatccttagcatgcttctcttgaggtacagtatgcacaaccamtaggagacccamgtcartaatatataaaaggtgcktaaaaarmammaagcamacagtamcacacacgaagaaatcaaccaaaarttggtgracatctgttttttattataatatagattctgaatattttamggaataaagagttattgttttattacattgccctctaatctgtatggaataaattatgactttgtwaaacaaaaaaaaaaaaaaaaaaaaaaacctytgcsgccgcaagcttattccctttagtgagggttaattttagcttggcactggccgtcgttttacaacgtcgtgactgggaaaaccctggcgttacccaacttattcgccttgcagc

SEQ ID NO: 6230 - DNA, 600 bp, Rattus norvegicus
  misc_feature (102)..(102): n is a, c, g, or t
  misc_feature (111)..(111): n is a, c, g, or t
aggagcatagttatttaggggcgaccaataggaaaaagctcgcgctttcatcgtgcctcctggagtagagamskgggrmtgccyskscssbcsvgyhchbynmmsbvvvbnkmrdgmswbrkykygcybwggygkycrcagkcggcatgtgttccagccgacgaccgcatcttgtgtcgctgaggcggcgcactgaggaaccaratggactccagcccttcaggaggcaagagraaaaaaagtgctctcggttccccagagcaacccggggaaagacactaccgcggccacgggactcttgacgratctgtccagggggtagagggttratcaacggagtytsgccctmtccacctttcagcmtccagagactttgaggagggggttattcaaccccgtgtgtttytgtttttttgaraaagcagacattttttttaaatggtcacatttcgtgcttytcagatttctgagaaaatgttttgtattgtrtatyacaatgatcactggytgagaatattgttttacaatagttyttatgggggtgggytttttgttgttattaaacaaacacwwtrgdhrahwawaaaaaaaaaaaaaaaa

SEQ ID NO: 6231 - DNA, 600 bp, Rattus norvegicus
tccaacaaagtgggagattgagacctacaaccaaattagatttggggagttttctaccttggttctgaggatggaacmcagggggtacacatgctgggtaagcactcttytcctggatcccatcttcagccccaaattgagtcccagtggcacatccaggaggcctttggttatcccagccatacwsgwrsccaaatctgccatttgccccacttaacacagtcmmaatttcatactaaaacgcaascamaagattagggggatttwtttttwwaaattaaawtataaactaagagwttatatgwagttcattataatggttaacaaagtctgtwactgaacgctgactggggtccgtcttatattttcaacmaaactgaaccataacattacactaaccagcagytcaacatgagcgagggttggkttttwykgtdtwtgyytttttttytgwtaagaagaaaagrgagwtgaaggaaggaagaaaggamcaaaggaagggtgaytaagatgaatttyccaagggtttctcaatgtttcagatttttaatcattaaaagaaactytcmtmcwraaraawrrrwaaaaaaaaaaaaaaaa

SEQ ID NO: 6232 - DNA, 600 bp, Rattus norvegicus
tctacttgtataggtctttcaactacaaggagatcgatccttctcttggacacatgattgtcaccttagtggcccgggttctgagtttcagcaactcctgtgtcaacccgtttgctctttacctgctcagtgaaagcttcaggaagcatttcaacagccagctctgttgtgggcagaagtcctatcctgagaggtctaccagctacctcctcagctcttcagcagtaagaatgacttctctgaaaagcaacgcgaagaatgtggtgaccaattctgtcctgctcaacggacatagcacaaagcaagaaatagcactgtgatcggagaccatccaattcatcctcgggaaataccattttcacaacttttccattattattgagcgaagcagagctaaataatcaccacatttacactgctccccagctaattcatgattgactcaagcgcaaggcacgcacttttgtctgaatagaaagaattttaccttacaccaccacacatctaactcacacgtaattcacatatatctcctgctaacatcggtttacacattcccttgggatttaagacattccaacaagcaaatgtggcatattg

SEQ ID NO: 6233 - DNA, 600 bp, Rattus norvegicus
cctgctccgcctgtcccagccagccacactctctaaaaccatagtgcccatctgtctgccgaacagcggcctggcgcaggagctcagtcaggctggccaggagacggtggtgacaggctggggctatcaaagcgacaaagtcaaggatggcagaaggaaccgcacctttattctcaccttcatccgcatccctttggccgctcgaaatgactgcatgcaggtcatgaacaacgtggtctcggagaacatgctctgcgccggcatcattggagacacgagagacgcctgcgacggcgacagtgggggacctatggtggtcttctttcggggtacctggtttctggtgggcctggtgagctggggtgagggctgtgggcacctcaacaactatggcgtctacaccaaagtgggtagctacctcaaatggatccacagctacataggggaaagggatgtttccctgaagagcccgaagctgtagcatccctccmtgctcatctctggggcccagaggtcactcttagaataaggctgggctagtgagtaccaagacaggggacattaaaggggcaagcaacacctgaaaaaaaaaaaaaaaaa

SEQ ID NO: 6234 - DNA, 600 bp, Rattus norvegicus
tyctcatggagatgctggaggccccacatcaaaccacctaggcccgtcacccatgtgccggtcccttgccccgcctggacacagctgctcagctccagccctgtccctgccctttctggatggcctgtgtggatctttggggtgcagcgtccccatggtcccaaaagatgcatcaccatcctcgccatcatcattaatgcttgcctttgcccagggccgtggcagagctggcgtgacacctacccagccccctgccctacaccaggctctaaggctggtcaccctgagggtcttggggtacttcgtggggtcttcagcacctggagctgcaggagctgggagaggggcttgttctggktgstggtkgctgtcgctggttctcgacatgcccgcgtggcacctctgtttggagtaccccatctttgcccgtgcagagtcctggtacccagctaagggtgggaaagggagcaggtggggcaggtcatatcctcctggatcatagctaacctttaagcctgtttccaaagataccctgggctatcaccccgagcaggattctgggaccacctcaaggccgcgtgggctggaggtccggaattc

SEQ ID NO: 6235 - DNA, 600 bp, Rattus norvegicus
tgtggctggttgaggcagagatctccccagagttagagaagcgtttaggccggaagaagaagcggaggaagaggaagaaggaggtgtgccccttggggccagcccctgaacttcaccactctgcccctgttcctgccaccagtgcagttcctcggctgcctcagctgcctcggcagaagtgcctagtagctgcaaatgcctggggaacaggagagccctgccgacagggagcctggactgtagtctccaaccccttctgcccagagcctagtccccatcaagatccatttctccctggtgcctcagcccccagggtctgggctcagggccgcctccaggggctgggatccattcattcccgcactaacctaatggaggctgagctcttggatgcagactcggacttctgagcttgcagggcaggtcctaggatggggaagacaagtgcacgccttcctatagctcttcctgagagcacacctctggggtctcatctgacagtctatgggccatgtatctgcctacaagagctgtgtacgactggctagaagcagccagaccatagaaacaagctgaacacagccactgatagacctcact

SEQ ID NO: 6236 - DNA, 600 bp, Rattus norvegicus
tcgccagagatttgaaaacctgctgtggtccagaaagaagtttgtggacaacatgaagatctataaccacagttacatatacatgcctgccttttctatgaagacgggaacagagccgtctctccgtgtgtactacaccctgaaagacgctggagccaatcaaacagtgctttttgctaaccccaactttcttcgaaacattggaaagttctggaagggtagggggatccatgccaagcgcctgtctacaggactctttttggtgagtgcagccttgggcctttgtgaggaggtgtccatctacggcttctggcccttctccgtgaacatgcaaggggaacctatcagccaccattactatgacaacgtcttgcccttctcaggcttccatgccatgccygaggagtttcttcaactctggtatcttcataaaatgggtgcactgaggatgcaactggacccatgtgagrasccgycgycrccacagcccacttcctagggactgcagaagaggaaaakactggatgggggtatttttttgctagatttttttttatgtgactttcaaaaggagctgccaaagtgtgtcatggattggcg

SEQ ID NO: 6237 - DNA, 1400 bp, Rattus norvegicus
cgttcaagtgacttccatatccatcaaacaatcacccatcttctccgcacacatctggtgtctgaggtgttcggtattgccatgtaccgccagctgcctgctgtgcacccccttttcaagctgctggtagcccatgtgaggttcaccattgccatcaacactaaggcccgggaacagcttaactgtgagtacggcctttttgacaaggccaatgccaccggaggtggtgggcacgtgcagatggtgcagagagctgtccaggacctgacctattcctccctgtgcttcccggaggccatcaaggcccggggcatggacaacaccgaggacatcccctactacttctatcgtgatgatggactgctcgtgtgggaagctatccagtcgttcacaactgaggtggtaagcatctactatgaggatgaccaggtggtggaggaggaccaggaactgcaggacttcgtgaaggatgtttacgtttatggcatgcggggcagaaaggcctcaggtttccccaagtccatcaagagcagggagaaattgtctgagtacctgacggtggtgatcttcacagcctcggcccagcatgcagctgtaaactttggccagtatgactggtgctcctggatccccaacgctcctccaactatgcgggccccaccacccacggccaagggtgtggtcaccatcgagcagattgtggatactctaccagaccgtggccgctcatgttggcatctaggtgcagtgtgggccttgagccagtttcaagagaatgagctgtttctgggcatgtacccagaggagcatttcatcgagaagccagtgaaagaagccatgattcgattccgcaagaacctggaggccatcgtcagcgtgattgccgagcgcaataagaacaaaaagctcccctactactacctgtcaccagacagattccaaacagtgtagccatctaaggctttgccgtccctgtcccagcagctctctgggcaggccagtggcttgcctggcaggctgtagatcttccagcagctggtgcctctcccaagctagcagtgccgctcttgggcccaggtgtggttgtaaactaaaggctgttctaggtgggaaattcacagagcttcagcacatgctacttcttcctgtcttcagtgacatagttcaggggcctcccatccagagcaggggtgtgcggctgtgtcccccagtccagcttagtaacctcttcactcagtagcaacagagtaagtgataatgttccactgggtcaggggtccatcattctacttatgcttcctccaactgcctgcatacagtaggtgcttagagaaacttcttagattaagagtttgttataaaataaagttcatttaaaacaggaaaaaaaaaaaaaaaaa

SEQ ID NO: 6238 - DNA, 600 bp, Rattus norvegicus
tccaggaagaagaataagaactgccgtcgccattcgctctacgtggacttcagtgacgtgggctggaatgattggatcgtggccccwccaggctaccaggccttctactgccacggggactgtccctttccactggcggrccacctcaactcaaccaatcatgccattgtgcagaccctggtcaactccgttaattctagcatccctaaggcctgctgtgtccccaccgaactgagcgccatttccatgttgtatctggacgagtacgacaaggtggtgttgaaaaattatcaggagatggtggtggaggggtgcggatgccgctgaaatcaggcagtccggaggacggwtgcacacacacacacacacacaaagcccatccgaccacccacacataccacacaaastgcttccctatagctggacttttacttaaaaaaaraaaaaaaraamwmraraaaraaaraaaaagaaagacagaaaaggaaaaaaaaaccaaccctaaacacccaccttgaccttatttatgactttacgtgcaaatgttttgaccatattgatcatatattttgacaaatatatttataactacgtattaaa

SEQ ID NO: 6239 - DNA, 1400 bp, Rattus norvegicus
gagcacctagctgaatacctagaggtttactggcgcgctacccaccacccagcaccgggccccgggatgctgggtccgcccagtgccatccctggacttcagaaccagcagctgctgggggagcgaggtgaggagcattcacccctggagcgggacagtttgatgccctcggatgaggccagtgagagctcccgccaggcctggaccggatcttcacagcgcagctcccgccatctggaggaggactatgcagatgcctaccaggacctgtaccagcctcaccgtcaacacacctcggggctacccagtgctaacgggcatgacccccaagaccggctcctagcccaggactcggagcatgaccacaatgaccggaactggcagcgtaaccggccttggcctaaggacagctactgaccacctcctgccctaccctggcaggcacagacacagcggctggggtgtccacctcasgcaggttggagttagattggcgttaggctgcctctaggttcagctcacacaaccctctgcccagccctakgtccagggctgactgtggtcccaaggttctgggagaagcaaggggccccctcacctcctgggcacagtgaccccgtaggttctcatccaggtactagctgtgttctgcatccttggcaccttcmcctgcataagaagctgccccggtgagcaatgatctcaggccgggatcacttagcaggggtcttccagccagaatggatacccctctaaacagcasgagggtgtgagtgcabgmrrtgtagcatgaggaagagacatggttcctgagcaggcgtaaaccctaagcaaaggaactccgttcacgtcactgccgcacattagaaatgaagcaatcagagctcaacatggcggcayttstatcccatcagstggggtgggcacttacacytaagacaggagcagtgcaggtgaggcaggacagacagytcatggytgtagctctgttagagaacggccytcctcaccaaaccaggaagcttagcatytggcaagactagggaactggggcacagtcaagcccaaagccggcytggactgcggggaagggggagcagyttccagcccccccaccccccttgctttcctcattctttgcccttgcgtctgtcatttctgttccttccctccatgcctcctgcaagataggggctccctggytcgtagctgccacttgttaagttagggttagatgagaggaacagacacaatgaacagccccagaggctgtcacctggctacccttgccttatggctctagcgtttgacctacagagcatgctccattaagaacccgccccacctcattgtcatctccaataaaacataacgcmcmrwmmmwwrrrwrwmwmaaaaaa

SEQ ID NO: 6240 - DNA, 600 bp, Rattus norvegicus
ccatgagttaccagtggaccaacctgagagcaccgtttaagtgcaaggcggtaaacagggtcagccaggagtctgagatggaagttgtcaactgtccagagaaaggtctgcccctctatctcatagtgggggtcagtgcaggaggactcctcttggtgttcttyggsrcgskgtttattttctgtatctgcarraggaaaaaacggaacaggwggakawaaggtgaasasctggagatawaagcttccasaatgagcactgtggaaaggggacccaagycacactcaryccaggcctcagcaccakcatcacagaatccagtggcttcccaagctcctcctccacctggccatcatckccagacacstggccatcgtcccctgcctccaagccaycgtaaycgtgagcaccakccgragaasagacctcckccatcaggcacacaggttcaccascagaaakgscctcctttgcccagaccccgagttcakmcaaagcckccctgtgggagtggagatgtttcgttgccaccccctaattaaaaaggcagaatctgccatttccaataaaaagctgtgtggatataaaaaaaaaaaaaaa

SEQ ID NO: 6241 - DNA, 1400 bp, Rattus norvegicus
cgatctattctcacttcagtgagactgtcacaggtttgcccattatccgtgcctttgagcaccagcagcgatttctagcttggaatgagaagcagattgacatcaaccagaaatgtgtcttttcctggattacctccaacaggtggcttgcaattcggctggagctggttggaaacttggtcgtcttctgttccgccttgctgctggttatttatagaaaaaccttaaccggggacgttgtgggctttgttctgtccaacgccctcaatatcacacaaaccttgaactggctagtgaggatgacgtcagaagcagagaccaacattgtggcagttgagcgaataagtgaatacataaatgtagagaatgaggcgccctgggtgactgacaagaggcctccggcagactggcccagacatggtgagatccagtttaacaactatcaagtgcggtatcggccggagctggatctggtactgaaagggatcacttgtaacatcaagagcggagagaaggtcggcrtrgtgggsmggactggggctgggaaatcatccctcacrarstgcctcttcagaatcttagagtctgcggggggccagatcatcattgatgggatagatgttgcctccattggactgcacgaccttcgagagaggctgaccatcattccccaggaccccattttgttctcggggagtctgaggatgaayctcgaccctttcaacaaatattcagatgaggaggtttggagggccctggagttggctcacctcagatcctttgtgtctggcctacagcttgggttgttatccgaagtgacagagggtggtgacaacctgagcatagggcagaggcagctcctatgcctgggcagggctgtgcttcgaaaatccaaaatcctggtcctggatgaagccacggctgcagtggatctcgagacggatagcctcattcagacgaccatccgaaaggagttctcccagtgcacggkcatcaccatcgctcacaggctgcacaccatcatggacagtgacaagataatggtcctagacaacgggaagattgtcgagtatggcagtcctgaagaactgctgtccaacagaggttccttctatctgatggccaaggaagccggcattgaaaatgtgaatcacacagagctctagcagctggttccgtggctggcggactataagaacagtttctattatttgctttggtttctgtgactgtgctctaggtgcaaagacacatattttgttcccgttgctcaggctggcctcaaactctaaggctccagcaatctctggtctcagccagagacctgtaaaaatagacacttcaaagattatcatgaataaatatttaaataaawarwaaaaaaaaaaaaaaaaaaaaaa

SEQ ID NO: 6242 - DNA, 600 bp, Rattus norvegicus
agtttctatgtggtcatgtggaaacagatggagcagacgtactggcaggccaatcctttccgggcagtggctgaaccagggattcagctcaaggctgtcaagtcctctacaggtcccggggaacagctccgaaatgcgttgtggcacacgggggacacagcatcccaggtgcggctgctgtggaaggatcctcgaaatgtgggctggaaggataagacatcctaccgctggttcctgcagcaccggcctcaagtcggctacatcagggtgcggttctatgagggtcctgagctagtagctgacagcaacgtggtgctggacacagctatgcgtggtggccgcctgggtgtcttctgcttctcccaagagaatatcatctgggctaacctgcgctaccgttgcaatgatacaatccctgaggactatgagcgtcaccggctgcggagggcctagggaccctaagaggggccccgctgaccgatggactgcggtagcatcggccacaggtgtctgggggggggggtctggcatctttctgaagggatgtctggcctggggaggaaaggcaaataaagaatgtatgtgggggaaaaaaaaaaa

SEQ ID NO: 6243 - DNA, 600 bp, Rattus norvegicus
cgcggagaagaactggtttgtgggcctcaagaagaacgggagttgtaagcgcggtcctcggactcactacggccagaaagccatcttgtttctccccctcccggtatcttctgactaaggagtctgttctgggtgctccctatttttggttgaccctaaaatgttcccttgaccattggctgcgctaaccctcagcccacagagcctgaatttgtwwgcagtrmwwmwaaawarmmagttcacttttccgctgagcccttccccaccaccccagcacagtttggaacacggggaccaaattacttstaggggacaactggctggccagtctaggtctgggtttggatatccagatgcttcagggtacctgmtacaagttggacytcgtgatacaaagaggggagccatgtgtagcatctggaggggtctaagaagtgggttcttttagtagctgcatgctctttccccttctgagtaatccstggttttgmgtacccccaggcacttagcatgaytacccttccccctaccagcacctcataaatatcagtaaagaaactgrtagtaaaaaaaaaaaaaaaaaaaaaaaaaaaaaaaaaa

SEQ ID NO: 6244 - DNA, 600 bp, Rattus norvegicus
atcccgctgtttggaattcattacatcatcttcaacttcctgcctgacagtgctggccttggcatccgtctacccctggagctgggactggggtccttccagggttttgttgttgctgtcctctactgcttcctcaatcaagaggtgaggacggagatttcacgcaaatggtatggccatgaccctgaacttctgccagctcggcggacctgcactgagtggaccacacctccccgatcgagagtgaaggtgctcacctstgagtrcyarsccmgmcwtcwcarwkscygagccccamawcystkcwytcwwmctrycwwgccaccaagggcaacaaggtcctcccttccgttctcattctctgcatctgctttctctaggtccctgtataccaacctccgactttctcagttcctgtatgcccccatctgttctttcttcctatctaggctattgcccaaggcccagggaaaccaataaacttgtacatgagtgatctgcagttgagtcaatgtggctctgaaggggagctcttgtcagcagccattatttgcacttccggtgcattcctcatcccttggctgcagctgcctcattgcc

SEQ ID NO: 6245 - DNA, 600 bp, Rattus norvegicus
gtatctatgtcactgctaaggagcatgcccagcagatccagatgttacaacgggcaggagccacctctgaaagcaggccccagacagctgaccagcacagcacacatcgcatgcggacagagaccaaagcagccaagactttatgtgtcatcatgggctgcttctgtttctgctgggcccccttctttgtcaccaatattgtggaccctttcatagactacactgtgcccgagaaggtgtggactgctttcctctggcttggctatatcaattcagggttgaacccttttctctatgccttcttgaataagtctttcagacgtgccttccttatcatcctctgctgtgatgatgagcgctacaaaagaccccccattctgggccagactgtcccctgttcaaccacaaccattaatggatccactcatgtgctaagggatacagtggaatgtggtggccaatgggagagtcggtgtcacctcacagcaacttctcctttggtggctgctcagccagtgatacgtaggccccaggacaatgacctagaagacagctgtagcttgaaaagaagccagtcctaagctgctacttcggtgtatg

SEQ ID NO: 6246 - DNA, 1307 bp, Rattus norvegicus; identical to SEQ ID NO: 2150

SEQ ID NO: 6247 - DNA, 1400 bp, Rattus norvegicus
tcctctcagaccccacacctggcatcccgaatccccgagatgagctgtgtggtggtgcccagctctatgcctgccaggaccccgccatcttcgaggagagacaccttaagtacatctccctgctgggcaaggggaacttcggcagcgtggagctgtgccgctacgaccctctgggagacaatacgggacccctggtagcagtgaagcagttacagcacagcgggccagaacagcagagggacttccagcgagagattcagatcctcaaggctctacactgtgacttcatcgtcaagtaccggggagtcagctatgggcctggtcgccaggagctgcggttagtgatggagtacctgcccagcggctgcctgcgggacttcctgcagcgccaccgcgcgcgcctgcacaacgaccgcctactgctgttcgcctggcagatctgcaagggcatggagtacctgggcgcacgccgctgcgtgcatcgtgacctggctgcgcgcaacatcctggtggagagtgaggcgcatgtgaagattgctgacttcggcctcgctaagctgctgcctcttggaaaagactactacgtggtccgcgtgccgggccaaagtcccakmkkctggtacgcccctgagtccctatctgacaacatcttctcccgccaatctgacgtgtggagcttcggcgtggtgctgtatgagctcttcacctacagcgacaagagctgcagcccatccactragttcctgcgyatgatkgggcctgagcgtgagggatccccgctctgccacctcttggagctgctggcagagggccgccgtctcccaccaccctccacctgccctactgaggttcaagagctcatgcagctgtgytggtcgcccaacccacaagaccggccagcgtttgacaccytgagcccccagctggatgcgctgtggcgcggaagccccggatagcaagcagccagggatgagcgtgagyttggttcctatgatctggstgtgtgacttccargcgggaagctgtccctctctgggccccagcacccccaatcccctctggscacctcttcccatcattcttccctcccagaatggggatgttaaataagtgaccccaggctckgcacgrktgtcattacctctggaaatgctttactagcaagtctgccttmtgcagaactcacaaccccaggtcccaagagcaccctagacttggccagaaacccacccagacccccagaccctctcttgaccctaggtctgtgcccagtcccktgctctcctgtccatgggtttcttgggggctgtgaaacctcagcatggtctcctgaaagattgggttctgggagtgtttgttgaatgaataaatgaattcmwtdgaaaaaaaaaaaaaaaaaa

SEQ ID NO: 6248 - DNA, 1400 bp, Rattus norvegicus
acatgtccgctggcccaggaagaaattttagaaattaacagagcagattccaaactgaatggggaggtggcgaaggccgcgctggcgaacgaagactgcccccacatagaccaggccctcactcccgatgagggcctgccctttacccgctcgggcacccgcgagagatacggaccctgcttcctcttatcaaccggggagtacgcgtgcccgcctggtggaggaatgagaaaggatctttgcaaagaaagccctgtcattgctaagtatatgccgacagaggctgtgagagtgacttgaccaggcggcttggccgaggacactggtggctattaagcatctgggtggacctgcagcccctcctcaccctcggacagagtaaattcacgccatgcaggtttgccggacgagtccgagtggccccgggcattgtactaagacggacgtagctttttctacggcccacggtaactgaccgtagaggattcgcccttctttcttttgattttctttttctttcttttttttttttttagaagttaccttttatttggggagggggggtcaaggggagccttagcatgacttgcatgaagttaaacagaaaacccagctaaaccaaccccaccagcccctgctgtgactgtatgctcactctaaccaccaccgagaaccagagaaargcaagagtctcttatttcttccagcattctttgacacgtagtgtcggagtcaaactgtgacggcgcttggtagaaccctgtacatttccgggagtgggtgcgggggggggggggaggtcagggactaaggatggggccaggggagtggattgcttttttgtacacgagacccagaggaaaggtcccaaaaaggcagtcagtcatcgktmacattgacctcaccttcatagctcacctctcgctcggaaaaccaagaactatgctccgaataggattgtggaaattcacactgccaccctcttccacctccgtttggcatgcttgcgacccaatggacctytccccaagaccccgacagcggctagtttagstcaattctctcatcttggtgtgtarctccagtgtgaccaagtttcataacaaattstttcmtagttacmccacatggattttccaatgtcattttaaagccaggwtgtagartcccdccagttcaggaccrcccagaggggcgcctcccctccacctttactaaggcgaaaaccgacactgtatgcaatttagtacttcagagctcaaagaaaaaaaaaaaaaraaaaaaaaagaaaaaagaaaaactgcatgcccaatgttatgcaaagagattcgagcatgaaataaattttgtaacatggwwwmaaaaaaaaaaaaaaaaaaaaaaaaaaaaaaaaaaaaaaa

SEQ ID NO: 6249 - DNA, 600 bp, Rattus norvegicus
cttctgcctttatctgttgtgctggggctgattagaggtaggcattccacatccagtttagacagggctggggcttgaagccagggctcggagcatcctcagtaactactctacacccctagtgtggtctcttctgtcctgctgggtaayggggctgggtttattcaagcccctgggaagggctggagccgcccctccacctgtgcacctaggattgaggcccagtgtggagaaccagcagggcctttatgaagaagaccctggagagactttgtcctaagcctccagatctcaccgacttcacatgggcwcaagcagagaaacctgaagtgcaacctgtcagggaaaagccatgatgaacagcagggcctgcgtcttgcctgtcaccgcggtgaagacgttccttaaattacctggtttttctccccctagtcccctcagagcactaatgaaattgtcagctgtatatcttaaagtgaaaagatttcacggccactgtgctctggtctgaggaacaggtgcctggagacctgcgccttttttaacataaatgactaataaaaatccgccagtcawaaaaaaaaaaaaaaaaaaaaaaaa

SEQ ID NO: 6250 - DNA, 1057 bp, Rattus norvegicus; identical to SEQ ID NO: 2154

SEQ ID NO: 6251 - DNA, 600 bp, Rattus norvegicus
aattgtggagcacaccaacagctctccttgcaaatcatgtggcctakaagaatcagcaktkacaggaattgttgtgggggccctactaggtgcwggtttgctaatggccwkstactttttcaggaagaaatacagaataaccattgagaggcgaaatcaccaagaagaaagcaacattgggaaacatcgagagctgcgggaagattccatcagatcacatttttcggtggcttaaaagaaatgccccccttgctttgtctgcttgagattccttaaagagatagttgaaggmcagacatcaatggaacagaaagggtgttcttggagaattcattcttttaagcagtagtcatttcattttaaattttctttagaagctcaggaatgattattaatcactatctgccttctggtctttcatctcatggcaaacagatataattatataacgtaatcctgttaagtgttctggctgttggaggggcatcggagtagatttatgtctcgaaagtctggagtctccatatcttgattgctttgggggtatttcacacaaggttataaaaatgtggtttttccaaaatgaaatgttttgtagct

SEQ ID NO: 6252 - DNA, 600 bp, Rattus norvegicus
gtcttcatccaaccctggggacccaaggcctacgtcacatggatcacgctcgccgtctacattgtaccggtcatcgtgctggccgcctgctacggcctcatcagcttcaagatctggcagaatctgagactcaagacggcagcggcggcggcggctgccgaggggaatgacgcggcgggtggagctgggcgtgcggcgttggcacgggtcagtagtgtcaagcttatctccaaggccaaaatccgcacggtgaagatgaccttcatcatcgtactggccttcatcgtgtgctggacacctttcttcttcgtgcagatgtggagcgtttgggacgtcaatgcgcccaaggaagcttctgccttcatcattgccatgctcttggccagcctcaacagctgctgcaacccgtggatctacatgctcttcacaggtcacctcttccacgaactcgtgcagcgcttcttctgctgctctgctcgttacctgaagggcagccggcccggcgagacgagtgtcagcaagaagagcaactcatccacctttgtcctgagccgtcgcagctcaagccagaggagctgctctcagccatcttcagcatga

SEQ ID NO: 6253 - DNA, 1400 bp, Rattus norvegicus
agggacaacgttgtctggccctttactcacattggctgacctggtagagctgtgtgtagatatttcaaaaggctgcgtctacttggagcagatgcacttcattcacagggatctggcagctcggaattgccttgtgtctgtgaaagactataccagtcctcgggtagtcaagatcggtgactttggtttggcaagggaaatctataagcatgattattatagaaagagaggggaaggcctgcttcctgtccggtggatggctcctgaaaacttgatggatggaatcttcacttcccagtctgatgtatggtcttttggaattttggtttgggagattttaactcttggtcatcaaccttatccagcgcattccaaccttgatgttttaaactatgtgcaagcaggagggagactggagccaccgagaaactgtcctgatgatctgtggaatttaatgttccgatgttgggcccaagaacctgaccaaagacccactttctataacattcaagaccagcttcagttattcagaaatgtttccttaaacaatgtttctcactgtggacaagcagctcctgctggtggagtcatcaacaaaggctttgaaggtgaagacaatgaaatggccactttgaattcagatgacacgatgccagttgccttgatggaaaccaggaaccaagaaggattaaattatatggtacttgccacaaagtgtagccaaagtgaggatcgttatgagggtcctctaggctctaaggaatctgggttgcatgatctgaagaaagacgagaggcaaccagcagacaaagatttctgccagcaaccacaggtggcttatggctctcctggccactctgaaggcctgaactatgcctgtcttgctcacagtggacatggagatgtgtctgaataatagtatctcataggaaacatagcactgagatgaacactgtattaagttaaaaagaagaaaggtggggtggcagtctagactctgaactgacacagccaagttccaaagttctgatcttggttccaagagccattatgtttcattcagcattctctttaccagtgacgtaaccttcagtggattatcagaggaacctgtgtgtgtgcggaaatcccaggacaaatcctaagtctgggaagaaaacatcactgtctctctcctytraagccctttamttcagagcattgcctgccmtggcaatcttamtaggttcatgcaaggatgtgagtgrgggaggggccggagtctgstgaggaccacctgaactacagattaccttaagaggatgcaggaawcaattactcacacaggaggaagcagcctgtggaccatgaggaatcatctggcacgctattattccaataaaatattccctttaatcatc

SEQ ID NO: 6254 - DNA, 600 bp, Rattus norvegicus
cgaatgaagatcatcaacctgaagctggagcggtttggagaccgcgtagagttctcggggaaccccagtaagtacgacgtgtcagtgactctaaagaacgtgcagctagaagacgaaggcatttacaactgctacatcaccaaccctccagaccgccaccgtggccatggcaagatctacctgcaggtccttctwgaagtgcccccagagcgrgackccacggtggcagtcatcgtgggtgcctcagtggggggtttcctgrctgtggtcatmttrgtgctgatggtggtcaaatgtgtgaggaggaaaaaagagcagaagctgagcacggatgacytgaagaccgaagaggaaggcaagacggatggcgagggcaacgcggaagatggcgccaagtaaccggaagcttgccctgaagccccttcctgtgtcctgtctcctctcactctctgccctgtacagtgtgaccctgcctgctctcacttggtgtgcttctcttgaataggaccccaggatcgacctggggcctcccttccaatgcccccactcccataccaaggacgacctccctccccttcatctgaaaaaaaaaaaaaaaaa

SEQ ID NO: 6255 - DNA, 600 bp, Rattus norvegicus
ggcccctgctggtcatctgcttgtgctacctgctcattgtggtcaaggtgaaggctgcaggcatgcgcgtaggctcctcaaggcggaggcgctcggagccgaaggtgactcgcatggtggtggtcgtggtgctggtgtttgtgggctgctggctgcctttcttcattgtcaacatcgtcaacctggccttcacactgcccgaggaacccacatctgccggcctctatttctttgtggtggtcctatcttatgccaatagctgtgccaaccccctgctctacggctttctctcggacaacttccgccagagcttccggaaggttctgtgcctacgtagaggatacggtatggaggatgcggacgccatagagccacggccagacaagagtgggcggcctcaggccacactgcccacacgcagctgcgaggccaatgggctcatgcagaccagcaggatttgaatgcccctgtaacaccctgggggtcctccaggcctccacggtgttgtcttctgggatctgagagtttgctgagatgcattcacccccaggcctacaagttggactcctctcggtggcagtgtgaagacaggacctgcag

SEQ ID NO: 6256 - DNA, 600 bp, Rattus norvegicus
gaagggttagggacttcttgggggtcacatggtctgtaaggacaaggcatggtcagcacagggtctcctccccacctgtgggaggctytatagagagagggaggatgttgagcagtcacagcctgtcctytaggactctggaggactctggaggaggagccctctgcttcaagaggttctggctggtgagatggacaaatgagctccaaccaaggcataggcagattccaggagtcaatggcctggggcagccttctgctgggaactcggcagggagcactgtctggaagcctctcgggcttgctcatttcaagaagaggccaaagcaaggacagagttccttagacgaggaccytgcagcagcacgaccagaaaaccccagtgtccacgccctcagcccacgggggcagcagagcaggcatttcaagatgcacttgccctgctgctccttagsccatttctgtagtttacagttagagctctattttgttatgggtttttaaacttcaarmmwwrmwmwrwwwwtctgggcgggtttatgttatgtatttacccactacaattttttaaagatgtacactcacaaaaaaaaaaaaaaaa

SEQ ID NO: 6257 - DNA, 600 bp, Rattus norvegicus
atggcaggcaggagagctgtgcccaaagacatgagagcaggggtatggccctgtccctcactatctgcaacactctggagagcaggccctacaccttgcctgggcagcagggtagagctggccctggttatgggagtcactggtgagccagttctgaaggcaggagaaccagtggactgaccagctcagataccactcagcccagatccagggctttaaattggctcactctaacatctacccatcagtgaactactggagtacatgaagcaggcagtcctacagatccaaaactacacacaggatctccatgatgcacgacaacaacaggatatccaagaagagccctggtgaggttccagcattgatggtggagcagaaggcagagggcttataccagaacaaggactcgctgcaatgaacatttgcaagcaaaagaagtgtggacaaaagggtatactggacactacagcatctgcagtgaggttttgtccctctgttgggacaggaagcatgcgtggaggatggatatgaggggaaaagatgagtggtttggggtacagggtgtaaagttcacaaagaatcaataaaaaattttcg

SEQ ID NO: 6258 - DNA, 600 bp, Rattus norvegicus
cagtgtacatatgtaaaataaaatgatgtcattgcgarrwmrwwwararwarwagcactccagatgtaggtcagaacaaaatcaaaacgtgttscttggactgactgttgtaacttcatgcttcttaggaaagtttaatgttggtgttaatgyksaskaggcagctgaccagtgtcacctttttgtactttattttcttcagcctaattttattcctatgcattttattgacaatgatttcatgtttttttttaaagaagccagggttttatatttttataggcaaatggtaaaaaggtcactgggttgactttcaggtactactttcctaattcatggtatactgattaagtagttttctcaactgtacggtacggggacgtgtttcttcatcaggatcttgtataatgactaacatggtttaaatgcaacttcatttgacttataaatactacagtaaagtgaaagtttctgaamawrraaaaawaaaaaaatctcgcggccgcaagcttattccctttagtgagggttaattttagcttggcactggccgtcgttttacaacgtcgtgactgggaaaaccctggcgttacccaactt

SEQ ID NO: 6259 - DNA, 600 bp, Rattus norvegicus
cgtgctgtctgtccacatagccattgcccagaatgttgatgcccaggctgtgctgaaggtggctagggaccgcctccaggggaagttcaatttccacaccatgaccatccaaattgagagctactctgaggacatgaagagctgccaggagtgccagggtccctcggaataactccctggccagacaccatctcattggaagtatggccaagacctgagggcagaatagtccgtgtgcagccgggaccccaggatcaagacatggcctggtccaytacaccatgggactctcctaggatggggacatagcagacgaggccccacttctcttycaggactgtgtttaggctggatcctggactaatgttatgctcacaccacagctggagagacactgaggcgcagaaagggattttggggtgtccttgtatragccagggtctctgtctgaaccaaaagttgaacaagatccacgtgtcacgtgactggatagttggagctccctttaaaagaatcggtcamattgataaaagagtttttgaaccggarwmarrrrraarawmwraggatgttttattagaatttgggagaaaaaaaaaa

SEQ ID NO: 6260 - DNA, 600 bp, Rattus norvegicus
gcacctgcatgctcagacttcttacagcgccacctccacttccgacttgyacgwgrtattttctccgtgcggtttccagggcccactccgctgcccaggcaatgggaccaggttccagcyccaaagtcaccctgagcccagctccggaatcgaaactgcacagtcaagaaggaamccacagaactctctacgtttgatccttgtgttgtttgtgaccgttcttagccttgtcctccaaactggcccaaggggctactgcactaaaggtgaccagtaccaacctccttcttttcccagcacccgtgaaggaggtacagtggcccgggtgaccccagtatttgtccatggagccacattgttctctccctgtgacacagctgtagagtctgattttgttttgttttgttttgtttagggcggggactgtttttgtttgtctatggaagatttgttttgttccgctttgtcttacggtcttcggttttgatgttctaaggttcgawttgggttttccatttttttttttgagtttatttattcgtgcttcgaaccacagtcatattaaaagctggtcttgtgraaaaaaaaaaaaaaaaaaaa

SEQ ID NO: 6261 - DNA, 600 bp, Rattus norvegicus
tgccttgagaaagaataacattatcttctgtctttgcccaccatgattctcattattaccgtagagggctcagtgctactcctaraacctttagtctytcaaaatytgggsaaaaawgtttatttccatagtctgttagwgcctctwaaatgtcasrcasgrrkccmacatttcagtarrmrsywykargttccttttcaattgttyataaattcatcastrtttagtaagtbsattttkttwwatawttctgsywmtaahgcgggkgcaatktaatatgatagaytttttaaagagattaatgctaacgtcattyttgagcyttttawataaaygtgtttaatttggaagcgtgtgtgcacacatgtcawatwtattcctgataattgtcmaataaggtacagaaacgttgasgcmchccacattgccccgcataagctyttccatgtgmtgcggacacccggtggwcttggggggacarctgaytaatcccagctttgsgctgtgctcagattgtaacctctgcctmctcatggtactctgtwatttkawacaaatdaaaaaytgccmcwtaggrrdwwwmaaaaaaaaaaaaaaaaa

SEQ ID NO: 6262 - DNA, 1400 bp, Rattus norvegicus
tcatctgggtggtcaagctgaaccgcactctgaggaccaccaccttctatttcatcgtctccctagcactggcwgacattgctgttggggtgctggtcatacccttggccattgccgtcagcctggaggtccagatgcacttctatgcctgccttttcatgtcctgtgtgcttctggtcttcacccaygcttccatcatgtccttgctggccattgctgtagaccgatacctgcgagtcaagctgacagtcagatatagaacggttaccactcaaagaagaatatggctattcctgggcctctgctggctagtgtcctttctggtgggactgacccccatgtttggctggaatagaaaagtgaccttagagctctctcaaaacagctccaccctctcatgccacttccgttycgtggtcggcttggattacatggtcttcttcagcttcatcacctggatcctcatccccctggttgtcatgtgcatcatctatctggacatcttctacatcatccgaaacaaactcagtcaraatctgactggcttcagagagacgcgtgcattttacggtcgggagttcaagaccgctaagtccctgtttctggttctcttcttgtttgccttgtgctggctgcctttgtccatcatcaattttgtttcctactttaatgtgaagataccagagattgcaatgtgcctgggcatcctgttgtcccatgcgaactccatgatgaaccctattgtctacgcctgcaaaaataaaaaagttcaaagaaaccactttgtgatcctcagagcttgcaggctctgtcagacctcggattctttggactcaaaccttgaacagactactgagtagttaccatgacagataaagagccagctcatttaccttcacagttcgcatcggtaaacactataaggacttaacagccattcttgcttacttccactgcagtgggatcatcgggctggttgccacagagctcccttccctcctccctccgctcctccctccactcctccctccgctcctcccttccctcctccctctgctcctccctccagtcttccctccactcctccctcccgccttcatktattttcttgagcttctctcattcaattctgtggaggtctgacatgaaggcaatgcattcctggttaccacagacttcgcccttccttcccagacacaagaagtaatggagtgaaygttgagggagtctcctctcacyaaagaagactctagtggggctggatgtacagaacctgcgttgaaggatccctaggatgttgggaacacagggagtgaattgaatttaaagagggctaaattcacctgtgtgggtgcatttgagcaaataaaagatggcgcccaaaaaaaaaaccggaattc

SEQ ID NO: 6263 - DNA, 600 bp, Rattus norvegicus
tactcagggtaaaaggagggaagcagtttgttttgcaatgtgagagtgaccccgagtttgcacagtggctgaaagagctgacgtgcaccttcaacgaggcccagagactgctgcgccgcgcccccaagttcctcaacaaaccacgtgccgccatcctggagttctccaagccaccgctgtgtcacagaaatagcagcggcctctgaaccacagagcagcagggcctgaaggaggccccccccccccggctcttcagccccagcagtggaatggagccacggggaaccgtgtggggctgagacacagtggctctgagcactgggctgctccaggctgaggaggcccacaacaccgggtggcccttcaggaactaggacatccttggggctggcctatccacactcgaaattactgaagaagcagaggcatttttctgtgcaaccctctcactttggtatccatggacccagaacgtaaaatggttcttacctctcaagcttttatgtctgccacattgttttgtcacaagataacacactgaaaaagtattcttaagcaaatagaaacaataggaaaaagattcgggagtcatccgaattc

SEQ ID NO: 6264 - DNA, 1400 bp, Rattus norvegicus
gttttgctcagctctggagctgccaatcagctccacaaggtgcagggctgggttttcgagaattggcttgtgatgacccggaaacagagcatgtagctttgatagccgtgsactacctcaataaacatcttcttcagggattcaggcagatcttgaatcagattgacaaagtcaaggtgtggtctcggcggcccttcggasaggtgtatgagttggaaattgacacgctggagacaacctgccacgctctggacccaacccccttagcaaattgttctgtgaggcaacaggccgagcatgcggtgsagrgrgactgtgacttccacatcctgaaacaagatggccagttcagggtgctacacgcccagtgtcattccacaccagactctgcagaggacgttcggaagttttgcccacgatgcccaatcctgatccggttcaatgacaccaacgtggtccacactgtcaaaactgccctggctgccttcaatgcacagaataatggwwyctattttaaactggtggagatttcccgagctcaaaatgtgcctttcccggtgtctactctcgtggagtttgtgatagctgcgactgactgtactggtcaggaggtcacagatccagccaaatgcaacctgctggcagaaaagcaatatggcttctgcaaggcgactctcatccacagacttggtggggaagaggtttcagtggcctgcaagttattccagacacagccccagccagccaatgccaaccctgcakgtyctgcacccacagtgggccaagctgcgcctgtagccccaccagctggcccacctgaatycgtggtggtaggacccgtggcagttcctctakgacttycagaccaccgaacccaccatgacctacggsatgccttctctcctgtggcttytgtggagtcggcctcakgagaagttcttcactcacctaaggtgggccagcctggtgacgctggtgctgctggcccartggcccccctgtgcccagggagagtcagatacttcaagatctaggcttgactcagggaagtaaggttttggcaggcaggacatagccaccactgaagtagagggcttgwccactgaccaagcaagtaccacatcatagcttgaattcaggtstmttsattccccagagaaaaggggcagmgagstgatggwtaaatttgttgaaagccagcagcagcaacabtagcasttgtgggstgacagactactgycatttgtkwmwttgcmttctcactgacctcmtacaaagcagttgcaagcgcgactgtgaaaggtgytytcaccaaacttcaatstacccwtaaataaaagtacccgaaggagctttyttaaacaaraaggtwmwrarmmrarwrwrrwwrwraaaaaaaa

SEQ ID NO: 6265 - DNA, 600 bp, Rattus norvegicus
aggtcagctacccttcattttctagaggtccatggagtggtccttaatgcctgcatcatgagccagatgggaagaagactgttcctgaggaacataaagttttgggctgctgtgtggcaatgcagaggcaaagwgaaggaactgtctgatgttaaatggccaagagcattttagccattgaagaaaaaaaaaacctttaaactcaccttccagggtgggtctacttgctacctcacaggaggccgtcttttagacacatggttgtggtatgactatacaagggtgagaaaggatgctaggtttcatggataagctagagactgaaaaaagccagtgtcccattggcatcatctttatttttaactgatgttttctgagcccacctttgatgctaacagagaaataagaggggtgtttgaggcacaagtcattctctacatagcatgtgtacctccagtgcaatgatgtctgtgtgtgtttttatgtatgagagtagagcgattctaaagagtcacatgagtacaacgcgtacattacggagtacatattagaaacgtatgtgttacatttgatgctagaatatctgaatgtttcttgcta

SEQ ID NO: 6266 - DNA, 1400 bp, Rattus norvegicus
catgcccaacccacctcggccccccacccgcctacaggaccgactgctgaagaagttgggccagcatgcccaccccttttttttcacaataccccagaatttgccttgctccgtcacaytgcagccaggaccggaggacacagggaaggcctgtggagtwkactttgagattcgagccttctgtgccaaakstatagaagaaaaaarmmamaaaargaactccgtgcggcttatcatcagaaaggtacagtttgctcctgagacacccggcccccagccatcagctgaaaccacacgccacttcctcatgtctgaccggaggtccctgcacctagaggcttccctggacaaagagctgtactaccatggggaacccctcaatgtcaacgtccacgtcaccaacaattctgccaagaccgtcaagaagatcagagtgtctgtgagacagtatgccgacatttgcctcttcagcaccgcgcagtacaagtgtcctgtggctcagcttgaacaagatgaccaggtgtctcccagttccacattctgcaaggtgtacaccataaccccgctgctcagtgacaaccgagagaagcgtggccttgcccttgatgggcaactcaagcacgaagacaccaacctggcttccagcaccattgtgaaggagggagccaacaargaggtgctgggaatcctagtatcctacagggtcaaggtgaagctggtggtgtctcgaggcggggatgtctmcgtggagctacctttcgtcctaatgcaccccaagccccwsgrccacatcaccyttccccgaccccagtcagccccccgggaaatagacatccctgtggataccaacctcattgaattcgataccaactatgccacagacgacgacatcgtgtttgaggactttgcvmggcttmggctgaaggggatgaaggatgacgactgtgatgaycarttctgytaggaagaggggctgggaraggtaggggtgggcaggactgaggtccamtgcccttgcgggtaggagggtcccagcctytcctccttccccgtycgtccacccgagatacacactggacccatcactcgttgaaagtgggcattaatcttttgacttcagctctgccaccccagccctgctccctagggtggcaagctgtgtacacacctaaagttttgggaagggaagggaacactgaaagcaaggagtgaatgtagagaaaaggagtagaaaggacacccatgtttggcctcataccaacccacccccagtcaccacttctgcctcccccgaatycttgaagatgagatttcaggggagggaccagcaaggccayatcttcgtttytgagcatagggaagaaataaaccttttaataggcaaaaaaaaaaaaaaaaaa

SEQ ID NO: 6267 - DNA, 1400 bp, Rattus norvegicus
cagagtgcctgcagaaggagtcagagaaactggagagtgtgaatgccgaactgaaggcccagatcgaggagctgaagaatgagaagcagcatctgatttacatgctcaacctgcaccggcccacgtgtatcgtccgggctcagaacgggcggacgccggaagacgagaggaacctttttatccaacagataaaagaaggaacattgcagagctaagcagaggtggcatgggggcaattggggagtccttactgaatcctccttttccaccccaaaccctgaagccattggaaaactggcttcctgtgcacttctagaatctcagcagccacgagctgttgggtcaggagggcctgcggtgactactgcgttgtcccactctgtccccgagtgaaccgtggagcaggcaggagcatcctttgtctcaccggctccaggatttaggccttaccatccckkccattctcagatgacctagctggccccaggctggggtcccatgcaaagcaggatcgcactaatgggatgcaggcagaagtgtctaccttgacaggtggggtggaccacgtcctccactgcggctgacaacatccctcctagggaagatggagtgagaacattcatcattgaagttgtccaatggccagggtatgctttctagaaactatgctgttctgtcctagactgactgtgcatagggcattcatttctgagcctggtgttgtgctatttagatgtttgtcttgcacaacattggcgtgatttttttycgggagtttcatcagacctgatttccgagagtttgggggtctgccactgtggacmatatcccccaaaagtgtttgggtggccatgtaaactggctgatgaccagctgtgctactctgtgctgaccgaggactgatgcctycttyccctgtacccactgctgaggaarracccsggcacarcagctgtccttggctacaaactgttacaatgtcacagaacgaaggcacaaagtcccgytttcaaaggscgtaggactccacactcagtgacagggcasgragagccaaggattctccsktttcccttccttcccaccaaaaaccacagcccstggagactggtatttgaagccaggagtggggcaaggrargtgtctgcactgtgggatgttaactgcgcttttgtcttgaagctattttgagatgcggtccagagtatttcagctgggaggtccctcccactggccaccagggctctggctactgttaaaattctgatgtttctgtgaaatcctcagtgttcaatccagactcagtagtatattacagttttctgtaagagagaacgttacttatttatcccagtattcctagcctgtcaacgtaataaaatatcagaatgagacctggt

SEQ ID NO: 6268 - DNA, 930 bp, Rattus norvegicus; identical to SEQ ID NO: 2172
  misc_feature (379)..(379): n is a, c, g, or t
  misc_feature (396)..(396): n is a, c, g, or t
  misc_feature (400)..(400): n is a, c, g, or t
  misc_feature (402)..(403): n is a, c, g, or t

SEQ ID NO: 6269 - DNA, 600 bp, Rattus norvegicus
cgagagcgaggacgactggtgytaakccgccccgccccccgcagcgcccgtacgktgcgggcgccaccgcawatgataaacawtaacgtttttaaawwwgaaaaccggggagaaaaacaaaaatarcttcwattgatgagttttatcatctcgattgaatctttcrttttcccggtgaacgaaaccgaggtggctgcgagccggagggacggytgcacgccccacacacttytcagacccacgggagttcttgcgggccacgccaaacttattactgcctgcagagttcaactacaagaaaataacmctaacagtttttawaaggacaaaaaaaamtgattgagaaaacggtttttttttcccctgacatttggtcctgcttgaaataacaaaagmmwmrwgmsraawwmttaccmccmccaccgaccgattcccttgccccttttttttttttttttttttttttttttttttttttttttcctatcttgtttgaaaaacgtgggcttgggactgtgaaatattgcatgacattaaaaagaacaaaaaataataaaaatgaaaaaacttgaatctaaaaaaaaaaaaaaaaacctcgtg

SEQ ID NO: 6270 - DNA, 1400 bp, Rattus norvegicus
ttctccgtggtgcgcaggtgtgtgaaggtgctggctggccaggagtatgctgccaagattatcaacaccaagaagctsksakccwgagmtsaccwkamkttgkmacsygagkccyscmtctsyyrcttgytgawgsamssyaatatcgtccgactccatgacagcatctccgaggaggggcaccactaccttatcttcgatctggtcactggtggggagctgttcgaagacattgtggcccgggagtattacagtgaggctgatgccagccactgtatccagcagatcctggaggctgtgctacactgtcaccagatgggggtggtgcatcgcgacctgaagcctgagaatctgttgctggcttcgaagctcaagggtgctgcggtgaagctggcagactttggcctggccatagaggttgagggagagcagcaggcatggtttgggttcgcagggacacctggatacctctccccagaagtgctgcggaaggacccatacgggaagcctgtggacctgtgggcctgtggcgtcatcctgtatatcttgctggttgggtatcccccattctgggatgaggaccagcaccgsctgtaccagcagatcaaagctggtgcctacgatttcccatcaccagaatgggacaccgtcaccccggaagccaaggatctgatcaataagatgctgaccatcaacccgtccaaacgcatcacggccgctgaggctctcaagcacccctggatctcgcaccgctccactgtggcctcctgcatgcacagacaggagaccgtggactgcctgaagaagttcaatgccaggaggaaactgaaggsagccatcctcaccactatgctggccaccaggaacttctccggagggaagagtggaggaaacaagaagaatgatggcgtgaaggaatcctctgagagcaccaacaccaccatcgaggatgaagacaccaaagtgcgcaaacaggaaattatcaaagtgacagagcagctgatcgaagccataagcaatggagactttgaatcctacacgaagatgtgcgaccctggaatgacagcctttgaaccggaggccctggggaacctggtcgagggcctggactttcatcgattctattttgaaaacctgtggtcccggaacagcaagcccgtgcacaccaccatcctgaaccctcacatccacctgatgggtgacgagtcagcctgcatcgcctacatccgcatcactcagtacctggatgcgggtggcatcccccgcacggcccagtcagaggagacccgtgtctggcaccgcagggatggaaaatggcagatcgtccacttccacagatctggggcgccctccgtcctgccccattgaaggaccaggccagggtccctgcgctcttgctt

SEQ ID NO: 6271 - DNA, 600 bp, Rattus norvegicus
acctcatgcatgctaccccgtgacgcgtcctcctgcatgacaccttattctcactcgcctsggacagattccagttacacggggttttcgaaccaccagaatcagttcggccaygtgcccctcaacaattttttcactgactctcttctcactggaactaccaacggacacgcatttgaaacaaagccagagtttgaaaggaggtcttccagtatcgccgtcctgaggatgaaggccaaggagcacacagccaatatttcatgggccatgtaacatacagtactctttwattttccttttcatagcaaagtaaaacattcttatttctcatwtttaaaggatgccacaataagctgctgtgtgtggaagggctaaaggtcaagatagacggtgagaccagcttacgtgaatagttgttattatttaacatttaaatctaagaatggattccctgaaaggactgaataggtttaccatacaccagcctccacaaactctgttttagtagtaagtgtttttttttcccctattgtacaagtcaatgaaatatgatcatgcaacttcttaaaggaataaatgtattaaamaaaaaaaaaaaaa

SEQ ID NO: 6272 - DNA, 600 bp, Rattus norvegicus
taaccggaaggtggccayggaatttgagtccttctccctggacgccactttccaygcaaagaaacagatcccrtgtattgtgtcaatgctcacaaaagaactgtacttttatcactaaaggaatgactgggagtggggtaggggcatgtttctgttttggttttttttttggtttttgktttktgtttttttttttttatttgaatgccaaatgagaaaactgtcagggagactttttttttcccctctcatttaaatcaaatccgatgttccaggtcgtcattgaacaataccactgcctgcaatgcagccacaatacaatacctcagctttgatatcaggtagttgaaatgaaatttaattaggaacaaataaatgtcaataatggtacaaccatcatagaagaaattggaaagtcacactttggtaattagagagatttggtgccactatgaatttgaaattacgaagcagtgatgatcttatacccccycctstagcrkcyrsaatgtcactttagttttcgttaagcataggaacgataatgtcaagtggtatgtcttagaactgatctgtggaaatgaagagttggagcactgt

SEQ ID NO: 6273 - DNA, 1400 bp, Rattus norvegicus
gtgagttccaggacagctggagagctacagaatggagagacgctgtctcaaaaacactcaaaacaaacaaacaaaccataccagtttgtaggcagacttctgttgggttgggtttgtactgtttgcctatgcagtgggattacagcagcagcaacaaaaactgtccctgaagtctttctctgscactgtgrmctgagtttcctatggtacgcgatttactctargaaacctcagcccctcaccacgttagctgttggcaaatggcctcacagttgcggaaagtcccaattctaggcttgggaaagcaatgcttagatttgaattggcccatgaagcattcaaatcaaggctaaagacataaatgtgaaataaaactgtgaaccttcattttaacattgatctcacttcccagatttaatcaatatatacttaggtggtattaaaaatggtaaactgcctaatttaaatctcaaaatttaaactatgaggtttacatcaaagccaacatttcacaaatgtactttttaaggtattaaaagaggtatttaagcagtaaatggtttcttggcacccataaccaagtaatagttaagttagaggtgggwyttttttwttgctatgagaattacatttaaamwwwwrrgtgttttataaaaagcagatttcacaagttttgaaaattgtgacctttactgaaatttgttacctttaatatttcttcyrgagsawaggtwtttayaaaagwrrarytcswcmgrrtkgckgcctcaawctagtcccmykkgwgaraattygkywckactgtctcaataactggaygarrtatcactctgaaaacttgcctattgcactaaagctagtttaggcttgataaaacactccaggaggtttttaccacagactgtttctattaaaactgctgcttctcatgtacaattttgttttaaaaggaaccgagtacatytgcaaaacytaagtcttaagrgacgtcaggaggtacmttcagaattatagsvhmmccatggtagtggggattctccatsctggccttgaatgtttgatcttcactgctgaaatgtgggtagctcctcagsgccctktrkagcctgagtctacctagaatwkctgtarccattttgrcaagtawtggataagaaaaytwtccaktgagaagbtaaaaacaaarcaaaacaaahccaaagaacgggtgtattttattcttaacctttrtaawccwtcactgagaacacttcagttcttcctaacagctgttatgcttcgayytgaaaaaaatactgagtggataaccaactaccatcatgykttgggtacacctttcawtaaarttactraawtgcaaaaaaaaaaaaaaaaaacctttgcggcgctccaacctcgtg

SEQ ID NO: 6274 - DNA, 1400 bp, Rattus norvegicus
ctacagaagatggaggatgtgtaccagacactggtggtccatggtcaggtccttgacagtggccggggaggtccaggattcactctggacgacctggaccgcctggtggcctgctcacgggctgtgcccgaggatgccaagcagctggcctcctttttgcatggtaatgcctcgctgcttttcagacggaccaaagcccctggccccgggcctgagggcagcagctccctgcacctcaaccccaccgataaagccagcagcatccagtcacgccctctaccctcacctccaaagttcacctcccaggactctccggatggccagtatgagaacagtgaagggggttggatggaggactatgactacgttcatctgcaggggaaggaggaatttgagaagacccagaaggaactgctggaaaagggcaacatcgtgcgacagggaaaaggccaactggagctgcagcagctgaaacagtttgagcgactggagcaggaggtgtctcgtcccatagaccatgacctggccaactggacaccagcccagccccttgtgccggggcggacagggggactggggccttcagaccgacagctgctgctcttctacttggagcagtgtgaggccaacctgaccacactgacagatgcggtggacgccttcttcaccgcagtggccaccaaccagccacccaagatctttgtggcacacagcaagtttgtcattcttagtgcacacaagcttgtgttcattggggacacactgtcacggcaggcaaaggcagctgatgtgcgaagcaaagtgacccactacagcaatctgctgtgtgacctcctgcgtggcatcgtggccaccaccaaggccgctgccctgcagtacmcrwssccatctgctgcccaggacatggtagacagggtcaaggagytaggccacagcactcagcagttccsccgtgtcctgggccagctggctgccgcctgaaagcagaagaytggsytgtgagsctggggagtgggtagcggtggtgtgagytacccrgrcgmkbgtcttgaastggakatcctgcaggtttggkgacagstaaccccagctctgctttggrcytrgtgccctmaactgtvcagggatttktacatatttatatcaaggcaggatgcagahtgcctcctcggagaggstgaggagccccstcagagtrgaccatgggctgggatcaccagggttggggcacatrggcymcaktccacagggctccytgggacaggaagtacagtgtggtgtacaccthtgcaccaagaaaacctaaagaactatttttcactrktgattttttyccawtcayttgwmtaatmgtytacatttaataaaattttaaaawtgrraaaaaaaaaaaaaaaaaa

SEQ ID NO: 6275 - DNA, 600 bp, Rattus norvegicus
ttttactcagtctttgatcgtggaaataaccaagtgggattggcccccgcagtcccttaaagagggctgtatgccttcatgtggatgtctgatttaacctttgtaactatcaaaactgtcatttcccatgggatgtagctattccaaacagagtaatcagaccaaacaaagcatgagagcccacccagcctcccagtcgctgtacatggacacacgcaccacctctaccatcaccatgatgaaagttctgtctatagtcttcattgcttattgttgacttcctgttatgaaaatctctaaacatagacactagaaataatggtgtgataaatagccacgcagctatgcctcacgtcacaacccatccatgtgtggctcagcccctctattttccatccgtctggttttatgcctctagatttgtaagcaaattctaagtaccatgccgttctatctaatgtctaatagtcttaaaaatcagaatttaaatatgtctcactctctcataaatgtggacctgtttttacagttggtttatctgtatcaggattcaaaccagatctataactggacaaaaaaatcataaactgaattgatttg

SEQ ID NO: 6276 - DNA, 600 bp, Rattus norvegicus
  misc_feature (422)..(422): n is a, c, g, or t
attgagcgtggaaagaacatgtgtggscwggctkyswgtrcmtcytacmcmakscmtcaggdakaagcyacssytrcayagrswacwkcytggcagacaaagggaggaactggtcctacgatgagaatgccgccctggagaaagttgttcagaaatycacccagaggscctctcactcckgaskhkrgamgcctaaagacagtmaggaaraacttgaccagcaacaagcccgsccrtgtgacgacatcaccagscatacgckttgtktgaatatggtktttaaatgasccamaamcatgtggmsctagaatcttctcttttcagckctcttcatatakggaaagctccgatggstwmmcttttctatgttgtatattcaataaatgcmgtgaacgccyrvmwrrrmwrrrmmwrrhvvvmwnvvmmwavammmwaamaaarmaaamaamamaaaaacccgagggggccggacccatcgcctaaggagtgatacatcatggcgcgttcacgcggatggaaacgtggtccaatataccgagaatccctgcatggaaaaaagcgcaggctccaggccaagaggagcgaatgaaccagaaactc

SEQ ID NO: 6277 - DNA, 600 bp, Rattus norvegicus
ttggaaagcctgccttattctgctacagagggatttcttttgctggtcaccatcttcatcagagtatccacctcctgtcagggcaggcaaaaagtatktttttwttaaatgtctcccttgcacagtaaagcttggactatgtcagaacgttgcttttttttttaaaacaaaaaatatgcctcaggtgtgttttatgaattactcaaaagagttcatgccccagaacttagcctgtacctgtgaaatattatcatgccccttatgtattcrcaccagggctgtgstagattaaatagagatcatcaccatggtatgckaattactgtttttagcagtgacacagttgtgtgacagaaggtgtatgttaccaggtgattataacccagarataattccctatttaacctctwmwwrwrmwwwwgtactttgtcaygtatrttcttaatctgtatatasctgatacagtgcacacagatcctctgcacacagaattaactaatgtgatataccaacatttaacatgctctgtcttcactgtmtatcatgaaacagtgtcacstaaacaatvwmgwscactgtcataaaaaaaaaaaaaaaaaa

SEQ ID NO: 6278 - DNA, 1391 bp, Rattus norvegicus; identical to SEQ ID NO: 2182

SEQ ID NO: 6279 - DNA, 600 bp, Rattus norvegicus
cgccgcgccgacccagcggcccgggcccgccggtgtcggaccctactcagggtcccctcttctcagattgtccgcctccctcacccagcctccggacgagccccaccgtctccagcagaccagagtcagacctctctcagagcccctgcagccccgggtgtctgctccctgatgcagcgctcgcgcaaccgcctgcgccgtcttcccgcagaaagagaggcgccaagatcactggaagggagcgcaaggcgatgagagtcctgccggtggtagttggggccttcctgatgtgttggacgcctttcttcgtggtgcacatcacacgggcgctgtgtccggcttgtttcgtgtccccacgcctggtcagtgctgtcacctggctgggctatgtcaacagtgccctcaaccccatcatctacaccatcttcaatgccgagtttcgaagtgtcttccgcaagactcttcgtctccgctgctgaaagaaccgctgatgtcttgaggtcaaggggttccaagcctgtgtgcagagtgcgctggcggctttcgttcgtctgattaaatgaagtctttcctaaccatttatcaacgctgggggctggg

SEQ ID NO: 6280 - DNA, 1400 bp, Rattus norvegicus
ctccaagccacaagccctggycaccccaggaaaagaaaagaacgggaaaaagaagaggaaaggcaaggggttaggaaaraagagagatccatgccttaagaaatacaaggactactgcatccacggagagtgcagatacctgaaggagctccgtattccctcgtgccactgcctccctggttaccatggacagaggtgtcatgggctgaccctaccggtagagaaccccctgtacacatatgaccacactaccgtcttggctgtggtggctgtagtactgtcatctgtctgtcttcttgtcatcgtgggacttctcatgttcaggtaccataggcgaggaggttatgacttggaaagtgaggagaaagtgaagttgggcatggctagctcccactgaggaggatctgagctcaaggagccttcagaggatggctacttytgagatggcggttccttacaagttctacagagggaaaatacttcaccagcagccatgaagacttcttcattcattcccagttgctaccctgactgggcctcctgtaattgctctgcaaaaatatcagagcctctaagtgccaaacagactatgccccgctgggatctggatcagaagaaagcaggagcaagtgagcccttcaggccttcctgatcctccaccactgaacccactggtttgtttaaacacttagcttctggattaaagtgtcagctagtttccatatgctccaggatttttggctgaaaaaaaaaaaaraaragassmcksrtgagkggtttatggactggaagagatcaacagagttgagaagctaagtgttcaagtagccacaggggatctgctgtttggaccctccagcacgctggatttgatgagctaactgtgaaatatctcaagcccgagaactcttgagttttgggacttctacccagagggaaaaataacaagtattttgttgttgttgttgtttgtttgtttttaaaatgcctcttaaattatatatttattttattctatgtatgttaatatatttagtttttaacaatctaacaataatatttcaagtgcctagactgttactttgccaatgtcctggcccgcctctcttgcagctcttccacctggctcaatgccacactcccatctgctctgtaacccatctgtagtaatttattgtctgtctacatttcagaagatgcccctgtagcagagtatcccagggtgggttgtgtatggtcggagtgcaaggatggatttgggcagagccactctgtgagttggactgcagtcttgcctaggtgatttttgtctaccgttcgtgttttgaaagcycaargtgctgatgtcaaagtgtaatagatattggtgtttcctcgtgtcctctccctgccaaatctca

SEQ ID NO: 6281 - DNA, 1323 bp, Rattus norvegicus; identical to SEQ ID NO: 2185

SEQ ID NO: 6282 - DNA, 1400 bp, Rattus norvegicus
tctttgcccgagaaatcctggactccaggggcaaccccacagtggaggtggacctgcacacagccaagggtcgattccgagcggctgtgccaagcggagcttccacgggtatctatgaagcactggagctacgagatggagacaaatcacgatacctggggaaaggagtgccgaaggctgtggagcacatcaacaagactctcggccctgctctgctggaaaagaaactaagtgttgtggatcaagaaaaagttgacaaatttatgattgagctggacggaaccgagaataagtccaagtttggggccaatgccatcctgggtgtgtccctggctgtttgtaaggctggagcagctgagaaaggggtccctctctaccgacacattgcagacctcgcagggaatcccgaccttgtacttcccgtgcctgccttcaatgtgatcaacgggggctctcatgctggaaacaagttggccatgcaggagttcatgattctgccagtgggagccaagctctttcaaggaagccagcgcattggcgctgaggtctaccaccacctcaagggggtcatcaaagccaagtatgggaaggatgccaccaatgtgggggacgagggtggctttgcacccaacatcctggagaacawtgagsccctggaactactaaagacagccattcaggcagctggtwmcccagacaaggtgktgattggcatggatgtgscagcatctgaattctatcgcaatgggaagtatgatctggacttcaagtcacctgatgatcctgcgaggcacatcagtggggagaagctcggggagcygtacaagtccttcatcaagaactatcccgtggtctccattgaagacccctttgaccaggatgactgggcaacatggacctcattcctctytggggyggacatccagattgtgggagatgacctgacagtcaccaaccccaagaggattgctcagsytgttgagaagaaggcytgcaattgcctgctgctgaaggtcaaccaratcggytytgtgacagaatcyawcywggcytgtaaahtggcacagtmtaatgsctggggaktgwtggtgavccwccgctytggggagaccgaagacactttcrttgmtgatcttgtggtgggaytctgcacaggacaratcaagactsrtgctccctrccgttcagagcgtytggcaaaatacaaccagyytatgaggattgaggaggytytcggagacaaagctgtctttgctggacgaaagttccgtaatccaaaggccaawtgagaagmtggagattccasgattccacaggacagacacagkcytycaagccyttctccmagaaataaacactgccmhvcadrmwwmaawwamaramamaaaaaaaaaaaaaaa

SEQ ID NO: 6283 - DNA, 600 bp, Rattus norvegicus
ccgggctgctgttgctgcttcttgttgctcttcttggtgtcttccgtccctgtcacctgccaagctcttggtcaggacatggtgtcaccggaggctaccaactcctcttcctcctcctcttcctcctcctcgtcctcttccttctcctctccttccagcgcggggaggcatgtgcgaagctacaatcacctccagggagatgtccgctggagaaagctgttctccttcaccaagtactttctcaagattgaaaagaacggcaaggtcagcgggaccaagaaggaaaactgtccgtacagtatcctagagataacatcagtggaaatcggagttgttgccgtcaaagccattaacagcaactattacttagccatgaacaagaaggggaaactctatggctcaaaagaatttaacaatgactgtaaactgaaagagaggatagaggaaaatggatacaacacctatgcatcttttaactggcagcacaacggcaggcaaatgtatgtggcattgaatggaaaaggagctcccaggagaggacaaaaaacaagaaggaaaaacacctccgctcacttcctccccatggtggtccactcatag

SEQ ID NO: 6284 - DNA, 600 bp, Rattus norvegicus
cgaatccggmgrgagagaaacaagctggccgctgccaagtgtcggaaccgtcgacgtgagctgacggagaagctgcagrcggagacagaggagctggaggaggagaagtccggtctgcagaaagaaatcgctgagctgcagaaggagaaggagaagctggagttcatgctggtggctcacggccctgtgtgcaaaatcagtcctgaggaacgccgatctycccccacctccgggstacagtccttacgcggtacgggcagtgctgtcggccctgtggtggtgaaacaggagcctcctgaagaggacagcccctcttcctcagcagggatggacaagacccagcgctctgtcatcaagcccattagcattgctgggggtggtttctacggggaagagcctctgcacacccccatcgtggtgacctccacacctgccatcactccgggcacttcaaaccttgtcttcacctaccccagtgtcctggagcaggagtcgcctgcgtcgccctccgagtcctgttccaaggctcaccgcagaagcagtagcagtggggaccagtcatcagactccttgaactcccccactctgctggctctgtaa

SEQ ID NO: 6285 - DNA, 600 bp, Rattus norvegicus
tgcccggcaagggtcgcatccgcagacgtgcctctcagctcaaagtgaagatccctgacttgactgacgtgaactccatagacaagtggtcccgaatgttcttccccatcacattttccctttttaatgtcgtttattggctttactatgtacactaagttcagtctcatggttcggtttagactcctttcctcctcgcttgttttttaaccccacagatttccaacagtggtaactgctatggtttttgaggtaagagattccgccttccagttggttttcgatcttgtgtgtcagtttttattatcacaccatgtttacttcaacaacaacaacaaaaggtattttttcctgtctattgtggtccaaggtaccagctctgtaagagttccatcaattactttgtttacaaacacaaagagaggtaggtgggtgttagacattgttggcagtcattcttagttgccctggatcttactggattattttaaaatgaaaatgtacagtggaccctgccgtccacctgcactgtgttctgggtaaactgtaaccatctcatgctgccaaacaattaaatagaaaatttaaaaaaaaaaaaag

SEQ ID NO: 6286 - DNA, 600 bp, Rattus norvegicus
acttgactgatgtgaacgccattgatcggtggtcccgcattttcttccctgtggtgttttccttcttcaacatcgtctattggctttactatgtgaactaaactccagcctcccatgagaagcaaggactagattcctcttcaaacagttgtacagcttgatgcctgatgtaggacttggaaaacacatcaatccaggacaaaagcgatgttaaaataccttagttgctggcctatcctgtggtccatttcataacatttgggttgcttctactaagtaatgactacactaaggtcctcgtggttttccagttacaatgcaagtgatttgtacacatgccggcaagatctttgtcagttttaggacacagcctactcagagggttaattacctagattctagaagacactggaaagctcaatggcatgggcagtcaagtctctgaaacagtcatttccaaatgctctccatcgttgttcctaaggttggcacgcagttgggacagcactgtgcttataaaacattatccgcaataatcgaaacatgctacttcaatatgggctttgaggtctaagccagatgatgatgatggtggtgatg

SEQ ID NO: 6287 - DNA, 600 bp, Rattus norvegicus
aggtcaacaaccgcattatttgttataacaacttccaggagtatgagctcaccctgatgagacaccacgttctgacctgggtgaagttcctttttggctacctcttgcctttgctgacaatgagctcctgctacctgtgcctcatcttcaagacgaagaagcaaaacattctgatatccagtaagcatctctggatgatcctgtctgtggtcatcgccttcatggtttgctggactccttttcacctgttcagcatttgggaactcagcattcatcacaacagctctttccagaacgtgctgcagggcggaatccctctctctactggcttggccttcctcaatagttgcttgaaccccatcctttacgttataataagcaagaagtttcaagctcgattcagggcctctgttgccgaggtactaaagcggtcactgtgggaggccagttgctctggtacagtgagtgaacaactcaggagtgctgaaaccaagagcctgtctctcctagaaactgcccaatgagtattttgtgcccagaaaaccagtgcaaagtttctgtgggagcctcataaccaatcctttcagattaggatttgtt

SEQ ID NO: 6288 - DNA, 600 bp, Rattus norvegicus
caatagccactaaccttgcctggtacagtctgggggttgtaaattggcatggaaattaaagcaggttcttgttggtgcacagcacaaattagttatatatggggacagtakttttkktyttttggkttkbytttkktttttktgwttttgdttttttksyttttkkttttttttyycawcttcagwtgtytctgatgcagmttatacgaaggtaattgttgttctgttaactgaataccactctgtaattgcaaaaaaatggyggctgttttgttgacattctgaatgcttctaagtaaatacaattttttttwywaaaaaaaaamwwawwwatcttctaaagtttaaactttcttaggtttctacaatgaacatattcatttgtactaagaaaaaatgttttagtaaagctttctctacaattattgactaaataatccacatgtgcctagagagtacctaggtagaaagctatttttacatccctcgcctcaaacgattgacacctctgatattcaggaaacattaaaacaaaaccataaaataattgctgattgaaaccaacttcttgttcttcctcctgctgaactgctggggtga

SEQ ID NO: 6289 - DNA, 1400 bp, Rattus norvegicus
ggaactccatgtgctatatggtcctcacctggacaagaaggactgcttggggaactggacctggcaagaggggtctcagcagactcttacatgccagccccaggggaatccagcccctaatctgacctgcagccggaaagcagatggtgtcccgctgcctatcgggatggtgaagtctgtcaaacgggagatgaatggtacctacaagtgccgtgcctttagctcccgtgggagtatcaccagggacgtgcacctgacagtgctgtaccatgatcagaatacctgggtcataattgttggtgtgttggtactgatcattgcgggcttcgtgatcgtggcgtccatttacacctattaccgccagaggaagatcaggatatacaagttacagaaggctcaggaggaggccctaaaactcaaggtacaagccccgcctccctgagcccactggacaggacrcctgcctgggccccgctgctcttgaacagatcaatggacagcatttacccctcacccacctcctctggctgtcacaggacaggacagtggcctggggatgcatacttgtagcctcaggcctaagaggactcggaggggcaagactgtgaactcgtgacctggacacacctacagcctggtgggcctgcagccaagaaaggctgacttccttctctattacccctgctgaggggccccctaccttaggaaggtgtgatatccggtagacacaagcaagagaagaaaaggaacaccatgcttcctctgacatgggaaagctgggacactgtccccaactcttgttgatgtatttattaattcagagttctgacagttatttattgagtaccctgtacagacactagaggagtgagcaggttaacatgtaagttattgcytagaccctggtgaaggggcacaacagagtctggggaaagatcatacgggtttgggcttctccacaggtcagggtgctttyctcaaaagagctgatttctttcacgagtcatataaatactatgtggacgagcagtggccctctgctcgtagacctctytgggacccctgcctcctcccacagcctggagtctcccagcaccagcatgggtgaccacctccccacctacatacattcctacctttgttcccaatgtcaaccaccatgcctaaatatggacgctcacctttagcagctcaacaatggagtctcatgcccgtgaaattatggtcaatccctgcatgcctccacccggctccacctcaaagagaatgcctgggagaaaatgttccaaccacttagaagggtcctgcaagctgttgtgggagggtaggcacccctcccagcgcagaagcctttcctttgaatcaataaagttttatgtgggaaaaaaaaaaaaaaaaaa

SEQ ID NO: 6290 - DNA, 600 bp, Rattus norvegicus
cttttaccgggctcattttggaacggatgaaacaattcttgacggaaaagaatatgatatttatgtttcctatgcaagaaatgcagaagaagaagagtttgtgctgctgacactacgtggagttttggagaatgagttcggatacaagctgtgcatcttcgacagggacagcttccctgggggaattgtcacagatgagaccctgagcttcattcagaaaagcagacgactcctggttgtcctaagccccaactacgtgctccagggaacacaagccctcctggagctcaaggctggcctagaaaatatggcctcccggggcaacatcaacgtcattttagtgcagtacaaagctgtgaaggacttgaaggtgaaagagctgaagcgggctaagtcggtgctcaccgtcattaaatggaaaggggagaaatccaagtatcctcagggcaggttctggaagcagctgcaggtggccatgccagtgaagaagagtcccaggtggtctagcagtgacaagcagggtctctcctactcatccctgaaaaacgtatgaaaggaaaagtcagggggtgaaaagaacaaggcggttcatgggaggaa

SEQ ID NO: 6291 - DNA, 1400 bp, Rattus norvegicus
tggcagtgaggatgtgaaacgccacagctctgcatcctttgagaatgtgtggctgagacccggggatctagggggagcatccaaggagtcggctccagggtgcggggctgccgggggattggagaagagtcttaactatatagacttggatttggtcaaggatgttaagcagcaccctcaagactgcccctctcaacagcagtccctgccaccccctccccctcaccaacccttaggcagcaatgagggcagctccccaagacgctccagtgaggatttaagcacctatgccagcatcaacttccagaagcaaccagaggaccgtcaatagcttaactggacgtcacaggcagaatgaaagacctaaatgacctcagcaatcctcctttttaactcatgggtacccagactcgaactctttcacgattcacaaccaggacctcacgtcttcctcctcagtagatggtacgatgcatcccttacagtttgtttactttgtacaatcctcaggagttcattgactgaactgcacgttctttattgtgccaagcaacaagaaagcactgtgacaccggaacaatgagtgtgcataaacttcatcttgaactttaaggacagctggccacgaagagccagtgtgctccctgccacgccgaaagaggatgggtttactctcgtcaaatttacaagcatacggttcctctgctctgaaaccgtgttccatgacacgccgctgtaaattatttcatatggaactgttcgcgttgggtggagagagtattaaatatttaacataggtcttcatttatatatgtaattttttaatgaaaatgtaactttcctcacagywywttttttttctcttggaatgtggaactgaggtattcaatgttttgttttaaagagtgggaagaatacttaaaacaaggctaaaaagagtagactaggagatgatccttgttttaagattctaattcagaaaaataatataatatgaatcatagtgccatagaaggttctggactgtatagttgtacttgctgatgctgtctcttgtaatataaacttgatgtcgagctgagttccttttaagaattaagcttagttttgtaattttttttttttccaaaccgaaggaggatgtattctactggggtgtttycaagtgtcggcttagaaytggawgttgaatggaagcaaagttcaacamagagaggaagccacagactkccattgtaaatactstagagagagacatgagcgatcccttcaagtcaaaaatctctcyttggamtgaagaatgtgggtgtttataaattctgaaaatgtctttctgttcataataaactagacactgttggtccctccccammmmmamwwmwawaarcctttcccccgga

SEQ ID NO: 6292 - DNA, 600 bp, Rattus norvegicus
tggatttaattaaagtttatttttaactggaaattaacttttgaaaaggctsyasssyyttasaaattgattatattttsttattaattttgggagatatactagcaaatgcctaatgttctggaggaaatgtaacaagttttgttcacaggtcttaagactggaatttttttttcttttgcactactttctatgctgaagcccgagagagacttcatactgtgaatgtttactaacgcaccaatcagttcaatgacaatcattggaagaatggtttcttcgtctcatttattgttcttttcattttgtgagactaatgagcacacagataacagcacacgattcctgctttaaaatctgaacaaccgatctacaaagggactacgargtaacgttcagcagccgaatctttcaaaattggtttgttacaatgatgcttcagaaaccatactattttcaatactcttctgccttttaagtccagaataatttaaccaaagttattgcatgcacagaaagaattccggcattttgttgcatatttaataaaaagatcttaagccataattgctgtagctgctgggcgccttatttctccaa

SEQ ID NO: 6293 - DNA, 1400 bp, Rattus norvegicus
ttcaagctctcccgccactccaagggactgcagatcctgggtaagaccttgcaagcatccatgcgggaactcgggctactcatcttcttcctcttcattggagtcatcctcttctccagcgctgtctacttcgcagaggcagacaatcacgggtcccatttctctagtatcccagatgccttctggtgggcagtagtcactatgaccactgtaggctatggagacatgagacccatcactgtagggggcaagatcgtgggttcactgtgcgccatagctggggtcctcaccattgccctgcctgtccccgtcatcgtctccaactttaattacttctatcatcgggagacagaccacgaggagcaggctgccctgaaggaagaacaaggcaaccagaggcgggagtctgggctggacacagggggtcaacggaaggtcagctgcagcaaggcctccttttgcaagactgggggttccctggagagttctsacagkatcagaaggggtagctgtcctctagaaaagtgtcacctcaaggccaagagcaacgtggacttgcggaggtccctgtatgccctctgtctggacactagccgtgaaacagatttgtaaagagagatccaggcagactggcaccagtgaagctggccacaggggtgccccttgagcctgggcatctgctttayaccaccgagtatttaagcccacctggtcacccaccgatgtctgcctttctttcacccttctcaccttcctgccctctaacttccccattttaactcctctttccataacccccagggtcgcctatttttaacaagtatgacattccatgacgcaggagccrttgaagtgctgagccctcactggaagatggatgcattcatagccagttttctacacccagcagagggataatcaaacaaatttgactttaaaaagcttagatcccaagagaatccatagcattccctacccgtgttccaaatttactttacatgggattacatttgygtatgggcaaatattatttttatggccgatgactgcattttgtacagcagtgcacatgaagaatatttgggtgtgctcttaagatatactttgaattatgaaagtgttgggggggtcaccatttcytgggacactcagggacaaagaccctaaaagagttgttcaggtttctgtgttctcawgcttcttattattctgggatgtactattggtgcttctggtctaggagakagaatgttctagaagaccagcwaatctaatcytgtgactgtcttcacagaagcattttaaggatgttggaagaaggatttggagaattcatgcttttmgttttaataccaggaaataaaatgtgactgtcgggcaagtaaaaaaaaaaaaaaaaa

SEQ ID NO: 6294 - DNA, 600 bp, Rattus norvegicus
gtccaggcgtgcagagttttgctccacatcagggaaaccgtgaagccccaggatggccctgtccaattccacaactgttctgccttttctggcctcgctgtggcaggaaacagatgagccgggtggcaatatgtcggcggacttggctcgtaggtcccagctccgagatgacagcaagctggaggctctctatatcctcatggtgctgggtttcttcggcttcttcaccctgggcatcatgctgagttacatccgatccaagaagctggaacactcgcacgaccctttcaacgtgtacatcgagtcggacgcctggcaggagaaaggcaaggccctcttccaggcccgcgttctggagagcttcagagcttgctatgtcattgaaaaccaggcggccgtagaacaacctgccacacaccttcctgaactgaagccactgtcatgaaccccatagttaattaatagacaagtgataagtgggtctttctagtcaaatgcctgccagtctttattgtagaggtacccttgagtttttataaggggtgagttaataacaccagttttctgaaattgcattctttctatagtaatcaatttatt

SEQ ID NO: 6295 - DNA, 1400 bp, Rattus norvegicus
agagaacttcaaccgccagcacttggccaaccagcaggcacttggacggctgtscacacacacccataccctgagcctgacgggagtaaatgagctggtgtgtggggccccakgggacgcaccctgtgctaccagcccttgtgggggtgctggatgtcgggatgaggatgggcaaccccgctgtggtggcctcggttgcagtggagcagcasccacagcagatctagcactgggccgggctcggcacacacargcagagctgcagagagcgctggtagaaggtggtggcatcctcagccgagtgtctgagactcgtcggcaggcagaggaggcccagcaacgagcacaggcagccctggacaaggctaatgcttctaggggccaagtggagcaggccaatcaggagcttcgagaacttatccagaatgtgaaggacttcctcagccaggagggagctgatcccgacagtattgaaatggtagcaacacgggtgctagacatctccatcccagcctcgcctgagcagatccagcgcctagcaagtgagattgcagaacgtgtcsraagcctggcggatgtggacacaatcctggcacataccatgggggatgtgcgtcgggctgaacagctactgcaagatgcacagcgggcacggagccgggctgagggtgagagacagaaggcagagacagwcsargcggcactggaggagscccagagggcacagggagctgctcagggcgccatccggggagcagtggttgacacaaaaaacacagagcagaccctgcagcaggtccaggagaggatggcaggtacagagcagtctctgaactctgstagtgagcgggctcggcagttacatgcccttctggaagccctgaaactgaaaagggcaggaaacagcctggcagcatctacagytgaagagacagcaggyagtgcccagagccgtgccagggaggytgagaaacagctacgggaacaagtaggtgaccagtaccaaactgtgagggcgttggctgaacggaaggctgaaggtgttctgsccgcacaagmsasagcagracarytgcsrgaksmggcymggggkctgwtgmargcwgctcrggacaagtwgswgcsrstacmrgaactggagggcacatatgaagagaatgaacgcgaactggaggtcaaascggctcagctggatgggctggaggccaggatgcscagtgtgcttcaggcaatcaacctgcaggtccagatctacaacacctgccagtgaccactccctagggtttagccttgtctccaagcacagttccacatgcgtttgtccgcacattaaagagctcttggmtagcaagtgctytcaataaaccagtgtgamcchmmhmaaaaaaaaaaaaaaaaaa

SEQ ID NO: 6296 - DNA, 600 bp, Rattus norvegicus
acctgccaacaactgtctcagagaaggcaaaggctttgacattacttaaaaataagggaggtcttgggctgacaatatgtcagctaccagtaatccacagtcaacttgactgccaagcctccatstctgtcccacaaagaacccccacaggaattcaggaaccacagtgtcttcattctgtttctgtaacgaggtccctrttggtmgtggtgttsgkmaygagatgccaagggtmccatggtaaggagatgcccagggtyccatgytsccacagctaaggacbtggsccagtatctytcytggttaagttgsctmtggagagatactggactgattatattcagasgwgtktttcctggaacatagsccaaaagsgacacagccasccagggaggcagctgyttcctcccagagcctcagwggcctcacatacctcacagccttgccctgggccatttytccctggcgcmttccctcttcccagcaccagtgcctcccaaagccatgtaaatgtgtmtacagtgtataaagcctttttttaagaaagccgagastgtcattmaacrtgagtgttttctwdrwaaaaaaaaaaaaaaaaaa

SEQ ID NO: 6297 - DNA, 600 bp, Rattus norvegicus
tcagaggggagaaaatacaaagttccctaatgatttccctctctgtcccttaggacacatgagccccaccacctgcaccctgaggaaacacaagaccaacaggaagccacgcacaccgttcaccacgtcccagcttctagccttggagcgcaagttccgccagaaacagtacctctccatcgcagagcgggccgagttctccagctctctgaaccttacagaaacccaggtcaaaatctggttccagaaccgaagggctaaggcaaaaagactgcaggaggcggaactggaaaagctgaaaatggctgccaaacctatgctgccctcgggcttcagtctgcccttccctatcaactcccccttgcaagcggcatccatatacagcgcctcctaccccttccataracctgtgcttcccatcccgcctgtgggactctatgccacgccggtgggatatggcatgtaccatctatcctaaagaagaccagatkgacacactctargatggatgtttgtggaaagcattcccctccctctccaggaaggcggtgccaattttgctcctgaacgcaaaccctgcgttgtccccctaagcaacag

SEQ ID NO: 6298 - DNA, 600 bp, Rattus norvegicus
cacagytgaaggcaggacagaatgggaagtccctgcatcgcagggatgctytacccamtgcctgtgggctgcaaggagccagggatcggagctktagggacaagcagtgcatgtcccgaatttcctytgcagcccccgtgtcagcctgggttcttaagaggctggctctcttytcaggccctacccagtyytggacacaaggaagccccaccggaggtgtgaaataaaagtgcttgmcaagtrwrraawwmmmwrrarrragttctccaattactgttttaaggccaatactggaaatatctcgaagctgctccttgtcagaaagcatgtttgtacagagggtgtctacaatcgtctcaacttggtactctttcactttactcactaaaggaccaagacatttcacagctaagttctgcacttcgccatttttatcctccagcaacttcagaatcatctttacgactttcctttcgctgtcatcatccagcttgatggagtctttctgcagttctgtcatcagatcatttgtagccataaacctgaagtccttgtcgctggatgtcattttttccagcaagttggagatgtggtacgaat

SEQ ID NO: 6299 - DNA, 1400 bp, Rattus norvegicus
agaagaaagcgaggcagatgatctaggggaaactctccctgactctactcccctgggcctctacctgaggtcccctgcttctccaaagtgggatctggctggagaacagaggctttcccctcaaggggatgccgggaaggaagactggggtcctgctgtccccgctgcccagggcctcagtggtccaccggaagaggaggaggagcaaggccatggctctgacctatcatctgaggagtttgaggacctagggactgaggcctctcttcttccaggggttcccaaggaggtggcagatcacgtgggccaagtgcccccggtactgcagcctgcatgctgggatcagggtggggaatctgatgggtttgctgatgaggaagaaagtggggaggagggagaggaagaagatgctgatgaggaaggagcagagtcaggagctcagtggtgggggtcaggggcctctggtggaggctgcaaggtccaggatattgcccaaagaggagacccggtacaggagtctgtgggtgtcagtggtctctgggatgatggcttgagaggtgctgcagctaatgttcctgccctagagatggtatctcaggacagtgctgagccttctgggtcagaggagtctgagtctgcttccttggagggggaggaaggtcaagtgactgaccatttagatgctccccaggaggtgaccagcatggtcccgggggtaggagatgcctttgacattggtggccagagccccaacttggactcagaacaagtgaatgggaaaatggagaatggactagaacaggctgaggggcaggtggtcctggatggggacgaggatcaagaactcctattacagggacasgaggtgggtgctctaaaggttcctttggtagcatctcstgtgcatytargcccaagccakcccctgaagttcactctgagtggggtagatggggattcctggtcytcakgggaakactagaaactgcccctctggctctgaggaygtamtggtggggatgtcmytccytgytctggrtsmccactcttagctttgataacttgacccatggtatttgtcctgrasagttgtggctgggctgagcaakggaggtgagatcctcctgarggctcargakttccakgcctataswtctaccccctctttcttctgtggctcacctgctggwagaggcctgrgcccakagctttcscacaaggstgttctggycacagmttgctakccttgcctamcayctgcacawggtctggtmtggtgtatgmccaggggagctgagggcagcatttatctgacccttcatctcagcytgmtgagagcttgttcctstcttcctccctgaataaagccgtatccctmcctmmaaaaaaaaamaaaaaaa

SEQ ID NO: 6300 - DNA, 600 bp, Rattus norvegicus
ctgactacaactaccacagtgacacaccttacttcccctccggatgaagacgaacagggcatgagactgaagcctgaggaattacaggtcataggacagggcyrykassttaaggaagaaggtcacatctgttgcctggaatgtgtctacactgctgctcttgttgrctggtgcgaacatgctagtggaaaacaattgatgtaatttctgcacagtcagcttcatctctcagcatagttgtaaatcaccatagctctcagagtctcatctgaagacatgctgtcactgtagagacacatgagcacccactcctgcacatttcagctcacatctatcatggtaccctttgagagggctttcattgtcttgactcatgatggttcaggataaactatgatcaaacacaaagaattaactagacagaggatgtatctaacatgccsktatggaaatctcttttaaggtcttgagtccatgctaatcaatagtccccactcatgcattcctactgcttggagtarctgtgctggtgaatactactgkaggagktatatgcttgttaaatgraaaaaatgkgtctttagagctcaatattctttt

SEQ ID NO: 6301 - DNA, 600 bp, Rattus norvegicus
agtggccacagtgctttgtgatctcttattgctccacatcctgcctaagaggcactactacaagcagaagaagttcaaatatgccgaggacatggggccgggagagggtgaacatgaccccgtggccaccagctccactctgggcctgcaggagaacatgaggacctcctgaccttagtcttgagatccggacttgacgcagtgtgtggcttccggcaagggctgatggctttgagccagggcagagggcattcccagaggctttcctgcaaggcagacaccagtggccctctggttcagcatgaagacaggcaagactttggatttcagagctctggtttcagttccacatgtcccttcstgagggatgcctcctccagttttcaccaatttgggttcatatggctgggcccctcacacatctatactctagctttgtgcttaaggctcaggctgtcattgtctttcccacagccttacctgcctagatttgggctcttccacatggtagccactagccagatgtgtcagtttgaactttaattaaaatataataaaaarawrrmwrrrwwraamwaaaaaaaaaaaaaaaaaaaaaaa

SEQ ID NO: 6302 - DNA, 1400 bp, Rattus norvegicus
ctcttcatccagttttgttgccgcacctgcctcctggctgggtagggcgggcgccagctgccacagagggcagggtcctcctgtctgcccttttgcccagctaccttcctacagatggccagccatagcccattccttggggtggccctgagtctgacagctgtgccctcccccccccagagctgggtcccactgcagcatctctgagcacctgaactaggtggaggtggcccttaaggataaggctaaatcggcaaaaatccccctgaactctgcttgctggctgcagtctaaagctggactcgaaataggaacagagtgaattatgagactcatgcctgcagcttgggagtggcttctgggaccctagtttactgaaacttcaagaccaaagcagaaaaagagagatgcctggcatcccatcaagtcctcctcccacacattcgtgtgaccgtgacagatctcaccgagttggctggcaggaccccatgctgtcctcacctataatgaagggcctcgcttcctccccatgcatcactggccaccaaacagcctgagggatggtttgatgagactgtaaataaaataggtttcasggcakragatgtatgaccactggggatagaacctatgtctacacagctccttccgaaactacagccccctgactggaaggtccggcaccagactgaagtaggtctactcatcctctcctcagcattctcctctgagtgagctgagctgtccaagtgactgttcaacctgtgtcccagggcctcctgggcctgagscacsagkcatctacagatacagagcctgtggagragggtccaaaggagctacttaaggctagccgaaagacctctaatggccaagcagttcctccttatgcaaagccagccccaaatcactaatcgccagccctccatggcacacaactgcttctcaagtgcatttggcctccacactcaggactctgttctcgggtggacactgctctggcccagtatagtacaagcctacgttgatagagctggattkwtttttytgccaagcctgtgtgggcattttataagmwacgtgttctaatttttaccgatgttaattattttgacaaatatttcatatattttcattgaaatgcgcrratmtgcttggtccagttccctttaacgtgggaataacatttgccttaaatttttccaacctcgtctctctccatatggtcctgctctcctctctgaatataatgtgttytgtcttgtcacctgtaagtggcaaggactcagctgttgtctgttgaatccacaacttcaaataagaaatcagtgaagcaaatctaatgttaaccctgagttaataaaagagttaacatcccmttgcaaaaaaaaaaaaaaaaa

SEQ ID NO: 6303 - DNA, 600 bp, Rattus norvegicus
gctgttggatcttggatctgtgttggctcatgtggttgtttaaaggaaaccatgatcgacaagatttgccatggatttaagagttttatcaagatatatcgaatacttctacccatctgttcatagtttatggactgatgttccaagtttgtatcattcctttgcatataattaaacatggaacaacatacactagatatatgtaaaaaatatctgttggtttttccaaaggttgttaacagataaagtttatgtgcaaaaaagggtaagatatgaattcgaggagaagttgatagctaaaaggtagagtgtgtcttcgatataatccaatttgttttatgtcaaaatgtaagtatttgtcttccctagaaatcctcagaatgatttctataataaagttaatttcatttatatttgwcwrgaawamwmwawarmwrwwttatacacattttcatgcaatcatttgtttctttcttggccagcagaagttaattgttcttagatatagctgtattactgttcacagtccaatcatcttgtgcatctagaattcattcctaatcaattaaaagtgcttgcaagagttttaaaaaaaaaaaa

SEQ ID NO: 6304 - DNA, 600 bp, Rattus norvegicus
gaacatatggttttcatttcctttcagcatgatgatataatcaccacactgaggatggagtaaaaagcctcttccttctcagccactttatgttacctctccttaaaagaaaatttttgcaaaagtttctagaaagaaagcattttggtatatatgaatccaatttaagcaatcctgtctagatctaaaggacataactttactcttcaagtcttatgaaaggtttaatttttctaaaaacagtactgtattttgatctttagagcattatttttgtaatcatcacctatagtgttaattaattaacagtattagtgtgtatttatgtaggataactgttatcacatttaaaagtgtatgtaggataaaattataatggcattgaagtggtgagtatttcctgtttttttctattgttttaaaaattagtatagccatttttctacccccccattacataattcattatacatggggtgctgggttaagtgggccaatataaaaacttcaaaagcaaaatgacaaaatcagatgaaccacaggacttcattttgcatccttgtgacttgtcattcttttgcaaaaaaaaaaaaaaaaaaa

SEQ ID NO: 6305 - DNA, 600 bp, Rattus norvegicus
ttttattaattgccttcagaaataatcttcagtcagaatctattgatatctttgacattaacacttaggacacgttttttgaacaatttgtaggagcatttaggcatgacatctgggcgtattcttttatacacattagctttctgaggctctgctacagaaaacatgtgagctgcaagctaaacttgctgacccaaataatccttcagttttggctttgttttgttttgtttggtagtgagttcaatcctgagcacaagtgaaatttaaaaatgaaaaatatggtttagggatccctaacctatatcataaatctgtgtggaagctgcactagggcgaggctacgtggcttacttgctgttatgtttccagtgactgaaaaagcactggctcctagtaggtatgtatagaccatgctaaaaggaatgggcccaatggtgaacaaccgctacaaatatgaagggtaccaggcaacctgaaaaatctaacttgtttttgaagtctcattgtagaaactcactgaggttccttaacaaagtgtcaattttggtctcactggtcacattttgatttattaataaaaattggaaatatgaaaaa

SEQ ID NO: 6306 - DNA, 600 bp, Rattus norvegicus
agcatggggcggaacaggcagkgcctggggagatggccccctcactgcctgcctgctgtaagagccggaatcagatggaatcytgagagaacggagtcttccctcaggasbtccacgsccactgtctagaactkagagaagggraarggaggagaasgactgwbdgctkctctcaccatsgwgctacacttagagaaaacacttgtcagcctagccagccccagtcgctcgtcacagcccccttgtgggtgaaccatgggttttgtgctcctcasgcagatcctgatctytaagagatccckagacctcaccacgccccacctctgtytytgcccttactccamtaagrgaatagctctgcagaagtcttggtaaagtawttttattcctcyttcttcactctgtgtggaggaggctggsctgtwtgctgtcagtccttcccatgagtctcgggaggtgcgtcycggctcctggsctgtgcagacgaargcagatgsctctgtggaggagggcggtgggtagggasccaagattaatgctttttgtggcgaacctaattaaatgacaaggtttcatcwtgrwaaaaaaaaaaaaaaaaaa

SEQ ID NO: 6307 - DNA, 600 bp, Rattus norvegicus
atccctctcttcaaagcattgttagatctcccggaagacaatggcagaaaagaaaaccctgatagacagggaaggagagtggccggatgtggttctgaatgagaatgtgtcctttagatgctgtgaattattcctgtattccattctgttcttgtctaaagatgtcaaaggttgttcctttccatttccatggtccratccattttcgttggcatascacagttttctctcaaatcrgttkctccctccaaatcaaactctcctgcctagaatcctaataatattaatatggcttttgttctygagcacctaagttatccagatagaaggaagactacagaacaacgttagaagaatcactccagggctcagcagacaccagggacttcctcctccgattgtggtttccagacatcttggraagtcaatagaagaccatgaattttattttctttcaacttacagatacactaatatattttycgatgttattgargcaaaaggaaacatttggatattaatgagtagtgccagttactaaagaaggccagtcaatcaaatcagataatcatatcakttttcgayarmaamraaaaaaaa

SEQ ID NO: 6308 - DNA, 471 bp, Rattus norvegicus; identical to SEQ ID NO: 2212

SEQ ID NO: 6309 - DNA, 600 bp, Rattus norvegicus
agccaggactcatctctatagggctggtgacctgatacttcccataaaggcatccaggagttagctgacccaatagtcagagttgacctcactggcctagcaaaccgtaacttgtctttggcccagccatggtcttgggctgtcttctaattccaaagggttggtaggtaaagakccatcctyttyyyytytgccaagagrcatcacgtgtktacacacacacatgsgsgsgcgsgcacacacacwcacacacacacacacacacacacacacacacacacgggtgtataggygrswyrarrggatgtcctcgctgacatcctaattttgtcttaagtttttttggagggagaawrsaamgaggcagggmasatacgtagctctagctttagtcaggcrgcytggggggatccccaagcctatgtatggaaccytggtacraaagcgccctgtgaggagtgggatytcagttttatctgtagaccagatgagaaggagaaaggccccattttgtacatagttgcmacttaaaatttttggcttgcaaaatatttttgtaataaagatttytgggtarmawhraaaaaaaaaaaaaaaaaa

SEQ ID NO: 6310 - DNA, 600 bp, Rattus norvegicus
atgttcaagatcctgatcattggtaacagcagtgtgggcaaaacctcattccttttccgctacgcagacgactcttttactccagcctttgtcagcactgtgggcatagacttcaaggtcaaaaccatctaccgcaatgacaagaggatcaagctgcagatctgggacacagcaggacaagagcsgwrscgaaccatcaccacagcctactaccggggcgccatgggcttcattctaatgtatgacatcaccaatgaggagtccttcaatgcagtgcaggactggtccactcagatcaaaacttactcatgggacaatgcccaggtgctgctggtggggaacaagtgcgacatggaggacgagcgaktggtgtcctcaraacgaggccggcagctggccgaccacctgggctttgagttctttgaggccagcgccaaggacaacattaatgtcaagcagacctttgaacgtctggtggacgtgatctgtgagaagatgtcggagtccctagatactgcagaccttgcagtcacgggtgccaagcagggcccacagctcaccgaccagcaggcaccacctcatcaggattgcgcctgctga

SEQ ID NO: 6311 - DNA, 1360 bp, Rattus norvegicus; identical to SEQ ID NO: 2215

SEQ ID NO: 6312 - DNA, 1353 bp, Rattus norvegicus; identical to SEQ ID NO: 2216

SEQ ID NO: 6313 - DNA, 600 bp, Rattus norvegicus
cccctagaacctcaatgaaaatacaacaaaaccagtccattcggcggcccagtcgacagmttkctsmaramawammwrgctaacttgccttctatgaaagcagttattgaaggtgatcatattcttccatccacaagactgaaatatggtttctcaaaacttaactaaaaagctatatttttactgagacacatacatacaccacatgtcgctcgttgcgtgcatgcttgcastcccttcccccctgaaataattacaaatcatggagaggtttgtctgggctactttgaacagttgaacaaacaatggttggtgaggtaaaaaaagtgtcctacaattctcccagacttgcttcataaagctcttggcagtcacactacattgcacaggattgagaagagtttaaagaaatcacatttcagcttcaacagagggtttcaccagcatattagtcagaagaatttgggagtgaatcccactacagtgatgctgactgcatctttaagaagtgaccatgatgttgtgttcatgtatggtatgtatatacatatgagttgagcctcatatatatatacacatacacacattcacataaacaca

SEQ ID NO: 6314 - DNA, 1400 bp, Rattus norvegicus
ggtgggcctcatctttgctgtgtgcctggtggctttcatgctataccggatgaagaagaaggacgaaggcagttactccywsgaggagcccaaacaagccaatggcggtgcctaccagaaacccaccaagcaggargagttctacgcctgatggggaaatagttctccccccacaacccctgccactcactaggctcccatttgcctcttctgtgaaaaacttcaagccctggcctccctaccgctgtgccgtctcctctgcacccagacccttctgcccgagcggtctcagggtgtgctgggaattccttctcctctgacttctgctagaagcttgggtgcagagggtttcttgcattttgtctttctaccacagccacgcctgttgtccactcttctgacttggcttctccaaatgggaggagactcagctctggacagaaagggaacccaactgctttggacctagatggcctattgtgactggaggatcctgaggacaggagaggggcttcaacagacacgccatagcacttacccatagagaccattagggttggctgtgctgtggtagggaaggagtccagggctccttggaattcacttctcattgtggggaggtctactttagacaacttggttttgcacatgtttcctctaatttttctgttttagagccccagcagaccttacttctggggtaaggcaagtcagttgactggtgtccccacctcgyttccctaatctacattcgggagaccscatcggggttaaataagacttttcattttcgkttttgtttttaacctagaagaaccaaatccggacaccaaaacgtaggcttagtytgtgtgttgtctctgagtttgtcgctcatgcgtgcaacagggtatgsactatctgtttggtgccccatttttggtggcccataagtaggctggctagcccaggatgccatggaktagccacctcttgaccagtcatgcctgtgtgcataracycagggccatggcctttgtgacattggaagagcctgtgtgagaacttcctcctagattagtctarggatggargggargaractgtayagtttggragragggktgmcaagggtgtccaagaytctcccacctttggtrctaactctsgtcaccctttctcctggaagttgacaagacacatcttgagtatggctggcactggctcctccatcaagaaccamgttcaccttcagctcctgtggccctgttcccagsctggagtcagaaatgtttcccaaagagtgagagtcttttgcttttggcaaaacgctacttaatccaatgggttctgymcagtagattttgcagatgtaataaactttaatwtaaaggrrwmmwwwdaaaaaaaaaaaaaaaaaa

SEQ ID NO: 6315 - DNA, 600 bp, Rattus norvegicus
aaaacgttatgcactttaaacagtcaaggttaagtatgatgtggtttatcaaatccggctcatgttctagaaaacaaggctatcaagctgctataatgtgaaaaatcaaactatcacatctcccacctgcttcaggtcatctgagtgttttttctagagatttgttaattttgagttgctgttattttttagactcytaaaaggttgttcatatcaatktagaaatgagtttcacgcaaagatgratscaatgaamctgcccgtgtctagcacagtaatgttcaaggtaatgragtggtcggsacrmskycycktkctgaascagagaaamccwtctacaagcgtgtgtgtgttactgcatcatctgtgcgctggtagamcaatgttcytaagcacgacamcactgatcgatcttttcagtatgccagctaatactgcwagtgamcmctatctataattgctttgtatgagattmcawtctkctggaatacaaacacagtatgggatctgtcttaaatagtatcaattctgcagttctgtaatcaaaaaaaaaacactgtcaattgtgttaatctgatctgtgtcacgttgcacataaag

SEQ ID NO: 6316 - DNA, 600 bp, Rattus norvegicus
cggacacttccgagaagcccttgtggaggacagtggtgaacatcaacggcatcatcctcctggcagtggctgtcttctgccacgcctattttgcctgaaccccgccttctgggggtagacttggcgactctggagttgttatttcccactagaccccgccactctgtagtggtaaggggaaactggccagttgtaaattttactcattcggataaaagatgtataagtgtgattatagacttgcttgaggaaaatgattaccctgctgtgaatttatgcctgtgaaaccagtgtgccacactcatccatcacaccagagctttggagtgacgttgactcagatgtagaaaaagtcataccgagacacagaggccctgtgttgtctgtctcaggtacgtccagcgtgtaactattgtttataattcttaaatactattttttaaaattgtggtctggttcctgacatttttctacctgacccctcaccaattcctcctcctcctcctattttttttttctaaaagaaatctcccatcatcgcatccctttagagttttttggttttttgttttgttttgttttttgtttttgtttttaatt

SEQ ID NO: 6317 - DNA, 1400 bp, Rattus norvegicus
ttttctcagaggactgtgtgttatagcttggtcccaggggattcatcatgatcgtgggattagttggccagtttcctcaaatgtgtttttcatgttgagaaagctccttaaatctggtctgtccagaatgtttctgtcttctagaaggactctctgtcattgtatctttcctctctctgtttccccttgtccttgttctcctcacggtcctccccatcccttcaccttccttcacgttctctctactcttcttcccttatctctgggctccttctcacctgttagtggcttcttcagtcaccctttgcacatgctacaagggacattggtgttgatactgggttggaagcagtaataaccctactgtgtttctccctttgtgactcttgtaacagaaaacaacttacacattaggtggatgaccaacttgatcccattttaaaagagtagagaaaacatgatatttttacccttaacactctcttatgatactaaccactgcctcaatggcaatacaactaatgtaaamacakkattttaacttctttcaaatatcaagagggtgtggaagggagagagacactgactctaagctcatagtgatatgtggggcatttattgggattaagatattgattaaatgattagggtgggggtacctattggataccatcaagctgtgtcactgcctgaagtggtagttgggatttttttttggttctgtttgtcttctttggtttgttttaactatagagaccattctgctcttgaactcctagagttccacctggctttgcctctcaggtcctgggattaaagccatatgtcaccttacccagccaggatgtttcttgttttggtttcaattttagagcctctggcttgtaagatttttataaagtagagtttgattcataggtggccagagttgtgactcatagatgggttttagtgaggtcttaggcatccaccccttataatgctgttacccagggtgactgtggaccacagcactgtgttatgagatggtggaggtcatggcacattctataggaaaagagaagccaagcccctagtctcaccaggcacaaccttgagtcctcactgctctcctctgccaacaggaccttttgtccagatttctgagtattctctagttacatttgtatttgaactatatttgtgttatctgtaattctgtatttgttttgtttgtgtgtggttttgtattttccagattatttttaattcacctgttgctattcaaatcaatgtatctgtactgcttcatcaacacagcctgttaaataaaagtcgtgtctgttgttgttgaatgatmataatgaatttgtttgttcctgaaattctgatatttcttaaattaaaaaaacaaaaataaa

SEQ ID NO: 6318 - DNA, 1400 bp, Rattus norvegicus
  misc_feature (905)..(905): n is a, c, g, or t
mmrwraracttgacartagctctggtgcaagtgtggtagctatcgacaacarratasagcaagctatggatctggtgaaaagccatttgatgtatgcagttagagaggaagtggaggttctgaaggagcagatcaaagaactaatagagaaaaactcccaactggagcaggagaacaatctgttgaagacactggccagtccggagcagctcgcccagtttcaggcccagctgcagactggctcccctccggctaccacgcagccacaggggaccacacagccccctgcacagccagcgtcccagggctcaggatcaaccgcatagcctgctatgccccaacagaactggctgctgctgtctgaactgaacagaccgaagagatgtgctagtgagaagccgcctccagtcacccatttcattgctgtctgcgaaagagacgtgagactcacacatgctgttctcgstttytccccagtattaagcactcatatgcttttggcttgaagaaatatactagttgagtgaattaaaggttaaacagagagtgagcatggatgtaccctgtgcaacgtggcagatgtctgaggaatggtttgattgacgctgaggaggagctctgtgccttttcaaccctccccagccgsccacwmwactcccaagctytggggctcgcctgcatggggctcagaaggtgggctgctcctggattttktgttctcctctcmykmssttcaaagaatttgagaggccagaaacgwgactgcaaagggggkgatgcagtcctttwmcaaaaccgacaactgtcaccaaagcttataaaacaggacagtactgtccskcwykwbkgaaacatcagaagacacaaaactgttagtgwcacmwykswrwmargyakmtsrrayntwsgctatcttattatraaggttgtthtkywtktkkwwtwwttkygtaygtagtgtaacgratttgtacaatrgaggrccgtaactastgttaggttgtacagaktgaagtktagatgttccattggytgtytgaaaagstgtggattgtccttcctagagagatstacttaaaaabtgcttcrtgacaaaaacchcaccygaagaaattttaagaatttggcacagttagtcactttgtgtcaccyggaatytaghtgytgagtvttgcaaagtaaaccccctgttgastgatgtcagytgagmtagtgaatgaatagatggagaaacgtcagtcagtygmtgaggaagtggatttcccagtaggggtttbtgcagmtcacmtgwatagtcyygckcrtgttccsmaywcagaacccactgtatttacctgttctacwtgtcacctttcaataaagcatatcaaatgttrdwhmhwwaaaaaaaaaaaaaaaaa

SEQ ID NO: 6319 - DNA, 600 bp, Rattus norvegicus
gcagatggagttttcactttttaatccatcatggacttcaaacagctaagagagggaggaagaaagggaagcctataggttatataaaatttaactagatgtaggccaaccatgcagaaccagaggtgagcgctttcaaaggacttgagggctgtgatacagggccacctcagacaccatgacagctacaagtccttgatggatttgttcaaatctctgggactcggtttcctcacctagttgaattagagtttagaccaaaagaatttctaatgctcctttaggttaacagtcaataatgtttatctgtgataggaaagcacaatcaaagttggccttggtgagccatcataattaaggaaaagccagaatctttgtgaaggagatggggaaagggaaggaaaggaaagaagggaggaaagagactgactcagaactctctgtgtctctcatacacacacacacacacacacacacacacaccccaaaaacaatgctaaaagaagctgaagtcattatgtctacaaaagcagagccaaggacctgggtgtggctgaacagcccacctcatcaagggagccgaaatctcgtgccgaattc

SEQ ID NO: 6320 - DNA, 600 bp, Rattus norvegicus
cttggrcctgtgaccabaaggtakattgaagtagggactccatgatttggsgtcctgttasascctgrggccctgcacmtmktrsbkatcasasatttggawcttgsrggttcccttgagggtgsggcccatggagtytssarsttgggaaattaaagatccatggactaagggtattagagtcctatccttgttccaaagatgggactttctgtttggggtctcmtggtgcctgggagtcaggtttgagatgccctgagagcctgggatgttctcctggcaacaggttccttcctcccggtcctaaggaccttgtgttgggggatttcctgagggtttgggattggtatcttaagtttgggmytccstggggatttgaagattctgtgacttgggtagggggaagtcctgggaattagaaatttggggtcttctagagattgtagggcttggaggcatggggaattggggattatatataatatatattctctctggaatttgaactccccagtgttctagaatggggtctccaaatttggggatccccccaaagggggggaagttattactttaaaaaatagagaattttccctcgtg

SEQ ID NO: 6321 - DNA, 1034 bp, Rattus norvegicus; identical to SEQ ID NO: 2225

SEQ ID NO: 6322 - DNA, 1400 bp, Rattus norvegicus
  misc_feature (490)..(490): n is a, c, g, or t
cagcaccctyatcatgcagttgcttagagacaacttaacattwtggacatcagacagtgcargasaagaaygtgakscarctgaggrggctgagaamtaaaggcatscaggacmccamcytcyttcycytsargaraaccttkttacatcyscatyccttattscacttgsatttcctctagcaaggaagcccattcatgtgtakggggtcaactgtttatrgtmttttcacaytgcagctttgggaaaaytccatccyykggkttgygbtgwctccmccttcytggkgkscagttaytgykrwagaaaagtatcaatasctkmatttcatwtaammacgagtaacttycakacactkgtgwrgaggactgacarcacatttggbattkaagtaatctgaaccasytctgcaagkgactgkgttttgkattactgkgaagatatggaaatkgkagtgcattacaayttaaagygdttgtrwwaawammrnmwhrawdwvwacawdmmwwwhmwraamtttcttggsrgtkkyctttyakaagmaactyttccwtgytctwactacaaattcctttttagtaggaatccagaagtgttagattgaatgggaaagcgcttaatgcatccgggcttgggggtcacagattgaaatgtctcctgtgtmacattctggaggtwacatctgtctgtgacaacagggcgtttccttatgcattcttcatktghtgctgtttaagttgacaacttccttcccaataaaaattcactwacmmmwmmwrmmwwmrwarmwmwrrwattcactttaccttgtgacagaagtagcatgttgctgccagaatacaagcattgctttgggcaaattaaaatgcatgtcctttcttaatacaytaggaaggagaaataaagtacacaagkccaagtytaaactttagtacttttccatgcagatttgtgcacatgtgagggggtatccagtttgtccagtgattgttctttagagagttggaccactatattgtgtgtttgctaatcattgactgtagtcccaaaaaagccttgtgaaaatgttatgccctatgtaacagcagagtaacataaaataaaactacattttwtaaaammawwwawwawrrmwwwrwaamagttgcatacccatattttaagaacagacaaatttactactttttgaagtttgttgctatttctctttatgtaacatataatggtgatatccatatttctgcattgtggtacacttgtctagggtgcctggcactgtaaaattggactatatttctccagatagcctcatgggttgtcttcctcagatgtaatgataactggttaggtgtcatgtgtaataaagtgaacatttgaaaactagaaaaaaaaaaaaaaaa

SEQ ID NO: 6323 - DNA, 600 bp, Rattus norvegicus
aryksatyycyykgktscwgkwwytckgcmmragccctggctttgggcccagaggcaagttagaagattaatagcatgtgatggctcaggctgaagaactgggtgctggttaagtccccgctgttatctggtgcctggtaggggtggggactgtcatattgtamcccctgtgaacaaccctgaaatataaccactccatgcaggcccaactgkcgagggttttcttggtgaatgagtggagtggtaatacatggattaagtcttggatttaagattttacctgaggaatttggataagtwactttctamstyrwswtaaatggcagcaggtaaacttttctaaatgatttcaggacaagaacacaaggtctcmsaacacctgtggagaaaactaaatgattactagactttaaaattaaagtatgcacgaggcagtgattctcaagcttbcaatcgacaccttcctgtsccagctccataaatgcactgtacaatgctgctgtacaatcccagggtaagtgtgactgtcagtcttcagaggccacccaggatcatgggggggaaaagattgagggcaaattacaaaaaaaaaataaaaaa

SEQ ID NO: 6324 - DNA, 1400 bp, Rattus norvegicus
gagcccggggacatgcagtatgagttgaatcggaacaacctgactgacccttccctctcggagatggtggaggtggscctymggrycctgwcrmmkwatsssaragscttyktcttgmtrgwsswaggaggcaggattgaccacgggcaccatgaaggcaaggccaagcaggcgctgcatgaggccgtggagatggatgaggccatcggaaaggcgggcaccatgacttcccagaaagacacgttgactstggttactgctgatcactcccacgttttcacgtttggtggctacacccccaggggcaactccatttttggtswgkmdsccatggkgwgbgamasgsacaagwagccctkcrsakccatcctstatggcaacgggcctggttacaagswsgwggacggtgaacgggagaacgtctccatggtggattatgctcacaacaactaccaggcccagtccgctgtccccctgcggcacgagacccacggtggggaagatgtggcggtctttgccaagggccctatggctcacctgcttcacggcrtccatgagcagaactacatcccccacgtcatggcgtatgcctcctgcattggagccaaccttgaccactgtgcctgggccagctctgcgagcagcccctccccaggggccctgctgcttccactggctctgttccccctacgcaccctgttctgagggcccaggtcccacaagagcccacaatgsacagccggctcccctccctttgtggcctgccacctggccgcccacactcaacggggaggcccaggcaacctygagcaggaacasaagtttgctacctgcctcacttccgcccggaaccctccgtgggtcggattcctggctctgccgttgtttctctattcackgccttttggccagcagggtgggtttctctcttgggccggcaggacacaractgcgcagattcccaaagcacskyaykwkkctaccaaatatactstccagaccctgyaaccatcatggaacattccagatmtgacsttskcwcsmskaccccttythtmtggaacactgggtcccatagtcacagccagtccctcaacccaaccctcchtggagggaagaccaggtctgctcasggtgagactcccaggaagccacctccggggttggytgyctacccakggtggccaggctgggaagaacaacccagccggacaggacgcacacactccccacccagctscagagactygccaacccttcactgaagcgactcccctgtttggaatagcaaaaaaaaaaaraaaraaaaaaaagaaaaaaattttaatttctctttttggtgttggttaaaagggaacacaagacatttaaataaaatgttccaaataaaaaaaaaaaaa

SEQ ID NO: 6325 - DNA, 1313 bp, Rattus norvegicus; identical to SEQ ID NO: 2229

SEQ ID NO: 6326 - DNA, 1400 bp, Rattus norvegicus
gacgttcagacacgcggctctatcctccaagaagtacccatacccaggcaatggagccctctgtgaaactggataaaatgggcgatgttagtgctttgtgtgttgggatgggtgacatgtcccagggctgactctacctaaaaggctttgtggaggatgtgggctatgagccaagtgttaaatgtgagatgtggactggtaagaaggaaggagcaagctcgctcagagagcggttggagcctgcaaatgcattgtgctggctgtggtggaagtgagcatgttgcctgtcacgaaaccccaaggcggctgtcggggtttggttttggaaggttgcttgctctcacggttgggctactgccaattccctgtgctgtttcctaccctaatcaaattccgtccggactcttacgtgtctcctggcctagccccaggaaggaaatgacgcagcttgctcctcatctcccaggctgtgccttaactcagaatactaaaagagagggactttggccgaggctccgctccttgtcatgctgaagaactgtgagaacacaacagaaactcagggtttctgctgggtggatacccacttgtctgccctggtggcagtgtctgagggttttgtcaagtggcgacggtaaaggctcagacaggatgtatccctttgttcttcctctaactccacttctgtcttgccacacacccccccctccccagtgctcagtattttagctttgtgsccacgtgatggcagaaggtcttaattggttgkttttgctctccagataaaatcactagtcagatttcgaaattactttatasccaaggtctgataacatctactgtatcgtttrgaatttaacatataaagcygdsdckrstkdtttttttttttgcccttgggcatatgtttttcaaaagagaaactacttttcatttggtaccatagcgtgacgagcagggsmmaatgmctgtaaaacatgctgtggcacatatatttatagtctgkyaykwsgaacaaatgtaatatattgaarctttatattatatataaggaactttgtactatccgcatttcgtatcagtattatgtagcaygacaragactgtgaggtctgagcagctggtggctcaggacgttgagaaactcgaaggaatcctttcktgaggatgmgcagctatccmtacccatctctctcmcctcaaacggaggagaaaggggaatcagagataatgtgagtgwgtccttgttctctgttcttaggaggaatgttcttaccaactgttcatacgctttataaaccaataaatgtattyygagtwaararaaaaaaaaaaaaaaaaaaaaaaaaaaaaaatggaagcggccgcaagcttattccctttagtgagggttaatttta

SEQ ID NO: 6327 - DNA, 600 bp, Rattus norvegicus
cccacactcatggaaagactgctgctgctcagtccgatccctcaactccagtcctagctttctgcctgagtgactccgccagagtcattccctctcttgaggttgcatcccctaagctgagttgataggggcttaagcatgctcaagagagcagagagcgttgtaaaccgtctagtgcytgtggacgtggttactgtccctgtctcgtatggccytaccswacagtgtcacttcaccctatcagagcttggctttctccccaaagacctgtctcstactcaattataggccctccctggctggagtccrctccaagggtccccacaggcatatycacctggcctgaaggccaccagaagtccggactgcacatrgccagctgcaccaatgtgtccctgtgaactaatttgcgttcagcccttctcagtgagctctgaagctaggtccaccctctccaggtgtggactgcacacagcacaggctggatctcgttggcattgtggagtgcttaaacactctccatgcggccgttcggcatggaggccaacagcccgtggcaactgtaattaaaagcctggtaccgaaaaaaaaarwmramaa

SEQ ID NO: 6328 - DNA, 600 bp, Rattus norvegicus
actccttcggcagcacaaagggcggctggaggcgaggatgcagattctggaagatcacaataaacagctggagtctcagctgcatcgcctcagacagctcctggagcagcctgactctgattcccgcatcaatggtgtctccccctgggcttccccacagcatccttcattgagctactcgcttgaccccgacccaggcccacagtcccaccaggcagcatctgaggacctgctggccccgcctcatgacaccagcacggacctcacagatgtgatggagcagctcaacagcacgtttccctcctgcagcccaaatgtccccagcaggccacaggcaatttgaagcatttatccagccaaccaacgtttcccgaccttcagtattgccctcttctgcaaatgccaaccccattcaacctgatgctccgtggctcccagacacttgcctttgagtgctgaccaggtgttctactgagggaatcaaacaccgactatccaaagagaaaaggatgctttgtttttataataacgtatattattgtttccttcttccctttctatgcaactgtaaattaatgaacagagaaggatttgaggtgt

SEQ ID NO: 6329 - DNA, 600 bp, Rattus norvegicus
aaaagcgtaaattccattagattattttcaaatagtttccacattgcttgaggcaaactaatgggaattttaggatcattatataagtaggagagtattcatttaacatcctctccatcattttatgcacagaagaaaacaacataaacctgaaaatcactgttagttctcgaagttcaaagggaatgcttttctacgctcttctgctattgaaaagggggacagaagactcccccaacttgccacgtatttctattcttttaaattttctttatagactttggagttagaaaaatctgggtttttcatgaaatatgtttttattattgtatccatgtatgtatgtatcagcatgccagttgttcaatagttatttacttaaaataattatatctttatgcttgattgtactgtgtcttcatgaagatctttttcatataaaaatgtgattatatgtctcccaatgtgaaggttaaattatgtaatttttaggtaaaataatcgcatccatgttgtcttgttgtaccatgtgaaaaattatgttgtcgttcaatacataaattggatatttgctcatgaaaaaaaaaaaaaaaaaaaaaa

SEQ ID NO: 6330 - DNA, 600 bp, Rattus norvegicus
atcgggaaattgcggtccaacctgatgggcactaagttcaccgtttatgacaatggcgtcaaccctcagaaggcatcatcttctacactggaaagtggaaccctgcgccaggagctggcagccgtgtgctatgagacaaatgtcctaggcttcaagggaccccggaagatgagtgtgatcgtcccaggcatgaacatggttcatgagagagtctgtatccgsccccgmaatgaacacgagacgctgttagcacgctggcagaacaagaacacggagagcatcattgagctgcagaataagacgccagtctggaatgatgacacgcagtcctatgttcttaatttccatgggcgcgtcacacaggcttccgtgaagaacttccagatcatccacggcaatgacccggactacatcgtcatgcagtttggccgggtagcagaagatgtgttcaccatggattacaactacccgctgtgtgcactgcaggcctttgccatcgctctgtccagctttgacagcaagctggcctgcgagtagaggcttccactgcctttagggcggccccgtctggagtggagcctgcctgcacctgcccgggcg

SEQ ID NO: 6331 - DNA, 1400 bp, Rattus norvegicus
cagatggtcaaaacatggcagaggatgaatttgtttactggccaaataaagatgagcccataaattgcgagagcttcaaagtcacgcttatgtctgaagaacacaaatgtctttcgaatgaggaaaaactgatagttcaagacttcatcttggaagcgacacaggatgattatgtgctggaagtaaggcattttcagtgcccgaaatggccaaatccagatagtcccattagtaaaacatttgaacttataagtattatcaaagaagaagctgctaacagagatgggcccatgattgttcacgatgagcatggaggagtaacagcagggacattttgtgctctcacaacccttatgcaccaactagaaaaagaaaactccatggatgtttaccaagtagccaagatgatcaatttgatgaggccgggagtcttcactgacattgagcagtaccagtttctctacaaagtggtcctcagcctggtcagcacaaggcaggaagagaatccatccacctccctggatagtaatggtgcagctttgcctgatggaaatatagctgaaagcctggagkctttagtctgacgcagaaagggtgtaggacmaccctcatccaagcagtgtctctttctaaacttagaaaaatgagtccagttctgttatcygwktrcttcccatgacctgacggtaactcattctgctgccaaattgacaccattaacaacgtgtgcctttttgaaagacttcttgtaatccacttattatgtttgaactaaaatgattgaattttacaatgtttctaagaattgaattgtggcatttttttccatattgattttaacaacaacaacaaaaaaaatttgtagataataggaaacaccaaccttgggagatatttgttcttaagtgtcaartttttagctgtatttgtagcaatcatcagktttgmtagaaatataacttttaatrtmgtagattgtaagtaaaccactttatccccgatgatattcaacattttacaactgcagtattcacctgaagtaggagtgmcagtaacttatgtwaatactgccctggtgtctccatggaccaaatttatatttataattgtagatttttatattttactactgtgtgagttttctagtggtgtacttgagtttaattagcttactctctggtcttaacttactctaaatgycttctaaaactgtactgtgttatccaagaaactaaccttctttctgcatgtcattttaacttttgtgaaaataggaaaccacttgttttaaaagatgtttttatgagaataacaccttaccaaacattccttaaatggtttttatctgagaagttgcaaaaataaatataaatattgccattaaaaaaaaaaaaaaaaaa

SEQ ID NO: 6332 - DNA, 600 bp, Rattus norvegicus
agacataaattgtaatttgggaacaagyaaamtactgaataaatcacawggcctaawwwwrraaawrwmamwrwwawaaawwwrwaswktkstkrycrmawgtacwgcttccctttgctatgactgactgtctgttctcagtgactatgtgggtttgatttccgagtatccatggtgtctgtaagaccaaagagcccctcagttaggctgtttattacaagatttacctctggattggccagaggaaatgtatgcgttatcctgcatgtgtctgggtgcagggatagaatgactgccakgggatttcaaggtttgcaaactgtgtagtgtagctattgacaatattgagacagatgccttcttttgcaatttactcttaaaaagtataaattccaaagmassarrgggacctttctagaagtakataactggggatcagccctatagaattgcttaactgtcaaagctcccttgcagaagaaccctgtgagtgacaaccacagccactccatgggcctggagggaagggtgtggaggctctgcatgttaaaacgacaacctggctgcttasgatggatgtttctagaaaaaataatgcca

SEQ ID NO: 6333 - DNA, 1400 bp, Rattus norvegicus
gccatccaggaccatacagaccatctgcctgcccccgaggtttggtgatgctccgtttggttcagactgtgagatcactggcttcggacaagagagtgccactgactatttctatccgaagracctgaaaatgtcagttgtaaagattatttctcacgaacagtgcaagcagccycactactatggctctgaaattaattataaaatgctgtgtgctgctgacccagagtggaaaacagattcctgctcgggagattcaggaggacctcttatctgtaacatcgatggycgcccaactctgagcgggattgtgagctggggcagtggatgtgcagagaaaaacaagcctggtgtctacacgagggtctcatacttcctgaactggattcagtcccacattggagaagagaatggcctagccttctgatggtccccaggcarctgggggaagaaacggatgggtcgccactcccacgctgaccgwcctctgcagcagggtcatctccatcatgtggagggaagagctgaagaaaacaggctctgcactgattctttgcttgtgctgtccaccagggtgaaccccaatagtattaccctcagacacaggtctgggtgctggccatccasacsaksctgaccaggatggaaatcaatcctgactcaagatgaatagatggggagttgtctttttatggactaaagccatctgcagtttaaaaacccaagtgtaggaggagagttggttcccctaatgggtcattcatgaggtctgctgttgggaaataaatgatttcccaattaggaagtgtaacagctgaggtattctgagggtgcttgtccaatatgagcacagtagtgtgaagagtagagacaytaatggcttgagggaacagttcttgcatcccatgagtggatcaggaaatattgtgtgcgtgtgcatgtgcatgtgtgtatgtgtgcgtgtgtgtgygtgtgtgtgtgtgtgcgtgtgtgtgtttgctcactgtgcacaggttgtgagtataaatctgagcaaagctggtgtattcctgtatctaactgcaagtctaggtatttccctccctccagactgtgatgcggsscatttggtcttccgtratrctccacttgaatgtattattcccggcatgacccgtgaccagcagctaatgtctgcttcactttttatataratgtccccttcctggccagttaccatttttttttttttttttactaattagcctagttcatccaatcctcactgggtggggtaagggccactcatatacttaatatttaataattatgttctgccttttttatttawatctatttttataattctatgtaaaggtgatcaataaaatgtgattttttctgaaraaaaaaaaaaaaaa

SEQ ID NO: 6334 - DNA, 600 bp, Rattus norvegicus
tgatggctgcctcaccagggagtctgyacagtccccagcaactagcagaagaagcaactcgaaagcgggagctgaggctgatgaaaaacagggaagctgcccgggagtgtcgcaggaagaagaaagaatatgtcaaatgtcttgaaaatcgtgtggctgtgcttgaaartcaaaacaagaccctcattgaggaactcaaggccctcaaagacctttattgccataaagcagagtaactgtgtttgacttggacctggttgactgtgaactctaatcggggcaggcgatgcagcatcctcgtaatggccatatggacttgtagatgggtctcttaacccttgcttaagaatacagtctgctgtagrgtgtgaattgggaaywctgttccacgggtcggaatgcagctctcctcccattaccaagcttgctctattgccaatagcatgcaacatacgttttgtttgcccttctgcttctacttttttcagggaagctgctaaagaatgtcgacgtcgaaagaaagagtatgtgaagtgtctggagagccgagtcgcagtgctggaagttcagaacaagaagcttatagaggagcttgaaacc

SEQ ID NO: 6335 - DNA, 1400 bp, Rattus norvegicus
  misc_feature (1093)..(1093): n is a, c, g, or t
  misc_feature (1390)..(1390): n is a, c, g, or t
crcaccgcagtctycggcctcaagcgacccaggctatcttccagtcccgggactccgggtactgcggtycccagaaccgcccgtccagggaccaacccaagytccgcaggccgcggcggccgccaatgggggtggarggctgcaycaaatgcatcaaatacctgctcttcgtcttcaatttcgtcttctkgstggctggrggtgtgatcctaggtgtrgctctgtggttgcgccatgatccacaraccaccaccttgctctacctggaactgggagacaaaccagcacctagcaccttctatgtgggcatctacattctcattgctgtgggagctgtgatgatgtttgtaggcttcctggggtgctatggggccatccaggagtcccagtgcctgctggggacgttcttcacttgccttgtgatcctgtttgcctgtraggtagctgcgggcatctggggctttgtaaacaaagaccagatcgccaaggatgtgaagcagttctacgaccaggcccttcagcaggctgtgatggatgatgatgcyaacaatgccaaggcagtggtgaagaccttccaygagaykstcaactgdtgwggctccaatamgskgacsasactgaccaccrcsgtgytgaggaacagsytgtgtccctcaagcagcaactcattcactcagcttctgaaggaagactgscatcagaaaatcgatgagctcttttctgggaagctgtacctyatyggrattgcagccattgyrskagstgtcattatgatcttcragatgattctragcatggwgctgwgctgwggcathcggaacagctycgtgwactraggmcmttcgctthgcaccagakrgtccctgkaatgaccagmggscaccttgggggscatggcctgwgkatatactawttctgdattactctgcyamamwwarmmwwwwwamwwdwrarwmwwwwhwgbtctgaacttttyctgtcacmttttggrgcsgacaccacacataggtggmgtatgwggsgacgtagaggtggagstgsscmtarctkscarsgscmtrkacttytkggacccsykgrgagkthtgsctgntgagccaaacctyctycatagmtayttgtccagaggccacatagccaagmtagaaggccatgtccacccactbtgcccactgtgkktcacatcgctccyatctttttaatcmktgtccctttcctgcctccatttcaaragctgggtttgwaagcacthttawgccttcaatgcacttattctttytaamgtgtmaccttcaactgtaattaaatcttgaaacagtcatttaawaaarrarraaaaaawmarrmawrhwwwwrrrraaaaaaaaaaaaaaaaaaaaaaaaaaaaaanaaaaaaaaaa

SEQ ID NO: 6336 - DNA, 600 bp, Rattus norvegicus
ccgatctggatgacaaaaccgagacatcagcgcgtcctggcctcctggctatgcccagagagaagcctgcgcgcagggtcagcgacagcttcttccggcccagcgtcatggagcccatcctgggccgcacgcagtacagccagctgcgcaagaagagctgagtagcctgcgcccctaaccgccctggcgccaccctcaccggaagtcgcttctctccccaaggaaacagaaaccacacttccaagtgggccactccttcaggttggcctcttgggagcccgagtcacaaccccacgatgttctcgagacccacatcatttctaaggcatccttggggcttgaccatcacagtcaggttttaaggggcaccgagcggctgtcgactctttcctctctcgtgggctgaatctctcatggcttttttttttttttttttttaactataaaagcaattgcttaattggatttctcacttctttaacaaaacttggcctgactagttctaaaaatgtagatcccttctctgtcgacacgtatttattgccaaaaagtagtgcgtcagttgactgttttctctttcttttctcttgtttttctcct

SEQ ID NO: 6337 - DNA, 600 bp, Rattus norvegicus
catctcctactacgagctgaaccagcgagttggggagacattccacgcttcacagccgtccatgacagtagatggcttcactgatccctccaattcagagcgcttctgtctgggcctgctgtccaatgttaaccggaatgcagccgtggagcttacaaggcggcacattgggaggggtgtgcggctctactacattggaggggaggtctttgcagagtgcctcagtgacagtgctattttcgtccagtctcccaactgcaaccagcgctatggctggcaccctgccactgtctgcaagatacccccaggctgcaacctgaagatcttcaacaaccaggaatttgctgccctcctagctcagtctgtcaaccagggctttgaggctgtctaccagttgactcgcatgtgcaccatccgcatgagcttcgtcaaaggctggggagccgagtacaggagacagacagtgaccagcaccccctgctggatcgagctacacctgaatgggcccttgcagtggcttgacaaggtcctcacccagatgggttcccccagcatccgctgttccagcgtgtcttagagacactgggagtaaagggatcg

SEQ ID NO: 6338 - DNA, 600 bp, Rattus norvegicus
tcttcgcctcctacccctgagggttagtgccaagggtggtccaacggagctgagcctaaccaagagtgcctgggaggccagttcactgmgtagctcccggcacagtggcttcagccacttgtgaatgtgcccamagctaggccaaaccattctgggctcragggttcaagggcatagagtctcaaactcagtgtgcctagggtgctgcatcctgtgggtccgcaacactgtcacagcactggggggaaagaggcaccaccggggacgagtacagttcgaacgttggtcacgagatggcacagatacaggggatgctccaaacaccagaggtggkattccccaggccggaagcttgaagagcatgcgcacaatgctgcaaccttagttctaagattggggatctccgcaagtagagcaaagttctggattcacgtcccacctctgtcgccacagtagactcttgcaactgttctgttcattttggtctctgamtsycccwasrrkctyaacaccttgtasscmcwcwrctttaamacccagggtccccaatacatctgtggtgctgccaacaggcggtaacggcacatcaccagcgctgcc

SEQ ID NO: 6339 - DNA, 600 bp, Rattus norvegicus
ttgaagcaggagaccgcctcagcatatggtgctcctcaggagtccatggaggctgtaggctgttccttcagccctgggacccctattctgcctgacgtgaggaccctatcctcctcagaggaggccccrggcctcctgggcctcccctccacggcggcagaggtggaggccccaagagaccatctggctgccacgagggcttgttctgcctgctctgggacctcaggagacaattctgccatcatctctrctccaggcaggtgggggtcaggcggagaccctgcctgatcctttttcccttcacccttgggtcctccctcctccccacacttcccactcaccacagaccgcctcagcgactcctggccctcctgagaaaaaagaaaacagaaaagtggggtttttttctcttttcttttttttaaccctttcccctctgcccttgtccacagggcctttttgttgaggtggggtatggggagccaggaactgaagtccccaaaaaaagggattttattttttgaattttaattgtaaagtttttagaaaaagaacaaaaaaaaaaaaaaaargaatkmaacacatcagctgtagatgctc

SEQ ID NO: 6340 - DNA, 1400 bp, Rattus norvegicus
  misc_feature (734)..(734): n is a, c, g, or t
gctgctacagatctaccgaggtggccacactgatttgcctgctcgyctcargcgtgtgggttgwatgcggtggccccttgttttccatctttgtggccttttttgctaggagacgtctaagagtataacaactgtgcatgcctttcctttgtaaatgtgctgscaaatccctgcttgctgtcattgtcactgtatcgatggtaactgcatagcggcccttgctgtgttctttttctaagacttgcattctgggactctgttccaccttgtcacgtgtacagactttaatctgttacagctggcagcagtattaacgcggkgagtaaagagcccaggattgctcctgtttgkaamcgatccyttctggaarccctgccytytgkttcwtttwgmccctgctgagwgkwmtttavcctttgagagwgggtttaggtagaaaagkgtyttwraaagycyasttycytgmwgtwayaswgrywtmawakcyarggcygrgggcttwakgtcmagkctgtscaagkmatacaagtgtccgatktgtacaghttgcytgcgytgagagcttcagtcctcttgtacaramtgydtcaaakgwmattaaacactgmgkggrccastgarrramrrmgaaamararratgcattttgagcatttcagatcagtagtttgatcagwgscttttgaggtccagtctttgtggawtggatccgktcatckwkkgatgktacctycnaskcatttgmamraaggktkgtggkyaraacygstttkggaarswarccacsgkgrkcardgscttcattggsagctttwaccayttttaadtykwamgwgkstttgsrraawcattattatkcmgvcmgkawdactkktatyttwcmmatatttccatwgggcyaaraargkdtymyttgaargaaaaswrttgdwtthwatcagvgrtkgvstmaatycccrcagkgkrggggttaataagksttacyswcaawwwatwgktcckttgkkgtattctgkaawawaaraacatctgggaatkcgaacyagtggaataygttttcawaattkttcwatactttgggtttaataaaatggtgttgataatctaaawwaawarawmawmmaaatttaattttacttcagaatgcattttgtattttcatttgaatgtctattttttaaasctttctgttaattaaaaatagaagtccttcmswwmwwmrcmkmwmavhaaaaaaaaamwmramrrggggggccggtacccaattcgacctatagtgagtcgtattacaattcactgggcgtcgctttaaacgtcgtgactgggaaaacctggcgttaccaacttaatcgcctgtgagcaatccctttcgcagttgggtataagaagaggcgacgatgc

SEQ ID NO: 6341 - DNA, 600 bp, Rattus norvegicus
accacagaatgtaaaggggaaatcttaccaaatrggttttaccatcttctctctctttctgagagacgttgtctaggatccaccttgaacttcgctactacctcagccgccgggatatcaggccacccgtgcttgactgccctgggaggagctgcgttcccaccaccaccctgcttattatgtttgtgctggatgcttagggctaagaaagcacccttacctacctcycttcctactgctttcctgaccccatgaatgacttttgtctccacaaatcactctgtctccaggttctgtgttcccagtctctgtgtctctggttagttggaaagcaggaaacccggcgggggaggcgggggagggggggaacgaccaagtttgaggttttgtccctggctcctcactacagctctctaaacatcatcttggaccatctctcacaataggcacaaaacagctctaatctacctcactcttaggacttcaaggtttgggagaaattccagggttcctgggaagaagtcaaaccattggaatgggtcccttttccacttaaaatcaaattaataaatattattgaatgtgaaaaaaaaaaaaacc

SEQ ID NO: 6342 - DNA, 600 bp, Rattus norvegicus
ttaggcgctccgagcaacgcctcatgcatgcagcgctcggtagccgcaggtgcggccactgccgcgrcctcctaccctatgtcctatggccagggcrgaagctatggccagggctaccccgcgccttcctcttcttactttggcggtgtagactgcagctcctaccttgcgcccatgcactctcatcaccacccgcaccagcttagccccatggcaccctcctccatggctggccaccaccaccaccacccgcacgcgcaccacccactgagccaatcttcaggccaccaccaccaccaccatcaccaccaccaccaccaaggttatggaggctctgggctcgccttcaactctgccgactgcttggattacaaggagcccgccgccgccgctgcttcctctgcctggaaactcaacttcaactctcccgactgtctggactataaggaccaagcctcatggcggttccaggtcttgtgagcccaggagggaaaggaagtggagaagaaacgcaactaccttcgccctccgtggtccctatcatgttgctgctgctgctgctgctgctgctgctgctgctgctgctgctgctgctgctgc

SEQ ID NO: 6343 - DNA, 1400 bp, Rattus norvegicus
tcatatctaccggccaagccacgggcaccgctggcctgtgtacctacctacaatgaaaacatggctggctctcgccggggcccatcctttctgacttgaatgtcrtwygkcmcsacagaaacttatttcattctaataaaagcttaagcttactgttttcttggtacccaaacactaargaatcttagtrgggatctcagtgccaggatacttgagtccaggtatgsttgaggtasccaagtgagtggccaacagagaatacatgasccatggaactgcwmcagaagtcaaagtcagcggtgaatgtmkgyyryrtgygkttwttttatggagttcaaaccgtcstgtmtgtttggcctcctcgtgagaagattgtacgtgaggytcctggggggagagtgaacggtccattccttcagctcattttggtgtgtggaatgcttttattgacacagtggtacaggtgaaatgtgcaccagtccaatgtggttaggatgaaaattttaaggcaaaaaraaaaaaaaawmasctsgtkyysacctcccttactctagcccagtctggccgtatccgctgctccattgaactggaagaatatggtgtggccaagggtcttgggacatggtgaccaaggagccttcctggaccatcctgttacatgtgctgaatggctagcaaaaaaagcccaggagagatgaaaagaccacgtccaaaaaatgttctcagggcgctggcgtgtccagcagggtcaggaagcaagatttaggaagagacatcatgcaaactaatttattgacaagtgttacctttgcgttccttgacaagctttgcgttggactatttcccattkgaaagttataatatatcttgtattaaggtattactgcttgttgtgcctgcagcttcgatgggttaaggtcacagagggtcatgatactaatgagggctggtttattagcaaacctgagcagtwaagtgstttctccagsacaatttttttacttctactgaacacggagccattattaaaagagttatgtgtggattttcattatgtaaattgtatatatttttttgcttgttcgaggttctatttttctaatagtcttcttacagtttcttacaatgacattagattaagtccgatactaactgtaaatcaagctggtctctgttggattcccgtggattaattctatttattttaaggccaagtgcaggtgtcgtccatcacccttttaagaaatgtgaaacttgtgtctcccctcktggctgaatacattgtacactggcaaaccccctcccgtccctgtgtgtcagagctattttgtggtacattgtgtcatgcttctgcagatgctaataaatcctgtctggcttccaaaaaaaaaaaaaaaaaa

SEQ ID NO: 6344 - DNA, 1400 bp, Rattus norvegicus
ccacctggaaagctttggtccgaacaccacttgttactttgggtgcaaaacaggatttacactcagaggagccaactctctccgctgcggggcttcaggacaatggacagcagtgacgcccgtgtgcagagccgtcaaatgctcagaattgcacatggacacagcagtcgcgatgaactgttccaacccctggggaaactttagctacggatcaacctgtgccttccactgtccagaggggcagtcactgaatggctctgccaggacaacctgcggagaggacggtcactggtcagatgctatgccaacctgccaagcagggacgctgacgatccaggaagctctgacttacttgggtggcgccttggcttctacttctggcctggcagtgggcgggacgctactggctctgctaagaaagcgtctcagaaagaaagatgatggaaaatgccccctgaaccctcacagccacctaggaacatatggagtcttcacgaacgctgcatatgacccaaccccttaagaggcctggctcccgatgtcaattggatctctcaggattccgcatgcagataacaagtttcctggtcgacttgactgtcactccccagcatttgctgcggttctttgtggtaaataattggacaggaaccaaacgaaaggacgatgtgctccgcccaccccttcctgctccgcccctcaccttcctcggscwsagccacagaaacaggagcaaatgtttctgctktggtctgtggcttgatgttactttgctgttactgaaaacccgagttagtccaaggcactggagcatctgcctcaccaggtgaccaggctgtggaaaaccggaagtctgtctgctttctcttgggattgaagaatggcgatgttggttgggcaggcagacctctcgtttaagggaacgctgcttwaagatctctgggtcttcgtgtttcttatctctgaggttgtttacacctctgctgctgagactttcagatggtactagggggacacagaagatckgtgaacagagcattggacaccacatctgactgcagactttycgtcacaaagcacccawwggccattgtttgactgtagagttyaactcccagctatcaagctcttcacgtttgttcagtgaggtctgtgtatctcactttgtcctaccaccaatgtggtcacagttayactcctccaaatgacagctggaccctcccagtgagcccacaaatatatgttgtatgtcgcctgtccacagagagaaaaatcagaggagcaggraaggtcctcytttcgktattttgkwcygcaggaaagracagttatgttttawacgtaacytaattcacatatttaataaayaagtcactgaaaawwaaaaaaaaaaaaaaaaa

SEQ ID NO: 6345 - DNA, 600 bp, Rattus norvegicus
cctgacagggacctctatccagaagcccgccggctggtacccgtctacctgctcaccatcactgctctggataggaaaggacagcctcatcttcagccggccaccttggacctctactgggccaccaatgcccactattttaagagtgtctagatctaacatcacgatcatctcgagactctgcaatgaatgaaagaagcttctatggcaggataaattctgtgtggcttgacccggacacaagcttaatatatttattgacttgactggggaagttagagtagagaaatcaaaaagtgaaagaattcattcagccttggaaagtcaatttgcaggctcctagatgagccccgcccctttcttatttaccggcatatttcagtcatgtgacctgtgatggccaaagacgttttgggtggagaagaaaggatagaaaaaccttctctttggctaagttggtgtttggggtggaggtaggttggagtatagtacttaactatttgaaaaataattaaaacacttttttttactcatgaaatgagccatttagctcctaaacagtgttttttagtttagaaggatgtggccatatttttaatg

SEQ ID NO: 6346 - DNA, 600 bp, Rattus norvegicus
tcctggagcgcatctccaccatgcsccttcsgratgatcggggtcctctggaacatctytactccctgcatatccccaactgtgacaagcatggcctgtacaacctcaaacagtgcaagatgtctctgaatggacagcktggggagtgctggtgtgtgaaccccaatacygggaagccaatccagggagckcccvccakcyggggagascccgrstgcsrtykctkytmcwrygmgcagcaggagaatgwtggggytcacgcccaaagggtgcagtaaaccacagccagtcggtgcstggcttccccaccccaaacaccagcagaaatggagggtstcagggygryrsgwgkrgaggatttcccagttttgacacatgtatttatattyggaaagagaccaacaytgagytcagaagcccccctgcgccccccagtggcagttaacctgtacctcygttcctgctthtaatagagagggtggtggcactggggatactggstacaggcttgrgaatggggaaagaaatttttmtttttgaacccctgtgtctcttttacttaagattaaaggarggaaamdkwwwwmaaaaaaaaaaaaa

SEQ ID NO: 6347 - DNA, 600 bp, Rattus norvegicus
atgaaaataacgagttacccaaagttcagtggtataagaactgtaaacctctgcctcttgacgatggaaacttctttggattcaagaataaactgatggtgatgaatgtggctgaagagcacagagggaactatacttgccgcacgtcctacacataccaggggaagcaatatcccgtcacacgagtaataacatttatcacaatagatgacagcaagagggacagacctgtgattatgagcccacggaatgagacgatggaagctgacccaggatccacgatacaactgatctgcaacgtcacgggccagttcaccgaccttgtctactggaagtggaatgggtcggaaattgaatgggacgatccaatcctagccgaagactatcagttgtgagtttgccaatcaattttgatgctacattctgtgacacacctgtgctcgttttgactctaagatggagagatgaaggttggctgctcctagccctttgctgcccactttgagctttgctaagtgatagacaattttgtgagaatttgtatttttggttttttttttttgttgttgttgttaaaaatacatgtcactgtacaaattc

SEQ ID NO: 6348 - DNA, 600 bp, Rattus norvegicus
ttcctcaaaagcctgcggaagccctttggtgactttatggagcctaagtttgagtttgctgtgaagttcaatgcactggaattagatgacagtgacttggccatatttatagctgtcattattctcagtggagaccgcccaggcttgctgaacgtgaagcccatcgaggacatccaagacaacstgctgcaggccctggaactccrgctgaagctgaaccacccggagtcctcccagctgttcgccaaggtgctccagaagatgacaracctcaggcagattgtcacagagcacgtgcagctactgcatgtgatcaagaagacggagacagatatgagccttcaccctytgctccaggagatctacaaggacttgtattagcagaaaagtcccagtcgctgacaaagtgttccttctatcgattgcactattattttgagggaaaaaaatctgacacytaagaaatttactgtgaaaaaagcatttaaaaacaaaaagttttagaacatgatctattttatgcatattgtttataaagatacatttacaatttacttttaatattaaaaattaccmcmctwwaaaaaaaaaaaaaaaaaa

SEQ ID NO: 6349 - DNA, 1313 bp, Rattus norvegicus; identical to SEQ ID NO: 2253

SEQ ID NO: 6350 - DNA, 600 bp, Rattus norvegicus
accacggtctgcaagatccccagcgggtgcagcttgaaaatcttcaacaaccaagagttcgctcagctactggcgcagtctgtgaaccatgggttcgagacagwgtatgaactcaccaaaatgtgcactattcgaatgagcttcgtgaagggctggggagcggagtaccaccggcaggatgtcactagcaccccctgctggattgagatacacctgcatggccctctccagtggctggataaagtccttacccagatgggttcgccccacaaccctatttcgtcggtgtcttaaaggccctcggcttctgtctcttgcaaactattgggccttgcagtacttgaaggacggagaagtcagacaggatggggagctgtaaaggagccgtgatacttgacctctgtgaccaaccgttggatggagaagctgacaggccttggtaacaagctgttgatatcaagaacccgcttagtttacattgtgacattctgttgtaaaatcaactaaaatgctgacttttagcaggactttgtgaatagttagaaaagagatggccaagccaggggcaaattatctattaggaaaaaaaaaaaaaaaaaa

SEQ ID NO: 6351 - DNA, 1400 bp, Rattus norvegicus
  misc_feature (730)..(731): n is a, c, g, or t
gttttgttcttggtctcccgcgtgggaagtgttcgtgagactctagtgcgcagctstggcttctgcttcttcccgcttccatccgggatgctctggcartgtcctgcagctcctggcasgwgrcaggaaccactggtcctgagagtgctgtcctcccccctctgtcataagaagcagagcctgctctctcagaaagggagactggaaasatggcccagagagcacaattctcccatttccagaaaatctgattttctcctcttggggaaaatattccatgcaccctccacacctgtcaaagatcagaaagccgcctctagccttggacagggtcttcactcctggagccggtcatggggacagcaaatatggcaggaggtacaggcaactcatctgggtatgagtcagacagaatggcgtggagacccacagatcactagaaggtttttagattttttaaggtaggttttaaaaatgaaaattttatacataaacagttttggaggaaaaaaaccacaaaaacactacgaatcatgtaagcaagacagtggcactaaaattttaattcattaatctgtccaatactgatgcgatttatggcttttttcttgccccaaatcacagacatttgtgtatctctggggaacttcggtattgattgcactaaatgatctcttgatagaggccaaattaatctttcaaacatggtgatgactctcagaattcccannacctaagctgacgcagaaggctggggcaaggcttgagtgggtcagcgtttccacagggttcaccatgcaggcaacattaccgtgtctctcagacgacgcctgccttctgcaaggggagacccagggacgctgaactcagagggtggggsctttcttacatcatttgcamcttcaaggatttatttataggcagatctttaracacagtcaacttacacgcacagcaatatgaaaaccatacttcgaaggcgataaacacatacagcatgcagacgaggtgtttctgggggaaaggggctgagttaacgctgtgaractggatttccatcttagccaggattgaggtggagaaggtctacattagtctttttgtattartgaagttactggctcctcatgtgtctccgggtaactctgcttaactaaacagcaaagccatattctctaaattcactgttgaatgcctgtcccgggccaaactgtctgctcttatttttgtaccatattgctcttaaaaatcttggtttggtacaattcataattcaccaaaactccttcaaataattataacactaaattagtttaaaatgaagcaatttatatctttatgcaaaaacatgtctgtctttgcaaaggattgtaaacagattacaataaatcctttacttt

SEQ ID NO: 6352 - DNA, 600 bp, Rattus norvegicus
mgaggatgactgaggagctgmctggagtgccctgggsccgcctgctgsccaccatcagmttccttcagcaccacgcctacttacgttcaatgcctgcctgcctgccacgctgscttactcacacgagtgtgtgstaatgaccaaagctgtctcgaatgaaagcrgwgttctgctgktctgtctgacagaccttcccacgtctctcagkctartatctctaagttgcgtyytctatcctcttctaragcttcatwyatattargttmataaccatattacctkgracggaaccttagccrtgaaattgtgaactcttggaagtgctgtcaakcaagcttagtgctctagctgayctgaaaaattmasatggtcgtaatatcagaaacgttgccgacaaataaacattctcgatcctccgaaaacagacgagcacactcgaggggggggccagggaccagttcgactataatgacgcgatgacagacacaggcggcgcacacaaagtggcgagtgaaaacccggcgtaccacttaacgcggcagaatcccttcgcgcagcgaaacaaagccgacagagcaccaaaggccactaggatgcatg

SEQ ID NO: 6353 - DNA, 600 bp, Rattus norvegicus
aacaagtgaaggctctgggacggggtgggggggagctgggagagggtggtgggatgagcacagaggctgggagccaagggwggaggaagagagrragagcasasasccatctccctccaccaagtgcaatagaagccacaagggtggatacatccagggtgttacaatatccatctagcctccaggggcgtgaggtgggagggccttttcgaatacagcaactggggaccatgaggggtgggacaggggtcagggaggggattgggaaaatcacagctttcaaaattcaagtccattgggttgaggggggcgggggggctcctgtttggaggtcaatgctgcctgccccaaaaacaggaaggcagtgtaatatatatataacatttaaccatgcttaacattaatgcaaaacccaccagaacaaaagatacgtctcttaaaccagcctagtaactgcttaaacttttaaagtccccaacgtgatggacaatacttcccagagtagaaatggacacgaataagcttgctgtggtctatgctcccatcacgctcttacaaacgccatgtctgtctttaaactgacccccgtggacacatgcc

SEQ ID NO: 6354 - DNA, 600 bp, Rattus norvegicus
tgatggagccacatgaatggccctggagctgtgtgccttgttcctgtggccaggagttrggtgactgaatcatttatgggckscwykrgkggacccataaaagctcttagcttcmtcagggggtcagcagagttswwgaatckkmaykwkktkttaatgtaccagttttgtataaataataataaagagctccttattttgtawwmdrhmhradrmwwmrwwwrktcyyrrmagcggacgtctgtgtaraagacggactctgaaagwsattscragtrmgrygrcggcggcggcggcggcgssackgrmgctcagtgattgtgyyagtattattgtggaaggtwgactyygctgttgtatgtaaagtttccagttgcgcctcttgtgacttttcagccagtaccattttatttacctgagcttgtcgtgggaagtggtagtaaaccgcattgagtgttgatgctggtgacttgtgatcagtgtcatcgtgctaagtccatgttttgtacaattactaaattgtatacattttgtyawaraawamwwwwwmmasttgagtaattmtgaaagsaagttaamawwraaaaaaaaaaaaaaaaa

SEQ ID NO: 6355 - DNA, 600 bp, Rattus norvegicus
caaataacaccatgagaacacgagttgttagtggttttgtttttcttcggcttatctgcccagctatcctgaatccacggatgtttaatatcatctcagattctccatctcctattgctgcaagaacactgacattagtggctaaatctgtgcagaatttagcaaatcttgtggaatttggagctaaggagccttatatggaaggtgtcaatccattcatcaaaagtaataaacatcgcatgatcatgtttttagatgaacttgggaatgtacctgagcttccggacactacagaacattytagaactgacctgtctcgtgacttagcagcattgcatgagatttgtgtagctcattcagatgaactgagaacactcagtaatgagcgtggtgtacagcagcatgtactgaaaaagcttctggcaataacagaactgcttcaacaaaagcaaaaccagtatacaaaaaccaatgatgtcaggtagcagcccggtgttctgcatggattcggcatgcccaacgtggtaattcacatcaccatgtctcctttgctcttgccaaaaagmmaaacaaaataataaagagaaaaaaaaaaaaaaa

SEQ ID NO: 6356 - DNA, 1400 bp, Rattus norvegicus
atgccagtagtgaggctattcagcttatgacagaaatgcttaactgggatccaaagaaacggccaactgcaagccaggcactgaagcacccatattttcaagtcggtcaggtattgggcccttctgcacaccatctggatgcaaaacagactttgcacaagcagctgcagcctccagagccaaagccatcttcctctgaacgggatcctaagcctttgccaaacatccttgatcagcctgccgggcagccccagccaaaacagggccaccaaccactgcaggccattcagccaccacagaacacagtggttcagccacctccaaagcagcagggtcaccataagcaaccacaaacgatgtttccaagtatcgtcaaaaccataccaacgaatccagtcagcacagtaggccataagggggcccggagacggtggggtcagacagtcttcaagtctggagacagctgtgacaacatcgaggactgcgacttgggagcctcccactccaagaagccgagcatggatgccttcaaggaaaaaaagaagaaggagtctccatttcggtttccagaagcaggactcccagtctccaaccacttgaagggggaaaatagaaatttacatgcatccttaaaatctgacacaaacttgtcaactgcttcaaccgctaagcagtactatttgaaacaatcaagataccttccgggtgtgaaccccaagaacgtgtctttggtagctggcggcaaggatataaattcacactcttggaataatcagctatttcctaagtctctgggatccatgggggcggacctcgctttcaagaggagtaacgcagcagggaaccttgggagctacagcgcttacagccagacgggatgcgtgccttcctttctcaagaaagaagtgggatcagctggccagaggatccacttggcgcctctgggtgcgtcggctgccgactatacytggagcacaaaaactggccgaggccagttttcaggacgaacttacaatcccacagccaaaaatctcaatattgtgaaccgcacacagccagtcccctcggtgcacgggaggacagactgggtggctaagtacggaggccaccggtaggagaagtggaagcctgaagcattgctccgtagaggacaatcacgccccttgatcctgggagacgtctacagagtctatttctaccgagttccacaggacgcacacaaccgtgggcgcctcagagmccggaagtcagctcccgatttcttccttttccggaaatgcaatgcattttcttaacttgtggccagcagtgctgatgcagcaccgtgctgaaacttttgagcgggacttttaaagagtattgaataaattatttgccaaagtaaaaaaaaaaaaaaaaaa

SEQ ID NO: 6357 - DNA, 1400 bp, Rattus norvegicus
actgtgtctctgaggtctcggtgcctgagatcctagaagaggacgaggagctggacagcacagagcgggcctgtgatactctgcttatgtgtattgtcaccgtcatgaaccacggactgaggaacggtggcggcgtgggcgacatcctccgcaagccctccaaagacgagtcgctcttcccagccagggtggtgtacgacctcctgttcttcttcattgtcatcattattgtcctgaacctcatctttggggtgatcatcgacaccttcgccgacctgcgcagcgagaagcagaagaaagaggaaatcctcaagaccacgtgcttcatctgtggtctggagagggacaagtttgacaacaagacagtgtcctttgaagagcacatcaaactggagcacaacatgtggaactacctgtacttcattgtgctggtccgtgtcaagaacaagacagactacacgggccccgagagctacgtggctcagatgatcaagaacaagaacctggactggttcccacggatgcgcgccatgtccttggtgagcggcgagggcgagggcgagcagaacgagatccgcatcctgcaggagaagcttggctccaccatgaagctggtctcgcacctcaccgcccagctcaatgagctcaaggaacagakgacggagcagcggaagcggaggcaacgtctgggcttcgtggacgtgcagaactgcatgagccgctgagcagagcggagcctcggaggcccccacgggaggccggcttgcccacagctgccgcccttccttcaggtcaggtagaagccaggtgcctgccccatcttcagctcagctgccaccctccctmcccaagccaggctctggccagcgggagtgccagagcagagcacggtcctgcttagtaagtacccttgaagagactcggtttacmttagtgccttaggggatgcaagtyctccagactgmtgtccwtcgaagcagtgactggcattyctcagtgsccytggcaggtggytaaaagtgggctgsctctcacctccaagcaytacattgtggctgtcccstgcctgccaccctggctaggaaggtggtagcctgctgytattagcttcctagggctttgmtatttaacttattctgggggcyatcccamcctcctgtggcctgctggggacagtgtggccccgtcscaggagcstcatgactcaggtggaccttgctcscaggactttctytaggctttgtaggcaagcctcacaagcccagcaacaggcctgggctgtgtgacagtggcttctctctwtttggtgtaatgttktacatgtcctgtgtcctggagamtaatgtgttaattgccttaaataaattaatagactccaarwmmaaaaaaaaaaaaaaaaa

SEQ ID NO: 6358 - DNA, 600 bp, Rattus norvegicus
  misc_feature (516)..(516): n is a, c, g, or t
taaggctgcacgcagccagcctcccgcagctccgctgggcccagccacggactgttcagaggacccgcccacaggcactggccacagcccacgcagctagagccactcacaacactccagacacggcccagactctcaccctctccgcccgccctcggcamccggttctccccagcacttcctgttcatgctswcwssccagcacccttgctcctccacctggccttctctagcatcctgcgcctccccgcctgtccccacatctgtctgattcacgccagtgagcccattagtccgctcaccagcagcctagaagcagtgaggcctgcactggcccggccctgcctgtctctgtcccctcttcaaggacatgagccatccaaagaaacactatgttctctctgagtccgactttccaagaaacttgcctggactgactgccatcccaggctgtctgaaccctaggcaccccwcgtsycactctgacactctcctttcttcctgcctgtgttctangccattgtcactgatggcccttgtgctgccctggagttgtcccctccgcaggggtccaacagccccactgaagggaaggggtgt

SEQ ID NO: 6359 - DNA, 1400 bp, Rattus norvegicus
tgcccagattctcatccaccgcctgctgcgtctggttgcgatgccggagttcctaactgttgtttcttggccgttcctgatcctcctgtccttccaggttcgcgtagtcgctggagccccccagccatggcactgtgctccctgcactgctgagaggctggagctctgtccacccgtgcctgcttcgtgccccgagatttctcggcctgcgggctgtggctgctgcccgacatgtgccttgccactgggtgctgcctgtggtgtggccactgcgcgctgcgctcagggactcagctgccgtgcgctgccaggggagcctcgacctctgcatgccctcacccgtggccagggagcctgtgtactagaacctgccgcacccgccacgagcagcttgtccggttctcagcatgaagaggcaaaggctgctgtggcctctgaggatgagcttgccgagagcccagagatgacagaggaacagctgctggatagcttccacctcatggccccatcccgtgaggaccagcccatcctgtggaatgccattagcacctacagcagcatgcgggcccgggagatcactgacctcaagaaatggaaggagccctgccaacgggaactctataaagtgttagagagattasstgccgctcaacagaaagcaggagatgagatctacaaattttatctgccamactgmrrcaagaatggattttatcacagcaaacagtgcgagacatctctggatggagaagctgggctctgctggtgtgtctacccatggagtgggaagaagatccctggatctctggagaccagaggggaccccaactgccaccagtattttaatgtgcaaaactgaaagttgtttcctccctccttcttcacacaaaatatttaagtatatagtgtatttatactccggagcacaccattttatatatgtgtatatgtatatatccaggaactagtttttatactccacatgctgcttgatgtacaagtgggtttgtatttattcactcyaagtttatttttttctaccctgtccttgtgcygtattaatttatataactgaagcttttctcatctccatacatgtaaatactamcatctcagctcttccagagttctgctttgaaagggcagcgcggtagtgcctagaacgagcacaagtcagtctgaggtaggggcctttcagtgggttcagggaggaaggttagccctggctcggggagacttcctcatcgaatcccacaggtctgtgtctgatgcctattggctgggaaggttccgatgttggttgtgtaatcaaagctaaacgtggaaagctgcgtcccatgcactgttaaacacacgtctggaataaaacattctacctggaaaaaaaaaaaaaaaaaaaa

SEQ ID NO: 6360 - DNA, 600 bp, Rattus norvegicus
ctgaccaaagytgttctgtatcgtgwctttaatagaaggacctttcgagaaggcgaaagatggtcctggagtgtgagarggagggttgatgttkaagctgkrgctctagkgtactgatgatttctgtgymagtgtamrtrtgsaamtgtmagatgtattyataacttctrakttcccacgttawgkktawgwwgwawgagyggcracttatggkcctagtgcgawrrctttgggaaaacataactsktaagkaccttgwacggmaygacagattggktstgwgtttgssagytttgatcagcwytatttatgttbktasmcctraatyttargcaccataaytwacattaggaaatgtcaacccccttaccctgattctatgtttacttatactcataaaatgttatttgtataaacgttgcacagactattttagtaccatgatttgtmtamagkyttktgwttcatrgggarmtmktwcwgaggttgcwkyacytymtktsrawmagwcwtttwwgcattgagagyattmggatttatttacagagtgcatgacgtgccgattctactttacatttgttttaaaaaactaaaattcca

SEQ ID NO: 6361 - DNA, 600 bp, Rattus norvegicus
actctgcacaagactcatacactcttctcacttcttggcctccatcttgcctatgtgaccagcatggggaagctcagaggtgtcttggcactagaagagctacagaaagctatcaagggccacaccaaatctggagtgcagcttcgccctccacttgccagcttccggaatacaacttcaattcggaagacccctggggggccaccccctcctgcagagagctggaatgtgcctgagggtgaagatggagctcctgaaagagaagtcatggttcctaccatgccagagactcctgtcccaccaccatctccagaggtcccttcctgcctggccccagccagagtggagggtgagctggaggaactggagatggtggggaacctagggcctgaggaggacctggctgacatcttgcatggccccagtctgcggtccactgatgaggaagatgaggacgagctgatcctgtgaacaacaccctccaagctttcttcataaaaaccacagggcccatgtcagagagtgggcttgtatatgaaatgggtgccctgaagttggggagacctccatttcatcgttgttcctaccccactatgaaag

SEQ ID NO: 6362 - DNA, 600 bp, Rattus norvegicus
cagctcacttcagttctgtgcccgtgtgctggaaggtgtctcctataggctctggtagcttgtgtccccagtctgggcactcttcctcacactgtaccagcagccacaggcctggcccacaacgtgcccatttctcctccaactccactccagcgggaccatgagaagtttgatcagaacgaacaggaggaaggaagagagacaataaggcaggcagagagaggcagaaagaacaaggctgaaagccagtgggatcacatacctggaaccctcacaccaaggagacttaggcaggtagaacaggaatttggagccatcctgggctacatagtaagttcataaatcagtctgagctgtctgacacagacttagcaacagcaatgcactagagaggctatttgaaaagcagagaccataagggcaaacttccataacagcctcacttcacagttctgctctgtggtcctgcagtgtatggcccaattctgggtccttctgaatatctgatcacaagattctgtccccaaacatatcaaagcaccatcccatttgtgataacagtgattcctgtctttaccatttgttcattgtgaacccaaa

SEQ ID NO: 6363 - DNA, 600 bp, Rattus norvegicus
tttggaaactcttaaaaagtacacagcaacaattgtcagtatgctgcataaaaattcaaaatctgatgggttgaaagatgatggatttctttctagtatgttgcaaagaagggacaaggaacgatggtatctatattttgatcacaactctatgagtagggctctgtgtgtagaaggaactgaggtttaacaagattacttgtgtccaagtgatgatagaactttcttggttgctgtgtttcgttttgagacagggtcccactttgaatcgctgactggcccggaactctctgtgtagatgagtcaggctgctcttgaactcacagagctcctcctgcctctgcgccaccatgtccacctattagaaccttattgaggtagcaggtgtggagagttgaggtcatcagtgtctctagtccaagtgtaaggtgttatcagtgtgtagcagggtgggaaggagctcctgacttcgttacctgtgccgtggagtgtgacttagtcaggtgactcatattacaacactcaagctgcacacacatttggagggtaattgcccacagccagactaaagttgaattgtttattgttttttctgcctct

SEQ ID NO: 6364 - DNA, 1400 bp, Rattus norvegicus
garaggaggagcagacattygagatcgaamagtacatagtccataaggaatttgatgacgacacttatgacaatswcmtygyawwactgcagctgaggtcagattccagtcagtgtgsccaggagagcagytctgtcggcactgcctgsctccctgamcccgacgtacagctycctgactkgacagagtgtgagctttctggctacggcaagcatsmkkcatyhhstsctttcttctctgaccggctgmasgaggstcacgtcagactgtatccgyccagccgctgtacctcacagcatctgtttaacamaaccatcacgagcamcatgctgtgtgcmggagacasccgaactgggggcaaccmasacgtccatgacgcgtsccasggwgamkcaggaggccctctggtgtgcatgatcgataagcggatgactttactgggcatcatcagctggggcctcggctgtgggcagaaggacgtgccagggatatacacaaaggtcactaattacctgaactggatccaagacaacatgaagcaatgacaaagaaagcccagctccttaaacccagaggacctgccttcctcttcctcttccacagaagatacgcctgaaaggccaagcgttcttcgcaggcwcgwsstcctgagctgccgctcagcagagggagtgacagtctttakgcacagacagmgtttactttgtgacaggtacttcacaaacttgtacgttttaagggtgaaggtctgactttagaatcagttctgtcagatgagmkgacagggaaatgccaaccttcctatractctargwttttaaaaagagaagtmgaccaaagtccacccttcctggaccactattttgtacaytgamccacaagatcgtgtctcaacagtgaaatwcmacttgatctttcaggagtaaaagtmtgcmctgaggacamgaatgtgtttywmtagttacacaggggcccagcatggcctccaaragaaggaaggggttasctgatcagaccacagccccctaaarcccttgaaatcaaatattccccatcctcccmcaatcctcaactcttggsscataycccyttgtacacagygtagaygtyytyttyttthtaaactttccagayggctgggmgaactgtatgatyyyaatattcgatgaaatgacrctagtatatttawatttgaatctatttagtttttmctgtgytactagaactctgtattatgctgtactsaaataataaattccaaggtatttttcmcmmwwwwwmamwrrwrmawawmwawwmaaykyctktkcyktttttctttgagtcaattgaaagacttcctttcatttagtcagcatgtggaaattctgcgtacccccaaggcaatatgctgggtgcca

SEQ ID NO: 6365 - DNA, 1271 bp, Rattus norvegicus; identical to SEQ ID NO: 2269

SEQ ID NO: 6366 - DNA, 600 bp, Rattus norvegicus
tacacccataacaccctactccggaatggtaacagagccagcagcwsrmgkttctttttcttcctcccatctggaagaacwtcaagatatcttttcgtggatcaagcttgtgtacttgatcatttttatattacttttgtaaatattcttggccacgttctacttcagctttggatgtggttaccaagtatctgtaacccttgaatccctagacagtattgccatctctggccaaatatgcactttccmtagaaagccatattccagcaatgaaccttgtgctatagtgactcccacctgtacatatactgtataggccacctgtacatatcccagaraacaatcactattcttaagcactttgaagatatttctatgtaaattattgtaaactttttcaatggttgggacaatggcaataggataaaacgggttactaagatgaaattgccaaaaataaatttgtaactaattttgtacggatgaatgaaacctttgacctctgtagaggtttgcaaagactgaattcaaactactgtacattttttttcaagtgctaaaaaaaaattaaaccaagcagcttaaaaaaaaaaaaaaaaa

SEQ ID NO: 6367 - DNA, 600 bp, Rattus norvegicus
acctgaggggtcaaacgtgcactcgacgggtgcctgtctcctttcgatccctcgggtcctggaaagttatgaagtcccgagacacaatggcacatcgggaaatagcaacttcatcactaaaccgaactttccattgaagaataggatctgaccatttcagtgcagcagttctaaagctttaacgggagggagggcccaacggtgcctgtgtgttttgttttgtgtacatgtgttgatgggagctgcgatggtgtggtcacttttcgtggaacacacaatatagaaaagttgctttatgttgacttcttttggagagcccagcactaatgtaaatactccctcctgctcttccttcctcttcctcttctcttcctccttactcctcccctggtccacccacctgcacccatctacttttcttcttcctttctgttctcacaaggtcatcctaggcatcatgtatggctggctcctttctcaacctctgtttgcctaactggttctttggatttcatcacttactgatcagttttttaaaactctgggctgacaatgaggactccatgtttttagaaggaaaccccctttccactgaagctt

SEQ ID NO: 6368 - DNA, 600 bp, Rattus norvegicus
tattactgacactattctgtagtgcccatagcctagtgcagaagtgacttaggacattgtggctgttcccgtttgacttcattattgccttcctcatccagcactgaaattatcaaccacacgcctttcacctttcggagctgccgatcgttcagcactgaaaagtcccccccccccactcctttccattggagactgtggaaagtcctcttccctcctgcctmtcctccctcmccagaccacatcwtaaaaggataagtgacttrgtgycctcctggacttcttgaggtagktgaacaggtgtggtttatgggaagcttcttcatttattggctcccatgabtaatctaccccatakccamccttgtgcaaaaagsccagggtatgaagatagggatgagcgtaccctctcttggttgtcatcttggacctaaccatactccagtgatgtagtagctgggactcattgtggcaggtgggatggccatgacacttcatgactcctcgtttggtgccattgttaaagtacgacactaatgsccscctgttgattttttgatgaaaagwtaaargwtgaaggsctaaaaaaaaaaaaaaaaa

SEQ ID NO: 6369 - DNA, 1226 bp, Rattus norvegicus; identical to SEQ ID NO: 2273

SEQ ID NO: 6370 - DNA, 600 bp, Rattus norvegicus
gctcacagaccccagaatttatgaaaggcaagagacttagtgttaaaaaagaaacctctccccacctcaagtgaaaatccttcggcttggggcttttattataactattattgtatctgaaccgmkrgtggcttagctctagaaccctaattttgtttttagtttggttggttttttataacatattaacttttgctatgatcacgtgaccctttcctgtcagttgcaaacgaagttcattcctgtctaaatcaaagtgggaacgtttaatcctaagagtatttaatgtacttttgtaaatagtcttagtactttcgtttttatgtaaacctaaargacatattttaaatgtggmattaagcattgtatataaaatgtgtgagagtctgatattgtwatattaaaatattaatacgtttcwamamrwaaaaacaaaaaaaaaaaaatgggagcggccgcaagcttattccctttactgagggttaattttaccttggcactggccgtcgttttacaacgtcgtgactgggaaaaccctggcgttacccaacttaatcgccttgcagcacatccccctttcgccagctggcgtaatagcga

SEQ ID NO: 6371 - DNA, 600 bp, Rattus norvegicus
gtacttacagtccagcccagagctgmtggcagtcatgcccaggggtctgcyttgtgcgtgctagcaaggctgtgctgcagakctcacttcytgccccagarttckgcwskagtatgttcgtttacagtgatagacggttccaytgtgtacgrcggtctctgactctatgcstacagtatttacagtgtcaaagattaaaagtgtcgcctgtcmawwwrrmmrwmahwrrraaacartgcttccaacagtgctctgtacgtaacctgtaagcatttcaacccygccacgccagtgtggcctggcgttacgttggcgagccatcttgtacgttctcacttggtcctcgttcttctgcgacctgaaatagttgttccctctgctctgggagctggyggctggggaacagcagcagcttgtcttgtaaggtcctgccaggagggcaacaagtgactayaaggaggctgttagtgagcctctgacagcttgtgaacttgctgtaattaaaacaaaaacttccctgttwaaaaaaaaaaaaaaaaaaaaaaaaaaaaaaaaaaaaaaaaaaaaaaaaaaaaaaaaaaaaaaaaaaaaaaaaaaaaa

SEQ ID NO: 6372 - DNA, 600 bp, Rattus norvegicus
tctgctctagggaatcgggatgttgttaaaggcaacagcatttttcttcagtttaccaagccaaagtcccctggaattgkatsttgaactgcctggaattaaggmcaatckgywckkttgcaaacagtcttttcmcctcgatcagcatcatgagtcattacagataatgtaattagtttytgggccagcaactagctatctcaggtccctcararatgctggactcaaaggcagaggtcagaattggttctctcatgtattccctsgggccccctccttctgccttccttcttggccgtatttccccttggacatttggctaracaccttccgggtcagggkscmttctctggatyctggaycccacacagcmtggggcatcagacatcgtttycctcctrccctagaccccgkgcctccccgggtsttcctsgaagcaggtgmtacatgcaggagttatccggggagcctcccatgtytsacatgatgactcggccccaratgcacagactgaagtatacagacaaatacaaatattactctcagaatctttgtataaataaatatttttggggaawmwwrraaaaaaaaaaaaaaaaa

SEQ ID NO: 6373 - DNA, 600 bp, Rattus norvegicus
ctagaggcagaacaagcagtaccaatgaagatgaggatctgaatccagaacagaaaatcgaaagggagaaggaaaggcggatggctaacaatgccagagagcgcttgcgtgtgcgggatatcaatgaggcattcaaggagctcggccgaatgtgtcagcttcatttgaagagtgagaaaccacagacaaaacttctcattcttcatcaagccgtggcagtcatccttagtctagaacagcaagtcagagagaggaacctcaaccccaaagcagcctgccttaagagaagagaagaagaaaaggtctctgctgcgtcagcagagccgcccaccacgttgccaggaacccatcctgggcttagtgagacaaccaaccctatgggtcatctgtaaacatcagccagttccagagtcatcagtaggctagatagaaggtgacctctcctcataaagatttggagaactcagattatctgaagacacaaacctggcaggagggagaagaaaaagcaaaacacttgaaacaagaaactcatatgtaatcctatgatcaaagcaactggtcaacacttccatcagaagtgaggataggaagctgcgg

SEQ ID NO: 6374 - DNA, 1400 bp, Rattus norvegicus
tgagcgtgtgggagccttcactgtggtstgcaaagatgcagaagaagccaaaagggtggagtcacagctgaagatcctgatccgccccttgtattccaacccgcctctcaatggagcccgratcgccgcaaccatyctgayktctssagackkscggaagcaatggttgcaggaggtgaaaggcatggctgaccgcatcatcagcatgaggacccagttggtctccaacctgaagaaagagggctcgtcccacaactggcagcacatcaccgaccagatcggcatgttctgcttcaccggcctaaagcctgagcaggtggagcggctgaccaaggagktctyagkctacatgacaaaggatggtcgratctctgkggccggggtcacctctggcaatgtgggctamctggcccacgccattcaccaggtcaccaagtaatcaccaggtgcaaggaaacagagatcacwkkccyttcagcctttgctctcatgagagtcacgtgcarggtgargsaggrdkratggwskwgrgtaratcctgttttcaaccamsgtgcataactcctgtcgattgaacgcgttcctcggaaaagaggtagggcagaggcwcmsrcggctgatatctggaacttcgtcggctctaaaccaaactstcmctcatccktttktctccagcttttctkraagtttacacatgcaaaaaaatcacagcmccaaaacctgtcagcatggsataggcacargkcagaagctttacytgaagcctcaggkggtgtcaggggttcccctgtggaccccggtagagcctctcatattagaggctgtaagagaagaataactagttctgtcattaacagttgtsgagtgtgtcctcgtggtgtggagcaactgtgtcascagaccacattatgraaatkatgctktacaamaaccaacagkgacagtagaagatgtaatgkcwygwsrtggctgttctgtarcytggagtttcatcccattytactgctcggttgaccatcaacmtmatccttaggagtgatstaagawtaargaatgtagttkwtctgttmawrmmrwaammwwmwrwctcagcaaagarccggggagagtgggaccstgcccttgatttcagagtcctcttcagtgattgattggctcmkacgggggtggggcctctgcccagytggacgtcmtcattcatcctgactgcagcctgtcttcacatgagtcagacatgcaggktaggatcggaaggagctattctggggtttgtatgctaccagcccggmtcagamtcagccmttgggaaagataaccaccatmtgctctaaccgtgtagacgtacctggttttctctgtkacaataaarttaytacvgrcccraaaaaaaaaaaaaaaaa

SEQ ID NO: 6375 - DNA, 600 bp, Rattus norvegicus
cagagggctttgggcccgagcgtgagggtatcatcaccatcgagtctcaggatggaggccccttcccacagctgggcagccattctgggcttttccagaacccactgcaaagtgagtacagcactgtcaccagcactcacagcactaccaccaccgagcccttccttatagatggactaaccctggggacccagcgcctggaagcagrgggctccctcaccyggcwtrtgayssaskaaytkgkgasccrgmscctgascassrgtssctctctcagcactcatatggaccaacagttcttccaaacctgaatcccccaggaacctgggcccctccttgcctcctcgccctggcgccttcttcctctgctgttgtacccacctgcatgctgatcacagagccagcacctgtagtcagagagcgggggtaggtgctgtctgggaggcatgaagtgggtagaggtgacacaagacctctgactgcatcctgccctgggtccaaacccacatgtaaccaaaaagctggagccgacacaaggacccagcctttgttctgcacttaataaaagactttgctmctgcgtaaaaaaaaaaaaaaaaa

SEQ ID NO: 6376 - DNA, 600 bp, Rattus norvegicus
tgctggtcccccttcttccttcaccttatcctaatgatctcgtgccctcagaacgtctattgcgcttgctttatgtcttactttaacatgtaccttatactgatcatgtgcaattccgtgatcgatcccctcatctacgccctccgcagccaagagatgcggaggacctttaaggagatcatctgttgtcatgggttcaggcgaacttgtacgctccttggcaggtattaaaacaccttcccctctccgtgcctctcatctctcagtcaattaggttcagccagggcatgagcagggccgctaaggagctcagatggactcctcctccttatctccttggcagctcggtttggttatggcgtgttggaagtgtgcatgtgtgagtcgtctccgtggtgagactggcctgagacagttgtctttttactcctttgctcactcctgctcccccagttccattttagaaggttttcaccattcctgcttgacctggtaagtggcctcaggagatgcataacctcctgggtgagttgtcattgaaagaaaccgcgtggcggcctatattaccattagtggcctttgtgtttctctagcttccct

SEQ ID NO: 6377 - DNA, 600 bp, Rattus norvegicus
aagccatcaactttggctccttcaccaysargtcagatgtctggtcctttggtatcctgctgatggaaatcgtcacctacggccggatcccttacccaggtatgtcaaacccagaggtgattcgagcactaragcatgggtaccgtatgcctcgaccagataactgcccagaggagctctacagtatcatgatccgctgctggaagaaccgtccagaggaacggcccactttcgaatacatccagagcgtgctggatgacttctacacggccactgagagccagtatcakcagcaaccttgatgggccggaagaacatgagcacagccagaagccccatcagggccttgacatgctcgacctgctgggcccactctcagacgccccctcccccacattccagctgtcgagtggagggagaggacttcacaatctctttttgactctagtcatctgcaatctgccattctcagggcctccaagttagtgtttctcatttgcctggaatgaactgaattcaatctatagctgtgatttaagtgggaagctgttaaaatagtatttaaataaaagatgtgagtgtcaaaaaaaaaaaaaaaaa

SEQ ID NO: 6378 - DNA, 600 bp, Rattus norvegicus
  misc_feature (412)..(412): n is a, c, g, or t
gctccgtcagccacactcctagkgcattgtgatgctkrcayragsaagtggctcaaatgattcagtattctgtggtccytggggctttattcggagactctgtcggggtgagytgacaatttagactcaattctttctgcccacctggccatccaggaagtgttccgacggttgkcacgcagccagggctggcacaggaacgtgggttccaaacaacgctcgtatggactgaaaagatacgcaggcgtcaaatatgcaaacgagatagattatttaaggagactgtgtgtgactgaaaagcaacattaaaaaataataaatttcattttctaywtkaaaaaaaaaaaaraaaargaaaaaaaatccttcactgaattgccctgtgcagagttgtgagtactttctgctgtancggggaaacacacctactctgagaggaagttctttttttttgtttgttcgtttgtttgattttcaattttcttttgttgttttttttgggggggttgttttgttttgttttttgtttcctgtggtattcgagctaaaaaatactaacaagttaataaaaaaaagcactttaaaaaaaaaaaaaaaaaa

SEQ ID NO: 6379 - DNA, 1400 bp, Rattus norvegicus
gctaaggagaatggtgacctcagccctttcagtggtacatccctaagggaacgggcctcagatgcctccagccagctgttccatgtccgggcccgggaagggtcctttgaagccagataccagcagccatttgaagacttccgcatctcgcaggagcatctcgcagaccattttgacagtcgggaacgaagggccccaagaaggactcgggtcaatggagacaaccgcctctagtcatgcccctaccttgttggagagcagcagcgctgccacctgtggaatgccatgaactgggttcwckrggagcggtctactgtaaagccttcctggtctcacagcctggagcctggattccagcggtgaaggctagacaaaaccaagccattaatgagatgtactgttttgggcctccatgcccagctctgggtgaaggcaaaaaactgtactgtgtctcgcattaagcacacacatctggccctgaatgtggaggtgggtccctccatcttgggccaggactagggctgaagccccttggaaagagaagttgcctcagttggtggcataggaagcttcaaggagctgctgacacattcctgaaagaggaagaggaggaggargaagagccttgctgggccaggggaacaaagtttacattgtcctgtagctttaaaaccacagctggtcagggtgaaagagtagatgccctgaggcttggccctggagccaggtcagaggaatgcagggcctgtaaggagaaggctctgctctgcctgaggaggaagacagcacaagggcacattgccaccgtgggtatactacccagcctgaaagatacaggggatcatgataaatagcagtattatttttttttttcttctcagtggtattgtgactaagttattctgtcctgctcctcaccttggaagggaagacccagcacagagcctttaggaacagcagctctatggggtgttgttactggaagagggcactgtccagaagggtggaggggcagaaagagagaaaatcgatgtctaccctggtgagcgtttttgtttttatggcaaggaaggctcattatgctctcccaaaggaatggagacatgggtaagtggagtcaggcagtaggcaccaaatgaagctgctgcttggtagtctctgtgtggttggtaaaaagatgcaaaggmgryrsgarggtaagcctcacctctgaggacagggtggggtccaggcctgtgggtgcaaaggtgcctmagcatagccagcattcagcacacgcaaacccactgcccacatttgggctcagggttggccatttgctagttctgctgccctcttaagatctgactgccaaataaatcatcctcatgtcmwwhhwmdwdwaaaaaaaaaaaaaaaaa

SEQ ID NO: 6380 - DNA, 600 bp, Rattus norvegicus
ggtgtaaaatacctacctgcccctctcagacgttcagatggacaagcagacagggatttggttaaggtacaaggtaccttcattgtgcccaagcctggtctccactcacagaagagacttttagctacttgatccactttattgtccaatccaaatcactcaaaagagctgtcagagctctgacccagtgtcacaaagagcgaggtctgtttaccatggccacaggtcagtcttacagagccctgtccatctcacccaacacagggcaggtacttaaccatagacactgatgggaccggacccaggtgagggaaggatagaccactgtacatagatctgccctgcggaattattttctttcggcaattagaaacaaacccagcatgcaccagagtaccgtggagcagaactcctagtgatgtacatatcattcctgtagctttagacgtacactttagaaataagaagaaaaaagactcccaatgtacagtaggcatttccgttctgatatctgagtcttctgactattttgatccccttgactgctggccctctaaatgcatggcctttgttccaggtcccagactgacagttgttaga

SEQ ID NO: 6381 - DNA, 600 bp, Rattus norvegicus
gccaagattgcacagctggaggagcagctggacaacgagaccaaggagcgccaggcagcctccaagcaggtgcgccgggcggagaagaagctgaaggatgtgctgctgcaagtggaagacgagcggaggaacgcggagcagttcaaggaccaggccgacaaggcatccactcgcctgaagcagcttaagcggcagctagaggaggccgaggaggaggcccagcgggccaatgcctcccgccggaagctgcagcgtgagctggaggatgccacagagactgccgatgctatgaaccgagaggtcagctccctgaagaacaaactgaggcgtggggacatgccatttgttgtgacccgccgaattgtccggaaaggcactggcgactgctcagacgaggaggtcgacggtaaagcagacggggctgatgccaaggcrrccgagtagggacttctgctacccaagacggatggacagacggctccacctcccttccccagccctccayacccctgccttgagactgctctgcccatgcccctcttcctcccaggccttcytgarggcattggcttcctctgctgcatccccttccagctccct

SEQ ID NO: 6382 - DNA, 600 bp, Rattus norvegicus
tctcttctatcctgagcttgctgtggctccctaccactctctgccccatttctggtcccaactcttgccccgtcagcactgctgtgggtcagctgtcctcaggatgtgatctggctgwacactgtcttaatcagggcggctttgacaagccaaacgaagagatcctgataagactgggtgcagcctgttgacggttgagggtccctsatagaaggaggggatgggaaggatcataaatccaccacctgagaaatcttagccactttcctgcacccacccccaamyagtgtaactckkcccctggtgcakkcattattttatgtgttcttggaagatgctggtatatgtagaggggatgaattgaagtgagggctccatctatgttgctttggggaccttgtcgtctactctgggcgggttttctgtgaagcagcttctttggatttattcacctgtcagtaagcctgacagactcagaggttcaccaagmtggacttgagtgtacttgtgcctttgatgtcgtatctgggagaagtacttacttgttaatgtatctcycraagccaagaaaagcttacaggacaaaaaaaaaaaaaaaaa

SEQ ID NO: 6383 - DNA, 600 bp, Rattus norvegicus
ctaaacataggatacattgagaagttgcaggaggggattgtgcacgtgctcaagctccacytgcagagcaaccatccggatgatacctttctcttcccaaaactccttcaaaaaatggtggacctccggcagctggtcacggagcatgcgcagctcgtgcaggtcatcaagaagaccgagtcakacgcggcgttgcacccactgttgcaagagatctacagagacatgtactgatttttcctgagatggtaggccgttgccactgttcagggacctytgaggtctgcggccccatacaggagagcagggatttgcacagatggcctccctccttacccttggagatgaagagggctgagcctaggcaatgcaggctcctcccacatccttactttctgaatgagcacttctaagacttcctgctactgaaatggtggtgatcagaggctagtaggattcagacaattacagrcaatggcrgccscccccccccaccagtctgatcttaactggcccaatgttaatcattgcacagtactctacgttgcatatataatttgccattaattaacgggtaacctcaaaaaaaaaaaaaaaaaa

SEQ ID NO: 6384 - DNA, 600 bp, Rattus norvegicus
wmwwsgsasmgrrgggtcaagccctgaggcgtgcacaccagcgcaacgtcaaacatatgcgccagctactaatggacaggggctttcctgttatcccctgtcccagccacatcatccccataagggtgggtaatgcggcactcaacagcaagatctgtgatcttctgctcgccaagcacagcatctatgtgcaggccatcaactacccaactgtgcctcgtgstgaggagctgctgcgcwtggccccstccccccaccacagccctcagatgatggaaaactttgtggagaagttgctgctggcctsgactgaggtggggttgcccctccaagatgtgtctgtggctgcatgcaacttctgccgtcgtcctgtgcactwtgagcttatgagcgagtgggagcgatcctactytgggaacatgggaccccaatmtgttacyacctatgcstaaggagccasctgccttagatgccaaccscacstgcactccccctggggatggtcttcctcctactstctgctwtgctgtstgcttctagctgacttgattctaaaaataaagagcamcctgaammawwwrwaaaaaaaaaaaaaaaaaa

SEQ ID NO: 6385 - DNA, 1400 bp, Rattus norvegicus
acccgggatggatgtggccgacgcctacgtgactttcgtccgccactctcaggatgtccttcgtgataaggtcaatgaggagatgtatatagaaagsttwtttsakcaatggtacaacagctccatgaacgtcatctgcacctggctgaccgaccggatggacctccagcttcacatttatcagctgaaaacactaattaggatggtaaagaaaacctacagagatttccgattgcaaggggtcctggattccaccttaaacagcaagacctatgagaccattcgaaatcggctcactgtagaggaasstaccgcgtccgtgagtgagggagggggcttgcaaggcatcagcatgaaggacagtgacgaggaagatgaagaagacgactagatcattctctgggtccaagagtccackrggatggagtcctgtaatcaatgcatgtctttagtctgttagttaaccccattagggaattttctgtcaaccaccatgcccatgagatgtttaccaatacagacaccattttagctgcgtkktammaagatymgcacaytggttthvtgswwkacwrkswytaymcmwkycttamamrcwrkkccawggagakayacatwsttmarctgctaggtgtgyccctyktgttagcaraacaaaacgatgcttcaccctgtgctycgtatgtacygataggaagcagacgtgggagccagtgtgtttccaagkctctgtttcacatatgtgggkatcaggkacytaaattagkacataaataaawkaatktamgcacwtwrawmwrmwwrrwwwwrrwmwmmrttttgttctcatcccccgaaactgaaagcaatgggcgtttgtgtcctggcaaacacagctttgcatttttccttgtagtttccccccmccmccaaaaaagttaattattgattaacttggattaataataaagtgrattaattattttaattgtcatggtcaaggggccatgtgatcagacgtagcatcaagcaaggttcagaccaattgtcttctgtggaagtttatcctagtacatgtcacgttttctgtttcaataactgtatatgtaaaaaaaaagtatcgaaatgacaaccctagactataaatgtatttrtaataagatatggatatctcctccagtagactgtaaccatgatttccattatkttgttccacactgtttttatatctgtcacgtacattgcactctgatctgtaactgagcgaccctggggtcctctgtagagctgtttctttctgtggaaagtagtggatccatcttgctttttgccttatataaaagcctacagttgtaaaarwrwrrrraamwrtggcttctcaataaacaattattcaaacgtcmwaaaaaaaaaaaaaaaaa

SEQ ID NO: 6386 - DNA, 600 bp, Rattus norvegicus
ttgcttctgtgagagcctacaacactgcagggacaggaccctcaagtccaccagttaatgtcaccacgaaaaagtccccacctagccaaccaccagcaaacattgcctggaagctgtcaaattccaaattatgcctgaactgggagcatgtaaaaactatggaaaatgagtctgaagtgctgggctacaagatcctctatcggcagaaccgacagagtaaaactcatgtcttggaaacaaataatacatcagctgagctactggttccatttgaagaagactatttgatcgaaatcagaacagtcagtgatggtggagacggaagcagtagtgaggaaatcagaattccaaaaatgtcaagtttgagttccgtgggagttcagatcttgaagcccagtacccagttcctgacaatggttggatttttttactgttttgttattcagccactttcacgatgaatcaatctatggatctttgggaattttctgagagcaaatcattctgtaaatacgttctccagcctccatcacgagacatattcttaatacagacttgtttggaaagaaaatgtatattactaagctcttgtctcgtgcc

SEQ ID NO: 6387 - DNA, 487 bp, Rattus norvegicus; identical to SEQ ID NO: 2291

SEQ ID NO: 6388 - DNA, 600 bp, Rattus norvegicus
  misc_feature (584)..(584): n is a, c, g, or t
accttgggattaaawaamcaaaacaacaacagaaaaaaaamcccaamccctgaagaagctggwacttratctgtctagctcttcccccwasccttgmtmtttgtmttstagcccatatctttggcaaatggyttggagmcattgtcccytgrtayttttgcagttcatataaatggctcattttatatggatcacccaacagcaaagtttccctctgaytgaggcctgccgtcagtgtcaacctcaggcaggttgaaggacactggtgytscacmtggwtgacagtgggasgacacaggagtgaaacacatggaatcatgacgtgactctccctcagctgggctggactmwtcagggacttgaagtaaatgcagctggtgaactgtacaccttgactgtggcccgaaacagagctgaagtaactccgaggaaawraaggttttghctgvggwrmwrrwwmwrwrmmwwwtttttttccttccccatttctgacatccaagaagcactcttaccaggtcagtactaggtctcaatacaaaagatatgcttttattggttatgtcaaaatgaacataaaaatttanaaaaaaaaaaaaaaaa

SEQ ID NO: 6389 - DNA, 600 bp, Rattus norvegicus
ggtgctggtgttggaatgaatgaatgcaaagtacaatgtgtttttctccagtgctgtccatgcttttcatgtcgtgaaatsacsaggatcctcccctttgaacactgctctgcagaagccacccctattctttgtggtttttctggagaacctccttcctacccttgccctcctgcactgtttaagaatctcgtatgccattttccactcacttatcttaaatttgtgaatgctagttattttttgttgttgtttgatgcaagcagttactgtgaagtttaggaacccctgtttagctaccacagagtgagtatgcactaaatatgaaccttttgtttcttgtttattgagtttgtaggtaaaatgtatttttctatattatggcttattgcttagtaaakywakyycarmwwmmwrmrrrrmmwwwtgtcctgttagcaattgaggcatttgcagaacactgtacagaccccgctctcccctgtacattcctccctggtggtgcccggtccccacttggggatgggagttttgtagactgtacagaaatcggcaccctattttcttgcagctctcagattttgttaatctggattatac

SEQ ID NO: 6390 - DNA, 600 bp, Rattus norvegicus
ccgtgaactagaggaataccgccgagaggtggagcggaagcagaagggctctgaagagaacctggacgagacaagagagcagaaagagaagagtcctccagaccagtcagctgttcccaacactccgcccagcactcccgtcaagcttgaaggaggccttccccaggagccgacatccagggatggcagcggatgccacrcctccaagccgactccccctgacctctcccctgatgagccttcagaagcacttgscttcccaacagtggcagaggaagcccatgcttccccagacaccactcagccccttgctgaggctgaccctgagccagcctcagcctcagctccaggagctgaagaggtagcctcccctgccactgaggaggggtctcccatggaccctggcagcgatgggtctccaggcaagtccccatccaagaagaagaagaagttccgcaccccgtccttcctgaagaagagcaagaagaagagtgactcctgaaggcccaccctgcatactgtcgtgtctgaaggcctggctctgccaggactccctcctctgtcttgtgttctgtcctctcgtgtaatggaatgcaaaaa

SEQ ID NO: 6391 - DNA, 600 bp, Rattus norvegicus
gggsmcaaggggggaggggggcggggagagggscagctgcttttcyggcaggggcatgggtgccaggtacagcgaagagctgggctgagcatgctgagagcgtggggggccccccbagysgktccgggacttaagtctctctctcttctctctctgtatatacataaaatgagttcskmtattcgtatttatctgtgggtacacgtgcgtgtgtctgttcggtgtacgtgtgggctgcatgggtgtgagtgtgaggcctgcccgcacgcgcgtgccggggcagagcgagtgcgccccstggtgacgtccaggtgtgttgtttgtctcttgactttgtacctcycaagcccctccctgwwctctagtcaatgctggcactttgataggatcggaaaacaagtcagatattaaagatcatttctcctgtgmramwwwrarwrawwwrtgaaggagagccttgcccttcctcttccttcaggtccaatcaaatcctaggacttttctttgggggcagacaagggaactactattattcgtgacattcttagtattgtcatatttattattacaattatatttattcatctttatcatatttac

SEQ ID NO: 6392 - DNA, 600 bp, Rattus norvegicus
ggcccacaggaactccatgcgtcagaactccctggaggcccagaggagcaacgacaccttgggcagacaccaggccctgcttcccctacagtgtgcagatgcggactcagaaatgaccattcaggaaacgggcctgcaagggcccatggtgggggaccaccagccagaratggaaagctcagatgaaatgtccccagcgctggtcatgtccacctctcggagcttcgtcattagtggtggaggtagctctgtgacggaaaacgtattacactcctaatggagggaaaggctatccagttgagaggtttttcttagagccctgagcaaaaggatgggtccttcctttcttcccaggaagccagggagagtaggtacgtcaaagcctgtactcagttgcactgctttgaatgacagtgaactgactggtgtgctctttagagttaaaagaagagccatgttttggggtcgttttccagagctcagtatcacacctgggtttgctgaagtcttttcctctgctctatccaccatcagttcagacgaaagcaaggctctaagctacccatctgcttccctcaaaaaaaaaaaaaaaacctgcag

SEQ ID NO: 6393 - DNA, 600 bp, Rattus norvegicus
ctactggaccaactttgccaagagtggggaccccaacatgggcaactcacccgtgcccacacactggtacccttataccayggagaatggtaactacctggacatcaataagaaaataaccagcacctccatgaaggagcacctaagggaaaagttcctcaagttctgggctgtgacattcgagatgctgcccactgtggttggtgaccacactccccctgaggatgactcagaggctgcccccgtcccacctacagacgactcccaggktgktcctgtcccacctacagatgactctcagacaacaccggtgcccccaacagacaactctcaggctggtgactctgtggaggctcagatgcctggtcccattgssttctaaagtcctataaaccggggctagagatggctcaggagctaagagctcttcttccactgttcttctgaaggtcctgtgttcaattcccagcacccacattsstkcttacagctgkctgattccgtctactggtgtgcagatgtacacgcagacaaagcgcctatatatagaaarttcatacataaataaagtcttataaccybkraawwmaaaaaaaaaaa

SEQ ID NO: 6394 - DNA, 1400 bp, Rattus norvegicus
ccggggacccctgtcagcgtttaaaaaggcctcagatctcagtcttggcctgaccttctcaccatgaagagactactgattctgagtctgctgctggaagcagtctgtggcaatgagaactttgtgggacaccaggttctccgaatctctgcagccgatgaagcccaggtgcagaaagtgaaggagttggaggacctggagcacttgcagttggacttctggcgggacgctgcccgggccggtatccccattgatgtcagagtgcccttccccagcatccaatctgtgaaagcattcttggaatatcatggtattagctatgagatcatgattgaagatgtgcagttactgctcgatgaggagaaacagcagatgtctgccttccaggccagggccttgtccactgactctttcaattatgccacctatcatacgctggatgagatctacgaattcatggacctgctggtggctgagcacccacagcttgtgagcaagatscasatcggcaacacctttgaaggtykccccatycatgtgctgaagttcagcactggagggaccaatcgcccagcaatytggatcgacactggcatccattctagggagtgggtcacccaggctagtggggtctggtttgcaaagaagrtcaccaaagactatggccaggaccccaccttcacagccgttcttgacaacatggacatcttcytggagattgtcaccaaccctgatggttttgcctacacccacaaaacgaatcgcatgtggcgcaagactcgatcacacacccagggctccctctgtgttggtgtggaccccaacaggaactgggacgctggyttwsrsrwggccggagcaagtagcaacccctgctcggaaacttaccgaggcaaatttcccaactctgaggtggaggtcaagtccatcgtggactttgtgacgagccatgggaacatcaaggcctwcatctccatccayagctattcccagctcctkctctacccctacggctacacgtcggaaccagcccctgaccaggcagagctggatcagctagctaagtctgctgtgacagccttgacgtytytacacgggaccragttcaagtatggcagcatcatcgawwcaatctatcaagccagtgggagcactatcgattggacctacagccagggcatcaagtactctttcacttttgaactgagggacactgggcttagaggattcctgctgcctgccyyccagatcatccctacggcggaggagaymtggswggcccttttgaccatcatggaccacacagtcaaacacccctactgaaagcagcccttatcccccacctctttcttctccttagtcccaataaagtctgattgtataaraaaaaaaaaaaaaaa

SEQ ID NO: 6395 - DNA, 600 bp, Rattus norvegicus
agacccaggtttctttttccccagtttgcctggcttgcyttcagttttcgcctttgttccacaaggataggaaaaggaggaggctcgcctcatgcgttttkggatagttctgccacggctgtgacagcaaaatgaacgaggtcagattakgggcctyargtggcmtgggatatgaatcagggagargkgtwgyyrmkmscggbgaaaatactcttctaggtcytttgtacactatargcttttttcttcgggctagccytgsctaaatgsmatycaatcctycacccacttgttgctattagtwacctctctgkggtttagggcagkagggaattgytmaaacawtggctgagggactaacttgtttagcrgttasctaaagcctgtttatgatccatcctggtttcaattactgtgcagtgactgacaagcctcgggggattgctctccagctcttctctgccttgtacatagcacacccaggtcctgggaaatgaatacaaaaacmggwmwmmrmmwmawwmwwrmwawwmwwwmwttgtgtgtgtgtgtgtggaaataaatggatatttcacacgtcaraaaaaaaaaaaaaaaaaa

SEQ ID NO: 6396 - DNA, 600 bp, Rattus norvegicus
gagactgagagaaccagctcggatttgtttagttttcgttsagasrggaaggtctcacatagcccaggctggcctggaactcgctatgtagtcaaggacgacgtcgttgaactcatgacctttctgcttccatttcttgagtgctgagattacaaatgccmtggccctatttacggggtgctggacgtggaagctggggcttcctgatgcraygtgagtgagcttccagaggctgacttagaactcaggggcagagacagccaaactcatctagtgccctgccggaactgtaatccacgccagccacctccccccccacmcccccccmcacacagggcaagctttgggctccaatctttgtggcatctacgaagaacacagggcctggagaatgtagggggcaagacatggattctttaggtctcatagggtttccccagacagcacgggccctgcactggacaacagagggtcacgaagccatgaagacagaatggccactgactctcagctttcatgggagggaaggggtttgaggttttgtgtcttttaaaaaataccactggcaacagccgaaatcaccaaaaaaaaaaaaaaaaa

SEQ ID NO: 6397 - DNA, 600 bp, Rattus norvegicus
taactttgaagggacccccactgcagagaaccctgagtacctaggcctggatgtacctgtatgagacgtgtgcagacgtcctgtgctttcagagtggggaaggcctgacttgtggtctccatcgccacaaagcagggagagggtcctctggccacattacatccagggcagacggctctaccaggaacctgccccgaggaacctttccttgctgcttgaatcctgagtggttaagagggccytgcctggctkgragagayggcactggacggcctctggattacagaccctkccctgacagactatagggtccagtgggtatcatggccatggcttcttgcctggcctggctctsttggttctgaggactgaggaaagctcagcctwgaagggaagaggtcyggagggaacatcctgggaacaggacaagcyactaggaytgagacacatgcatcccaacagggggctgcactttcatccagrmmarwmwwwrwamaragtgtattttgttctgtttttacttttgcttttttttttaaaaaaagwtgaaataarramamrrarrrararwrrawrwwarggaaaaaaaaaaaaaaaaaa

SEQ ID NO: 6398 - DNA, 600 bp, Rattus norvegicus
taatgatttaattgtacgtcagtgagatatttgcttatttatattcaaatatatatcatgttaaagagacatcttgtattttcttcccatttgtaatgtatcttatttawawawtaatggagtaagttctggawactgtttatggtattttcgtgcatttgtgagccaaagagaaaagatgaaaattagtgagacttgcatttatatttgagtgcccttaacataatgatttgaacacatgtgtactgtctggaaacgaattctgatactgwacatagagtggcgttatggaaatcttgcttcagtagcctttgctcttctctttcccccctcaggctgtacgtcaggtgttctcawagcttttctagtaactgttgaaaaataatgactagatctcctgtaattttgtagtagtatatgaccaatctctgtgactcgcttagctgaaacctaaggctatgtttccgaagatctccgatacactgaccagtcccacaagtgtttttgaagacatgaaacccacactgtgcatttagagtatgcaagaagaatataaataaaataaaaaatmttctccatgaamaaaaaaaaaaaaaaaag

SEQ ID NO: 6399 - DNA, 1400 bp, Rattus norvegicus
tgtgaggtgkgcccagctgggcggcccttgccatacagtgtgagggcctaaagctccctcctcagatagtcttgtttgctaggcccaattcccatccacaccagtgctccccttscttctgttttwrtgcccacggctcggtcagtgcggagtctcatggacggcacagaccaccctgcatctccaactaacaggataycaccccaaaggcaatcaggaggggaggacccccctcccccagctggttagaactggaagaaagaggaaagacaggggcagggagacttaacaaatcccttccttcatccttsttgttatggaaaccgttgccagagctggaggtctctgggaactggacttttgaagttttcataggcatgctggagcaagacaaacattcagacagaaaggaaaasatcccgaggcaaagaatctctagccagaggcctaggcatctggaagaaccctgacgatgtaggagtgggtagggcagacttgctacctggaatggccactaaggcagtcctgaagggcccccctcykgaggatgaccctcgtgtatcggcccactgagcagccctgcaggttgatgccagagcstgtgaaacttggttcttggcatgtggcaggctctatagcataagctggagagggaaggtgtactggagggtatagaggaggctctctggcccctaagtrtggatgagtcgagaggggggagcccaggaaggctaccccgctcaggctgcaggggtgccatggcggaggaaccggtggagataacttggacaatggagttggaagggtgtgtaggaactagttacwcttggctctgaatccttggaatcaaggaaatgacctgtctctcaaagacctgaaacaggagagagggaktkcatcactgggcagggtacaggcgcgtctcagttgtgaaggtctatcctggttgctcagtcccaacykcgcrycaccctgggcttctcaacctgraagagtcacaaccatccttctgaggctccatcccacaaccactagctgttgttctcwagccaaggccccattccctttcttatgcatgtacggagtmtcgcstagacktaagcgtccatcctgtttgaagttggaactgmcacgttgtgttcaascagcytggtgtggagtgccttcgtattagtgtaccctctcggaagctggttggtgggcaggtgaggaagaaatggagctgaaagtgtcccmtcagttgtcctttcctccccctmtaaggtccctccytttccccaggacatcgtacactcccccccttgtcacctctgctaaccttcagagcagtactgtcacctttactcactgggcaggaaataaagacagtgtcagaggcwwmmaaaaaaaaaaaaaaaaaa

SEQ ID NO: 6400 - DNA, 1400 bp, Rattus norvegicus
gtttttataaacctgcgcacattgttattaaaatgtaaggttgaaaaggcaatatttagaatatttcagatatatttttaaaaagtttttccacagctacttgagtttcatggtcttctagtatataacaacactcaagtctacccagagtgtctcaactatctgcttgtcaattctgcttaattttattttcatgcatttaaacttttatatctttgttagcatctcttccttatgatcctcatgtgtactattatgtaataaccacatacatgtaatatccacatacatgtaatatccacacatgtaacattcacatacatgtagtccagttattccatcttgaccctaccttttcgaacccaaaagaaaattgttcttgttatttttatttcttctgttatttgtgagatgaacccgttccctttaaataatctttgtttgtgccttatgttcagtcattttaatttgctgtcttcatgtcgaagctgctggtttctcagccaaaaagcatcatcttagactctctaaatagccaaagcatcatgagtttggaatttaacatcagctcccatgtcagagttgtgctcctcatgtgatcccacattctactgcccagtgtagtgaattcctttccaagaactcttgcctttgctttccaagttatttttgagcatcttggttgcagagatctcaagaatttacgtcttggattccacgttttcactacgaagaaacagaatgagaagaagaagaaaaattaggcagtgtagagctgggcgtagtggtccagktctttaagcccaggctagcctgatttagccaataaattctaggcctaaaaagagagacytgtctcaaaactcaaagcacacaacagatgctaagtagatgggtcyccataattgggaagccaatgagagaatgcatatttcttcctatgttctttaaaacttgaagcagttacatccgtctttcatcattacgggactcgtgcattcagagccttttgttgttctwttgccagaatagatgaggcamcatttgcctattcgaatgctgtaacaggcaagttgactstagggttttggtctgagacatttggtgaacaccttcaacactgattaaaatattactgaatkccwamwmwwawmmwrawwatgaatcttccagaataaatagaatattagctcatataattgttcagaattggagatgtatgcctactaccctgtacctaaagggcaaaaatatcttcactgtaatgtgtgtgcttcttcaaggtgttttgcttcttgtaaaagtgttttcctttggcttgttactgccttttgtcagataatcttgatgacgctgtatcataataaatattttctatttattaaaaaaaaaaaaaaaaa

SEQ ID NO: 6401 - DNA, 600 bp, Rattus norvegicus
cagggctcgctcatggagcagatcagcagcgtagtgacgcgcttcacagccaacatctccgagctcaactccatgatgttgtccaccgcggccacgccggggccccctggtactccaatctgctcctcctacctgatccccaaagagattcagctgcccacgaccatgacgaccttcgcagagatccagccgctgccggccatcgaggtgaccggaggagctcagggggcgacaggcgtatcacctgcccaggagacgcccacaggagctgaatccgccccgggcaaaccagatctggaggagcttgtggccctcactccaccatcgcccttcagggactcggtggactcggggagcaccaccccaaactctccagtctcagaatcggccctctgcatcccatcctctcccaaatatgacactctcatcatcagagattacacgcagagttcttcatcgttgtgagccactggaaacttccctgagataggcctgtgcagcagacctcggtgttccagatgggcgcagcgacacccatagtcaccccaacagagaacccgaggtgaaaaatgccaaggacacacacggtggagacatgag

SEQ ID NO: 6402 - DNA, 600 bp, Rattus norvegicus
tggaggattgccaacgaaaccagaggttacggttcagtgccgaggacccagtgtatgggaagcagaccgttcacattctaaagctacgactacctcaccgcagacagggcctgatgaagtgaaaggtattctctcagcagaagagyttwtcctmtggagtttgtgaaccaacacaagsrsgackttrgaagtgacatggaagttttcmttgtgtggggataatgacttgcagtgccttakgctcagtaatgtgtcctsctgagaagtgtcccarbtcrkywckgwmargttytttttgsccytgsctttgtghactcttgaaamcctrytrtktgawwactcacaytargmgmkbctkrttaccggctragggacggctcacaatttaagaatactgactvttytaycaggggttccagattcgattcmtagcacccacgtggtcgtyaactatgagctgttgccccatttctcaggtgatgtacgaacatacatgtggggsgaggggaatagtcataygtgtaaaatgaaaataaatmtaaataaaactgttttctttcvytrwwmaaaaaamaaaaaramammaamwaatagaaacgt

SEQ ID NO: 6403 - DNA, 600 bp, Rattus norvegicus
tcagtacaattgatttacctagttatggctgtacaatccctgaaaagactacttgcagtatttacggctggggctacactggattgatcaacgcagatggtttattacgagtagctcatctgtatattatggggaatgagaaatgcagtcagcaccatcaaggcaaggtgactttgaatgagtctgaattatgtgctggggctgaaaagattggatcaggaccttgtgagggagattatggtggcccactcatttgtgaacaacacaaaatgagaatggttcttggtgtcattgttcctggtcgtggatgtgccatcccaaatcgtcctggtatttttgttcgagtagcatattatgcaaaatggatacacaaagtaattttgacatacaagttgtaatagccatagaagaggccagtgtatttgaagcatccatggatacaggaagatttccaagacttcaggattaaaatgtcacctaaaacaatcctaaaacaactacttgagtgttgtgagtgttcagatactcattaatatatgtggcgttttctgttgtattgtttgtcagtgtccttttgtaaatgttgaagtgagttagggt

SEQ ID NO: 6404 - DNA, 1400 bp, Rattus norvegicus
ctcaaatactcagctctttgtgagtgctcagggagaagacaagcctgtgttgctgaaggagattccggaaacaccaaaactcatcacaggtagtgagaccgacctcattttcttctgggaaaaaatcaactctaagaactacttcacatccgcagctttcccagagctgttaattgccacaaaagaacaaagtcaggtgcacctggcacggggactgccctccatgatagatttccagatatcataaaaacagccttatttaggagtctactttcttgagaagtgctgacaatctgtatgtaccatgtacaggaaatgttcctcgtcctaagtcactcgcatggcatgtgctgagtctttgtaattctaaatgaatgtttaccctctttgtaagagaagagcaaagcctagtggaaccagcccgacatatgatactgtttgttatttaaagagtaccctatagtttgctcactactaatcattttaattattattcttcatggtattcttaggagggtcaaaaagactctgctcatattacagatgggctaactaagggataagacaactgaaaagtacactcaattgcatctggaatgggaattcacagacccatgaaacttatctcactgtgcaccttctgcttctaaagtgccggatgggtaggataaagttgtaagaacgtaatgctatcattttcaaaaggaaggggacaatagctacatctttcctacctcagtgggttttattccagtaagagcatttggataaaatccttctgtaacagacctcaagaaggagacagactgttgaatgttatttttaagttattttatatatgtatttataaatatatttatgataattatattatttatggcacatccttaaatcctctgagcwygmsrggcatcctcagcagcagaattttctaggtggtcagttagatgcagtgtcctctgaaacaccatgctatagacagacgtacactgtttccacatccgtggagctctctttacattcttgtccttaggagccctgcagtcatgatcaccaatctgtactgttcacttcgttcatttaaaatgataactgggtcagtcttttgccctcctgtccttaaagctgtctgggtcttcttacatcattcaactcacctgtaattaaagctaaccatctaaagacgggaagaacctaactgtgacaaccacatccctgttacctgaaktttcttttctaggatgtaatcagtgtttcctctgggttccaaatttgttctcaaaccagggtgtcacaaaaatatcaacaataataatcaactcatcattactattgatcataattaaataaagcaagtttgagctgacaaaaaaaaaaaaaaaaaaaaaaaaagtgtggcg

SEQ ID NO: 6405 - DNA, 600 bp, Rattus norvegicus
tggggaagattcccacactcaactgcaggtggaggtggtgagaaagctgttttcatttggagaggcaggatcagcccaagaagctttcagtgggagagcctacagtgaggctgtacctcactgtgggaggaggcagsccagctggctcaggtcctgggactggcactggggagggtctgccaaaggtccctccagcctgtagtcytagcatagtcgggtgccagttccaggaagtttctatggcaaccttagtgctcattaaggaacattgtcagttttgtgaacatmkgywcarrtggaratcytgttttcagagawaggaytggtacagtgtgtaacaagctggagcagacagaragmctttttggcaakagatcacatccgttaagcagaataccycagtgctacatgtttttgtctttgagacaatgtttttaaggtttttatgctctgttacctgtaagctgatacctaaaactttytgcaaagtcagggtttttcaatgccttttttttttttttgccattgtttgctttaaagtgaagattgtaactgtttgaaataaataatttctaaaactgcaaaaaaaaaaaaaaaaaa

SEQ ID NO: 6406 - DNA, 600 bp, Rattus norvegicus
aatactaccctggcttctactattctcttcctgattccgaggcttcctgttatgctgtataaatcagccgatgtaaaccagcaccaaggtttgtgtgttttgtaggtcatggaatcatctgcgaaaacaaggaaagagtaaaattttacaaaaggcaatttaagatttgggaaacccgggctttttagtatactcctgtaacaccattcccatgaccatcagggcccttacaaaaagaagtaagatgtaattggtgagataattgtcagcaaatatttcaaaacattgtaattaaccctgggcagtggttactggacagtcctcgtgtcttttgtctgggtgttaatatcagttacttagaagcttgaagaggatggaaaagctcagtgtctgtagcaattcattcaaaagacaagagaactgtcccttattctctgtatctgtgcttttcatctctgtggcaattatcttagggtctgaaatgtgaataaaggccttccatattccttttatcttcaaataatcatattctcttataaatagataagtatatcaggctgttctttcatgtatgtattttaataaagatttttttccatt

SEQ ID NO: 6407 - DNA, 600 bp, Rattus norvegicus
tatacatgcaagcaaaacaccgtacacatacaattaaaaaaacaaggtagagaatgactgaagaagaatcttatgttaacttctgatctacacacacacacacacacacacacacacacacacggcatagtgatgtttgtttcaatattcaatggataggttctggggctacaggtctggtaaaagaggttttaatccttcctctttcaagatggtaccgaggaatgggaaagcagtgagcctggaagagggtgtagtgctaacacaccctcttcttgtgtccttgtgtttctctgcccggtggttgaactgagattctaggtatggaggaagaaggaataagatacagagtcacagtcagggtgttgctgctttcttgtctctgagggccattcctgtgtcttccaaagggaacaagttagcaggagaacttctttggaggaaggttctagtgtgaaggtcttgtttcttcatttccatacctgtatcattccaaattcaccttgaaaaaaaaagtagagttcaaagctgctcaaagatcaaaatttttttggtatgtgattaataaatttctgaaaccgtwaaaaaaaaaaaaaaaaa

SEQ ID NO: 6408 - DNA, 1400 bp, Rattus norvegicus
cagtgccctgcctggcagagaggctgaccatggagctcatctcacacatctgtaaatctcttcctttgttagaaaatcaaataaaggaaagtcaccagagtacaagtgaggagctgcagaagtatggtgcagacataccagaagatgagaatgaaaaaactctcttcctgattgaaaaaatcaatgcttttaaccaggacatcactgccatagtagaaggggaagagattgtgagggagaaagaatgtcgcctattcaccaagctccgtaaagagttcttcttgtggagtgaggagatcgaaaggaatttccaaaaaggttctgatgctttatataaagaagtctacacattcgaaatgcagtatcgtggccgagaactaccagggtttgtgaattacaaaacatttgagaacatcataagaagacaaatcaaaaccctggaagaaccagctatggaaatgcttcacaaggtcactgaaattgtacgggctgcctttacaacggtttctgagaaaaatttctctgagttttttaatctccacagaactaccaagtccaaacttgaagacatcagattagaacaggaaacagaagcagagaagtcgatccggcttcacttccagatggaacaaatcatctactgccaggaccaaatttataggaaagccttgcagaaggtgagagaggaggaagctgaggaggaggagaggaagcatggcaaaagcaggtcctctcagtcaaaaaatttacagacctcatccatggatgaaatcttccagcatctgaatgcctaccgacaggaggctcacaaccgcatctccagccacattccattgatcatccagtatttcatcttgaagatgtttgctgagaagctgcagaagggcatgctccagctcctgcaggacaaggattcctgcagctggctcttgaaggaacatagtgacaccagtgagaagaggagattcctgaaggagcggttggcaaggctggcccaagctcagcgccggctagccaaattccctggttaagctggccctgtcctttcctgtgtctcctggataatgattcaggaacagaagggctcctgccttcccttcagctaaccactaccctttatcctattataaatattagttctaagatgtgaaggagctttctgttcactctgagatgataaagagaaagagrytctcaaaactcagcaattagatgagtaggagaagccactttgctgataagacaatagcttcastctgagtaccattcctattcaccatatcctcattttagaaccctgccaggaacaartatttgctgaryaaatgggccatgatgtttgggagctkcctatwgcatttcttaataaactacttttctatgaaaaaaaaaaaaaaaaa

SEQ ID NO: 6409 - DNA, 600 bp, Rattus norvegicus
atggagaagtttcagttcgaactgacccttgaagaagaggattctgaaggaccggaaaaggagggagaaggccccaactatttcagcagcacaaagacactttgtgtgatcgatccagagaacagggattctctggaagagactgacatagacattgccacagaagacaagtctctgatcgacacataatctccctctgtgtggaggtgaacattctatccttgacgagcatgccagctgagtggtagggcccacctaccagagccaaggcctgcacaaaacaaaggccacctggctttgcagttacttgagtttggagccagaatgcaaggccgtgaagcaaatagcagttccgtgctgccttgccttgccggcgagcttggcgagacccgcagctgtagtagaagccagttcccagcacagctaaatggcttgaaaacagaggacagaaagctgagagattgctctgcaataggtgttgaggggctgtcccgacaggtgactgaactcactaacaacttcatctataaatctcacccatcctgttgtctgccaacctgtgtgccttttttgtaaaatgttttcgtgtctttgaaatgc

SEQ ID NO: 6410 - DNA, 600 bp, Rattus norvegicus
tttttttctaagaagtaacttgcaagttttcagtacggatcagtactacactggataaatctcatttatgaatttgacttccaccttagagttcatagcaattaactgatttgtagtgattcattgtttyakakrccgatgacttccatactttaaaacagagaaacaaatttatgttgccagaaaccctttttgtaagtgtccattgactccttttgtttcactcctccgcccgccagaagagttgctgtcccacattgctgccctcactgtgtgcaaagtgagtatttattctgtaatatgttgatgtgcattatgtccagtgtgtcttaaacctcataggagttcagtcatcacttgctgttgtctgaagcaaatgggaaatatataaatacccagtagctaaaacagcctgtcttttctaggcattttcctacccactgccttctgatgacttcctttttttycccctgtgtcrgrakwcatgcattcacaagtgcttgtccttgtagtcacccatacatttcatgatcattttattgtagctcacagccagttataggaagaaagacattttcccatcatgctgcttgatttaat

SEQ ID NO: 6411 - DNA, 600 bp, Rattus norvegicus
gacatggtctgcggagatattccatttgagcacgacgaagagatcgtcaagggccaagtgtactttaggcaaagggtctcttcagaatgtcaacatcttattagatggtgcctgtccctgagaccatcggaccggccctcctttgaagaaatccagaaccatccgtggatgcaggatgttctcctgccccaggccaccgccgagattcatctgcacagcctgtcaccatcacccagcaaatagcagccattctgtcagaccctccagggaagagagagcttgtctgctggcctccaacaggaccctgctctacgatgcagggacagaaatgacaactcattccaggctccggggtccctggagcaacctccctcaaggagaagagactagttcactcgtcctggaccccgctttgcccctcacagactcagtggcgtccagtgtggctggcgtccgcagagtcccgggtgttggggggggaggtgggagtgggtcagagccctgtcatggaactttagtcaccatggagactgtgggtcaccaagatgggccagggtaggggaaaaacatttggggggtgggattaaaaactagcaccat

SEQ ID NO: 6412 - DNA, 600 bp, Rattus norvegicus
tcgtggagatccatggcgtgggccgggacacsgstagccgtcagacagcagttattaccaataatggtttcaacccacggtgggacayggagkttgagtttgaggtaacagtgcctgaccttgccctcgtacgcttcatggtagaggattatgattcctcttctaagarvgrctttattggccagagtactatcccctggaacagcctcaagcaggggtaccgccatgtccacctcttgtctaagaatggagaccagcatccatcagscacactttttgtgaagatctccatccaggactaagcccgggggtctgatgcagtccgacctgagtgagtggagctgtgtccgcacctcggccaaggctgacattattgcaccgacctctggcgcggagcctgaggccmtgaactgccttcagtgccaacamatcgcttgagcttctkcctctctggaggcccaggagtggtccgatccccggagcgctccaaaattccgttaggaacaacactgcatccctctccmtaccctctagctgtctttatggataagtttttataaaaaaaaaaaawmaaarrvwmmaaaaaaaaaaaaaaaaaaa

SEQ ID NO: 6413 - DNA, 1400 bp, Rattus norvegicus
  misc_feature (1021)..(1021): n is a, c, g, or t
  misc_feature (1284)..(1284): n is a, c, g, or t
ccagctcttcactctcaccaaaggcggccgcttttacatcactggagtcttccaaatccttgctggtctgtgtgtgatgagtgcagcggccatctacacagtgagacacagtgagtggcatgtcaacaacgactactcctatggctwtgcttacatcctggcctgggtggctttcccgctggccctccttagtggcatcatctacgtgatcctgcggaaacgcgaatgaggcgcccgacgcaccatccgtmtaggctctgagcgtgcatagggtacacagggagggaggaaggaaaccagaaaaccaaaccawycaacccaaaagagytagcccccaaacccaaacgcaagccaaaccaaacagaacacagttgagtggggattgctgtcgattgaagatgtatataatatctatggtttataaaacctatttataacactttttacatacatgtacataggattgwtwgctttttatgttgaccgtcagcctcgtgttraatcttaaacgactctacatcctaacactataaccaagctcagtattttcgttttgwttykwttttttcatcttywtghyttgctyasasrtaraarmmamaraadmcacrtggccchcywwcatcwgaawgsmsrtcsykccctcccaktcaacctcataggataaccaaagtgcggggacaawccccagatggccagarsytcacactatgggtgacccagygaattwarcaggaatwatyckytksccsaatcmatgtgtkaagccytwrrcackmrsagacgawacgccytgaccagakccctytgcgaaaccratagctggwggmtgcggmacacttgrcmytgarkscggagtactgggvccacatgtttamatgrsacgkcakasacaarcmatctgygwmatgstsctatagmttyaccmwycckykdtattactaatcatwtaaaccactcactskraactcadttwmmwgkkktatgacctacarcaraacagasacccgayacraacggntcrwaactsctttcstacatagctmggctgwtgwtattacthmmmtaaataaatmtcaaagcbttcgtmactyccacarktttctcacgghcgrmgcawyargacgagcgtctagacccywrggactagmawawwccctkgctttctkggtctagagtgdtcwgkgccthcaagrmctgtctarcgatgacttgtakwkrscaccmhytgtmgawgtatatacsgdghccwtmtgatgbtaagamtmcaramctttctkkddndtgcbkgcwwytyctgatkwkatamcaacbgbgdggmctaagakscmtthmaawavmchtcrgmgkmvmhhahaaaaarrmawawmwmwmamwaaamaaaaaaamwmrrrmwaaaa

SEQ ID NO: 6414 - DNA, 1400 bp, Rattus norvegicus
cacatacggctgtgatcggtttgccaagtggacttgagacatggtcattctttgctgtatatgatgggcatgctggttctcaggttgccaaatactgctgtgagcacttgttagatcacatcaccaataaccaggattttaaaggctctgcaggagcaccctctgtggaaaacgtaaagaacggaatcagaacaggttttctggagattgatgaacacatgagagttatgtcagagaagaaacacggtgcagatagaagtgggtcaayagctgwgggtgtcttaatttctccccaacatacttatttcattaactgtggggactcaagaggtttactttgtagaaatagaaaagttcacttcttcactcaagaccataaaccaagtaatcctctggaaaaagaacgaattcagaatgcagggggctctgtgatgattcagcgtgtcaatggctctctggctgtatcaagagctcttggggattttgattacaaatgtgtccatggaaaaggtcccacagagcagcttgtctcgccagagcctgaagtccatgatattgaaaggtctgaagaagatgaccagttcatcattcttgcatgtgatggcatctgggacgtcatgggcaacgaagagctctgtgactttgtgagatccagacttgaagtcactgatgaccttgagaaagtttgcaatgaagtagtcgacacctgtttgtataagggaagtcgagacaacatgagtgtgattttgatctgctttccaaacgcgcctaaagtctcagcagaggcggtgaagaaggaggcagagctggacaagtacctggagaacagagtagaagaaatcataaagaagcagggggaaggcgtccctgacttagtccatgtgatgcgcacgttagccagtsrgmacakscccagcctcccaccagggggtgaactggcaagcaagcggaatgtaattgaagccgtttacaatagactgaacccttacaaaaacgacgacactgattctgcgtcaactgatgatatgtggtaaagctgctcatctagccatggtttcacctttgcctssaagagagagagagatcagcgcatccttgctgagcctttaacatccatcaccgacttaaggaaggggtccgacatgggtgagggactacagcttcagcgatggaacagccagcccagaatggatttttttttttattgtaaatttgagacttatgtaagcgtgatttcaaammrwaawwmawrttgtaaatcagactccagcaatttttgttgtatgattttggttttttgtaaagtgtaattgtccttgtacaaagtgctcatatttaattatgaactgctttaaaatcactatcaatgataaaggaaatttggcttgttgtgtggcaca

SEQ ID NO: 6415 - DNA, 1400 bp, Rattus norvegicus
  misc_feature (1348)..(1348): n is a, c, g, or t
gtgtcagaaatagttaacattcaaacttgtttccacacggaccaaaagatgtgccatataaaatacaaagcctcttgtcatcaayagccgtgaccactttagaatgaaccagttcattgcatgctracgcgacattgytggtcaagaatccagtttctggcatagcgctatttgtagwtacttwtgctttcttgagasactgmagatytmggatgtaacmttaacacytgtkagtmcagttgactyccacttagctgtagcttactcagcatgmctgtagatgaggatagcaamcamtcattggagyttaatgaacatttttaaatgagtaccaaggccyyccctcttkdtgwgttckttcagggawacwrhtaatttaattgtrtgatttctstgcactcagwttctcccttytmaaatctcggccccgcgttgwtctttgwtactgtcagaaaacctggtgagwtgttttgaacagaactgtctccctcctgtaaratgatgtmctgcacamgtcmccgcagwgttttcataataaacttgagaactgrgawardharrwwwrrawwrtawmarwrrrmamramwrrkgctkkttattaaacaagmwwaatytattgatcaatttcagaatttgtagaattccaggtaarraaaaataaagatcaaggccmctrtrtaammwvwmwrrmaamwmmwwrrwrwmwwwgagaagaacttggggacttgtttgacagactgcagcttgtcttkktgctkgcctgcgcttgtgmamggraatctgtgctgcttcagtargacttgattgttaaaccatagaactyragagttatgtgtttaggattttacttaaaatggcatgttttcaggtagaacttaacaaactaaatgatgtgtctaattagtgtagtttctggttacaaaaatactgctatgtwyatttcatggactctttaaaatgattgacvgwacggtaagttcttagcrmacatttgkacatttcttgtcaagtcatgtgatcttmgagttagttaracttgtctcagataagctgctaggaccttagcttgtgttccgtgactggtaaytragtgacgccgagtagaaaggaagctgacttgggattgtgtttcttcgtcccagatccgagastggagcmtgagcgccagtgctcagcagtgatgagttttcctttctgttctttgacwtggcttaaaaccgaagacagttcttctgcggggactgaatatytgctattttaagctacctgggcraacatcaggatgcttgatgaktactgtgtgagtgtagtaaatamatgtttccttgctttgwrmwrwrhwrarwwnrraammaamarwraagttacaacactgccctgtataaagaaaaaaaaaaaaa

SEQ ID NO: 6416 - DNA, 1400 bp, Rattus norvegicus
  misc_feature (1382)..(1382): n is a, c, g, or t
tgttaccgtctgtggagatgtgcatggccaattccatgaccttatggaactcttcagaattggtggaaaatcaccagacaccaactatctattcatgggygrcwaygwagrcagaggatattattctgtggagaccgtgactcttcttgtagcattaaaggtgcgctatccagagcgtatcacaatattgcgaggaaatcatgaaagccggcagatcacacaagtatatggcttttatgatgaatgcctacgaaagtatgggaacgccaacgtgtggaaatactttacagatctctttgattatcttccacttacagctttagtagatggacagatattctgcctccacggtggcctctctccatccatagatacactggatcacataagagccctggatcgcttacaggaagttccacatgagggcccaatgtgtgatctcttatggtcagatccagatgaccgtggtggctggggcatttctccacgtggtgctggctacacatttggacaagacatttctgaaacatttaaccatgccaacggcctcacactggtgtcccgtgctcaccagcttgtaatggaaggatataattggtgccatgatyggaatgtggtcaccatttttagtgcacccaattactgctaccgctgtgggaaccakkctgctatyatggaattagacgacactttaaaatactcttttcttyagtttgacccagcacctcgtcgtggagagcctcatgtgacccggcgcaccccagactacttcctataaattyctccccaggacctgtctttgtatgttgaagtatacctggctttttaaaaaakatatatmcatatatatatttaaaaacaacagttatctgtgtgkcwcwgkarcmaaykgtrcwmtgkyktsmcgtkmwvacacwkcwtgkamyrraacgtgccatactaatkgtgwgccatsakcrsrryrygarcttgagtccactgtcctagccgagtcawycmkrymrvydcswgsccgcmkgcytgytktagtagyygtcmktmgtrmctggttaagggmaagggtmactggtggcttcatytccttygcgcttacttggaaatttagttacaagtttaactggcatggattatagagttgsagttttatykkyamgrrktgayaagykgamktcmrcttmaattcwtaaccctttattwtgttgaaatgtatgamtaactgaasaagagattcttgggagtatgttgtcataacaytaagatktcctttcaagtttcmtgaamtgaattactgttggatgttgacctgcacattctgtmtrhttstcctgacagtsytgcatcctccttgctstactgaacaamtmaacttcccaayttmrvsngmmrmmmaaaaaaaaaaa

SEQ ID NO: 6417 - DNA, 1400 bp, Rattus norvegicus
ggagccggaggggtcgsccsakctgatrataaatgtcataatctctytgaakaaacaaaccattgtgctttttgagacccttgcccccttccyggatggaggcttgagggccttgggacttgtgctgtccataagattggggaatcgctgccacarcggararcagtkagcaaggggcttggggcaaattccagtggaggaagcccaaacctccatttatgcttgtggttcacacatttacgtttacaaatgagatttcctttgttttctccctcagtagaattagatttttttcaaccatgactttaaatgcaatctttagagttaahgtggaacctccctcacccccaccccatgaaatgtctttaaraggatggattagcatggtcttaaaatatatttctgaggttactagatgtattttgaattgtagacaaaatctgagaaacccagttggtgtttatataaaaacgctgacctcaggtcatagttcttaaatgtggctaattctgtaacatagtcttggtatttttcaattatgaatgcataaactatttctaagragactcttacttgaacamgatccamaaaaccaatttagatyctttttkssccmkatcttttgagattttcaccccagagatttarggaaaaaaaaaammwaaawtttaaaattatgaagaattacagaattactcatttaaggtrctytaaaagaagtttgtacattgtcaaagtaaattttaattcamatcattgtctgtraaacttgacgtattttgtgtatgcatsktttcatykwgsaratatttaatatatagacctatgrtgwacakgtacmacatgtataggttgcgtggatattatgagaaatwwtagtwtcttgtgagtactccagttgcttaaaaaccaccabggsgatttgctgctggwtctaacatttttatgttwaaatgcaaaggaaatttaaagtgtytggacatgtttytgactaatgcarccyrgmmkcaawggttctcttcagcccttcagatgttagtggaagcataaaagtcaagactgcatgtcgaaattttacttttgatagttacagaactgcttggttaaattaaatggasccatgtgctmmtyktrcmgttactgaccttgtactgattsccactgtagtttggtgatccctttactttggtggcttgcttcccttatgccctggactacagctcatagcatcaggcagcggagccatctgctgttttgtttgccaggaagtgcaccttgtatggtcttctgtytaagttggaaatattatgcatgtgcaggactattcaagtattttataaacagtagcacacaataaattccatgcatgggccgcygctcstrmmraaaaaaaaaaaaaa

SEQ ID NO: 6418 - DNA, 1400 bp, Rattus norvegicus
tcatcaaggagtcccgagaaatgcgcctgcagtccttcaatgaataccgaaagaggtttggcctgaagccttacacttctttccaggagttcacaggagagaaggagatggccgctgagttggaggagctatatggtgacatcgatgctttagagttctacccggggctgatgctggagaagtgccagcccaactccctctttggggagagcatgatagagatgggggctcctttctccctcaagggcctcctagggaatcccatctgttccccagagtactggaaacccagcacattcggtggtgatgtgggtttcaacatcgttaacacagcctcactgaagaaactggtctgcctcaacaccaagacctgcccctatgtctccttccgtgtgccagattaccctggagatgacgggtctgtcttcgtgagaccgtccactgagctctgaggggctcttctggagggaggagttttgttcctgaagaagacagtccttgatgtgggtttcctggctgggcattgtgagagctgacattgacatttggaacttggggtctcacccttgcctagaatattgtgmkkyyrykwkatttttttttgccattttaggatgctgaatcctttgctaactaagawagttaggagtggtttkgtctggcgtcttagaacttggctccttgttggcaacacagaaagttagatttctggttgatttggaatacaggcttagaactttatatcacagggcarggtgtggttccaggcaccttaatcccagcacttggaaggcagaggcagttgaatctctgtgagtttgaggccagtctgstttatgcagtgagttctaggccagccatggctgcatagttagactttttctcaaaacaaacaaacaaacaatcaaacacacaactttagaatagaatgtagaactccttaaaaaattcccttgaaagttaaaggggttcttaattttcttctwagaatctggagscccctwagaatgttgactatctgrcgggtgactcagaaggtcctgtkscamgwsratratctrtaacatggccmaaacwttccmaacttgaatgtctagaatgtggaattggttcattttcctgttcagtgaaatggacacagaacaaaagaacccaatgtccagcaagggttgctttgcccaagtctgtgtctataccagagggcaaggcagtaaggtgttcttgggtgtcaygttagactcttwccacagatgtggtagggaacaggtggactcatytacgattttggttggragccrccacaktcctatccccaagcaggtctwtgctcrtggcarctctttstygtgrarctaataaaattctcttcccmaaaaaaaaaaaaaaaaaaaaacctcgtg

SEQ ID NO: 6419 - DNA, 600 bp, Rattus norvegicus
gggtctgtctatcgtcatgggagctgtgctgcgcaggatcccgttggccgtgctctttgggattttcctgtacatgggagtcacatcactgtctggtatccagttgtcccagcgtctgctgctcattttcatgccagccaagcatcaccccgagcagccctacgtgaccaaggtgaagacatggaggatgcacctgttcaccttcatccagctgggctgcatcgcgctcctctgggtggtcaagtcaacggtggcctcactggcctttcccttcctgctcttgctcacggtgcctctgaggcgttgccttttgccccggctcttccaggacagggagctgcaggcgctggactctgaagacgcagagccaaactttgatgaggatggtcaggatgagtacaatgagctccacatgcctgtgtgaccctcaagatggtggccctccgagaccccaccttggtgactcacctcaggacccagggatgtgcctggagtcactgcccatgccaggacagtggccccttgactttcacagcccagacggcaccggctttgaagtcattataacacactccttgtcttgaaaaaaaaaaaaaaaaa

SEQ ID NO: 6420 - DNA, 1400 bp, Rattus norvegicus
ctggccggggcgcgacctggggcgggaccccgctcctccttcctcgctttgctgtgcggcctcgtcctcaccgacttcctggggctgctggtcaccggcgctgtcgtggcgtcgcaacacgccgccttgttggactggcgtgccactgatcccggttgccgcctttgccacttcatgggcgcggccatggtgttcttcgggctgtgtcccctgctcctgggggccgcgatggctgcagagcgcttcgtgggcatcacacggcccttctcacgacccgcagccacgtcgcgccgcgcctgggccactgtggggctggtgtgggtgggggccgggactctcgggctgctgccactgctggggctcggccgctacagtgtgcagtaccccggctcctggtgcttcttgactcttggggcgggacgcggcgacgtggccttcgggctcatgtttgctctcctgggcagcgtgtccgtggggctgtccctcctgctcaacaccgtgagcgtggccacgctctgccgcgtctaccatgcgcgcgaggccacacagcgcccccgggactgtgaggtggagatgatggttcagctcgtaggcatcatggtggtggccacggtgtgttggatgcccttgctggtcttcatcctgcagaccttgctgcagacgctacctgtcatgagcccctccggacagctgttgcggaccacggagcgccaactgctcatctacctacgcgtggccacatggaaccagaksttggacccctgggtctacatcctcttccgtaggtccgtgcttcgacgcctgcatccaaggttcacttcccagctccaggctgtgtccttgcactcaccccccacacaggccatgctcagtggaccctgaaggacggtgccaatcaaagctggggttcttggtgactgctaacgacctgtctcctgtcccaggagcctgaatgtttggtgggatggagttacaacacagggctgactcctgtgaackacaaagatacctcctccatkytagggrratcctccctggccccctccccagamtacttktcagctargaggttggrgcatatgtggraggtccttgcaggaatytwtggttacmyagrgagaacctggggtgccgatggcatytcccatcttgccatagtccgcgtctgthtcarccccgttgtcccgggcttcatgtttgttcctttaggctcaaggatcatckgccttgggtgttggaagcacccactgtggtccmgtagctggcthtggagttaccaacctctccgtgtttaytgagccccctccccccacggstatccaacacacatgctcaataaatggttgaatgtccgggtawamarmarrwrmwmammmaarmrwmaaaaaaaaaaaaaaaaa

SEQ ID NO: 6421 - DNA, 600 bp, Rattus norvegicus
cccagcagtgcctcctgccctttctggagttcagtccttcctctgccatggcctctgtctgtctgcctcatcctttctcctgcccagcctaacacctggtctccctttcctgtagacctcgagttgctcctgtctcttgagacctcagttaggagaggctgctgtttatctgacaaaggaactcaattggggatagagggcaggggctgaaggcggaactctgcctaggggatgcctccaccacaaggggctgctgcttgtgtcaagggaggcaggcagaagagacgcattcactcctcagggacaggtacctgcacctcccctcactccagccctacctgcccaaagcctagtgagaaatctggcccctgcctgcgaagggtacacaacctacccatcatccctactgtgtcccgtctcgtcctgccgcctgtctgtgttattctgacccgggggagtaggtcactgaggggcctccttcctctgcctttatactcacggggctcactcactgccaagatgaccaaatacactaccacacgaaccaaggagcactcacccagccctgcagttcccacctttgaggttttgccatgggaa

SEQ ID NO: 6422 - DNA, 1245 bp, Rattus norvegicus; identical to SEQ ID NO: 2326

SEQ ID NO: 6423 - DNA, 600 bp, Rattus norvegicus
gaatcgtccagggattgaagggagaccaggaaaacgtacaccctgatgtaatgctggtgcaacccagagtagaatttattttgtcttttattgatcacattgctggagatgaggatcatacggatggagtggtagcttgtgctgctggactgataggggacttgtgtacagcatttggaaaggatgtactgaaattagtagaagctaggccaatgatccatgamctattaactgaagggcggagatcgaagactaacaaagcaaagacccytgctacgtgggcaacaaaggaactgaggaaactgaagamccaagcttgatctggtaccattgggatgatgacctgagacccccactggaaatctccaatcttttgaaaraacccggaagtgaggagtgtgcacggatgctgaatgtttgggaatgagaggatgagtgagtgaggcttgaaaacaccacactgaaaatcctgccacagccaacagcagcagcgctgttagtgagctaagtaagcactgactttgtagaaaacayaacatcagccatcttggaacagagaaacaatggwtttacttacttaytaaaaaaaaaaaaaaaaaa

SEQ ID NO: 6424 - DNA, 1400 bp, Rattus norvegicus
ggtgtgccctcaggctcactacaacatgtacccaccgaaccccgaccctgtccttgaccaagatggtgaatttgacctggatgagaccatggatgttgccaggcatgtggaggaacttttacgccggcccatggacagtcttgacccccgcctttccccacctgctggcctcttcacttctgccagaagctccttgtcctgaacgctggactccatgcttctcttggaaaagcaccttcagtgtgaagaacccgtgtcagttgtatccctgttcataccagtggctttgcaccttcgcagttccgccttgcccacagtgcggggtctggctaaagtagtggtggccttttcactcagacctcaagggtcccctggacctctcctctaagagctgaacctgtcattgctgacaaacctatttctccagtgcccttcacctgccaggggccactgagtgaaatgattctagaaaaggaagggaggcaagtttatgcaactaaagttggagttttactcctgagctagaagcttcctccggactggtgtgcgtgcacctgtcctcgcacatgtggtagcctaactgatgaacccctctaaagggagattggggctaaccttagtaaccctttatacgttagtgaatatgggctgcggattttgtgaccgctcacaatgtgcataagctgttcccaccaacacaggcggctgccaaagctgactgtgtcagttctcaaaccagcgtggacatgggattcgggtctaaggcctcrtctgcatcccttcttccccatccgatgtcctcacccttccatatagattcatcyttgctttttgttttgcttttttgagacagggtctctccatatatcccaggctgtccatgaatgatcctcctgcctcagcttctggagtgctaggattataggtttgcatgaccacacctgcctcagcctttcttccwykmskgcttgcaaccttgcttgttatcagaaaggaggggaatactggktgcctgggattaggagacytagggcgaaaaccttgtagcccacgaaaaggaacagagctgccagttactgcaggcaacacagtggtatgtgaggggggaggctcaacctggtccactctsctgggaggtaggacccggaacaggccytgcctgtgcaacatgggtgtggtctaggaaggcctctcgcaggcagctcttcccttggaggctgtgatagagcggccaggactagctgactaggagtcctggcttccaacytgagggaagcagaggatgcacagagggatggtttttatattttgtacatagaactcacatttatggaaacagtgtttttgaataaaatttcygttgggtttgtttttgcaaawmwaaaaaaaaaaaaaaaaaa

SEQ ID NO: 6425 - DNA, 600 bp, Rattus norvegicus
atgtgaatgccatagacagatggtcccggatcgtgtttccattcaccttttctctcttcaacttagtttactggctgtactatgttaactgagtgactgtacttgattttttcaaagacttcatttaacactgagtgaaatattaccctgcctgtcaagtttttataccagtatacacacacacacacacaaacaaacgcacacacaaacacacacatacacaaacacacacacacacacacatacacagacacacacaattgtatatatatgtgaactttctcagcatatatataaaatacacgtgtatatgagaatgtatgtgtatatgtttatgtacactggtgagagtgcctgtgtatgtaaaacaaatacgcatacataccatacattttgcaactatggacaatttaacacaggatgcatattaaagaaagtcatagctttttttttcttttttaattgaaagggacaagtatctaaatattatgcctcaagaatgagggcgagaaacacagtcatcccaaagtgtgtcttttattatcataagtttttgcttaagaatcaaaacggaattcttagttaatctttgggcactcc

SEQ ID NO: 6426 - DNA, 600 bp, Rattus norvegicus
accatgaccaccttgagtatcagtgccagaaactctttacctaaagtggcatacgcgacggccatggactggttcatggccgtctgttatgcctttgtattttctgcactgattgaatttgctactgtcaactacttcaccaagcgaagttgggcttgggaaggcaagaaggtaccagaggccctggagatgaagaaaaaaacaccagcagccccaaccaagaaaacaagcaccaccttcaacatagtgggaaccacctatcctatcaacctggccttggatactgagttctccaccatctccaaggctgctgctgctcccagtgcttcttcaactccaacagtgattgcttcccccaagaccacttatgtgcaagacagtcctgctgagaccaagacctacaacagtgtcagcaaggttgacaaaatttcccgcatcatcttccctgtgctctttgccatattcaatcttgtctattgggccacatatgtgaacagggaatccgctatcaagggcatgatccgcaaacagtagataatagtggcagcacagcaaccagatcacccatgaagcatccaaatcccaaaccccagagctccc

SEQ ID NO: 6427 - DNA, 600 bp, Rattus norvegicus
ggtgttttcctcatagattggaaggatgaacctgtttttacagwkkttttttttctgctagtgtctgagttatagttagttgtcaaagacagactttatttatggagcacaagtcagaaagcaaagaagaaacagacagaaaaacaaaacaaaaaccaaacctgacctacagaacccagttctggaattgcgtgctttcgcggggttgggctttgagaaggtttcattaatctgagagaaggagcttattttattttagttttgttttrtttttttcctcattcacaaaatcagttcctcaaattgaccaatagctgctgctttcatattttattattttgggaaagggtgtgtactcctaagtgtgtgctcatctgcacactgcgtgcatttgcgtgtgtgttgtgtccaggktagmgrtcacagggtggggtgggggctgtstgtatgttacatttttctctggattgatgcttggtgacttggctcatgaagcacccgctgcttggagtgggtgacctcatattgtcctcttccttcttatgaaccgagagcttgtgccctcgagagattctcctcagtcacgtcagaactcgctcg

SEQ ID NO: 6428 - DNA, 600 bp, Rattus norvegicus
gtctggactgcgcctcgcctccttcatccgcaccctatttcactggcctggagctcccaggggaactgaagttggatgcgccctacaacttcaaccaccctttctctatcaacaacctgatgtcagaacagacatcaacaccttccaaactagatgtggggtttgggggctacggtgctgagagtggggaacctggggtctactaccagagcctctattcccgctctctgctcaatgcatcctagcggcgcaactgggagaaatgcggtgatgggggtttgctgtgacagatgaccggttcttcggccctgatctttctggttacactctgcttatccagttaattaacatcgtatttggtctattactgtgatatgacccattggctactgtggtaactgcatggactcttcggtgggcctagggttggggtattgtgaaggcagatgcatttgggagtgttacgaaggtggccatgtcggacataccgtgaaggcaattagactggtgtactataaaagctgcatgttaagtgagtgatccactgggtgcctgatggccgcgatgtcggaggacatattgtttggccctttggatgct

SEQ ID NO: 6429 - DNA, 600 bp, Rattus norvegicus
gccacttgctggtgatcaagcattcagtctatgggtctacgagagccattcctattcaaaccacacttaataggatgctattctttactgacatttttaataagcgacaaatggtaactagaaacatcgtaggcccactttactctttatatggtaatatggattggcttttrtattaactagttttacagcctatctgaaaacatgtaacaggcaactcctgcagacacattctttgtaatgactttataatcctgcagtggcatgttcyggtaatgacttcagtctcctcgtccacactctccggttagtagagccatttatgtacatcgcrtatccctgatttcagagcaackgtgcagttgcacaggttcccacctcaaaatgggatgccatgactctgtctggataattctgtggaaaaaccattctgagctggatacggtgcctcatacctgtcatgtctactttcaggaggcagargcaggggaattgctgtgagttgttggtcagcctgggttacatatgagaccctgtctcagaaaaccaaacaaaaacttcccctgtgagttgatataagcacactgtcatatccgaatt

SEQ ID NO: 6430 - DNA, 600 bp, Rattus norvegicus
cccatgattcctgactacaacctgtatcaccaccccaacgacatgggctccattccagaacacaagcccttccagggcatggaccccattcgggtcaacccaccccctattacccctctggagaccatcaaggccttcaaagacaagcagatccacccgggcttcggcagcttgccccaaccgccgcttactctcaagcccatccggccccgcaagtaccccaatcggcctagcaagaccccactccacgagcggccccacgcgtgtcccgcggaaggctgtgaccggcgtttcagccgctcggacgagctgacccggcacctgcgcatccacacgggccacaagcccttccagtgtcggatctgcatgcgcagcttcagccgcagcgaccacctcactactcacatccgcacgcacaccggggagaagccctttgcctgtgagttctgtgggcgcaagtttgcgcgcagcgacgagcgcaagcgccacgccaagatccacctcaagcaaaaggagaagaagtcggagaaagggggtgcgccctctgcatcctcggcgcccaccgtgtccctggcccctgtggtcaccacctgcgcctga

SEQ ID NO: 6431 - DNA, 600 bp, Rattus norvegicus
gggaggtgtgtgccgtacacgcactatgaagattgttatgaaggttgggcaagatccaaatgccgtaacgcctgagcagttgactaccagccggccaagcaaagagtcagacaacactgtcaagacagccacacaggctcctggtcgggggtcccagggggactctgatggcaagcatgagactgtgaaccagcaagagaagagtggcccaggtgcaggtggtagtggcagcggggacaccgacagcttctttaactccaaggtagcattgttcgcagctgtaggtgctggctgcgtcatcttcctgctcattatcatctttttgacagtcctactactcaagctccgcaaacgacatcgcaagcatacacagcagcgggcggctgccctctcgctcagtaccctagccagccccaaaggggatagtggtacagcgggcactgagcccagcgacatcatcatccccttacggactacagagaacaactactgcccccactatgagaaggtgagtggggactacgggcatcctgtctacatcgtccaggagatgccacctcagagcccggcgaacatctactacaaggtctgagcggccgc

SEQ ID NO: 6432 - DNA, 600 bp, Rattus norvegicus
gcyttgcccttgatccctctgattttgaaggttttgcaatgtgtttactataaggtttaaataaaatgtttactattatagcacattacaactgaaaaggacttaagagttaaaacattaaatttcagctmcttagaaaagacctaaagaataatatcagyaactgacaattaatatgtgattttaaaaaacgaaagagtgggaggtcaaccccaccctttctggtccttattctaacttatggagatttttcttcagcactttctaatatatatttcccctctaagaaccctaaccaattcatggstatarccaaatrttcacttgggtaarctttaatatttagrcaataccatgtttgaatgtttccaacctggagtatatattgtctacacataaaaagaatawttttgtcagcctttcttagtgcctatgtggaattttkgtgaaaatgttaaaaaaggrtaattatataatatttcccttggaatattaagctatattttctttacaagtatttgtaatgtaccaatgcttttaacaacagaattttaaaaagcataataaattatattaaagartcaaaaaaaaaaaaaaaaa

SEQ ID NO: 6433 - DNA, 1400 bp, Rattus norvegicus
ttgtacatcaacattgagagagctgggcagcctgctgagaatggcagtcccgagctgccctgtggagagcagtctagcagcgaggcgggggatggcagtggcatgggggcaataggtggcatccccagtgactgtcggtacatcttcagccctggagggttggccgagtcaccagggcagctggagcagcagccagaaagccccctcaacgagaaccagaggcttttgttgttgcagcaagggctactgcctcacagtagctgttaacctgcaggcagaggacagctggggccccctggctctgccggccattgcgctggcttactaggccccgtctgatcacagcccaggcagcaaggtatggaggctcctgtggtagtcctcccaagctgtgctgggacctggactgaccaaattgcccaatcccagttcttcctgcagccgctctggccagcctggcatcagttcaggccttggcttagaggaggtgagccagatctggttgcctgaatgcaggcagctggcaggaggggagggtggctgtgtttccatgggtaccatgggtgtggatggcagtaaggsagrgkagcagcagccctgtgggcccctaccctcctggctgagctgctcctactttagtgcatgcttggagccgcctgcagcctggagctcagcactgcccaccacacctgagtttaaatgccaggtttgcccctctacgtcacaaagagatgtccttgtattgttcccttttaggtgacgattaggaagggattggcacacttaggtccttaagccccatgacaggaaatggtgggatattctcaggtccgaatcctcatcaccttcctgattccccaccctgccatggcctggaactgactgggtggctgagggatgcacgaggacaaagactaccgagatccgactcytaaaggcagggtctgagtctsccagatggagggggtgctaagaggttggcccakgagtcwgscawtksaggrsysctmwragsttcyasagtctgtctgagcatgctaccaagccsccaaacatcccagaactracaggcagttttgtctgagcccagcccttccacatggtgacccttaggtctaccatcctctctgaatggatatcacwtgtcccaagtcttaagagagmgatacacctgatggctgatgtgggtaagaaaagttcctggaaccagggctggggthtaggcaccgcactgcaaacctcctkgaatgcagaggcaggctcttgggctgttaggaacatttccaagctattaagttgctgtttcaaaacaataaaattgawmcamaaaaaaaraaaaaaaaaaaaaaaaaaaaaaaaaaaaaaaaaaaaaaaaaaaaaagaaaaaaaaaaaaaaaaaa

SEQ ID NO: 6434 - DNA, 600 bp, Rattus norvegicus
mwcwgmatggsmgcsrtccdctsmctkkktkkytttttaaaaaaaactttattttgcctttggtttgcgttcccttccctgtcscctcatcccatatccagtttcttcttcagttcttgctcagacttagtggkcctggcggscctctcctccggsctcccctctgctcccagaggagtgctgggaacctgcccaaggacaggccgttgggaggatggagagtgaggttattaakcaccagcctcsaagagagtgaagtgggaagccatggagtcacctggatttggaggcaaaccagcggaggacacatctagaagttgccccaaccccagcaccccagatgccttctatgctgtcgtctgggcagtctgtctgctgccacccgacccggggcagaaaagcaataatgtccagggacaggcagaagccttcggaagctaagggatctggtttggttccgtggaaaatggagccaagtcctaggatcctcatgggagatccaggagcakgacctgcctcctgcactgtgtcttcctcccaagctgctctcttgagtctccataaagcaggaggaaggttccgggtgccctcctgcccaca

SEQ ID NO: 6435 - DNA, 1400 bp, Rattus norvegicus
aagaggacatttacatcaccacasrargccttaccactactgcccgaatgtccgagacagcagataccgctccagatgctgagcctgtcccagactacaccacggttcacaccgtgaagtccccaaggggccttatactcaacgcgactgctttgcctttgcctgacaaaaagaagtttctctcctcatgtggctatgtgagcacagaccaactgaacaaaaksatscagtascctttcctatctttaatggcaaaagaaatgactgggcacgaacgcctaaaccaaaactatgttttaaatctgtgttgggagagcgtgagagtgaatgtggattcaaaaataccttttctggaaacgtcgaaacattatcataacgtggaaaatcaagaatatgtaatcagmtrgatactcccattgtgaattttaaatattttaaagaatcgtctttaagactgtttagtggcagtgattgtctgtgctgtgggtcttaactttgtgatactaagtattaaatagctacgtttttcatgtatgtagatcatgcttttttgaaaaagcaaaacaatcaggtggcttttgcagttcaggaaattgaatgcagattttagcacagactgatttctttttcctttttaaatagctaggagctaaaactctaggggagaaggtaaaactagtttggatatgcaaaacayttattttgacataaaattgataaagatatttttaataatttamavwrwaarmawrarwattttataatacactacagatatattgttagtycayaacaatccatctacrgatgtaacaactacaatgtgtagaggggttgatgctttggtcaatgramytmaagaaaaatgaacaagttagatttttacaaagcccttttttataactcccaaaayttcttaaatctaaaaatgtctgcattattggaasrramymakyttrmrkyygyaaakgwwtatttttttwwttttgaaaactttaattttttatacaaattaacgtatcatacaccaaacagtaacagaagtgattataataatggaagaaacagtttcttcmccaaatttccattcaagccacaargctgtgtgtaagagaagtagaagtgatgtggtgtgactggctaggataaaggagatcttcargagcacatgggtttagagagcccagggatcargaaaaggaggctctcacatctgagcagtgctgtcctttcaaacacagcttggcttttatagtaacctaagaattaatgcatacargaggagtttcacatgtgtgaaatccaatagcagatgggttaaagttaaacaagttatagcacaggaaattaaagacctagatcyytcgtkycgcagccagacacatacttttaattcaggg

SEQ ID NO: 6436 - DNA, 846 bp, Rattus norvegicus; identical to SEQ ID NO: 2340

SEQ ID NO: 6437 - DNA, 600 bp, Rattus norvegicus
catctgtgccacctgggagtctgctacagsaattgtagagctttggcttgacgggaaacccagggtgcggaaaagtctgcagaagggctacattgtggggacaaatgcaagcatcatcttggggcaggagcaggactcgtatggcggtggctttgacgcgaatcagtctttggtgggagacattggagatgtgaacatgtgsgactttgtgctatctccagaacagatcaatgcagtctatgytggtagggtattcagccccaatgttttgaactggcgggcactgaagtatgaaacacacggtgatgtgtttatcaagccgcagctgtggcccttgactgactgttgtgagtcctgaggcacmtcctgggattacattctctcccttgtccctccttatgaaccttttaaccccagcagatgttgtagatctgttttgtgaatatggcctttcacttmtmtgctctgtggtcctcagcactagagcatggaatttaaatgtaaggcttccagcatgtgcatcccactactctttatcaaagagaacctgacttammmamrrwrwrwrwawgtgtatttaattaaaaaatttttagacat

SEQ ID NO: 6438 - DNA, 1400 bp, Rattus norvegicus
aagaagatggcaaatcactctgagaaggtttatgtgaatgtggcacaccttggaggtctccaggaaaaatattctgaaaggctctacagtcacaaccacaactttgtgaaggccatcaattctgttcagaagtcttggactgcaaccacctatgaagaatatgagaaactgagcatacgagatttgataaggagaagtggccacagcggaaggatcctaaggcccaaacctgccccgataactgatgaaatacagcaacaaattttaagtttgccagaatcttgggactggagaaacgtccgtggcatcaattttgttagccctgttcgaaaccaagaatcttgtggaagctgctactcatttgcctctctgggtatgctagaagcaagaattcgtatattaaccaacaattctcagaccccaatcctgagtcctcaggaggttgtatcttgtagcccgtatgcccaaggttgtgatggtggattcccatacctcattgcaggaaagtatgcccaagattttggggtggtggaagaaaactgctttccctacacagccacagatgctccatgcaaaccaaaggaaaactgcctscgttactattcttctgagtactactatgtgggtggtttctatggtggctgcaatgaagccctgatgaagcttgagctggtcaaacacggacccatggcagttgcctttgaagtccacgatgacttcctgcackascacagtgggatctaccaccacactggactgagcgrccctttcaacccctttgagctgaccaatcatgctgttctgcttgtgggcyayggraaagatccagtcactgggttagactactggattgtcaagaacagctggggctytcaatkgggtgaragtggctacttccggatccgcagaggaactgatgaatgtgcaattgagagtatagccatggcagccataccgattcctaaattgtaggacctagctcccagtgtcscatacagctttttattattcacagggtgatttaktcacasgctggagacttttacaaagcaatatcagaagcttaccaytaggtacccttaaagaattttgcccttaagtttaaaacaatccttgatttttttcttttartatcctccctatcaatcaccgaahtacttttctttttaaagtacttggttaagtaatacttttctgaggattggttagatattgtcaaatatttttgctggtcacctaaaatgcagccagatgtttcattgttaaaaatctatataaaagtgcaagctgccttttttaaattacataaatcccatgaatacatggccaaaatagttattttttaaagactttaaaataaatgattaatcgatgctatagaaaaaaaaaaaaaaaaaaaa

SEQ ID NO: 6439 - DNA, 500 bp, Rattus norvegicus; identical to SEQ ID NO: 2343

SEQ ID NO: 6440 - DNA, 600 bp, Rattus norvegicus
aaggagaaccctgcacatgataggcctgggaggcatggctgtttgctccgttttcatgacgatttctctgttactgaaggatgaatatgaagccatgagctttgtctgtattgtggctatcttggtctacgtggccttctttgagattggccctggccccattccctggtttattgtggctgaactcttcagccagggcccccgaccagctgccatggctgtggctggctgttctaactggacctccaactttttggtgggaatgttcttcccctcggctgcggcctacttgggagcctacgtttttatcatcttcgctgccttcctcgttttcttcctaatcttcacctycttcaaagtcccagagaccaaaggcaggactttcgaggatattacccgggccttcgaggggcaggcgcastctgggaaaggctctgctggtgtggagttgaacagcatgcagcctgtcaaggagacccctggcaatgcctgagccggacctcctccctcacctccctccactgtggaaagccaacctcccctgaagtggcgagacctcatcaggatgaaccaggactgcttctgagcgctcgtatcaca

SEQ ID NO: 6441 - DNA, 1305 bp, Rattus norvegicus; identical to SEQ ID NO: 2345

SEQ ID NO: 6442 - DNA, 600 bp, Rattus norvegicus
gtccttactcaggacagtatgactgtggaagatgtagagaccataatcagtgagaccacgtacagcggctttccggtggtggtgtcccgagagtcacaaagacttgtaggctttgttcttcggagagatctcattatttcaattgaaaatgctcggaagaaacaggacggggttgtgagcacgtccatcatttatttcacggagcactcacccccaatgcctccatacacgccccctaccctgaagcttcggaacatcctggatctcagccctttcactgtgacagaccttacgccaatggagatcgtagtggatatcttccgcaagctgggactgcgccagtgcctggttacacacaatgggcgcctacttggaatcattaccaaaaaggatgtgttaaagcacatagcgcagatggcaaaccaagaccccgagtccattctcttcaactagaagcatggggttgttttggatgtaaaacaaggacattgcggaccatggatgtactttattaactgggtacccmaaacacatttcccatgtttgatggtgaagtcatgttagtgtgttgtctgtttcctacaagttaatccagttgca

SEQ ID NO: 6443 - DNA, 600 bp, Rattus norvegicus
ctgccagtctcagttcacatacccggcctcctgtgcagggacgcagcacctcccagcagggtgaagaaccccaaaagacagcatcacctcacccccacctcaacaaatctcagtccctgactaacagcctcagcacgtcagatacctcccatcgaggaaccccaagtgaagatgaggccaaggctgagacaatccgcaacctgaggaagtcctttgccagcctcttctccgactagcctctatccaggctggaggacaggagggcaagaagactcagtgactggagccctgtctggttccctccttctcagccttggttcctgatggaaatatgcttcctaaatacatctgtcccaggaactggtgatctacattcccacctccttgaccatgacattctaatgctgtctgactgagcggtagccttgagagcccctaggttcctcaacacggaccttctagacagacaaggcatcactacatccaccatacgcttgctccctgccgccggtaccacgtgagatgtctgtgtggcttgtttttgcagtcttattagtattttgcttgcctttgggctgaggcccccttctaagctgtgac

SEQ ID NO: 6444 - DNA, 600 bp, Rattus norvegicus
atcctgagagatacaataggaaccttctctttaaggacctcaacaattgtttttctcactataaaaataattgctgatatcatttttatagtgagaaaaacaataaaaataattgctgatatcattttcagaatttcaggtgatatttaagatttccctggggaagacttttatggtgacccccacactacactttaaagcttccttcattttcacataacattttctcttaactcaatcaagggaaatatgtgtttcccacacatctttaaatgagtataaaactttcctattcctgaaacagtatttaatttcattgaatttatggttcacagttggaagtatttagagctgaaaagatacattctcattaagccacattgaaaagttaacttttctatgttcaggatgtctccatatgtctatatgtaggagttctcaaatattattattattgtagacatgatgctcctagattagacttctcactcctgtgtcatttcctgtttctagtcccttctttcattactcctgtcacacagttgaatgttttgtttagagcactgacaaacttaatcaggttattaaaaatcacattag

SEQ ID NO: 6445 - DNA, 600 bp, Rattus norvegicus
actaacacccagcccagcaagggaatttaactgactccttaaagcagagagtatccccttccaaggagagaaagatggagtccagagagcccccttgttaatgcccctcaacggggcaaackcasgagsttyyttwyywttttcttcataatgcgcststaattccaccccccaaatgrgacagtttgagagacagtgagtgccccgaccgggacaagtgtgcacatctkttcgactctcttcctgatgccagtggctgggctgggcytgccctgagatgagagagaagggagggaacgwtagggttccaaagtctytgggggrmaagcatttgcagtggatattgggaaccttccagtgctttgtgtattgtttattgttgtgtgtgttgtttgtaaagctgtcatctgaccaaggtctcctgtgctgatgccagggacaggcagggaaggggktgggggctcttggggtgacttcttttgttaactaagcattgtgtggttttsccaattttttttgtaatttttttgctaacttatttggatttccttttttaaaaaatgaataaagaccggttgctatcaaaaaaaaaaaaaaaaa

SEQ ID NO: 6446 - DNA, 600 bp, Rattus norvegicus
cagcctggagggaggtggggatttgtgccaaggtgaagagtctttttgtttgttttggtggggaagaccggaggattactgggctgtgggactttgaagaagttccctgatctacttccctgcagaagaacacttcctgtcccagctcttgctgctggaggcatggtaaaaagaagatctcccaggattccaactgggggtccccaaacccagcctgcctctttgcacttggataacacagatttacccgtctgtcctctgtatttctctctccttcccmacytyacacaygcaygggssyrhgygacatgygcgcgcaacacacacacacacacacacgcacgatatgcacgcacacatgcacagcacccgcgcacacagaggccgscagacagatgagcagagcccctccacagcgttctgtgtgggaaagaagtgcagcccctgccaagccccatgtccctytgcatgcgccrcacggagcgtctttgttctttttaataacttcaaaataaagtcttgtttcmgtgaaaaaaaaaaaaaaaaarrrmrrmmrmaaaaaaaaaaaaaaggccaaattaccaaaaaaaaaaaaaaaaa

SEQ ID NO: 6447 - DNA, 600 bp, Rattus norvegicus
gaagaaacaggaagaagaaaaagaatccgtgtgccgccaagtttcagaacttctgcattcatggtgaatgcagatacatcgagaacctggaggtggtgacctgccattgtcatcaggattactttggcgaacggtgtggagaaaaaaccatgaagactcagaagaaggatgacagcgacctatccaagatcgcgttagcagccataattgtctttgtctccgccgtaagcgtcgcagctattggcatcattaccgccgtcctgcttcggaaacgattcttcagggaatatgaagaagcagaagaaagaaggaggctgcggcaagaaaacgggactgcacatgccatagcctagctgatggcaattcaggataacagtcgagtcactgccaagccacacccacaccggaagtgacgaatcggtccttctttcagcgaaggctccagaagttcagttgtcactttttgtgatagtcttatttctgtacataaagaaatgtgtgaagataaaatattttttcacgttgtaaataatttatttaatatttaagcgttatttattttatagcctcattaaatgcttttttaaacaaagaaaaaaa

SEQ ID NO: 6448 - DNA, 1177 bp, Rattus norvegicus; identical to SEQ ID NO: 2352

SEQ ID NO: 6449 - DNA, 1400 bp, Rattus norvegicus
tggatgtccccaatgacagcccctttcaaattgtgaagaacccacggtctgtgggaaaagccaatgaacagctggctgctgtggtagcagagacccagaagaatggaacaatcagtgtggyrctksktkkmswccacagtmtgksaayyggamkmatcyctggccacgccagggtccaccctgacctatgcgtcatttgggtggatgctcacactgacatcaacactccgctgacaaccagctctgggaatctgcacgggcaaccggtggcctttctcctgaaggaacygarwkkmwagktmmmagrygtmccagraykctcctgggtgaccccctgcatatctgccaagsacrwsgtgtacatcggcttgcgagatgtsracsytskkkwayastatwtartmmawrctctgggcattaagtatttctcaatgactgaagtggacaagctgggaattggcaaagtgatggaagagaccttcagctacctkctksraaggawgawrmkkyccattcacctgagttttgatgttgatggactggacccagtattcaccccggctacgggcacacccgttgtgggaggcctatcttacagagaaggtctctacatcwcasmaswwmtttrywagwcagggstactttcaggactagatatcatggaagtgaacccaactcttgggaagacaccagaggaggtgactcgtaytskgaacasggcagtgscgttgaccttgtcttgttttggaacgaaacgggaaggtaatcataagccagagactgactaccttaaaccaccgaaataaatgtgaatacatcgcataaaagtcatctggggcatcacagcaaaccgaacagaaccaggccaacgctgctcctcccaagggcttgttcttttagaaaaaagaatgtttttycccaatatgtatgtattctagcagttcctttctggaatgaaattyagggtgtgggaattaaaacagctatgaaattaggagacacgtacttcccattttagcagaagttatccttaagaagtagtataaattaatatctaattaaaaaatgcaccaggagttaaaatacacagtgatgtcaagtgtcaactcacggttggaagcaaaggcatctggagacgaggcctgcatccacgtcgttcaaaacatgtgatttttgtaataaactctttwtawtaaaawwmmrwwrwmwrmatctttccaaacacatgtaatgtacttacccatgaacataccataccacacatgtacctatcataccattacatattaacatatatattcccacagggcacagagataaccatccctaaaacaatggaaaacattgaccattaaaagctggttcctctctagcctgtaaagtggatcatctcaggctta

SEQ ID NO: 6450 - DNA, 600 bp, Rattus norvegicus
cccagaactttggcctccagcatctctccagcggccacttgttgcgggagaacctaaagaccaacacggaagttggtgacgtggcaaaacagtacctagaaaaaggtcttttggttccggaccatgtgatcacgcgcctaatgatgtcagaactggagacccggagtgcccagcactggctattagatggattcccaaggacattagtgcaggcagaagctctggacagaatctgtgatgtggacctagtaatcagtttgaatattcctttcgagacacttaaagatcgtctgagccgacggtggattcacccttccagcgggagggtctataacctagacttcaacccacctcaagtgctgggggttgatgacatcaccggcgagcctcttgtccaacaggaagatgataaacctgaagcacttgctgcccggctaagacggtacaaggacgcagcaaaaccagtcatcgaactgtacaagagccgtggagtgctccaccagttttctgggacggagactaacagaatctggccttatgtttacacgctcttctccaacaagatcacacccattcaatccaaagaagcctactgagcct

SEQ ID NO: 6451 - DNA, 1400 bp, Rattus norvegicus
acccggtgtcagaaaacaaccaagtacagagtggggttgctttccaccatggcaagttcatcatgagtctccggaaagcagctatggcagagcccaatgtaaagtttatagaaggtgttgtgcttcggttactagaggaagatgatgctgtgattggtgtgcaatacaaggacaaggagactggggacaccaaggagctccatgccccgctcactgttgttgccgacgggctcttctccaagttcaggaagaacctcatctccaataaagtctctgtttcctcccacttcgttggcttcattatgaaggatgcaccacagtttaaagccaatttcgcggagcttgwtctggtcgatcccagtccagttctcatctaccagatttcacccagcgaaactagggtgcttgtcgatattcgaggagaattgccaagaaacttaagagaatacatgacagaacaaatttacccacagatacctgatcacttgaaggaatcatttctggaggcctgtcagaatgctcgtctgcggaccatgccagcaagcttccttcctccttcctcagtgaacaaacgaggcgtcctacttctgsgagatgcgtataacctgaggcatcctcttactgrtggaggaatgacagtcgctttaaaagatataaaaatatggagacaactgttaaaagatattcytgacctttatgatgatgccgctattttccaggccaaaaagtcattcytttggtcaagaaaaaggagccattcctttgttgkgaacgtgctggctcargcgttgtatgaactattttctgctacwgatgattccttgcgtmagyyccgaaaagcttgctttctttattttaaacttggtggagaawgtttsactsgkcckswhrgstykytttstatatkgyctcytgacyctywcctatkgmttysmcrcttcttctccgttgcagtctatgccacgtatttctgcttsaaktcrgagmsrtgggmtacaaaacctcgggctcttttcagtagtggtgctatactgtacaaagcgtgctctataatatttcctctcatctattcagaaatgaagtatctggttcactgaaagggaaaccacatggaagtcattgggacttgaggaggatgtacatagcctaggactgtgtgtgtgacttctgcagtggtgactcaaggaccaagcttgtgtataagcatgtaaatatatgccttaattcacaattgagaatgaagggtcaataagctagatgtttaaaagaatgattgtttccacaaattaatgttaacactcaagtgtttggatttcagtattggggtgattcaattggggacaatgccaaataaaatgaaggagtggaactcctwaaaaaaaaaaaaaaaaamcctcgtg

SEQ ID NO: 6452 - DNA, 600 bp, Rattus norvegicus
cattggcagactcattgggattgtcaccctaaaggagctccggaaggccattgaargctctgtcacagcacagggtgtaaaagtcaggccaccccttgccaskwkscgggacagtgccacmagcagcagtgacacagagaccaccgaggtgcatgcactctggrggccgagatcccgccacgkcctcccacgagakggtaccccctctgatagtgatgacaagtgccagtgaccmccatactrgacggcctgtcttccttctgcaagccagcagtgaccagaagytggaacctgaggccatcctcamtgtgggctgccagctcccccattttcaacacctcccagccggaggaccagcaatgctctggcaggaggtggggttctgtggcccctgcctcgtcttttgagaaaagggcagaactaaaatgggtttatactggaacctccaatgacaagatgtatatagaaatttacaaagatttttatattaatttaataaaacaataaatagaataaacacctrrwdarmmamwmawrwrtrraaaaarraaaamawrmrggcgcaggcttattccctttagtgagggttaattttagctt

SEQ ID NO: 6453 - DNA, 1400 bp, Rattus norvegicus
aggagaacaggatgccatcagggagacaggactcccccgtggaagataggatacctccaggaagacagaatgccccccaggcagccctgggacagcgggaaacactagggaccaagctatccctggttcactcgggattttgttgggttgtgggcggggctcaggaaagattgtccctgctggtcctgctccacgaccacccacccggcaaggttccctcctagagaaccttgtcagagacagaacgggtccccacaggcgcattcttctttccaacacccatggcgcagttcctgagactttgcatctggctcgtagcgcttgggtcctgcctcctggctacagtgcaggcagactgcagccaggactgcgctaaatgcagctaccgcctggtacgtcccggcgacatcaacttcctggcatgcacactcgaatgtgaagggcagctgccttctttcaaaatctgggagacctgcaaggatctcctgcaggtgtccaagcccgagttcccttgggataacatcgacatgtacaaagacagcagcaaacaggatgagagccacttgctagccaagaagtatggagggttcatgaaacggtatggaggcttcatgaagaagatggatgagctttaccccgtggagccagaagaagaggccaatggaggcgagatccttgccaagaggtatggcggtttcatgaagaaggatgcagatgagggagacaccttggccaactcctccgacctgctgaaagagctactgggaacaggagacaaccgtgcgaaagatagccaccaacaggaaagcaccaacaatgatgaagacagcacgagcaagaggtatgggggcttcatgagaggcctcaaaagaagcccccagctggaagacgaagcaaaggagctgcagaagcgctatgggggcttcatgagaagggtcgggcgccccgagtggtggatggactatcagaagagatacggaggcttcctgaagcgctttgctgagtctctaccctcggatgaagaaggcgaaagttactctaaagaagttcccgagatggaaaaaagatacggaggctttatgcggttttgaagcccttcccagcagtgatcccgggcccccactagcctgctccatcccccgtgagcaactgccccatcagtgatgtttcttgtcatgtgctgcttgtgctgtacagttgccctcgtggtctggataactgctgcctgaaagctgtgatttttagggggttgtctgtattcttttgagtcttgaagctcagtattggtctcttgtggctatgttatcatgctgaaacagtctgttacctcatcccttctgacaaaacgtcaataaatgcttatttgtatataaaaataataaacccgtgaacccaactgc

SEQ ID NO: 6454 - DNA, 600 bp, Rattus norvegicus
ggagyrsrtrkaagacaaacaatatccccagaaatgccaggacccccttttgtcacacctgcagcccccctcacctggtcagacacatggggggctgaagcgctactacagcatctgccaagacactgccttgagacacccaagcttggaaggcggggcagggatgagccccgtggaaaggactcggaactccttgagccccaccatggcacccaagctcagcttagaggttcgaaaactcagcaacggcaggttatccacgtccctgaggctggggcccctgcagcctcggggagtaccacttcgagagaagaaggccacccagatggykktcwttgwrcyyrgagycykmrttgyckgctggctgcccttcttcctgactcacgttcttaatacccactgtcaagcatgccacgtgtccccagagctttacagagccacaacgtggctaggctatgtgaacagtgccctgaatcctgtgatctataccaccttcaatgtggagttccgcaaagccttcctcaagatcctgtcctgctgaaggaggagaagagaccgcactcctttaccacttcgagatgccaggcagtttgaaccctg

SEQ ID NO: 6455 - DNA, 600 bp, Rattus norvegicus
attggcatcagccatggctcagtggtagcaggtgtaattggcgctaagaaaccacagtatgacatttggggtaaaactgtgaacttggcaagccgaatggacagcacaggagtgagtggccggatccaagttcctgaggagacctatctcatcctgaaggatcagggctttgccttcgactaccggggagagatatatgtgaagggcatcagcgaacaagaagggaaaatcaaaacatattttctcstgggacgagtccaacccaacccattcatcttacccccaagaagacttyctgggcagtactctctggctgcagttgtccttggscttgtccagtctctcaacaggcaaaggcagaagcaactactcaatgagaacagcaactctggcatcatcaagagccattacaaccggcggactttgctaacgccaagtgggccagagcctggagcacaggctgaaggcactgacaaatccgatttgccataaaagcattttctttgtgtttctttctctttttttgtatttcttttatatataaaataaatatactaataaaaaggttwrwywwwwwwarammaaaaaaaaaaaaaaaaa

SEQ ID NO: 6456 - DNA, 600 bp, Rattus norvegicus
gacggcggcgagatggtgcacgaggtggatatgatcatcaagcacaacaagtttcagagggacacctacgacttcgacattgccatgctgaggctgaagacccccatcacgttccgcgagaacgtggcccctgcctgcttgcctcagaaagactgggccgaggccacactgatgacgcaaaagacaggcatcgtgagcgggtttggacgcacgcacgagaagggccgscagtccaaagtcctgaagatgatggaggtgccctatgtggrmcgcaacacctgcaggctctccaccagcttcagcattacgcagaatatgttctgcgcaggctatgacgccaagcaagaggacgcctgccagggggacagcggtggccctcacgtcacacgattcaaagacacctactttgtgaccggcatcgtcagctggggagaggggtgtgcaaggaaagggaaatacggcatctacacgaaggtcacggccttcctcaaatggattgacaggtccatgaaagccagggtggggcccacctctgagaccccaaggttaacccatccaccctattaaagcagtccttctccagaaaaaaaaacggaattc

SEQ ID NO: 6457 - DNA, 600 bp, Rattus norvegicus
ggcccacagtgtatcacacctgaaactgcttgctaatgggcctttatagtkkacagtraggtgccctgagcccctttctacctgtgggctaaawacagttcactccggtgatctattgagttttaagkttcccttagatctytccctmtggtgttggcttacccttytgccaggttcagtggtgctacgagctgstaaattgagcctttgscctcctgtacttggggctggagtccattyagggtgggtcagcaggtggagtctgggacttcakacccaggtgtcttgccccacytactgtttccccagctagagccctgactgagcctttagcttggattctrtggattmtggcctaagggctgraaaagctggtacthtagggcaggmswscccwwtycctkayctkgcsccamtywtggragsgkwscagkaagggmctgttctcttttgatmscaagggtraagggaattctttttttgttttttaaacagggtttctctgtaggtcaggctgggcttgaactggatcagcctgtctctgcctcctgagtgccgggattaaaggtgttcgttdtcmmhdmrwraaaaaaaaaaaaa

SEQ ID NO: 6458 - DNA, 600 bp, Rattus norvegicus
ctaattttagcaaatgcattcatattagctgatgaaaataggctttcccgtggacaaatgcagccagcttcttgtatttttatacatttttttgtcagtcagagacatcagtatgtgcttacttgtgttcaagtagaggaaatgcagtagagtctgataggacatattcttggtaccacagacaaaacaaatcttctgttgcattgactatcaactgctgcagatacattagagaacacacctagcccccytccagcytccctctgttatcgctcgaagacattagsrtcataggcaagtagttaccttgccaaatgagtcttgtgtggcagatgtctgattttgtatctttaaactgttaatggtatgtgtctgcttcagttaacagggaaaaagatttcttcctcattgtttatgatacaaaacccaagtgccaaacaaagctagttcttcaagggatagatgagaaactgaatgtctgacaagtagactcagcgaaaatacattatttttcagaggctgtgtattcatgcagtacaagtccttgtattttgtaaaaaaaaaagttaaataaatgatctttaaaataaaaaaaaaaaa

SEQ ID NO: 6459 - DNA, 600 bp, Rattus norvegicus
tgtgtggaccagttcaccaccctgtgtgtcactggagtaccagaaaactgtaaatcctggtctgtgaggatctgaagagaaggtctccascaktggtttgtaccgcacmaggattcyttggagccacaagcacatcctgtagtatccagatttccgcatgccgsgtgggactcagcaggatgacattttcargaagatggrcattttgaycmaaataagagctgcaaacaaaccaataagcaaatggggagctgttggchtaaggggcgaatcagcagyttggatgatttsgagtccactttgaccacgtgtttgaaatgagtttaggaagcatttgtgttatgtccctactcactcaatggtgtatgtaaccagaatcctcacacacctcytgaatcttaaaccaaagttcctctagatctgcatgccatattcagaaagcttacatcgctcaagtcactcaaagtgccatgctttaaccccagagtcacactcatagttttcagcgagacagcagagggacataaaaacctccacctacgtttgcatcatggaaggcaataaaaatgaagtgaaawmarraaaaaaaaaaaaaaaaaa

SEQ ID NO: 6460 - DNA, 1400 bp, Rattus norvegicus
ctggaacacgagcaagagggatcatcgctgtcctctgggtccttgcctttggcattggactgactcctttcctgggttggaacagtaaagaccgtgccaccagcaactgcacagaacctggggatggcatcacgaataagagctgctgccctgtgaagtgtctctttgagaacgtagttcccatgagctacatggtttatttcaacttctttgggtgtgtccttcctccactgctcatcatgatggtgatctacatcaaaatcttcatggtggcctgcaagcagcttcagcacatggaactgatggagcactccaggaccacgctgcagcgggagatccacgcggccaagtcactggctatgattgtgggcatctttgctctgtgttggctccccgtgcatgccatcaactgcatcaccctcttccatccagccctggccaaggacaagcccaaatgggtgatgaatgtggccatcctcctgtcacacgccaattcagttgtcaatcccattgtctatgcctacaggaaccgggacttccgctacagtttccacaggatcatctccagatacgttctctgccagacggacaccaagggtgggagcgggcaggccgggggacagtcaactttcagtctgagcttgtgacctaggctctggcctttgggagaagaaggcttaaaatwaacaatggactggacacagctggtgacctcactgtggaggacaactaccctctcaagcatgtggcccacytgccctgaacgcttgccaggagtcacacaagtctggctcacacgtacatgcaactaggaggccctgaggctaacagatacacttaggaatctattcagctgctcttacttactgtgtggatggcgggcggctagaactgattccaaaaactgttttatttttaagaatctgcctcattcgtggtagaaaaatgactgaaacttaccttactgtgaaacactgtgaactatataatgtaagtatttttcacttacagcaatgggaaaataaaagttggctctattaamwwawamwmawwmmrrrramarcaactcagaaaactgaagtataattcttcagtcaagatactgtagtgttaatttagggaatggtactaccctaagtttgaaagtagaattatgtaacaaamcmwtwwrarwwmarwawmwwmcttgcccacaaaacactagaggtggaaacttggagagctgggtccttcctccactgcacccctgctttagagctaggtactagagtttgcttctctctcacattacagtttattggatcccaaagtatgaaaattttactgagcaaaatcccctagctgtgtattatatccagtgaaataaaactttgaaaggtgaaaaaaaaaaaaaaaaaaaa

SEQ ID NO: 6461 - DNA, 1400 bp, Rattus norvegicus
gtggcaggaaccagtaccagagcccagcgctcttgctctgtccccccagatcagcagccctgggtcaatggcctacaattgctcatggaaaactcagtaactgagtcagacctcccaaaccccagcatcctgattgccatgaacctggccagcacctacaacctggaggcccagaagctcctgacttaccagctcatggccagtgacagtgcagacctgacaaatgggcagctcgccctcaccattatggctctcacctcctcctgccgagaccctggaagtaaagtgtccattctacaaaagaatatggagagctggacaccttcaaacctgggtgctgaatcctcatccttctatgggcctgctctggcgatccttgcactgtgccagaagaactcagaggcaaccttacccatcgcggtgcgcttcgctaagaccctcatgatggaatcctctcccttcagtgtggacacaggagcagtggcaaccttggccctgacatgcatgtacaacaggattcctgtgggttctcaggaaaactacagagacctgtttggtcaggcactgaaggttattgtggataatatcagcttgaggatcaaagctgatggtattattggagacatctacagcactggccttgccatgcaggctctctctgtgacacctgagcaacctaccaaagagtgggactgtgagaagactatgtatacgatactcaaggagattaagcaggggaaattccagaaccccatgtccattgcccagattctcccttccttgaaaggcaagacttacctagatgtgccccaagtaacgtgtggccctgatcatgaagtgccaccaactttaactgactatcctaccccggtccccacttcaatatctaatatcacagtcatatacaccataaacaaccagctgaggggggttgatctgcttttcaatgtgaccatcgaggttagtgtgaaaagtggatctgtgctccttgctgtcctggaagaagcgcagcgcagaaaccacatgttcaaatttgaaaccacaatgacatcctggggccttattgtctcttctatcaacaatatcgctgagaatgttaagcacaagacctattgggagttccttagtggcaaaacgcctttgggtgaaggggttgcatactatattcccttcaactacgagcacatcacagccaacttcacccaatactgagaaggagtatcttctgttgtatgtgaccaaaggatggtttggtttcttttcatatcgtttcaaatctgtaccaagaaaagcagatattaacagtgctactccattcctgagccacggtgtggaataaatgatgcaggttcctgaggtgctcaccactgtgactcatgaaataaaattcctggcttctc

SEQ ID NO: 6462 - DNA, 931 bp, Rattus norvegicus; identical to SEQ ID NO: 2366

SEQ ID NO: 6463 - DNA, 1400 bp, Rattus norvegicus
ggaagatcgacaccaaggagaacaacatgaagtactgggagaggaatcagtccattgctattgagctctctgacttggttgtgtactgcaagccgactagcaaaaccaaggaccatttggaaaatcctgacttccgggaaattcgctcttttgtggagacaaaggcagacagcattgtcaggcaaaagcccgtggatctattgcggtacaaccagaagggcctgacccgtgtctaccccaagggacagagagttgactcttccaactacgaccccttccgtctgtggctgtgtggctcccagatggtggcgctcaatttccagactccagacaagtacatgcagatgaaccatgcattgttttcgctcaatgggcggacaggttacgtcctgcagcccgagagcatgcggtctgagaagtatgacccgatgcccccggagtcccagaggaagatcctgatgacactcactgtcaaggttcttggtgcacgccacctccctaaactagggcggagtatcgcctgtccctttgtagaggtggaaatctgtggggccgagtatgacagcaacaaattcaagacgacggttgtgaatgacaacggtctcagccctgtctgggctccaactcaggagaaggtgacatttgaaatttatgacccaaaccttgcgttcctacgctttctggtctacgaagaagacatgttcagtgaccccaacttcctggctcatgccacataccccattaaaggcatcaaatcaggatttagatcagtccctctgaagaacgggtacagtgaagacatcgagctggcatccctcctggttttctgtgagatgcgsccrgtcctggagagtgaagaagaactctattcctcctgtcgccagctgcggaggcggcaggaagagctcaacaaccagctcttcctgtatgacacacaccagaacctgcgaggagccaaccgggatgccctggtgaaggagttcaatgttaackagaatcagctgcggctgtaccaggagaagtgtaacyggaggctgagagagaagagagtgagtaacagcaggttctactcctagaagctctgtgcgcgcacatgcgtgcggtgttcatgagcgcatccggatacaggcgagccttataatcagttcccaggaagaggttcatctgtgacattcattgtcctctctycgagccactcaccatagagatgacatttctgaagacgtcccccccatgggcaggaggagttgagaccttcctgctgtttttccaccttggacaacttaacttatactccttatagaggattcccccaactgtgtgcctcacgtttgtccttccctgttctcagcctctttgaataaaggcaagagtttcatgccawwaarmwwwmwawmyra

SEQ ID NO: 6464 - DNA, 600 bp, Rattus norvegicus
tatgccaccttgacgctccaggctagaaagggacagcccctagccctggcttctgcaactgtgtggtcttgaacctccgtatagtccgaatccctmtggctctcctcaaaatataaaacaagcctccttccaatagcatattggtgcacacccctaatcccakcacctgggaggaggaggcggcaggagcatcrggagttcaaggccagctcytgcmccmtagcagggatggtaggctgcatgaragtgtgtytcagaaagaaccmcctggtkcgggtacagggatgctgggattytgaratgtcactcagtgsgggaaaagattcaaggaggggaacagatcaatggcrgaatgactgtytgtgccgagttaagggcactgaaaatctcagstcatytatcgctttataraagatagagctttgggaggaagcaaggcactytacagtaaaggagtggcctttccaaggaagkgtctaggstccttyttytccagaacatgcacaggacataggagatccattatttagagacctttygtgttcsaacsyyyyctmaataaagttaattatatyvrvvhwhaaaaaaaaaaaaaaaaaa

SEQ ID NO: 6465 - DNA, 600 bp, Rattus norvegicus
agcacattctgcggaactccggagttcctggcgccggaagtgctcacagacacatcctacactcgagccgtggactggtggggactgggtgtattkctctatgaratgctgkttgragagtctccgttccctggggacgacgaggaggaagtatttgacagcatcgtcaatgatgaggttcgttatccccgcttcctgtctgcggaggccatcggcatcatgagaaggctactgcggaggaacccagagcggaggttgggatccactgagcgtgatgcagaagatgtgaaaaaacagcctttcttcaggactctggactgggatgccctgctggcccgtcgcctgcctccacccttcgtgcctacactttcggggcgcacagacgtcagcaacttcgatgaggagttcactggggaggcccccacactgagccctccccgggatgcacggcccctgacagctgcggagcaggcggccttccgggatttcgactttgtggcaggaggskattagccmtaagcccytgccttgcccaagagttcttggtttttaaaaaagcctttggggtttactccrdaawdmawaaaaaaaaaaaaaaaa

SEQ ID NO: 6466 - DNA, 1400 bp, Rattus norvegicus
ttgctggatgctaagtgcccagaaccaatccccaatcggcggcgctcttcctcgctgtcccgtgacgcgcagcgccgagcctatcagtggtgccgggagtacctgggcggagcctggcgcagagcgcggccggaggagctgagcgtttgccccgtgagcggaggcctcagcaacctgctcttccgatgctcgctaccgaaccacgtgcccagtatgggcggggagccccgggaggtgctgctacggctgtacggggctatcttgcagggtgtagactccttggtattagaaagcgtgatgttcgccattcttgcagagagatctctagggccccaactttatggagtgtttccagagggccgcttggaacagtacctcccaagccggccattgaaaactcaagagctccgggacccagtgttgtcaggagccattgcaacaaagatggcccgtttccatggtatggagatgcccttcaccaaggagccccgctggttgtttgggaccatggagcggtacctaaagcagatccaggacctgccgtccactagccttccccagatgaacctggtggagatgtacagcctcaaggatgagatgaatcacctcaggacgttgctagacgctacaccgtccccagtggtcttctgccacaatgacatccaggaaggaaacatcttactgctckcagagccagacagtgatgacaacctcatgttggttgatttcgagtacagtagttacaactacaggggctttgacattgggaatcatttctgtgagtgggtttacgattacacttacgaggagtggcctttctacwaagcaagacytgcagactaccccactagagaacagcagctccttttcatccgtcattatctggcggaggttcrgmmmgrkgaggtcctctcsgamgaggagcagaagaracaggargaagatttgctgatakagatcagmcggtatgccmtggcctckcrbbwskwskggggcctatggtccamcctccaggcttccatgtccactatagagtttggctacttggaawacgcccaatctcggttccagttytacwtccagcmgaaggggcagctgaccagcktcctatcaccttgaggatccracccccacctcagatttytcctggagcctccggggcaggccctcggagggaggggcaaagagcagaagcccccagagcttgggctgtgcctctaagtgagactgtcgttgaagtagctgacctccgtactcctttmttagtacttgcccaaggggggcatctgacagcccctggggctgtgcacctaaataaatgaacttcacaaatmcaamwrrrraawamarawwmaaamawwrmrrmmrmaarcttattccctttagtgagggttaatttt

SEQ ID NO: 6467 - DNA, 1400 bp, Rattus norvegicus
ctgatcacctgaactccaccaaccatgccatagtgcagactctggtaaactctgtgaattccaaaatccctaaggcatgctgtgtccccactgagcttagcgcaatctccatgttgtacctagatgaaaacgaaaaggttgtgctaaaaaactatcaggacatggttgtggagggttgcgggtgtcgctagcacagcaagaacaaawaaawaaaaaawaaatatatatattttagaaaaaraaaaaammwamtcaccccctctccccctaaaaaaaaaccagctgacactttaatatttcccaatgaagactttatttatggaatggaatgaaaaaaaaaacacagctattttgaaaataymtktrymkctacgaaaataagttgggaaaacaaatattttaatcagagaattattccttaaagatttaaaatgtatttagttgtacattttatatgggttcaactccagcacatgaagtataatggtcagagttattttgtatttatttactattataaccactttttaggagaaaaaatagttaatttgtatttatatgtaatcagaagaaatatcgggtttgtatataattttcaaaaataattgtagtttttcagttgtgtgtatttaagatgcaaaswckasrtggaaggttactgagcaaagtgcttgcacatttgctgtctgttttttgcagcactactgttaaagttcacaagttcaaatccaaaaaagaaaaaaaaaaggataatccactctgctgactttcaagattattatattattcaattctcaggaatgttgcagagtggttgtccaatccgtgagaactttcattcttattagggggaatatttggataagaaccagacattactgatctgatagaaaagctcttgccgccctccctgcagaaagaaywmrgcasrassagtggaagtaattaagaaaactgtgaccatgtcaggaagtgatgatgscctcttgttctttcttaaacctatgatcctttccagggggctgatctggccaaagtactaaataaaatatataatatttctwctttakwaacwttgtagtcatatatatgtacaattgattatcttgtggccctcataaagaagtggaaattgacttgtattttgtgtttaccctagcagcaagctctttattctccaaagcacccaattttctacagttgcctgacacgcagcaaaattgagcacgtgtttcctgcmtacaccctgttctctgtcctatcagcytgcttttctttctagggayatgtgtttgaacatatgtctccaaatgttaarcctgtctcagataatarakrtcaaaattctggcatttcrtcctrymaaacctammmmrwrararmaaaaaaaaaaaaaaaaa

SEQ ID NO: 6468 - DNA, 600 bp, Rattus norvegicus
cccgggccactcaaggttttgaggacttcgggaagtgggaagagtgcattactatttaagttcacttggatcaaaaccaacggaggtctccccgccctgtgccagatcaagkagtttggacatmaccctacggataacgcgcgcttgcagttcctcgtrgttttttctgcgtaagcttcatcacagtgcaggaagcgattttgagtcaagatgactatttatgaacctttggaaggatcacctaacgtaatggaccttgtaggagcaatttatgtactgtaattttattttaatgtattttggtttatgattatwtatgtttttttaatgcctattctaagacatttctgaatgtaggccacctcctcttccccttctcgccaaaaaaaaaaaaaaagagagactttattttcagaaacctatttcctagtaagccctgatcttggaaaagaaaaaggggaagaagagtggtggagtggggcaaacatgaaaaatggattcatcatccccagaacattctcataaagtcgactctttttcattgtatttgaagaagttgaaattaaattctgatattactttcaaaaaaaaaaaaaaaaa

SEQ ID NO: 6469 - DNA, 600 bp, Rattus norvegicus
tataggtaataatacatccaagtggagggtggtactgcgcatcctgcctcagacctatggcttcctcctgccgctgctcatcatgctgttctgctatgggttcacactgcgcacgctctttaaggcccacatggggcagaagcaccgggccatgcgggtcatctttgctgtggtcctcgtcttcctgctctgctggcttccctacaacattgtcctgttcacagacaccctcatgagaaccaagctgatcaaggagacctgtgaacgccagaacgagattaacaaagctttggaagctactgagattcttggcttcctccacagctgtcttaaccccatcatctatgcctttattggccagaaatttcgccatggacttctcaagatcatggctaattatggccttgtcagcaaggagttcttagccaaggagggcaggccttcttttgttggctcttcttcagcgaacacctccactaccctctaagactgtttacttaaactgtggcccctctgggttcccttcttgtccttcaagcatggctcattaccagagactgtgatatttgaattgatgcagttccctctacagctacagga

SEQ ID NO: 6470 - DNA, 868 bp, Rattus norvegicus; identical to SEQ ID NO: 2374

SEQ ID NO: 6471 - DNA, 735 bp, Rattus norvegicus; identical to SEQ ID NO: 2375

SEQ ID NO: 6472 - DNA, 600 bp, Rattus norvegicus
ctgagctagaagatccaacttccaccttagatcccacgaagctctatgagagatataagttctccagcagtaaggtctacagcgctgaagaccagttccagcctcctgtccccggggtgtacggagattatgatgaagcacaaacctggaataaaaatgctgtcttagggagaagtcctactgacgacacctactatccaccctatcctctgcctgtggccagctggccctgtgactaccttccctcccagagctctttggagcactctccccaacaggttccactagagccacctgcagctcaacccggccatcatcccttgtggaccaatcccggaggtgagccttacgaagagaaagttcctgtggatttcagcagctatgtgccttctgtcacgtaccactcccctcagcaggacccctttctgctcgcttacggctctcatcctcagcagcagtacgcgctgcctggtaagagcaacaggtgggatttcgatgaagagatggcgtgcatgggcttggatcacttcaacaacgagatgctcctaaacctctgttctttaaaataactcatagcccgcttcctgctctccccatcat

SEQ ID NO: 6473 - DNA, 600 bp, Rattus norvegicus
attacagtgccaaaggaccaatctgcctgtaccacagcccgggtgagaagtaaaagctttttgcaggtctgctgctgtgtggggtcctcggccccgcgccctgaagaaaatcaccaagttccaaccattaagatccacaccatctccctcggtgaaaacggggaggaagtctagaggatgggaaaggtcacaggaaaagggagaacacttaggtactgctgattttcccactcggaaggccaggaccattcaacaggggaaaaggggagaaggaggatgccagtttatcaggcgagtgggtagagcacaagggaagaggcaggacgtagggtaactgaccgcttctaagtgatgagaggcccatttccctcagtcgttctctgatcctgctttccactactgaccctttcaacaagaaataccatgggaaagaaaatttcatacacaatccaaaagactataaatacaggatgatgatttcattgtgaatattttgagcacacactctaagtttggagctatttcttgatggaagggaggggattttattttcaggctgaacctactggcgactacatttgacatttatggagcgggccg

SEQ ID NO: 6474 - DNA, 1400 bp, Rattus norvegicus
gtgactgtggggaccattaagggtctagggggacagcaggctcgagtttagggctagacatttgccacttggtacatagggtgtcggcatcctgtctgtcctatcttccagcttcccggttcccttcctgcctcctccttttaagggcctctctacatagccccggctggctagagcttgctgtgcagaccaggctgacctggacctcccagagatagatcaactaactgtgtcctgagtgctgggattttaaagccgtgtgcccccacacccggctcctgccaccttccagaagcaatcttaggccacttgttgaggaaacactctccccagaggacccaagccttcttccctgtctctctgaggcctgaatccacagcttccccattttatcaactgctgcttcttccctttccttctgtgttcaggggaaaccactgtgggggcagggaggggtcctgggatcccagtttttatgctcagatctcactgagcacttgctttattggggagcagagaggaatcagctgaggcagtgtggggcagatgttgaggagaatttgggcttcctggtgagaaaactctaggggaggcgttggttattcctggaacccagcctctctccccacgaactcttcacacccgcagccttgagctggatgcaaaggctgctttcaatttgtctttgtagttttgttttgttttgttttgtttttttaaattgggacaggatctcacgtaccccaggctggcctccgactcactatgtagccaaggctggctttggactkckgmcsctccwrcmtcmgmwtstggagtgcaggtattacaagggtgtaccaccaccaccaccrccaccamcaacaacaacaacaacaacacctgtcktgaaaactatcatgaatgacatggttcacayrgcckwgggtgsccaaggacatcccggatactcwtatggcatcttccttgaaggrctttrctaaatcctgtggakargtakaaaatccaatacggtacaaacggtatttatgtgtgtctgtgyrkcarwgkggggtctgtgacctcmtatcccagtgtgggtgctgtctgacctcttatgtgcacatccgtgtcaagactgctagagakatgsacgggggtgtgtgtgcttgtgggggtctagccatgatcaggcctcctgggaattgctgaatcatctctcccacacacagacacacacctccgccttaaagaaatgtgtgaaagaaaaggctgaggaaggggagatttgggaggcaaggagccagtcgggagtgtgtctcccctcatacagcttcccagatgtcccccttgtgctggaaacccagaactgggccaataamcagttcaatttctcttgmaaamaaaaaaaaaaaaaaaaa

SEQ ID NO: 6475 - DNA, 1400 bp, Rattus norvegicus
ctggaaaacaatattgatgggcagtttggagtggcctacgactgcaatgttctggtctatgagggaggctctgtgagctggctgcccccagctatctaccgcagcacgtgcgcagtggaggtcacctatttcccctttgactggcagaactgctctctcatttttcgttcccagacctacaatgctgaagaggtggagttaatctttgcagtggatgacgatggcaatgccatcaacaaaattgacatcgacaccgcagcttttaccgagaatggagaatgggccattgactactgcccaggcatgattcgccattatgagggaggctccacagaagaccctggagaaactgacgtcatctacacgctcatcatccgtcgaaagccgcttttttacgtcattaacatcattgtgccttgtgtgctcatttctggcttggtgctactcgcttacttcctacctgcgcaggctggtggccagaaatgcacggtctctatcaacgtcctgctagcccagactgtcttcttgttcctaattgcccagaaaattccagagacttctctgagcgtgccgctgctgggcaggtatcttatttttgtcatggtggttgccacgctcattgtcatgaattgcgtcatcgtgctcaacgtatctttgcgaacgccaacgactcacgccacatcccctcggctgcgccagattttattagagctactgccgcgcctcctcggcttgagcccacccccagaggatcccggagctgcctcaccagcgaggcgtgcctcatctgtgggcattctgcttagagcggaggagctcatcttgaaaaagccgcggagcgaactcgyrykwgrgggacagaggcatcggcatggaacttggaccgcagccgccctctgccagaacctgrgtgmtgcagcccstgaagtccgmtgctgtgtggatgctgtgaactttrtggctgagagcacaagggaccasgaagccaytggagaggaactgtctgactggktgcgtatggggaaggccstygacaatgtctgtttttgggcagcgttggtgctcttcagcgtcggttctacgctmatcttccttggaggttacttcaaccaagttcctgatctcccmtacccaccgtgcatccaaccatgagcmtgcaccaggacccacctcatccccaccccccaagaaagagattttgaaaacaggctgmtgacaataaatctggtttgtgaacttgcamaaaaaaaaaaaaaaaaaaaaaaaaaaaaaaaaatctcgcggccgcaagcttattccctttagtgaggggttawttttagcttggcactggccgtcgttttacaacgtcgtgactgggaaaaccctggcgttacccaacttaatcgccttgcagcaca

SEQ ID NO: 6476 - DNA, 1400 bp, Rattus norvegicus
agatcttagagaaattacggagcatagtgagtgtgggcgatcctaagaagaagtacacacgcttcgagaagattggacaaggtgcttcaggcacagtgtacactgcaatggatgtagccacagggcaggaggtggccattaaacagatgaaccttcagcagcagccgaagaaagaactcattattaatgagatcctggtcatgagggaaaacaaaaacccaaacattgtgaactatctggacagttaccttgtgggagatgagctatgggttgtcatggaatacttggccggaggctccttaacagatgtggtgacagaaacctgtatggatgaaggccagatagcagctgtgtgccgagagtgtctacaagctttggagttcctgcattcaaaccaagtcattcacagagacatcaagagtgacaatattctgctgggaatggatggctctgtcaaattaactgactttggattctgtgcacagataactccagagcagagcaaaaggagcaccatggtgggaactccatattggatggcacctgaagttgtgacacgcaaggcctatggacccaaggttgacatctggtccctgggtattatggcaattgaaatgattgagggggagcccccatacctcaatgaaaaccctttgagagccttgtacctcattgctaccaatgggacgccagagcttcagaacccagagaagttgtcagctattttccgggactttttgaaccgctgtcttgagatggatgtggagaagagaggttcagctaaagagctactgcagcatcaattcctgaagattgccaagcctctctccagcctgactccactgmwygmkgcagcaaaagakgcaaccaagaacaatcactgaaaccacgctcaccccagcctcatgtgccaagccttctatgaaataaacactcgtttcgggaactccgacccctcatgtcctcttctcctttccttgcttctcccatttcctgatctagtgctctcaagactttgatccttggwaaccgtctagcactgaagagaaccgcaaccggatgactaatccagcagaggccatttctaaataggaattccctttakcttgtgggcatggaggggactgatgagcaagggtttacctgaataaacctgtttctacgaaacagaaatctcaaccatcccattccttacccctcacaatcagttcttaactctataaacttatggtttgatagcattatcaatttgctatcagttgaaattgctttygttttttatttctgtgaccaaattgcccaaacacttcattgtatttgaaaaccagaacagctttgaaatgccacggggcctgataatctgccwrggacatgaagaggtcttgtttccctgaacccac

SEQ ID NO: 6477 - DNA, 600 bp, Rattus norvegicus
ggctgtggagcgtgaaggggctacgccctttcactccagagcaaccctcatgaacggtgcactcatgaaacccagtcacgtcattgtggagaccatgatgtgaggtccgggctgtgtgaccggcgccgctttcctgccgtttactaaccttagattctcctaggaccaggtttacagagctttatatttgtactaggattttttttttaattgtcacagaaaatgttactctgtgtgtgtgtgtgtgtgtgtgtgtgtgtgtgtgtgtgtgtgtgtttcgtgtgtgtctgtatatgtgtattttgttttrtttgggggattattttgtacaaaaagaaaacccatgggcctatgtcctggggggagaggatggactttcatattgattttgatgtattttatgggaacttggtaaatttttctttgtatttttttaacatataactatatatagagtctgtcatacactttgccacttgaattggtcttgccagcaacggatctcgttttttgttttttgtttttttttcaaaagcaattcttcggtgcttacatagctggcagagagttctgcccaaaamcaaawraaaaaaaaaaaaa

SEQ ID NO: 6478 - DNA, 1302 bp, Rattus norvegicus; identical to SEQ ID NO: 2382

SEQ ID NO: 6479 - DNA, 600 bp, Rattus norvegicus
tcatttgctgcgtgtacccactctaataggcactggataaatgttctattttggtgacttgacaaccttccataatctgagagagcagtgtcccagccatcttccctcactcctccagtgtgaagatggtgacagtgctggggcctargagcgaggagcccaggcactgcagttccccttcggcgagtttgggccatggtgtcacagtggctgtacagagggtggcatgtacagtaggagatatatttatataatatatatttwattaacctgttagatgtccacagagtattataaatcatgtgcctaaaactgtccacacagacccaggccctctgcggtgccctccctgctcctgccttccatgtgcaccagagccatgcgcgtcttcctgaggtgttcgctgcaggctgtgtcagttgctccaagttactctgtctgacctgactacattcataggaatactgtggttttcttctctgctgccctttctggtggcagtgagttccagggctagcagtttgtcccctgcttgggtaatggaagtcaccatggggaactgcttgctaagctacctggcccctaagtcctgcggaattc

SEQ ID NO: 6480 - DNA, 1400 bp, Rattus norvegicus
ctatggggtgagtactccgaaaactctgctgtctgactgacacagagctgcctcgcaccggtgattactactagcacttttaagtccctatgctgttggccatccctcctttgcctgggtgctcagggcatgctgactagcarctgggttggtctggagatggatgtttgagaggaatsaaggaatgcggtccaggccttgttgcctagccctacaaatgactactgcttaggtgagggcagaagaccccgaggttatcttaattctttcctctcttgataaggtgctctcctattcctacccccaaagaacgtcacctgtcagatgagcctctttacttccccgtggttggttgctcacgttagkaaccatggccacctgcaagtcattctaagctacccgcttacatttttcaaaagcatcaccagggggaaaggttatgctgtcccaggaggaagtaagctcttatgagcyryrarsccctttttggttttctgctttgaggtaagagcttgttcatcccatyccaaacaccaaagttagcagagaccaacggwaggagagaggmargawaaaaaaaaarrawraraagmgaaamgaggaggacgggatatcagttggtaggactactgtttggagctttttaaggcacgtgaaatacttgraaatttctcatttgkgttatttatgttgktttgtacaatgtttttattwytktwttkttttataaatggrggtacaggrtattacccgawttattaatgaatgsccaagaagtaattttcttctcattcctctaaaagtcctgcctttgagagcgcacacagactcgtgcatactgcaggcacagctccagtttaaattccatgcatgagcaccattgtggctgcaaagtgaagacactcatagtgtgaatccaagtctcaccattattgaagaarkcagttttctamcagtactkktgtctctcttgacagkcttgcgtatwatatycccagagctyccccatyartggkcctaaytycyttttgtratacacaagyycacagycgtgtctgtataactctccggtcttgccctaawattatcatgactttgagattgtacctgtactcccagactgctgtctcacaaatasgtctgggaaaagtcattctgaatgagaagtaaattattttatgtaatacatmwwrarwrwrwmwwmagttgtatttgccatcgctctttggtctggcgagcctgcctgctgctggcccctgcaaaggacgctccttccagatgcatgtctgtttctgccatgtgctttataggcctcagcgctgatgcttccaatgaaacacatagatctgaatgataacaggaaataaatgcttcctmcaaamcaaaaaaaaaaaaaaaaa

SEQ ID NO: 6481 - DNA, 600 bp, Rattus norvegicus
cgaagccgtggcagccatcttcatagcccagatgaatggggtcatcctggatggaggtcagatagtgactgtaagccttacagcaactctggcgagcattggtgcagccagtattcccagcgccgggttggtcaccatgctcctcattctcacagctgtgggcctgccgacagaggacatcagtctgctggtggcagtggactggctgctggatagaatgagaacttcggtcaatgtagtgggcgattcttttggggctgggattgtctatcacctttccaagtccgagctggacaccattgactcccaacaccgaatgcacgaagacatcgaaatgaccaagacgcagtccrtttatgacgacacgaagaaccacagggaaagcaactctaatcagtgtgtctatgccgcacacaactctgtcgtaatagatgagtgcaaggtaactctggcggccaatggaaagtcagctgactgcagtgttgaggaagaaccttggaaacgtgaaaaataawgacccgattctcagccaattcttgaataactccccagcgtatcttatggtaaaagatgctctaaacaggcttcctttacaaaagg

SEQ ID NO: 6482 - DNA, 600 bp, Rattus norvegicus
ctcagaggtgcgtcctcctcccgggaaggcaccctctcgtcggtaggtctcagttctgtgttgggtactgaggaggaagatgaagatgaggagtatgaatacatgaaccggaagagaaggggtagccctcctcggccccccaggcctggctccctggaagaactgggttacgagtacatggatgtgggttcagacctcagtgcttctctgggcaskasrcagagctgcccgctccatcccatggscatcgtgccctctgctggcacaactccagatgaagactatgagtacatgaaccggasgcgtggtgcgggtggcgccggaggggactatgcagctatgggggcctgcccagcagctgagcaagggtacgaggagatgcgagctttccaggggcctggacatcacgccccccatgttcgttatgcccgcctcaaaactctgcgtagtttakaagccaccgactctgccttcgacaaccccgattactggcacagcaggcttttccccaaggctaatgcccagagaacgtaaacttctgctccgtgacgctctgcgggcgtgtggcggcagctagtgcctcttcgagggtacccaatg

SEQ ID NO: 6483 - DNA, 600 bp, Rattus norvegicus
actgccgcgcacctgctcttcgtggcgccgcacaacgactccgggcccactccgggaccgagcccactcttcgccagccgcgtgcgtccggggcagcgcgtgtacgtggtggctgaacgcggcggggaccgccggctgctgcccgccgcggtgcacagcgtaacgctacgagaggaggcggcgggtgcgtacgcgccgctcacggcggacggcaccattctcatcaaccgggtgctcgcctcgtgctacgcagtcatcgaggagcacagctgggcacaccgggccttcgcgcccttccgcctggcgcacgcgctgctggccgcgctggcacccgcccgcacggacggcgggggcgggggcagcatccctgccccgcaatctgtagcggaagcgaggggcgcagggccgcctgcgggcatccactggtactcgcagctgctgtaccacattggcacctggctgttggacagcgagaccctgcatcccttgggaatggcagtcaagtccagctgaagtccgacgggaccgggcagggggcgtgggggcgggcggggcgggaagcgactgccagataagcaaccgggaaagcgcacggaagga

SEQ ID NO: 6484 - DNA, 600 bp, Rattus norvegicus
ggcatgggcagcaccatggcccgggtgggcagcatyrygagsccgctggtgagyatgactgcagagttctacccctccatgcctctcttcatcttcggcgctgtccctgtggtcgccagtgctgtcactgccctgctgccagagaccttgggccagccgctgccagatacagtgcaggayctgaagagcaggagcagaggaaagcagaatcaacagcagcaggaacagcagaagcagatgatsccgctccaggcctcaacacaagagaagaatggactttgagaacggaagggcttcacacagcactaaagggagtggrgttmtacaggtcctgccgtctacatgaggagggggagtgagtwkagggactggrccatccaaatgtggaggctgccattcagagaaatccctccccaaaggtcatgtcagtagacccactaggaacaaaagctctgactatgtgcagcttcttaagcagaatgttctcgtcaccggccatcttcctgctcatggtcactccgccacctccaggaccttgcaaagaatctcagacaattaaatgaatctcttctaaaaaaaaaaaaaaaaaaaaaaaaaaaa

SEQ ID NO: 6485 - DNA, 1400 bp, Rattus norvegicus
caaccacccattctatgtgcccywggrrrmarwrrammmrrrrmttctgggttacaatgtcccagccctgtacagcagcgacccagctgcccgagaacgggagcgggaagcccgtgaacgtgacctccgtgaccggctcaagcctggctttgaggtgaaacctagtgagctggaacccctacatggggtccccgggccaggcctggatcccttcccccgacacgggggcctggctctacaacctgggccacctggcctgcatcctttcccttttcatccgagcctggggcccctggaacgagaacggctagcgctggcagctgggccagccctgcgtcctgacatgtcttatgctgagcggttggcagctgaaaggcagcatgcagaaagggtggcagccctgggcaatgacccactagcccggctgcagatgctcaacgtgactccccatcatcaccassaskcccacatccactctcacctacacctgcaccagcaggatgccatccatgcggcctccgcctcggtgcaccctctcattgaccccctggcctcagggtctcaccttacccggatcccctacccagctgggaccctccctaatccccttcttcctcaccctctgcacgagaacgaagttcttcgtcaccagctctttgctgccccttaccgggacctaccggcctctctatctgcgccaatgtcagccgcccatcagctgcaggccatgcacgcacagtcagccgagctgcagcgcttggcactggaacagcaacagtggctgcacgctcatcacccattgcacagcgtgccgctgcctgcccaggaggactactacagtcacctgaagaaggagagtgacaagccgctgtagaacctgccatccagacagcacccactgctcsttcatccagaccttggaggaccaccccsgaccttttgaccccatcccacccccaagccgaggacagggtgctgcccacttgcagagcttctgcagccgggcagagggagggagggaagaagggacagacaaggtcagggcccggggaagtggcaagggtggggacagaaagtggacagtatcttggaccaggtccctcctcccatcccctgcttttcttctgtatgcccaatccttggtggccactgctcctcccctaacccgttggtgtgatttttttcatctgttagatgtggctgttttgcgtagcattgtgtgctgcccctgccccatccctgtgtgtgcaccccctcggcgatatgtgccccttgcccgtcccacattaataakttatatwtataaawawmwmwawdawrmtctttaaaaacatcstgaccaaaacatcccaacaaaaacatcctcacggtgccccarrraaaaaaaaaaaaaaaaaaaa

SEQ ID NO: 6486 - DNA, 600 bp, Rattus norvegicus
accataattcttttatgaaaacaggatacctcgggtatttccaaatatatcttctatgtctttgtttgggggtgggatggggccagaaacaaacttctatgcttaatccaaaaaggaattyaysasggcctttctgagtgatttctgctcgtggcagtacactgttccatgtggttctcctagcttcatccgtgaaggactgaggacctttgttatacttaacaaaacccagatgcatcaatttctgatgctttttactgttgtgtataatctacttaagtgttttatttctgccgaaagtattcaggtttgctgtggacatcaggagtctgaattctgttcttactgattttgttccatggttgaattttaaaagtgtttaacaatgaaggaactttattctttagtcaaaactgttatttttattcttgctcaggatacataattttaaacattaattattataaacgtggcatagatttgccagaaaaaaaacattgtcctaatattgatgttaccttttatgaaatgagcaccattttcttttaattaaagccaagaaaarggarawramwawmwwwwrmcttagtggaaaatcaa

SEQ ID NO: 6487 - DNA, 1400 bp, Rattus norvegicus
catctctcaatgcaaaaggtatcagtgggcttcttcaaaactttgaaatgtcttccagctcacggtaccagaagtgcagtaggccccatgcaatgtgtgagttcagcctggatgccagcatgatgctctccttactctgtttcttgtagtcattttgctctgagaaactgctgattgatctgtttttgtagctgtgttccaggctcttagtattctttctttaacctccattaatattttctctacttgaagttttacattcaggaaaaacctcagctcaggactactgtgtagctccccttcggaggaagaagttactttagacaaaagggaaaaaaaattaaatgtatttttcatttgtaattaaatggaagggccctaccaagattctagaattggagggggttctgacaagaaagttacattcttgtcctgaagaattgctttcttatttaaaaacagagtcagttagtgggtagttctgggcaatagaaataaatataaaacaataatgacaatcattctctacatctcattatcagctsasgwrstgtatattactgaatttactgaagatagttatgtctttcagacattgttgttataaactatgtttaagcctactacaagtgtttcttttttgcattatgtcagaattgatgtaccttttttttaatgattacctccctgtactactgtgcgaacaatcaamcaaaatgatgagattaatggtcatggataaatttcaagaaaactagtgtatttgattgaaaagtttaaagttagaacttagkccattggaatttaytcatatagcaaactgcgtagagycaatattgactcacctacacacgttatacagattgacattttagacatttkgaaggccccgtaggtattttattagttagaacttaattttttgaaaaaacatatccaaagcacawtaggcattwgaatktgtgcatcgagaactgattacaaataatattgatatgtatgtaaataactgagaagtatgtcttatgaagaaatatattttattacaaaaaattataaaacrttttcaagwttatatgctttaaaagtttaagatcagaaaataatcaactttagaaaaacacgtwtaaaaattgttaacatcattgawwaaaaaaaaaaaaaaaaagccaacatgattgttgtgaacatcaacctgctgactgaacctgggaattcaggttaagtatgtgactgctgccgtgcctcagagaaatttgtatttaaattaacttatgtaaaaaaaaatcttagaacaaatgtttgtttatttttatacttatttaagaaattgaaaacttctgaaaataaagtttgattgtgtctttaaaaaaaaaaaaaaaaaaaaaaaaaaaaaaaaa

SEQ ID NO: 6488 - DNA, 1400 bp, Rattus norvegicus
aagtcagggaggatattcatggttcagcggccaagccaggaactcatctcctcccagggcacttagcatctgctgcttcctacaagtggtgagcagccctggatcccaggccggctgctggcatgaaggccctcattcatgacttgtccattcagcccaaggttgttctctagctggtagaaaacttcgatttttattttaaagaaaaccaccatcttaaaattgcttaaagagatttattttatcaaagtatgaagaggcatcaagttttcctatccaacatttgccagtaacaatccttatttttccagtgttatttgcaactgtgggcaggcagacctgagggaatgcttgctgtgattgaaaagcagctgcagacagagagtgcctttccttgcggtgtccaaagaccctgggagaccatgtcatggcccagtgcaagggctgtaggttctggacctagtgttcaggcatagtctatgtaacttacaccccaacacacacacacacacacacacaggataaaagctgcaaaatgttttcctgtgctttctgaggcatgtaggccacggccagcatgaataccaatgatctcagcaattgtaccagagccagaggttttggggtcagaaaaatcacaaaagtaggggctccacttctggtacatgggggctttagtacagcagagaagtatctagaaactagctgaggcccgggggccagacatctgtcctgaatgtctgwccacagaacccctcctgcactwttgcctctatccactcttgaaaggcctccagtttgtctgcaactgcacaggatagacacctcasatgatctagaaaacaccactaacctgctgccttgcagggctaccaggytagagaacaggttgtggggaacaaatggcctaggtcagaaacacttaaaagagctgttggcagtgacaaaagrtgggtgctacaagccctggtgtcagccttgcctgtctttatacagagctcactgcttactccagcagctcggcggacacacagccctcccatatctgaaagttgtcctatcaaccactaggcgtgaccctgccatgaccctgaagagacatgtagatcctgtgaacacargcagccactgagtacacacggaacattcagaacaccattccctcagcccagcatgtgstaatgctaactatagctgggtcctcgtcctgsgaaagagatcggctgatcacaaagtggtcgctgctggaactcaccagtagcagaggtgtagtaaccatatggccagcgcrtgatcttacgtgttgtatgtggaatatctacaaacmcmccscggagtggaactgagttgtgtatatactgcaataaacctgatttcattctgaaaaaaaaaaaaaaaaa

SEQ ID NO: 6489 - DNA, 1400 bp, Rattus norvegicus
  misc_feature (1100)..(1100): n is a, c, g, or t
atcatcgaggagtctggggagcacatcattgctggtgctggagagctgcacctggagatctgccttaaggacctggaggaggaccatgcctgcatccccatcaagaaatctgaccctgtcgtgtcctaccgggagacagtcagtgaggagtccaacgtgctctgtctttccaagtccccaaacaagcacaacaggctgtacatgaaggccaggcccttccctgatggcctagcagaggacatcgataagggtgaggtatctgcccgccaggagctcaaggcgcgtgcccgttacctggccgaaaagtatgagtgggatgttgctgaagcccgcaagatctggtgctttggacctgatggcactggtcccaacattctcaccgacatcaccaagggtgtgcagtacctgaatgagatcaaggacagtgtggtggctggattccagtgggccactaaggagggtgctctttgtgaggagaacatgcgtggtgtgcgatttgatgtccatgatgtgaccctgcatgctgatgccatccaccgaggaggtggtcagatcatccccacagcgcgccgctgcctctatgccagtgtgctgactgcacagccccgcctcatggagcctatctacctggtggagattcagtgtcytgagcaagtggtgggcggaatctatggtgtcctsaacaggargcgtgsccatgtstttgagrrgtcccagktrgstgkkrhmcccatgttygtggtymwggcmtacykgcytgymaatgartcytwtggyttcacygcygayytkcgatcmamcacygbbggcmaggcyttccmccagtgygtgtktgaccactggcagatcctgcctggkgahsmhttkgacavcagcasccgcccmagccaagtkgtagytgaracscgcaagcgcaarggcbtgaargagggcatccmagcgstggacaacttyytggacaaactgtaggcagmbtgrtamtgccacabsytgmacagtgmccrcccrtcagaaracacyktgrgactgtcsccmcagtgcyccthtrgakghtgmtgggvccaycctgacatcaytcagcavtcacktgstvccaaktntatttatttmggaattacaagryagmgkgaatggcycthtgcaggctggavtggcagvcygtggggtgggcrssrcacgryksttavcatytkmagwrggaaayracgcagatgtccaaaaktbtmartaaatgcattcagaggttwwwrrrrwmmawrrmmaagtgkarttcccccagagggggargtggggragtgcctccaggaaggcaggcamcccttagacytgcarcccrsytgtgbgaatcattggrgtaataaactmttywgtggttrawmmmhaaaaaaaaaaaaaaaaaa

SEQ ID NO: 6490 - DNA, 1400 bp, Rattus norvegicus
aatggaacagcaagtaaatggccagctaatagagccgctgcagatctttccaagagcctgcaagcctcctggggaacggaacatacatggcctgaaggtgaatacacgggctggaccatctcagcacaccagccctgtggtctcagattcacttccaagcaatagcttgaagaagtcctcggctgaactgagaaagatactggccaacggcmagwkgawtgaacaagacatacggtatcgagacacccttggtcatggcaacggaggcacagtctacaaagcatatcatgtcccaagtgggaaaatcttagctgtaaaggttattctgttagacatcacactggagcttcagaagcagatcatgtctgakttggaaattctttataagtgtgactcatcgtatatcataggattttacggggcattttttgtagaaaacaggatttcgatttgtacagaattcatggatggggggtctttggatgtatataggaaaattccagagcacgtcctcggaagaattgcagtagcagttgttaaaggccttacctatctgtggagtttaaagattttacacagagatgtgaagccttccaacatgcttgtaaacacaagcggacaggtcaagctgtgtgacttcggcgtgagcacccagctggtgaattctatagccaagacgtatgttggaacaaatgcttatatggcacccgaaaggatttcaggagagcagtatgggatccwttcmkrsrkbykgmdckwaggsakytcwttchwksrkrytcwkraramccasssatctttaatgcctctccagcttctgcagtgcattgttgatgaggattcgccggtccttccgcttggagagttctcggagccgtttgtacatttcatcactcagtgcatgargaagcagcccaaggaaagaccagcgcccgaggagytgatgggtcacccattcatcgtgcagttcaatgacggaaacgccaytgtggtgtccatgtgggtttgccgagctbtggaggagagacggagccagcaggggcccccatgagacctcagcaggacactgaccacccaggaccaggcatcaakgtcacaacaagccgygacccctctgtytgctgcctgattgggaakagatgtwctgggcacagctcmtgctttcacctthtaccttacctgggagtcttcaagaaggbtggyctctgccgaacccctcaccaytggtagggaggaggcactgacaatggcaggtggagatggtgcagggttggggtgatgaggttatggaacctcctytggccccaccmtcatytctcchtactgttgtaaagggtcagcctatcagcagcactgatgggartaaagtrttaytgcttwrrawwrwaraaaaaaaaaaa

SEQ ID NO: 6491 - DNA, 600 bp, Rattus norvegicus
attcttgctgtgacccagcgctgctgtagcactgttgctgccgtggctcggcgctggggcacaacccctttccctttgcggtactgaaaggattgaaagaagaggtcatggcgctgtcatgctctgggggagaattttacttctcacatggaaactgcactttttgctaaatcctttgcattttgatgttcacttagtgtccagccctttaggatgggctggccagggtaggttggccccctggactcaacttcactggggaacttgacgctgcagttgtgaatcagggaagccatgctgtctccaggtatggggtgaagctgaacatgggctcattatttccaaatgccctgtctggtctgctcactaggatgtgctgactttgggcactatacagaggggcctgttctggcagtagttctgtgcaccgcctatacacctcagtctgtcaggaacggttgtagtgggtggtaaggggtccaatcccacgcagcgcctatgccctgcctctgctgccatggaaagtgcgaggaaaggacccgcccctaaaacagccctgtagaagattagagtccctcaaaaaaaaaaaaaaaamtcgag

SEQ ID NO: 6492 - DNA, 600 bp, Rattus norvegicus
aggtctttctgctgtaattggatgtaaaatagcaggtgcttccagaatcatagctattgacatcaacagtgagaagttcccaaaagccaaggccctgggagccactgactgccttaatcccagagacctagacaaacctgtccaagatgtcatcactgaactgacgggtggaggtgtggatttctccctggactgtgcaggaacagctcagaccttgaaagcagctgtagactgcaccgtcgtaggctgggggtcgtgcactgtggtcggagcaaaggttgatgaaatgaatatatccaccgtggacatgatattgggccgttctgtaaagggaacgttctttggtggttggaaaagtgtagactctgtcccaaacctggttactgactacaagaataagaaattcgatctggacttactggtgacccatgccctaccttttgacaaaatcaacgacgcgattgacctgatgaaccaaggaaaaagcatccgaacaatcctgaccttttgaagacgccaggaggaacttggaatgtcatcagattggatccaagcttgtccagatgacttcccacttcccacgatgagccaaggaaagcg

SEQ ID NO: 6493 - DNA, 600 bp, Rattus norvegicus
tggatctctggggatgcagccttggacagggacatcctaggttctgtcagtgagcagatccagaagaattttgccaggacccactggaagcgtgcattcaatgccacatcattcctacgtcacatccgtaagctgggacagagcccagagggtgaggaggcctccaggcagggtatgacccgtcacagccacccaggccttgggactagccagtctcccaagtggtgacaaccaggtggatgccaaggaaggccaagtggactgactcctagcttttctttcctccagcccttttgatctccttccctgatccttgtcccccggactggcctctgttggaaagtccaagaccgtgggtgtgatgcatggcactggggtatggggcttcccaagtatgtccccagcctctgtcctttgttgctgccaccctctatggaaactgaggaggtattcaaaaatggatttggggccatccttcctgcaccttgcacgcacatatgcattgcgtggctgttctgtgctttgctgactgtgggtggtcctgcttgtgttgtagccctttagttcctcctctttccaaccaataaagacaaacagaac

SEQ ID NO: 6494 - DNA, 1400 bp, Rattus norvegicus
  misc_feature (993)..(993): n is a, c, g, or t
  misc_feature (1054)..(1054): n is a, c, g, or t
caaggttaagtgctatatatggaggtacctacatgttgaataagccaattgaagaaatcattgtgcaaaatggaaaagtggttggcgtgaaatctgaaggagagattgctcgctgtaagcagctcatctgtgatcccagctatgtcaaggatcgggttgaaaaagtaggccaggtaatcagagtgatctgtatccttagccaccccatcaagaacaccaacgatgctaactcctgccagmtcrtcattccacagaaccaagtcaaccgcaagtcagatatctatgtttgcatgatctcctttgcacataatgtggcagcacagsgcaagtatattgccatyryragkacaactgtggagactaaggaaccagagaaagaaatcagaccagctttggagctcttggaaccaattgaacaaaaatttgtcagcatcagcgacctctttgtacctaaagatttgggaacagatagtcagatctttatttcccgtgcctatgatgctaccacacactttgagacaacctgtgatgacatcaaagatatctataagaggatgacagggtctgagtttgactttgaagaaatgaagcgcaagaagaatgacatttatggagaagactaacagcagtacatattatgtaattaggacaaacttaaaatttggcaaataatgtatattgtatgaaatcaatattgtaagccctgcttttatgatcgaagtggagattgaagagtgctataccagtraatgytccctcacttttctaatatcatgtattaacttgttttcatggaatggctagtcagaattggttggttctgttcagtttaaccaaactgcatttttttttttttgtagtgaagdagctgttctaaacatatattgatatcgatagagaacttgawacagkmcttgtatcktttaatcactgtmgcctttacgattgtgtgatgtkgcccarkagctgdatccawacaatytgttsccatcntgatattgggagtcmmmyysmayaycckttggyttctgaaaacgttcagthttcgsyaywnkgttatgwcaagtatthcagcagggcccagataggasasccamatgttttgttwatgtgggtataaactttamccmmmcttcmsmyttagkgagttgtttggaraasccaatatgtggtakykkmacswrsaattgytgagaaagggaaagcaggtaaaaatatmgaagcmccttttatcccaggtatggyttyttyaacggrccaagctgcaatgcagtattgatttgacaragcctcaatttcgatgatgtytgtkccaaaatggctccaaatgatttytgtactgcaaaataaagccaaactytggrahmmmmwwaraarrwwwaamaaargatttcagtttg

SEQ ID NO: 6495 - DNA, 844 bp, Rattus norvegicus; identical to SEQ ID NO: 2399
  misc_feature (825)..(825): n is a, c, g, or t

SEQ ID NO: 6496 - DNA, 600 bp, Rattus norvegicus
ataggcctggccggmctggccactgacgtccmgacagttgcccagcgtctcaagttccgactgaacctgtacragctgaaggaaggacggcaratcaagccttacamcctratgagcatggtggccaacctyttgwatgagaaacggtttggtccctastacacagaacctgtcattgctggcttggacccgaagacctttaagcccttcatttgctctytggacctcattggctgtccatggtgacaratgacttygtagkcagkggcacctkstytkrasarrkbtdkggswkgtsygrgtykytytgsdvksyyrrcwtggatycrgrgcacctkkttgrgamcatttytcargccatgytkratgytgtggacarggatbscgtgtcsrrcatkggsgtcattgkycacatmwtkraaaragmcaagatcmccmccaggrcaytgaaggsgcggrtggrctaacytgtgctytggcyccgtytmccttktgytgkttytctkybtaatamaatytcctttctttcdwrmhhdmvmrmmmwhrwwwmwrmractttgtccccatcagggagagcccaatacagagcgactttatctc

SEQ ID NO: 6497 - DNA, 1400 bp, Rattus norvegicus
gmctmksaycmgtayyaysagwggsccmttgkgktwctstttargagttsagatgccwsrwggaaagacagaattgtcctaaaccaagaggtgatggcccctgactccatcaagaacttcgtgcccctgctggaaggtgtagctcaggacttcatcaaagtcttacacagacgcatcaagcagcaaaactctggaaagttctcaggggacatcagcgatgacctattccgctttgcctttgagtsyatcassaktgywgyatttggggagcgcctggggatgttggaggagatcgtggaccctgagtcccagcggttcatcgacgccgtctaccagatgttccacaccagtgttcccatgctcaacatgcctccagacttatttcgactctttagaactaagacctggaaggaccatgcagctgcctgggatgtgattttcagtaaagctgatgaatacacccagaacttctactgggacttaaggcagaagcgagacttcagcaagtaccctggtgtcctttatagcctcctgggaggcaacaagctgcccttcaagaacatccaggccaacatcacagagatgctggcaggaggggtggacacgacctccatgactctgcaatggaacctttatgaaatggcacacaacttgaaggtacaggagatgctgcgggctgaagttctagctgcccggcgccaggcccagggagacatggccaagatggtccagttggtcccactcctcaaagccagcatcaaggagwywctsagactccaccccatctctgtgaccttgcagaggtatattgtgaaygamctggwrctkcgwamttrcmmsmttsswgccwagrctwtggwgcwgrkgrctagswatgccatgggtcgagaatccagcttctttcccaatccaaacaagtttgacccaactcgttggttggaaaaaagccaaaacaccacgcacttccggtacttgggctttggctggggtgttcggcagtgtctgggccggcggattgcagarctggaaatgaccatcttcctcatcaacgtgstrswmwrsytcwgrawtsaagttcaaagtatccgtgatgtggggaccaagttcaacctcatcctgatgcctgagaagcctatcttcttcaacttccagcctctcaagcaggacctgggctcaactatgcccagaaaaggcgacactgtatgaattgcaggctgcagtcacacggggagatgtctcactggggcatttgagggtggkgtctctatatctccagaaacagcactctgtgattacctgtccacgttagctgggccctcctctctttcatcctgtcwccctttctacttactcaggaggttaataaacacataaatgctgrraaaaaaaaaaaaaaaaaa

SEQ ID NO: 6498 - DNA, 1400 bp, Rattus norvegicus
agcgggggggcgcgcccccccagcagcagctgcggcgcccgcgcccgggccagtcgccgccggggcccatctcctgtcgccgcgctctgcgacccaccgccttgcgcggccatggggacgctgctggctctcgtggtgggcgcggtgctggtatcctcagcctgggggggctgcgtggaggtggattctgagaccgaggcagtgtatgggatgaccttcaaaatcctgtgtatctcctgtaagcgtcgtagtgagaccaccgccgagaccttcacggagtggaccttccgccagaagggcacagaggaatttgtcaagatcctacgctatgagaatgaggtgctgcagctggaggaagatgagcgctttgagggccgtgtggtgtggaacggtagtcggggcacsaaggacctgcaggacctgtccatcttcatcaccaatgtcacctacaaccactctggcgactacgaatgtcacgtctaccgtctcctcttctttgataattacgagcacaacaccagcgtcgtcaagaagatccacctggaggtggtggacaaggccaacagagatatggcatccatcgtgtcagagatcatgatgtacgtgctcattgtggtgttaaccatatggctcgtggcggagatggtgtactgctacaagaagattgctgctgccacggaagctgctgcacaagagaatgcctcggaatacctggccattacttccgagagcaaagagaactgtacaggcgtccaggtggctgaatagcgctggctctgggctccgcctcaaggrrswgmyagcctrsskstrssctccagccctsmagtgrrgaycagcccctrstgggtaccctccccykgcagtggggatcagcccatcggtctccccagcctcacagwtctgcagtggagccaccagggtgggagsgggcagggactgatcccacctcacccaccgmctcccacctaccctcccaccgccatgcatgatgggtgaagcaatatggccgccccaccctgcttttgctgcctgtttgggggakgggscrstgaggcgagggggcaggccccgcccccttctttttgytgatttgcacataggccacttccacacgcactgccaggccagccggcccaccyctgcttgatggggtgaagaggggtcgggacagggacmgtagtgggcagggggttytgggcctcatytcccctccgcttcctccggstggacctggggttccctycctgtgacacctcctagccctggcccacccsccctytytcaccagccttcaaktgtsgtctcttgggaaggcctyttcggcctcctatctyyacwgaagtagttkttgttcatgaaataaagrttyttggaytmgraaaaaaaaaaaaaaaaaa

SEQ ID NO: 6499 - DNA, 600 bp, Rattus norvegicus
cccaggrggcccaggaggcatccgttccagactcaaacccatcgatgcagacaccatcgacatctaygsccgcscwgkgkkcccggcakcckttscagcagtcaacatcatctactgggcrgcgtataccatgtgacggcagtgcgtacaccacatgacggctttacatgtaccacgtgcggtggttgccacaaactcctggaggaacagccctctccgtggatcccaaagtgggacagagaggagsstccgctccctgggctttacctcaattttgctctaccagcctgcacttcctgtagatggagcaggatgggctttgcacagagggccattagttggcctgtccctgaagctgagcctgcactaaggtgcccttgggagctgtgaagttttagactcaggatgggcctgatttctgggcctttgctctgtgggatcaggatcagagagaaagagagtaggggtggatgaccactctcatggtgaactggaggagaagggcattatgaggcctctttggtcccagsgaatwmagccttggcctggcarmwrrmwwmwrwawwtgttgcaaaaaaaaaaaaaaaaaaaaacctcgtg

SEQ ID NO: 6500 - DNA, 1400 bp, Rattus norvegicus
atgataatttaatattgtggaccatatggttaataaatatagagaaggtctaagagacctgtccaggggcaaccatcctctgtgctgcgaaacctatcttcatatatgtcgttatagctcccatcatttcaaggttaacttaagggatcaatactaaatagtatcatacacatggctattctttactctggtcataaaaagagctatttgcaaattcctacttagaagacagtctctcatttcccccaataaaaggtcatcaaaagcttttatcaaactcaagtggtagacttagagggataaattaagtaattatcattgattttcaaaatgaccgttcgttttgccaagcatggtttgcccatgcacttgggaagtggaatcaggagggtctggagttcaaagctagctttgctttacggcatattggaggcaagcatgggctatgtgaggtttaaaatggttggcttttcatttttattttatgaaacatttaccatcaaagccaacaactttgccactgtcttcttcctcaccactaaggccactgagctgtctaggtttccagagcttgtaactaagccctttgtactgtttgggacactccaccatttgagccagtgtgtagaatgctctcctagcctgctaacctgctatattgaagagcacagactggatggcttaatcaacagagatatattttctcacagttctagagactgatgtccaaggtcaaggtgctggccgacgcagtttccccagaggcctgtcttgctgtctttccaatagccactctcttgctgcatccttgccttctttcctctgtagcaacaacctctgtctagatccctttctccctagttacattgtatcagggcccacatccatggcctcatttaaccttagttacttctttaaaagccttgtctcaaaaccatttgctctttagcgatctcctccaatttggaattcttcatcttgggaagctccttaggacttaggaggtacttaaagaaggtgatgctgtccatcccacagggaagaagcctgttcaggttaagctcaggaaacaaataacaaattcaggaagtccctgaaactgataagctatcacccccccccccaagtatatacaaacaataagaactgctgaggtcacttttagataatccaaaaattctggaagagacaaagaccagccaagctgcctagaagggacagttccaacccatctagctgcctgcaagtcatgctgtgagctccagatttccagctatgggagctgtcacccacgatggggcaggcttttgtartgaaactgtctttgagtcatttctgcacmtctaaataacctcaataaagctcattggttcatcccgttggaaaaaaaaaaaaaaaaa

SEQ ID NO: 6501 - DNA, 600 bp, Rattus norvegicus
cagctttgtgttcgtgtttctctcagtgttggagtacgcagctgtcaactacctgaccacagtgcaggaacagaaggaacggaagcttcgggacaaatttccatgcacgtgtggaatgcttcattcaagaaccatgacgctggatggaagctacagtgaatctgaggccaacagcctggctggctacccaagaagccacattcttccagaagaagaaaggcaagacaaaatagtggttcatttggccctcaacagtgaattgacttcatccagaaagaaaggccttctcaaaggccaaatgggactctatatcttccagaacacccatgccattgacaaatactccaggttgatatttcctgccttctacatagttttcaacctaatttattggtcagtgttttcctagggattctaaggctggatctgggaaagggcatgaccatccgttggtggatacatggacctaatgaccacacttcctacaccaggccaagcagctgctcctggcttggaggagcccagggacctccagctgccctcaccccatcttcatggctcttttcctagttcacactattccagatcacacttttgact

SEQ ID NO: 6502 - DNA, 600 bp, Rattus norvegicus
gcacagcttctcaaatctaggatcacttcagaaggggagtacatccccttggaccagatagacatcaacgttggtttcgatagcggaatcgaccgtatatttctagtgtccccaatcactattgtccatgaaatagacgaagacagccctttrtatgacttgagtaagcaggacattgacaatgcagactttgaaatcgttgtcatcctggaaggcatggtggaggccactgccatgacaacgcaatgccggagttcatatctggccaatgagattctctggggtcaccgctacgagccggtgctctttgaagagaagcattgctataaagtagactattcaagattccataagacttacgaagtacctaacactcccctttgtagtgccagagacttagcagagaagaaatacatcctctcaaatgcaaattcattttgctatgaaaatgaagttgccctaacaagcaaagaggaagaggacagtgagaacggagttccagagagcacaagtacggactcacctcctggcatagatctccacaaccaggcgagcgtgcctctagagcccaggccyttaaggcgagaatcggagatatga

SEQ ID NO: 6503 - DNA, 600 bp, Rattus norvegicus
ggtgggacctagagggaggtccctgagaacaggatgagaggttggtgggtgactagggaaagaagagtctaagtgtggagcagagccttggggtccacagcctcagagacctttctcttccagtctaggagatctgatggtcggtcagtgaagcattatgttgaaaacmragktggcctggtcttgggaatatgctagcatgatccccaacacctctacccgggtgttcatggctctcaaccagcctctgagaatagaagcaccttcctgccaggccctagagaactttctctggcatctccaaggagatgagacgctaaggctagggaacagcatcctaacctcaggccttgttccccttacagggtgcccaggtctctakgctggtgagaaggtgtcctaggatggctagctacattgtggrccagacacagatagaasaggggaaccttgrcttgttwtctgggcygaatcttgaaagacagtcyaaagccagtggttctcaaccttcctaatgctgtgaccttttaatatagttcctcatgttgtgatgaccccaatcataaaattatttttgttcctaaaaaaaaaaaaaaaaaa

SEQ ID NO: 6504 - DNA, 600 bp, Rattus norvegicus
atcagacgctcgctgggcccggcatatccgtgtctgagcccccctcccccagagcactggttcctggtttctgtgcagccgttctgagtggcgcacaccagaacccagccgctagtggtcgcgatgaggggagtgggaccggaaccgttttgttaagcgatgccagtttacataaagagaacatcactcagacggtcagttctgtcacattaagggcaattgtaaactggaagggtagcgcacttgcaaaccaggtaaaacttagatacattagtttgtttaaaaattatagatttactgtacatgacttgtaatatacgatttgtatttgtaaararawrrwmwawawwttgtaattatcgtaccgtatttgaactgcagcaatatcccacgggtcctaacaatcgtagtttcccaccaaaacctagaaattattagtatttttactcgggctaaacagaactaggagaattagaggcaattctcacatattcagtaaaaagaatcttttggggataaacttttgagttcataagaacttgacacttcagaactttttctaaagtattttgagttactataaacctatctttacataag

SEQ ID NO: 6505 - DNA, 600 bp, Rattus norvegicus
gcagcccctcctgtgtgcactccagcctgaatcagcccttctggggtcccagtgcctgagacrwgkgggggcccccctgttgcctttcaggagccttcaggttaggccacagaactctctccttaggggccaccttttttaacagtggggcgacagacagcttgtccttccggtagcctytgaggaccctaagcccagcctacttcatgctttagcaatggstggagcctgctacagacactcrggaccgctccctggcttttgtgaaccacaatgtcaggccactacgagcctgggttgcmtactgcttgccaagragaacctgtgtaggggtcagctgtgcccaccaggytggtytgccctttgctytgggatgstcaggacaaatcamgtctgcccccagggmtagtgaggtagcccagacaccggacaaggtccgctgagcctgcagggtactggttacctgtcctaggctcctggtgaagctgccatacctccactctcggaggtgcttgtttgwatggttgtctgatttyttaaaacttgacattaaaatggagamsthmraaaaawaaaaaaaaaaaaaaaaaaaaaaaaaaa

SEQ ID NO: 6506 - DNA, 600 bp, Rattus norvegicus
gcagagggtttcctgcccccwccymwtytcytcamtwccytcrgwcgyttctgwttwtscmmcwkasycwwwkktcttttctccgtttttctcattccccttctctaccatcgctttcttttctctttctttaaaatttaggggcaacaaaaggaatcccacaaatggatattgtggaaaacatagtgctgaatgacggcaaagaatggtggtaaatcaaaagataaattaacttcataagactgctattctgaaatgcaacaatcttgtacagtcaggactgataaaatggagcaatcagacatttcagatgcccgtcaatgtaaaatcacctacttgaacattgtatgcaatacattcacacaaaaaagcaaatactgtagccttatttgaacaatactgaactcataaatactcatggtttcactctgtccaggcgcctaaggactatgctgctgtaatacaggaaaacacagcggatgcctcctctattaaaatgtcactcaagaaaagtctcttgtaacgtaaaggcaaacacatgtagctactgagctatgactgtccttggtcacactctatgggaaaaacaccggactccac

SEQ ID NO: 6507 - DNA, 600 bp, Rattus norvegicus
tggaggtccagctgccagagctctaccataaaataggggttggtgcaatgacatggtctccacttgcttgtggaattatttcaggaaaatatggaaatggggtgccagaaagttctagagcttcactgaagtgctaccagtggttgaaggaaaggattgtaagtgaagaagggagaaaacagcaaaacaagctgaaagacctctctccaattgctgaacgcctgggatgcacactacctcagctggctgtggcatggtgcctgagaaacgagggtgtgagctctgtgctgctgggatcatccactcctgaacaactcattgaaaaccttggtgccattcaggtcctccctaagatgacatcacatgtggtaaatgagattgataacatattgcgcaacaagccctacagcaaaaaggactatagatcctaaggcaatgcatgagccacttaagctgcatgagtaaatcctggtgggtaggcggtgcagaacggccttaccagccactcttttcaatcacttagcagcttgctgctcaacctctagtgtcccaggattctctgaggtctctgctgttgctaccactgtgcaccctgaattc

SEQ ID NO: 6508 - DNA, 1400 bp, Rattus norvegicus
tcggcgggagctgcaggatttgcatggactccgaaggccactgccaatgagactgtgactggcgtgaatcatagccaataataggatgctaggggcgtggccgcgggcgtcccacgaggtaaagatgctgcgggcggaacctgccggagcaagcgggattcgggggtgctgaagtcgcaagggcagggcgggaaggaagatccggaacggggcgtgggatccggagctggaggcccccaggatttcccctctgtgaaaagacacgctgatctagataagtgaggccggccccatgtatccggaatcaaccacggggtctccagctcgactctccctgcggcagacaggctcccccgggatgatctacagtactcggtatgggagtcccaaaagacagctccagttttacaggaatctgggcaaatctggccttcgggtctcctgcctggggcttggaacatgggtgaccttcggaggccagatcacagatgagatggcagagcacctaatgaccttggcctatgacaatggcatcaacctgttcgatacggcggaggtctacgcagctggcaaggctgaagtggtattagggaacatcattaagaagaaggggtggagacggtccagccttgtcatcaccaccaagatcttctggggcggaaaggcagagaccgagagaggcctttcccggaagcacataatcgaaggactgaaagcttccctggagaggctgcagctggagtacgtggatgtggywykwgsswwcckycmagwcmcsracaywcycatkgaagagactgtgcgggccatgacccatgtcatcaaccaagggatggccatgtactggggcacatcacgctggagctccatggagatcatggaggcctactcggtggctcggcagttcaacctgatcccgcccatctgcgagcaagcggaataccacatgttccagagggagaaggtagaggtccagctgccagagctgttccacaagataggagtaggtgccatgacctggtcccctctggcctgcggcatygtctcagggaagtatgacagtggcatcccaccytactccagagcctctctgaagggctaccagtggttgaaggacaagatcctgagtgaggagggtcgccgccagcaagccaaactgaaggaactgcaggccattgcagagcgcctaggctgcaccctcccacagctggscatagcctggtgcctgaggaacgagggcgtcagctccgtgctcctgggtgcttccaatgcagaacaacttatggagaacattggagcaatacaggtccttccaaaattgtcgtcctccatcgtccacgagatcgacagcattctgggcaataaaccctacagcaaaaarramwawarawmctaagtca

SEQ ID NO: 6509 - DNA, 600 bp, Rattus norvegicus
ttcacaccacacgcttagcactgtgggctctagagagacgaattaagaatcagacaagtaaaacttttgatggtctgcctatcagttgacaagakgggatacagccaggaaaggctgaadgggggaagaatcatttagttgtaatgtcacattawaaatcagaaaattgcaaararrmwawrawmmatacatgtagcacactgaatggttcaaatctatacatgtgtgtctataactcagtttccatttttctttaaaagctaacttgtatgccagtatttttaaatcatggacctttgtaaaactaattttgctcagaaatttcaacttagagaaaagaactagagttctatgttaaaccagtacagtagatctttttcctaagtgagactttgtggttactgattggatggtattctcaattagaagtacatgaaatcaactgatttgcctactaaaacttacagaatttgacctaagagcctataattatattgattgtatataatgctagatatataggtaactgttaaatttggcaatgttttcatgtagcatatactttaaatatatgttgtatttaaaaaaaaaaaaaaaaaa

SEQ ID NO: 6510 - DNA, 600 bp, Rattus norvegicus
gaggttcgctttccgtatctacgacatggataaagacggctatatttccaatggagagctcttccaggtgttgaagatgatggtgggcaacaacctgaaagatacgcagttacagcagattgtagacaaaaccataataaacgcagataaggacggggacgggagaatatcctttgaggagttctgtgctgttgtaggtggcctagatatccacaaaaagatggtggtrgatgtgtgactcwktgaagactctaccacccagcacttttgctttcttctccatctctgaagatctgctcaagacgtccagcartgctctctgtgtgtgtaaatggaagtatttttctctgtgaagccacattttccaacatgagcctcatraarmmaacgaagtgttattgaactcctaccctctcaataactcagtgtagcactttcaagtttgaggscatgswgcatgaaaagagcatatcagtatggtggagaaagggaaggggtggctctttaatttatttttcttcatcttttataacaagaaagtatctatatatacatatgtaaatatagatactttcttgttwtaaaaaaaaaaaaaaaaaa

SEQ ID NO: 6511 - DNA, 600 bp, Rattus norvegicus
gataatcatcatgggcacagtcttgaagagagaatcatctatggagtagaaaatagtagcacattcttggaatgcagtccgaagtcacagagagccttggtatattggcaatttcagaggcgaaatgaagatcgaaaggaggagatcagagtgggtgatcatatcatcaggacagaacaggggctcctgcttcgtagtctgcagaagaaggattcaggcaattacctgtgtcacgccgtggagcacggtttcatgcaaactcttcttaaggtgaccctggaagtcatcgatacagaacatttggaggaacttcttcataaagatgacgatggagatggctctaagaccaaagaaatgtccagtagcatgacgcccagccagaaggtctggtacagagacttcatgcagctcatcaaccaccccaacctgaacacaatggatgagttctgtgaacaagtgtggaaaagggaccgaaaacaacgccgacaaaggccggggcactctcaagggagcagcaacaagtggaagcacatgcaggagagcaagaaaggtagaaacaggaggacccacgagtttgagagggcacccaggagtgtctga

SEQ ID NO: 6512 - DNA, 1400 bp, Rattus norvegicus
atcmaraaggagtcmaccytgcacctggtccttygsctyaragggggcatgcagatctttkkgaaraccctkrcasgcaagaccatcaccctkgaggtcgagcccagkgacaccattgraaatgtsaaggcawwgatycakgacaaggagggcawhccccctgaccagcagaggctgatctttgcakgcaagcagctkgragatkgscgcaccctgtyagactwcaacatycagrargagkscamcctgsacctsgkycttygsctcaragggggcatgcagatctttgtgaagaccctgacasgcwagaccatcaccctggargtygagcccagtgacaccattgaaaatgtcaaggcaaagatccaggacaaggagggcatccyccctgaccagcagaggctgatctttgcmggcaagcagctkgaasatgrccgcaccctgtcagactacaacatmcaraaggagtccaccctgcacctggtyctgygyctmakagggkgcatgcrgatmtttgtgaagaccctgacaggcwagaccatcaccctsgrggksgagcccagtgacaccattgaaaaygtmaaggcavasrtccaggacaaggwgggsatcccccctgamcwssaragsstgatctttgcaggcaagcagytggaagatgsccgcaccctgtcagaykrcamsakscrgmasgagkccaccctgcamytggwcmkkcgcytcagagggggcatgcagatctttgtgaagaccytgacaggcaagmccatcaccytggaggtcrrgcccagtgacaccmttsrraaygwsraggcaaagatccaggrcaaggagggcatcccccctgaccagcaraggytgatctttgcaggcaagcagytggaagatgsccscaccctgtcagrctacrrcatcsagraggagtccaccytgcacctgrtcytkcgccycagassrsrmrkgcagatcwttgtgaagaccctgacaggcaagrccatcactytggakgtcgagcccagtgttaacmccaagaaggtcaaacaggaagatactcgtacmttthtcmccacagtatytagaaagagcccttcttgtgcytgttcytgggtytgatggggaggtgtcttagytttccctatcttttaagctgttaacaagtttcattgcactttgaataaagttcttgcmttccmaaaarwmaawaaawaaaaaaattattggaagcggccgcaagcttattccctttagtgagggttaattttagcttggcactggccgtcgttttacaacgtcgtgactgggaaaaccctggcgttacccaacttaatcgccttgcagcacatccccctttcgccagctggcgtaatagcgaagaggcccgcaccgatcgcccttcccaa

SEQ ID NO: 6513 - DNA, 600 bp, Rattus norvegicus
gggctacatctggacagaaaggactctgggcacagacacggggtggggtgacatagwcataggggtacttctgccagccattccctcctaccccagcctgggttgctggagcatcattggggtcataactgtacccctaccagccaagatggctttctgcatggacatttgagagccagtatttctctgtcctctttagccctcagggacccctgatacagaggggacagagaggggttttatttgtagagaagctggtgagatgagagctgggcatggctctcttgtacagtgtacattggaatttatttaatgtgagtttggcctggacagacagccatgggmcacagtccargmrcmagykrmtsmrgcsasaggraagawgcrgasycaggkktyagaatgggacttcatgtcctccctgcgtttctcttctccctctttcctcctcccctcttttcttagtcctcctttttctcttcccccttttcacatctgttcctttcctctctcacatttgtggagaacatccatttaccttttctctttttgatctgtggttgaattaaaatcattagcattcrmwwwrwrrwwaaaaaa

SEQ ID NO: 6514 - DNA, 1400 bp, Rattus norvegicus
gaggacgaatttaagaagttcattagtgataaagatgcctcggtrstgrgctttttcagggatttattcartgatggccactccgagttcctraragsagscagcaactygrgagataactaccgatttgsacacaccaacgttgaatctctggtgraggagtacgatgataatggagaggggattactatatttcgkccattacatctggctaacaaatttgmagacaaaattgtggcatatactgaaaagaaaatgaccagwggcaaaatcaagaagtttattcasgaaagcattkttggtctctgtcctcatatgacaraagataakwaagatttgatacamggcaaggrcttactcacggcktactatgatgtggactatgaaaagaatactaaaggktctaactactggagaaacagggtcatgatggyggcaaagacattccttgatgctggacacammctcarctttgctgtagctagscgkaaaacctttagccatgaatwgtctgackttggmttagaaagcactactgragagattcctkktgtggctatcasaactgctaaaggagagaagtttgtcatgcaggaggagttctcgcgggatggcaaggctcttgagcggttcctgcaggaatactttgatggcaacttgaagagatacctgaagtctgaacmtatccccgagaccaacgawggacctstcaaggtggtggtagcagagagttttgatgacatagtgaatgctgaagacaaggacgtgctgatcgagttttatgctccttggtgtgscmactgtaagaacctggaacccaagkrcaaakagctgggggagaaactcascaaagacccaaatattgtcatagccaagatggatgccacagccawtgatgtgccttctccatatgaagtcaagggttytcctaccatctacttctcaccagccaacaagaagcyrrcwcsaragaagtatgaaggtgsccgyraattaaatgatyttatcagctatytacaacgagaagctacaaaccctcmtatarttcargaagaaaaacstadsawgaagaagwrrgcrcamgaggacctytaaagcaacagccaamkgcmcsastttmtaaaaggactcttacmccagagaaagcaaahccatcagagaggacagaatggatatactctgaatcctgttaaattttctctaaactkkktcttagctgcrctgkttsaaaawmmmarrmhhmrhkkmygtttgtgktttggggagaaaattatytgtgttgggaagaatktggtaggggkggggggaattkagttggggggttatyttctaatwttttttgtacatttggaacagtgacaataaatgtgccccctttawamwrwwrrwwwwwwwmmctc

SEQ ID NO: 6515 - DNA, 600 bp, Rattus norvegicus
  misc_feature (61)..(61): n is a, c, g, or t
  misc_feature (103)..(104): n is a, c, g, or t
  misc_feature (124)..(124): n is a, c, g, or t
  misc_feature (135)..(135): n is a, c, g, or t
  misc_feature (166)..(166): n is a, c, g, or t
  misc_feature (212)..(214): n is a, c, g, or t
  misc_feature (312)..(312): n is a, c, g, or t
  misc_feature (316)..(316): n is a, c, g, or t
  misc_feature (318)..(318): n is a, c, g, or t
  misc_feature (340)..(340): n is a, c, g, or t
  misc_feature (342)..(342): n is a, c, g, or t
  misc_feature (354)..(356): n is a, c, g, or t
  misc_feature (365)..(365): n is a, c, g, or t
  misc_feature (391)..(391): n is a, c, g, or t
  misc_feature (470)..(470): n is a, c, g, or t
gcctaataaaatctgtcatttyawgctcmraaawwawawwwwmwwwcttattttttacttnaaattgttattgtggtttgctaagtttttattattccttttnngatggtgagttttgtatttntttatgccttntgtggcacctttgggcttggttctgtttttnatacacccaccttgtgtgtggttagtaccttaggatgggaaaaaannntctgtttctggtctctgtgtggagcctccctacaacctttataaaattgcgggcccttttttggtcaaaatctaatcattttttcccttcatatattnctcntncattagatttttgggtcggttnanaattatgtctgnnnttttttggngatctagtcttacctctgggtttttntcccttttatcttaaactaggtttggctctccaagctcttttaaatggggtcgaaaatgtgtgtctctctccccctcgnaagccggaggtcattataaacccctcgtcggtggttttgtttgttaacacccccaatgtgacctggcttacactatgcctagggtctctaatccctcagcttcttttagctttattttctaatatattcg

SEQ ID NO: 6516 - DNA, 1400 bp, Rattus norvegicus
tgcccactcactggcgctgcaacaagaccctgcccatcgctttcaaggtggtagcgctgggcgacgttccggatggcactctggtcaccgtcatggcgggcaatgacgaaaactactcggcggagctgagaaacgccaccgcggccatgaagaaccaagtggcgagattcaacgacctcaggtttgtcggtcggagcggcagaggcaagagcttcactctgaccatcaccgtctttacaaaccccccacaagttgccacctaccatagagccatcaaaatcacagtggacggcccccgagaaccccgaagacatcggcagaaactagatgatcagaccaagcccgggagtttgtccttttccgagcggctcagtgaactggagcagctgcggcgcacggccatgagggtcagcccgcatcacccagcccccacgcccaaccctcgggcctccttgaaccactccactgcctttaaccctcagcctcaaagtcagatgcaggatgccaggcagatccagccgtccccaccgtggtcctatgaccagtcttaccagtacctggggtccatcacctcttctgtgcacccggcgacacccatttctcccggccgagccagtggcatgaccagcctctcagcggaactttccagtcgactctcaacagccccggacctgacagccttcggcgacccgcgccagttccccacgctgccgtccatctccgacccgcgcatgcactacccaggcgccttcacctactcgcctcctgtcacatcgggcatcggsattggcatgtcagcsakgagctcgacctctcgctaccacacctacctgccgccgccctacccaggctcctcgcaggcgcaggccgggcccttccagaccggctcgccctcctaccacctgtactacggcacctcggcaggctcctaccarttctccatggtgggcggcgagcgatcacccccgcgcatcctgccgccctgcaccaacgcgtccaccggagccgcgctgctcaaccccagcctccccagccagagcgacgtggtggaaaccgagggcagccatakcaactckcccaccaacatgccacccgcgcgcytggaggaggctgtctggcggscmtactgagcgccttcgggggactgagcccgccgtccatgcacagaccccgccaggagagcccttggagsccaacaggagggaaactgtgaatgcttctgatttagtaatgctgtgaataaaagaaagattttatacccttgacttcactttttaaccacgttgtttattccaaagagtgtggaatgttttcggttccgggtggggaagacgcagcccatcctgtttggcatctatttcttttccgcaccttattgattgcaaaaaaaaaaaaaaaaa

SEQ ID NO: 6517 - DNA, 600 bp, Rattus norvegicus
ttgtttagccacttaaggaaratctgcttwtggcacaatttgcctcawatccattcmaagttgtatatttgttttccaatawaaamwmrtgmcaatttwmwmmmmwmwmammmaaaaaawagactaatgggaacatctaagggaatttcagaagtgtgctttatcagtttttcatttaaatttcatttttctcttctgtaaacaatattcaagaaatttcacttatagaatttcctagttatttatgaaatataccttataaatagataaataaatataagtagacatctataatgtataattatatattatatagcacaaaatatataaatatataaatatgtaaattatatgtttattatttattggtatttattttcattttaaattcttataccctttcctggtttcccctctgaaaaacccctattcatcttcctcttttctgcttttgtgagggtactcacccacccgccgaatcccacctcaccacgctagcattcccctaccctggggcatcaagtccctgtaggaccaaggacctcccctcccatggatgacagataatgccatcctctgctacatatgcactggaggcat

SEQ ID NO: 6518 - DNA, 600 bp, Rattus norvegicus
mkkcwcwksctcaacaagaaagacctctttggcgagaagattaagaagtcacccttgaccatctgctttcctgaatacccaggctccaacacctatgaagacgcagctgcctacatccaaacacagtttgaaagcaaaaaccgctcacccaacaaagaaatttactgtcacatgacttgtgccacagacacgaataatatccaggtggtattcgrcgccgtcaccgacatcatcattgccaacaatctccggggctgtggcttgtactgacctcttgtcctgtatagcaacctatttgactgcttcatggactctttgctgttgatgttgatctcctggtagcatgacctttggcctttgtaagacacacagcctttctgtaccaagcccctgtctaacctacgaccccagagtgactgacggctgtgtatttctgtagaatgctgtagaatacggttttagttgagtctttacatttagaacttgaaarrawwwaaaaaaaaaaraamawwwctcatgtgctttgtagctttaammaggaaaactcaccatttcatccatatttccttttattttgaagttaaaaaaaaaaaaaaaaaa

SEQ ID NO: 6519 - DNA, 600 bp, Rattus norvegicus
tacatcacatctacggatgcttatctgaaggtcttctttggtggccaggagatcaggaccggtgtagtgtggracaatarccatccctcgtggagtgacaagatggactttgggaatktgstcytgyccacagggggacccytcagggtgcaggtctgggatgctgacaatgsctgggatgatgaccttcttggwacttgtgacaagtctcccaagtctggtttccatgaggtgaattgtcccctgamccacggcagtataaaattcatctaccaggccaattgcttgcccsatctcactggagagacctgcctggagtatgccccccaggggcttctaggagatccacsaggaaaccgcagtggggctgtgtggtaaaaacaaacaaaaaagacwtaaaaaammaaaaaaaaaaaamaaaacaaataacaaaacaaaacaaaaaaacccaaaaaacaaacaaaaaccatgcctgagagttgggtgtagtagcacatgccttcaatcccagcttttgggaggcaaacacaggtggagctctaggagttcgaggccagcctggtctacatagtgagacctatctcaataaaagcaaacaac

SEQ ID NO: 6520 - DNA, 600 bp, Rattus norvegicus
gattcaaaaactgctttaagtcgtgtktgtgctgctggtgccaaacgtttgaggaaaaacagtccttagaggagaagcaatcctgcttgaagttcaaagckrmcgmtcacggatacgacawcttccgctccagcaataaatacagctcatcttgaaggaaggaacactcactgaatctcattgtcctcatcgtggacagatagcattaaaacaaaatgaaacctttgccaaacccaaacggaaaaccgtgcttgcggaaaggtgtgcacgcatgggagagggattgttttttaaccgttytaactttccacacctgatatttcacgggctgtttacaacytaagaaasccatgggaatgaatgaagcctcgggaaagcacttagattyttagtcagcacttcagcacggctyttaaaagccctcabtgcactcacagcccacttacatttaaaaacaagaactcaaactytattcaggggtttattatccagtcctwtgaatytggatacaggaatgcatgacattgcaaaacaattyttaaagcaaagtttcaattgctcgrtttgrgmcaaaaaamaaammaaaaaaaaaaaaaaaaa

SEQ ID NO: 6521 - DNA, 600 bp, Rattus norvegicus
ctgttcgacctctccagtcaagcaagaactcattgcctgggagaaggagacgcatttgtagggagtgccagaggccaggtaactccagagccaggaacctggtcaaggctagctcctcccagggtgaacctctctyccaccctgttgagacctcscaggtctstggacacccctgctggtcttsgtttggstgrgacagcctgtcacmtaccagtcctttccagatgtgctccaggaatctgtttgccaagacttttgaactcaatgtcctgactttttggatttaaaaaaatgaagaatcagaaaggcaaagtgatattttcaaggtcatgcagccttgcagagcccaagaccttccttggacttgytgctctctgctgaggagaacctccagcctcacccctgcagcagttaacaagcctgtgtggatcacccgctastamamrarwrmmwmwwmmttgtctcactccacttcagctgttgtgtgggtgggaggtcacctcatgcaggggcttgggactgggaacataccttgttaagttcccatctagcctctacctaccaaacttctcttggatctctaaaaaaaaaaaaaaaaaa

SEQ ID NO: 6522 - DNA, 600 bp, Rattus norvegicus
gaggggttytactcacacgtcagccggtttatctcttcctatttcgaatatgagaacctgtgtttcgaagtagagtaggaaaaacattacttgtctgacttgtcgtagtgggtttcttccttgttgacagttgggagtttcktccgtggctcttttgaactagtgtcactgtcayggtccttttcaaacagccagagctgactcaacagttttgagtctgactctgaactctgagaaatcttggtgcctagccttctttatttttctgtccacccgtgtmmacaagaacagtttcwccaagagctrtaggctgtaaaaatgcactttctttccccacccagaggarctgrgaattcagaagtcaggacaacgaactcagcatgctaggacagtmactggacaccgtcccttaagaataccgttgagcgtctccgtggattccgacaggatattctctgggttctttgcatttctgttgtcagactcattttaacccgtgtagctagtggcattttattctttggattttgtatgattaaagtacatgattatgtgttgtgmccakmrmmrhdrwmaaaawgrgaaaaaaaaaaaaaaaaa

SEQ ID NO: 6523 - DNA, 600 bp, Rattus norvegicus
cagatgtgtataaagttggctgacatcaacgggcctgctaaatgtaaggacctccacctgcggtggacggagggcatcgccagcgagttttatgagcagggcgatgaagaagccagccttggtttgcccataagcccatttatggaccgctctgccccgcagctggccaatcttcaggagtcctttatctcacacatcgtgggtcctctttgccactcctacgactctgcgggtctcatgccgggaaaatgggtagatgacagtgatgattcaggagacactgatgacccggaagaagaggaggaagaggctgaaacaccacacgaggaagaaacctgtgaaaacagtgaagctcccagaaagaaaagtttcaaaagaaggagaatctactgtcaaataactcagcaccttctgcagaaccacatgatgtggaagaaagtgattgaagaggagcagtgtttatcaggcacagagaaccaggccccagaccaggcaccgctgcagcattcctcagaacaaatccaggctatcaaggaggaggaggaagagaaggggaagccaagagcagaggaaaccctcgctccacaaccagacctgtga

SEQ ID NO: 6524 - DNA, 809 bp, Rattus norvegicus; identical to SEQ ID NO: 2428

SEQ ID NO: 6525 - DNA, 600 bp, Rattus norvegicus
ctctgcaaatggcagccgagcccatctccgctaggcagccagctctgcggccgcacgtccacaaacagcccgagaagaccacccgagtgcggactgtgctcaacgaaaagcagctgcacaccttgcggacctgctacgcagccaaccctcggycagatgcgctcatgaaggagcaactagtggagatgaccggcctcagtccccgagtcatccgggtctggtttcaaaacaagaggtgcaaggacaagaaacgcagcatcatgatgaagcagctccagcagcagcaacccaacgacaaaactaatatccaggggatgacaggaactcccatggtggctgctagtccggagagacatgatggtggtttacaggctaacccagttgaggtgcaaagttaccagccgccctggaaagtactgagtgacttcgccttgcaaagtgacatagatcagcctgcttttcagcaactggtcwrttwtwmakwaggaggaccaggctctaattccactggcagtgaagtagcatcgatgtcctctcagctcccagatacacccaacagcatggtagccagtcctatagaggcatgaggaacattcattc

SEQ ID NO: 6526 - DNA, 1400 bp, Rattus norvegicus
  misc_feature (1250)..(1250): n is a, c, g, or t
gatcatccctatcatctatgtcaaggtgtacatgtaccagctcttccggagcttggcctacatccactcccaaggtgtgtgtcaccgtgacatcaagccccagaatttgcttgtggaccctgacactgctgtcctcaagctctgcgactttggcagtgcaaagcagttggttcggggggagcccaacgtgtcctacatctgttctcggtactaccgtgctccggagctcatctttggagccacagattacacctcgtccatcgatgtgtggtcagctggctgtgtactggctgagctgcttcttggccagcccatcttccctggggacagtggggtagaccagcttgtggagatcatcaaggtactagggacgccaaccagggagcaaatccgagagatgaaccctaactacacagaattcaagttcccccagatcaaagctcacccctggacaaaggtgttcaaatctcggacaccacctgaggccatcgcactctgctctagcctgctggagtacactccatcctcaaggctctccccactagaggcctgtgcccacagtttctttgatgaactgcggagtctcggaacccagctccccaacaaccgcccgcttccccccctcttcaacttcagtcctggtgaactttccatccaaccgtctctcaatgccattctcatccctcctcacttgaggtccccatcaggccctgctaccctcacctcgtcctcacaagctttaactgagactcagactggccaagactggcaggcacctgatgccacacctaccctcactaactcttcctgagggccctaccgactacccctcacgctcactcggaaggctcaagtgggctggaaagggccatagcccatccagctcctgcctgctggccctagactgagggcagaggtaaatgaactacccagcatctaggcctccctcaccagcctcaccttgtggtggcttttaaagaggatttaactgtttgtgggggagggaagggaagagaaggacggacggggtttggggtatgaggaccttctacccccgtggtcccctcccctcccccaggstaccamtmcycccccccctcccatgtcccttgtaaatagaaccagcccagccgtatcctsttyytggcccktgggtktaaatagattsttataatttttttcttaaagaaaacgtbgattcacaccakccaacytgccytccccctcaghtgwwcccccytyttstcctntgbtcccaaggvytmctccctbtccccatcccaaggaggggwgtagggaragccchtgskgtbttagtttccacagtaaggtktgcctgtgtacagacckccgttcaataaattwktggcwtgdaammmwwmaaaaaaaaaaaaaaaaaa

SEQ ID NO: 6527 - DNA, 600 bp, Rattus norvegicus
accctcctcccattgctattccactttcaggacacacacacacacacacacacacacacacacacttactcatattgccttcgatacccaccagagaacatcgaagtggcttctctcactgctggagataggcagacctcttcctactggaattggctagacttttccctgctgccaccataccccaggaccccttagcagccctgcctgcccccagttcttgtcctcagccccttcccctgttcctcacgttgggaatgtaaatacaccgtgactttgaaagtttgtgctgttgccctttccccatatgccactagcttgtaggcagatgtctgagtctctaggtggtttccccattttatagcagttagctttgatgatctcactccaagaaaaataaaagcagacacacacacaaaaaagcaaagattgcgtgtcccagcactgctgtggttcgctcagcagctgtgctcttcctgtatgcctttgcttggtctgttgatgagccctctacaaaaaacaaatatatatatatgtacataatatcagaatataacaggcaaataaaaacctggaaatgaaaaaaaaaaaaaaaaaaaa

SEQ ID NO: 6528 - DNA, 600 bp, Rattus norvegicus
ggggaacagcacctttggatgttcctacgaagagasstccytcattgactgccggggaccaatgaatcagtgcttggaggctacaggcttagatgtgctgggaaaccggagttacaccgtaagaggstgcsccacggcttcctggtgccaaggttcccacgtgkccgactccttccagacccabgtcaacctbtmtatctcctgytgtaatggcagtggctgtaaccgccytacagggggcgcccccgggccaggccmtgmtcatsttatcytcattgcctccbtgmtcctgaccctcagactgtggggcatccctytbtggacctgaatcmtgagccgtstgcmctggctggacccaggracttttgactcvtccgcctytgctccatmtttgaggacaggcgtgctgtattgtmttcktgggcctcaagaactggaagagaattgagaaaagggctgcgggccagcaggggggcctcttggttgagttaatattgttgctgttattattattatcattgttattaccctaatttattatgtaaatatatatataagatwtttgtaccagwraaaaaaaaarmrrmmrmaraakcgryc

SEQ ID NO: 6529 - DNA, 600 bp, Rattus norvegicus
acttcatctgcagtaatgaaaccatagtaactgccttggctaagatcacagcacacaatctgcgatcatcccggagtatttggcattacttctgatggtcagtcaagaaaagttgctccccccaaaatgatattgtgtccccaaactatctaaattgtcagtgtctatggcctaattttcatgcggcagaatgtctcccctagtatgttgagttgtcccagctgggaaatgtctctacattgaaaaaaatccaatccagtgtgtttgcttgtctctgcaccattcagtctgttagtctggagtcatcaccctcatcaacaaacatttatccaatttaattgttagctttgccccaaatagcagattgcccatgccagagtctgggtcgtgctgatgctaccttcgaggcctagctcaattttgcaaagcatatttatttcagttgcattgttttggaatcaggttgaacttcgttcgcttgggttctcctgcatttagatagctctacaaaattatcaaaaattggacccaaatcaactaaattaaaaagacttttaaaaaaaatacagcaagctttcatcaaaaaaaaaaaaaaaaaaa

SEQ ID NO: 6530 - DNA, 1390 bp, Rattus norvegicus; identical to SEQ ID NO: 2434

SEQ ID NO: 6531 - DNA, 600 bp, Rattus norvegicus
tgggacccaggagactaacaatggctgtcgaaaggtgaaaatcatgccctgttccttcccagtgtccaaagacccttcaacaaaaggtccggatcccaacctcagtcatcaaatgaccaaacgaaagagaatggttctggtcaaagagaggaaagcggctcagaccttgagtgccattctcctggccttcatcatcacatggaccccttataacatcatggtcctggtttccaccttctgtgacaagtgtgtccccgtcaccctgtggcacttgggttactggctgtgctatgtcaacagcaccatcaaccccatctgctatgctctctgcaacagaactttcaggaaaacctttaagctgcttcttctctgccggtggaaaaagaaaaaagtagaagagaaattgtattggcaaggaaacagcaagctaccctgaaaccttagcacctcccctggaaagaataatgatcaccgtctggtttgcttgtttaaagaacgtcatctgctgttctgagtccttgaaggcttgtcaaggtgcaaaatcttctgtcaaatgaagagtcgtcacacatgcacctgccatgtgcggtgagtcttgac

SEQ ID NO: 6532 - DNA, 600 bp, Rattus norvegicus
ggagagaagccttatgaatgtaaagggtgtgggaaggccttcattcagaaatcaagcctcatcagacaccagaggagccatactggagagaaaccgtacacatgtaaggaatgtgggaaagccttcagcggcaaatcaaacctgactgagcatgagaaaattcatattggagagaaaccctataaatgtaacgagtgtggaacaattttcaggcagaagcagtacctcatcaaacatcacaacattcacacgggcgagaagccatatgagtgcaataagtgcggaaaggccttttctcgaatcacgtcgcttattgtgcatgtgagaattcacacaggcgataagccctatgagtgtaaagtctgtgggaaagccttctgtcagagttcgtctctaaccgtgcatatgaggagccacacgggtgagaaaccgtatggctgcaatgagtgtgggaaggctttttctcagttctccactcttgctttacacatgagaatccacactggcgagaagccttatcagtgcagtgagtgtgggaaggccttcagccagaagtcccatcacatcagacaccagagaatccatattcactaaaactct

SEQ ID NO: 6533 - DNA, 600 bp, Rattus norvegicus
aggggcggcgtctgaagaaacggaagacctccattaagaagaacacgctgaaccccacatacaacgaggccctggtgttcgacgtggctccggagagcgtggagaacgtgggtctcagtatcgcagtggtagactatgactgcatcggccacaatgaagtgatcggggtgtgccgcgtgggcccagmggccgctgacccacatggcagagaacactgggcagagatgctggctaaccctcgcaagcctgtggagcactggcaccagctagtggaggagaagactctaagcagctttaccaagggcggcaaaggattgtcagagaaagagaattcagagtgagggtctggtctaggcctgggattggaccaggcgccctcaggacccatcccttcctgcccggactgtgaactcatctcgaagccataatgtccgagctgctggtgcggggcggcctggacctgttcctccttatcctggaggcgtgaggctaggaggcagcaggcccagctccctgtttcagggtgggaggktctcggcctccattgtctgtcttcttatccccagagttccccctagaggcaggggggcatgcatgtct

SEQ ID NO: 6534 - DNA, 600 bp, Rattus norvegicus
tccagcgtggactctggaacataattcctgccatgaaagcaacttcccaatagtgtttggaattacgttttctgttcryacarrctgggagagaaaagtttctttctcctgtggtctggggctcatcmgtagcagtgttcagmtagcarrraggtgtagtgcgctgtgtgagtattttatattaaaatgtggagtgrgrgcarvmmawwrvmwawwrattgtgtttcccttgytcaatgcattttgtttcctytttamccattcctthtattggaagaccttaaatgctattgtaacttgcttgagaactwtaggaccatggcaaacaaaagcaattaaaattaggagratctgaawmwwwrrmwrarrmmaatatatattatatatataycaatttatggaaaaaaagcacaaatamccttggaagcrsywygwstgcacaccatgwtgaacttcytgggcccaaaggtaccagggcaaataactggcaccatctaccctttsgaagtgttttagttactggatcagtggaaaataatactaataaaacaagctatctctkamawhwrrwmaaaaaaammmaaaaaaaaaaaaaaaaaa

SEQ ID NO: 6535 - DNA, 600 bp, Rattus norvegicus
agcccggagaggacccacgcgtgacccgggccaagtacttcatccgggatgagtttctgagaatcagcactgctagtggagatggacgtcactactgctaccctcactttacctgcgccgtggacaytgagaacatccgccgtgtyttcaacgacwgccgtgacatcatccagcgcatgcatcttcgccaawacgagctgcthtaagaagggaacgcccaaatttaattcagccttaagcacaattaattaagagtgaaacgcawtcgtacaagcagttratcacccaccwtmggrcakgatcaacacsgcarcctttccmttttmtccccagtgattvtgaaaaccccsthttccvttcagmttrmttagatgtkcsaaatttagtaagcttaaggcggchymcwgmdgaaawrgaaaamgaaaaagvccacaaaagttccctvtmacwdkcagtaaataaaatraamgcagcaacamrmaraavwaamraartaartgaaataaatgaarcycaaawtgaaahaaawawwrwrwwrwrmadcattaararrtcaaaataaaaattaaarwtgrgmaaaawaaaaaaaaaaaaaaaaaa

SEQ ID NO: 6536 - DNA, 600 bp, Rattus norvegicus
aggtctcaggagcctcacccggagggcagcagcgccaaggccctccccagaaacccccaggccctgctggtcccattcgtcaggccagccaggcaggtcccggacctcgcactgggccacccaccacacagcagccccggcccagcggcccaggtcctgctggacgtcccaccaaaccacagctggctcagaaacccagccaggatgtgccaccacccatcattgctgctgccgggggacccccgcacccccagctcaacaaatcccagtctctgaccaatgccttcaaccttccagagccagccccgcccaggcccagccttagccaggatgaggtgaaagctgagaccatccgcagcctgaggaagtctttcgccagcctcttctccgactgacacctactctgagaaccctaaacccctagacaacccgtctctgggtcctgagtccatttctcacctttggaatctccaaatcccttgagaacccctctctcctggttctacatcccacttctcattcctcaagatgtcccttgagaaacgtggtcctaaatccagttctcacattgggaatccccaagtccatttagaatcctgg

SEQ ID NO: 6537 - DNA, 1400 bp, Rattus norvegicus
cacaaagatttgaccactgctgagaaattaaaaagagaaagtccatggaaaattacagatgcagaacwsgargcartcwrksmamagagttaccgccaagttcgactgaacgagctgttacaggagcattccagagccgccaacctcatcgtattgagccttccagtggcgagaaaaggatctatttcggatttgttgtacatggcgtggttagaaatcctgaccaagaacctccctcctgtgctactggttagaggaaatcacaagaatgtcctgacattttactcttaaagcgcgagggatgagaaatgttgtaccttggtgtccgaataattacaaaacgtgtctggtactttgtgttttaaaacctcatctatgaatatacaaacctckggagactatcccacctgattctacataaatttcatcttttttaaaaaagttattattaatgagagttttttcccaccagttttaaaaacatcgaaaacatttttcccttgtcgctggtgaataagaaattaataagagctggctgacatgcttgcaggatgtgctaatgtagatgagctccaggcaaacgcaatctcttgtttccgtggattctkctgcatggccccgtgcaggccacargcccayagcgggctctctttaagttgttattgacagactggtgtggwgaaagmaggcggctatcatagggaaagacacactgggtcagtggcctgattctgcttggcctcctgagaagtttgwggagatttaaaaatcaatatccgsaamctgtaagaaggactagagtctacaaagtgtycaaagcagttacctaaattaaggtttatttaatgcagccgataataagcttaacctctgatcacacgtagcttssattygctgctagccagaggtacrytaggtaggtgagcaaagacacatgttccacttagacgaaatagagtcccaacatmcaaatrtcaattgkcttcckggttaaatgtkkwgaaatttctaccttaatactactttatcttttttctctgattaagtggtttgcatagrcgaaataaaaatasacgatctcattgaaaaataatctcacaggwttccaatccrctactaaaaatatatccagatcctacatttatttacttctctatatacaggtatatgggttttatagaataacaaggatataagtggagaacttgtaaaaatttttaaaaaccacaggtgttgatttttcttcttgttcrtgtgtgtataatatttaatcacagaaaaaatgcttatatgataaatggcttggttttggttttgttggcatattttgactgttctggggaagcttgtggggggcaaatcaacctgaaataaaattctmctaaaaaaaaaaaaaaaaa

SEQ ID NO: 6538 - DNA, 600 bp, Rattus norvegicus
gacacagtagatatgtgggcatgcatagtgttcccaaagccatgtcacaatgaccacatggattccacacttttggaagatatttcccaactttttcttcttcttcttttttttttctaagatcttgttctgtatcctaggatagattcgaacttgatatggctgaccctgaacctgtgaccctcctatcttaacttcccaaggaaggacaggcttcagccactatgccagactgccacacatttcaacaaagggacatattcccttgcarargrtgctcttcacacaattttttgaccctctaaaaatccctacgtggcctgtaaaaattaatggatttgtgaggccgaaaactgatcagagagatgagtagtgggaggccctgaacacaaagactgtcaggggtctggtctattctctctagacagggctgttctctttgtgcaaagcacccacagccaagggcaggagcccatgaccagctgtgtgccctttaaatctctccttgtccatctgggcagtcccttcttcccctgttcaaggcctgccctccaaggatgctgggaataaaggatctctgctcacaaaaaaaaaaaaaaa

SEQ ID NO: 6539 - DNA, 600 bp, Rattus norvegicus
cctcaagcagaaggcgcgcgccgaggagcgcctcaagggcctgggcttctactcgctgggcctctctttcgccgcgctgtakccggagctggctccgtargtckgcgccgccggcsstcggcgcacgckacacggtcctgccgctccctcgtcccygctgccttccctgcctcttccacgcacgtccggggccasccgcagsmcagctccagttcycccgaagcgmccgccgctcacgcccttcagcacgggctccgcggacagcgcccgctgttttcggagscgccttcctctagccamccgctctggggactgtcctctcggtccacccacagagcaggcgataccttaggactgaagagagtttttgtaactggcgtacgccccacgccttcctctttatcccttcccagagtcaagctggggatgtaccgagccggtctctcaagaactttgtacagcaagtccagcaagcctttggatgtgatgtctttgctttggggttatttcctttttgttgtcgttcattttttgtaaagcagacgctactctcaagcatttgacaaaactgtttatttttgcaattaaaattattgtgct

SEQ ID NO: 6540 - DNA, 600 bp, Rattus norvegicus
agttgtattgacatttctaacgatggcaccaagctctggacaggtggtttggacaacactgtgaggtcctgggacctgcgtgaagggcggcaactgcagcaacacgacttcacctctcagatcttttctttgggctattgcccaactggagagtggcttgcagtggggatggagaatagcaatgtggaagtgttgcatgtcaccaagccagacaaataccagttgcatcttcatgagagctgtgttctgtcactcaagtttgcccactgtggcaaatggtttgtaagacctggaaaggacaaccttttgaatgcttggaggacaccttatggggccagcatcttccagtccaaagaatcctcatcggtgcttagctgtgacatctctgcggatgacaagtacattgtcactggctctggggacaagaaagctacggtttatgaagttatttattaaggacaaatcttcgtgcaaactggactcctcctcatagcactttgcgctgttgtacttttctgttcacccctcacccattctaaaaccaaggatttcaataccattgcagttgtggagtttaaggccttccatagcccacgtctc

SEQ ID NO: 6541 - DNA, 600 bp, Rattus norvegicus
ttcctcgatgatcaccatttaactcggcctcaccctgagagagtaccattcttggttgccgaaacaccaagggcccgacacaccctagatgaattaaacccacasrarkccaaacaccaaggcgtacggaaggcaaagtggcatttggggattcgaagtcaaagccgacccaatgacatcatggcagaagtgtgtagagcaatcaagcagttggactatgaatggaaggttgtaaacccctattatttgcgtgtgcgaaggaagaaccctgtgacaagcacattttccaaaatgagtctacagctataccaagtggatagtaggacttacttattggatttccgaagtattgatgatgagattacagaagccaaatcagggactgctactccacagagatcgggatccatcagcaactatcgatcttgccaaaggagcgactccgacgccsaggctcaaggaaagccctcagaagtctctcttacctcatccgtgacctccctcgactcctctcctgttgacgtagctccaagaccaggaagtcacacgatagaattttttgaaatgtgtgcaaatctaattaaaattcttgcacagtaa

SEQ ID NO: 6542 - DNA, 600 bp, Rattus norvegicus
  misc_feature (597)..(597): n is a, c, g, or t
tcgccccgcgggatgttttgagacttccctcttaaatggtgacagttggtgccctgttctgcttcagggtattcagtactgctcagtattattgtctaagagaatcaaaagttcttgtgatttggtctgggatcaaagggaamcrsrggtasccaaccacgatscawtgaattgaatggtagtacccragagcgggagcaggaagttaaaccagacagttctgctttcyyttsccgyctgatctscagcactgtcaggaggcctgtcctgtggctgtgtccaaacaccccacaggactcactgtcccaacaatcctaattgcctagaaatatctttctcttacctgttatttatcaatttttcccagtatttttatacggraraaattgtattgaagacactttgtatgcagttgataagaggaattcagtataattatggttggtgactatttttataatgtacatgccaacactttactactgtggaaagacaagtgttttaataaaaagatttacattccawaaaaaaaaaaaaaaaactcgagggggggcccggtacccaactcgccctatagtgagtcgtataacaaatccngaa

SEQ ID NO: 6543 - DNA, 600 bp, Rattus norvegicus
  misc_feature (338)..(338): n is a, c, g, or t
cattctggtgattgtgtccagaagggctcctgaagacctgaagaaagacaatctcattgctgtggaaaaatctctggagtcagaggcctgggtgcagctctggactctgcgtataacgtttgcacgaataccaactcctctgtgccttgatggaatggaatcctctgggtgaagcagaaccaagccattgcacatggcaatgcccaggagcaatcatccacaacctggcaaacctttggcccaaagattcacaccatgtgggccccacccagcaggcaggcctcggccgagcatgagaatgcaatgttttctaacagcagcgacctaggtgaagcatntgcttgctggaccaatgggaccattggcttgggggaacctttcatgtctttcaagagaccctgccttactcaggccagccgtccttgggagagaggagccctcgccagaatgcggttgctgcagcctcctgtggcctgggcagccaggcttccaacgcgttatacacagagtttgggtgcacactaccctccctctaagacaccagaagttttttccacagccttggagaggggctttgactgagggctggagccctaggct

SEQ ID NO: 6544 - DNA, 1400 bp, Rattus norvegicus
gtggttggctgggaaatcgagtgcagcgctcacagctatgcaaaaaccagtgaatgtgcccgggtgtacattcccctgcagccgactcgtcggctcccaggagctgcccaggcctaggcctcggagcttccacatctgccagcggtcctaatggtgatggcagccttaggatcatagttttatttatatttattgactcttgagttgtttttgtatattggttttatgatgacgtacaagtagttctgtatttgaaagtgcctttgcagctcagaaccacagcaactatcacaaatgactttattatttattttttttattgtatttttgttgttgggggaggggggatttgatgtcagcagttgctggtaaaatgaagaatttaaagaggaaaaatgtgtcaaagtagaatttttgtatagttatgtaaataattcttttttattaatcactctgtatatttgatttattaacttaataatcaagagccttaaaacatcattcctttttatttatatgtatgtgtttagaattgaaggtttttgatagtgttggaaacatatggctttttttttttttttttgtgaactttttctcattacgtgttgcctgtaagccaaaagtaaggtgtttggaaatagtttctcttggaaggatgggataggcttcttcccctgggaatactgatggattttttttttttttttttttttttgtacgacgtcaggtgttcaaacacttccttgatagcatcactttaagacacattctaaggactgactgaggcagattgagaattcgtctagaacaggtttttgtttttttctcttttctttttttattttttcctgctttagacttgaaaagagacaggcaggcgatctgtgacagagcagtttaagggaacaaactgagctatgtagtcagaatgtgactggttggatctcaytaaaagtatcagattgtgtgaagttggaagcttaccaatcttactttgtaaattctgakttcttttcaccattcgtatgtaatgctgaaccacttgtagatttgatttcattgttgttgtctactgcatttagggagtattctaataagctagatgaatacttgaaccataaaatgtccagttagagcactgtttagattggccatagagtacactgcctgccttaagtgaggacatgaaagtgctattaccaagttcaagatcaaaaaaggcttataaaacagtcatcctggctcmccacggagcccaggaagatactttgtattgtcctattagtgttatatgaacataaaatacatctttgatgtgttgttcctggcaataaattttgaaaagtgatatttattaaattttttgtatgaaaaaaaacctsgwraaaaaaaaaaaaaaa

SEQ ID NO: 6545 - DNA, 600 bp, Rattus norvegicus
  misc_feature (575)..(575): n is a, c, g, or t
tcaaccgcacacaggaaacggaagaccagggcgggagccagctcgccctgcccttttgtttggctgagggagcacagagacctctgttaaagtacagttttgcagttcctatacagttttctaaaattaaggtttgttcaggttgctgcaagctcagctgaacctgtgagcccgaaactttcagatccccccaaagaggcacttttatttctgaggttgttctcactcgctaggcgggcccgagcgttcgttctcccttttgagtaagcagggcatgctgtaatggataattagaggtgaatgccgggaatgagtagaatggaaatttaactatccttccaccccgagacatctgctaccacactaggtagtcagctctgcggctgtgtgtgctctactaaccccactgtgtagaaggagacagtgtgtgtcagtgttcacatgaggtcctcccgctgctgtcctctcagaccgttctcatgaagcacagggaagagtgttccttccacctgtaggaggaagagatgcaataatatgattaattatatgatattcagaatgctaacaatacttantgcagcaattctatatgtatacatt

SEQ ID NO: 6546 - DNA, 600 bp, Rattus norvegicus
atcaaacccatgaaagacggtacaaggtataccggaatccgatctctgaaacttgacatgagcccaggcactggtatttggcagagtattgatgtgaagacagtgttgcaaaattggctcaaacagcctgaatccaacttaggcattgaaatcaaagctttggatgagaatgggcatgatcttgctgtaaccttcccaggaccaggagaagatgggctgaatccctttttagaagtcaaagtaacagacacacccaagaggtcccggagagactttgggcttgactgtgatgaacactccacggaatcgcggtgctgtcgctaccccctcacggtcgatttcgaagcctttggatgggactggattattgcacccaaaagatataaggctaattactgctctggagagtgtgaatttgtgttcttacaaaaatatccgcatactcatcttgtgcaccaagcaaaccccagaggctcggcaggcccttgctgcacgccaacaaaaatgtctcccattaatatgctatattttaatggcaaagaacaaataatatatgggaaaattccagccatggtagtagaccggtgtgggtgctcgtga

SEQ ID NO: 6547 - DNA, 600 bp, Rattus norvegicus
acccctgatgtgaggttgcaagtgactctccaaggccttccatttatttctattttttttttttaaaaaggaaaatagattaggywwgmtksggyargagkctgtgttcaaagactgagcagcttkttywtgcctytgcccytccttcctmtatmtcttgvtgcawtgstgctytgcaaaagtcmtcatgagctcayggsamrwgbksvgyawagstwttttkyttyttgcatgtgmtgagaaggytwtgrgaacacgtcacagcaggatcaaagrtttktaaagrrtytattktaaaatcacgthtgrtaktttcagcataagagaagytttasttgttbttacaatktstatgrgtgtttaacctttthtcgttcattytgagttytkaaagtgatagaattccttccagaaggcctcagatacatgttatgttcagtcttthtaacctcarccttccctgbgtbttagcccagttyttwtgaagaccccwttaatcatgmtttyktaagagtttttacccaamtggrttggaagamakaggtatccggaytgrttaaatwtttgrrgraaaaaaawaaaaaaaaacctttgcgtccg

SEQ ID NO: 6548 - DNA, 1400 bp, Rattus norvegicus
acctactatcagagctgctgtgttgactacatggagcagtgcaagccccaagtgacccggggggatgtgtttaccatgccagaagatgagtattggagctatgactacccggaggaaaccaagaacagtaccaatgctggcgtgcaatccgagaacacctctctacactttaacctaaagcctcgagccgaagagactataaagccaacaactcctgatcctcaggaacagtcaaacacccaagaacctgaagtggggcaacagggagtggccccaaggcctgacaccactgatgaaggaacctctgagtttccagaagaagagctgtgtagtggaaagccctttgatgccttcacagacctcaagaatggttccctttttgccttccgaggtgagtattgctatgagctagatgaaacagcagtgaggcctgggtaccccaaactcatccaagatgtctggggcatcgagggccccatcgacgctgccttcactcgcatcaactgtcagggaaagacctacttgttcaagggtagtcagtactggcgctttgaggatggtgtcctggaccctgattatccccgaaacatctctgaaggcttcagtggcataccagacaacgttgacgcagccttagcccttcctgcccacagttacagtggccgggaaagggtctacttcttcaagggaaaacagtactgggagtatgaatttcagcagcagcccagccaggaggaatgtgaaggaagctctctgtcagccgtgtttgagcactttgccttgcttcagcgggacagctgggagaacatttttgaactcctcttctggggcagatcctctgatggcgccaaaggaccccaattcatcagcagggattggcatggtgtaccagggaaagtggacgctgctatggccggccgcatctacatcactggctccacattccgctctgtccaggccaaaaaacagaagtctgggcgtcgaagtcgaaaacgctaccgttcacsccgaggrcgtggccatagccgcagccgcagycgcagcatgagctytcgtcgcccatsgsgttcagtctggttctctwtgctctccagcgaagagagtgggctakgaacctacaattacgattatgatatgaactggcksatacctgccacctgcgagcccattcagagcgtctatttcttctctggagacaagtactaccgagttaaccttagaacacggcgagtggactctgtgaatcctccctacccacgctccattgctcagtattggmtgggctgcccaacctctgagaagtaggaatcagcacccacacagctgagcttcagaaacctcgtcctccagctttttctcccagcccaataaagtgttggccccaaaaaaaaaaaaaaaaa

SEQ ID NO: 6549 - DNA, 600 bp, Rattus norvegicus
ccgcgatgctggagcagatcgccatgtcagaccggtacaagctctgggtcgacgcytgctctgagatgtttgggggcttggrcatctgtgcagtcaaagctgtgcatggcaaagatggcaaagactacatttttgaggtcatggactgtagcatsccactgattggggaacaccaagtggaggacagacaactcatcactgatctagtcatcagcaagatgaaccagctattstscaggactcctgccctgtstccacagagacctttaaccacccaacagccacagagtggaacacttaaggaacsggactccagcaagacccctcctcwgcggccagccccccaaggktgtttacagtatattctsractgtaatggcawtgcagtaggtccaaaacaagtccaagcttcttaaagcgatcagtagttaacttttcaaaacagaaaacttaagccaaaammaaaaaraararaaaaraaaggaaggaggggaggggagcagcagatgctctgcagttcactgctgtgtcctctcagtgctgacggcatgtttctcctatcgagtgtcagccccctggtctcggttgtttacccctccc

SEQ ID NO: 6550 - DNA, 600 bp, Rattus norvegicus
atgctggtcgaaacagctcaggaaagaaatgagactctctttccagctcttatctattcctcaaccatggtgtggttggtgaatatggctgaaggagacccagaagcccaaaggagggtacccaaaaaccccaagtatagcacacaaggaacagagagggaagagacacaggacactggcactgggagcgatgatggtggcttcagtgaggagtgggaggcccaaagagacagtcacctggggcctcatcgctccactcctgagtcaagagctgctgtccaggaactttctgggagcatcctcactagtgaagacccggaggaaagaggagtaargcttgggctgggagatttcattttctacagtgttctggttggtaaggcctcagcgaccgccagtggggactggaacacaaccatagcctgctttgtagccatattgatcggcctgtgccttacgttactcctgctcgccattttcaagaaagcgttgccggcccttcccatctccatcaccttcgggctcattttctactttgccacggattatctcgtgcagcccttcatggaccaacttgcattccatcaattttatatctag

SEQ ID NO: 6551 - DNA, 600 bp, Rattus norvegicus
tacaaccgcagtaatrcggagcataaatgaccaagttctcttcgttgacaaaagaaacccgcctgtgttcgaggayatgcctgatatcgaccgaacagccaacgaatcccagaccagactgataatatatatgtacaaagatagtgaagtaagaggactggctgtgaccctaksyrygarggatggaaggatgtctaccctctcctgtaaaaacaaaatcatttcctttgaggaaatgaatccmcctgaaaatattgatgatataaaaagtgatytcawattctttcaraaacgtgtgccaggacmcaacaaaatggaatttgaatcttccctgtatgaaggacmctttytagcttgccaaaaggaaratgatgctttcaaactcgttttkaaraggaaggatgaaaatggggataaatctgtaatgttcactctkactaacttacatmrawsttaggtattaaggtttctgtattccagaaagaygattagyayacaygagccttatgataacctactctgtatttytatgacaaaawacctgaggccgcatgatttatagagtaaacaagyttrattgycmaaaaaaaaaaaaaaaaa

SEQ ID NO: 6552 - DNA, 1079 bp, Rattus norvegicus; identical to SEQ ID NO: 2456
  misc_feature (1062)..(1062): n is a, c, g, or t

SEQ ID NO: 6553 - DNA, 1290 bp, Rattus norvegicus; identical to SEQ ID NO: 2457

SEQ ID NO: 6554 - DNA, 600 bp, Rattus norvegicus
ggcggcgcgcgctggacgtggccaccttcgccgcgggctacctgctgccggtggccgtggtgagcctggcctacggacgcacgctatgtttcctatgggccgccgtgggtcccgcgggcgcggcggcagcagaggcgcgcagacgggcgaccggccgggcgggacgsgccatgctggcagtggccgcgctctacgcgctttgctggggcccgcaccacgcgctcatcctctgcttctggtacggycgcttcgccttcagcccggccacctacgcctgtcgcctggcctcgcactgcctcgcctacgccaactcctgccttaacccgctcgtctactcgctcgcctcgcgccacttccgcgcgcgcttccgccgcctgtggccctgcggccgtygccgccaccgccaccaccaccgcgctcatcgagccctccgtcgtgtccagccggcgtcttcgggccccgccggttatcccggcgacgccaggcctcgtggttggagtatggagcccagaggggatgctctgcgtggtggtggagagactagactaaccctgtcccccaggggacctcaataaccctgcccgcttggactctgacgtc

SEQ ID NO: 6555 - DNA, 600 bp, Rattus norvegicus
ttacaaactccacagtgagtgagagctgcctgcaggatatgcttcctgaaaagaagaaactgtctgcctacttccgttaccagggctcactgactacaccaggctgtgatgagactgtcatctggactgtgttcgaggaaccyaykargatccataaagaccagttcctggaattctcaaaaaagctctactatgaccaagaacagargttgaacatgaaggacaatgtgaggcycctgcagccactgggaaaccgccaggtgttcaggtctcatgcctcasgacgactgctgtctttgcccctgcccactstawtggtccccacactcacctgcctggtggycagcttcytccamtgatggtcaaattctggatatctggcctctgacctcaacctttagaggatatggcttctctttctcaatctttccaggttgaactttggggactattaaggtgtgctgtggtggtgcacacctttaatcccagccctggatggagagagcagagacctatggatctctgaccttcccctaacccctgattaaattaaataaaatatggatatgtttttamwmwwwrmaaaaaaaaaaaaaaaaa

SEQ ID NO: 6556 - DNA, 1214 bp, Rattus norvegicus; identical to SEQ ID NO: 2460

SEQ ID NO: 6557 - DNA, 600 bp, Rattus norvegicus
aactgacttaattggggagagaaaaactgtctgcagatcatctggctcctggtctagtcctagtccaatatgtcaaaagacaaagagaagtttctcaaagatcaaggaaggcgactataaccccctcttcattccagtagctgtcatggtcactgcattctcagggctggcatttatcatttggctggcaaggcggctaaaaaaaggcaagaaatcgcaggaaaggatggatgatccttactgattgatcctttgtgagaggaaagtcataaggtactaacaaccgccaccaaaaaccattggaagacaacttcaacacctcctgttaagattttgcacacgggcatctcccacgttagagatgcagtgtttgctcagtgtaactgagtacggatttcaacacgaccaacagctcctcctaatttcctctcactcactcatcctataaatctattccataacttgtgcttatacagatcggtattttatcatcttttctgtgaaagaacaaataagacaattgagcaaaagagttactgtaggatataaagatacctgcttttactcttccccaactctcgtttcctctttcagtgccaa

SEQ ID NO: 6558 - DNA, 600 bp, Rattus norvegicus
tagtgacgagcctctcctgccaccttatcctctgaagcaagtgaaggtccccattgtggaaaacagcctgtgtgatcggaagtaccacactggcctctacacaggagatgatgttcccattgtccaggatggcatgctgtgtgctggaaataccaggagcgactcctgccagggagactcagggggcccactggtctgcaaagtgaagggtacctggctgcaagcaggagtggtcagctggggygagggctgcgcagaggccaatcgtcctggcatttacacccgggtgacgtactacctggactggattcaccgctatgtccctcagcgttcctgagacccatccagggtcagggaagaaccaggcacctgctgtctttaactcactgcttcctggccagatggaaccctggccttctttgtactctgtctcccctgtctwccgggtgtccctctgagcccccactttgttccaccttgagtccctcgccactcctgtcccctctgcctcccaccacaacacagctgcactgtgcggctccctcttttctgtggctcattaaagtatgtgaaaattttgctccaaaaaaaaaaaaaaaa

SEQ ID NO: 6559 - DNA, 600 bp, Rattus norvegicus
acttctcctcccacacagtcgactgcctcaggggtgggtgcatcagtgatgtctgcagtgggagaaagtgccaaccctgagaacagtgacctcaagtattcaggtcaagatggcctctacataggtgtcagtttgtcctcccctgccgaagttacatcctcggtgcgacaggattcttggtgtgctctggccctggcctgagctggtgctgccaagggctctgaaggcctcataccacttgtgtctgattttgtccagcagtccagatggcggcaaaaaatgcagacataacattccttcgatgcgtgatttctgtgcctttgttttgaaagagatatatttcccaagaagcttattgaagtaagaagagatgggtctttgtaggaaggggcagcacagtgggcgtgtggcctattcctgtcagcctgggtctgcttccagccagcttgcctctggctctgctccacaccagtgggagaaactgtgacaatgactggggccttgtctgctaaggaagattgagagattaaaaaaaaaatagtttgtgtattgctccaaatcatgtgcttcttgtgatcaaccttggttatcccagaattc

SEQ ID NO: 6560 - DNA, 600 bp, Rattus norvegicus
tcagtgacggatctgtgcagtacccaatcaccaaaccacgtgagccctgcgggggccaaaacaccgtgcctggagtcaggaactacgggttctgggacaaggataagagcagatatgatgttttctgtttcacatccaacttcamwggmmgattttactacctgatccaccccaccaagcttacctacgacgaagcagtgcaagcttgtctcaatgatggtgctcagattgcgaaagtgggtcagatatttgctgcctggaagcttctgggctatgaccgctgcgatgccggatggctggcggatggcagtgtccgctaccctatttctcggccaagacggcgctgtagtccgacagaggctgcagtgcgctttgtgggtttcccagataaaaagcataagctgtacggggtctattgcttccgagcatacaactgagtgtgccctggagtcagttctcgagatacgtgaaagttttgttcgtttgttttttgtttttaatatgaactcatgcaagtmcsaawwctgtgataaccctttttcacttactgtaaagagtcgttttcataaaggccaattcattcaaaaaaaaaaaaaaaaa

SEQ ID NO: 6561 - DNA, 1400 bp, Rattus norvegicus
ctryarcctsawgakcttcaacraycragaayttgckrmtmykctkgctcagtctgttaaccagggttttgaggccgtttatcagctgactcgaatgtgcaccataagaatsagcttcgtgaaggggtggggagcagaataccggaggcagacagtaacaagtactccttgctggattgaacttcatctkaatggccccctgcagtggttggacaaagtattaactcasaygggatccccgtcagtgcgatgctcaagcatgtcctaaagtccgtcagcagtggagctcattggaagacttaacgtaccaactcctccgccacagtactcgtgtgtgatcccgtggackgtgctagtcaaaacccakagcgaaaacagcacttgaggtctcatcagttaaagcaccttgtggagtctgtttcctacatttraawtttagatgggaaattagtgtctagaaatgccctcccagagkggacaaakaagacttaaagacttaatdatgtytcgwtgggcataagacagtgtcccaaaggttattaatwccagtagtagttgwgtacagtaaygtgtycagacccagtattgcagwgctctgctgttwgtataccttcttagtgtgcataaatsasgtgtgtgctgctgcttggtctaggcamgcctttataaaattacagtacctaawmwrwwawwmmmamwwhwmmrwwatttttgygtcttttttaatatataatatatatatcgagattttcaaattatcatttwgaagcagattttycttgtagaaactaatttttctgccytttwccaaaaataaactcgygsrsgargamwmgtgvhwdaamwwrrmarwmmwwramcttaatgtgtccagwgggtcttagcattctttctgtgatcattttctgctgaattgcattagaaggaaaccttgttggaaacttccaggctctttgtgccatttctgttctgattcaaagcagtgcagcatgatgtcattgtggtaaatagttgcactgatggcttctgggttagttacttctgagtccagtaaaggattgtgtgagcagtaagtccttttgtcttctaaccagacttcagcagatgataaccagttgttccattgattaacttttgtctcaaacgtgcacaggtgacagtataattattttcagggctattctagaatcatctcagtatgtttccttcttccaacgccagtctgataataaagtatctttctgtaaaggcarwmarmwwwwrrmrwmgtctcactttactacaggttgtcacagaagagacctttgttagctgatgctgaagtgtcatcagcagatagggccatctgttcctaaagtgtatcgtctgtaatttataataaatagaatgttatattgcct

SEQ ID NO: 6562 - DNA, 1400 bp, Rattus norvegicus
  misc_feature (1231)..(1231): n is a, c, g, or t
ccacagggccccagggacccccacactacaccgaccagccgtccacttcccagatcgcctacacctccctcagtctgccccactacggctccgccttcccctccatctcacgcccccagtttgactactctgaccatcagccctcaggaccctattatggccacgcaggccaggcctctggcctctactcagctttttcctacatgggcccctctcagcggcccctctacacggccatctctgaccccagcccctcagggccccagtcccacagtcccacacactgggaacagccagtatatacgactctatcccgaccttagaggggccctgtcaccattggtgcccacgtggcccagggccccttcccccagcctgtgtgccctgctcctcatcagcctcatgcccagcagtggcagtggaggaggctgcagaggctgacagcagcaggcaggcttctgccagctcctgccctgatgacctccacccaccctggctcgggaggccaagccctgactgagctggcaaaggaggagtttggtggccatcccagactgagggtgaggggccacccatccccagaaataaccctctatcccaggacctgagaagtcgttctcaagtctttcagggaggcagaaaagggtatggtgggaaacctcactgctcctgttctctcctgggagagcaaggggctcaagggcctgtgtgccactgtgtcactgtgcctaaaagctaggctgcctagggacctgcttcaaagcctggagctggctctgtcctgtcactaaggactcactgaggacagctttgaacagctttgtgaagagcagggtgggacactcaatggacactctgatcctttcacccccctcctmacmtgaatgggaactgrccgaggtccccagatccagttctgcattagtaacctcatccctcacctaactgaggagagtcctcatgttcttccccasgaccwccaytcytcaaggcccaccccaggtgaggaggcagggkctccaggaaagaatcarargtgtccagsmttyctstcgsmttctgtcagcctmagttagsactgsacggsccctagcccmaragccmagtacytgggttgbtkgcagsargctggacactwaaccccttycatgkacmgkstamctttgsctygcaccctttgbtycarcgatatcttaatwaagkacgtagstytgtstyccmawhwmmwrwnwrharmmmagtccacaygwaacacatsgctgcccctttatmtycamagtcaccatgttcccatccctytaghtactccagccccaattaacttgcattargcactccaagtawtaaaawcaaagcttytggtwrmmwrmwwrrwrrmmwrraaaaaaaaaaaaaaaaaa

SEQ ID NO: 6563 - DNA, 600 bp, Rattus norvegicus
gctggcactcacactcatcgtggttgttggcgccatccttttcatcccgggagagaagcccgtgaagaacgcttctggtcttggcctcattgtaatctccacaggaatattaatactgcttcagtacaatgtgtttatgacagcttttggaatgacctctttcaccattgccatattgatcactcaagtgctgggctatgtccttgctgtggtcgggatgtgtctctgcatcatggcttgtgaaccagtgcacggcccmcttttgatttcaggtttgggaatcatagctctagcagaattacttggactagtttatatgaagtttgtcgcttccaaccagcgaactatacaacctcctaggaataactgaagggaagtgacggactgtaacttgaaagtcagaartggaagaatwcagttgtctgagcaccatggccttcacaactcacagctggaaggaacacacaacagtgactgactttcatctctgaaaaaagtcattgaaccataaatgaatattacagttaagtttatattaaagcagctgtaatttacgtaataaaaaatatatgatgtgctgtgtaaaaaaaaaaaaaaaaa

SEQ ID NO: 6564 - DNA, 600 bp, Rattus norvegicus
tatctcagtgttcttttttagttttgacctgctatattttcatgttgttgtatgtaaaataatgttgctaccctgtgttggccgcagttcttctaagaaacatccactccacgtagtcatggaagacagagaagaagcccagaacyttctaatgctgatttaacggactgatacracgttgaaaacacgttcagtaccatgctattgtttkwacattagtattaatcttaatgacwtagaaaaagacaatgtgttagtaattattttggttgtatgccattagtaaattgacagaaaaattaagggggttaatgtgacttcatttcactgctgtatattaacatcttacaatacaatagtttaagtctaagggaaacagatggagctgtttaccgagcaactggtgaggaattatgtgttcaatcccattttagagcgtgaaactcctacattagaatagataaagtcactttaaatattatctatatttgtaacagaagtcgtatacatatattttattatagcattcttgtgtaaatgcagaattaaagtgaataaataagttttttgtggtgtmcmgcaaamwaaaaaaaaaaaaaa

SEQ ID NO: 6565 - DNA, 600 bp, Rattus norvegicus
atcctctgctgtcaaacgcagggggagaatcacccgtctcctaattttaaccagtacgtgagggaccagggcgctatgactgaccagctgagcaggcggcaaatccgtgagtaccagctctacagccggaccagtggcaagcacgtgcaggtcaccgggcgtcgcatctctgccaccgctgaggatggcaacaagttcgccaagctcatcgtggagacagacacattcggcagcagagtccgcatcaagggggcagagagcgagaagtatatctgtatgaacaagaggggcaagctgattgggaagccgagcgggaagagcaaagactgcgtattcaccgagatcgtactggagaacaactacacagccttccagaacgcccggcatgagggctggttcatggctttcacccggcagggccggcctcgccaggcctcccggagccgccagaaccagcgagaggcccacttcatcaagcgcctctaccaaggccagctgcctttccccaaccacgctgaaaggcagaagcagttcgaattcgtgggctccgcccccactcgcaggaccaagcgcactcggaggccccagtcccaaacgtag

SEQ ID NO: 6566 - DNA, 600 bp, Rattus norvegicus
cttccgcatccatgtggagaaccagactcgggctcgcgatgatgtgagtcggaagcagctgcgcttgtaccagctctacagcaggaccagtgggaagcacattcaagtcctgggccgtaggatcagtgcccgtggcgaggacggggacaagtatgcccagctcctagtggagacggataccttcgggagtcaagtccggatcaagggcaaagagacagagttctacctgtgtatgaaccgaaaaggcaagctcgtggggaagcctgatggtactagcaaggagtgcgtgttcattgagaaggttctggaaaacaactacacggccctgatgtcagccaagtactcaggctggtacgtgggcttcaccaagaaggggcggcctcgcaagggtcccaagacccgcgaaaaccagcaagatgtgcacttcatgaagcgttaccccaagggacagactgagctgcagaagcccttcaagtacaccacagttactaagcgatcccggcggatccgccccactcaccccggctaggtccggtcacactcacccycsyrgagaactacgtcagaggaatatttttacatgaaaaaaaaaaaaaaaaa

SEQ ID NO: 6567 - DNA, 600 bp, Rattus norvegicus
gggctgcgttatggagggtggtgtgagtccctgtctgcgttgtgccgggaatcagagcagagtgttagcgctgtaaaaggacatgctggtgcttgcaggaaatcatcgatttcttggaagggcagccattcatctacaccagggattgactttatgccaggcttgtgatgagggtagaaaagtagaaattctgtccgctgcaaggagcagtcagaggacacaaggaccaaatagcttgggagttgcggaagtaggtgtctgctgagggagcagtgaccactgggggaaaggctccttcaaggaattcagggacaggggtgagggctgacatcttgcctgagaccctaaagaagagaaggagttgagagggctgagtatgctgtgtggagccccacccccacccccacccccacccccaccccaggtatatggatggaggataatgcgggggtcgggttcctctcaaatccatcatcccaccttcgagctgctggcacggccttgccagcacagcccgattctgtgttgacaaaatactcgaacgaaatgattacatgcaaataaaatgcaagaggaaaaatctaaaaaaaaaaaaaaaaa

SEQ ID NO: 6568 - DNA, 600 bp, Rattus norvegicus
ctcacagtcatccacaggcaccgttatgggagcggtcatcatggaaggcttctatgtggtctttgatcgagcccgaaagcgaattggctttgctgtcagcgcttgccatgtgcacgatgagttcaggacggcggcagtggaaggtccgtttgtcacggcagacatggaagactgtggctacaacattccacagacagatgagtcaacacttatgaccatagcctatgtcatggctgccatctgcgccctcttcatgttgccactctgcctcatggtatgtcagtggcgctgcctacgctgcctgcgccatcagcatgatgactttgctgatgacatctccctgctgaaataaggaggccagtgggcagatgacagagatccccctggaccacatctgggtggttccctttggtcacgtgagttggagatatggatggtacctgtggccagagcacctcaggaccctcaccaacctgccgaatgcttctgccttgacagaaaagagacasytggcaagctggattacagggcttgcaaggsctgtwkgaaacaggagggagaaagcagcattctggtggcaggatacccttaggcctcgtg

SEQ ID NO: 6569 - DNA, 600 bp, Rattus norvegicus
gggagaatatcggcacccatcccccaaggacttggcttcatgtagttacagatgggactggaagtcatgatgtttgatgagataagccagactcaaaaggttgtgtgatttcttgcatatgcaacatcttaaaaggagagagcatggaaggagatgtaggattattgaggaatagaaaggaatgagttaggggtaactgaggatgataggaggactaaatactatcaaagcaccttatacacatatgaaaatgtcataacatgacccattgtttttcaaaattaatatacactgattaaaatgctaatatttaaggacatgttacatttaagaaattggaattttaaagcatattttaatggatcttggttctttttgttgttttgcttgtttgcttgtttgaaatagggtctcactgtatcaccctgattgacctgcaacttactatgtagaccaggctgacctcaaactcacagagatttacctatttctgcctttaacgtgccatcatgccaagccagaatggttttagtattagtatgtactaattatgtataataaaaaattttactaccacaaaaaaaaaaaaaaaaaaaaaaa

SEQ ID NO: 6570 - DNA, 600 bp, Rattus norvegicus
gagggatacctgaccacttgctaggttgccgcaccctcgctgagaagctgcccctcggactgtttccccacgccccagcaccgggcccctcctgcccgccccccagacgggctttcggttttttttttgsacttyctgaacttcamaaaacctcctttgtgactggctcagaactgaccccagccaccacttcagtgtgatttggaaaagggacagatgagcccctgaagacgaggtgaaaagtcaattttacaatttgtagaactctaatgaagaaaaacgagcatgaaaattcggtttgagccggctgacaatacaatgaaaaggcttaaaaaaaaggagacacaaggagtgggcttcatgcattatggatcccgacccccaccactgtgggcttgctcccggaagaactgagtgcttgcatagctattcaggcaccgggccggagggtactttaatttattcaggatgcttcattcatatgaaaatgtatttttgtacataaagaatttattctattattatgagctatcaaagtttacatttttgtactgcagacgtttcgtgtaaataaaaaataagtaaaaaaaaaaaaaaaaa

SEQ ID NO: 6571 - DNA, 600 bp, Rattus norvegicus
ctcactcctctgattcttgctgcaaaggaagccattaagaacagtagccgttagaagtgcaagccttacccctcaccgtctcccggatgaagtaagactgaactaaaacgtctsctgcagggatccacagaagaaargacagtcaaatgsagwgggggttctttaactttcaagtgaatagaaacttcttataaacctttttcmtactccctcagattatgtaatttatttgtaagccwgaaccgcagcccacacaggscagcaatgtcgaagtagccattaagtggccacttccaccgtgaagcgagagagccagtagtsaatccctcattcgtgcatttactttgaagaaaagagatttctcaaagatgcacactccctcttcatagtgctgtgtgtttttaagttagagagtagtcccccttccattcaaacctctttcaaaatcccttacccaacgtgatgttttttcacttgcattgtcttagatgtccagaaaaaaacgatrtcaarmtkttttttttaaaaaaaagaaagcaaaaaagcaaagaaawaaaaacawracaaaaaacaaacaaaaacgaaaaaaaaaaaaaaaaa

SEQ ID NO: 6572 - DNA, 600 bp, Rattus norvegicus
cctaccttattcactacctcagatctcaagagcctctttccctgtcctttacttgccccctatttcctcccttgcttgtaggcacatcagcatatctacctagaagtgacctcctagagatgtagcctgtgtttaaatccagagcttcttaattgaacttgacattgtctgattgcaggccaacttatagctctaggtcttagtcattatgaaatacaaaataaaactacccataatcatcaattaccatgtcatacacagaactcattatctaagtcaaacgacgtaaacacgcctgtccagatagtctttctttagtggatagaattaacaatctgtgaccttttaaaagacatggtctgtgaacagtgtttagttcttcacgttctagtctctctctctctctctctctctctctctctctctctctctctctctctcaagtaaactatcgtaaggtcctcttttgaactgaatctgtgcttaaaattgtcttcacttttattatctacaaataagctatgggaggcgatggctttaacagctgacagcatttacctatgtgtagaatatgtgtatatagtatcaggcatgcatgga

SEQ ID NO: 6573 - DNA, 600 bp, Rattus norvegicus
cgcgtcaaccgggcgtcgctgactcagggtctccccgaagcctaccgcgtgcaccgagcgctgctcctgctgacgccttcgtccaggccctgggacatcaccaggcccctgcaacgtgcgatcagcctccagggaccccacgctcgcgcactgcgcttgcgcctggcgccgcctcccgacctagccgtgctgccctctggcggcgcgcgcctggaactgcacttacgatcggccgccggcagggggcgccgaagcgcgcatttgcacccaagagactcgtgcccgctgggtcccgggcgctgctgtcacctggagactgtgcaggcaactctcgaggacctaggttggagcgactgggtactgtccccgcgtcagctgcaactgagcatgtgcgtgggcgagtgcccccacctctaccggtcggccaacacgcatgcgctgatcaaagcacgcctgcatggcctgcagcccgacagagtgccggccccgtgctgtgtcccctccagctacaccccggtggttcttatgcacaggacagacagcggcgtgtcactgcagacttatgatgatctggtagcccagggctgccactgcgcttga

SEQ ID NO: 6574 - DNA, 600 bp, Rattus norvegicus
cctgtttacagaaggcagcccttttgataacattgctgcaaagtgcaaatactcgaagcttcaagggatatatgtatttattgtcgttactgcctttggaagaaacaggggatcaaagttcctgttcaccttatctattgttttctatagctcttctattttaaaaaataatagtacagtaaagtaaaaaaggaaaatgtgtaccacgaatttcgtgtagctgtattcagatcgtattaattatctgatcgggataaaaaaaatcaagcaataattaggatctatgcaatttttaaactagtaatgggccaattaaagtatatataaatatatatttttcaaccagcattttactacttgttacctttcccmkgccgaaktwttttkttgtgattttgtacagaatttttaatgactttttataacgtggatttcctattttaaaaccatgcagcttcatcaatttttakacatatcagraaagtagaawtatatctaatttatacamrwmtaatttaactaatttaaaccagcagaaaagtgcktagaaagttattgcgwtgccttagcacttctttcttctctaattgtaaaaaaaaa

SEQ ID NO: 6575 - DNA, 1400 bp, Rattus norvegicus
acagcccgaaatgtgcttctcagtgcaggttgtgacaatgtggtgcttatctggaatgtgggcactgcagaggagcygyaysgmswakrsrgmtwgcaymstgaccycakskacmatgykagcygrwacyrcaacggcagcctcttttgcacagcttgcaaggacaagagtgtccgaatcatcgatcccaggcggggcaccctggtggcagaacgggagaaggctcatgagggggctcggcccatgcgggccatctttctggctgatgggaaggtgttcaccrctggtttcagccgcatgagtsaacggcaactggcactctgggacccagaaaactttgaggagcccatggccctgcaggagctggattcaagcratggggctctactgcctttctatgacccggacaccagtgtggtctacgtctgtsrcargggtgattccagcatccggtactttgagatcacagatgaacctccctacatccactttctgaatacctttaccascaaagaaccccagaggggtatgggcagcatgcctaarargggcttggaggtcagcaagtgtgaaattgccaggttctacaaactgcatgaacgcaagtgtgagcccataktaatgactgtgccaagaaagtctgacctctttcargatgatctgtaccctgacacakccggacccgatgctgctcttgargcakaggattgggttagyggtcakgatgctgatccaatcctcatctcactacgggaagcctatgtgcccagtwaacaacgggacytgaaggtcagccggcgcaacgtgctatcggacagcaagcctgccggttacagccgctccggagtctccacagytactgcaattactgacattcccagtggcaaccttgctgggtctgktgaagctgggaagctggaagagktgatgcamggacttcgggcacttcgggtgmtsgtcaaggaacaaggggagcgtatcasccgcctggaggagcatytgggccgcatggagaatggggawacakagkacmamsagrracytgctsyckwtamtgmcyscytcycskmmravvmwkmshrystagcttstgtgsccaggtcacaccargcagtttgctgctcagtgcctctgtggcaggtcrtggscagtttgcacstctccacagcytgrkgcycakgttggaagcaccacctggcttttggaagatttttgtaccaaggcaaaktccaagtacthtaagggaccatctcctsgamttgcccaacccactgccccctcayywgaaaaagcrkcagagatgggttytatattttcatbccaaataaawgctctktsthwarmmaaaaaaaaaaaaaaaaaaaaaaaaaaaaaaaaaaaaaagtgtggcgacggcaaaa

SEQ ID NO: 6576 - DNA, 1400 bp, Rattus norvegicus
ccccaagggccggcagagcttccagtactttctcaagaaggaattcagtggggagaacctgggattctgggaagcctgtgaggatctgaagtatggggatcagtccaaggtcaaggagaaggcagaggagatctacaagctgttcctggcaccgggtgcaaggcgatggatcaacatagacggcaaaaccatggacatcaccgtgaaggggctgagacacccccaccgctatgtgttggacgcggcgcagacccacatttacatgctcatgaagaaggattcttatgctcgctatttgaaatctccgatctataaagaaatgctggccaaagctatcgagccacaggaaaccaccaagagaagctccaccctcccatttatgagacgccacctacgctccagcccaagccctgtcattctgcggcagctggaagaagaagagagagctcgagaagcagccaacaccgtggacatcacccagccaggtcagcacttggctcccagccctcacctggccgtgtacacagggacctgcgtgcctccctctccctccagccccttctcaccatcctgccgctcgcccaggaagcccttcccttccccaagtcgcttcatccggcggcccagcattgccatctgcccctcgcccatccgagtggccctggagggttcttcagggctggagggcaagggggaagccagctggtctggtgccaaccctgggcccccagtcactgagagcatcgagacctcwskagrccgctcacgaccacacagccagcccagggccccgctcaaggcccgcgctgccctgtcccttggcaggtttctgagacggggctgtttggcatcaccagtttttgccaggctctcaccgaagtgcccttctgtgtcacacgggaaggtgcagcctctgggggacatgggtcaacagctgcccaggctgaaacccaagaaagtagccaactttttccagatcaaaatggaaatgcctacggacagtgggccckgcmygakggactcggatgaccccggagcaggagagtctggcgmccagaccacggaaaaggaagtcatctgcccctgggaaagcctggcggaagggaaggcgggctgagcagggccgtgcgccggaaagatggtcctggcagacaccatcagacctggggcacacttgctctcaaacccaagtgcattaggatgatattggagaactggaaaaaaacgaatggggtggagtccaatggaatgggcgtgtgctctggttgactcccaacggccaccttttccctttcactgcctttcccttgcttggccagacaggcatgtgggccagaagacgtcccttgctgccttaaaatcaataaaagggtcatctggaggmaaaaaaaaaaaaaaaa

SEQ ID NO: 6577 - DNA, 1400 bp, Rattus norvegicus
cctgcccctgtataacatgaggatttcagacaggacacttaatgggagtggacatttctctctaggggcaggctgcgtgtggctcactagatcctgggtccagaatgtgggttatataagtagacaggtggaaggccatcccgggagaccatccccttggcctgttgttctgttttatcttgttttgttttccaacattaaaagaagcactcccttcttgggtactcttcccaaacccaagggaagaaagcctcccaccacctcttcgactgacagtgagatgtttaggaaacaaggagaagactagcagctagcaagtgtgtccatggtcttactacggaacacaaaagagcagaggcggaatagagtacagcccacattacaaaggaggattctttttaagatcagaaaaagttggttttctttaaagactaaaagagagctgaaccttggccttcttctgctggcctaaacgctttgtcttctgttcctaatcaatccccaaagaaacaacacataacatcactcctttcttatttcacagtccagcaaatgatatctctggaacagattcatatctataagctgggtggatggtctcatttccaaaaaaaaaagtttaaaatttggttagtttttcctattttaactggaagttcttaggatgacaaaaccacatactcctttgtacagagatgtctcttgacaaatcattcaagactctcatctagaatggagtttgcttgtgtccctgtctccccctccctaaatgcagatgaatcagcatgaaaataacatcaacgagggtggaagaaaagagggcaaaggaattgttttcaggcgaggcagctcccaggttgaaaagagatttttttacttccttaggaatatccaatcaaagatactcaatgggagccctytgacagtaccagctgtgtttctttctgagagaaaatgctgagtggacaccattatgctaacagactgaagrtctagactcsttgtgtctcccgatctactgtagagatactttctagagattctgagcgttacmkgcskataaaggttaacactaggctacagtggaatagtcatttaatggcaggctcaatttgggaagtacactacagaggttaacctatgtggcagtcgttttgcgacgctagtagaacaaacttaaccgcgtcaaattaacgctgtttacccagtgtgaycatattttttatactaaccgtttcttacgaaaacyggtcctctagggtgatcctttagscagcccatcacaggctscgcagatgtgtgwacccactgtggactgggaaacatcactttgtagatgtattttcaataaagaaaagatagttttacatgaaaaaaaaaaaaaaaaaaccctygtgccg

SEQ ID NO: 6578 - DNA, 600 bp, Rattus norvegicus
cagtgcagccagcagtgtgccaggtgatcgggatgtacgattacaccgcgcagaatgacgatgagctagccttcagcaaaggccagatcatcaacgtcctcagcaaggaggacccggactggtggaaaggagaagtcagtgggcaggttgggctcttcccgtccaattatgtgaagctgaccacagacatggaccccagccagcaatgaatcatatgttgtccatcccccctcaggcttgaaagccctcaaagagacccactatcccatatcactgcccagagggatgatgggagatgcagccttgatcatgtgacttgcagcatgatcacctactgccttctgagtagaagaactcactgcagagcagtttacctcatttgaccttagttgcatgtgatcgaaatgtctgagtcctgcgtgcagaggcagaagcaaattgcagaactgcacagggtggtgggtccttttgtgctttcctagtcactcagactgacggccccgccttcaswcwgagygactwksaaagyywyaarakkayttttaaatgtgtattttagccttttaataaaaatcaatcaattaaaaaaaaaaaaaaaaa

SEQ ID NO: 6579 - DNA, 1400 bp, Rattus norvegicus
gcatgagacataactccgtggtgctgggctggccctatggctggcgacagagtgaggacccacgtgcctggaagacctttatcgacactgtgcgytgcaccacagctgcccacctggccctgytggtgccaaagaacatagctttytaccccagcaaccacgagcgytacytggagggccacattgatgtgtggtggatcgtgcatgacggaggcatgctgatgctgctgcccttcctgctgcgccagcataaggtttggaagaagtgccggatgcgcattttcaccgtggcccagatkgaykamrwyagcatmmagatgaakawsgwtckgrccawmwwmmwrwawmamctccgcctggaagctgaagtggaggtggtagagatgcacaacagtgacatctcggcctacacctacgagcggacactgatgatggagcagcggtctcaaatgctgcgacagatgargctgaccaaaacagarcgggatcgarargcccagctggtgaaggacaggcactcsgstctgargctarararcctctactccgacrargargatgagtctgtgacaggcgctgacaagatccagatgacatggaccagagacaagtacatggctgaaccctgggaccccagccatgcccctgacaacttccgggagctggtgcacattaagccggaccagtccaatgtgcggcgtatgcacactgctgtgaagctcaatgaagtcattgtcacacgctcccatgatgcccgcctggtcctactgaacatgcccggcccccctaagaacagtgagggtgatgagaactacatggaattccwygargtcctaaccgagggccttgaacgggtgttgttggtgcgtggtggtggccgggaagtcatcaccatctattcttgrgcmcgakggagtcttgtggcctggagttgggttgtytaagacaacagtgcccasccttgcacctamttgccagttytgccttgcccasccttgytttggamtagctttgytagktytccagggaaaccaagcttgggccttgcaatgggaatggatccgagggcccacgggacctggaggatttagggactttcccytcccatactccaagggaggcctctcctgactcgagatgaytggtgagggctgatgtgggatttgaagtcccagactggctcacaagtgctatttattgtatatttattgtgtggatgtcatcatttcagaaaggggggrgacaataaaagggggagccgagytgggcctrtytgcaggaagatytggctcaggctgctgtgggcagcatcaagccaagtggaatggagctggccaagctgagcctgacttttttcaataaaacmtygtgymcttytgrrmmmaaaaaaaaaaaaaaaa

SEQ ID NO: 6580 - DNA, 600 bp, Rattus norvegicus
cagttgttgtcacttcatgataaaagtcaattgtattcatactttaaaggattggcgacccatttataagggatgtaggagatactaatgagggactgaattttttttttattagatcaagactcctcaagcaaagactcaaatgtmamcacrgtattctacgtggkgtgcagttcttgataaattttcsgactcagtgtgtatgttagactgaaagtttcttaaacttcaaactcagtgtggacaggcaaaagtmgcctcaaagggaaaccttaccgatgtggaagaaagaaatgcatatgtggagaacataagacatgtgtgccaccccagagaagatgtgcgtgtgactgtaaaacatcgtttcaccctgacgcatgtgagaaccgaatgtgagtgttcagactcytgacagccttttgggtattcattgccacacccactgtgcgtgcccggcatctgtggcctggttccctgtgtgtttcatggctgtagcgcggctcttgtccactctgctgcctttggattgcatttcaagttggaagttctgtttcataacaataaacaatttttaaactgttwwwaaaaaaaaaaaaaaaa

SEQ ID NO: 6581 - DNA, 600 bp, Rattus norvegicus
tttgatgatgccttagagcgggagaatctcagcgtggacgaatggaaacaacacatctacaaagagatcgccaacttcagtcccatagcccggaaggactcgaggcgacgaagtgggatgaagctgcagtgactgcccgatctaacctgcggctgagcccgagactgtgacagggccaaactctccctcaggaccaatattattttgtcactacttctatctcagggtttataggaatgtagtgtcctgagccgagggaagaatcttccgatggcctaaggttcaggcctgagggagaattccagcctgctgtttggggggtgggggtggtgtgtattaaaacaaacatgtgggtgattgcctggctgtggggtcccttccttcctggagggttgggaccaaggatatgtcagtcaggctgagggccttatagggaatgactagggtctgcttctggggtgggggggggaggtgcagcacagaccaggatgagggcttaaagagatgactgccttttacctttttggaggtcagaataaatatattcacatgtagcccaggctgtcctccatgtagccaaaaaaaaaaaaaaaaaaaaaa

SEQ ID NO: 6582 - DNA, 1400 bp, Rattus norvegicus
tcctgcagaaggaccggaccaagaggctgggtgccaaggatgactttatggagattaagagtcatattttcttstctttgattaactgggatgatctcattaataagaagatcacgcccccatttaacccaaatgtgagcgggcccagtgaccttcggcactttgatcccgagtttactgaggagccggtccccagctccatcgggcgatcccctgacagcatccttgtcacagccagtgtgaaagaagccgcggaagccttccttggcttctcctatgcccctcctatggactccttcctctgaaagctcccaggatggttccgaaggatttcctcagcgtttttctaaagtgttttagttagcctttggtggagtyacsagctgacagaacatcttagaagagaaatttgcacaccaggaagcttggcagtcccgcctgccgggssctgcacgcggcttgttgacgcggaagctttycggragctttccgaagagcacatcctcctctcagtgagctagtgaggkcttcatttcttttyttccttycmacgtggtgctagctctwaaggagcttgagagtgccgcctgagacgcaccttggtctcagtgagaaggaagatgcaggtctaagagggatctccgcaggtctgagctgtgatcaagaatattctgcaatgtgccttttctgagattgtgttagctccaaagcttttcctatcgcagagtgtccagtttttgtttgtttttttttttttgttttgttttttgtttcttttttttcccaacccttgcgtatttcccatgtgtgcagttagtgtgagtgctatgcctgatcacagacagttttgttgtaagcatcaatgtgacacttgcaggacactacaatgtgggacattgtttgtttcttccacatttggaagataaatttatgcgcagactgtttttttttgtaagatataataactaaaacctattgaaacggtcttgcagtgacgagmatccagatgcttgagggaagcattgctgctacaaatatttckatttttagaaagggtttttatggrccaatgccccagttgtcagtcagagccgttggtgttcaygttaaaatgtcacytgcaaaatgggcattawttatggttccccmcaacctttgttcattttctyttgcattcytrattattgtgtgtaaagawagtctgtacattgggttataacwctagatatttaaacttacaggcttatttgtaaaccatcatkttaatgtcctgtaattaacatggttataacatgtacactccccchtactcaccacacaactttttttgtgtgcggtkaaaccaattttggtttgcaataaaatcttgmmwvstrwwwrmrmaamaaaaawaaaaaaaa

SEQ ID NO: 6583 - DNA, 600 bp, Rattus norvegicus
ccttaaaacaggggcaaggatcctccaccccgaggtaacagaccctgtgggcccgtcgctttcccgcagaacatgagactgcctagaggagtaggggacgcggcagagctgcgcaagagcctgaagccactgctggagaagcgccggcgcgcgcggatcaatgagagcctgagccagctaaagggtctagtattgccgctgctaggagcagagacttcccgctattcgaagttggagaaggcggacatcctggaaatgactgtgcgcttcctacgggagcagcctgcgtcagtatgttccacggaagcacctgggtctttggatagctacctcgagggttaccgagcctgtctggcgcgcctggcccgcgtgctgcccgcctgcagcgtcctggagccggccgtgagcgcgcgcctgctagagcacctgcgacagaggactgtcagtggcggcccgccctcactgaccccagcatccgcttcagctccagcaccctctcctccggtgcctcctccaagcagccttggactttggaggccatggtaggttcctggatgttccacaggatcctgctgctggctgtcaagggacctagctgac

SEQ ID NO: 6584 - DNA, 1400 bp, Rattus norvegicus
agtgttcctgtgtggaggggatgksacmggggagtcgggttacgtggcaagtgagggtttccccaacctctaccccccaaacaagaagtgcatctggacaataacggtgyctgagggycagactgtgtccctgtccttccgagtctttgatatggaactccacccttcctgccgctatgatgctctggaggtctttgctggatccgggacctcaggccagcgacttggacgcttctgtggcaccttcaggcctgcgcctgtagttgcacctggcaaccaagtgactttmmggatgacaactgacgagggcactgggggacgaggattcctgctctggtacakcggtcgggccacctcaggcactgagcaccagttttgcggggggcggatggagaaggcgcagggaaccctgaccacgcccaactggcctgagtcggattaccccccaggcatcagctgttcctggcacatcattgcaccctcaaaccaggtgatcatgctaaccttcgggaagtttgatgtggagcctgacacatactgccgatatgactctgtcagtgtgttcaatggagctgtgagtgacgactcaaagaggctggggaaattttgcggagacaaggcccctagccccatctcttccgaagggaatgagctcctggtccagtttgtatcagatctcagtgtcactgccgatggcttctcagcctcctacaggaccctgccacgggatgccgtggaaaaggagtcagccccaagtccaggggaggatgcacagcatggtccccagtcccgctctgaccctaagacaggaactggscccaaagtcaaaccacccagtaagcctaaagtccagcctgtagagaaacctgagggctctcctgctacccaggcaactccagttgctccagatgcccccagcatcacttgcccaaagcagtacaagcggtcaggcaccttgcagagcaacttttgctccrktagcctggtggtgacaggaacagtgaaggccatggtccggggcccaggggagggcctcactgtcaccgtcagtctcctgggtgkctacrarrccggrgacctggmcctgccytctccagctagtggcacctctbtgaagttytatgtgccctgcaagcagatgccccccatgawgrmasgagscagttacctgctgrtgggtcaggtggaararaacagrggccccrtccttcctccggrragyttygtggtgstytacrggscsaaccaggrccagatcctgrgtaacctaagcaagagaaagtgcccctcccagcctaggccrratgcctgmtgtcctsgccagatcrgagtgtggtgcttttatccraataaatgtttyttgaytcmrraarraaaaararaaaaaaaaaaaaaaaaaa

SEQ ID NO: 6585 - DNA, 600 bp, Rattus norvegicus
  misc_feature (581)..(581): n is a, c, g, or t
gtacatagaagagatttatcaccgggtccccaactcagacccgtcagctagcarggccaagcagctcatctccaacatcagkacgcagagccttcccaattgccagbtyatctccmgaagccrctaytcccccatttacctgtccttcatcaygcyytwggcwrcmswkmsctgrcagtacwtsascactctgtcmcaggtcacagaagactatgtccagagagaacactgactttgtttagstggaagcggaagtccacgtgaagtgggtttttyttcttcccccagmtggattttgacttcccttggtttttccttmtactctaatctttsggagaactgagtgtgsgacctttaggaactytgaaraggaaaggacgccttgccctmagcagcmtggtgcttcctggatgtggtccctgccthttgtagccamtggcatcatgttgwccgaagcmctggaaaggccacatgtgatcctagtgaacctggctagaatgctgattgaatctatttaatttgaaacagcctttgaatwcctwtcmcmgtrraaawwraarwramwrrwmmwmwmwttctcntcaaaaaaaaaaaaaaaaa

SEQ ID NO: 6586 - DNA, 600 bp, Rattus norvegicus
ggcaacctgactcaccagctggatcaaatcctcatttagaaatgtcccgatatgtggatatatgtgtcttcccccmtcccaaccacacagctccctcmtgcccagacctctgwctgtttctctggtggcttttgcctcctgctttgcagaccgcctgcagccatgattttgttacggcatccasgagccaaagaytgcgccttggragcaggrdyrrtaagcarkrstayacywykygvtackgtcgggggyctttttctywttyttttyttttttagcttcactgatggcaacagaggawgaaaggaattgaggtttaggcaagttctcttcccctgtgtgaccagattctcggtgacacacagttgtgcagwwcastaggagaacaaggttgkrttttmtkttctrgtgtgtaacacaaggatctgcaggattttccgtagacaaagaggtctcgtgtatttttgtccmtakccaaggttatacaaactaattgtgttgttttrwactgtggccacammtrtkmygcaatgcaccatttgtttttgtttttattttattaaaggaaatttaatttaaawmaraaaaaaaaaaaaaaaa

SEQ ID NO: 6587 - DNA, 600 bp, Rattus norvegicus
tccaccccttcacaagttatgcagcaggtgcctgtatacctaggaacactctcaacagaagtgccgctgtaccgagggcccagagagaggctggcaagagcctagacatgcctaccctgaaagcagctgccttcattaccctttcctgtgtgcctgttctgaagcccgtaccttcactaccactcacccttcctgctgaaggaatggtggcgtgtcccaggaaaaytgggaggcacaggattcccasccagcacccttgytscctcactggggaagttgbcctgytgggctgcagagagytgagacacagtsttgtctaagatagcatgggagcccctgcctmtgaccacctgtcttcctctgcaaagtgctcagggaaatggccttcatyccagaggccagctgtccgcctgacttttcckccattsttggccttctccccttcccatctttggagctaattgttaatatgaattttttaatgcttaagatttgatttttacttttcaaagcaamawwwwrwwraawwwwtttytgcacagctttccaaaataaaaagcagaagtaaaaaawwmmwmmmawwaaaaaaaaaaaaaaaaa

SEQ ID NO: 6588 - DNA, 600 bp, Rattus norvegicus
catggtgccctcggcggcygctgccccgggcaccgtcccaggtcccggagccttgcagggcctgggcggggcaccccccgggctggctccagccgccgtgtcctccggggcagtgtcctgcccttacgcctcggccgccgcagccgccgctgcagccgcctcctccccttatgtataccgggacccgtgtaactcgagcctggctagcctgcggctcaaagccaagcagcacgcctctttcagctaccccgccgtgcccgggccgccgccggccgctaaccttagtccctgccagtacgccgtggaacggccagtgtgaaccgcaggtctgtggatccatccccgagggcggggcagtaattcacagcctctctggacaggggtcgcctagactggcttgcccttcgtcccagggtctgaaaaggggtgccagagcacccgggaagaggcggctccgaagagggccttttccctcacagcccctgaggggtggtctgacccctatacggagaccgcggccctgggactaaggccaggaacagggaccagctcccccggggccaattcacccttggctcaccccgccttctccccgaattc

SEQ ID NO: 6589 - DNA, 600 bp, Rattus norvegicus
atgtccagggacgtctacagtactgattactacagggtgggaggacacaccatgctccccatccgctggatgccacctgaaagcatcatgtaccggaagtttaccacagagagtgatgtgtggagctttggggttattctttgggagatctttacctatgggaagcaaccatggttccagctctctaacacagaggtcattgaatgcatcacccaaggccgtgtcttggagagaccccgagtctgcccaaaagaagtatatgatgtcatgctggggtgctggcagagggaaccacaacagcgactgaatattaaggagatctacaaaatcctccatgctttggggaaggccaccccaatctacctggacattcttggctagtggtgactggtggccaagcgtttatactctgttgcctcctctctccctgcctcatctcctctttttcctcacctcaactcctttcgtccatctttgaccgaaacgaacatcttcatataaactcaagtgcctgctacacatacaacactgaatttaaacaaaacaaaacaaaacaaaacaaaaaaaaaaaaaaaaaacgcgaggggggggcccggtacc

SEQ ID NO: 6590 - DNA, 600 bp, Rattus norvegicus
ccagaggactagctgactttgccaaggggtgctgscagmkgggcatggagcctcgcctsccctggacaatgtccmccacactttcctgtcacykccyyargtgcwgmtcwctgcmaccmrwgswcycagmtgctyyrssacabssryrcwsccagbggggmtgccaactgcgttctctcmttgtgyccataggcmmtggcctgggaccttcatggaggtcctagcctttcttaggctgcascaaagattccaccttcaggcctacagartragggrgtytygcccmccamgrgcccaarccctyccatggatcakrgarrraagccctytcatggrccscctggttggcattgaaccccatwccactgaaagtsccattcaccmccgstgsgtcccgggtgtacaagactacatgcaatgggaggtttktggggagggggaasacgaytggmtatttgtwtaaaacgtaaaaagtttmctgattggggtggggcaatatttatttkttgtaaatagaaaatgctagacttswatwttwtattaaaatcccgtttythythwrraaaaaaaaaaaaaaaaaaaaaaaaaactctagcggcc

SEQ ID NO: 6591 - DNA, 1400 bp, Rattus norvegicus
gtcatccacacagaggactaccggctgcgacttatctccctcaggagagggactgaagagagaggcttgaagcattactggttcacatcctggcctgaccagaagacccccgaccgggcacccccactcctgcacctggtacgggaggtggaggaggcagcccagcaagagggaccccactgttccccgatcattgttcactgcagtgcagggattgggagaaccgggtgcttcatcgccaccagcatctgctgccagcagctgcgacgtgagggcgtggtagacatcctaaagaccacgtgccagctccgtcaggacaggggcggcatgatccaaacatgcgaacagtatcagtttgtgcaccacgccatgagcctctatgagaagcagctatccctccagtcctcagagtgaccacactcttcctctgagatccactgggcactgccgagtctgaggctggggcttcaccccaactacccaaggtcttaccttgggtcctgggcctgttccctggctctccccttcagtctgcccccatctgttgtcctggcctggtccctaccccaagcctagctcttctactgtacatactgcagagttcgggagggcaggggaggaatgtgccaggccaggcctggggccctgggcctgacccacactatatagacctggggcctcagttttaaccatgattccacagctacttgrtccaaaatgttttcatgccacaccccaagtgtcctaccacaacatgttctgtctgtccatccatcacagctatctgtaccaaacactgtgtcccctcagccaggaaaggagtactgatctgagctctcacccctcarccctcacccacatcgccattcccagacacccaccctgatccccaggcagagatgtctaccaatctctggcctcacaggatgtggatggtggagaccaggcaragragaatgtggtggttgaccgagatcccagctragaaggttcccaggcaagggtgggcatctctggcctatgagacactggagagaaagaggacagatatagtgggaaaccctaaggatctgagccctgagggggccctycaagagtagggtggggacagckscagasstgcaaggcatckkymygwgkcactatgggaaaccccaaatgtckcctcgmtacatgttgctccgtgtgttcccttgtccatgtttgtgttgagagcccatgakcakggcatgcatgactctttggcaacatgtgttatcttggagccacgtgtttttatcgctgactttawatatttattccacggcatacagagacatttggtgtckttttawaatctgctcgtggtcattgaatagagcaataaacagagcattttgvgcaaaaaaaaaaaaaaaaaa

SEQ ID NO: 6592 - DNA, 600 bp, Rattus norvegicus
cgcctctgtgcctttaacgtcctggactgaacagccaatgagtccgaggcaatctaatgcctcagcctagtgcctttggggggcggggggtcagaagagggtgtctcctggaactggaattgcaggtggatatgaggtaccgtgtgggtcctgggaagtgaacttgagccctctggagcagcagccggtgctcttaaccactgagccgtccctacaccttcacaaccacatcttaaaaatcataatcataatagagaaaaagagaggggaagagcgcctggggaggtggttcagtgggtaagagcacaagcatgaggacctttgttgggatcacagcatccacctaaagtttggatgtggcttggtagagacaggagggtgggggtggggggggtgagcttgccatgtaatctgatgaccttgaaccccatggtgaatgtggagaatcacgttctctgacttccacatggacctcacacacacaccacacaccacacagacacagacacactaccaccacaaccacaagcacacatacacatgaagacacacagagacatatacacactaccactaccaccacaaccacacactcacaca

SEQ ID NO: 6593 - DNA, 1305 bp, Rattus norvegicus; identical to SEQ ID NO: 2497

SEQ ID NO: 6594 - DNA, 600 bp, Rattus norvegicus
ttggcctccactgctgtgtaaatcagaactcaggctgccagacacttggctgtgtcttgagggaaatgtatggataamarrgtgtyccttccttcywcsagsmctgwsmygggagtttgymatctgctgtkgwatcwcaasctatttgyccttwarcagaaacttgggaactgcytgtgtttcccagctcagggtwaccctggytggtgtscrgwygmvratataaatggccttcacagtctwagccactagagsggctytgagtgccaaaaatmctaacaccatgcttcttccttttmsgatgtgtaatcatgaggaaaatcacargaaagaaatgtaaattgtgttcacagtctctcasagtcgctggctgcagtcacatcggtggggatttcrtgttcagtgattgtcttcycttctgattatgttsccatggtgctccgaaagcacacgcttcacgctcttaaaatgcaaaacawacacagaaacccrtattttgtgaaagctactgaagtgccttgggcaaggatatggttttaataaactgattttttttttwwaawwawaaaaaaaaaaaaaaaaaactcgagactagttctc

SEQ ID NO: 6595 - DNA, 600 bp, Rattus norvegicus
gagagataagcttctgcagtatcacaggaagattaaagtggcagacaccccttccagcggaagttactaattcggacctgactgatgcagttcccatagcaacccgtgtttcctgggaaacccgaaaaaggttgtcatggcatcttttgctctctagccccacccccaccccaggccgtgcgtttctacagtaacctttccagatggttcctacttacacgacttcataagaaaaaacactatttgaataaagcgcacaaattaagtgaaagactatatagaggtgaaatgaatcacaaaatgcttttttacattttatataaatcattgatgttatcccataacgactggatcagaaaggaaactgtcgtctttgaaatgttacatgtaaggcatgatctgaattaaattatgtcagctgtttggtaacaatttttaaagatgcttctgtacagttctttcactaagaaatgacaagtcaacagatgaaaygaaaacagcaatataaacatggtctgtacataagcaagtgagagtcagtgtacccgaagtcttacacgataccttcagatttcctcaattaaaaaraaaaaaaaraaa

SEQ ID NO: 6596 - DNA, 1400 bp, Rattus norvegicus
gggcccatcagcttgtggggtggagtaaggacataggccccggaaagggaatcagtgtggaggtagttggggcgtgtgtgccctgcgtccttgtggtggctgtatgatttcccagtctgctgactcwggggakcgcrksmkcccctgactgccttgagatctctcccaactcagtttccccttgctctggaagagtgtgtgtctatacactggtgtgcctagaaggcctgtccatgtgtgcatggacgacagggccggtgcctcggtgcttttggggagtcggagagaaaggttggaatgggggacaacttaaccctcggtagccagtgagggaaaccacatgcccgtccccatcaccccacagcgcttctttaactttgagcaaagttcccaaagtgaccttctgggtgggaagggcagcaggacatgtggcccccgtccttctccttgtctttcccttctggctgccaaccactgccgtgccaccgctgcgctttccctggctggagtggaggctgagtcctctgtccttggtttccatttaaaatgaacttcacaacattctaaatattgggggatgacaaatgacttttttccccagaaaagtgtgtaggaaatacaagcaggttaaagaagatttgcctcagtgactttcacccttgccctaaagcaggagtccctcagctagcgtctgtggactccctgaaattgtatgcgtctgtggactccctgaaattgtatgcaaagtgtctgtgtgtgtgtgtgtgtgtgtgtgtgtgtgtgtgtgtgtgtgtttgcgtgcatgtgtgcatgtgtgtttgatggctttcatcagattctcaaggccttaatgaggttaaaggaccacggcctatagtcaccacacttgggccacatggaggaggtgttgctctctgaggcagttcctccctggcctgcctgaggccagcccctggacacattgctgctggagaccccacatctctccagaacttggaagctaggctctgcgcgtgcttgaaggcaccaccatctcccttcttgcttcattctcctgtgtgctctgcctctgctcagtcctgctcttggcctgtgaatgtgcctcgcccgtccctggtgggggacctcaaaccccagtgctgatgctaccctttccagtgggagtttctgttctgctttccttgacagcagcctgtgaactactcacgagtccccttggtttggagttcccggtggctttgagtaggatctttggcgtggcatctaacctagcagcattgatcgttcattgtaaagtggggatatacctacctcagggttgctgcaaggatcaaacgaggaaacgtataaataaagcattacccacagcaaaaaaaaaaaaaaaaaaaaaaaaaaaaaaa

SEQ ID NO: 6597 - DNA, 600 bp, Rattus norvegicus
ggtcagagccaatttctacaaacaccataatttctattgcttttctgcacctcaagtcaatgagaccagtgttgtgtaccagcgcctctatgggccccaaatcctcctcttctccttcttctggcccaccttcctgctgactggyggccttcttatcattgccatrgtaaagctcaacaggtccctstcyrtcyykgcrgcycagargtagaycaatctcttctgcacagcagcwwggagtcaccaggaacggcaggggtcccgggcaggcataattctcttcctcttgtcctccatttaatttgttcaacctctttggacaatcatttcttgctcaagaatgtttaacagctctctccggttgacttcgaagggcaaaggaactgccagtcacagctctcgatccccggcttcagttggctcacatctgttacctgctatgtcactgtctactcccaagacgatgaatatcgtcacctctgtccctatgtgctctctcttagttcctcagatacccacctttgacatccaggatgctgtccttggccaaattcagcttctttgaattgtcataaaagccatagctctcaaaaaaaaaaa

SEQ ID NO: 6598 - DNA, 1400 bp, Rattus norvegicus
  misc_feature (1304)..(1307): n is a, c, g, or t
atctccctggatcatacggagaacttcggtgcacccagtattgctccatcgactccacaccctgcsgatacttmacgtgagaggctgcagggacaggtgggctgtggcccatggacccgttggctgtttctstacccttcacatcaagctggccttgccctctcctgggacagtgccctttgaccttcatgtgacaaaacaaggatatattcttgctgctacgacatgcttttgactccgtatgactggaagttttggaccactgaatcctgtcttaattctaagaaccagaatccttctataccccaccctggaaacttccccatcccctccaatctggctaaacagctggctgtaatgcctgatctcttctggaaagatgctggctsaagcgtggawwwrrmwwarmamwrwtaagcatacaggcatctacaggcctggcgtggttcgttctggtctaccaggtttaggggtgctcgtgaacaggcttctgcacctccaagcacatctgttccgaccccaaagcgagccagctgctgggtctctcaagatttaagaaccacatcataggaggtgagaaattctcttggtgcagctcccagcttcagacctgctgaggggacccttcagctggctggagcctggatcaacttcatgttgatcagtcaggggtacgagagagccacaaggcccaagcttggtcccaggaagagggtgaaggctcagctgagtcactgccatgtgacccctaccagaacagaaaccttcttccttcccgaagttctctgaggcaccatctgaccttgtgcttctctctgcaccttgacctctgtcttgacagtgccctcttgcaacgtgcctgtgtgaaagtctcacccctcatgccctcccatggcccgtgctgctgtttcctcatgctggcttccctggcttgggctccactgccaagtccttggctgcaggacgcgccggtgactctcttccatgcccatcttgcataccccttgttccctcactgtgtgcccaacctcttcctttatcctgggattctttttcctaagccctgcatttctgagaactgccttcccatatttcatgaatggggtttggctctatttggggaaacatcgctttttgtccccctccccaatgcgcgcacctgccttgccccactacccaggctgcctctgggctgtgcaaagctcttcagtgagcccaagccttgggaattcagcaggtggcaccttctcacccagcaagtccgagctgtgaatggtatttcctgagagaaatcagcctgaggnnnncttcaggggcagacagctatctatttactattctgggacttctgggtgggcaaacaagaaataaaggtgattcttggctgtgaaaaaaaaaaa

SEQ ID NO: 6599 - DNA, 600 bp, Rattus norvegicus
gcagaataacggaaaccgtgcagttggtaacaggtagtttggatatttttgtacttgatttgatgtgtgactytttttcatatactgtttaaatcatgtatgttttgacattgtttaaaattcagtttttgtatcttggggcaagactgcaaacttttttataccttttggttatcctaarcccttcgtttgccatcattgatcccttggtggtgactttgtagacgttgaagtagaagcgtgggacgcattgactgtaccacagacatgtatactttttacctagttactagagygaataaaacykmgtgccatatamraarwwraawwmwarrwwwrrwwwttaaaatgctttccttttgcacttttgaatccaatctcagtggcaagacaccttctactaactgacaggcaacagccagttgtattgggcagctctggttttccttcacactctaccaggactttcccatgtacattatggatcatgtgtagagttggttattttttgagtttttattttctgtagcgaaaaaaataggctacagtaaaatagtgtgaataaaaccaagatcatcattgarawrwwwwwamwmwaaa

SEQ ID NO: 6600 - DNA, 600 bp, Rattus norvegicus
aaacaaaacaaaacaaaacaggtaaaggactgtagagatccgtgatagagtaagtgataaagacctttagctttcatgtgaaagaagtggatggtgagaaaagtgttctgtgttatcctctgtaaacatcaccagggtgtattagagaagatgacacaaaggggagaatattaggtgaatgctcaggaaagtctaatagcaaagacattagactagtggcaatggaaatcaagagaaactaaagatttgagaagattttaaaaatgtcaatttctgtgaaatctacttcagcatggccaacatagtgactttcaagacaggctgagctgtatagtgggaccctgtctaaaaatttcaaaagggaaaaatttaaaaaataagatatataaagagggctatctattaactagatggaatagttgggatctcttttcatccatgtgatacacacagcaaatgacaaatgttggtatggtagtcctataacattatcatggacttgaaaatttcttattttctcttattgtcagacattgtagtgttgtggtacaacttatgactcaagtttgagatgatgtttacataaagaaacatattccg

SEQ ID NO: 6601 - DNA, 600 bp, Rattus norvegicus
agtggtgaaacagctcagaggcttggtgaccggtatgtcccagcacatgtagaccagatccatgcccgagtgcttctctgtggccagcaccggtcatgagacaataatttgtttacagaagccaaaaactgtagtagaggaamgatactratgagggcttaaacwwtwwkkwywkywwwywtcatttgtatggacttttaataastgaatactatkttmtatataaaaatgtaacattaatttttkccaattttagawgaaaastcaaaagtgtaatatataaacccaataaattgtgtatgaaactggttgcaaatattrraaaaamawrwmwmwrmwtgcattttttttctcctatttaagcttgaaggagtttctgtttgtgtcggctatagtttgggacccagccactgctcataaggaaatactcagtgctgtcgttggaatttattttcacctcagtgtgacttatgtggcccagaagttttagttctgcagagtgtgaggagtgagcacagatatcttgaaagttcctgaagtcaggctcagctctccaggacagtaaattatttgttctacttagatattttcattctgaaa

SEQ ID NO: 6602 - DNA, 600 bp, Rattus norvegicus
ttcattcctgacaccgacgctatgattctctgcyyttctagttatgggatgtstgtttgtcttctgaaatggggccttttgagttagaaaatctgagaccagtcttcgatggtgaggtttttcagaagagaaagagaaagtaatatgtgtgactggtyytaaataaaatacgtctctacatgttaamwmwrrwwwrwrwmwmctttggactgtggctttaagagggtggcagacttgatggagaagggagagcatggagtcagacgcacaagggttaaaatcccaactgctggtctctacctggccatcagtgagctctttcacttctgaagtctgttagtcacctgtaagtcaatccagtgatgttcactccattaggctgtgaagtgagaggctgtgtaggaagagaaagacagatcctctcaggcacaagagtttacaattgaggagccattgtcattattttcaatacagagtggtccagaacccgaggtactgagggataattctagaccttcctcttttggaactcacagcattatctacctggggggaacaaatgaactcacagaaaggacacaagtagggtgcaggacaggg

SEQ ID NO: 6603 - DNA, 600 bp, Rattus norvegicus
tggctaagttggatgtccttgggccttcttctttcgtggcccttcctgctcctgataatagtgaactggcatagctgccaagcaagaattagctcggctgagctctgtattctggtgaatggcatgagtcaaacactcattgatataaaatttgtgacccatctcagcacatacctttatcctgggctgcagaaaaaaaaatcctggaggatatttttcccccttcagcatgcccctttccctcaaacccaggatagcatgccagcttttctttttccttgatctggccttacattagccctaacacagtttatctgcaagctggagggaattacatggggtgctttttggagactggccagggcagaggtttgcagtagagccccatatgactggcccttagtcattaaaacaaaacaaaaccttaggaatgtctcaatatttccaattttttaaaactcaaattgcactggtgctgtttattaggggtgggggatgggagggagggaatctcaacaacacttctgtgagatggtcatttcactgttgagcatgtgtttatgagctttgagatatttctgccttctagattatggcccg

SEQ ID NO: 6604 - DNA, 600 bp, Rattus norvegicus
gaatgttttctttctctgttttatacgacagcctctgagttggggcaaagaagaaacaggccgttgtatgttgctagagactttcgtcaggtcagggggacacacagtcttgtcacatatgaagagatgttaccaagtcaacgacaagccttattttttaacgttgaatgttccttaaaggctgacacttctgaagcaatgttaggaaagactttaaatgttattttgagagacttctgtgcgtatacaagcagataatgacggcatgttcagacaagcagaacatttctaaacgagaagtccgagctgaacgactgaaaagagattcctcgccatattgaatatcatctacattgtgtatttaatatactttaatcattttgaaacaacgaaggattatgcaggctatgacggaactactaccttgctatggatgagggttgggcaggatttaatggtctcatagaagctaatttggcttaaagttttatgaatctgtaactagaattttattttcaccctaataacattctatataacctttgccaaaaaagcaatcaataaattaacctcttctttctgtggcaaaaaaaaaaaaaa

SEQ ID NO: 6605 - DNA, 1400 bp, Rattus norvegicus
cttcgtctgcttctcagagcacctgacgaagtgcgtccagaaaggccccaagatgttgcactggctgcctgcgctgtctgtcctggtggccacacggccgggattgcgagtagccctgggcacagccaccatcctcctggtgttcactatggccgtcgtcagcctgctcttcttaccagtgtcgtcagactgccctttcctggctcccaatgtgtcgtcagtggcttttaatacttcctgggagctgccagcatccctgcctctcatcagcatcccatactccatgcattgttgcgtgctgggtttcctttcctgctccctttttctgcacatgagcttcgaactgaagctgcttctgcttctgctgtggctggtggcatcttgttccctatttctgcactcccacgcctggctgtccgactgcctcattgcccgcctttatcaaggctcattgggctccaggccgggggtactgaaggaaccgaaactgatgggagctatctacttcttcatcttcttcttcacactcctcgtcctggctcggcagaatgagtattactgtcgcctggacttcctatggaaaaagaaactgaggcaggagcgagaggaaactgagacaatggagaatgtactccctgcacacgtggcgccccagctcatcggccagaaccggcgcaatgaggacctctaccatcagtcgtacgaatgtgtttgtgtcctctttgcatccatcccagactttaaggaattctactcggaatccaacatcaaccatgaggggctagagtgtctgcggctgctcaatgagatcattgccgactttgatgagctgctctccaagccaaagttcagtggagtagagaagatcaaaactatcggcagcacctacatggcggccacaggcctaaatgccacccctgggcaggacacacaacaggacgctgagagaagctgcagccatctgggcaccatggtggaatttscagtggccctggggtytaagctgggtgtcatyaryawgcactcsytcawcaamkyccrchwkmdtrtrgsrykardccatggaccagtcgtagcwggggtgattggggcrcagaagccacaatatgacatctgggggaatacagtgaacgtggccagccgcatggagagcacaggagttctcggcaagatccaagtgaccgaggagacagctagggcymtgcaatccctgggttacacatgctacagccgaggtgtcatcaaggtcaagggcaaagggcaactctgtacctacttcctgaacacagacctgacacgaaccggatctccctcagcatcctagacacytgagctccccttctccaagatcctcaataaaatgtctccaggcatctgaaammwaraaaaaaaaaaaaaaa

SEQ ID NO: 6606 - DNA, 600 bp, Rattus norvegicus
gtgacttttgatktctrgaggtgtaaatgaagatgtaaaaattgatatagttgtgatacagagtatawttccyttcagataacttmccataacctaatggataatgtattttagatatattctctaataaaattcagaactctawwwwrrrwwmmwwawwgtctgcgccacagggacagaaatgggtgaacaaatgactgcctactgggttcatatcaattcattatatatagtcagccattaaaattgaagcaaatccctgagcactggtgtgatcctttgagagtcctatgaaactcgtccagagagtcagaactgatggtgccacaaagggagaagcttcttccctcaaatgcacccccataacatttttccttctcacatgcccaaagtcatgggagagagatcaactaaccacagactcaagatctctgcaattgtgagcgacgaaacatttcttcttttaaagttgcatgtcagacgttttgtatataaggctaattaccatgtagcttcattgctttttattaagtaagctgttcattttatagagcaagacaaaagtgagctgatggttctggaactgaaaaatccattttt

SEQ ID NO: 6607 - DNA, 600 bp, Rattus norvegicus
cctgtcggcttatccagctctggaaggggccctacaccgctcttccacacaacctgacaattcctctgacagtgactatgacctgcaagtggctcagarrctktaaaagaacttaaggccagcaacaaagaccaagcacatccctctgtcctgaggaagcatttaccactctgagtactgcccacttccacctcagccagaacttggacagaagccaaggtcctttggacaaggtcctgggccctgcagtggcaggccagctcctatatcctgtggccatggtagcctggctgcttcctccaaaagccaaaactcagcagacagagccttcaagcaaccgatccttgcaagcagagaccccagtatccagaggrgtcccaatcctttggggagcaatgaccagcgaggttgactttctccttggactcttgacgccatgaacgaatgatgtgatacacccaagtgggatacgtacaagaamwmmwwwmwmaarcatatttttaatatatctttgtaawtaawrrwwwwwmwamwwwccaagaacatgagtactccgggctgctgtgttcaggcccatcctcccgaccttctaagagacat

SEQ ID NO: 6608 - DNA, 600 bp, Rattus norvegicus
tgggaccgtcggcatgttcctgcagcctctcttccagaactacactgccactaccttcctccaccctgaccactcagctcccagctccaagtgaggtctcattcatttgcagctcctcaccccgtgacccctgcggttcagtactgggtgcaagatggatctctccccactccactgaagcctgcttcacacctccgttcacacatagtcctccagcctggaggctggacccgctgccttgtggtcgagccttctcctttccctctgagctcgttcaggcaggagtgccaatggtgggggccacggctggtaagtagaggccagagatcacagagccacctaccccgatgagggtgctggagaaggcgccaagaaagagacagagttatctgtgacctccaagtcatcggagaggaggaggtaggataaggggctcagactctggcagagtgcggctagtacttggcgcccacccacttaagtgagcgacactggtctgggaggactcgaagtgttggggagctctcttgggagctcggtctcccaccctgtacctcagagggctccagacccgggcttcaggttcccttctgccagtgc

SEQ ID NO: 6609 - DNA, 1400 bp, Rattus norvegicus
tggctaccagaaattgtactggagaacaacaatgacggctcattccagatttcttacgcctgcaatgtgcttgtttctgactcgggccatgtgacctggctgccacccgccatcttccgctcctcctgccccatctcggtcacctacttccctttcgattggcagaactgctccctcaaattcagttcactcaagtataccgccaaggagatcagacttagcctgaagcaggaggaggaagacaaccgcagttaccccattgagtggatcatcattgaccctgagggtttcacagagaacggtgagtgggaaatagttcaccgggcagccaaggtcaacgtggaccccagtgtcccaatggacagcaccaaccaccaagacgtcaccttctacctcatcatccgccgcaagccgctcttctacatcatcaacatcctggtaccctgtgtgctcatctccttcatgatcaacctggtcttctacctgccaggcgactgtggagagaagacctcggtggccatctcagtgctcctggcccaatctgtcttcctgttgcttatctccaagaggctgccggccacatccatggccattcctttggtaggcaagttcctgctttttggcatggtgctggtcaccatggttgtggtgatctgcgtcatcgtgctcaacatccacttccgaacacccagcacgcatgttctgtctgagggagtcaagaagttcttcctggagaccctgcccaaactcctgcacatgtcccgcccagaagaggaagacccgggccccagggctctcatccggaggaccagctctctgggayacrwskccaaggcagaggagtacttctcacttaagtcccgcagtgacctcatgtttgagaagcaatcagagcggcatgggctggcccggcgcctcaccacagcccgcaagccaccagcaagytytgagcaggtccaacaggagcttttcaatgagatgaasccagccktggatggggcgaacttcatcgtcaaccacatgrgggaccagaacagttacaatgaggrgaaggacaactggaaccaggtggcccgcacagtggaccgtctctgcttgtttgtggtgacgcccktcatggtggtgggcacagcctggatcttcctgcagggtgtytacaaccagcccccaccccagcctttccctggggaccccttctcctatgatgaacaggacaggcgcttcatttagagcaggcatgagtaaaacagtcaggcagacggcggtctgagaattgtccttgagcttgtgcctatctggggctgtgtggctgggcagaggtcatgggaggaagagctccctcccaggagcaattcctttctaaataaaggagagagacacttgaaaaaaaaaaaaaaaaa

SEQ ID NO: 6610 - DNA, 600 bp, Rattus norvegicus
atgctagtgtgttgctcacttcatgtgtaacaggtgccctcatgttgtgctgtatcctgtgcyttyyctgtgrgmccattccattcaggaacaaagagchccatgactgcacacgtgtgtatttactaacccttccstgaggtgtgkgyatgtwggatattgtggtgttttasatcastgrgtgyacagaagrgrgaatwcaaacaagatattgctgttcttcagttttgttygtggaatttgaamttmcyccaatttaaaataaattaytggackgtggaaawaammwrwaraawwrmarwwttaattaaatacatctcaaaaccagaaraawrrwrrwwwwcatagtttctactggctactgctggagcatcacagagaggcataragggtgaagaagacatgcattatggtattacattcctccagttatgagagattgtgcagccgwcactgaataatgcgcccctcacatctcccaacattttaacctagtarcactcgggttttaagcatttyccctaactaaataagktataggtgttatattgacttgaaataaaggtgtatttttttttaaagtwaaaaaaaaaaaaaaaa

SEQ ID NO: 6611 - DNA, 600 bp, Rattus norvegicus
gaagaagatcttccctttaagaaaggagacatcctgagaatccgggataagcctgaagagcagtggtggaatgcagaggacagcgaaggaaagagggggatgattcctgtcccttacgtggagaagtatagacccgcctccgcctcagtatcggctctgattggaggtaaccaggagggttcccacccacagccactgggtgggccggagcctgggccctatgcccaacccagcgtcaacactccgctccctaacctccagaatgggcccatttatgccagggttatccagaagcgagtccctaatgcctacgacaagacagccttggctttggaggtcggtgagctggtaaaggttacgaagattaatgtgagtggtcagtgggaaggggagtgtaatggcaaacgaggtcacttcccattcacacatgtccgtctgctggatcaacagaatcccgaggaggacttcagctgagtatagttccacactttgctgacagatgagaacaatctgtttccacccccaattgccgtctatacaattttcttacaggtgtcaaagcagtctagtttatataagcatcctgttgcctgtgatctt

SEQ ID NO: 6612 - DNA, 600 bp, Rattus norvegicus
cagatgtcatcacgctccttaacaccgtgcactatgactccgaccaattcaagacccctcaggagttcaatcctgagcattttctggatgccaatcaatccttcaagaagagccccgccttcatgccattttcggcgggacgccgactgtgtctgggagagccactggcacgcatggagctgttcatatacctcacctccattctccagaacttcacgttgcatccgctggtggagcctgaggacatcgacctgaccccgctcagctcagggctgggcaatttgccaaggcctttccagttgtgtatgcgcattcgctgagtactgcaccaggggactgctctggccctcttccaggggtttcactgttgtgggcctccattgacgtctctctcacgttcccttccctaaacccggggcctgccacgtgtcggtactttacccttcctatcttaagcgcatcttcatggaaaaaatgacgtgacaaaggggaaatacccatcttatacgcacagaccctgttctgcgatgcacccttttcctggctgtttgtatcatttcctagtaaataccttactagtaaaaaaaaaaaaaaaaaaaa

SEQ ID NO: 6613 - DNA, 600 bp, Rattus norvegicus
tgggcagtataaactcggatccaaaacggggcctggacagaaggccatacwgtwtstkmsrawgkctgctwmrakctgwctcyctttagacwytgtcactctcaggcagtcccctgtggtagagcttgtagaacaggcctgtgtatactgcagggagttcctccatgctgaggtcaatcttgtcaaaccyttccctgtgtccgtatagtagtagcctagccaccctgctggtgatgggggttgtgtgtttagtcctggccaggctttctagatccatccattcacacttcaagcattcytgctggcagaagttgatggtgaaggaacgcggctgcaggcggcagatcaggtmtcatgtctgacatcccaaaggccccagggctcytgtgttgctgccggatgctcaacagagacytgaattctgacttgacaccagtctcttcaaacacctctcggactgctgtgtctccaatatcttctccaggctctgacaggcytcctggaaacttccacatgtttttcaatttatttcgatcttgtacaaccagtactttcctggtgctaacatcaaatacggcacctgcaacccctaccctcgtg

SEQ ID NO: 6614 - DNA, 600 bp, Rattus norvegicus
tcaggcctgtgcgccaggaggatgaagacgaccctgagctggggaaggaatcctgctgctctccgcccccagactacaactccgtggtgttgtactcctccccgcctgcttagtgcttctcacaagccccagacaacagcctctgacagtattatacatatatgagtttacacctattccgctcctcgggagccagctgcttctcgtgacttttaatcgtgctttttgttttgtttgttgtcgctgttttgactaacaagaatgtaacccccagatagagccacgtgaggaaaacactattgttcaatcctcctgtgactccacgttagagaaatcctttctaagtcccaacggctcggctcacctgcttcatccccccaaagcctcagggtaacttggacaggaaggtgctggtgccgccccgcccacgctggccatggccccacccaccctccctgcagctgtgggaccagacccagtaagtcattagctcagggcagcgtgctctgggtccctttctgaggaaagggagaacagcaaacgagagaggcacaggaaaaggccgtgggctgcatcctgtggagccggtgcaggagaggg

SEQ ID NO: 6615 - DNA, 1400 bp, Rattus norvegicus
  misc_feature (728)..(728): n is a, c, g, or t
  misc_feature (735)..(735): n is a, c, g, or t
  misc_feature (750)..(750): n is a, c, g, or t
agccccagtgccagtcaagaggcccgtcaagccttccaggtcagaaatgagccagcagacaacgcccatcccagctccacggccacccctgccagtcaagagtcctgcagtcttgcagctgcagcattccaaaggcagagactaccgtgacaacacagaactcccccaccatggcaagcaccgccaggaggagagtctgcttggcagaactgccatgcagtgaagtcctcagggagccgctggtgatgggagcctggaggaacagcacaaagcagatctacgcctctctggggatgcctcttggaggacctcctgctagctcttcttgcctagcctagcttcaagtccaaggctgtgcatttcttcaggaaacggcctcccctctctgtggtccaaggagtgtgctggctgccatactgtgtggctgatgctgaagctgaatgggaagcacaagccgtgtggacaacagagagccgcaccggggtctcagaactcggactccagagcctccttccagtcgccgtttaaaagaaaggaactgagctgctcatccatggatgaagatataaataataatattattaataataataatggtcaggtgccatgtgctgtattaagtgctttatgaacatttgttaggctggcctccggagctgaggttccagtcaacctgaaccctaagcccagacccaccgatcccaaatggcgggtcctgagatgtttanacaaagnattaaggaaaccagnagtctcctagagctagccggatggactytaatgcagggacctgaacagamtgcacagytaatggcacaggaggccgscagmttcagagatataagctgctttagctggggttctgtcacaggcctgagcctcttggtttctactgggttttgaatctaccagagtcasagaksagctccaacttggcagtgcagagatctggcctcaatytaagccakccacttcakacccctgctgatcctgtggaccaattaayactccctgtgccactagaggtggcaccataccctgggttgggccaagcccaccccamtaacctgcagcacttytgatgtactgaggaagaatatccaccatcgtccccagtgactgagctctytgggcctgctctcasggaaggcgggccttggtcccaggctctcaaaaatagtgtaccctcttcttctcaagctctgtggtgcagccctgtgtccttggttactaggagactagtgtggtgatgtckttaattgtcttgctttttgatatataaggattaatgtaggaaactagacctaggttattcaggagggcaggtatataccctgtgtttcctagtatgtgtgaccaataaattgtggctttctaamwrraaaaaaaaaaaaaaaaaa

SEQ ID NO: 6616 - DNA, 600 bp, Rattus norvegicus
aaggtgtggatgattgactttgggaaaaccacgccccttccggaaggccagaccctacaacacgatgtcccctggcaggaggggaaccgggaggatggctacctctcagggctgaacaacctcatcgacatcctgacagaaatgtcccagggcagcccactcacctgaggccaccagcaccttgcatagccatgccaccttgcccgccacctctgcctgtcgcagcatctctcttcccctgattcttcttccttttcctgtctgagcgcctacctagaacagagcctcccatctgcactacaggacactttggagaagagaagagagatttttttttctaggtctttatctcccgccttcctacacaggggcctggaggtggcgtttctaattctctctaaatagaactaccttctagaagagaattgcacagagctaggcccccgcatcccgttacacttagagcctgcacgggtctagaaggctgtgggatcccaggaatccgaggaccccagcagaccctggacagcatgagagaagggtcttcagcactgggcttgcttgggggcagccaggcagcacagccaggggggatccgtc

SEQ ID NO: 6617 - DNA, 600 bp, Rattus norvegicus
cctggagagccgcctggatgtcctargcgcctccctgcaggccctaccaagtctcatagcccaagccatatgccctctaccaccaccctggcccgggcccagtcacctgaccacagccgcccagagcccacaaagccactggctgcccaccacggcatcagactgtgggtgagggcctgctggtcactaractgcttaatcttggccattgtgtggccacagctagctcctcactgttytggacctccggacgactgagtttgcaagcttgggtggaaytgaactgactggactggcattcattcctctgaggytggaccatgagatccatggccccttagytgtcccaagccccaggagggcaaggagtagtagaaggggggcctcgacatttctaagtaaatcagaagcctccarmmmamwwmmwrwwwacatggcagggggggccatgaccatctccccagaggaggtggatgacccagcctgtgggttcctgaatgggcaaggacaggggtggaaagtcactgcccatgcattgagtacttgctgtatacagggactgatacaatgacttttcttcggaaaaaaaaaaaaaaaaaa

SEQ ID NO: 6618 - DNA, 600 bp, Rattus norvegicus
atatgatttccgacttaaatgaaaggagtgaagactttsasrarrggatcgtcaccctggaaacaaaattagaaactttgattggtagcattcatgccctccctgggcttatcagccagaccatcagacagcagcaaagggacttcatagagacacagatggagaactatgacaagcatgtcacctacaatgctgagcgttcccggtcctcgtccaggaggcggcggtcctcctccacagcgccaccaacttcatctgagagtagctagaagagaataagttaaccacaaaataagactttttgccatcatatggtcaatattttagcttttattgtaaagcccctatggttctaatcagcgttatccgggttctgatgtcagaatcatgggaacctgaacactaagttttaggccaaaatatgagtgaaaactctttttttttctttcagatgcacagggaatgcaccaattattgctatatagattgttcctcctgtaatttcactaactttttattcatgcacttcaaacaaactttactactacattatatgatatataataaaaaagttaatttctgcacaaaaaaaaaaaaaaa

SEQ ID NO: 6619 - DNA, 1400 bp, Rattus norvegicus
aaagcgactgagtgactatgctctgatttttgggatgtttggaattgttgttatggtgatagagaccgaactgtcttggggtttgtactcaaaggattccatgttttcgttggccctgaaatgccttatcagtttatccaccatcatcctgcttggtttgatcatcgcctaccacacaagggaagtacagctctttgtgatcgacaatggtgcagatgactggcggatagccatgacctatgagcgcatcctctacatcagcctggagatgctggtgtgcgccatccaccccattcctggagagtacaagttcttctggacggcacgcctggccttctcctacaccccctctcgggcagaggctgacgtggacattattctgtccatccccatgttcttgcgcctatacctgatcgcccgagtcatgctgctacatagcaagctcttcacggatgcctcatcccgaagcatcggggccctcaacaagatcaacttcaacacccgattcgtcatgaagacgctcatgaccatctgcccgggcacggtgctgctggtgttcagcatctctctgtggatcatcgctgcctggactgtgagagtctgtgaaaggtaccatgaccagcaggacgtaactagtaactttctgggtgccatgtggctcatctccatcacgttcctttccattggctatggggacatggtgccccacacatactgtgggaaaggtgtctgtcttctcactggcatcatgggtgcaggctgcactgccctcgtggtagctgtggttgcccgraagctcgaactcaccaaagcagagaagcatgtgcacaacttcaygatggacactcagctcaccaaacggatcaagaacgctgccgccaatgtcctccgggaaacatggctgatctacaaacacacaaagctgctaaagaagattgaccacgccaaagtcaggaaacaccagaggaagttcctccaagctattcaccaactgaggggtgtcaagatggaacaaaggaagctgagtgaccaagccaacaccytggtggacctttccaagatgcagaacgtcatgtatgacttgatcacggagctcaacgaccggagtgaagacctggaaaagcagattggcagcctggaatccaagctggagcacctcacagccagcttcaattccctgcccctgctcatcgcagacaccctgcgccaacagcagcagcagctgctcactgccttcgtggaggsccggggcatcagtgtggctgtgggaactagccacgcccctccctctgacagccctatcgggatcagctccacctctttcccaaccccatacacaagttcaagcagttgctaaataaaactccccactccagaarmawwaaaaaaaaaaaaaaaaa

SEQ ID NO: 6620 - DNA, 1387 bp, Rattus norvegicus; identical to SEQ ID NO: 2524

SEQ ID NO: 6621 - DNA, 600 bp, Rattus norvegicus
ggctcccacggactccagcgccggggccggggcgcgggccgccggttctgcagctctccagagcggcgtggtctcttacctgtgggtggcccgtcccaggggcctcgtttgcctctggggactcgccttctctctctccccagcgggcttcctcctcccttctctcctggagagcatctctggggacctcccgccaggccctcccaggagactccctccacattcccaaacttgggttttctctccccgcctcccagcaggccagaggcagttggtaaggggctgctgagtttcggggatagtgtctcctccacttatggttactttaaaaaaacaggcacagagctgcccaggccgaaaagagttggtatctcttccttctcgaagaggccaaagccagggcgcccaaacgccttcaccccaacacgaatctccgcgttttttattttttattttggtgggaggggatgtggattgagaggaaagagagaggccaagccaatttgtaactagaaccatttttccttttccctttttaaaaaaaagaatccaaacatacaaaaggaaaaaaatagaaaaaaaaaaaaaaaaaaactcgag

SEQ ID NO: 6622 - DNA, 600 bp, Rattus norvegicus
agagagctggctgaagtgtccggttcatgtctcccttctgtagacccctagccctcacccctaaagtaaacaaacaaacaagcaaacaaacrracacaaattaaaaactgttgctatttcctaacctgcaggcagaacgtgaaagggcattttggctccggggcatcctggatttagaaaacggacaacatacacagtacagtggtataaacttttttattatcagttcaaaatcagtttattgttcagaaggaagattgcaaatgtatgatgggaaatgtttggccatgcktgcttgttgcagttaagacaaatgtaaggcaaatgtaacacacacacacacacacacacacacacacacacacacctcttaatgggaccctcatattttgccctttaacaagacttcaaagttttctgctgtaaagaaagctgtaatatatagtaaaactaaatgttgcgtgggtggcatgaattgaaggcagaggcttgtaaattttatccaatgcagtttggctttttaaattattttgtgcctatttatgaataaatattacaaattctaaaaagtaagtgtgtttgcaaaaaaaaaaaaaaaaa

SEQ ID NO: 6623 - DNA, 600 bp, Rattus norvegicus
cctacccatgtccaccctgcctttcccatggctgcccagctctgaggcagagggaatcactaagccccaagtcctgaagaggcagsccagccasctgggctccaggaaaggggktcatggtgggaggggtaggctgacatcatctgtttcaaatggggttgtgccacaggcttttgggtwkyyggcwckscaagtrccaggggtggrcaggtggcaccaccaagcccwwwmtaacamtgtgccstggtggagaaagcwttgrcstatgatgccccscaaaccccctgttstgatgtgcctktcgcacccstcccattaggacaatcagtcccctccmwswtgggcctmmtmtkttmwtttwmytagccyttbtcggtacccawcytacctgtccagggtgccccttgctctcytgcccacccytagcggscatvcaggctggttttgtaagatgctgggttggtgcacagtcatttttttttccttgtaatttaaacaggcctggcattgttggttctatttaatggacacgagataatgttagaggttttaaagtgattaaacgtgcagactatgcaaammaaaaaaaaaaaaaaaaaa

SEQ ID NO: 6624 - DNA, 1400 bp, Rattus norvegicus
acagccctggctccgcccacagccccggctctgcccacagccctggctccgcccacagcacccctgggcctcctgggaccgcccaacctggagagaagcctacaaagccctcctgcatctccacagttcaagagggcactacacaggcctggaggaggctatcaccagaactggaggctgggggcatccagactgtggaggaggagcaggtggctgacctgaccctgatgggggagggggacatcagcagccccaacagcacgctgctaccaccaccaccccttccccaagacacaccaggacctacaagaccaggtacctccaggttctgactctacacccttgatctgtcctgctgactgcccatggcctgctccacctcatgttaataaagggaacactgagcaggcagccctgctttacttctgtgctttgacatgtcctgagagacagcctccttctctcatatttatggggcctcctttgccttttctgaaaggaaagcaggtggcagccaaggctcagtgtcccagggagagggtcactgaggctcagatagacagaccacgttgagctggtcctgtgaaggtgccatgggaatggtgacccacatccagtgactccttgtgaaggcttgggtctctgagtgtggatctcacctttaaaacctgcttgctgccactttagtgttttagactcamgatggaaagagaaaatagtatttgttttgagcaaatcagcaagggtcccatgctgacaaggatcaggctgtcagggtcagcctctctctccagccaggacttgctgactgccctccataggcaagccttgcacttgcactaggcagtgttcaccgactggcctcaacagtgtccaggcatttctcttagtggaagcatgaagtccagtgtgtgtggatgcgagcagtgtgagcgagtggtagggatgctactctcgtcccacctaagacactccctatcccacacgggtgacagggcwcscgcgtgytcagtgtcctcacagtgwcagtgatgagcctttcagtgcatgctgcctgttgttcctgtmtaggccttggctgtgatatgcagcaggcaatgtgggtgctctgggtcctgcttcctgggcctggcggtgtcgggcctcatgcatgtttcatgtactctcacacaccatgggctggacttcacagccccacccgtggggatacactcgatgaggaggcacaggcaccatgaagcggccytgcgtgcatgcttgggcacctctgtcaggccacaccctcctttctgctcctttgtagctgcctgtttacagttmtatctgtgttctgactctgttyttccaagagaaataaactytagagctcrwmaaaaaaaaaaaaaaaaaaaaaaaaaaaa

SEQ ID NO: 6625 - DNA, 600 bp, Rattus norvegicus
gtcatttmaawtccgcccttatgcttctgaatmmcgagggaaaaagkcaaccyttgrctytytykracaatcagaaatgstwaataccccmaaatcttcttgagctgktccttwaacaatggraaaaawtttaaawtgarawattttattcacatwagttggakatccaaacgtctgaaaatacccaaggaaccagccggctattatacactcacccagatgactcttgctgtggagacctcaaacgactgtgcttacaaactgactgagtgagtgactagtcttgtcagtgcavggtgargarggtgggaagggcgcctymagagcagtctgtgaggccacaaaagaatgcasgaaggtatgcttctgcagtctaatggctgcattatwtwtccagacwttyactgtatctctatataattttaagtttaaagcaatatatatatacacacacacacatatatatattcttctagcatataagacagccaatgggaggtaagtattctagatccaaaggagaagccaaatgtattaaaattggactagaagcattttggagggaaaaaaaaaaaaaaaaaaaaaaaaagttgtgcggcc

SEQ ID NO: 6626 - DNA, 600 bp, Rattus norvegicus
gccaaggatgttagmccaagatgttgcatgaatgaaggacytgagttgttctgtgtgcacataaaggcatcacatttgccaagggacactgtcatctcattgcctccatcttcccgtgccgtttgcttccctctctcctsgtamtaagctggatctgtgtccttttctttttaacgagttcaagtgaaggaaaactttatttgtccccccttcctctctttttcttaaagcttctgctagatgcacagttcactgaaaattcagtcagtcacaaactggaagaattgtaaawgaaaaaaaagtatacatcastaagtacacacgtggcttcacatctattaaataataaattggcatggaaggaaggtgtcatttcacccgtgtatccacagtyttaagcaagcgccsatcttcatctgttctctggacattgtctgttcatgtttcttgcatttatttttataccatatttaaatgagaaaacaccttttactccagatgtatcaaagttgacctyttytctgtaaatttgkgtawgtttawawtgktgktttatctttcattaaaagatgcagaatytcvwaaaaaaaaaaaaaaaaa

SEQ ID NO: 6627 - DNA, 600 bp, Rattus norvegicus
tctcaccattggcactatcccaattcaaaatggctccacccgcgcggtgcggcaccctcacttggggcctagagttcagctcttgatgggatgaaggctgcagaaggtgatgtcatgcaccctggtgactcctttccgcgtgggaggtatgaaggagcaagttggagtatcctgagttctgtagctagacgaggacatggagtttgtgtctgtgtcgaggagcagatagctctatgggactcccgtggagcatctggtgtgtgtgtgtgtgtgtgtgtgtgtgtgtgtgtaactgtgagtcttgggcagtataccacagacatgctcttcccatgtaaatagcttttcacataccgtatctcccctgcttctcatagaaggtgcagagcttctagccctggtacctcctcttaggcactttagtcatgctagcccagattctgatgtgtggtgaaacagagaaatgtttacaacatctagagcaatatccaagcatacctcatctctgagcttccatgtcccccagttccctccccttgtctcttccgctacgagcctcatctgcctcaccaggtcttcattaaagatgccactgcttcc

SEQ ID NO: 6628 - DNA, 600 bp, Rattus norvegicus
gcctccattacagagcacagggattcsaggcacattcacataggcatgtttcacgaggtgatagggaccacacctacggttgatgggtgccggcaatcacctgctgactakgctaccmccgcccwgtctctagtgtgctcctttgaagttgattgcaaccttctaaatgatcttcaaacccactcgtgtgcagtgacccgtgctttgaaaaacaggtttaatttctggaggttgtgtgtagggtctgttgctggtwggtttctttgktgctcgggaatyttgttttgkcaactygacaggagytaggsccatctaagcagaaggamcctcaattgacaaatgcctcctgctgattggckgcctgwaatgattgacggggtggggccagcccactgtgttsccgtaccmccatgagcaggtggtcctggggtgtataagaaagcaggctgagcaagctatgggagcargccagtgaggagtgtctcttcatggcttctgcytyagttcctgcctggagktccttccctgacttctyttcattataamccgtaagccatgagatgaaataamcccttttctycccaaaaaaaaaaaaaaaaa

SEQ ID NO: 6629 - DNA, 600 bp, Rattus norvegicus
ctgtgataacccgtggacaggggccattttcctgtgtgccatcctgctttcctccccactcatgtgcctgcacgctgctatcggatcgttgctgggagtcatcgcaggtctcagtcttgcagctccgtttaaagatatcttctctgggctctggggtttcaacagttccctggcttgcattgcgatcggagggatgttcatggcactcacctggcagacccatctcctggcccttgcctgtgccctgttcactgcctactttggagcctgtatgacacacctgatggctgcggttcacctgccagcttgtacctggtccttctgcttggccacactactctttctcctgctgaccacggaaaatcccaatatctacaggatgcccctcagcaaagttacctactccgaggagaaccgcatcttctacctacaaaacaagaaaagggtggtcgactctgtgtgtgtacatgtctgtgtgtgtggctgtatgtgtatcttgcctgtgtgtgtgcttctgcatgtgtatctatgtgtctctgtgtcttcgtgagtttgtgtgtatatgtgtctctgtatttctgtgggtgtgtgtgtgtgccg

SEQ ID NO: 6630 - DNA, 600 bp, Rattus norvegicus
aacttgctagtcacctctttcagttatttagtggcgcaaatcatgattccaggaaatgttcattagcctgccatgcaagagggctgggttcactaatgagttccaactgtctcaggccagtcttctccctaccccatccccacccctatccacacccaccccacccctcatctcagcctgggtgttttgttgccaaggatttctttaccatgacaaggaaggactccaaagtccttccacctcagaagcatttattcttttccatatcctgtaaactaaccaactcagcatggccagcaagtaattattctgacttgagttacttatggaatggctctcagaggagagaggaaaatgttagtgccctgtggaagtttattcttagatatctgggagatgctctaaggcttgggaccggacacctgaattcattgaaaatgccaatgtatcttctttgcaccatagaaatatttccagaaacatcatctggtaaggagtgaccttttccaacatccaatcatagtgtaagcaaacgtctttgcttgtgtaatattcaaaatcagtagtcattaaacttgaaatttgcaaaaaaaaaaaaaa

SEQ ID NO: 6631 - DNA, 600 bp, Rattus norvegicus
cagacgacctcccttgccacttcacttctgccttcggggcgggcttctgcaccaccgtcattgcctcccccgttgatgtggtcaagacgagatatatgaactctgccttgggccagtaccacagcgccggccactgtgccctgaccatgctccggaaggaggggccccgarccttctacaaggggttcatgccttccttyctccgcttgggatcctggaacgtagtaatgtttgtcacctatgagcagctcaaaagggccctgatggctgcctatgaatcccgggaggcaccyttttgagcctctccagctgatgacctggaccctgctccccattcctgccctgtcttttccttcatcctctgcccagccccaacctcttcccatttcccacactccaactcccttcccagctcatctccctatacctcctcagcaaggaggccttaccctagcacatctcactatgcctcctcagcgaggaggcctgaccccggaccctgcaccctcagtcctgctaacagttaagcccaaatcttttgtcctcattcccagcccagcttagccagccttcgcccataaagcaagctccaatgtwaaa

SEQ ID NO: 6632 - DNA, 1400 bp, Rattus norvegicus
  misc_feature (1070)..(1070): n is a, c, g, or t
ctggcgaaaacaaaaggattccatacaaccattgacatcggcgttaagtacgcagaaaaacagacacgacgcttcgatgaaggcaagctaaaggctggccaaagtgtaatcggtttacagatggggaccaacaaatgtgccagccaggcgggtatgacagcctatgggactcggaggcatctttatgatcccaaaatgcagactgacaaaccctttgaccagaccaccatcagtctgcagatgggcaccaacaaaggagccagccaggctggcatgtcggcaccgggtaccagaagagacatctatgaccagaagctaacattacagccggtggacaactcgaccatttctctacagatgggcaccaacaaagttgcttcccagaaaggaatgagcrygtakgggcttgggcggcaagtgtatgaccccaagtactgtgccgcacccacagaacctgtcattcacaacggaagccagggcacgggaacaaatgggtcagaaatcagtgatagcgattaccaggcmkmrtmcccckatgagtakcatggcgagtacccagatgagtaccctcgagagtaccagwatsgksacgaccagggcatcgattactagagtcacacacaggagtgcagtattttagtccattgtttatccagtgagacccaagctagccttgagtaattcktatctcgtcttcctaaacactattacgcwtmctgtacctttaaagaatgccttacgtacattcctttctcmctttcstgcytcctccctaaattgcyttctagtkcwskagbgagggaagcctacagcctaaccagtamctcgcgttggaagaagtgagaaggaacgctgtgcgagggcagccagctytttcgytgrrgatctatrmawttttttacacttacacktaarctgrtdttkkmrrrchryarrrrwbtwtttttttyttwkttacagtttrdyaygwrkctggcttgtacmcggwarmctaaraagttgatttgctamgtgtggymwwwrmmmarwwawhwwamatkcagctttaraacytgacacgtggatgcttntgcmcagksttgtctkstaagttttaaataaagkcgkgatcagkgkgawwmrhrawhahawrwrwamwmawwmwttyccgaagctgacaaggtctytcccgagtggcgctstaaaggcscgtytacagaaatgrccgcaracatgtaggtgtgggtggcgtgcctgcaracttcatttgkrccawtgtattactktaragwcgctgktcccttcaactgtatttattgstgcatttytcagcataracttatcccattgkatktttkataartaaatatttwttwtgrmcwttawahrraaaaawaaaaaaaaaaacaagttcggccgca

SEQ ID NO: 6633 - DNA, 472 bp, Rattus norvegicus; identical to SEQ ID NO: 2537
  misc_feature (40)..(40): n is a, c, g, or t
  misc_feature (45)..(45): n is a, c, g, or t

SEQ ID NO: 6634 - DNA, 600 bp, Rattus norvegicus
atmtgrmcattwagaatactgkamctgkgctgccgttctgktagawygstkaytacatccccgtgtctgattcggctctccttargtgataggattcattgtttgtaaggcgataaacttgaccacaccagaatctgagttttacttgaaactctgcagaatacacagggggtatgaaaaacaaaacaaaacaaaacagaaagatttttttgtgcaatggcaaaaggtaaaaatgctgtaaacgttcgagaataaatatttccaacccaagaammwmmwrmwwractatgtattatgaacctaacaaaccttaggattttcaaatttggagtcaaaaccctcaagaaggtggctccggggatggcaccattgctccttacaagctaaccctagatgcggcagctytttaacgtactttaaaaagcaaatatatattactaaggaaagaagttatttataattgccttgtcataatygttaaggtgttytagaaccatttgcatacaatttaatgtaattccattccattytattgtttacacaattamtcaaagatggctgcaaaggtaaaaggaaaaataaaagcgtcttgcacagtgg

SEQ ID NO: 6635 - DNA, 600 bp, Rattus norvegicus
tggtccaaaccartacaagatccctgccatctgcgacatccccaccgagatgcacatttcttttttgcccccatccgaacactcaaacaccctgtattcatctaagggtctgggagagtctggggtgttcctgggctgttcggtatttytygscatcsakgacrcaswgagggcagcgcggcargagagaggcatctctggaccatggaagctcactagtcctctgactccagagaaaatcagaatggcttgtgaagataagttcasaaaaatgattccaagagatgaacctggatcctatgttccctggaacatacctgtgtgagtgaaatatgaacttctgaaaggattggctcaacaactacagaacgcacctcccggtctctctgctctaagatgctaaatatgaaagccagagtttcacagcccagaatcatccacagcactgctttactgattcggaagtttctcttgaggatactccagatacacctgagacattataaatcatatatcaaattgcacaaatattaaatcgtttgctcaswaaaaaaaaaaaaaaaaaaaaaaaarwrarmggccgcaagcttattcccttta

SEQ ID NO: 6636 - DNA, 1400 bp, Rattus norvegicus
aaaaatgaggccaagagcgtggtaaagcaggatcggctgcttggcttgctgatgccctttagggcttttggggatgtaaagttcaaatggagcattgaccttcaaaagagagtgatagagtctggcccagaccagttgaatgacaatgaatacaccaagtttatccctcctaactatcatacacctccttatctcactgctgagccagaggtaacttatcaccgattaaggccacaggataaattcctagtgttagcaactgatggattgtgggagactatgcatagacaggatgtggttaggattgtgggtgagtacttaactggtatgcatcaccaacagccaatagcggttggggggtacaaggtgactctgggacagatgcatggccttttaacagaaaggagagcaaagatgtcatcagtctttgaggatcagaatgcagcaacccatctcattcgccatgctgtaggcaataatgaatttggagctgttgatcatgaacgactctctaaaatgcttagccttcctgaagagcttgctcggatgtatagagatgacattrcaatcaykrkrgttcagttcaattytcatgttgtaggagcatatcaaamccaggaacagtaagtgatactatcctggcagttcttcaktttgaagggcagatcaatgttcaaaagaaactaatacagtaaatatcccagtgggtcattctaaacacatcatgtttagtactctagctagcccagtcttcatatctactgcatcagatgatagcatcatgagtgtctgttctgtcctgttggacctcagggtacctgcacttgaggcagcttgtttccttacccaggtgtcttttaacaatgactcaccaactaagaatatggataggtagatacgatcttgaataggtcaaaagcaaggaacttctgggagtattagtaaaggtagaaaacatcaccatgcccacctgcagactccttccatcataagactcctaatgtacatgagaatagttatttactgcatttttcagatgaacagttcaggtattcacatacatttatgttagcctaaagtgcaggtccagtattttcagccatttatgaccatgaacaaagaaatctggatttgtaagtttttgtgattskgtgctaaagtatgcttyctgaacggaaagaattmtaaaccgttcttccttcctcacccatgatttcctcagtgtaaccgaaatattttgttttgctacacctaaaagacaataaagattcttagtttaaatcyatctttctagtgmatgytaaataaagggaaaatgtgtttttctgsytygtattcatgaaaagctttatttagtttgaaataaagatatmtgcmgamtgaaaaaaaaaaaaaaaaaa

SEQ ID NO: 6637 - DNA, 600 bp, Rattus norvegicus
tgmcwkswccwkgtkmykcymtykswggagtgggagmcmtgccggggcttttggtcttttctcaccctgactgcctctgggctccatggcaaggatgacttggagaatgaggttgctttggaagaaggctacacggcactgaccaagctcttggagcccctcctgaaggagctggagaaaggccaactccttaccagcgtctcagaggaaaagctcaggggtctctccagcaggtttggcaacggaagagaatctgagctactgggcactgacctgatgaatgatgaagccgcacaggctggcacgctccatttcaacgaggaggacttgagaaaacaggccaaacgctatggcggctttttgcgcaaataccccaagaggagctccgagatgactggggacgaggacaggggccaggatggggatcaggtagggcatgaggacctgtacaaacgctatgggggcttcctgcggcgcattcgccccaagcttaagtgggacaaccagaaacgctatggtggttttctgcggcgtcagttcaaggtggtgactcggtcccaggagaaccccaatacctattccgaagatttagatgtttga

SEQ ID NO: 6638 - DNA, 1400 bp, Rattus norvegicus
ttggcatcctgagtgtggtaactcacagtaattctgcctgtggttgagggcctgttaacccttgatcactttgggctgttaccactcaaaagttcatgaccgyaaatatctgcagtgtcttctgaggaaattcaaaacctgaaastgaacttctttggctgataattgggctgtaacaccacaaaaaggtcccgtgttcataccacatgtgtgactaaacctttttattatagcaacgtgttcctgattagctccatrtgaaaacggggctgttaccccctakctgaaggagaggggaaararararaaartagtgtatcatataaacggccataccagttttttggatgattcttcaatgttctgtggatgcggcctcttgcctgaggagcattcctagccttggggtgggagctgtgacacgtaacattcttctcaccctgtccttttgacttttgactttttcctctttaaatgtacagctttctgcttccttgggtggttttcttgggaagcctttattagtcagtactgtgtggacagggcggggcattgagcacatggtgagagctgtgctttaaaggttgagaaagaccttccagcaccacaccctgtctccctccaggtctcagcacagttgttcttcatagtatgacccaaatcgggaaaaaataaaggacttttaagtatttgtgatttcccccattgcacccagccctgacagtgctttgtctgtgcctgtgacagaccctcccctccagtggactcatccagcttcgtcctcagacacgcctcaagaagacttagaacacagggaagttgcatggacactacagtagagagaaccaagaacagccaggccttcagtctcacagtatcacccctctaccttgacattccgtgtacccatagctgtagagttcatccgtttgtccatctgctgaaatatgaaaagaattcatgcactgatttaaacaaaaacaaaaaacccacaaaaaaatttcttctttctagctgaacagaaaacgtgcagttaatactcggcgcttgacaagcagcagcgagtgtggaccaagcctgtctgtatctggtagctcttcgctctgttttctttccttaccagtattctgcctaatgtttgcttccgtggtggttctttgcctagcaagcacacctgtggttgtgaaaatagtatagcaaaaagaaaaagaccccctccccacccccagttactgatgtgctagatccgtgtatgtcttttaaacattctagtttctccttacacagagtaatcaggacgatgtaaaaactcaaaactgaaataaaacatcttatcagttaaaaaaaaaaaaaaaaaaaaaaaaaaaaaaaaaaaaaaaaaaaaaaaaaaaaaaaaaaaa

SEQ ID NO: 6639 - DNA, 600 bp, Rattus norvegicus
  misc_feature (586)..(586): n is a, c, g, or t
  misc_feature (588)..(590): n is a, c, g, or t
catttttragctgctgatactcattccytattatttgktktcrgatgaggaagctgcagttytggtacaaaaagatgagagtataaacttargtytgtcattywaagggcttacttacmmkakractttaagaacctggammagtccmctgaacggstrgaatgaattgcagtatatatgtatgawtgctttttaagtgactatttttccttttgtcaaatcatgtaaattctgamatcttttgcactgatgtgtcgaaccttattyttgtatattcaatcaaggcaacttttataatttcccatttgttttcaatgaccctgaaatgttaatagcatggtgatattctatgcaactctagttataccttttggtttgacactgtattttcacattgatttcatgactgatgatagattttataacctgactgggttytcatgcggtactaactgtaratgcatgkacttgtgttctgtgtaattattgaagtgcaatggtgtacaaaaaaagtgaattcacctgtttttaacaataaaacattgataaaarrwrmwwrraawaawamwmwwwawwmaaaaaaaanannnaaaaaaaaaa

SEQ ID NO: 6640 - DNA, 1400 bp, Rattus norvegicus
gctgcgccgggcagctgaggaggcggagcgtcaacgtcagatccagctggcacagaagctggagatcatgagacaaaagaagcaggagtatctggaggtgcagagacagctagctatccagcgtctgcaggaacaggagaaggaacggcagatgcgcctggagcaacagaagcagactgtccagatgcgtgcccagatgcctgccttccccttgccttatgcccagctccaggctatgcccacagctgggggtgtactctaccagccctcaggcccaaccagctttcctggcacctttagcccagcaggctcagtagagggctctccgatgcatggtgtgtatatgagccagccagccccagccactggcccctaccccagcatgcctggcaccacagcagatcccagcatggtcagcgmctacatgtacccagcaggtgcccctggggcacaggcagcccctcaggcccaggccgggcccaccaccaaccctgcctactcctcgtaccagcctactccaaccccaggctaccagaatgtggcttctcaggccccacagagcctcccagccatctcccagcctccacagaccagcaacattggctacatggggagccagccaatgtccatgggctaccagccatacaacatgcagaatctcatgaccacccttccaggccaggatgcgtctctgccagcccagcasccstacatcrcagggcagcagcccatgtaccagcagatggcacccagcactggccctccccagcagcagccccctgtggcccaaccgccacctacacagggaccgccagcacagggcaatgagacccagctcatctccttcgactgacyttgagtctggcgctcaccatccagagtaacabtacagttcwccagaaaccacttatatgtctaactagccatttcskccsakdmctgscckgtagtgtcccttctgtgagcaaggggtgggcmttcacccwtggccctcctccctgtcmtmagtggtctggctcctgtcactggttccctgmtttggtcctgatgcagtccraccttcccgggactgggactctgcakgacragkaggaccttttctggagaatgcccagctgtgtcggggcctgccagaggtgactgctgtggggatggttagcctggcccagartccgatgtraamtgtgtggtgtccaggcatggccmtggtacccagaagaacgatgtgacccatgcacagcaagggtrgaagtttcaggcatctmtgtctcccstactcmttggatgtcatmtckccagtgcagaacagtgaaaataaaatgtatktcaaaawwmwmwraaraaraaaaaaaaaaaaaaaaaaatactctagcggccgcaagcttattctatttagtgag

SEQ ID NO: 6641 - DNA, 1400 bp, Rattus norvegicus
aatttccagaaaagattccatttagactaacaagaatgttgaccaatgctatggaggttaccggtctcgatggcaactatagaaccacatgccacacagtgatggaggtgcttcgggagcacaaggacagtgtcatggctgtgctagaagcctttgtctatgaccctctgctgaattggaggctgatggacacaaatgccaaaggcaacaagcggtcccgaaccaggacagactcctattctgcaggccagtcagtagaaattttggacggtgtagaacttggagaaccagcccataagaaaacagggaccactgtgccagarkccatccattctttcattggagatggtttggtgaaaccagaagccttaaacaagaaagctattcwgattattaacagggttcgagataagctcactggtcgggatttctctcatgatgacactttggatgttccaacccaagtggaactgcttatcaagcaagcgacatctcatgagaacctctgccagtgctacattggctggtgtcctttctggtaaccaaggcytggcaaagaaaatcatctcctccgatgcttttgtaccttggtctgtgcttccagtggactgaaaccatggtcataaagttggactttgttaayakwkkgaaatgtatatgaaaagaactactgtatattcaaagttggcttatgccaacctcctagctgctgttgaaaagacactgtcagaaacacaaggcttgattcagttcccaggacagtgaaacacagtaatcctacagaaaccaagcctttgattttgggagaacagaagatgagtaactgactaagaaatacgggtttkgacttaacttacagaagaactcatcatacgcatttgctgaccgaataatctagttgatcctctcarccaggggcttcaacagcaaggacacagmtgtcagcactccaccatcytgttacctcacccgtccctggatgcagtggcaacatctgcaggatggrccaccgtgtgtgtaagaagatctgtcttccacctgatcccatgatgctgaacctcacagagccggccttccaggaaggacgtttgctcagacgcctggccaccgaggatgagcakgtgtgccaggatctcagtgcagggtccacgctggccctgctgctgtgttcagtgagggatggatatgttgtgtttgcagcagsgactcagaacacaaatgcttktgtggaagtgctgatctcagagggacaytagcgcaggttkkgaattwagrgcaaagtaaatrkccaactaaacacaaagtataagtgaagccacatctagacaccattgtatctgagtaatttttgtgccaataaatgrcatcagaattttwaargtaaaaaaaaaaaaaaaaaa

SEQ ID NO: 6642 - DNA, 600 bp, Rattus norvegicus
gttcttagaacaaacagggccttagttactgcattytcatgagctataatgtctsagaccatttttgcagagtggttccttggtgaccagtcctgccacaagtctaagataagttgcatttttwyttaaagttgctgttgctgctaaarwrarwwwmwwwwacgtgtgactgagtgccatggggcccgatstccaggcagacactgaagttcagagacgtgcgttctgtcagcattatcttaaattcaamtgmgaatacatttattctgtttgggaatgttctttgaagaaggawacatagctttccttaacaccccccaacccccgctgccayttcctcagaaataaagcaggcctctggcctctgacattgctgcagcctsccagggggctgctgtgaatgaaggtttttcttgttgccttctttgggttgggccttccacctttaaaaccctcagcctacccakagaccaaaagcatattctctgtttttatctgcaggatcttaaatgcatatcactgtgtaatgtgagacctactataaacaatgaaaaaataramawwrawwawrrwwttaaaattaaaaaaaaaaaaaaaaaa

SEQ ID NO: 6643 - DNA, 600 bp, Rattus norvegicus
aggtgcaggcagagattaggaagtcatggagccgctggacactggcgttggacttcaagcgcaaagcacgaagtgggagtagcagctacagctatggcccaatggtgtctcacacgagtgtgaccaatgtgggcccccgtgcaggactcagcctccccctcagccsccgcctgcctcctgccactaccaatggccactcccagctgcctggccatgccaagccaggggctccagccactgagactgaaaccctaccagtcactatggcggttcccaaggacgatggattccttaacggctcctgctcaggcctggatgaggaggcctccgggtctgcgcggccgcctccattgttgcaggaagaatgggaaacagtcatgtgactgggcactagggggctagactgctggcctgggcacatggacagatggaccaagaagccagtgtttggctggttgtctatcgggactggaccaggaagataacmaaaggaaaawrgaarwrramraarmarrgaagaaggaagaggttttgcaggaattaaatatgtttcctcagttggatgatgaggacacaaggaaggcctattataaggaattc

SEQ ID NO: 6644 - DNA, 600 bp, Rattus norvegicus
gccaacagatgaaaacaatattgtctatttcaactatggsccttttgataggatgctcaccgagcaaaaccargaacaaccaggagawtttattatatgaaagtaaccgtctswykmbscacctccacatgaaacaatgtgttcagtatactttgtgtaccacgtttaaatgagcagtctcaggataagttttacagaaaatttaaaatgcttggaaaagactcttgaatcctgttacccctttcctcattaattgataaggaattatgctttaatgctgttatctatcttattgttctggaaaatatccgcagctatatgtgtattgaatcataactttaaaagccatactggtttcgaaaactttawtttgatagcaagttgatgaacaatacttcatacctaaastgttccattgtgaattaaagatatattcctatgtgattaaaaagaaaataaaatgaaacacagtggcctcctammrwrrmwawrwrawrtggtttacatggtgaggggtataaattctgttatggccattggatatgacggggaagaccaaatgttgtttatctaaaaatgttgtgggttggggctggggat

SEQ ID NO: 6645 - DNA, 600 bp, Rattus norvegicus
cttgaatcaagagtgtgtagaagatactttcttgaactatgattgcaccccagaaaaatgcaaccaccatggggtatgtaataacaagaagcattgccactgtgagcccacatacttacctccggattgtaaaaatacggaggatacatggcctggtgggagcgttgacagtggcaaccagcaacgggctgaatccatccctgcacggtcctatgttgcaagtgcctaccgctccaagtctgcaaggtggccatttttcctgatcatccctttctacgtggtgatccttgtcctgatcggcatgctggtaaaagtctattcccaaagaaaaaaatggagaatggatgacttctcaagtgaagaacaatttgaaagtgaaagtgaatccaaagactagtctggacagcaaagattccagtgtcatgtaattctcttcagtggacagaaaaaaaagtggaaaagaaaaacctatgcatcatctgtttgcctgaaagtcaagcctgcatgttgtggtttccatctggccagaaatcatatctctccatacacatgtgtgatacatatatgtgtatataattccataaatgatttacttgtaag

SEQ ID NO: 6646 - DNA, 1400 bp, Rattus norvegicus
tgcctgcttgaccggccttggcaccagagccacaagcgcagagatgcccattgtggaaacggtgtggtagaggagtcggaggagtgtgactgtggtaatgcctgtgacagtcacccatgctgtgagccaacatgtacactgaaggtgggtgcgcagtgcagtgagggactctgctgctacaaatgtacattcaagaagaaagggaccttatgtcgtcctgctgaggatgtatgtgaccttcccgagtactgcaatggcattactggagaatgccctgcaaacagctacatgcaggacggcacgcagtgcgataggatttattactgctctgggggtttgtgtaagaaccctgataagcaatgtgcaaggatctatgggtatcctgcaagatcggcccccgaggagtgttacatttcagttaatactaaagccaaccggtttggaaattgtggccatcccacctcggctaacctaaaatatgaagcatgttccaatgaggatatattttgtgggaagttggtatgcacggatgttagatacttgccccaagtcaagcccctacactcactcctccagattccttacggagatgactggtgttggagcatggatgcctataacgtcactgacatccctgattacggtgacgtgcagggcggtacctactgtgccccaaaaaaagtctgcatggagtccatctgcaccggtcatgccacgctccagtatgactgtcatccacaggaaatgtgtcatgggaatggagtgtgcaacaacttcaaacactgtcactgtgatgctggcttctcccctcctgactgcagcagtggaggaaatggggggagtgtggacagtggtcctgtcgggaagccagctgaccgaaacttgagtctttttggagttggggagagtccggattcgaggatggaggatgaggagatcaacctcaaagtggtggtgcttgtggtccccatcttccttattgtcctgctgtgctgtctaatgctcatcgcctacctctggtctgaagtacaagaggcagtgtctccagggtcttcaagcacaacctcgtcctcagagtccgagtccgactgacgtccgcagacctcctcgtgggctgttgctaccgaggccgtgtgtttgcggggcagtttttcctccgtggtttttagggcttgttgcatgcacactgtttactgtaatgtgttgtatatacacttgtgttgctcttctctaccgtaacaactggtattatcgtgtgaaagtttttatgggatctaaatgttctaacttgccctgtcagctactgttcataaaatacaagtcattttaaataaacatgaatamcaagrmmaaaaaaaaaaaaaaaaaaaaaaaaaaaaaaaaaaaaaaaaaaaaaaaaa

SEQ ID NO: 6647 - DNA, 600 bp, Rattus norvegicus
tgttttatacagcaaaagacacccacgggatcaattatcctccagcagtgggaaacagagctctcagtgatcgccaacttcagtgaacctgaaatagaggaggctcagaatgaaacaagaaacactggcataaatttgacctgctcatctaagcaaggatacccgaaacctacaaagatgtattttttgataactaattcaactaatgagtatggcgacaacatgcagatatcacaagacaatgtcacararctgttcagtgtctccatcagcctatctcttccattcccggatggggtgtacaatatgaccattgtgtgtattctggaaacggagtcaatgaatatttcctccaaacctcacaatatggttttttcgcagccccagtttgatcgaaagacttggatccagattgcaggtcccagttcacttctgtgctgtctctttctgctggtcgtctacaaagcagtcaaaaagtgtttgaagatgcagaaccagcccggcagacccagcagaaagacttgtgagtccaagcaggacagtggtgttgacgagtcgatcaacctggaggaagttgaaccccaattgcatcagcagtaa

SEQ ID NO: 6648 - DNA, 600 bp, Rattus norvegicus
kacctcacccaaatcggcgacgagattgcaaaggaaayytcatttcttytattcgsmattccgctawyagswaramkggtgmsarwcavacsgwsrwmwccwgkycmgctywkgcactttctaggtgacgatggacatacagaggacccaatccttgcttstgctcttgdtgctgaccctgctggggttagggcttgtacagccctcctatggccaagatagaatgtaccaacggttccttagacagcatgtggaccctgagggkacaggcggcagcgacaactactgcaacgygatgatgcagagacggaggatgacttctacccagtgcaaacgcttcaacaccttcatccacgaagacatctggaacattcgcagcatctgtgatactgccaatatcccatgcaagaatggcaatatgaactgtcacgaaggcatagtgagggtcactgactgcagagagacagggagctctgtgccccacaactgtaggtacagggcgagagccagcactaggcgagttgtcattgcctgtgagggtaccccagaggtcccagtgcactttgacagatagatgacatctgtagctgctactgctgg

SEQ ID NO: 6649 - DNA, 600 bp, Rattus norvegicus
cccaccctacctggctgctccaggacatggagaggaataccctgcagcagggacccacagcagccccacaaaggcccgcttcctgcgggttcccagcgagcatccttatttgaccccatctcctgagtccccagagcactgggccagcccgtcccctccctccctctcagactggtccgactcaacgcctagtccagcaactgctaccagtgccacagccgctggagccctgcctgctcaaccacaccccatatctgttccctccctccctcagtcccagactcagctggggccccagccagaagtaacccccaagaggcaggtgatggcctaagttcttggattttggaggggcgttgaagtggcacccctccctggcttctctctcccccccttttaatctcgctctcatccctttatctctgtaccagctttcctgaacctctctgtcttgaagtgtgacagagttggtcaccagcccagacccccagtcttcctttatttataatgggtaggggctgacctcccaccacctcggccctctaaggggtctgggacctcctctcgatccctcttccggcttccacttccttttttccc

SEQ ID NO: 6650 - DNA, 600 bp, Rattus norvegicus
ctcgaaggttcaccaacattgaattccagtactccacgctgctgctcagcatacgctacggcctcacccccgacacactggatgaagagaaggcccgcgtcctggaccaagcgcgacagagggccctgggtactgcctgggccaaggagcagcagaaagccagggacgggagagagggcagccgtctgtggacggagggcgagaagcagcaactcctgagcacgggacgggtgcaaggttatgagggctattacgtgcttccggtggaacagtacccagagctggcagacagtagcagcaacatccagttcttaagacagaatgagatgggaaagaggtaacaaaataacctgctgccacctcttctctgggtggctcagcaggagcaactgtgacctcctctcctaaggagacgaagacctaacaggggcactgaggccgggctgctttaggaccccaagtggcaagaaagctcacattttttgagttcaaatgctactgtccaagcgcaaagtccctcatcctgaagtagactagagctcggccacaaattctgaggaaaacaaaactaaaggatgaacgaatgaaccaacgaacgaa

SEQ ID NO: 6651 - DNA, 600 bp, Rattus norvegicus
ttcctgggatccatcatctggatagccatgttctcatacctcatggtgtggtgggctcaccaggttggtgaaaccattgggatttctgaagagattatgggtttgacgatcctagcggcaggcacttcaattcctgacctcatcaccagtgtgatcgttgcccggaaaggcctgggagacatggccgtgtcaagctcggtgggcagtaacatatttgatatcacagtgggcctgcctgtcccctggctcctgttctccctcatcaatgcgctgcagcctatccctgtcagcagcaacggcctgttctgtgccattgtcttgctgtttctcatgctcctgtttgtgatcttctcaatcgcttcgtgtaaatggagaatgaacaagatcctgggcttcaccatgttccttctctactttgtgttcctggtgatcagtgtgatgttagaagatcgcatcatatcctgycctgtatctgtctgactcagtcacggctgctcgagatggacaaagagcagaagacctggctggaagttactgtccgtctcaccacaccaatcaaataataaacacaatcaagaatgtgaaaaaaaaaaaaaaaaa

SEQ ID NO: 6652 - DNA, 600 bp, Rattus norvegicus
cctgtcccacgatgactctcactttcatgagcggcacaagtgtatcaacytttttgtcaaggtgtacggctatatgcctctcctgtacacacagtttagggtggactctgtgctcttcaagacccgcctgccccatgacaagaccaagtgcttcaagttcatctagggccttgccagttctgaggagaagacagtgagcagagtgaggggagtcacccccaaggttcccaaggtgttgaaggtccttggggacatcgtgggcagggcccaggccctttgcttggagaagagcagggagagtagaaagggatggctgtctttattttgaagtcagccgcactgggcctggaatcctggtcagcagactcagggcaccgactaatggcgaacactgaggactgttcatgagcccgggacagctggttcccggtttttaaattcagaacagcatttactatttaaagagagagtttcacatctgccatccaaggcttatttatatgtgcgtatatgtacacacatatgtgtatatacatgtatatgcacgcacacacacacacacacacacacacacacacacacacacacacagcggccgcg

SEQ ID NO: 6653 - DNA, 1400 bp, Rattus norvegicus
tatactttcctgatgagcatcagacgaggagtgagccaatcttcacagatatctatcccctacataatacggcagagtcattggaaagagttccttccaccttttcaagtcctcactacatcaccctgaaatctgtcagcaaggacccaagaggaattgcagaccctaagcaaaatgataacatgaatttgaacctggatagccaaagcgactgcacaagactgggctaaagatcccccatgcagatcatcactgccttggtgtctgctaaacagatttcagttgtttgccaaatatcccttacctggatagaaaatgttcaagagaaatagtttcttcctgtcaatattaagtcatagaacccacaatctatagcacacacataatccccacaaaaaatgaatatgaaatttccaatgggctttaatttaatgcccaaataggaagtctctctgctctagtaatttcctatgtaatattaatcttgtaattttataataatcaaagcttgtgatcatttagagtttcacatacaaggaacagataaggctagtggttggttactttgttaagatcattttaaaagcacttactttcaggtcagatgttgtggcccagacctataatccctagaggttgagataggaggatcacaggttcagggtctacatgggctgcagagaaagatcatgtcaagtctggacaacttggtgagaactctttaaaaaaaatcataaaatttaaaattgcaccagaaatgttaaggaacagctgttggtggagcagaatgggagacaccctgggttcaaccccgagaattaaaaaaacaaaacaaaacaaagcaaacaaacaaaacagaaagatcaaaacagatgacagtgtgcctactttgatttgcaaactatatcactgaagtctgctttcaatgaaattatcttctatggaagggccaaggaggttagggcagggcagagagttatagtagctgattagaagagggaggaacaaaagaatggcctcctagactatagcaccagcactgtcacaaagcatctcatccattgcccagggtgtagaggcctgtgcaagctttgggttcctaggcctgcctttctagatttctataataagtcaagaaaatgacagggcttttaaaatattcactccacttccttgtgagtcctcaggaaacacagatgggggtgtgcttagtgttcattttctttactgcagaacactgcattcccatggatttgttgccttgcgttgggttgtttccttatacagatgtctgtgggtggaagcactctctctcactgactctgttttcttaatgggagctgttaagtcttttaaatctatagataattttcccccatccttaaataaagatctcaaac

SEQ ID NO: 6654 - DNA, 1400 bp, Rattus norvegicus
ctgacatacgatgacatctacaattgcttctgtcgaggaagcacatgcataatgaatccttcagcaatacattccgaaggcataaaggtttttagcagttgcagcatggatgaattcaggcagctggcttcacagcctgacctagattgccttctgaagacacaggagacagaagttgttgccctgccccaggctgcaaaagtttgtggtaactacatcctggagcccccagagcagtgtgactgtggcccagcagagagatgttctcataaaaagtgctgtaagtctgaggattgtaccctgcttagtgatgcagagtgtggttctggggcgtgctgtgataaaagaacatgcaagatagctgaaagaggacgcctatgtaggaaaagtacggaccagtgcgacttcccagaattctgcaatgggacgtctgaattctgtgtagctgatataaaagctgcggacctggaaccttgcaacaatgaaaccgcctattgcttcaaaggggtttgccaagaccgcgacaggcagtgcacagacttatttggaaaatatgctaagggtcctaattatgtgtgtgcacaagaagtgaatctgcagaatgacaaatttggaaactgtcatgggcgctgtaattatagtgctctattttgtggaaaagcagtttgttactggagctttgcagaactcgtgaaaacagacgtatttgatgttcaatatacttacttgggaggccaagtgtgtgtgtccgcacatttaagagtaaggaatgatgagaccaaggatgacacatatgtccgtgatggcactatttgtggtaatggccaggtgtgttaccgaggggagtgcttgcgtgtgcacgtcctgaggggggatagggagtgtgaggccgatgacaaatgccaaggacatgggatttgcaacaatcaaaacaactgtcaatgtgaagctggtttcgctcctccagaatgtgacatgaccccttcatctccaggagggagcatggacgatggattttggctgcccttagataaaagcacaccgttggttatcaagcggcctggcactcaatataaaaagggacttttgatcagtttctatgtcttcctgccttttctcattgtgacagccattatggttgttaagcagaatatctcaaagatgttcgggcaaggagaggaagagtttagtgaaggatccatatcagaagaaattaacgacagcaagcagtcatagagccaaagcatttatgcaacagcaaagccacaacagaaaaagatcaccaagaaagtcaccattccttggtcttatttcgagaacaagaaccagtccatctctttctccgtggcttactggtttcagttatccatgcctccaaataaatcctatggctgaaagta

SEQ ID NO: 6655 - DNA, 600 bp, Rattus norvegicus
agaagttgcacatcccccaacmtacagtgyttcgcggtmtgagstggagtggagctctctcctgaacactctggaaggctggcaggtgctgagctggytagggagacggrtggggcccagccctgraagaacygtmttcagcctcagcaagcagacactcgcgttacctcasgctttggggyttcmggamcsaggatgttttgtacttattgtgtgaggataaataccattagcctgaatkctcatttctgtaagttttagtyataaaagcttkttttctthtaagaattgcaatgtgcwcaccagyaaacacgtcttaaccagaataacttgtaactbtgaggacagttaaccaaacctgtsccttgtctmtmctgagggtgtmtgttacaytaatacttgaacatgtaccttgkggtmktggctccttttactagtcatgacasyyttatatgttagttacactttgaggatttgctmtaaggtgagtggggtgtgtgggtrtatgtatgaatgaaacagttggcagaatataagaaaaccatttttataaaattgtgactttttaavmcmaaaaaaaaaaaaaaaaaaaaaaaaaaa

SEQ ID NO: 6656 - DNA, 1400 bp, Rattus norvegicus
tgatccttgctgtgactattttacctgccagctgaggccgggagcacagtgtgcatctgacggaccctgttgtcaaaactgcaagttacagccagctggctggcagtgccgccttcccacagacgattgcgatttgcctgagttctgcctaggagatagctctcagtgcccccctgacatcaggcttggggacggtgagccttgtgctagtggagaggctgtgtgtatgcatgggcgctgtgcctcctacacccggcagtgccagtcgctttggggacctggggcccagcctgctgcaccactttgcctccaaacagccaacactcggggtaatgcctttgggagctgtgggcgcagccccagtggtagctacatgccttgcaaccttagagatgccatttgtgggcaactacagtgccagtggggtaggaatcagcctctgctgggctcagtccaagatcagctctcggaggtcttggaagccaatgggacacaattaaactgcagctgggtagatctggacttgggcaatgatgtggcccagcctctcctggctctacctggcactgcctgtggccctggcctggtgtgcatcggccatcgatgccagcctgtggatctcctgggagcacaggaatgccgcagcaaatgccatggccatggggtctgcgacagcagcaggcactgccactgtgacgagggctgggcacctcctgattgcatgacccagctcagagcaaccagctccctgaccacaggcctgctcctcagcctcctgttgttattggtcctcgtactacttggtgccagctactggtaccgtgcccgcctgcatcagcggctctgccagctcaagggatccagctgccaatatagggcagcccaatccggtcctcctgagcgaccaggacctccayakagggcasmscagatgccrgkcactaagcctsagsggcctassaaaccyccacmsmsrrsamagcmrmtgccmgscaacycacaggrccggcccccsctgggtgacctgcctggcccaggagatggaagcttgcagctggtagtgccttccaggcctgccccaccacccccagcagcatcttcgctctacctctgacccctcgagaytcggctgtskcctgctcagttctaggacttaaagtggaacctctgtctgaatctcccacaaaacactagagaagcagaagcktagacaatatggcatccagccctaaagaaccaccaggcgctgttcagtagtacctgggacccactgaattacctgcagctgagtgytgggaaggggctggggctggagtaggtggtggaaggacgggaatgtggtctgtctctgctctgttgtaataaatgtgaggtcttggaawaaaaaaaaaaaaaaaaaa

SEQ ID NO: 6657 - DNA, 600 bp, Rattus norvegicus
ggacatgctacgccgccaacccgcggcccgacgcgctcatgaaggagcagctggtagagatgaccggcttgagcccgcgggtcatccgcgtgtggtttcagaacaagcgttgcaaggacaagaagaagtccattctcatgaagcagctacagcagcagcaacacagcgacaaggcgagtctccagggactaactgggacgctcctggtggcgggcagcccatccgcccatgagaacgccgtgcagggcagcgcagtcgaggtgcagacgtaccagccgccctggaaagctctcagcgagttcgcactccagagcgacctggatcaacccgcctttcaacagctggtctccttctccgagtcaggctccctaggcaactcctctggtagcgacgtgacctctctgtcttcgcagctcccggacacccccaacagtatggtacctagtccggtggagacgtgagacaggacccttccctgccagcccgcggacctcgcatgcctccctgcatgagactcacccatgctcaggccattccagctctgaaaaatctccggcccttgtaattattgttgttatttaaaggcgagcgggcagagga

SEQ ID NO: 6658 - DNA, 600 bp, Rattus norvegicus
cagtgcaaccataccgtcatcaccttgggtacctttggtatctgggctgcctatctcacaggtggggatactgtttacctggctaactttacccagcccagctcccctttccataaggttttcaagccagaagcagcttatctgcctgagtgggtgggcattgctgctgatctggaacagccaaacagaggassccctggccatgcctcagcaagagcccccaagagtcaccagaggaccttgctgtagtgcacatgctcagagggscggtgggggggaggktatgttgttgtcgtgctcgtgctcgtgctcgggacctcacagggattcccagttctgttttgcatgcttctcagmysagysmkkgcsgtcraysaygcgtsmcctmtastgsskatcctswagastcgascacagcctggacttagctcagcagcaacagcacaggtactttgagctcctccatgcccacactgttagccatcataggcctaacattggctgcatctggagtgctgtgtcacggaggccagtgtgtagttagggtttctgcggctctgataaaacaccatggccatggmcaaaaaaaaaaaaaaaaaa

SEQ ID NO: 6659 - DNA, 1400 bp, Rattus norvegicus
ccctgtactctttcgtgtttatcattggagtggtaggcaatatcctggtgattctggtgctcatgcagcataggaggcttcaaagcatgaccagcatatacctgttcaacctggctgtctctgatctggtcttccttttcactttacctttctggattgactacaagctgaaagacaactgggtttttggtgatgccatgtgtaagcttctctctgggttttattacctgggcttatacagtgagatcttctttatcatcctgctgacaattgacaggtacctggccattgtccatgcagtgttttccctgagggcccgaactgtcacttttggcatcatcaccagtattattatttgggccctagccatcttagcttctattcctgccttatgctttttcaaggcccagtgggagttcactcaccatacctgtagccctcatttccccgatgagagcctgaagacgtggaagaggtttcaggctctaaagctaaacctccttggactaattttacctctgttagtcatgataatttgctacgcagggatcatcagaattctgctcagacgacccaatgagaagaaggcgaaagccgtgcgtctgatatttgctattacgcttctattcttcctcctctggaccccctacaatctgactgtatttgtttctgctttccaagatgttctattcaccaatcagtgtgagcagagcaagcagctggacctggccatacaggtgactgaagtgattgcctacacccactgttgtgtcaatccaatcatttatgtctttgtgggtgagcggttccggaagtaccttcggcagcwskwksaaaggcatgtggctataccgctggcaaaatggctgcccttcttctctgtggaccaactagaaaggaccagttccttaactccatccacaggagaacatgaactttctgggggcttctgattcagaccctaggtgtcaaccaaggtctagaggagaatgaggggratagtwtatagcwmtycrrsacagakrctgacagctattacagtgggrwttcccagtcttgtagsgkcaragggaactttgaggtcgcttaggtacaagtcacctattcaatggtttccttgaacttctctctgttaaaaatgagatgaataaacaaagtgggacattatagaaatggggataatgagtggcttgggcccaacaagtgatggatctgtagttattaacctaaaaacaaaaccactacttttactgaaatcaacacctaatgatgtgatattytgagaaaaatttaaagcattgtaataaagaattttgtgtattttcatattgacatatattataaagtagatgttatgtcaaaattaaaactgtmgcmmmcwmmaaaaaaaaaaaaaaaaa

SEQ ID NO: 6660 - DNA, 1400 bp, Rattus norvegicus
ctcaaaacaagttggctaaattatcatgaagcagtaccaactgttcacgggtacgaatttatccaagaccgattggaatccagacaaacaaaaaaawwraarwmmaagcaaatccaatcttacagtgattgataaatgtaaatactcattgatgttttcactgtaaattcttgatgctcagccagtaatctgacagaatgcagtgacactttcctgttgtgtgtgtactgatgactacagcgattatcaatgggaaattcaccaaacaaactgatttctagacttgtggacagttgagtgttgtgctgaaataaaagtagaaaaggtcaaagtaaattcggtttgaagccttgttatgaagccagacaacatgtaaggccatgctgtgtgtcctttttataaactgttttggagacamwwrmwrwrwrwrwgcatgtgtgtctacatgagtgtatacacacttgaaaatgcttattgactcaagttcactgtctgtatacatctgtgcctatctgcattggtctggccagcgcctctaactgtgcatggtagtgacagccctgtgtgattggatgaacccacagaaaaatagtgtggaaatcagagctgcgtcaaactcattataacaattgcctgatatagcatattaaattgtcagctgaaaaacgtttgtaatgttgtgcctgtaacatgtgtagggaaaactggaaaatctgaggccctcactataattttaagggtgcatgacatgtggtgtctttaaagatgtatcttattgtaataaaaggtgatggataaattctgaggtagcgtaagtgaagcatgaaacgmwaggtktttktwttatatatgsccacacaatatttttgaaggcasggtagtaaatgtttgaaggttaataggcaaagaatatggaagttaatttwactgtgatgtgtttttgaggtgtttttacacattgccagacaaggaacttagttcctgtttcccccctgtggactctttgaaacactatgaatgttacaaagttggattttctttataaaggtcgcaaaccatttgcagttggagttgcttggatgtatagtctcctctttggggaaaaaaaccactttggtattaaaatggtttaagcactaatacattgggaaatacgtcgtctgasgccatctgcagacatctgtagagatgagaactaatgaaatgtgttactgaactacccagttttgatagcttccatgcctctctgctgtagtctcctcgaaaatgctgtaccttgtgtttcacatgcaaccatgttactctctyccgaacttacctttgtgacacttagcagcttagccaaaccacgtaataaacaggaagaactgcmmwmrwraaaaaaaaaaaaaaaaaaaaaa

SEQ ID NO: 6661 - DNA, 600 bp, Rattus norvegicus
ctattattcctttggctaacttgggcatctaatcttgtcaccaaagtagccaggcttgataagggttaaaaaatacttcggttttgtggccttcagccgttctcactttccaacccaattttaaatggaattatcctggggctgcagaagtggctcagcagctaagagcagacactgctctcccaaaggatgggagtttgagcccagagtctacatcccataactcacagttgccaataacattgtttccgaaggatccatcgccctcttctggcacctgcaggcactacactcatgtgcacagacacacctaaacgcataattaagtaagttggggctggagagatggctcagtggttaagagcactgactgctcttccagaggtcctgagttcaatacccagcaaccacatggtggctcacaaacatctataatgggatccgatgccctcttctgctgtgtctgaagacagctatagtgtacttatgtacataaaataaataaatctttaaaataaataaataagtctatgggcataccaccctgtacatgcccaagctcatctagaagtaaataataaaataaaaaagttaatctta

SEQ ID NO: 6662 - DNA, 1400 bp, Rattus norvegicus
catccttgassmkscyctgcagccctctgaacttcagcccccagycattcagaaccccctggcttccttcgaaggccttcaggctgaggaatgtggcatcctgaatggctgtgagaatggccgctgtgtgcgtgtgcgcgagggctacacttgtgactgctttgaaggcttccagctggatacagccctcatggcctgtgtggatgtgaatgagtgtgaagacctgaacggssctgcgssamtctgtgcgcatggymactgcgagaacacagagggttcctatygstgcmactgttcccctggtwacgtggcagagccygggscccmacactgtgsarccaargagtaggagtraragatcatggtgggcagcwatgtggaaatggctatcagccataggctggggacttaaggttgcttccctagctgggaagacgtgactgggaagaccccgtgatgccatcaggccagggctctggagcccagttccgccagcctcgcctcctttttatctcttccggcttaactctgggtgtgaattccgtcactgcctctatgccactgcttggctcagacaccacaaatattttaatgctttagccactggccgtgagacacagcccacagtctgtcctcggggccacactttagagcgcccatcagaagagtcctcgtgcactcctcttaggctgtgcagacactgcaggcacccccttccatctgtgatctacacatcatctcgatggttctgtaacgggsacagwggctacatccacctggggatggcccttcacagtgaatggagcaggagagggtctggggagtagctccaatgccacctctcagaaccaccaccagcactgggtggcgtgagttctttttgctactcctccatcccatagacagttctgcggccccgagaagggaccagtttccctcacctcagaggatgaagactaatwckmackkgctgagtktaagaamcgaaagaagaggaataacgagtctgagaaagtgtggcaagagagtgatacggaaaacatgggagtccatatgaaaggaggasccaagagttagacaaaacacgaagtcgctttgggcaaatcagtccaagcctccttagagcttctktgtgcctgcagggaggctcgccacaagctctggcgcccatctgcaaacacctttattaggctcatctgttccccacaggaaaacctaaatagatggccttaacaatataaaggcagagcaagccagatttttcaaagttgtttctctcctccacttcagaagcacttgcccttgcttcctcttaasasatgcacttccacaccagctagctgggggtycaggagcgtgggggaataaaatgttcatctgsmaaaaaaaaaaaaaaaaaa

SEQ ID NO: 6663 - DNA, 600 bp, Rattus norvegicus
tagtctgttcatatgtaaaattcaatggaaaagaggcaggatgcggctktywttttaaacagaggttgtattattatcwtgtyttgatttttttttttactattgcttaaatttggcttttaaatagtggtgacgatgttthatatgagtcttctytgtgctgtgcagatccccagccmccatkttttcttcagcgataatctcaagtgcaaacatctttgwtaacgtattgttaaactgtmttatargtatgacacagggttgtrctgtcccttggtccggagactttgaaaaacaaattgtctgtcctgtggagcaggcagtgactgttaaacttttatctacatttrgagtggktgggaaaacacctttattttcaatgtattatcggattgcstgtcaattggatcccttacttgggtggaaatggaggagtttcttagcatttattagcactgtgttgtgtaaagtcaacccagaaaaatttaaaaacctgaaatccccccctcaaaatatttwmcattgtatgttataagaaaataaaatcgccatttttgtvsmwmrwrmmraawwmwwaaaaaaaaaaaaagtttggcggcc

SEQ ID NO: 6664 - DNA, 600 bp, Rattus norvegicus
cggcatgagcagggacatctacagcacagactactaccgtgtgggaggtcggaccatrctgcccatccgctggatgcctccagagagcatcctctaccgcaagttcagcacckagagtkatgtgtggagcttcggggtggtgctctgggagatcttcacctatggaaagcaaccctggtaccagctctccaacactgaggcgatcgagtgcatcacgcagggccgggagctggagcggscgcgcgcctgccctcctgatgtstacgccatcatgcgcggctgctggcagcgtgagccgcaacagcgcctcagcatgaaggatgtgcacgcgcggctgcaggccttggcacaggcgccaccgagttacctggacgttytgggctasgagtytggatgtcaggctaccctgggctccctcagcgcccagcagctatcacactcaagtcttaccctcagcatgtggaggggaccagcaggcggggagcagaggstsgykyygcttcatggccagcmtcswkcmkaatagcmmtyrtvyybrtkmyscctgrmwrwraaaaaaaaaaaacaayswcgtgccgctccaacatcagcctcgtgccg

SEQ ID NO: 6665 - DNA, 600 bp, Rattus norvegicus
ctgccccagatttccctgccggcgggccaccacctaccaccgcagtagcagcggctgcctatggtcccgatgccaggccgagtcagagcmcaggtcggctggaggctcttggaggccgcctgcmcaggcgaaaaggttcaggacccaaaaaggagcggaggcgcacagagagcattaacagtgcgttcgcggagctgcgtgagtgcatccccaatgtgcctgcggacaccaagctctccaagatcaagactctgcgcctggccaccagctacatcgcctacttgatggacgtgctggccaaggatgcacaagcaggtgaccccgaggccttcaaggctgaactaaaaaaramvrmwdrmrgycgcgaaagcaagcggaaaagggagtcgcctcagcagcacgaaggccttcctcctgccctggggccaagcgagaagaggattaaaggacgcactggctggcctcagcaagtctgggcgctggagctaaaycagtgagamgaggccggcaccgaggacccggccaaggctggcccacctggctatccggagaggagagggcaggacgcagcggccacggcaatttccgggtacccgcgcg

SEQ ID NO: 6666 - DNA, 1400 bp, Rattus norvegicus
ggtgtggggcgacgagcagtctgatttcgagtgtaacacagcccagccaggctgcaccaatgtgtgctatgaccaggctttscccatctcccacatycgatactgggtgctgcagttcctcttcgtgagcacacccaccctgatctacctgggccacgtcatttacctgtctcggcgggaagaacggttgcggcagaaagagggagagcttcgggcactgccatccaaggaccctcatgtagagcgggcactagcagccatagaacatcagatggccaagatctcggtggcagaggacggtcgkcttcgaattcgaggggcgctcatgggtacctacgtgatcagtgtgctgtgtaagagtgtgctggaggcaggcttcctctatggccagtggcgtctytacggctggaccatggagccggtgtttgtgtgccagcgtgcgccctgcccccacgtcgtggactgctacgtctytcgacccaccgagaagaccatcttcatcattttcatgttggtggyaggggtcatctmcttggtgctcaacctactggagctggtgcacctgttgkgccgctgtgtcagccgggagataaaggcrcggagggaccatgacacccgcccggctcagggcagtgcctcagacccttaccctgaacaggttttcttctacctccccatgggcgarggaccmtcgtccccaccgtgtcccacctacaatgggctctcatccactgagcaaaactgggccaacttgaccaccgaggmragamtkacskctacsagrcctcccccatttgtaaatgcagccccccagggtggccagaagtcctctasccgccccaacagctctgcatccaagaagcagyaygtakagggctctggggyttctgtcactccacaggctrtcctgaggagtgtgtgtaccttgratgcctctcgggcggtccactcctcaaaggcacttgagagacaactgggcctggaaggtggacattcgctgggcagargacctgatcacaggtggttctggaataccctgagccttagtgatgaccaaaggacactggcttctttccagaatgtgaccctaccagcctyggtgacagcaggtggggtgmtcttggmtaagtgtgctgtgaactctctgatccttttygcctgatgcagagggatcccragccaagtcgacttcaggtttccatcacaccycacttctcctgggagaaggcactgatgtaggctgctggctcagcttcgtcaccaggacagacacagcctgcctgckctggatctggccctttccaggggagctggttggtgtcttgtttccctcactcctagttccactgtttatgatcctaaaataaacgggactccatcataaaaaaaaaaaaaaaaaa

SEQ ID NO: 6667 - DNA, 600 bp, Rattus norvegicus
ctgcttcgttcggcgggcgtgggcttcgtagtcaagctgctcgagggcactggctccgaggtgtccagcacccgtcgcggaggcactttggtccagaccccgaaggccacacccacctgtcctgaaccgggccccaccgacagcttcatgacttcctccacccctcctgaatcttcgaagtgaactgtagtaggttgggttatgacacaactcataacttggaggagaacctggaggagaacatgttggggactgggctaaagtggaaaagagggaggggtggggcaagtcagggcagagagakagcatgctctgtcctggcttctgcaggcagccttacgattaaaactaaagtctaaagccarrwwaarmmwrwrarwgaggtgtgtattgtgggggtactagggtctttactggtcccacagagggaccattctggtggagtccctctcaacagttccttagttccccgtgatttacaattttgcaagagacacatggcagatacaaccctatgttcctaattctgaaatccgtcagtagaaacacactactgactcctgaaggtgttcgttacgagaactcttgttgtgtgagctc

SEQ ID NO: 6668 - DNA, 600 bp, Rattus norvegicus
ttgttttgttcgtttggaaggcagggctagttgccgttgctaaatgatttaataatactgtaatgtgtatttctttgtggggaaagcttttttttgtcttgaaaatgatagacatttgtagaatatggagactaactcctaggagykgcwykaskctgtcagtgacttaagtcactgggactcactaattttctctgagagaacagttgattgagaaatttctattgtaaatagctcagtgttacataatgaagcttaaagtgtttgtagtcttggcatagggacacggccgaaataactgactccttcctcgstytgcagagcctcccctgccccagccacctcgcccatgtgcagtgtgssccatttgctyagtstgmttctgtgcagataatrtggccctgctctcgggagcccagaaccttttacagacactktttaaktgtrttcmttcstgctrcsacamtcwgcatgactgtatagagtccmttagaccagccacacatccagagttatatrgaaacwgaatgcccaawtggacatgtcgtaatwtwtgtwataataaatatgaaatktacamrwwaaaaraaaaaaaaaaaa

SEQ ID NO: 6669 - DNA, 600 bp, Rattus norvegicus
ccgtttcagccgcaatgaccccattggggaggtgtccatccctctcaacaaggtggacctgacccagatgcagaccttctggaaggatctgaagccatgcagcgatgggagtgggagccgaggggagctgctcttgtctctctgctacaacccctctgccaactccatcatcgtgaacatcatcaaagctcgcaacctcaaagccatggacatcgggggcacatcagacccctatgtgaaggtgtggctgatgtataaagacaagcgggtagagaaaaagaagacggtgacaaagaagaggaacctgaatcccatcttcaatgagtctttcgcctttgacatacccacggagaagctgagggagaccaccatcatcatcactgtcatggacaaagacaagctcagccgcaatgacgtcattggcaagatctacctgtcctggaagagcggaccaggcgaggtgaagcactggaaagacatgatcgctcgtccccggcagcctgtggcccagtggcaccagctgaaagcctgagaggggccgagggaggccccgagggccaaggcctggctccccatcacgccctaccactttatgcacaa

SEQ ID NO: 6670 - DNA, 600 bp, Rattus norvegicus
cscgacttatytatgaggactacgtgtccatcctgtcccccaaggaggtcagcctggactcccgtgttcragaaggcatcaataggaagatgcaagaaccatcaccacacacattcgacgacscacagctgcagatctacaccctcatgcaccgggactcctaccctygcttcctcacctcccccacctaccgytythtgttactccagggggccccacagtcctytgaggcctaggtcatttgtcacacagatgttctcccatgggcagcctaggggtggccctgctccacttggctgaaatagactgcaatgccatgttctgctytgtcctagcctgctcctactgggggttctcctacatggtgcctmagaccaccaccctccagtcktgtgcccagragatgttctcatggagaacatcctgtatagcaacaagtttgtagcaggagaacgttaattcctcagaagcagatatagaacctcagagtcagactcaaatgaagagcccatttatattttatatattaactttaaagttgtccatactgtatgttttatcaaaagaaaaaaaaagacctttcaaaaaaaaaaaaaaaaa

SEQ ID NO: 6671 - DNA, 518 bp, Rattus norvegicus; identical to SEQ ID NO: 2575

SEQ ID NO: 6672 - DNA, 600 bp, Rattus norvegicus
tccttcgcctccgcttcatgtgtcagcagcaaaaaggcaatgagactcttgagctccggtggcatggcatgacctccttggatgttgccttcttgctactctatttcgatgacactgatgagagtgctcaggctaaacttcttgcaagaggtcaagaggagttaactgatagggaatctccttttcttatgcggagtgtccggcaaacatgcagcatagcatctgatgtcccttgtccttctcaggaacaggataggtctgtaaataaccagtgttccctccatccttacaaggtcagcttccatcaattgggctgggatcactggatcattgctccccgtctctataccccaaattactgtaaaggaatctgtactggagtattaccctatggtctaaattcacccaaccatgccatcatacagagccttgtcaatgaactagtgaatcgcagtgtgcctcagctttcctgtgtcccttataagtttcttcctatgagtatccttctgattgaggcaaatgggagtatcttgtacaaggagtatgagggtatgattgctcagtcctgcacatgtagataacagtgaacttgtagctagc

SEQ ID NO: 6673 - DNA, 1400 bp, Rattus norvegicus
gttcctaaacccagcagaagtcacctctacaataccgtccggctcttcagcccctgtgcccagcaggagcaggctcccagcaaccagatgacaggacccctgccaatggtggacctgctatttaacctggaccgggtgactgccatggaacacttactcaaatcggtcttgctatacactctgaacaactccgctgcttcctcctccactgtgacctgtgtgtgtgaccttgtggtaaaggagcccatgtcttccagcaaggctaccccaagagcgccatactcatttaccctgaggaaacacaggtggattgagatggatgtgacctccctccttcagcccctggtggcctcaagcgagaggagcattcacctatctgtcaattttacatgcacaagagaccaggccccagagaatggaacgtttaatatgcctctctcagtgccgccctcgctcatcttgtatctcaatgacacgagtacccaggcctaccattcctggcagtcccttcagtccacccagaggcattcacagcatcccggccaggrcagtgtgactacccgtcctgtggaagaggaggctactgaggtagmamgakstcctcggcaccgtcggggacagaaaaccctcagctcagaaacaaagaagccacttacagcatccttcaatctcagygaatacttcagacagtttcttttccctcaaaacgagtgtgaactccatgatttcagactgagttttagtcagctcaaatgggacaactggatcgtggccccgcacagatacaaccctaggtactgtaaaggggactgtccccgggcagtcaggcatcggtacggctctcctgtgcacaccatggtccagaatatcatctatgagaagctagacccctcagtgccaaggccttcatgtgtgcccggcaaatacagccccttgagcgtgttgaccattraacccgatggctccattgcttacaaagagtacgaagatatgadagctacaaggtgcacctgtcgttagcatggggctctctacaacacctgagcctgtctggcagagcagtkccatgggccttagagggcctgggcagagagcttcatgtgaccaatctttytgtgtcactcagtgcacmttgtwtgagcaggggaagtgtgtgtgtgtgtggatgagcatkttgtgtgcmgtagccataggtgtacaggacacactggtcgttkccataaaccaagtggattatagctcmttcggagatctttttcttacccacgagtgtggtttccaatggacaaatttattagcataggtcttgagtggaaatgtagctgtgaacacttmagagtgctgtggttttacgcgtaacagaagaataaaccgttgstggcmaaaaaaaaaaaaaaaaa

SEQ ID NO: 6674 - DNA, 600 bp, Rattus norvegicus
aaggtgaaaaaaawawwwrrawrrggtgatttctactccaacatcaagacagtggccctgaacctgctggtcacagggaagattgtggaccacggaaacgggaccttcagcgtccacttccgccacaacgccacgggccagggtaacatctccatcagccttgtaccccccagcaaagctgtggaatttcaccaggagcagcagatcttcatcgaagccaaggcatccaaaatcttcaactgccggatggagtgggagaaggtagaacggggccgccggacctcactctgtacccacgacccagccaagatctgttcccgagatcacgctcagagctccgctacctggagctgctcccagcccttcaaaatcgtctgcgtctatattgccttctatagcacggactatcgactggtgcagaaggtgtgcccagattacaactaccacagtgataccccctactacccatctgggtgacctagatgggccacagaggcctgttcaaggaggctggctgtctggacactgggcagggaaagggatgggcctcaggaagggagggggtggagaggaagagaggccaagtgggtccgggtcagg

SEQ ID NO: 6675 - DNA, 600 bp, Rattus norvegicus
tctggggatggcggggcaggggctggggggtaaccttgggggtgcacttgccggcccactcggaggcgcgctgggagttcctggggccaaagagtcgcgcgcttttaattgccacgtagaatatgagaagacaaaccgcgctcgcaagcaccgcccgtgcctgtacgacccgtcgcaggtgtgcttcaccgagcacacgcagagtcaggccgcttggctctgcgccaagcccttcaaagtcatctgtatcywcgwskccttcctcagttttgactacaaactggtgcagaaggtgtgcccagactataacttccagagtgagcacccctactttggataacgcccccgtcctgggcccagagtttcccaccagatctcagtctcactaggtgggaccctccctgtataccccatgctcctgtgactgcccccacgtcttccactatgggtgaggtggagaacaacagccttcccccgggactatcagccagtgtggccctccatttccttgtggtactgagtgtccctaagactsrrrtgtcttcktsrmasgwkrarwkskmskggctakamkcmtgcmccwgawywtgastggttgtc

SEQ ID NO: 6676 - DNA, 600 bp, Rattus norvegicus
agctgtctggtacgccagacttcaggaatgggacaacttttacaaattttccaatagagcgaagactttagtgactcgaagaaccccaacggtcctttactacgaaggaatttctaggtatatggaagggcaagtcctccatcttcagaagcaaatagaagagcaggccgagaatgctcaggacagtggggtggagctacttaaggccttagagacccttgtggctcaaaataccactggccccgtcttctaccccaggctctaccatttgatggcctatgtctgtatactgatgggagacgggcacagttgtgacttcttcctaaacacagccttggagctctctgagacacaggggaatttgctggagaaatgttggctgagcatgagtaaggaatggtggtactcagcccccgagttgacaggagatcaatggcttcagacagtcttgagtctcccatcgtgggataaaattgtatcaggcaacgtaacccttcaggatgttcaaaagaacaaattcttgatgagagttaatattctggacaatcctttctaataattatgaatgagaacaaagattgcaaaaaaaaaaaaaaaaaa

SEQ ID NO: 6677 - DNA, 600 bp, Rattus norvegicus
cagaactggatgaagaaggctacatgactcccatgcatgacaagccaaaacaagaatatctgaatcctgtggaagagaacccttttgtgtcccggaggaagaatggagaccttcaagctttagataatccagagtatcacagcgcttccagcggtccccccaaggcagaggatgagtacgtgaatgagcccctttatctcaacaccttcaccaacgccttgggaaatgcagagtacatgaaaaacagcttactgtctgtgccagagaaagccaagaaagcatttgacaaccccgactactggaaccacagcctgccaccccggagcactcttcagcacccagactacctgcaggaatacagcacaaaatatttttataaacagaatggacggatccgccctattgtggcagagaatcctgagtacctctcagagttctcgctgaagccaggcactatgctgccccctccgccctacagacaccggaatactgtggtgtgagctcagctagagtgttttaggagcagaaacacacccgctccatttccccttctccctcctctttctctggcagtcttccttctaccccaaggccagtagt

SEQ ID NO: 6678 - DNA, 600 bp, Rattus norvegicus
tgtaactcacaggcgatgtcatcacctggcatcctgcacctgtaactyacaggkgatgtcatcgcctggcatcctgcacctgtaactcacaggkgatattatcacctggcatcctgcacctgtaactcacaggtgatgtcatcacctggcatcctgcacttgtaactcacaggktgatgtcatcgcctggcatcctgcacctgtaactccacagktgatgtcatcacctgggcattacacactggggawgaaatacttkraacatgttactgcasyggarakscmvktytwmwwyswaactkrskactctgggtttgcattccaatcattttgccgcagctagtagcaacatttatattaaaamaaaamaaaaaawctatagaggtggttttattaataagcttaagggtcccgctttgatgtcctatatcaaatgataattttgtgaaagctaaataactctatttttagggaagggcccaatcccgtggccctagacaaattaaatgttatattctggcctaggggagctatcacaatacctggcttcttaaccagataagaagttttttttcctttttggtcccttttaccaacacg

SEQ ID NO: 6679 - DNA, 600 bp, Rattus norvegicus
tggaaccatgaggaaggactggctggagcaggcacttctctcagagaaagccagagcctgtgcaaccaagaggtccagaggccagccacagytgggcagggctctccacagagcggactcaaggccctggagtgggcagtgtcgaggcagctgtcctctgtgatgactgtcagctgtgaagatctttgatgttcacggccaaggaaaagggkccattgaggccccagaggggtaggagagctgggaggtgcaggactctggttcagtagagagccctcccaccgggctttstgcatgtytgtatgtctgtacatgcagctgtgtgtcctkgawrmmarrmymwrwrmwtgtwttcacaggagccagcgagctcacatctgcatggtgtgtgtgtgtgtgtgtgtgtgtgtgtgtgtgtgtgtgtgtgagcactgggtggtgccttgcctgggagagggtggggagttctgctattctcaccacacatctgagataaacagctgggtgtgggcaaarmmrmwrmmwararwrrwggtccctgtggagttgtattgttcccataaattaacaaagrtaaaaaaaramarwmwwrrcggccgc

SEQ ID NO: 6680 - DNA, 986 bp, Rattus norvegicus; identical to SEQ ID NO: 2584

SEQ ID NO: 6681 - DNA, 600 bp, Rattus norvegicus
tacgttggtggggaggtgtatgccgagtgtcttagtgacagcagcatctttgttcagagtaggaactgcaactttcaccatggcttccaccccaccaccgtctgtaagattcccagcagctgcagcctcaaaatttttaacaatcaggagtttgctcagcttctggctcagtcagtcaaccatgggtttgaggctgtgtatgagctcacsargatgtgtaccattcgaatgagttttgtcaagggctggggagcagagtaccaccgacaggatgtaaccagtactccatgctggattgagattcacctccatgggcctctgcagtggctggataaagtcctgacccagatgggctctccgctgaaccccatttcttctgtttcatagtgcagaagtattcttttcaactatatttttagtggacttgttttaattttagaggaatttccagcacagatactgtgagctgacatggaaaaacagatattatggcttattttttctacgtaattgtgaccaacacatttgtattttatgatattacatttgtttgtattcgtgttcattgtgattaactttcaaaagtattgtaaacgacat

SEQ ID NO: 6682 - DNA, 600 bp, Rattus norvegicus
aatgcccctgggggcttccgagtggcgtccttaagcccagcgcggactccgcctgcctctctctaccacggctatctgccagagaatggagtcctgcgcccagagcctaccaagcagcagccataccagatgaggccttcactctatgctctgtcgccggtcaaggaacctgccaagacctcatcacgtgccacctcgtcacgcgcttcgtcacgcactgtctcacctcgtgctgcctccccggccaagcctagctccctggacctggtgcccaacctgcccagagcaggcctcccaccgtctcctgcgcttcctcggccttcccgctcctccccaggcctctacaatgccccagtccaggacagcctccagcccactgccgtgagccccacctacagcagtgatatctcccccgtgtctccctccagggcgtggtctcctcgagccaagcaggcccccaggccttccttctccacccggaatgctgggatcgaggcccaggtgtggaaaccttccttctgcttcaagtaacacatcccagtgcctgtcttgtcccccctttcggagggccagagagaagatgtggcaggatctagctca

SEQ ID NO: 6683 - DNA, 1400 bp, Rattus norvegicus
gttaaaactcaaaccaaaggtgaaatcccaaacctgctacctgaaggttctgtagacgaagacaccaaaatggtcctggtgaatactatctacttcaaaggacggtggaaaactccatttcagaagagacttaatgggctttatcctttccgtgtgaacttgaatgaaagcaaacctgtccagatgatgtacctccgtgaaaagctgaacattggatacataaaggacctgaagactcagatcctagaacttccgtatattggaaacatcagtatgttcctgttgcttcctgatgagatcgaagattcatccaccggcttggagatgctggaaagggaaataaacttcgataacttcaacaagtggatcagcaaagagacactggatgaagatgatgttttggtctacattcccaagttcaaactggcacaaaactacgaactcaagcccattctgcaacgcatgggcatggaagatgccttcaacaagggcaaggccgacttctcgggaatgtctgagagcaatgacctttttctttctgaagtgttccatcaagccacagtagatgtgaacgaggagggcactgtggcagctggtgggactggggcagttatgacagggagaactggtcatggtggtccacagtttgtggctgatcatccctttcttttctttatcatgaacaacattacccgcaccatactatttgttggtagattctcctcaccctaaaaggggaagaccttgttttcacattagattttgaagcatgcgctgtaagcctcagaattgcttcttcaagtgccaaaagtcaaaatattttcctacacatttttatactgctatacactaaatacaaactgtacaacagtctgcactgcttacagtataactccgttaatgatttttttccaaacgatgtgtgtttagttcatccttattactgctttgtcattatagctttagtttttacagtgttatttattatttacataatggttgttttacagattgttgtcctctgtctatttaataagactataatactacagaagcagataatcagataattttctatttaaagaaaaacagccattcaatgtaattatgaaggaaaatatgatttttctatgatttctcatgataatcacccagaaaaatgtayttaacaaaagacaacaacatgttatatgtctatyattgtatatcttatgtacatatctgcaagtcatctataattagaaatacatcatacttccttactcaatgctatttgttgttctctgttaggtatgcacaacagaatacttagcaatccttgtttgttagtcatctttcaatcactgtaacaaaataccagagataataaagttcaaagatttaaaaaaaaaaaaaaaaaa

SEQ ID NO: 6684 - DNA, 600 bp, Rattus norvegicus
agacatgtgtatggagagctggacctgcagattcgaagacgacctactgtataaatgcccaggaggctcgaatgggctggggcacatggcctattgcagtcttggttatggccattctaacgcaaaacatagctagctcttgctttaatttgggtgtgaagactaagacagattccagcatagagatgctatgtatttcatagacacgcctttccaaacaggctattggacaaggggagttagatttgagttgttccacctccaaagggtctgagcattagcttaattaagctataattaagccttcatagctcataagatgaaagccatcatttatcactgcaaatgggtacagctcacagatcagaggtcttgcccatgagcaggggggatgtgcccaatacctggcctcaattaagaattctgattcccactcagtcttttaggggtaacatactccccaaaggaaagggtgtccacaatcagatcctaaaaattctattcccctttcttggaatcaggttgaaccctccgtattaaaatatttttttccaggaattaagcccaacatcatttttcttcctggcaaagcctttctct

SEQ ID NO: 6685 - DNA, 600 bp, Rattus norvegicus
ggagatccgcaaggtgctggacgccaacagctgccaaagcgagctgcacgagcgatacatgctgctgtgcgtgcaygrsrcacccggccacgagaactttgtgcagtgggagatggaggtgtgcaaactgccccggctgtctctcaacggtgttcggtttaagcggatatcgggcacttccatggccttcaaaaacattgcctccaaaatagccaatgagctgaagctttaacaggctgtcaggaggggcggcagaggcccaccagtggacttggctgcttgggccaaacctgcatcccctgggagaaaaactgcaggatgaattggtgtgtctcccctgctggcacttgtccccttccaggcccttctcagttttttcttccatgtttgtgggggatgggaagtggtggttcctcctcccacattcacccctgcccagaagtctctcccttcccctctacccccgtacaggaggcaaaggaaggggaaggggttgggggggcagggctccccctcggtactgcggttgcacagagtatttcgcctaaaccaagaaaatttttattrccaaaaagaaaaaaaraaaaaaaaactcgtgcc

SEQ ID NO: 6686 - DNA, 600 bp, Rattus norvegicus
gcttctacggccccgagccccctgtgccctgtggggagctgggaagcccgggagggggctccagcggcgactggggctctatctactccccagtttcccaagctggtagcctgagccccacagcctcattggaggagttccctggcctgcaggtgcccagctccccatcctgtctgctcccgggcaccctggtgttctcagacttcttgtgaagggcccaaacaggccctgggcggtgggcgctggcagaaagggagggagtcagagctgtctgaaatggaaggtagtggaggcactcgagcatctcgccccttctggctttcattagtcaggtccctgatttaaccaggattcgcacagttccttgctgctgtgcgtgcacaaaggacattgcaggctgatctcctcttaaccctcctcagtgtggccacctcaaactcccgctccaagcagaggagagccgtagcactaaatagttgggagactcccatacttcctggtgactccgccctctttcaaatctgcgggcctccaaccaccgctttctccagagtgacctaatccagtgttgcgtcttacctcactggctcttgttccata

SEQ ID NO: 6687 - DNA, 600 bp, Rattus norvegicus
cctgagctgcagcagaatccactggtgggccgagtgatcgacatctttgacacagacggcaacggggaagtggacttccgcgagttcatcgtgggcacctcccagttcagcgtcaagggtgacgaagagcagaagctaaggttcgccttcagaatctatgacatggataatgatggcttcatctccaacggggagctcttccaggtgcttaagatgatggtgggaaacaacctcaaggactggcagctgcagcagctggtggacaaaagcatcttggtcctggataaggatggtgatggccggatatcctttgaagagttccgtgatgtggtcagaaccatggagatccacaagaaattggtcgtgtttgtagatcacggtcaagaagactaaaagcttaaaaataagagaggtgtacatctgtgcctttctttctcgaggttgtgtacatgggagaagacaacaattctcatggagtattaggaactcctttcgtttacctgtggcattcagactttttaacaaacagattgttaacttcctgttgtaacaactagcagaaatatatttatctttgcckagcaaaaaaaaaaaaaaaaa

SEQ ID NO: 6688 - DNA, 600 bp, Rattus norvegicus
gcatggtatattgctctactgatgtgtgttctgcacacgcttttatcagggaaacgttttgatgtaggatttattgctatctaactgaaaatgatacaaatatttttatttatgattatgaaatagctttctcttggataggatggattgttttgtttggctgtgcatgggattgaacccagagcctcgtgtgtgctaggtaagcgctctacctctgagctagatccccagatccaaaacatgtgtttctcttttttgttttgtttttttttcttagccattttgtgccaattacagtttctctttttgaaatttgcctcatgaaaaattagacagtcctattttcaaatctatgaagttttcttttagtaattgcaaaggttcagaattatgcagctgtaggctgttgggttaggcctttgcttacagtggatttttacactgaagtatgcagctaccccaagtgtgctggtcacatgtcgagcattgaccctttcctttaccctttgaaaaaccacattacactttccgcacactcagattgatgtgctgcctgacagccatttcagttttaacttcagagtttataaaacgttcatg

SEQ ID NO: 6689 - DNA, 600 bp, Rattus norvegicus
atcttccgacagcaccaacacaaccatagaggacgaagatgccaaagcccggaagcaggaaatcatcaagaccacagagcagctcatcgaggccgtcaacaacggcgactttgaggcctatgcgaaaatctgtgacccaggcctgacctcatttgagcctgaagctctgggcaacctggtcgaagggatggatttccacagattctactttgagaacctgctggccaagaacagcaagccgatccacaccactatcctgaacccgcacgtgcacgtcatcggcgaggatgcagcctgcatcgcttacatccgcctcacacagtacatcgacggccagggcagaccccgcaccagccagtccgaagagacccgtgtgtggcaccgccccgacggcaagtggcagaatgtccatttccactgctcgggcgctccagtggccccactgcagtgagagctgcgcctggtttcaccggacagagttggtgtttggagcccagccgccctcgggcgcacggcctgcctgtcgcatgtttgtgtctgcctcgtcccctcccctggtgcctgtgtctgcagaaaaacaagaccagatgtgatttgttt

SEQ ID NO: 6690 - DNA, 600 bp, Rattus norvegicus
agcacatgggaaggaagggacaatcttcctggttaccggagaacacgtggactactccagcatcatctcaaacacagaagtcgcattcaacaacctcctgagcctcgcccaggagctcgtggtgagactccgttcccttcagtttgatcagcgggagtttgtgtgtctgaagttcctggtgctgttcagctcagatgtcaagaatcttgagaacttccagctggtggaaggcgtccaagagcaggtcaatgctgccctgctggactacacactttgcaactacccacaacaaactgagaaatttggacaactgcttcttcgactaccagaaatccgggcaatcagcaaacaggcagaagactacctgtactacaagcacgtgaatggggatgtgccctacaataaccttctcattgaaatgctgcacgccaaaagagcctaagttcccacccctagacccttgctctagggacagagactggagggagaagaagaggaggaggaggaaggaagacaaacaatgctctgaactgctccaagcaatgctaattacaaacttggtttaaagacactgaattttgaaagcataataatgaatag

SEQ ID NO: 6691 - DNA, 1400 bp, Rattus norvegicus
ctctttggattctgctcagcatttcctcaccagtaacctctcctccatcgttattggagaaacaaagaagtttgggagaacaataataggctactttgaacattatctgcaatgggtcttgtacgccatcacagagaagatgacatcctgcaaacccatgattacagcaatggactctgctgttaatggcattctgtgtagctatgttgctgaccctctgaatctgttctggttcggcatagggaaagccaccatgctcttacttccggctgtaatcatcgctatcaagttggccaagtactatcgcaggatggattcagaggatgtatatgatgatgttgagactgtacccatgaaaaatttggaaaacggtagtaatggttatcataaagatcatttatatggtgttcacaatcctgttatgacaagcccgkcwcgakrctgacaactgamgtggaaattgcttgaacatcaagatagctaactcggaaagaatcccagactttggatagtttctgagtcttctagaattttccaagaagaaaccatggtggcaaatgcggagactcgggcgggcactgggaacacagcacagtggtcttagggaggtgctttgtcaggaatgaacagtcatggttataatccacgtttccattgctactcacgaatgattctcttctgttttgtttttaaaatttttttacactgaatttctatttagacactaaaacatataggggtgcttgtcacccggatacatttatctgtgasccagctattcggatgtcatggctgggtacctaacttacttccatatgtgaagtgtgctaaactcaaaccagtttamaraaamrawrwawwwtgtgtatagtaaattgtatattcacccttttmccacggccggttttykrmacaratgaatactctagattttwmtycsrmrygaggwtwckgwygrggtggggttgacttagtgatgctgtagaagggaatccgcatgcactaaaaagtgtgtctgcctaaaagtgtgtacagcaggcacaaccttccttgtggatttccgtctgctcactgcagatctgcctgtggtttagaaatagaattcaagagccatcaaggagtgaccagcttgacaccactgccaaattcagaatgaggaaccttgagagaaggaactgtcgctcagccagaagcagatgaagccactggtcctggttcacagtttagtgtcatgctctggtttataaggatgggcattacgttcggtgttatctggttatctgcgagattctaaaccgaggtgcaagagctcctatcctgattctgagatttgaaataaagcatgawtgamcaawraaaaaaaaaaaaaaacaatcgcggccgcaagcttattcccttta

SEQ ID NO: 6692 - DNA, 600 bp, Rattus norvegicus
  misc_feature (592)..(594): n is a, c, g, or t
tgtgtmcataataaatcttttaaaawtghwwmwaawrwrawwmawraraawwmctttagataagctgtgtgtgctttgtaaataaaatattgggagaagactccatcagtatcaaaaaattgagataaatctacatgagaaattatatgaaacagtttacttgcctgttgagtgtaggtgttygttaggattggagggttaggaaccagacagtgataagtactttctttgtggaccaaaccatatatgacctgtcctagatataagtctggtaggcttgtgaaggtttgaagtgtctttaaaaaggcagagggcgtggtggtgtacagcacagacaggtggatctttgggctggtttgtttttgacaacaaatttaaacatgtcttggaagarggaatctgagaaagctataagatggtcatagcctgctggagcgtttcttattatgatgagtagaagctgcccatcggtgtgtccctggcatggctgacgccaaagcgcacaccaggcagcgagccccgccgtcacggcgcgcgccccaggggaaagtcgcgagcgcggcgcaccggctctcgacaccccgcaaaaagnnngggggc

SEQ ID NO: 6693 - DNA, 600 bp, Rattus norvegicus
ttcttccctccacccaaccattcattgcctactcccacccccagacctccatacagtatagacttataactcagagctgatgaagccccacccctgcctctcsacccctccaccaggccctttggtgctatccctttccatagttaagcactggatacctcctggtccctggctaggacctttccctctcattcctattctttctttgagtaaagaggtaaacaagatcaacgtgggacgccctcccctgagacgcgccttccttctgcttccttgacccagctccgcacaattccctctccccactytgccccattcccatgtccccaagccttctggggaccaagatgttgggcacaaatcaggatcctaaatggtgctgccctgctcgtaactgggaactgtatgaaatggggaatgaatggtttgtggtctatttaatctgcttccttctgaaggaagtctgggatatgatgagagattccagaagggtctctactctccctcccctgtgctgccctcctcccaaggacacagggcaaaactgccatctcaagaataaaccaaggaactgtgmwmwwmaaaaaaaaaaaaaaaaaa

SEQ ID NO: 6694 - DNA, 600 bp, Rattus norvegicus
agagtgtcccagcgacgatgaggacattgacccctgtgagccgagctcaggtgggttagccaaccccacccgagtgggcggccgcgaaccatacccaggctcggcagaggtgatccgggagtctagcagtaccactggcatggtggtggggattgtcgcagcagcagctctgtgcatcctcatcctcctctatgccatgtacaagtacagaaaccgggatgaaggctcatatcacgtggatgagagtcgaaactacatcagtaactcagcacagtccaatggggctgtggtcaaggagaagcagcccagcagtgcgaaaagcgccaacaaaaacaagaagaacaaggataaggagtattatgtctgatctcaagattcgaaaaggacacttgtatagaaatagtcttcattttatctgagacataatataaacttatttactttcctttttatgaagcacatacaaaagaagacagggaatgcgatcaggagggaaaactctttttaaaaaaaaacaaacaagtatgtcatgctcttgtttctcaaaaaaaaaacatacacaaaaaaaaggaaagagagaaaaaaaaaaaaaaggaattc

SEQ ID NO: 6695 - DNA, 1400 bp, Rattus norvegicus
agaatcagttcactgtagcccagtatgagaaatttgaagaagattatgtcaagaaaatggaagagtcaacactcaagtttrratcagagatcttagggagtgtttgctcctcagtctcctttggcaggcactaaatttagaggaaaagcacattcatggttcagtgaaagaaaatgttgtatattatttttctgtatttactaaaattcatggtcttcaaatatacaaaaataaagtaagaatgttctcctaawwawmwwmmwwamaaaarrwwmawawwmtagtttcctttttactttctaattatcaaaataatacaattttaagaggcttttaaacacagtgcgtttttagtttcagtcactaatagcttcctgtctaaatatggtctaggttacccctagaggaagattacatttcattaactctaattcaatgtcatctgtggttattttacattttaaaatattacgctttaatgttgccaaattatttaaattttttatgcccagaatctcccactcccccttcagccctaatttagaaatattaatttttaacaaaagaatgaatagtacccattttatacgatttaaatcaaggaaattaaatacctaattattttgtccttcatttcatatactgaagctactgtaaaactattacagagaaatgctctgtaggtttgttctagatattctaaattactgattctattgttcgctatctyaygwssattgacgcatcagcktctgagaggaaaactccatacaataaataaatttctgtaatctctcttcttggttggctagtcatcacatcaggctcattggccctctggaattaaccattcctgagtagacaaatacttgacaggttttgaaccagcaggagacatgaattcaaaacactttagatctattttcaggaacgaatgcttagtgaaaagtgaaaacttaaaggtaaatgagtaaagtactgtaasatttaatttgatatataasattcgtgacatgagaaaactgatgaagcagccgccmgwtaatgctacataatttaatgaagaacctgwwgggacatgagagaagtcataaaacagcagtgcaactcagactatattactatagaacaactagtctttaatgtatcaatatcatggtgttgatagaatgttattggtttaccagaggttactactggagaaaatgtgttaaagttacaatttcttaccatttcatgctgattatctcaagttttagaattatgttaaaagaatgtcttactaattttacattttctaaagtcaaagtaattttaactaaacaacagtaatgactgtctaaaataaaccttccttaaataaagtcaacaatgaattaatttaaaaaaaaaaaaaaaaa

SEQ ID NO: 6696 - DNA, 1400 bp, Rattus norvegicus
tgaccacaaattcatagagaacattggctatgtcctttatggaatatacaatgtaactatggtggtcgttctgctcaacatgctgattgctatgattaacagctcataccaagaaatcgaggatgacagtgatgtagagtggaagtttgctcgttccaaactctggctatcctacttcgatgatggaaaaacattacctccacccttcagtctggtccctagtccaaaatcgtttgtttatttcatcatgaggatcactaacttttccaaatgcaggaggagaagacttcagaaggatctggaactgggcatgggtaactcaaagtccaggttaaacctcttcactcagtctaactcgagagtttttgaatcacacagttttaacagcattctcaatcagccaacacgatatcagcagataatgaaaagactcataaaacggtatgttttgaaagcacaagtagacaaagaaaatgatgaggtgaacgaaggtgaactgaaagaaatcaagcasgakatctccagccttcrttacgaacttttggaagataagagccaagcgacggaggaactggccatcttgattcataaactcagtgagaaactgaaccccagtgcgctgaggtgtgaatgagggagccacatgcagtgagactttgactctggcacaaatgtgggcaataatattcctaagtatgaaatacttgaaaaaccgttgtgtaaaaactctagtgttaataccttcaccatgcggagctttaaaattaacctagtgggccacaattcccattacgtgaaaatgatcccaaggttggcctcagcactccaagcagtgacatgctgttgtacttagaagcccagtattaatgtcactgatttttttttttttttgtcatttttgtctttatgtcacctgttggcctccaagagttccttgggggacagggaccacatcaatctcatctttatgtctccaacatttagtgcagtgcctgatacacagtaggtgcwtggtaaatgttgaacccagctggcctggacagccagtagcatccaagaacacgaaagmccattgctatgtagcmtaccttctcatccgaacgcttgaagcgatttttttaaaaatagaaactgaaggtgttttacgaccagccatgacgtgtggagatctttctcagacctttagacatgcactgacagttctagggcttttgaaatgccaggtttaacagtgaaatgagctcattggaaagatacatatttaatttcatagggttgttcaaaaacaatcattaaagatttttctaaaatatatgcttgtgtcctttctctttgtatctgtggtgtcatgatgtaaatttggtcaataaagaatgcttttctaaaaaaaaaaaaaaaaa

SEQ ID NO: 6697 - DNA, 600 bp, Rattus norvegicus
cctctgctctatggaaacccaacactttatggaaaggaagtggacagagacaaaagggccaaggagctcaaagtcagagtcattaaggccaaagggggaaaaggagacgtcccagacctgaagaagacagagagtgaaggtgaacaccgccagcagggcacagctgaggacacacaccccacatcactggacaggaagccttctgtctcggaactaacaaaccctgtccatcccagtgcgaattctgacactgtcaaagaagacccacactctgggggctgtatgataatgccacctatcaacctgacaagcagtaatttgttggccgcaaatcccagttcaaacctctcccaccccaattcacggtgagctagagtgagaggaggcttgattaagtaaggcgtcctcctgtgcggcgcattgcagacacacgtgtacgatgtcagtatggaccggacctgaaaaggatcttctcaagttcgagtcaagtagtaacagggcattccctgaggagttcttgggaatgttatgtgagaagtgtttttcttagctatataggtattaaacttttttttgagacaaattgccacagagcccagg

SEQ ID NO: 6698 - DNA, 600 bp, Rattus norvegicus
atgatctgttcgattcatttggccgtttactgctgagattgtttattttcattgattagccatttgagttctttatatattaatattaataatatatattctgttggaagaagagctggcagagatttctctcactttctaggctatctggtaaattggttgttgtgcttctgatactggatggaattttacttgcccattctagttcttaattcttgaggtattggagattaattcagaaaatagttgactatgttcatgtcttaatgtcttttccatatagtacttccaaagtttctgcacatattaaagatgttcatcatgtttttgaataaaattctgtgtagcataggagagagttctcaaactacggacttcccacatatcaacattcagttttcacagcatttaatttttgggccaggtctgtacagttcaaattactctcagcaacaaagtcttccagattcctactaggatagctcattcagccccatttaaagcattccgccactttccaaatctaaagtccccaaatctacattcttccataaataagcacaggcagacctatcatagcaatagccagtacctggtacc

SEQ ID NO: 6699 - DNA, 1400 bp, Rattus norvegicus
caaaagcaccattgtgaagcagatgaggatcctacatgttaatgggtttaacggagagggcggcgaagaggaccyrcakgytrmwrggwkyaacrgmgatrgtgagaaggccaccaaagtgcaggacatcaaaaacaacctgaaggaggccattgaaaccattgyggccgccatgagcaacctggtgccccccgtggagctggccaacccyrasarcsagktsagagkssacyamatkcwgrrcrtsawraacrwscyraaskwkgmcwtysmacctgaattctatgagcatgccaaggctctgtgggaggatgagggagttcgtgcctgctacgagcgctccaacgagtaccagctgatcgactgtgcccagtacttcctggacaagattgatgtgatcaagcaggccgactacgtgccaagtgaccaggacctgcytcgctgccgcgtcctgacctctggaatctttgagaccaagttccaggtggacaaagtcaacttccacatgttcgatgtgggcggccagcgcgatgaacgccgcaagtggatccagtgcttcaatgatgtgactgccatcatcttcgtggtggccagcagcagctacaacatggtcatccgggaggacaaccagaccaaccgtytkcaggaggctytgaacctcttcaagagcatytggaacaacagatggctgcgtaccatctctgtgatyctcttcctcaacaagcaagatctgcttgctgagaaggtcctcgctgggaaatcgaagattgaggactactttccagagttcgctcgctacaccactcctgaggatgcgactcccgagcccggagaggacccacgcgtgacccgggccaagtacttcatccgggatgagtttctgagaatcagcactgctagtggagatggacgtcactactgctaccctcactttacctgcgccgtggacactgagaacatccgccgtgtcttcaacgactgccgtgacatcatccagcgcatgcatcttcgccaatacgagctgctctaagaagggaacgcccaaatttaattcagccttaagcacaattaattaagagtgaaacgcaatcgtacaagcagttgatcacccaccatagggcatgatcaacaccgcaacctttcccttttctccccagtgattctgaaaaccccctcttcccttcagcttgcttagatgttccaaatttagtaagcttaaggcggcctacagaagaaaaagaaaaagaaaaaggccacaaaagttccctctcactttcagtaaataaaataaaagcagcaacaaacagaaataaagaaataaatgaaataaatgaaactcaaaatgaaataaatattgtgttgtgcagcattaaaaaatcaaaataaaaattaaactttag

SEQ ID NO: 6700 - DNA, 600 bp, Rattus norvegicus
gggcgaggccggcgcagcgggccggagggcgctggarwcsswrcggmgmgtgggmgacggmgtgcagcgcaaccacgagacggccttccagggcatgcttcggaaactggacattaaaaacgaggamgatgttaaatctttttctcgagtgatgahccatgttttmaaagatggcgtaacaaactggggcaggattgtgactcttatttcttttggtgcctttgtggccaaacacttaaagagcataaaccaagamagctgcatcgmacctttagcagaaagtatcacagacgttcttgtaaggacgaagcgggactggcttgtgaaacaaagaggctgggatgggtttgtggagttcttccacgtacaggacctagaaggcggcatcagaaatgtgctgctggcttttgygggtgttgctggagtaggggctggtctggcatatctaataaggtagcttgtgagtgcaataggtgactctaaaacctccagccaccaactacatgcttccgtgagaacaaatgtgtttatgaaggtgctcttgaagctgcccgggattttaacagggcagaaagaaagtggctacaggattgtggctaa

SEQ ID NO: 6701 - DNA, 600 bp, Rattus norvegicus
acagttaatttcttcatcttcctcaagattctcaagcttctcatttctaagctcaaagctcatcagatgtgcttcagagactacaaatacagattggcgaaatcaacgttgctcctcattcctttgttgggggttcatgaggtcctcttcactttcttccccgacgaccaagttcaaggattttcaaaacgtattcgactcttcatccagctgacactgagctctgtccacggatttctggtggccttgcagtatggctttgccaatggagaggtgaaggcagagctgcgaaagtcatggggccgcttcttattagcccgccactggggctgcagaacctgtgtcctggggaagaatttccggttcctggggaagtgttccaagaagctgtcggagggagatggctctgagacactccagaagctgcggttctccacatgcagctcacacctggcctctgagaccctgggagacgttggggtacagcctcacaggggccgtggagcttggccccggggaagcagcctgtctgagagcagtgagggagacttcaccctggccaatacgatggaggagattctggaagagagtgagatctaa

SEQ ID NO: 6702 - DNA, 600 bp, Rattus norvegicus
aagttcatagagtctggacggaaatggttctgccacgtggatgatgacaactacgtgaaccccaaaagcctgctgcacctgctttccaccttctcttccaaccaggacatctacctggggcgacctagtctggaccaccccatcgaagccacagagagggtccagggcggtggcacctcaaacacagtgaaattctggtttgctactggtggggctgggttctgcctgagcaggggccttgccctcaaaatgagcccgtgggccagcctaggcagtttcatgagcacagcagaacgggttcgactgcctgacgactgcacggtgggatacattgtggaagggctcctgggtgcccgtctgcttcatagccccctgttccactcccacctggagaacttgcagaagctgccatctggtgctgttctgcagcaggttaccctgagctatgggggtcctgagaacccgcacaacgtggtgaatgtagctggaagtttcagcattcgacaggaccctacacggtttcagtcagtgcactgccttctctacccagacacccactggtgtcctatgaaaaacaggggtaaggaagcttttcagtaa

SEQ ID NO: 6703 - DNA, 600 bp, Rattus norvegicus
ttcagtgggttggatccatacctttctcccatggtgccccagctagggggtccggctctcagccccctctcgggcccctctgtggggccatccttggcccagtcccccacctccttgtcaggccagagctatagcacctacagccccgtggacagcctggaattcaaggaccctacaggcacctggaaattcacctacaatcccatggaccctctggactacaaagatcagagtgcctggaagtttcagatcttgtagaagaggcttcatattctcccttccagcggaatcaccctctytggactccggctgccacctcctgcttagattccaggagagtagctctcagcaagcatcagcaagtagcaatcctgccaaaggctgtgaaaaattcagccccaggtgtaggccaccctcagctccattagagtttaacccctttaccacctaccccaagcaatgaaagggacttcctctcccaagacagtccagcagcaaccagtagatagcatgaccgatgtgtatatctgatgctttycccagtcttcagtaaaggtgctgagaacttgcwmwrrararaaaraaaaaaaaaaaaaaaaa

SEQ ID NO: 6704 - DNA, 600 bp, Rattus norvegicus
ccatcaacagactttgatagaattcacagcacmgtgaaaagtyccagatctgagctgaagcacgagaaatcttggagaagacagaaaatctcaggcactcgagaacgcaaagcagccactaccctgggattgatcttgggcgcatttgtaatatgttggttgcccttttttgtaaaggaattggttgttaatatctgtgaaaaatgtaaaatttctgaagaaatgtcaaattttttggcatggcttggttacctgaattctcttataaacccactgatttataccatctttaatgaagactttaagaaagccttccaaaaacttgtacgatgtcgaaattaggatttaaaaaaaagcctatttttaaagggtagaggctgtatttcttggggggggagggataactaaatgaatgtaaagtaataaaagattgaaatttttagagaaaawawawaaaramwgctaaaattataagaggataaatttatttttaatagtaccaagaaaataagatatactaatttggccatcattttaatgttctcaaaattaggaaataatttaggcagctcagctcataatattttttctatgcaatat

SEQ ID NO: 6705 - DNA, 600 bp, Rattus norvegicus
tggtctctgaggacttagtggccaaggtcagtgactttggcctagcaaaggcagagcttaggaaggggctggactcaagtcggctgccagtcaagtggacagcacccgaggctctcaaaaatgggaggttctccagcaagtcggatgtctggagttttggggtgctactgtgggaagtcttctcatatggaagagccccataccccaagatgtcgctaaaggaggtttcagagrytgtggagaaggkttaccgcrtggasccccccgacagctgsccaggcyctgtgcacaccmtcatggrcagctgctgggaggmtgagccytmgcgcagmccaccgttcmgcaaaatagtggagaagctgggycgtgagctccrcagtgtgggcgtcgcagcccccsccgggggacaggaggctgagggctcagctccmacacggagccaggacccctgacccytgaactggaaagcaagaggacacagatgtagggtcacagggccagggtgagccagtgcacaggctccggagcccctggratccccgktactgggacaccccataaagagtgwttggaaggawwwwrwamaaaaaaaaaaaaaaa

SEQ ID NO: 6706 - DNA, 600 bp, Rattus norvegicus
tgtttgcctctctaccaggaatcatatttactaaatctgaacaagaagatgatcagcatacttgtggcccttattttccaacaatctggaagaatttccaaacaataatgaggaatatcttgagtttgatcctgcccctacttgtcatggtcatctgctactcaggaatcctccacaccctgtttcgctgtaggaatgagaaaaagaggcatagggctgtgaggctcatctttgccatcatgattgtctactttctcttctggactccatacaatattgttctcttcctgaccaccttccaggaattcttgggaatgagtaactgtgtggttgacatgcacttagaccaggccatgcaggtgacagagactcttggaatgacacactgctgcgttaatcctatcatttatgcctttgttggtgagaagttccgaaggtatctctccatatttttcagaaagcacattgccaaaaatctctgcaaacaatgcccagttttctatagggagacagcagaccgagtgagctcaacatttaccccttctactggggagcaagaagtctcagttgggttgtaaagtaagtagcagtccccctttt

SEQ ID NO: 6707 - DNA, 624 bp, Rattus norvegicus; identical to SEQ ID NO: 2611

SEQ ID NO: 6708 - DNA, 600 bp, Rattus norvegicus
gcgaaagaaacagataagtacattaaggagtttggctttctgcccaccacccccagtgaacagcgtcaaaggaagatacagaaagaccgattggtggcagaattcaccacagcgctaacaaactttcagaaagtgcagaggcaagctgctgagagagagaaagagttcgtggcccgagtgcgagccakttccagagtatcgggtggctttcctgaagacagctcaaaagmgaagaattttgtatcttgggaaagccaaacacagcctcaagtgcaagtccaagatgaagaaatcacagaggatgacctccggctcattcatgagagagagtcttcaatcagacagctggaagctgacattatggacattaacgaaatattcaaagacttggggatgatgattcatgaacaaggagatgttattgacagcatagaagccaatgtagaaagtgcggaagttcacgtacagcaggcaaaccagcagctgtcaagagcggcaaattatcagcgcaaatccagaaaaaccctctgcatcatcattttaatcctggtggtcggaatcgtgatcatcttcttcatcgtatggggtctgaaaggctga

SEQ ID NO: 6709 - DNA, 600 bp, Rattus norvegicus
agggtcccctagcaccgttagggcagagcctgggaacgtgcattttgcagaaactcttgaaggttgttataagactgtgtagccggcctaccaggtccttttcatcctgagagggtcatgtccctcattttctgcagtggccatccctctggcccaaggcccttgcaaatgctccccatccctcctgcacssagtctccctcaggtctaagaattgccctccaaccagtgtttcatttgcctaggagtcccagtcagccctacgaacccacagacgtccgtgaatggaagccctccctgagccgtgtttctggcttcatatttcttccttcctctctcttcccctgtctctacacaccccctcagtggggatctgtgaggtctcatgctgagggcaggaacctgtggtgaggggtgcttggctgtcctcgtaatcactctcaaggttcccaagcttcttcacccccttccaagcttcaggcacctggggtgagcagcacagctcatctctctgycgcgttatgccctcccgctgttggggtgctgcttctggcaccccctcttgttgcacaaactgaagaggtaaaaggccagtcctagg

SEQ ID NO: 6710 - DNA, 600 bp, Rattus norvegicus
aaagaccccagcaacccacagagggtcctgcttctatcttcccagggcgggaaccacagtgggtgacaggtatggtaagtccttaggattggcccaggtggcctctgtgagcaccattagacaccagcaggtgcggtcacgctcttgtccttagggagaagctgaattagcagccccacagcccaaccccytgcttcctgttggcttttgggtagcacttgccgttaacaacagcagcctagagcctagaattgacgctttagtggcccaactgcagagccagtatatcgctctttccagcacaatcgggcagctcacagattaggaattaacagccaaaggctcccacagtagggaccagacggggctgagccccaccctggagtgggcttgcacctggtaggtgtgcaagaagccatttccccataagcactggcctttgacggccccctcagcctacccggtgtggccacccagtggtggctcagccattccctcccctccccctcccctcagtggaattgtggaagtgtggcaagtccatgttcggacaataaagcttgtgattaaggwwaaaaaaaaaaaaaaaaaaaaaaaaaa

SEQ ID NO: 6711 - DNA, 600 bp, Rattus norvegicus
agatgttctacatcgtgggcgccatcaccctgaacaacctcctgctgcgcaaggacatgtgctcctggagcaaaggcatgcagatmmggtacaatgtcagtcaattggaagaatggctacgtgacaagaatctaatgaacagtggggcaaaagagactctggaacctcttatccaggctgctcagcttttgcaagtgaaaaagaaaactgacgatgacgcggaagccatctgctccatgtgcaacgctctgmccacagcccagatygtcaaagtgttgaatctgtacacacccgttaatgagtttgaggaaagggtctctgtttcatttatccgcactatacaggtgcggttacgagacaggaaagactctccacagctgctcatggatgcaaaacacatctttcctgtcactttcccctttaacccatcctccctggccctagaaaccatccagattccagccagcctgggcctgggcttcattgcaagggtctgaagggctacccaagcaaatgtagagaacgcatttctcctcaaaacatgaacagttgtttccagtgagctactgaaaatacatttttaaaaaaaaaaaaaaaaaa

SEQ ID NO: 6712 - DNA, 1400 bp, Rattus norvegicus
  misc_feature (1360)..(1360): n is a, c, g, or t
cagaggtttgagaaaatgatcagcggaatgtacctgggggagatcgtccgccatatcctcctgcacttaaccagtcttggagttctcttccggggccagaagacgcaatgccttcagaccagggacatctttaagaccaagtttctctccgagattgagagcgacagcctggccctgcgtcaggtccgagccatcctggaggacctggggctgactctgacgtctgatgatgccttgatggtcctagaggtgtgccaggctgtgtcccgcagggccgcccaactctgcggggcaggtgtggctgcagtggtggaaaagatacgggagaaccggggcctgcaggagctgacagtgtctgtgggagtggatgggacgctctacaagctacatccccacttctccaggctggtgtcagtgacagttcggaagctagcccctcagtgcacagtcacctttttgcaatcggaggatgggtctgggaaaggggcagcgttggtcactsstgtcgcttgccgcctgacccagatggcctgcgtttgaggaaaatctccaaagagcaattgggatctccctggactaaggattcagcccacacggaccctctggcgggcccagccacccacaactcccaaagaaacccacgggtggtgccctcataactgtccgcccacacccaatggctttctgagagaagcaccactctsgttagcaakdhrkhhvhmbamkwtrrmrrarrrrmarrwwmtagtmttggatggccggrgmcatcttctggsmcrcmkggccvwttgtggccaacwgstvbkcwsgtarssgaaaggtggtggttgwacsctgtgagggcatcaacatttytggaaatttytwyagaaacaagttaaagtatytgsccttytccgaaagcggwtraacmccaacccgtytsgagscccctrscamwkscgagccccaagccgcattttttggcgyactktgsgmggcatkytbccgmacaagdccaaawgrgkccaggytkccmtgraacscctcaaggtgktggdtggratcccbycmccytwtgmcaagaaaaascggrtsbtggtccvtsctgcchtmaaggktgtgcgsbtgaagcmymccagaaarwttgcttacytggggsgthtgsctcatgaggtcgggtggaartmccmggcvgtgmcarbtactytggrggrgaaacggaaggaaaaggcaaagayccmttwccggaagwagragcagctyttgrggbtaaggaaaymggchgaaamgaatktkgdgaagaaaatytgcaagkwywcagrssycctcragrcyarwsraswyttkgtgtgaaccaataaagactgtttgtgccthnwrmmhrmharrmwrmhvwhmmhymawaaaaaaaaaaaaaa

SEQ ID NO: 6713 - DNA, 600 bp, Rattus norvegicus
ggcagccacccctgagactccacagccatcaccaccaagtggctctggatctgaatcctacaagctcctgccaggagccatcaccaccatcgtcaagcctccctctgccatcccccagccaacgatcaccaagcaggaagccatctagmawkccgccggggggtgggggtgaggcttctgctggctcacaccctcagagagcgcctgggtgtaacttagtcacggcaaagaggatgtgacaagagggaccagtcccagagcagccactgaaagggcttgtaggcccaaaaacatgcgytgaggmtcgcatgcattgccacccctgaccccacatccgkagggcagggctttgccttgagkagaccccggcggggggatgtcttccgctgcctggactsttytcaagttkaagctgccgtcttcatcttcccctcatatcttccctcaacttcttcacccctaaaggacaaccatctgcagatgttgcaggaccttgtttaaaaacaactcccttctctctcarmwrrrrmmwmwwmmwtcctggtgctggtcagggggcctggaaacaaaccttctggggtcaaaaaaaaaaaaaaaaaa

SEQ ID NO: 6714 - DNA, 600 bp, Rattus norvegicus
aacagcctcaagcctgatctcatgcagctgcgcaagatcagggaccagtacctcgtgtggctcacccagaaaggtgcccgacagaggaagatcaacgagtggctgggaatcaagaatgagactgaggaccagtattcactgatggaggatgaggacgccctcccccaccatgaggagcgcacgtggtacgtgggcaagatcaaccgcacacaggcggaggagatgctgagtgccaaacgagacgggaccttcctcatccgggagagcagccagcggggctgttacgcatgctctgtggtggtggatggcgacacgaagcactgtgtcatctaccgcacagccactggctttggcttcgcagagccctataacctgtacggatccctgaaggagctggtattgcactaccagcacgcatcacttgtgcagcacaatgacgcgctcaccgtcaccctcgcacaccctgtgcgtgcccccgggcctggcccgccccctgcagcacgctgagcgccccacctcacctgcctccctgtccatgtctgtcttctaatcccttcccctggtgaacacacgcaggatgccaaaaaaaaaaaaaaaaaa

SEQ ID NO: 6715 - DNA, 600 bp, Rattus norvegicus
gacactgaactcttggaggtcgctttcttatgatacaaaccaaatggctacctggaataatttttcaaacacttatttttcttatcttcagggttaaatgtataaaagtatgtcatgtgtaattaatctataatgccataaatgataatgcaaaagctaactatggtggcctgagaggctcacttgtatttggaacatgctttctatcatgcgttgactgtatgcatttcatgcacattttgtttgtttgagatatggtgtgtaagatacacgcttccagacggaactgtacgtgccacagtttgcactactcgtaacataatgataacctcaagactatcaggagaaatatttaaatttccagtttatgaagaaaggaaccaaattattagttacgcttttaaaaaaaattaccagtttacataattaatcagggtgcattttcagttctaactttgtgttatatatgcatcatttgaaaatactgaggaactcttcctctcgttctgaatgatgcatgtgtgaaagtaatgctagttagcagtatttgattgtaagaaatcaataaaataattgtgtttcawaaaaaaaaaaaaaaaa

SEQ ID NO: 6716 - DNA, 600 bp, Rattus norvegicus
gctgtaatccagaaagccagacccaccaagaaacagaagcaccagccaggacatctgcgcagagaggcctacacagatgatcttccaccacctccagtgccaccgcctgctataaaatcgcccagtgtccagtccaaggcacagctggaggcacggcctataatggggccaaagctcgcttctatagaagcgagagcagacagatcatcagacagaaaaggcggcagttacaaggggagagaagctctggacggaagacaagtcactgacctgcgaacaagcccaggtgaccccagagaagcacaggagcagccaaacgaagggaaagcacgagggacgaagacagcaaagcgagaccttccaccagcgaagacacacctcatcccagaggatatccttccgtactgtaggcctactttcccaacgtcaaacaaccctagggatcccagttcttcaagctcaatgtcatcaagaggctcaggaagccgacagagagagcaagcaaatgtgggccgaagaaatatggcagaaatgcaagtacttgggggatttgaaagaggagatgagaataatgaagaattagaggaaactgaaagctga

SEQ ID NO: 6717 - DNA, 600 bp, Rattus norvegicus
gttgtgagcctcttgattcctakcatcttcctgatgctcgtggacctgggaagcttctacttgccccccaactgtcgtgccagaattgtgttcaagaccaatgtgctggtgggctatacagtcttcagggtcaacatktctgatgaggtgccaagaagcgcagggtgcacatctctgattggggtcttctttaccgtctgcatggccctcttggttctcagtttatccaaatccatcttgttgatcaaattcctctatgaggagcggcacagtgagcaagaacggcctcttatgtgccttcgaggggactctgatgccaatgagtctagattgtacctcagagctccatgtgctgaggacacagagtccccggttcgtcaggagcaccaggtcccatcagatactctgaaggatttctggttccagctccaatccatcaacaactctctccgaactcgggatcaggtttaccagaaggaggtggagtggctcgccatcctgtgccactttgatcagctgctcttccgaatctaccttgccgtgctggggctctatactgtcaccttatgctctctctgggcactgtggagcaggatgtga

SEQ ID NO: 6718 - DNA, 600 bp, Rattus norvegicus
cccccagcggtggagcatgccagaacccttgggcasamgarrgatcgctatgagatcagctccctggtgcggtaccagtgtactgagggctttgtccagcgccatgtgcccaccatccggtgtcagcccagtgsgsactgggaagagcctcgaatcacttgcacagaccccaacacctacaagcacaggctacagaagcggassatgagacccacacggaggagccgccccagcatggcccactgagaggagcttccacaatgtgcccaggatgctgagcccagcggccagccatgctgaccgtgcatcccactcacatggtgtcttcttgtcgctttttgtcatataaggaatccattaaaraarraaaaaaaarccacattgtgtgtgccccactccccatatcacccaaactgcatctaatttatccaccaccatcaccgccccccataaaaaaccgccaaagcaaattcactgtaacccatggactgagtttagagacatttctttcatttcccaccgtgcctttccagggaccagtgcagggacagggtgagaagagttaaattaaataaagaagattaaaaaaaaaaaaaaaaa

SEQ ID NO: 6719 - DNA, 600 bp, Rattus norvegicus
cagggaccactggaatgagatgttggcatacccacgaaagcccatcgcacactggcactgcttggcggaggtaaagaaatccttcaaagaggkrrsycmccggytgyswkkycrttsrcrtgkwtrctgcargcggcgtgggctgcagaatggcargcggctgctctgagtccttggscttttatggaaaagggggcmtggggagcatccagtgtataacatggtatatatgatgaggaaggacacagatgctgcctggcaaaaagttcctgattttgagcattttatattttgagcatttatggtgatggggscagggatgctatagttcagttggtagactcctggtctagcatgcatgaaaccccgagttcaatccccagcactgcctaaagttaggcgtggcagcacacactgcaacccaagtacttggcaggaagattcaaagtttaaggtcattctcagcttcatagcaggtttgagggcaatgtgggctacacaggaccttgtcttgaaagaaagaaagaaaggaagaaagaaagaaaggaagaaagaaagaaagagaaagaaagaaggaagaaagaaagaaaaaaaaaaaaa

SEQ ID NO: 6720 - DNA, 600 bp, Rattus norvegicus
ccagctcattgctgggtacttacaaggaccaaataccaaactagaagaaaagatagacatggtgcctattgactttcggaatgtgttcttgggcatccacgggggcaagctgtgcctgtcttgtgtcaagtctggagatgacaccaagctccagctggaggaggttaacatcactgatctgaacaagaacaaagaagaagacaagcgctttaccttcatccgctccgagacaggccctaccaccagcttcgaatcacttgcctgtccaggatggttcctctgcacaacactagaggctgatcatcccgtgagcctcaccaacacaccaaaagagccctgtacagtcacaaagttctacttccaggaagaccaatagcactgcctcggcctgtccttccccactcccaggccagcaatgaccaccaactgcctgatcactctggccatcattggggtctgaggaacaatttttgcagggtgtacagtagaaggagacagaagagtcctgatgatagatctctgccttcagtctgttggctaacccaatccccatgatgatttcagaataatctttcaaactgcaaaaaaaaaaaaaaaaaa

SEQ ID NO: 6721 - DNA, 600 bp, Rattus norvegicus
aagcagcagcaccaggagtctcaggagtcagaactgcaagtggaaaagaaacagcatgagaagtccccagagccagaactgcacctgggaaagcagcaggagttacatgagcctgatatgacagaggatcagaaagagaagcagagtcttcatgaaccagaactgcacctgggaaagcagcaggagtcacatgagcctgatatgacagaggatcagaaagagaagcagagtctttatgaaccagaactgcacctgggaaagcagcaggaacaacagatagagtatgaaggctaccaaagatcaaaaagtctgaatcagttacttaagcaagagaaagcttccaggggacaggagctggatgactcacatctagaacaggagaaggagctcttggaccagcgattggatcaagaactagtaaataaggatgagcaactggaaagaaagaagcacaaattggagaacctgacacagaaggagaagcagataaagcaattagtaccaagcactgacagagtccaagagactcagccaatccaaccagtgaaagaagactctctcactacaaagaagcagcagcacagccatgaagtgcagtga

SEQ ID NO: 6722 - DNA, 600 bp, Rattus norvegicus
ttggccrcagggattgtgcccctactgctcattctgcactggaaacacggggcagggagcccccttcccatcacccctgtaaatgccacctgcgccatacgccacccgtgtcacggcaacctcatgaaccagatcaagagtcaactggctcaactcaacggcagtgccaatgccctctttatttcctattacacagctcaaggggaaccatttcccaacaacgtggataagctatgtgcgccmaacatgacggatttcccacctttccatgccaatgggacagagaagaccaagttggtcgagctgtatcggatggtcrcgtacctgggagcctccctgaccaacatcacctgggatcagaaaaacctcaaccccactgccgtgagcctccagatcaaactcaatgcgactacagacgtcatgagggggctccttagcarcgtgctttgccgtctgtgcaacaagtaccatgtgggccatgtggatgtgccctgtgtccccgacaactctagcaaagaagccttccaaaggaagaagttgggctgccagctcctggggacatacaagcaagtcatwagtgygktggyccaggccttctag

SEQ ID NO: 6723 - DNA, 600 bp, Rattus norvegicus
gtggctgatgcctttgggaaagaagggatttatgaagcccacatccatctgaatgggtacccatttcttgatgtgaaggatgagttcactcaccgtaccctagccactgatgtgatgcggccccgcaggggagaaccacctttgtcagtactaacccaggacagcatgactgtggaggatgtggagactctcataaaagagacagactacaatgggtttcctgtggtggtctcgagagattcggagcgcctcataggctttgcccagaggcgggagctaatcttggctataaaaaatgccagacagaggcaagagggcatcgkgagcaattccatcatgtacttcacagaggagccccctgagctgcctgccaacagcccacatccactgaagctgaggcgcattctgaacctgagcccttttactgtcacagaccacacccccatggagacagtggtggacattttccggaaactggggctccgacaatgcctggtgacacggagtgggaggcttcttgggatcatcacaaaaaaagacgttctgagacacatggcgcagatggcaaaccaggaccctgaatccatcatttttaattag

SEQ ID NO: 6724 - DNA, 600 bp, Rattus norvegicus
gtgtttgtgtggtttgtcgtggatcccccccacaccatcattgactatggcgaacagcgaacgctggatcctgagaacgccaggggagtgctcaagtgtgatatttcggatctgtcactcatttgttccctgggatacagtatcctcctgatggtcacctgtactgtttatgccattaaaaccagaggggtcccagagacgttcaatgaagccaaacctattggctttacaatgtacaccacgtgcatcatttggttagctttcatccccatcttttttggtacagcccagtcagcagaaaagatgtacatccagacaacgacacttactgtttccatgagtttaagtgcttcagtgtctctgggaatgctctatatgcccaaagtttatattataatttttcatccagagcagaatgttcaaaaacgcaagagaagcttcaaggctgtggtcacagctgctaccatgcaaagcaaactgatccaaaagggaaatgacagaccaaatggcgaggtgaaaagtgaactctgtgagagtcttgaaaccaacacgtcttctaccaagacaacatacatcagctacagtaatcattcgatctga

SEQ ID NO: 6725 - DNA, 576 bp, Rattus norvegicus; identical to SEQ ID NO: 2629

SEQ ID NO: 6726 - DNA, 1400 bp, Rattus norvegicus
tgtcatcacactccccttctgggcagtggacgccatggctgactggtactttgggaaatttttatgtaaggctgtgcatatcatctacaccgtcaacctttacagcagtgttctcatcctggccttcatcagcctggaccgctaccttgccattgtccacgccaccaacagccagagcgcgaggaagctgctggctgaaaaggccgtctatgtgggtgtctggatccccgccctcctcctgactatccctgacatcatcttcgccgatgtcagccagggggacggcaggtacatctgtgaccgcctttaccccgacagcctgtggatggtggtgttccagttccagcacatcatggtgggtctcatcctgccgggcatcgtcatcctgtcctgttactgcatcatcatctccaagctgtcacactccaagggccaccagaagcgcaaggccctcaagactacggtcatccttatcctggctttctttgcctgctggctaccgtattacgtggggatcagcatcgattccttcatccttttggaggtcatcaagcaaggatgtgagttcgagagcgtcgtgcacragtggatctccatcacggaggccctcgccttcttccactgttgcctgaaccccatcctctacgccttcctcggggccaaattcaagagctccgcgcagcatgcactcaattccatgagcagaggctccagcctcaagatcctttccaaagggaaacggggtggacactcttccgtctccacagagtcagaatcctcaagttttcactccagctaacacttacgcaaagacatatataatatatatatatatatatatatatgacaaagaacttttttttatgttacacatttcccagatataaaagactgaccaatcttgtacagttttttttattgactgttggagttwatgtttctcyagttyytgtgtgtgtgtgtgtgtgtgaggtttgacttaatttatataaatattggtttttktctgttgtttgtctgtttcacgtgaatgagtgtctaggcaggacctgtggccaagttcttagtcgctgtgtgtctgtgtgtaggactgtagagctgtagaggaaggaactgaacgctccagaatgtgtggtaaatcggataaagctagaagtgaccctagctgtcgctgcataatctcttcgccccgcccaccccgttcctgaattgtttggttgtgctgtgtggtttctctgtagaagatggcacttaaaaccaaagcctgaaatggtatagaaatgctgggttttttctttcagttttcaagggtggattgatttcagtacctacaaatgtacagtcttgtattatgttgttaataaaagtcaatggtaaacttgcaaaaaaaaaaaaaaaaa

SEQ ID NO: 6727 - DNA, 483 bp, Rattus norvegicus; identical to SEQ ID NO: 2631

SEQ ID NO: 6728 - DNA, 600 bp, Rattus norvegicus
caaggaagcggctcggagcacagcagtttccagtggagcccttcggggcgccggaccggcagcctgtactgcagagtgggcatcggtttccatctgcagatctacccggatggcaaagtcaatggatcccacgaagccagtgtgttaagwawtttrsaratatttgctgtgtctcaggggattgtaggaatacgaggagttttcagcaacaaatttttagcgatgtcaaaaaaaggaaaactccatgcaagtgccaaatttacagatgactgtaagttcagggagagattccaagaaaacagctataatacctatgcgtcagcgattcacagaactgaaaagacaggccgggagtggtatgtggccctgaacaagagagggaaagccaaaagaggctgcagcccacgggtcaaaccccagcacgtctccacccacttcctacccaggttcaagcagtccgagcaaccggaactttccttcaccgtcactgttccagaaaagaaaaagccacctaggccctggaaaccaaaggttcccctgtcgccatctcgtagaagccccagtccagtgaagtacagactgaagtttcgcttcggatga

SEQ ID NO: 6729 - DNA, 600 bp, Rattus norvegicus
tcttggcggtgtgtcactgcggagctctgtggccatctgcgagaggttcctggacatgccaccgcctttggcatctacgagggcagctgcctagctcagtgccctccaggcttcacccgtaatggcagcagcattttctgccataagtgtgagggcctgtgccccaaagagtgcaaggttgggacaaagaccatcgactctgtccaagccacacaggacctagtgggctgcacccatgtggaggggagcctcatcctcaaccttcgacaaggctgtcagtattcttcctggtcacgcccttggccacgccctccgtggtcacaccctccctcccttgcatggttccccctcatccctccgttcctacctcctcgtttgtccctccagctcccttccctgtggacccatcaccttccctgggctgctccactcctatctttctcatccccagacaatctggagccagagcttcaacgcaacctggggctggtggagaccatcaccggcttcctcaaaatcaagcactcttttgcactcgtgaccctgggatttttcaagaacctcaaactaatccggggagattccatggtggatgggtaa

SEQ ID NO: 6730 - DNA, 600 bp, Rattus norvegicus
ttgaaatcccgtctgggtgagattcacgatagcaaagtgcgtcttgagcaggacttgaagaaacaagctttggacaaccgggaaatagataaaaaaatgaatagcatcaagcctgacctgatccagctgcgtaagatccgagaccagcacctcgtatggctcaatcacaggggagtgaggcagaggcgcctgaacgcctggctggggatcaagagtgaggacacagatgagagctattttatcaatgaggacgatgagagcctcccgcattatgatgagaagacctggtttgtggaggatgtgaaccgagtacaggcagaggacctgctttatgggaagccagacggtgcattcttaattcgtgagagtagcaagaaaggatgttacgcttgttctgtggttgcagacggggaggtgaagccctgtgtcatctacagccctgctcgaggatatggctttgcagaaccctacaacctgtacggctcgctgaaggagctggtgctccactaccagcagacatccctggtccagcacaacgactccctcaacgtcacgctcgcctaccctgtccacgcacagatgccctcgctctgcagataa

SEQ ID NO: 6731 - DNA, 393 bp, Rattus norvegicus; identical to SEQ ID NO: 2635

SEQ ID NO: 6732 - DNA, 600 bp, Rattus norvegicus
tggacggtcatgctgccgggtctttgctctgaccgttctggagttcctgctgccgctactggtcatcagcgtgttcacaggccgtatcatgtgtgcactgtcgaggccaggcctcgtacgccagggtcgtcagcggcgcatgagggccatgcagctgctgctcacggtgctggtcatcttcctggtctgtttcacacccttccatgcccgccaggtgactgtggcactgtggcccaatgtgccttaccataccagccttgtggcttaccatgtggccgtcaccctcagcagcctcaacagctgcatggaccccatcgtctactgttttatcaccagtggtttccaggccactgtccaaggcctcttctaccagcgtggagaagaattcaagcccagcactatggatatggtcagcatgcacaagagcaccaagggctcagccccattcacatcctcagcaccggttctcacaccctcacccagcctttgaccaacgggcctgagcataggtagcagtactccaccaagggtcgaaggtcaaggctctgaaaggttaccaaccagacatatcctggtcctgggacagcagttaatttctat

SEQ ID NO: 6733 - DNA, 600 bp, Rattus norvegicus
cagaagccgaccaggatgcakgctggttggtgggggtgaaggagtcagactggcttcagtacagagacctggccacatacaaaggcctctttccagagaacttcacacgacrcctrgartagggctgcagatgttgtaaaagggtcatgtgactgggtttttaaaccttcatgaaattcagaggagttcacttttgctactacactcttaatgactgacagacaggtgccagatgaggcttgagaagaccgatcaatagagcatgtatgcaaaagctgtaagaggggaaaaaaacaaaataaggaaagagtccttactctgttccctgtgttcagtagaggtctgtttgtgctttgtctaaccatggacactggtacttgattcccctcccaccaaatctaaagtagctttctccagaccagactttgacttctttgtatcaagtgtgtggtgttgagtgattgccctgcagatgtgatgagttatcctgtagtaagacattatcttactcccttgcccgatgtgagtgagcacgtgctctcttttcctttcaagtttactgcgattaaaactgaacagctgcaaaaaaaaaaaaaaaaa

SEQ ID NO: 6734 - DNA, 600 bp, Rattus norvegicus
ctcgtcttcggacacgtcagcaccagccacgggaagataacctgcttcaacaacttcagcctggcggcgcccgagcctttctctcattccacccacccgcgaacagacccggtagggtacagcagacatgtggcggtcaccgtcacccgcttcctctgtggcttcctgatccccgtcttcatcatcacggcctgttacctcaccatcgtcttcaagttgcagcgcaaccgccaggccaagaccaagaagcccttcaagatcatcatcaccatcatcatcaccttcttcctctgctggtgcccctaccacacactctacctgctggagctccaccacacggctgtgccagcctctgtcttcagcctgggactgcccctggccacagccgtcgccatcgccaacagctgtatgaaccccatcctgtacgtcttcatgggccacgacttcaaaaaattcaaggtggcccttttctcccgcctggtgaatgccctgagcgaggacacaggaccctcctcctaccccagtcacaggagcttcaccaagatgtcctcattgattgagaaggcttcagtgaatgagaaagagaccagcaccctctga

SEQ ID NO: 6735 - DNA, 1400 bp, Rattus norvegicus
tgcttcacctgaagacacttccatttctgttcttcttccacacacagcttgccacagccctcccagtgcctccagaacacctggaagagaaaaatatgaaaactgctgagaattacctacgaaaattctaccacttaccaagcaatcagttccggtctgcaaggaatgccactatgattgccgagaagcttaaggagatgcagcgcttcttcggcttgcccgagacagggaagccagatgcagctacaatagagataatggaaaagcctcgctgtggagtgcccgactctggtgatttcttgctaactccgggaagccccaagtggacacacactaacctgacctacaggattataaaccataccccacagatgtcaaaggctgaagtgaaaacagaaatcgagaaagcttttaaaatctggagtgtgccatcaaccctgaccttcactgagaccttagagggagaagcagacatcaacattgctttcgtctcaagagaccatggtgacaattctccatttgatggacccaatggaatccttgcccatgcctttcaaccaggccggggtattggaggagatgcacattttgattcagaagaaacgtggactcaagactccaagaattacaacctgtttctcgtggctgctcatgaatttggacattccttgggactctctcactccactgatcctggtgccttgatgtacccaaactatgcttacagagaacccagcacctattcactacctcaagatgatatcaatggaattcagacaatctatggaccttcagacaaccctgtccaacctactggacccagcacgcccacagcctgtgacccccacctgagatttgatgctgccaccacactccgtggggagatttacttctttaaagacaagtacttctggagacggcatccccagctgagaacagttgacctcaatttcatatctctgttctggcccttcctacctaatggtcttcaggctgcttatgaagactttgatagagacctagttttcttatttaaaggcagacagtactgggctctaagtgcctatgacttgcagcaaggttaccccagagatatatccaactatggattcccaaggagtgtccaagccattgatgcagctgtttcctataacgggaagacatacttcttcgtaaacaaccaatgctggagatacgacaatcaaagaagatccatggatccaggttaccccactagcatagcaagcgtgttcccaggaataaactgtagaattgatgcagttttccagcaggattccttcttcctcttcttcagtggaccacaatattttgcatttaatcttgtcagtcgcagagtcactagagttgcaagaagcaatttatggcttaactgtccatag

SEQ ID NO: 6736 - DNA, 252 bp, Rattus norvegicus; identical to SEQ ID NO: 2640

SEQ ID NO: 6737 - DNA, 600 bp, Rattus norvegicus
ctgcagtgtctttgtggcaagagtcttaagaaaaacaagaacccaactgatccccagctcaagggcatagtgaccaggttatattgcaggcaaggttactacttgcagatgcaccccgatggagctctcgatggaactaaggatgacagcaccaattccactctgttcaacctcatcccagtgggactgcgtgttgttgccatccagggagtgaagacagggttgtacatagcaatgaatggagaaggttacctctacccatcagaactttttactcctgaatgcaagtttaaagagtctgtttttgaaaactattatgtaatctactcatccatgctgtacaggcaacaggagtctggcagagcctggtttttgggattaaataaggaagggcaagttatgaaaggaaacagagtaaagaaaaccaaaccagcagctcattttctacccaagccattggaagttgccatgtaccgagaaccatctttgcatgatgttggtgaaacagtcccgaaagctggggtgacaccaagcaaaagtacaagtgcatctgcaataatgaatggaggcaaaccagtcaacaagtgcaagaccacatag

SEQ ID NO: 6738 - DNA, 600 bp, Rattus norvegicus
atccacgtcctcggtcacctccattaactcccgggttccggaggtgcccagtgagtccgggtctcctgtgtacgtgaaccaagtcaaagtgcgagtctcagacgccctgctggaaaagaagaaactcatggccgctagggagcgcaaagccaccaagaccctagggatcattttaggagcatttattgtgtgctggctccccttcttcatcatctccctggtgatgcctatctgcaaggatgcctgctggtttcacatggccatttttgactttttcaattggctaggctatcttaactctctcatcaaccccatcatctacaccatgtccaatgaggacttcaaacaagcattccataaactgatacgctttaagtgcacaggttgacttgtcaatggcattggggtcgcctaagcgmcmtttggggaccaagttgggtcttttcacaggtaggtcaaatcttctttgcctgttactgggtggaagcaaggctctctcaactgggcaagggcagtggatcctcagaggccagggcagaagcctggctgctctgagagagcactctggaatgtgaactgaagcaaactattgtaaagctt

SEQ ID NO: 6739 - DNA, 600 bp, Rattus norvegicus
atgccttgcggtatttgtacgtgctggccaacctctgtgagaagccatatccgattgacaggataaagatggccatggacaaagtgtgycttagtcactactgaacagctctcttcccagtgcttctagaagagtgagcacagtacactggaatgtgaaccaaccggagtgaaccaagcggagaccggaagggcggagtcagaggcagcacctaagccccgcccccagggataccgtccgcccaccccagggcttgctttctgaggatacctgcttactaagaagccagtttgggtctggaggaaggaacttttgcttcttaggaatttttgggtttgttttgttgtccattagctttcaagagcagattcactgcggattctgtagccagtgaaggaaccggagaaattctcgaagctgaaacctcttgtcgccttcacagtgattttaccgaagagggcwmragcaagtccctactggagaattatttttagaatatataatkwttgatygcttttatattttattctgtaataatggatgtcctaaaacaaataagtgaagtgagacatttgttcctggaaaaaaaaaaaaaaaaaa

SEQ ID NO: 6740 - DNA, 600 bp, Rattus norvegicus
aaacagaggatcatcgggctagccttcccggccgtaatgacaactcctacatgtatattctytttgtcatgtycctattcsctgtcactgtgggcagtctcrtcytgggatatacccgttcacgcaaagtggacaaacgtagtgacccytatcatgtgtacatcaaaaaccgtgtgtctatgatctgatgtgaggtgcctgaggmcaatggaagattatgatgtctgaggattgtcttyttgggtctccggaaytcatytmgaccctatcmagccmcagtacyyctgtctatacaagatcaacgwgaaattggtaagagagttaggtcatcactgggaccagagaagaggrgctgataggcctggtcttctggmtgagacatttttctagacacagatgcgcattataaactcagagcccgtgagcacacatataaaagtatggacaaccaacaagtaggagaggaagctgtggtgaagggaaatggagcaggaaaatgctctggaaatataatcttttaatgtatgatctttaacatgagagatcttgmtaaaacagagaatgctacttwaaaaaaaaaaaaaaaaaaaaaaaaaaaaa

SEQ ID NO: 6741 - DNA, 600 bp, Rattus norvegicus
tcagacgtcggctattccatggctccgcctgacccccgaatgccatttgctaccaggccagaactgcgctggctggagggggcagagacgacaggaggggttcttacctgcatccttccatgagggtgtgkttctgtgtktcatctctaacagagatgctwskgcwyggkggcgtttgttagaaatgkgacacayscccctgtcgtgaagtttacatgtgaccttcttgtaggtaacttgagttcgtagcctgsgacccctgtaatgaaggttacagtccacaggtgatagagaaattcaagctgtaagttacaggtgcactayaagtgtgttcattcagtttacctgggggcatggaggtgagtcagctccacgaggaaggaagcatacctctgccctcatcaaggggacacagggtacatcccaggcatcagagaactgcagctcacctcaaaccatgtcaaagaattaaaacacacccccatcccctcactgtagcctttggcaacttcgccaaacccttcacacaaagaaaataaaagtaaggcgtataaatttcmwmmarmaarmmwmdwrhcrartwmaaaaaaaaaaaaaaaa

SEQ ID NO: 6742 - DNA, 1400 bp, Rattus norvegicus
ctatgaccacaagtacctgcaccgcgtgatctcactggtaagccaggagcctgtgctgttcgcccgctccatcacagacaacatctcctacggcctgcctaccgtgcccttcgagatggtggtggaggctgcacagaaggccaatgctcacggcttcatcatggagctgcaggacggatacagcacagagaccggggaaaagggagcccagctgtcaggtggccagaagcagcgggtggccatggcacgtgcactagtgcggaaccctcctgtgctcatcctggacgaagccaccagtgccctggacgcagagagtgaatacctgattcagcaggccatccacggcaacctgcagagacacacggtgctgatcatcgcacaccggctgagtactgtagagcgggcgcacctcatcgtggtgctagacaagggccgtgtggtacagcagggtacacaccagcagctgttggcacagggcggcctctatgccaagctggtgcagcgtcagatgctggggctcgagcaccccttggactacacggctggccacaaggagccacccagcaacactgaacacaaggcctgacagtggccccgggctgaagcgctggaggcgacctgccgagtcccactcttgcttcctgcatcttgcctccttccacttgctccccaggcacccaccagctgccatgggcttacccccttctactgtgtcccatcttggctcctccaggcctgccaaggtagaacagcctttttataccaagctagcagggtttttactgctcagttcaacgcactccagtcaactcctagatttcaaaaacacctttttgggactggcagtgagcaagctcactaggatgttttcaagacttctgasccaggagtgcacgaccctttctaactgcctggaagatgtctgggagagaactaagcactaccctttgcctctgggagaagcagcttccctgtccctagggggacacaagggttggccttccatcctyccagtctcccggctctgtgagtcagsccagaggtggggcaagagagtgggaggtrcccactgchtatcaccccttgccaatcaaagccagtctcaytgtgaaccaccagaacctcagcagaggaggggctggccaggcctgktggscctcggggtgccctcagccccacacccagcacttgaaccsttcatcctttcccctggmtggcaccttcccctcctgtccacccctgcaactytgcagaggaaccttgtttgtaagatgtattctcagattggtggaggggaccgaggcaatgcccagggtctggctttgtcctggtttaagattttgggagaactgggtcaataaagtgtactacctctgammwmwaaaaaaaaaaaaaaaaaa

SEQ ID NO: 6743 - DNA, 600 bp, Rattus norvegicus
agattaccaccagaacaagaactacaattgtggaatgagattcctgaagcttgtgcgtcctttctgtctgttgattcccagcctcaggcatctgttgcattgaggaagctttgccgtgtcctgatggagattttccagaagcctcaggagcaaactgagaaagataatgctaagaggttcttatttcattattcaaagacacagaagttgggaaattcaaatgttgtgtcgtctgtcgtgcatccgttgctgcagctcgttcctcaactgcatgagagaagaatgaagagatacaaagtgaatgaataccagggtcctgtagctccaagtgggggattctttttatttaggccacgcaatgggaagaggtcaacaagtttcatttaaaatggatgccaaatgatcttttcattgaaaactctgctatgggatataaaatgtactcacattttgttctcaaaaaaaaaaaaatgatccctccgaaatgtagtctgttgcaaacccctgtattgtaacattctctgccatggttgagattatgaatgtttaatttgttgaaaataaaacagcatcttgaaatgtaaaaaaaaaaaaaaaaaa

SEQ ID NO: 6744 - DNA, 600 bp, Rattus norvegicus
attttggatcatagtgaaggaagtgggccagtagcctttgctcacaagagaacaggactgtcttccgtacttaccacagggaatcaggctcagtgtacatcttacttcatcgaacctgtgcagtggatggagtctgctttgttgggggttatggatggacagcttctttgcccaaaatgcagtgccaagttgggttcctttaactggtatggtgaacagtgctcgtgtggccgatggataacccctgctttccaaatccacaagaacagagtggatgaagtgaaaacattgccagcgctgggatcacaaacaaagaaaccatgaacttaggactcagcttgggatggaccctgggaaaggcgcttctccattggcatctttcatggcgatgtcaaatttcagttggatgtccaaggataattactgactgtaacagctgtggggtggtggcttattatgtcacacacacacacacacacacacacacacacacacggtactctgcttggccatccagactgttagtcatgtaaattggatttgatattaaaatcttttgggctggaaaaaaaaaaaaaaaaaaaaaaaaaaaaaaaaaaa

SEQ ID NO: 6745 - DNA, 1400 bp, Rattus norvegicus
agggcattcccttaggcctggcggggagcatacccctcattttgcagagcaaaaatgttagctatacagatcaagctttcttcagttttgtcttctggccattcagtcttaagctgctctgggctcccttggttgatgccgtctactttaagaacttcggtcgtcgcaagtcctggcttgtccctactcagtatatactaggaatcttcatgatttatttatccactcaagtggaccgtttgcttggaaatattgatggcagaacaccggatgtagttgctctcactgtgactttctttttgtttgaattcctggccgccacacaggacatcgctgtggacggttgggcattaactatgttatcccgggaaaacgtgggctatgcttcgacatgcaattctgtgggccaaacagcaggctactttttgggcaatgttttgtttttggctcttgaatctgctgacttttgtaacaaatattggcggtttcagcctcaacccaggggaatcgttaccctttcagattttctatttttctggggaactgtatttttaataacaacaacattagtagcccttctgaaaaaagagaccagagaagcgtcagtagtaaaagaagagacacaagggatcacagacacatacaagctgctcttctcaattataaaaatgccagcagttctggcgttttgccttctgattctaacttcaaagattggcttttcagcagcagatgcggtgacaggcctgaaactggtagaagagggagtgcctaaggagcacctggccttactggctgtcccaatggtccccctgcagataatcctgcccctcctcatcagcaagtacacggcaggtccccagcctctgaatatattttacaaagccatgccctacagattgttgcttggattagagtacgccctccttgtttggtggactcctaaagtagagcatcaaggaggattccctatatattactacatcatagtgctgctgagctatgccttacatcaggtcactctgtacagcatgtatgtgtcaataatggctttcaatgccaaggtcagtgatcctcttattggaggaacatacatgacccttttaaatactgtgtccaatctgggaggaaactggccttctacagtggcgctttggctagtggatcccctcacagtgaaggagtgtgtaggagcttcaaaccagaactgtcggacacctgaggctatcgaactttgcaaaaagcttggcggctcgtgcgttacagctctggatggttattatgtggaatccattgtctgtgttctcattggatttggttggtggttctttcttggtccaaaatttaaaaagttacaggatgaaggaccgtcctcatggaagtgcaaaaggaacaactga

SEQ ID NO: 6746 - DNA, 600 bp, Rattus norvegicus
tggacagaaacaaaaagtgccgccacagcacaaatgcagagagcattctgggaacgtccagtgacctggatgaggaaaccccaccgcctgtcccagttaaacttctggatgagaatgccaaccttccagagaagggagagcacggggcagaagagcaagctccagaagcacccagtggacacagcaagagatttagttccttgtcatacaagtctcgagaagaagacccaactcttacagaagaggagatctcagcaatgtattcttcagtgaataagcctggacaatcggcacacaaacctgggccggaatctacctgccagtgcccgcagggtccccctcagaggtcatcatcttcctgtaacgacctctatgccactgtgaaagacttcgagaaaactcccaacagcatcagcatgctgccaccagcaaggaggcccggtgaggaaccagagcctgactatgaagccatacagactctaaacagagaggacgacaaggtccctctggggaccaatggccaccttgtccccaaggagaatgactatgagagcattggggacttgcagcaaggcagggatgtcaccaggctctagcaac

SEQ ID NO: 6747 - DNA, 600 bp, Rattus norvegicus
cgttcaggggctgccctgccccacacagcacggttgatggactcgactgccccaggcagcggtgtcagctccctgccgctgctcctggcccttgtcctgggtcttgtgattctccagtgcgtggtggcagatgggaacacaaccagaacccctgaaaccaatggctctctttgtggagctcctggggaaaactgcacaggtaccacccctagacagaaatcgaaaacccacttctctcggtgccccaagcaatacaagcattactgcatccatgggagatgccgcttcgtgatggacgaacaaactccctcctgcatctgtgagaaaggctactttggggcccggtgtgagcaggtggacctgttttatctccagcaggacagggggcagatcctggtggtctgcttgataggcgtcatggtgctgttcatcattttagtcattggcgtctgcacctgctgtcatcctcttcggaaacatcgcaaaaagaagaaggaagagaaaatggaaactttgagtaaagataaaactcccataagtgaagatattcaagagaccaatattgcttaacttaatgattataaagttaccacaagctgg

SEQ ID NO: 6748 - DNA, 600 bp, Rattus norvegicus
cggcgtgacaccgataaaggatctgacagctcattttaggggagaccgatgcaaaaccctgctagagaaacccaagctcttcttcatccaggcgtgccgagggacggagctggatgacgggatccaggctgactcggggcctatcaacgacaccgacgctaatccccgctacaagatcccggtggaagctgactttctctttgcttactccacggttccaggctattattcgtggaggaacccaggaaagggctcctggtttgtgcaggccctctgctccatcctgaatgagcatggcaaggacctggagatcatgcagatcctgaccagggtgaacgacagggtggccagacacttcgagtcccagtctgatgacccccgcttcaatgagaagaagcagattccatgtatggtgtccatgctcaccaaagagctctactttggccgttgaccagcctccaactgagaacctgctgtcattcactgatgaatccagcttttattttatttttgttttgatgctctcaaaatatccagaaatgttaaggagatttaatttcaggaaagtatattgattcagggagggagttctctggtgat

SEQ ID NO: 6749 - DNA, 600 bp, Rattus norvegicus
ttttcccattagcaaagtagcccctactgtaaacggaaggcctcatgctttagaggaggaagggtagggtgcaacggggatgcctggagttcttcacagtgctcctccgagtgtgtttgaaaagtatggccagtagttcatttgaagagtttagaagtagtcccgttttggcccagagagccttccataatgacgggcagatgtatgtagcaagactagaaaggaaacccaagccctgtgtgtggaaagtagaccattattagaacagaggacacatgagaacatctaggcctaagaagtctggtcatgctgagaacgagacctaggctgagacggcgcaagccctggaagcgtggacatagatgctctgttctggggctgcgcgggcttttgcgcaagcttttgtacaactgacctggtttttaaatagtctgctgttggggagtagaattggagacaaggcctcctccctagccagcgtttgtatatactcactgtacgttgtatgcgttcatactttggagcgggggatccccccacaagctttagtttctgtgtacaaccctgggattaggtctgctgtgtgtaagaatagattta

SEQ ID NO: 6750 - DNA, 600 bp, Rattus norvegicus
gcaaaaggaaattgctgacgcatttacaaaggaagttgtgaggcagactcagaggataaagattggggacccacttctggaagatacaaggatgggcccactcatcaatgccccgcacctggagcgagtcctcgggtttgtcaggtctgcaaaggagcagggtgccactgtgctgtgtggtggagagccgtatgccccggaggatcctaagttaaaacatggatattacatgacaccttgcattttaactaattgcacagatgacatgacttgtgtaaaagaagagatctttgggccagttatgtccattctaacatttgagactgaagccgaggttctggagcgggccaatgacaccacgtttggactagcagctggggtctttaccagggacattcagagggcgcacagggtggcggctgagctgcaggccggaacgtgctacattaacaactataacgtcagcccggtggagttgccctttggtggatacaagaagtcaggatttggcagagagaacggccgagtgacgattgagtactattcacagctgaagacggtgtgtgtggagatgggggacgtggagtcagccttttgaaa

SEQ ID NO: 6751 - DNA, 904 bp, Rattus norvegicus; identical to SEQ ID NO: 2655

SEQ ID NO: 6752 - DNA, 600 bp, Rattus norvegicus
acagtcaccaaacccatgtgggtgtataacttgatcatccaagctaccagcttcctcttctacatcctcccaatgaccctcatcagcgtcctctactacctcatggggctcaggctgaagagagatgaatcccttgaggcgaacaaagtggctgtgaatattcacagaccctctagaaagtcagtcaccaagatgctgtttgtcttggtcctcgtgtttgccatctgctggacccccttccatgtggaccggctcttcttcagctttgtggaagagtggacagagtccctggctgctgtgttcaacctcatccatgtggtatcaggtgtcttcttttatctgagctccgcggtcaaccccattatctataacctcctgtctcggcgcttccgggcggcctttcgaaatgttgtctcccctacctgcaaatggtgccatccccggcatcrgccacagggacctccagcccagaagatcatcttcttgacagaatgtcacctcrtggagctgacagaggatgcaggcccccagttccctggtcagtcatccatccacaacaccaaccttaccayggccccctgtgcrggagaggtaccatra

SEQ ID NO: 6753 - DNA, 600 bp, Rattus norvegicus
caaggaaataacttccagaaagcggtgcctgtgcctgatgagacaggcttagaacaggagcacgttttagaagaggattcatcatcttacaagaactatatcccagatgaggcagactttctgctggggatggctactgtgaaaaactgtgtttcctaccgagatcccacgcgtgggacctggtatatccagtcactttgccagagcctgagggaaagatgtcctcgaggtgaggatattctcagcatcctgactggcgtgaactatgatgtgagcaataaagacaacccgaggaacatgggaaagcagatgccacagcccatcttcacactacggaagaagctcttcttccctcctaactgatgtgtgctctctacagttcacatgggttatctgtgcacttttgtgtgtcctaactgatgtgtgctctctacagttcacatgggttatctgtgcacttttgtgtgaaggagagaatcttatttattttttttaccatttcttttgtttttgagtttacatttatgtcatttccgttttctctcttcaaatcttcctatgtaatcttccagtttcaaatacatgacctcttttgtcatc

SEQ ID NO: 6754 - DNA, 600 bp, Rattus norvegicus
  misc_feature (483)..(483): n is a, c, g, or t
ctttgtcatttctagagaacaaatggagaaagatatccaagagcacaaattwatagaagccggccagtacaatgacaatttatatggaaccagtgtgcagtctgtgagatttgtagcagwaaggggcaaacactgtatacttgatgtatcgggaaatgctattaagcggttacaagttgcccagctctatcccattgctatcttcataaagcccaagtctctggaacctctgatggagatgaataagcgtctaacggaggaacaagccaagaaaacctatgaccgggcaattaagctagaacaagaatttggagaatattttacagctattgtccaaggagataccttagaagatatttacaaccaatgcaagcttgttattgaagagcagtctggacctttcatctggattccctcaaaggagaagttataaattagctactgcacctctgacaacgacmgwrsmgmattyagaagaacaanatatatataatataacacttggaggcttttatgtttttgttgcatttatgtttttgcagtcaatgtgaatccttatgaatgtacaacacaaactgtgtgaagccatgaagaaacagg

SEQ ID NO: 6755 - DNA, 1400 bp, Rattus norvegicus
ctgaggtcactcattgttcagagactgtcgtgtaggaacatggaccattctaatagagaaaaggatgatagacaacggacaactaaaaccatggcacaaaggaatacacactgttcccgaccatctggcacttcaacatcctctggggttctcatggtgggacccaacttcagggttggcaagaagatagggtgtgggaacttcggagagctcagattaggtaaaaatctctacaccaatgaatatgtagccattaaactggaaccaataaaatcacgtgctccacaacttcatttagagtacaggttttataaacagctcggcagtgcaggtgaaggtctcccacaggtttattactttggaccatgtgggaagtacaatgccatggtgctggaactcctcggccctagcttggaagacttgtttgacctctgtgaccgaacgtttactttgaagacggtgttaatgatagccatccagttgctttctcgaatggagtatgtacactcaaagaatctcatttaccgagatgtcaaaccagagaacttcttaattggccgacaaggcaataagaaagagcatgtaatacacattatagattttggactggccaaggaatacattgatcctgaaaccaaaaaacacataccttacagagagcacaaaagcttaactggaactgcgcgatacatgtctatcaacacacatctaggcaaagagcaaagccggcgggatgatttggaagccctgggccatatgttcatgtacttccttcgaggcagcctaccctggcaaggactcaaggctgatacattaaaagagagatatcagaaaattggtgataccaaaaggagtactcccatcgaagctctctgtgagaactttccagaggagatgatgacctaccttcgatatgtcaggagattagacttctttgaaaaacctgattatgagtatttacggaacctcttcacagatctgtttgaacggaaaggctatacttttgactatgcctatgattgggttggaaggcctattcctactccagtaggatcagttcatgtagattctggtgcatctgcaataactcgagaaagccacacacacagggatcgaccatcacaacaacagcctcttagaaatcagccaagatctttaacagcagagtggtttgtgctggctcccctttcccaccctccagcacccacataagcaggagtcatgtgctggcagtgaaagcaggtggcaggagcggctgcacaacaagacaagcctgatcgggtccacactaaccagatgacaggagtgggagacagagccttcattgacagttcgggaccatcagtgagcagtgggatgacagtgaacctgaaataaaggccattgaaataagacttgta

SEQ ID NO: 6756 - DNA, 1400 bp, Rattus norvegicus
cagcccccggcccccgccccgccgctgccgccgccgcctgccgcgcccctcctgctgctgctgctgctgccgccgctcgcacctcaacgaggacaccggacgcttcgtgctgctggccgcgctcattggcctctacctggtggccggcgccaccgtcttctccgcgctcgagagcccgggcgaggcggaggcgcgggcgcgctggggcgccacgctgcgcaacttcagcgctgcgcacggcgtcgcggagccggagctgcgcgccttcctccggcactacgaggccgcgctggccgccggggtccgcgccgacgcgctgcgcccgcgctgggacttccctggagccttctacttcgtgggcaccgtggtgtcgaccayasgmkkcggcatgaccaccccagccacagtgggcgggaaggccttcctcatcgcctacggactgttcggctgcgcggggaccatcctgttcttcaacctctttctggagcgcatcatctcgctgctggccttcatcatgcgcgcctgccgggagcgtcagctgcgccgcagtggcctgctgcccgccaccttccgccgmggctcggcgctgtcggaggccgacagcctggcgggctggaagccctcggtgtatcacgtgctgctcatcctgggcctgttcgccgtgctgctggcctgctgcgcctcggccatgtacaccagcgtggagggctgggactacgtggactcgctctacttctgcttcgtcaccttcagcaccatcggcttcggggacctggtgagcagccagcacgccgcctaccggaaccaggggctctaccgtctgggcaacttccttttcatcctgctcggcgtgtgctgcatctactcgctcttcaacgtcatctccatcctcatcaagcaggtgctcaactggatgctgcgcaagctgagctgccgctgctgcacgcgctgctgcccggctcccggcgcscccctgtcccggcgcaacgccatcaccccgggctcccggmtgcgccgtcgcctggccgcgstgggtaccgaccccgcggctcgcgacagcgacgccgagggccgccgcctgtcgggagagctcatctcaatgcgcgacctcacggcgtccaacaaggtgtcgctggcactgctgcagaagcagctttccgagacggccaacggctacccgcgcagcgtgtgcgtcaacacgcgccagaacggcttctcgggcggcgtgggcgcgctgggcatcatgaacaaccggctggcagagaccagcgcctmcaggtagagcggccgcccgcccccagcgccgcggacctggccggggctgcgcgccgccgggcgggtttgcttcacttctctccgagatggcgctttcttaatctttatccaataaaactcgtgcc

SEQ ID NO: 6757 - DNA, 1400 bp, Rattus norvegicus
gcttggcatcagtagccatctcctgtggagcctcggctctgtacaccaccatggaaggctggagctactttgactccgtctacttctgttttgtggcttcaagcaccattggcttcggggacctggtgagcagccagaacgctcagtatgagaacgaagggctctaccgctttgtcaatttcttcttcatcctcatgggtgtctgctgcatctactccatgtttaacgtcatctccatcctgatcaaacagacagtgaactggatcctgaggaaactggatagcgggtgcttcccacaatgccaaagaggactcctgcggtccaggaggaacgtggtgatgccgggcaacatccggaacaggtgcaacatctccatagagacggacggggtgatggaaagtgacactgatgggcgacgtctctcgggggagatgatctccatgaaggacaccaacaaggtctccctggccatcctgcagaagcagttgtccgagatggccaatggtggaccccaccagaccagcacatcctcccgggatgatgagttctcagggggcgtgggagcctttgcagtaatgaataacaggttggcagagaccagtggggacaggtagggaccagaagtagctgccacatgaagaaacccagggcaagtgggggataggtcactgccacacccccagggacctcagctgtgtctctggctgttggaattagcatctccagtccagcttttgaaatctgaccttggccctgggcagcagtaaacctctcaaggttgggactggagccatcttccctgactcttactttacccttgaattcccaatttcgcgtttggaattgtctgggggagatgggtttccgtccagctttgatcccctaccccaacccggtcatgatccatccctagggagggaaagccccgaaaagcctgactctgtcatgtagtgtgaatggcggctgaacttcacccagcccctcaagaaaaggcagcgaacattcccgaatgcctctrggccttgttctattattggttccactaatagggaaaacatctaactttctctttatatctgcttctctgtttgggagtcttggtttcgttttkttttktttcctatctgactagtgtatctttttggatctcagatgataaggaaaccaaktctaccttcaaacctctaagttgtagcaagatgaaggcagtgagtcaaagaggaggaaagctcccatcttgtaactaaagcctaccgcttactgtgttctttctgaatggttacacggattatgtcattttaccagggcctggagcctgctgtaaaggcaaccgactatttattagaactgaaaatttaataaattcgcattttgttaactatgaaaaaaaaaaaaaaaaa

SEQ ID NO: 6758 - DNA, 1400 bp, Rattus norvegicus
tcatgaagctgcagaagaaggttcaggacctgacggcccttctgagctccaaggatgacttcatcaaggagctgagggtaaaggacagcctcctgcgcaagcaccaggagcgggtgcagcggctcaaggaggagtgtgagctgagcagtgccgagctgaagcgctgcaaggatgagaactacgacctggccatgcgcctggctcacctgagtgaagagaagggagcagcactcatgcggaaccgtgacctgcagcttgaggtggaccagctcaggcacagcctcatgaaggcagaggatgactgcaaggtggagcgcaaacacacactgaagctccggcacgccatggagcagcggcctagccaggagctgctgtgggacctgcagcaggagagggacttgttgcaggcccgggtgcaggagctggaggtctccgtgcaggagggtaagctacacaggaatagcccatacatccaggtgctggaggaggactggcgtcaggcactgcaggaacaccaggagcaggccagcaccatcttctccctacgaaaggacctccgccaggctgaggccctccggacccggtgcatggaggaaaaggagatgttcgagctgcagtgcctggccttgcgcaaggatgccaagatgtacaaggaccggatcgaggctatcctgcagcagatggaggaagtctccattgagcgggaccaggctatgacctcaagggaagagctgcatgcacagtgtgcccaaagctttcaggacaaagataagctgcgaaagcaggttcgagaactggatgagaaggccgacgagttgcagctgcagctgttccagaccgagagccgattactggccgctgagggcagactcaagcagcagcaattggacatgctcatcctgagctctgacttggaagacagttcccccaggaactcccaggagctttcactgcctcaggacctggaggaggatgcccagctctcagacaaaggtgtcctggcagacagggagagcccagagcagcccttcgtggttctgaacaagaagcatctttcgcagacccatgacacggtgcccagcagcagcgagcccccggagaaggagcggcggcgcctcaaggagagcttcgagaactaccgcaggaagcgggcgctccgcaagatgcagaacagctggcgacagggagaaggggatcacgggaatacgacaggcagcgacaacaccgacaccgagggctcctagaggaccacgccgaggctgagcgtctgtgtaattgtgaagggatgctgcgggtttttttactgtacgctacacatacgttgtacaagtattagaaaaaaatgcagcctaataaaatgacctctgagctgaaaaaaaaaaaaaaaaaaaaaaaaaaaa

SEQ ID NO: 6759 - DNA, 600 bp, Rattus norvegicus
gtccctcgctgaccgcctggggsacswgrattacctcatmtacgtgttycctgatcggccaaaggatgargtatattctaagtactacacaccagtcccgtgtgagcscscmacsgcgaaagcagctgacggatacgtgaagccgcagatcaagcaagtggtcccmgagtttrtcaatgcttcwrcagatgcagggagcggcgccacytacatggaccaggctccttccccagtggtgtgccctcaggctcactataacatgtacccacagaatcccgactctgtcctcgataccgatggggatttcgatctggaagacacgatggacgtggcacggcgtgtggaagagctcttaggccggcccatggacagtcagtggatccctmacgcgcagtcatgaccagacctcaycgmctgcagcttcactgtcctcctggaggacccttcctgtggatgttttaattccatgaatcgcttctctttggaaacaatattcgtaatrtgaagtgttaawamwarwmrwramwwwarwrwctctgtgcatagtggcactagtgaagggagtgtgcgtgagtgtgagtgtgtgagtttgcacgttgt

SEQ ID NO: 6760 - DNA, 600 bp, Rattus norvegicus
  misc_feature (409)..(409): n is a, c, g, or t
gcttkgcaatgggamcattaagttgtcccagacaagcaatgttgataaagaagaggaagctgtgtccatagagatgaatgagccagttcagctaacttttgctstgaggtacctgaactttttcacaaaagccactccactgtctcctacagtaacactcagtatgtctgcagatgtaccccttgttgtagagtataaaattgctgacatgggacacttaaagtattatttggctcccaagatcgaagatgaagaaggatcttaggcgttgctagaaattgagaaactaaacctttgacgatcgcttctgagatgccagcgtgtwctgaggtcttttctgtcamcaagtttgtacctgagtattcttaaatattaaaataaaatgtagatatcttcwrwaaawaammwnwwdwwwmmwmwmsakrrkkkgcktacmsaatwmgcycyawagtraaaactggtyytgytaacataaatgtcwctgcctyacaaatactggtgattttcataaatgatcttgacgctaaatgcagttttaagaaatatttttcaakkkaavtaaagttaactgaatttgraaavwmaaamaaaaaaaaaaaa

SEQ ID NO: 6761 - DNA, 600 bp, Rattus norvegicus
gctacagccttccacagcagcagccggmagccgtggcgcgccgcaacgagcgcgagcgcaaccgggtcaagttggttaacctgggctttgccaccctccgggagcatgtccccaacggcgctgcsaacaagaagatgagcaargtggagacgctgcgttcggcggtcgaatacatccgcgcgctgcagcagctgctggacgagcacgatgcsgtgagcgctgccttccargcgggcgtcctgtcgcccaccatctcccccaactactccaacgacttgaactctatggcgggttctccggtttcgtcctactcctccgacgagggatcctacgacccccttagtccagaggaacaagagctgctggactttaccaactggttctgaggggctgacaggccctactgggaatggactttggaagcaggatggcaggagatcctgtgtcttcagtgtttcttgacaacgacgtcaaaagggggaggcagaaaaaaaaaaacaagggaagaggaaaagaaacaaacaaaccagacacccagcctcccacgggcaccaggacttagattcaatgttctcagcaacaggggtgggctccaacagc

SEQ ID NO: 6762 - DNA, 600 bp, Rattus norvegicus
  misc_feature (166)..(166): n is a, c, g, or t
ttagaaacagagygtatggtcgtcatttgcttagcagactcactttactgactcacatwatyykrcamkarkaacgmttcatcagaagcgttttctgtattgacytgaactytgtgcaggaactctgtaaggaagstggggttytgbtagrttgctttgccagccntacagtgaggtgttataggsttcagagtcargcttgkgggtcaggaactgycctaaatcaractgkatytggaaatgscmacactgggagcatwgacagacaccayagtgkggtggsacacgcctgtawtcctaggactyaggagacmgaggcaagamgaccaagaattyagctttgtggtgarkctrargscggcyygggcagcttgaggctatgtctcaaamcawaacagaaaaccawccaaccaaccaaccaaamyattcatgctcaagttgttacggatattcaaagtaatgtttgtatgaactctygtctmtgctagtaaaatgatacagaaggatcccaaatggctgtttgaggagttcaccacacaatacaaaaactgcacatgaaaagaaataaaaatcagttttmwtaaaaaaaaaaaaaaaaaa

SEQ ID NO: 6763 - DNA, 1400 bp, Rattus norvegicus
gctgaccagacgtgtaaaatctggaggacatccaacttctccctgatgacagaactcagcatcaagagtagtaaccccggagagtcatcccgtggctggatgtggggctgcgccttctcaggggattcccagtatatcgtcacagcttcttcagacaacctggcccggctctggtgtgtagagactggagagatcaagagagagtatggtggccatcagaaagctgtcgtctgcttggccttcaacgacagcgtgctgggctagcccctgccccttgagggctgcactgggcaaccaggactgcctggtctagtggctctaagaggatgtacctgaacaataccctgctccaagagagactcaggtcagcctctgcatatcaggccagtgggacctgacccgactaccctcggcccctcttggccaacctagactttttggctactctaccctgggactttctccgtgcccagatctgttgtcagaaagctcacaaagccaggctgcatgtgcctggattgggagtcttctccctttagagagaccagacctagagtgcttggaactgttgaggacatcggaggttgatgcctgtatcccagagctgacaggtactggccttcctgccctctttccactctgcataccctggaagaggtgcttaccttggaagggctgtatgtgaaaccaagaagccctccagccacggcccctgcagtgagcagtgtcagcatcagcagcaagcctgctgctctccagcccctgtagcagggtttggtcttcacctgagggcacagtactagctgtggggcttcgggcttagagactcgggagccgacttgctcagggaaagggctgaggatggtaggtggtgactcctgtctcctcctatggcatccctgagttcttgtcttgggggtggtagagacttacctcaacaggcttggacctgaggctctcagtgaggatgtgcccbtgcttcatgctgcagcccctgctgacaatgcactgattgtctrswgscyctwrgaggagtcagccagggaaacctcaggatgcctttgatgaatcgaactgtatcctcccytcccaaccccaccgcttccttcccagccagtatctgatagcytgcctcagagccaggacaaccctctcccccacttgtgattgctggttaccaggtttgtccctggactcttggcctgtgcagaacatgggattttggagtgtgtgtgagctggccttgatgttagaattggytaggtcttggccagggtgacttttgtctggttgggcagatttttttcttggtgtgttacctctgactcctgagctagacacaggaaccatcaataaakgkgtatgamccmtcmrwawrarrmwamaaaaaaaaaaaaaaa

SEQ ID NO: 6764 - DNA, 1400 bp, Rattus norvegicus
ctggttatgggccaactgcgggggcagcgatctcctctcacatggatgtggacaaggtggccttcacgggatcaacccaggttggcaaattaatcaaggaagctgcaggaaaaagcaatctgaagagggtcacgctggagcttgggggaaagagcccttgcattgtgtttgcagatgccgacttggacattgctgtcgagtttgcacaccatggagtcttctaccatcaaggccaatgctgcgtcgcggcatcccggattttcgttgaggagtcagtttatgatgagtttgtgagaaagagtgttgagcgagccaagaaatatgtccttggaaaycctctgacccaaggaataaatcagggccctcagattgacaaggagcaacatgataaaatccttgatctcattgagagtgggaagaaagaaggagccaaactggagtgtggtggaggacgctgggggaacaaaggcttctttgtccagcccacagtcttctccaatgtgaccgatgagatgcgcattgccaaagaggagatatttggaccagtgcaacaaatcatgaagtttaagtccatagatgatgtgatcaagagagcaaacaatactacctatggtctagcagcaggagtcttcacaaaagacctggacagggccatcactgtgtcttctgctctgcaggccggggtagtgtgggttaactgctatatgatcttgtcagcccagtgccccttcggtggattcaagatgtctggaaatggacgagaactgggtgaacatggtctttatgagtacactgagctcaagacagttgcaatgaaaatatctcagaagaactcctaagaagcagagtgaagagaaactctcagctgtggctacacgtctcctatcgtcaccagcaaagtgttgttttactataattttttcttctgttgatttctttaacatgatgaatccawcagtgtwrctgttactcatagaaaacatgtagcttaatccwacmaarccactcaccttmtaatatgtgactccagtccttatcccagaataaaaggatagatttaggtgcaarmwmwmwrtaactctgtcatgataggtgctttctgtcgtarctcccygthtagrgtactcatttggtgaggaggaccmgtcgtgatttaagctctgtccctctgtgrccccttkaamtgcttctcggcatgcmtgataamtgcagagtmggctgctytgtttcccaggtgttgtgraatgttttctagaaagccatgcctgcttatcaaatgaaatgcccagctgtaattagaatgcaaagctaataaagggacccttgcmtgawwwwrwwrrwmwrwaawtatttgggaatcaactaggattatggcaataaactctgctggtcaaaaaaaa

SEQ ID NO: 6765 - DNA, 600 bp, Rattus norvegicus
aagatcagcatcsakcttgggaagacctggcctaraaacccttggcctttgaagggtgaaacaacggagacagttcatcctgctctgcacacgtgccgacccgccggasgcgaccgaccgcttgagttcctccggtgtgtgctcccagctctccrkmaygwsrctcaagactacctttcagcagtgtgcaaggaccarggagaaccaggaagtgaamcgagatggaaaacagaaagtaaacgggactttttcagaccagtggggcaaagtctgaagrttctmtggtcactggagccagggaatcgctttstgacctgaaggatttttatttstamtggacttgggaacaaattcatcctcmgattccacagccagaaacggamgacmgtagctcctccaggycaggaaatcstaagtgcggagaggggtgcgggtgttgaacgactggagatgtggcaaggaagstggcattyyccaaatgcttcctaacgcaggtgtgcaagtggaaccacacmgtttwtggaagcacttagcccgtgacaggcacatagtaggtcctcaataaaccatgtttgaccccctgaaaaaaaaaaaaaaaaa

SEQ ID NO: 6766 - DNA, 1181 bp, Rattus norvegicus; identical to SEQ ID NO: 2670
  misc_feature (931)..(931): n is a, c, g, or t

SEQ ID NO: 6767 - DNA, 600 bp, Rattus norvegicus
agggggcacccaacaggcacttctagacagagcaatctcttgtgtccaggccccagaggctggctttgtgctggaaggaaccacttcctgtgcccatggcggccctaccagagggtgagacagccacgccgtcttgaaaggcgcacatcttccacagagacagaactcgatgcactgatccgctccaggaaaagttagcgtgtaatgcccysaggaatwmagtgtactgatgatgtcgaagcttcctctgatgccttttttctgtggcacccgcctgatgtccccaatgcagccccccacacgaggaggagctgcgctttccaagcaggcagaacgtaggcaggggacgggcacccaagtgcctgcagggatgttgtgctgcaacaagaattgttacagattcggaacgttttctaaatcccggtaagttctgttgttaatatttaacaagtattttcatacctagggcagctaaccgtggtaggctgaagccgaagggacaccccggccaggttggtggcgctgttcccaccagcccagcccgttcggactctgaagggggggaaattggatcacggagattctaaaacattgctcacc

SEQ ID NO: 6768 - DNA, 600 bp, Rattus norvegicus
aagaacccgaagaaagaaatcaagaagattgccaactttctagacaagaccttggatgaacataccttggaaaggatcgtccatcacacctcctttgaagtgatgaaggataaccccctggtcaattacacccatctgcccacagaaataatggatcacagcaagtccccattcatgagaaaaggtgttgttggtgactggaaaaattacttcacaatgacccaaagtgagaaatttgatgccatatataagawgaaattgtctggaacaacacttgagttctgcacagatattcagagtgcctaaacttcaacttgaatatatgatttcttgaaatagtagtttgacagggaaatcagatggatytgtgagggagaaataaatgtgcttttaaaacactgattaaatatgccctgcacatccctcagcaggaattattaataattccgaattatctagggmcaaggtcttttgtgatcttagttttcaaagggtatgtcttcagattccaargtgactactgaattaaataamtaagttttktrarywytgawwaawwawrmmmdvmamawmmmwmadmarraawwrwdwrdmrktccg

SEQ ID NO: 6769 - DNA, 1400 bp, Rattus norvegicus
ccgctgcaccgcttcaagaaacctggctccaagaactttcagaacatctttcctccctcagctaccctgcacctctccaacatcccgccctctgtgtcagaggatgacctcaagagcctcttctccagcaatggcggtgtggtcaaaggcttcaagttcttccagaaggaccgcaagatggcactgatccagatgggctctgtggaggaggcagtgcaggcactaattgagctgcacaaccatgacctgggcgagaaccaccacctgcgagtgtccttttccaagtccaccatctaggtgcctgtgggcctgcgaagcttccgccattccagaaaagccactttaaaaagcagctgaagtgaccttacagaccagagatttatttttttaaagagagatcagtttacctgtttttaaaaaaattaaatctagcccactttgccgtggcaggaaatggcttgggccacagaggcccaggcccagcaaccatgccttgaggggcttaggcgtgaggccacagcggtgccccaacacagccgcttctgtgccttacaaaaccagcgtgcctcacggccgcacacccaccctctaaggccaccagttgtctctagacctgcagtgagccaggcggcctatacttaggctccccaatgccgtgtaagagctggggccactcccctacacccattataatcaagtgacatgattctcccatgtccctggccagcccagagggcccaggccgtcctcagcgccgagccttgtgtgaccttgtattctattccgtggggtcacagacacctgtgcctagcaatctttccacttgaccaaatacccgagtcttttccatttatatgcaagagatagagtttttaagtaactttttatagcagtggtacaattgtatgtgtgtactctaagcttctctgtcccctgcactccttccttccagtgaccaacttgcaggtgggcccaggccagggctggagaagaagctctgaggcttgtgggtgtcctaccttcaaattttggaccaaagttttgttctctgcccgcctctgactatgcccagttgaggggctgacctctaggccttaatgtccttcctggacgcccacctccatcctagcctgtttctatgggaggggttccctgcacctcagtttctgtgaaagtcatggaagagtgtaaatatttatgattttatacctgtggggctgaggcggtgcagcattttttatggtgacagatgtatattttggtaacgactacaggctcagtattgtcctgggccagccctagccacatctaccccagcccagatggtgtattggggggagggggactttccattaaagcagtttataacctttgaaaaaaaaaaaaaaaaaaaaaaaaaa

SEQ ID NO: 6770 - DNA, 1400 bp, Rattus norvegicus
  misc_feature (284)..(284): n is a, c, g, or t
gagagcgtgtgaacgargcccgtgaagagcttatgaggatgctagctgaarwtkadctssgaratkcmgwwctsktkgtrtttgsyrwcrwgsaggacctsyycamtgcywtsaatgcggccgwaatcacagacwagctggggctgcactctctacgccacaggaactggtacattcaggctacctgtgccaccakcggwgacgggctctatgaaggactagatwggctgkctaatcagctccggaaccwgawgtgwaccwgacccctscttycccctcacttnctcttctmcgccctcagmtttcctctcatgtggcaaacgtgcgactytgwggtcctgagtgccagaagctgtctccatgggttggtcacagtgtgcatcgcaccgtgctgtacatgtgcwgacgcagcctgcarccaggtttttatttaatrkaaatagtttctgtttccactgargcagkttctggtactyctatgcaatattacttagctttttttattrkraaaagagaatcaactcactgtcagtacctgagaagggatwtgggtgtaggggcacctggcctycgggagccattgggctgtagactggtgtcsgtatmcatttggkggktggkttttaacccaaactmagkgcattttttaaaaatagkttaaaacacaggacaagaacryytgracacmcagaacggrgacwwkgcywagkgtaggktttgcarktaakggcckgaatgcwagtwatyagatcacyhgwtyccykrkggggmcagraragaargkgasgaamaaaccaccatycghtgywtgkwymmrgwarasccmccgwgaytygcckgkcttkggsdcashygcattcmawagmatkgtgsttgkacttgtgskcacawggkmacywarrrktvggcwsgrrgccatkgdsgrgkgcagggcmtggcttgwacttggtgwgwgsccaggcccaatggcagshtacakrccsagcttactcttgggcccacttgrayrcamtggcagragscytgggtctywccagcaggagtgcgtgcaasgtgggaggrtcggtccattacagacccacatcstggagcaccccmwtytccatgtgtgaagtagcttcctccytcagcctgcaagggtccgatttdccatcgaaagacgaccyctacttttttyktttgtattytgataaacactgaagaagctggagctrttaaatttatcttggggaaatctcagaamtggtttatttggtgtcgtggaacctcytastgctttcaatacacaattwgtaatcaamwrwwwwrwawamwwrktttcagttttcatttcgacaagcactgtaattatagctwttrgaataaagtctyttamctwwwdraaaaaaaaaaaaaaaaaa

SEQ ID NO: 6771 - DNA, 600 bp, Rattus norvegicus
ggaaggtggcatctacggggtggatggcaaactgcttcagctccaagaggtttttcgactttttgacaatgctaactgtccaagtctacagaacaaaccaaaaatgttcttcatccaagcatgtcgtggaggtgctattggatcccttgggcccctccttctgttcactgctgccaccgcctctcttgctctatgagacagatagaggggttgaccagcaagatggaaagaaccatgcacaatcccctggatgtgaggagagtgatgctggcaaggaggaattaatgaagatgagacttcctactcgctcagacatgatatgtggctatgcttgccttaaaggcaatgctgccatgcggaataccaaacggggttcctggtacattgaggccctcactcaggtgttctctgagagagcttgtgacatgcacgtggccgacatgcttgttaaggtgaatgcccttatcaaggagcgtgaaggctatgcccctggtacagaattccaccgatgcaaggagatgtctgagtactgtagtactctgtgccagcagctctacctgttcccaggctacccacccacgtgatgccacctgctagtca

SEQ ID NO: 6772 - DNA, 1400 bp, Rattus norvegicus
ggagattgcattccttaagaaagtgcacgaagaggagatccgtgagctccaggcccagcttcaggaacagcaggtccaggtagagatggacatgtccaagccagacctcacagccgccctcagggacatccgtgctcagtatgagaccattgcggctaagaacatctctgaggctgaagaatggtacaagtccaaggtttcagacttgactcaggcagccaataagaacaacgatgcgctgcgccaagccaagcaggagatgatggaataccgacaccagatccagtcctacacctgcgagattgatgctctcaagggcaccaacgactccttgatgaggcagatgagggagctggaggatcgcttcgccagcgaggccagtggctatcaggacaacatcgcgcgcctggaggaggagatccgacacctaaaggatgagatggcccgccatctgcgggagtaccaggatctgctcaatgtgaagatggccttggatgtggagattgccacctaccggaagctgctggagggcgaggagagcaggatcaaccttccgatccagaccttctctgctctcaacttccgagaaaccagccctgagcaaaggggttccgaagtccacaccaaaaagacagtgatgatcaagaccattgagacccgggatggagaggtcgtcagcgaggccacacagcaacaacatgaagtgctgtaagccagacacgtgtcctggccccgtcctcactgcctcctgaagccagccttttccactctcggatgtcacacccagtcgcttttctcctctcacagcctctgaaccctcctcacaatcacctctttgtggtcttcatgctgcccagcctcaggaaacccctcagccacctctgcagaccctcccatgagccctggctattggcaactgtcaagcctggctcttaagagagaacctagctcaaggcctgacccttttccctgccatctttgtgacctctggcttagaagggggtaccagagagggcgatgggaccggcagggtcaggacagagctttgtggatatccccacattcgacccccagcctgggtcagagacagaatgaagcctcagcgagctgagatggagaagggggggcctgaaaaatgtcctcgtggcccctctctttcccaccccagctcagataggcttggaaagcaggggctgtaagagagaactggaaggtgctggatgtgggagcaggagatacagaaggagagaggatgggtgagaagttggagaggaaagaagagagaggcagagaktgggctcaggttggtgggaggatgccacctcccytgcytgcccctcccaccgcaggggccytggacagaaacaataaagagwtaagcmcaaaaaaaaaaaaaaaaa

SEQ ID NO: 6773 - DNA, 600 bp, Rattus norvegicus
cctcaagttccagcggsasgagsggcctctatttccccagattctggccacgatcgakctgytgcagcggtcactccccaagattgagcggagtgcctccgaaccctccttgcaccgtacccaggstgatgagttgcctgcctgccttytcagcgcagcccgccttgtgccttagactccactcccagcccaytagggagccattttcagcttaccatgccaaggcaccccyttcctaccagccaatcattgttctgtctgtgccctgatactgcctcaggattccctatcccacaccctgggaaatttgggggactccaaaaactgaggtcccctgcttccyccataatttggtctcctcttggctttggggatagttctaatttggagagctgttttacctccaatggctgggattcagtgcaaagattccactcggaacctctttataaagttttcgcctgamawrwmwwmamwraawwatggggttcccagcaccccatgcggatttkggagtttccctttgtctccccccactattcaaggactctcctctttaccaagaagcacagaattctgctggaaaaaaaaaaaaaaaaa

SEQ ID NO: 6774 - DNA, 600 bp, Rattus norvegicus
acgacccatgstacagtttgggcttgttgctttatccatatatgtgggcctgtctcgagtttctgattacaaacaccaytggagcracgtgttaattggcstcattcmagragmtgytgtggcaatattagtggtyttgtatkkaactgrwttyttcaagaccacagagtytaacaaagaaagraaagaggactcacataygactmtacacgaaaccaccaacagacagagctacgcaaggaatcaygagccmtgaaggggymgasraacaggccagcttsgaagggaactgytggaggcaragggcagkaagatgcatatcactccmtggtgtatacattaaagggctgctgytatacctcttggatgcccactttatctatgwatatagttactttaacmcaatgagttttttgagtttttaattgaactagtagttcaattaaaaaaaatttaagcctttcamtaaaacactgccccacctgtacatttttttattgaaagatgctatgkacaaatgtgtatgttacatgccttctcagaatgatatttgatttaaatmtaataaaaatgcttgcgawcaaaaaaaaaaaaaaamaa

SEQ ID NO: 6775 - DNA, 600 bp, Rattus norvegicus
aaggctgaagcktttwytgttgytgatraaagawttctttgcacaattgtcccattgtttgacacccagtgcacttgtcatttgcataaggcrgcaybwbgascacacttgtatgctgtaacctcatctacttmtgatgttttttttttwaaacaaactatgatgactttaaggagattacaaaaaagattctaatttywgcytwgwtttcttgaaaaaaawrwmaamcatgtgactttwtaaaaatttgtgtagcatacacacagttwkgrwaaassmaggyrayrmgtattsrkgtcwakthrarcctccctccctytcymcacaagacaagtctcttcatctatgtgaaattttctgwacattctctgtgcagagcaaagcttcytcttccttattcccctccttcccagcccagtggtacttctactaaattgtctattgtyttgttwtkktttwdttttwttttaaataaactgacagatgmcwmagtggtgagcttawrawrwhwamawaaaagttctataagctgtgtatacagttttttatgtmaaatattaaaagmctrtghygatgrcmtttawaaaaaaaaaaaaaaaa

SEQ ID NO: 6776 - DNA, 759 bp, Rattus norvegicus; identical to SEQ ID NO: 2680

SEQ ID NO: 6777 - DNA, 459 bp, Rattus norvegicus; identical to SEQ ID NO: 2681

SEQ ID NO: 6778 - DNA, 600 bp, Rattus norvegicus
acccactctgtgccctggcgccgctgcagcagcccctacggccaggagcccctacggcctggggcctcctcttcatcttggcacagaaattgttcaggggatgtggggggggctggggggagsggcmgckrmtatctttgagacagaaagatgcaggacagcatttcatacgtaaccatttgaatgtttttgctgtttttagaattcgggccctggtggrrtgggtggggtgmctgggaagtggcgtaaggagattccatttgtccagtagattgcacgttagtgtggggaggggggtgtggtrccagcaggcagctgctgtgggagttgatgacaaccagcccagatcatctgggtgctcactcagaggggctctcccggagcctgtgcctcgaaaggtccgtccgatgaagcctsksmtctscaytctgccccmttcccacmtacytggtcagggctagtgcccatttttaaccstacccattgatcatttcaagaamcctctggttactgtgcatcacccagacaagacgtgctstmaaattcamcttgtatatttggcagattaaacaacattatmwtaaaaaaaaaaaaaaaaaa

SEQ ID NO: 6779 - DNA, 1400 bp, Rattus norvegicus
  misc_feature (1338)..(1338): n is a, c, g, or t
  misc_feature (1346)..(1346): n is a, c, g, or t
aaggcctggtttctggtggagtatacaattctcatataggctgcttaccctacaccatccctccctgtgaacaccatgtcaatggctyycktsccccatgcactggagarggagatactcccaagtgcaacamgatgtgtgaggctggctactccacatcctacamggaagataagcamtatgggtacamttyctacagtgtgtctgacagcgagaaggagatcatggcggaaatctacaaaaatggcccagwggagggtgctyttactgtgttttctgactycttgrcwwacaaatcaggcgtatacaagcatgaagccggtgatgtgatgggaggccatgccayccgcattctgggctggggaatagagaatggagtaccctactggctggtagcaaactcctggaacgttgactggggtgataatggtttctttaaaatcctcagaggagagaaccactgtggamwygmrkcagaaatcgtggctggaatcccacgcactcagcagtactggggaagattctaatctgctgggacttgatygtatagtccttaggagactttttccaaaatttagcaatgcaggcagggagtgaggcagataggagtctttgattctttgagttcacctaacawgcatgaagctttcagcaaggtttgggtgactggaccagagctgccccccatcagagccaccctacctggctcccttctagcctatcccatgacastgaksacascytacatcctagcctctccmtagactagtgctgtgtgtagcgcctgctgctgtggctctgtctgscatccctcccacccccmcctcagcatccccagaccaakggctttggctgcaggatttycaaaggaatgaacaccaactacatgatgagaggacagatgccacccgccagctgcaccttgaarctagtcayttctaggactgkggcargctttgatggcccaatgcagktctctggagaaaactacctttccccaaggcatytgcacscattgmcaakggtaatgtgcccatctytyctwggtcyygsscdcrassgmygcttkyssartcakkkttttgktttwtkttttkktttgygtacctcaactgagytatgaaratwtgtactggktttacagatcatctcatcgkatggawwagaacaagcttygtggtcagtttrctgggtgaccggyagacaccacaatcmaactagtytgggraaaacctgcttttttgttgtaggtgccacgtaaccctgtyagtttracaaggaatgaccgtgccawtaaammaawwhwmmmwhhrmwwgraaaaaamaaaaaammwmrhnmvdvrddnvvhmmrwwwmmmmmdwhdmmvwmwrcctttgaagatgagtaaagagaaccttgg

SEQ ID NO: 6780 - DNA, 1400 bp, Rattus norvegicus
acctcggatagagggttccagtttgtttcctcgtctcttcctgacatctgttatcgctgtggtgagtctggtcatcttgccaaggattgtgatcttcasgaggatgcctgctataactgcggtagaggtggccacattgccaaggactgcaaggagcccaagagagagcgagagcaatgctgctacaactgtggcaagccakgccatctggctcgtgactgtgaccacgcggacgagcagaagtgctattcctgtggggaatttggacatatkcaaaaagactgcaccaaggtgaagtgctataggtgtggtgaaactggtcatgtagccatcaattgcagcaagacaagtgaagtcaactgttaccgctgtggcgagtcagggcatcttgcacgggaatgcacamttgaggctackgcckadkkattttyytttgtcgcccctmmkyttkckgrywrawggttkkwttwttttctctgaatmctcttcactggccaaaggttggcagatasagsctgttcmcaggccagtgagctttacttgcagtgtaaaaggaggaaaggggtggaaaaaaaaccgratttctgcatttaactacaaraaaarwwwawrtttagtttggtagaggtgttatgtataatgctttgttaaagaaccccctttccgtgccactggtgaataggsakwrrtgamtgggaagagttcagtcagrscaswargcccytykgggtttgagtgtgttmccatgtaggasgkwaaaccaattctggatgcatctaagcttccatgaataactttaattcttagcataatgmtggscytggattgtctgacctcagtagctattaaataacatcgagtwacmtctgsatcargccctcatagaacattcarktgagttgggagtaaactgraaagacaaatgtgttgaaggatatgccagggaatctkgctwaagcctaatacaggrgcatcttcatcccagtgttratgctggacgtacagaaggtgatggcaaaggtgtagaacacattttttcaaagactaaatctaaaacccagagtaaacatccgatgctcagagttagcataatttggagctattcakgaattgcagagaaatgcattttcacagaaatcaagatgttatttttgtatactatatcacttagmcaactgtgtttcatttgctgtaatcagtttttaaagtcagatggaaaaagcaactgaagtcttagaaaatagaaaatgtaattttaaactatwccawtaaagctggaggaggaagrggarwwwwramwaaarwwmmwwwwrwwwrwtttaaattttcatcaatgtatatagaacaaaatgccatattaaagaggggaatgtggrggrctyaaaaaaaaaaaaaaaaaa

SEQ ID NO: 6781 - DNA, 1101 bp, Rattus norvegicus; identical to SEQ ID NO: 2685

SEQ ID NO: 6782 - DNA, 1352 bp, Rattus norvegicus; identical to SEQ ID NO: 2686

SEQ ID NO: 6783 - DNA, 600 bp, Rattus norvegicus
agcaaattaattttgcggtggtgtttttctaccattatcttgggtttccatggtgctattactcacaagtttagctatttttttatgcatcatattaaagttgcaagcaagcagagcaaccctcggttaatgggcaaacattctcctggggtagaatgaattgtctatttagcccgaaaactgcagtttctgtgggtggctgccagactacagccgtgctttgctctggctttgacaggttgaaatagtccccatgagcctggaacagtactccagactgtgctggagtcccaaagttaggagggccatggagcctgggacaggctgctgctttggtctttaggatctaggaagaattacagaggggccaagacagagttccctcccctagaaactgtgcagcctggaagtcagccctggcactttaagatagccttctttagaacatgagttagttggtagtattctgacgtgtaaacagcctatgttgctcggagctggaccattttctccacttccctgtctgcatgcctaagacttctagagcagccaacgtatatgcaacattaaagaaaaaaaaaaaaaaaaaaaaaaaaaaaa

SEQ ID NO: 6784 - DNA, 600 bp, Rattus norvegicus
gtgctaaggccatatgacaccaacctcaccttgacaagccagtacatgctgcaggtggatgccagtggctggtaccagcttctcctaggacccgaagctcaagctgcttgcagtcaggggcacctcactctggagctggtgccagaaagtcagctggcccacagttccttgatcctggatggggtttcccacaggccttttgtggcagcccaggtaagagttgagggcaagcatcgggtacgccggcgaggtatcaactgccaggggctgtccaggatgtgctgtcggcaagagttctttgtggacttccgtgagattggctggcatgactggatcatccagcccgaaggctatgccatgaacttctgcactgggcagtgcccactacatgtggcaggcatgcctggcatctctgcgtcctttcacactgcagtgctgaatctgctcaaagccaacacagatgctggcactgcccgcaggggctcatgctgcgtgcctacgtctcggcgccctctgtctttgctctactatgacagggacagcaacattgtcaagacggatatacctgacatggtggtagaggcctgtgggtgcagttag

SEQ ID NO: 6785 - DNA, 600 bp, Rattus norvegicus
agagcgagtcccaggtcaccatgctgcaaggacagggtttcagcctacgaaccctcttcagcccctctgccctgcccacacgacagtcggcttcccttgtgagctttctggtgggattcctggctttcctcatcctgggcttgagtattctaaccacgtatggcgtccaggccattgccagactggaagcctggagcctggctcttctcgccctgttccttgtcctctgcgctgccgtcattctgaccatttggaggcagccacagaatcagcaaaaagtagccttcatggtcccgttcttaccgtttctgccggccttcagcatcctggtcaacatttacttgatggtccagttaagtgcggacacttggatcagattcagcatctggatggcgcttggctttctgatctatttcgcctatggcattagacacagcttggagggtaaccccagggacgaagaagacgatgaggatgccttttcagaaaacatcaatgtagcaacagaagaaaagtccgtcatgcaagcaaatgaccatcaccaaagaaacctcagcttacctttcatacttcatgaaaagacaagtgaatgttgatgct

SEQ ID NO: 6786 - DNA, 600 bp, Rattus norvegicus
gattatgagactagtggatgccgatgagctgactggcctgtgctatgtcgggaaccaaagcctagatgccctcaccggctttgtggtggcacctctctttacctatttggtgattggaactctattcattgctgcaggcttggtggccctcttcaaaattcggtcaaatcttcaaaaagatgggaccaagacagacaagttggaaaggctaatggtcaagatcggggtcttctcggtcctgtacacggttcctgcgacctgtgtgattgcctgttatttctatgaaatctcaaactgggcactctttcggtattctgcagatgactcaaacatggcagttgaaatgttgaaaatttttatgtctttgctcgtgggcatcacttcaggcatgtggatttggtctgccaaaactcttcacacgtggcaaaaatgttctaaccgattggtgaattctgggaaggtaaagagagagaagagggggaatggttgggtgaagccagggaaaggcaacgaaactgtggtgtaggactagctagcttccactttcctcattttgaaggaaaggatgcagtgaatctcagtttgaacaaactagaaaca

SEQ ID NO: 6787 - DNA, 600 bp, Rattus norvegicus
tcccctgcagcctgtatttctgcgagcagtgggtcctttcctactgtatgtgagccacagacatctaaagatagtcgtcaaggccaatggcaacgcaggagaagactagatggagcactaaatagagtaccaattggattttatcaaaaagtgtggaaaattttgcagaaatgtcacgggctttctgtggaaggttttgttcttccctcttcaagcactagggagatgaccccaggcgagattaaattctctgtccacgtggagtccgtcctgaaccgtgtgcctcagccagagtaccgtcagcttctggttgaagccatcctcgttctcaccatgctggcagatattgaaatccatagcattgggagcatcattgctgtggaaaaaatagttcatattgccaatgacttgttccttcaggaaaagaaaaccctcggcgcagatgatatcatgttggcaaaggatcctgcatctggcatctgtactcttctgtatgacagtgcacccagtggcagatttggcaccatgacctacctctccaaggcagctgccacctacgtgcaggagtttctgccacacagcctctgtgccgtgcagtga

SEQ ID NO: 6788 - DNA, 600 bp, Rattus norvegicus
gaccactggtgtccaagggtcagagtgtgccaggccactgccctacttagagctgcctcgtgcgggtggctttccttgcatgggttgattctgtatcccacactgtgtgacacaatccaccgtggtttatatggcactagttgctccacaagaaccctcctcattttatgtaccctgtggaatgacttccctcagatctcatacatgacccagtaatgcaaaactcactgggcgaggaacccttttgaagagtttgtgggatgagcctcaccttagagcctgaggtgccagggtctcctttttagctcagtgaaggcctaacccwgtgtgytgcagtttactttaacatctagagaaaagaaatgcacaccgttgtgtctcggttggtcctgtgtattggctgtgtgggcctgtctccggttttctttatcagagcactcagcttgtaggcaggcttgcacttarggaaaccttccatatctttcatccctgaaagtttttttatgtgcctacatttttctttaattaaraaaaaarmawawccatcaattttaatgggctattaaagaaccttgggccttgaaaaaaaaaaaaaaaaaa

SEQ ID NO: 6789 - DNA, 600 bp, Rattus norvegicus
tggcccgcccataatccagtcccactcccaggacccacatatttatagaaagtacagtgcttctggttctttttatttctcccccaagaattgcagctggaaccatgttttttttttcttccttctgttaccatctaagaactctgtggtttattattaatattataattaatgtttggcaatagtgggggaaactaagaaaaatatttattttgaggatctttgcaaagttagtacgaaacttctttcttctgatgctacaggataaaggggaaataacacgtattcgaacttagctgtgcagttggggttcacatctagaaggcataagaactattttcttctcaaacagagtcctatgagatgggtggtatcctggtgaaagaggtggtacagacccatgagtgactcagtcccagtgaccaaatgaattgcaggtgctctggtataagacaaatcaccttaaatatagatatattaaatatacatatatgccaaaatacagaatacgagacactctgtgtttttttctatttttagaacgatcttttagaaggtacgagctagactttcacatcctcataagcaggcatgtcaggg

SEQ ID NO: 6790 - DNA, 600 bp, Rattus norvegicus
accgtagtagaattactttgctgtgaatttttctatagtaaatttgtacacattgtttaggaagtataatcagagaagtatacacttcagaaaatttggacatgaagatgtgttgagtttgagtcttatggcattcatgaaagggattagaacctggttcatggaaagatcttttctttggtataatttggctgttagagcaggactgcccctatatatttataaaacacctgtactagatgagagtatataagataccaataaaacaaaacaaaataaacaaaaaaacaacaaaaaatcaaggagaaatgaaaggggtgggagataatgagcaaagatatgaaacgaaaataaaggcagttccctccgatgaggactggtggaggcaagctcaggggtaacacatttgaagaaatgtatgaaaggcaaaatttcttatgaacaaagtaactggaaaagcttagtggtgatgaaatgaacaagtaatgagctgggtagttggagaagatcttgatgaaggtctgaagcagagtaagtaaccagtaaaaggacaagaggaactcccgagaccaggtagaagtcgacatcttcctggaattc

SEQ ID NO: 6791 - DNA, 600 bp, Rattus norvegicus
cccaagggcctggacctcgaccgacccaagaggacccgtacctccttcacagcagaacagctgtatcgtttggagatggagttccagcgctgccagtatgtggtgggccgagagcgcacagagctggcccgccagctgaacctctctgagactcaggtgaaggtctggttccagaaccgccgcaccaagcagaagaaggaccagagcagagacctggaaaagcgggcatcctcctccgccttcgaggcctttgccacctccaacgttctgcgacttctggaacagggccggctgctctccgtgcccagagctcccagcctcctagcactgagccctggcctgccaggtctaaccgctggccacaggggcacctccttgggtgaccccaggaactcctcccaacgcctcaatccaatgccctcagcctcagcgtcgtcccctctgccaccccctctgccagccgtctgcttttccgcagctccactcctggacttgcccgccagctacaaactggggtcctcggcttttgagccctacagcagactagaacaacagaaagtaggcagccctggccaaagtgacaagaaagctgacatttaa

SEQ ID NO: 6792 - DNA, 1400 bp, Rattus norvegicus
cagcctacgtgtgcaacctcctgctgccctgtgtgttcatctccctgctggcgcctctggccttccacctgcctgctgactctggggagaaggtgtctctgggcgtcaccgtgctcctggcgctcaccgtcttccagctgatcctggccgagagcatgccacctgcagagagtgtgccactcatcggaaagtactatatggccactatgaccatggtcacattctccacagcacttaccatcctcatcatgaatctgcactactgtggccctaatgcacatccagtgcccgcctgggctcgggttctcctgctgggacacctagccaaaggcctgtgtgtgcgggaacgaggggagccctgtgggcagtccaagccactagagtcagcccccagcctccagcctccaccagcttccccagcgggcccttgtcatgagccacggtgtctatgccaccaggaagcccttctacatcatatagcttccattgctagtaccttccgcagccaccgggctgcccagcgccgccacgaagattggaagcgtctggctagagtaatggaccgctttttcctaggcatcttcttctgcatggctctggtcatgagcctcattgtactggtgcaagccctgtaagggccaggaactggatttcagggagctacggtcacatcaacaccaccaggcaggaatggcaaagcccaggtggttgttggtactcagatgtactagccagtctctccccaaagtgctgctaacagtcagagacacctcttcaggaccagtgcttctgacctcacaacccacaaacagcctttgcgatctacatgccctcatggagggggatctaaagcccacctctaattccaacatgattaaggtcaaagtacaaacttggaggataagactcaatgccagatgagcacggtaattccagcacatggaggctgagacaggaggattaccttaagttctgtagcctgaggcataaaaaatttttttgaatagtcaccccattgtctatacttggaatcatagctattggctgggggaatccaggttatttctgtctattgagacagagtctcactatgtagtccttgctatcctggaactcgcaatgaagcccaggctggctttgaactcacatagatccacatgcctctgcctctccaaacacaggtgccactatgcctggctagagtgtaggttactaattaaagggacaaagccacactttgcttgtcacccttagcagttgctgttacagattctcacctggcttgtttctgcttaggctctcccggaagggagttcacggtctagtttccagaacagaaggctgtgcagacatttgacccagaacttcaatccataataaatgagagtattcccagcaaa

SEQ ID NO: 6793 - DNA, 1400 bp, Rattus norvegicus
tgtccctcatctgcctgctgggctacagcatgctgctgatggtcacgtgtactgtgtacgccatcaagacccgaggcgtgcccgagaccttcaacgaggccaagcccatcggcttcaccatgtacaccacctgcattgtctggctggccttcatccccatcttttttggcacctcacagtcagccgacaagctgtacatccagacaaccacactgackgtctccgtgagtctgagcgcttcagtgtccctggggatgctctacatgcccaaagtctacatcatcctcttccacccggagcagaacgtgcccaagcgcaagcgcagtctcaaagccgtggtcaccgccgccaccatgtccaacaagttcacacagaagggcaacttcaggcccaatggggaagccaaatcagagctgtgtgagaacctggagaccccagcgctggctaccaaacagacctacgtcacctacaccaaccatgccatctagccgggccgcggagccaagcaggctaaggagccacaacctctgaggatggcacattgggccagggccgttcccgagggccctgccgatgtctgcccgcctcccgggcatccacgaatgtggcttggtgctgaggacagtagagaccccggccatcactgctgggcaagccgtggtgggcaaccagaggaggccgagtggctggggcagttccaggttatgccacacacaggtcttccttctggaccactgttgggcccagccccaaagcacaggggctcggtctccagagcccagccctggcttcctctccttcctcctgcctccgtctgtcctgtgggtgaccccggttggtccctgccccgtctttacgtttctcttccgtctttgctctgcatgtgttgtctgtttgggccctctgcttccatatttttccattctgctcctggccttcccctgccatctgccctgccccctgcccctcctccctgagctgccccatccccgccatcattttctcttctgttccccctcgatctcatttcctaccagccttccccctacttggcttcatccaccaactctttcaccacgttgcaaaagagaaaaaaaaaggggggggggaatcaccccctacaaaaaarmmmaaamaaaaactaatcttgagtgtgtttcgaagtgctgcgtcctcctggtggcctgtgtgtccctgtggcctgcagcctgctcgcccgccctacccgtctgccgtgtgtcctgcccgcccgcctgcccgccttgcccttcctgctaacgacacggagttcagtgcctgggtgtttggtgatggtctctgatgtgtagcatgtctgtttttataccgagaacatttctaataaagataaacacatggttttgcaaaaaaaaaaaaaaaaa

SEQ ID NO: 6794 - DNA, 600 bp, Rattus norvegicus
ctcctatcttatttgagtacccactgtttggtttttttktttttttttttttyttyytykttttttcaacaattactacttggtkgtgwatcagacmcaaacaagctaggtgctaattaataataatmcaagtttctttgtgcmmamwwmwmwwwmdwwmmwwrwmtckkyccttcatcatccactcttctccttgctcaagcctcctgatgccagaggtcratcttcaggaaaaaccawatacaagacctcagttagaccccaccctcacttcttttagwtttaaaaattgtatttatgctgtgaggtggggaragggggtcgtgcacgggcatgtgtgaagccargaattaggtttttccttctgmcacaggggtctcagggttcaaaaactcaggagaggtcagagtckgtgtcaacctccatcacctcatcactcccagacgggccttctgtttcagaactatcactgcttatgcgtttccgtcttctcttcctggattcccttactttaaaaatatttcccaagggttcacgatgatagccaagcagatgacccaggatttcccagcatttactgagcctgattggtcttcggga

SEQ ID NO: 6795 - DNA, 600 bp, Rattus norvegicus
ggtcaaggaagctcccaggaaatggagaaactggccaaggtgagcaaaaggwtccctgcaggwtccctgaagaatgaggataccccaaatagacagtacctggatgaagatatgctcctgaaagtgctagagtatctcawtcaagaacaggcagagcagggaagggaacatcttgccaaacgggccatggaaaacatgtaamcagctttaatgcccaatttcccttcttttccccaagtgawtcccctccctttctcttaagtgtgttaatctctatcctgttaacactgtaatatctttaagtgatgtacaagcagatgactccagatagttttggggatctgctttacttattctgagctgttatgttgtgtatggatgtgtataaatgttatgactctcagattaaaaatatgtcctttattcaagaaagatatctatgatagtgttgactaatgtatccaatggtcatggtattgacaatgctcacatatgatgaagagtatcctataattatcttggaagtttttaacatttattgaattattttgttactgtctgtagtgttttgtggagttctggagcaaaatcaataaagca

SEQ ID NO: 6796 - DNA, 600 bp, Rattus norvegicus
gggcgtaaaagcaaggagagcagccccaaggggcgcagcagcagtgcctcctcaccacctaagaaggagcaccatcatcaccaccatcacgcagagtccccaaaggcccccatgccattgcttccacctccacccccacctgagcctcagagctctgaggaccccatcagcccccctgagcctcaggacttgagcagcagcatctgcaaagaggagaagatgccccgagcaggctcactggaaagcgatggctgccccaaggagccagctaagactcagcccatggttgytgccgccgccaccaccaccaccaccaccaccaccacagttgcagaaaagtacaaacaccgaggggagggagagcgcaaagacattgtttcatcctccatgccgaggccaaacagagaggagcctgtggacagccggacgcccgtgaccgagagagttagctgactttacatagagcggattgcaaagcrrwccaacaagaataaaggcagctgttgtctcttctccttatgggtagggctctgacaaagcttcccgattaactgaaataaaaaatatttttttttctttcagtaaaaaaaaaaaaaaaaa

SEQ ID NO: 6797 - DNA, 600 bp, Rattus norvegicus
ttccgctgctggagcctcacctggacccggaggcarccgakcagattcggaggcgccgccccacccctgccacacttgtgctgaccagcgaccrgkcakmsscagaagtagatgaagrccggatccccaacccayttctcargyccacmctgtcaatgtctccacggcaacgraaraagatgmcaaggrctmcmcccmccatgaaaragctccagmcaatggttgaacatcmcctagggcmacagaaacaaggggaagamcctgagggagccmctragagcmcagggaaccaggagtcctgcccmcctgggatcccaracacaggctcagcgtcaaggccarataccycggggacagcmcaaaagcctgcagaatccaaacccaaractcaggagcagcgtggtgtggagcccagcacaraggacctttcagcccacatgctaccmctggattcccaaggagccagcttggtytgacaraagttgacatccggggatcgccagtgagtgtggaagttcatggacactggatgtttcttaatctcttgtttttaaacgtgataaatttggwgttaggtcmaammaaaaaaaaaaaaaaaaa

SEQ ID NO: 6798 - DNA, 600 bp, Rattus norvegicus
atgcacgagctggtcacgcacgtcacggtggagcacgtcggcggcccagagcagagcaaccacatctgcttctgggaggagtgtccacgcgagggcaagcccttcaaagccaaatacaaactggtcaaccacatccgcgtgcatacgggcgaaaagccttttccctgcccgtttcctggctgcggcaaggttttcgcacgttcagagaacctcaagatccacaaaaggacgcacacaggggagaagcccttcaagtgcgagttcgagggctgcgaccggcgcttcgccaacagcagcgaccgcaagaagcacatgcacgtgcacactagcgacaagccctacctttgcaagatgtgcgataagtcctacacgcaccccagctctctgcgcaaacacatgaaggtccatgagtcctcttctcagggctcacagccttcgcccgccgccagctcggggtatgaatcgtccacgccacccaccatcgtgtctcccaccacagacaacccgaccaccagctccatgtcgccctcttcctccgcggtccaccacacagccggccacagcgcgctctcttccaattttaacgaatggtacgtttaa

SEQ ID NO: 6799 - DNA, 600 bp, Rattus norvegicus
agggagctggatcgggaggacaaagccagcgacgatgagatgatgaccccagagagcgagcgggtgcaggtggaaggaggcatggagagcagtctgcttccctatgtctccaatatcctgagccccgcgggccagatcttcatgtgccccctgtgcaacaaagtcttccccagcccccacatcctgcagatccacctgagcacgcacttccgcgagcaggatggcatccgcagcaagcctgccgccgatgtcaatgtgcccacgtgctctctgtgtgggaagactttctcctgcatgtacaccctcaagcgccacgagaggactcactcaggggagaagccctacacgtgcacccagtgcggcaagagtttccagtactcacacaacctgagccgccacgccgtggtgcacacccgtgagaagccccatgcctgcaagtggtgcgagcgcaggttcacgcagtccggagacctgtacagacacatccgcaagttccactgtgagttggtgaactccttgtcggtcaaaagtgaagcactgagcttgcccactgtcagagactggaccttagaagatagctctcaagaactttggagataa

SEQ ID NO: 6800 - DNA, 600 bp, Rattus norvegicus
ctgcctcccggccatctgggcccctggtccccctgcaggtggctcccaatccccgcagtccccgttccctccccttggaggtctccttgagtcctccactggcattctggcaccgccacctgcatcaaactgccaggccrmgarkccgagacccgggtttcgcgtgtggcggccctggtgaggcctaggcaagaatttagattcaagccctaacctctgcccttatcacctcgccgtctagtttgggggaaactatttggggacacccatggtgactgcagggactctatcaatcggtggcctggtggggctgcagggaaatacacggagccatttgctgaaggggtctgcacgtctaggtgaattcacccattccagccccaccctctccagccaaaccaacttttcacctcccgttcttagtgaagatgggagggaacgggtgagctgtacccctttcccagggacccggggctggcagtccgcccccgcccccctttcaccgctgcgtcacggtgggaaggtcgcggttgctatcggagcagagcggacccctcgcagcgaggagaatcgctgccccgccctggcccattcaacggg

SEQ ID NO: 6801 - DNA, 649 bp, Rattus norvegicus; identical to SEQ ID NO: 2705

SEQ ID NO: 6802 - DNA, 1400 bp, Rattus norvegicus
tggggctaacctgtctgtcttgctggtggagcacgcgctctccaaggtccacttcactgctgagcgcagsgsctactataagcctctcctgtctgctgaggaagctgccaagcagaggaaagagaaggtctgggcccactatgaggagcagcctgtggaggaggtaatgcctgtactggaagagaaggagcgctcggccagctacaagccagtgtttgtgaccgagatcacagatgacctgcatttctatgtgcaagatgtggagactggcacccagctggaaaaactgatggagaacatgcgcagtgacatctccagccaccctcctgttgagggtctacgcccacgccggggaragttctgcattgccaaatttgtagatggagaatggtaccgcgcccgggtagaaaaagaggagtcccctgccaaagtgcatgtcttctacatcgactatggcaatagagagatcctgccatccacccgcctggccctaccacctgccttcagcactcgcgtgttgccagctcaagccacagagtatgccttcgccttcatccagtggccccaagatgaggacgctcgcacagatgctgtgacagtgtgtgcggacatccaaaacactcagtgcctgctcaacgtggagcacctgagtgccagctgcccccatgtcactctgcagtttgcggattccaaaggtgatgtggggctgggcctggtgaaggaaggactcgtcatggtagaagttcggaaggagaagcagttccagaaagtgatcacagagtacctgaatgcccaggaatcagccaagagtgccaggctgaacctgtggcgctatggcgacttccgagctgacgatgctgatgagtttggctacagtcgctaaggagaacttgcctggctcccagcaccgmtgatgccagaccttytccctctgccaggaarccgttttcaactccagacctggtcgggggagtatagattgggkccagcttgcytcagrcagaaacctcytctgtcgcgrgtmgcattggagmkggggtggagarcccaaggcktgctgkggcagacccstcagtggtactgccgkccagtctmtcccagatgatyytgtattywtakttaattgtcttcaaatcaggaaagawccatgaaagactgtgtgttagtgaagggtatratsgtgacacagaggcagctgtcagytggcacccacctbtccsccagaccaccsttyttcccaagctytgwccaagtgttgattatgtgacttstgrtacakccgttbtcaaatyccagtgtgcccatatytgcccccacaccagcctgttctgtatytaaagcttttgmgacccaataaamtagtacctgctgtctgcarmmmwwamaaaaaaaaaaaaaaa

SEQ ID NO: 6803 - DNA, 600 bp, Rattus norvegicus
attatkggggagtgccgcccggtgccgggcctcccggcctgggggggccgcgcccggtgaagcgtckgggcaccgccaaccgcaaggagcggcgcaggactcagagcatcaacagcgccttcgccgagctgcgcgwgtgcatccccaacgtgcccgccgacaccaaactctccawaatcaagacwctgcgcctggccaccagctacatcgcctacctcatggwtctgctggccaaggacgaccagaacggagaggcggaggccttcaaggcggagatcaagaagaccgacgtgaaagaggagaagaggaagaaagagctgaatgaaatcttgaaaagtacagtgagcagcaacgacaagaaamccaaaggccggacaggctsgysacagcacgtytgggccctggagctcaagcagtgamgarkmkgrgmsctrgwgmkcmrgsrgymaaggcgccagatgctgacccaggactccccgaaagcccttggtctctgttctgaggacttcttgcagttggatcatccggtttatttatgtgcaatttccttttccctctttctgcccccccccaacctttgaggcatctgctcccctcgtg

SEQ ID NO: 6804 - DNA, 1061 bp, Rattus norvegicus; identical to SEQ ID NO: 2708

SEQ ID NO: 6805 - DNA, 943 bp, Rattus norvegicus; identical to SEQ ID NO: 2709

SEQ ID NO: 6806 - DNA, 983 bp, Rattus norvegicus; identical to SEQ ID NO: 2710

SEQ ID NO: 6807 - DNA, 544 bp, Rattus norvegicus; identical to SEQ ID NO: 2711

SEQ ID NO: 6808 - DNA, 600 bp, Rattus norvegicus
gagtgtccagcccttgacagatgatgattccaagtctaaaagtcagcccagcttccagtggcgccagccttctttagatgtggacgtaggagaccccaaccctgatgtggtcagtttccgctccacctggaccaagtacattcaagagaataaacagaagtggaaggaacgggcagcgagtggcatcaccaaccagatgtccattgatgaactgtccccctgtgaggmasragscccatcctcccctgcagaagatgagcacaaccagaatgggaatctggattagggaactgggagctggccakgtcctcactgagtccaaagtcttcgatgtcattagcactatccatcaggactggttcccccatctgctccaagggagtgtgttggttgtgatagagacagcccacctgagagccaaatgttggagcavgtggggtgtgggaagggcccctctccacccacargcccccagtggtcattgtgcccatcccttgcctctggactccctccttggccargtggccacttgggaggagtamacccsctgcaggctgcctacaatctggaggggagggtctgagacgccagccccctggg

SEQ ID NO: 6809 - DNA, 600 bp, Rattus norvegicus
ccatcatcctcgtgctcctcatcaattttgtgtttctgttcaacatcgtcaggatcctgatgacaaaactgcgagcctccaccacatccgagaccatccagtacaggaaggcagtgaaggccaccctggtcctcctccccctgttgggcatcacctacatgctcttctttgtcaatcctggagaggacgacctgtcacagattgtgttcatctacttcaactctttcctgcagtcctttcagggtttctttgtgtccgttttctactgcttcttcaatggagaggtgcgctccgccctgagaaagcggtggcaccgttggcaggaccaccacgccctccgagtgcctgtggcccgggccatgtccattcccacatcgcccaccaggatcagcttccacagcatcaagcagacagctgccgtgtgatcccctgtcacccatctgcccagcactccaccaccgaggcggcttcctcattcttcacagccttccctgggtcctccttgctacactgacccttgggtgcaggagaagggggggtggatgaactctcctgccggaagaaaggaaaactatgaaatggaggctctgaaagaccagg

SEQ ID NO: 6810 - DNA, 1400 bp, Rattus norvegicus
cgcgtggcactgccgccactgcgccagcctggagctgctaccgccaccgcgccacctcagctgctcgcacgacggcttagacggcggctggtgggcgcctccgcctccaccctgggccgcggggccacctccccggcgccgggcgcgctgtggttgtccgcgacctcacccacaccgcccccgggcctcgcaccgtgcgcccgccgccgcgccgcaccaccaccgacacaggcgcgcggccggtggctgggacttcccgccgcccgsscccacctcgcgttcgctggaggacctgagctcctgcccrcgggcggcccccacgcgcaggctcaccgggccatcccgccacgcgcgccgctgcccgcacgctgcgcactgggggccgcccctgcccaccgcatcgcaccggagacaccggggcggggacctgggcacacgcaggggctctgcgcatttctccagcctggagtccgaggtatgacgcggctccggcccccacccccacccccgccgccccctcggtcagcgcaggccacggcccgagggggcgcgctaagtggacaggaccctcatgggttgggaaggacagaaacggacctggccggaccccgcctggagcagcgtcctgcgcccccacccccttcgccttgggggaactatgagccagagggacttggtcgcccaaatctcacccatcctgagagcaagggggcggggttcttggagcccaccgactcttttttttttaaacccgaaaagggctttttaacgtcacctgattggcgggaggtgtgggggagtcacgccgcgccccacccctacgcygrsscatggccctcacatcactgtgcagctccctagccccagacacacctctcggggagcctgtttttaacctttcattcatcaggactcaaaactgtgagacssgtatgccaaactgtgactccagaccttggccccgccacacagaaacccctgaccccagactgtgacttccaacacctaaaatgatcatctgaccccagactgtgccccgaccagactgtgacccttcatgtcagacctcgatgaccccttcttttagatccttgttggctctgacctatgacctctcctcmrmgaaarkcctaccswcmcytgtctcccccwcktrcckamywccccagatgccatcaatcacatcttcaagtccagcccttatttgtgacccttcagtgatgatccagcagacactccacccccaggtctcctttcccagatttcagcagggtctgaggctgggctcaaaggagggtctgggagcccacacttgacctttccttccctctcccactcctacactgcagtgtttggaataaaaccatgtttttacacctcmwmaaaaaaaaaaaaaaaaa

SEQ ID NO: 6811 - DNA, 600 bp, Rattus norvegicus
aattcctttggaaggcctgaggagtcaaagccagtttgaagagatgaggtcaagctatattcgggaattgatcaaggcaattggcttaagacagaaaggggtggtccccagttcacaacgcttctatcaacttacaaaacttcttgacagcttgcatgatcttgtgaaacagctccacctgtactgcttgaatacgttcatccaatcccgggcactggctgtggaatttccggaaatgatgtctgaagttattgctgcccagttgcccaagatcctggcrggsatggtgaarcctctcctctttcacaaaaagtgatgacttttctttgtttcctctgcaaaaattgaattttgtggtgtgtcattttgtctcagtcaggacagtcagctctgtgtctttataatgtccttctgaaagccttacgtgtatacatatcacactgtaaacttaggagaaaaccaatgaaatttggattttcctttgtgatgtctaagtagaatttttaaagtgttttgtgcacccatattttgagagtttacatggttaaaaaaggactaaagttgattgtataagtaaactatatctcacccgtgttattt

SEQ ID NO: 6812 - DNA, 600 bp, Rattus norvegicus
ggcttcctggaggagaaggaccagatggaagctgtgagaaccatgctgaaggagcagtacattgacaagactcgggtagctgtgtttgggaaggattatggtgggtacctgagtacttacatcctcccagccaagggagaaaaccaaggccagactttcacctgcggctctgcactctctccgataacggacttcaaactctatgcctcagcattttccgagaggtaccttggcctccatggactcgacaacagagcgtatgagatgaccaagctggcacacagagtgtcagcactggaggaccagcagttcctgatcatccatgctacggctgacgaaaaaatccatttccagcacacagcagagctcatcacgcagctaatcaagggaaaggccaattacagcttacagatatacccagatgaaagtcactactttcacagcgtggcgctcaaacagcacctgtacaggtccatcatcggattctttgtggaatgtttcaggatccaggacaagctacctacagccacagcgaaagaggacgaggaggaggactaaccacgcttgagacctaaacacagacatggctctttctacaac

SEQ ID NO: 6813 - DNA, 600 bp, Rattus norvegicus
aaaaattagggggataaataaaattgttactggaawwwmwmwrmwwwwmwwtcccccattgttatatcttatctgttaggattgtaattgctaggcctttaaagtcatcaagcttgtttcctctgatgttgaggggtagttacgtgccctttgagatcataagcctagcataattgcagcatgtttccagagcaagtcatgactattagcaggaaacgagattagttactactctgttctccacttctgagtagtcgagtaaaccgtgaggtaattcacaagatgagttagagtttacacattgtagagcatataggggagaagagcaaggaagaaggcaatatgtcagttattacctattaatgtggagattatagctctaaattaccttgaaaatctcaaatggctttattctaccaaagtcagtctaaacacttctgccagtgttgctttctttcaaagactggtattagcaacattgagctaaaagttctaaatgcatgaatagttttgaaaatgcagactccttaactgcaaactattaaattgtgtcttaaaaaaacttccatagtgacctgtcagatggattgaatacctttc

SEQ ID NO: 6814 - DNA, 600 bp, Rattus norvegicus
  misc_feature (589)..(589): n is a, c, g, or t
gcgtcgcgcggggccgaggtgcarcccgcggcgcccctgttsstggcgcccctctccaccgcggccccagccaagccatttcgaggtccggagaccgccggcgcggcgcacctgtactgccccctacggctgcccacggccctgcaggcggccgcggcctgcggtccgggtccgcacctgtcctaccgggtggagacgctgctagcttgacaggagcttggagctctgctggtgggtctagggtggagttgggagcaccttttgtcatggagggcaccttttgwcatggargttggaatgcgggctccagggctgtgcactttccaccttccccgaggaatagagattttttttcaactctccatcaaatgtgctaagtaagcatttgtcccaagtgttttaacttagtccagaatagttcctttgtcttttctaactttacagaggatcaaagctgttcttttctatttcatggccaggsctgtactctcccgcaaagaggctttcctctccctcctattgtgttgcaccttctgmtgatttttcttccccacccmcgvmmrardwmaaaaaaaaaaaaaaaactctngcggcctcgtg

SEQ ID NO: 6815 - DNA, 600 bp, Rattus norvegicus
cgcgcgaggaccgcacggtggagctggcggtgctgcagctgcgggagctggctcagcgcgggagcgccgcgtgctggctgccgctcggccgccgcatccacatggacgacacggggctcacagtgctgcgtatcctgtcgcagcgcagcaatgacgaggtggccaaggagttcgtcaagctcaagtccgacacgcgctcggccgaggagggcggtgccgcgcctgcgccctagcgcgcgttttggcggcggggcggggcctgggaagggatgaggtcccgccttccgtaggccaccgcctctccagaggccacgcccctccacctcagtggccttggctggggaggccctgccccctgcccctggaaaagccatagagggtccggtgcccagggcatggactgggcagggctgcctgggaggctgggtcgcagcctctggtgtctgcaaaatacagggcgggatggactctcaaaagcacaccggccctcggcgcacagctggggctgcgggcacccctctccgcggaccccgccctcagcagcgggcccactggcagctggcgaccccctgctcgtgtcacacagggcgggctgagctc

SEQ ID NO: 6816 - DNA, 600 bp, Rattus norvegicus
gtagcagccaatgatctcaagtggcagacagcaggtatgttccggccttttgtggaagtgaccatggttggcccacaccaaagcgataagaagaggaagttcacaaccaagtctaaaagtaacagctggactcccaagtacaacgagacttttcatttcctcctgggaaatgaagagggtcccgaggcctatgaattgcagatatgcgtgaaggattactgctttgcccgggaggatcgtgtgataggactggcagtgatgcccctgagggatgtggcagctaagggcagctgtgcctgctggtgcccgttgggccggaagatccacatggatgagacaggcatgaccattctccggattctgtctcagaggagcaatgatgaggtagcccgagagttcgtgaagctcaagtcagagtctcgatccatagaggaagggagctgaccatctctgccatctttgccttgtgtgccatccagacagcacccactgctcagatcagtcagggagagttagctgtgtagccagcttagagtcctcgtagtcaaaaagctgactctcccagttaaggatgactaaggagaatcttggggggaattc

SEQ ID NO: 6817 - DNA, 600 bp, Rattus norvegicus
accccgcaaaaataagccatagtcctagatctatcctgcccatgtccccctcgcgcctcgggagcctctggccacccctccccgtactgccatcactgaccccaccaggcaagggtgtgcccctcaggccccygtgctgtgcatccttgcctttcggtggttggaccccctccctaccaatcttaagttcaccattcctacagagcctgcccaaggtcaggccccgagggccagccctgaccacccctggatgggtggccaccagtcagggcctaaactcaggagcacagccatagtggggtgggacttgggaaatgagcagtgggtgcttgggggccccagcccttccctgagtccattgcccctgtttctggacttgttggacctgctggaccatttgctctgtcttcctgtctgtgagctaccaccctagtcttccccagcagcccttgcatactttgtccagctgtctctttctctgttgctctgcaaggtttggcttaagaattccacagccagaggaaacacagcaatagagctggagtgggtgggctcgacacacttggagtcccttgacgtggtctgtaatgcacccggaat

SEQ ID NO: 6818 - DNA, 600 bp, Rattus norvegicus
agatgacctacctgagcctctgggtgaagtaggtacggtggatagatcctgggcacctgcagtgaggagcaggcgaaggacagtgaggctgggagaggtctgggcaggaccgttctgtctggatccctcccctcaaagggatcacatgggagtgrttatgtctwatttaagttggtcccctggattgattaktggtacctwaactatatgatgttactgatacaggmtaaccagggggggmtgggaggcatatctgggtgatagtggcgcttacmtaccattcaaggacagagtgtgatctccatcaaggcaggaagtgaatgagcagagatccctggsccaagggagtaaattataaagccgtaagatttgaccattggcagagctcagccagagtgagggaagggagaagagcaccctggctaacctggtgagaacagacacggagcctccctggtttggtttccatggtcacctggtaacctgmtaaaagtgggtgcctgtggcagctccttgaggaagtctgcatggtcaaagttctgtgtcttactacaaaacaataaaatggatggtccctgrwrwraaaaaaaaaaaaaaaaa

SEQ ID NO: 6819 - DNA, 600 bp, Rattus norvegicus
agccagtgcccttcagtgactacattcaccccgtgtgcttgccagacaagcagacagtaaccagtttgctcmaggytggtwataaagggcgggtgacaggytggggcaaccttcgggagacgtggacaacyaacatcaacgagatacagcccagcgtcctgcaggtggtgaacctgcccattgtagagcgaccagtgtgcaaggcctytammmggawrygcaytmctgacmwswtgttctgtsctggcttcaaggtgaatgacaccaagcgaggagatgcttgtgaaggtgacagtgggggaccttttgtcatgaagagcccctacaaccaccgctggtaccaaatgggtattgtctcctggggtgaaggctgtgaccggaatggraaatatggcttytacacgcacgtgttccgtytgaaaaggtggatgcagaaagtcattgatcrgcmkmrataggtttktgggtgggtgagagacccacagtatgggatcctcattgcaaaatcacagaaaccagttcaaaatatttttgtggkttgtttctgttctcaataaaagtgattgtcvgtwaaaaaaaaaaaaaaaaamcctcgtgccg

SEQ ID NO: 6820 - DNA, 600 bp, Rattus norvegicus
tggaagaacaggagttttcattgctctggaccacttaacacagcacataaataaccatgactttgtggacatatatggactagtagctgaactgaggagcgagagaatgtgcatggtgcagaacctggcacagtacatcttcttacaccagtgcattctggatcttttatcaaataaaggaggtcatcagcccgtctgttttgttaactactccacacttcagaagatggactctttggatgccatggaaggtgatgttgagcttgaatgggaagaaactaccatgtaaaatttggaccaaagattacaacaggaggatagaattttcagatcccaggagccaacattatccctcttgcttctgaattggactgggcaaaggaaatctttatgcttcccggaccatgcctcactgactgggctgactgttttatggacggatggttgtaggaaaatgctcatataagatagtcatttgttttatatagaattaaatattatgtaattaaaatgtttaagaaaatacatcatacaaattttcgaggtcctcaagtcttcttgaaataagccaaatataaaattatgattatttcatagcgt

SEQ ID NO: 6821 - DNA, 1400 bp, Rattus norvegicus
agtgaaaaaccatttgaagaataccaagagagtacatactataatcgatttttacaatggaaatggctagaaaggcgtccagtaacaaagaacacattcagacaatacagagttttaggaaaaggcggatttggagaggtttgtgcctgtcaagtgcgagctacaggaaaaatgtatgcctgcaaaaaactagaaaaaaaaagaataaagaagaggaaaggtgaagccatggctctgaatgaaaaaagaatcttagaaaaattgcatagtagatttgtagttagtttagcctacacttatgaaaccaaggatgctttgtgtttggtgctaaccattatgaatggaggggatttgaagtaccacatttacaacctgggcaatcctggctttgaggagcagagagctgtgttctatgctgcagagctgtgctgtggcttggaagatttacagagggaaagaattgtatacagagacctaaaaccagagaatatcctccttgatgatcatggacacatccgaatttcagatcttggtctagctctggaaatcccagaaggggagatggttcgaggaagagttggtactgttggctacatggctccagaaattatcagtcatgaaaagtatacatttagtcctgattggtggggacttggctgtctgatatatgaaatgattgcgggacattctccattcagaaaatataaagaaaaagtcaaccgggaggaaatggaaagaagagtgaagactgaaactgaggagtactctgagaggttttcagagaatgccaagtccatctgcagcatgttacttaccaaggatccaagtaaaaggctgggctgccagagtgatggagcctctgctgtaaagcagcacccaatattcaaggatattaacttcagcagactggaagcaaatatgttagacccacctttctgtcctgatcctgaggccatttattgtaaggatatcttggatattggacagttctctgtggtgaaaggagtcaacctggacaccaatgatgagatcttctacactcaatttgcgacagggtgtgtcaccattccctggcagaatgagatgattgaatctggatgtttcaaggacctcaatgaatatgaagataaaggtctgtcaccacttgaaaaacacaagatatgttcctgtattcttagaccaaagagaaacttcttccatagactcttcagaagagcggcctgcctgaacattgcccacagtgaggagagggagccaacagaacactgaccattcactgtgcagaccacaaagcaagaccctggtgttaagaaggaatctgtcacatacccagtgtcttgtcctttccataaattgtaataaacggtctgtaacactgtttwaaaaaaaaaaaaaaaaaa

SEQ ID NO: 6822 - DNA, 600 bp, Rattus norvegicus
gaaatccgaagtttgttttggaagcatgcccatctctccatgctgctgctgccctgtggaaggcccctctgcttgagcttaaacagtagtgcacagttttctgcgtatacagatccccaactcactgcctctaagtcaggcagaccctgatcaatctgaaccaaatgtgcaccatcctccgatggcctcccaagccaatgtgcctgcttctcttcctctggtgggaagaaagaacgctctacagagcacttagagcttaccatgaaaatactgggagaggcagcacctaacacatgtagaataggactgaattattaagcatggtggtatcagatgatgcaaacagcccatgtywttttttttycagaggtagggactaataattctcccacactagcacctacgatcatagaacaagtcttttaacacatccaggagggaaaccgctgcccagtggtctatcccttctctccatcccctgctcaagcccagcactgcatgtctctcccggaaggtccagaatgcctgtgaaatgctgtaacttttataccctgttataatcaataaacagaactatttcgtacacaaaaaaaaaaaaaa

SEQ ID NO: 6823 - DNA, 600 bp, Rattus norvegicus
cccctggcccccgtgttgcctctgctcacacactttgcagatatcaatactttcatggtgcagcagattatcaagttcaccaaggatctgccccttttccgttccctraccatggaggaccagatctcccttctcaagggagcggctgtggaaatcttgcatatctcactcaacactacgttctgccttcaaacacagaatttcttctgcgggcccctttgctacaagatggaagatgcggtccatgtagggttccagtacgagtttttggagttgatcatccacttccacaaaaccctgaaaagattgcagctccaggagcccgagtatgcgctcatggctgccatggctctcttctctcctgacaggcctggggttacccaaagagaagagattgatcagctgcaggaagaggtcgcgctgatcctcaayaaccacattatggagcaacagtcaagactccaaagtcggtttctgtatgcaaagctgatgggcctgctagctgagcttcggagtataaacagcgcatactcatatgaaatccatcgcatccagggactgtctgctatgatgccgctgcttggggagatttgcagctga

SEQ ID NO: 6824 - DNA, 600 bp, Rattus norvegicus
ttactccagtgcagacacctccctgcctcggttgtgcgtggggtatggttgggcacatctgggtcctcacttccastgatgtttccacctccctccctsgggcctgaactccaggggaagagttcctsgtagctcctactctgggaacgtmcgtccgtccgtccggaaatgaaggaagagcccaggaccgggctggatttatttaagtttttctgtgtgggttttgggaagggagggcacgttaattttattggggtggggcaggacctcggccttaaaatgccagtttgcctagttctggctgttcctctggttcgaagaagcgctcttgcccagggaatgcgtggcagccggcggatgggggggggggggcagcctcgggttgccccggcaccagaagacagtgcttttgcagtttatcccatcttgggcactcagaaaggttgccggcttgatgtcttcaataaattaagttttatttggattgagcaaaatcacsttaataaatkacacgtttttcawaraaaaaaaaaaaaaaaaaaaaaaaaaaaagtttggcggccgcaagcttattccctttagtgagggttaattttaggt

SEQ ID NO: 6825 - DNA, 600 bp, Rattus norvegicus
atagaaaacattagtatgaaatttgatgaacttcatcagttaaaggccaataattggaaacagatggatcctcttgacaagaaggagcgaagggcccctcctccagtgccaaagaagccggcgaagggccccgcgccgttgatccgggagcgctcgctggagagctcgcagcgccaggaggcccgcaagcgcctgatggccgccaagcgcgcagcatcagtccgccagaactcggccaccgagagcgccgagagcatcgagatctacatccccgaggcgcagacccgcctctgagcgcggccgacgaggaccgtcccgcatccctgccctcggccgtctccccgccccctccgtctctgagctcagtgaccgccaccgtcgtggcgtagttgtccacctcgcaggagccgtccccaggccgccccgcttcctgggccactttgcccatcttctccaccgagcttcgctccccagtcctgaagcctcatgcagacatccaaaccctttattttctgggccaagcaaacttgtgtagaaacgacacctgtaggtcactcaccctcctcagttctctcaagctagtgtgcccctagaactcag

SEQ ID NO: 6826 - DNA, 1400 bp, Rattus norvegicus
  misc_feature (1128)..(1128): n is a, c, g, or t
gcatggttggaggtggtgggcaccgcccccatgaaggccctggagggagcatgggcagtggacatcggtctcatgagggccctggagggagcatgggcagtggacatcggtctcatgaaggccctggacacgggggaccccatggccaccggccacatgacgtccctagccatcgaggccacgaccatcgagggccaccacctcatgaacaccgcggtcaygakggccatgggggaggcggccaccgagggcatgatggaggccacagtcacggaggagacatgtcaaaccgccctgtctgccgacacttcatgatgaagggcaactgccgctatgagaacaactgtgccttctaccacccaggggtcaacgggcccccactgccctaggcctgcctgccctacccgcacccctgtggactgcagctttgctccttccacttggttatggcttctgtgaggcccactttscttttccccagctgatgaggagccggccccctcagttcccacctggttgggtttctgggggtttctgattcctggtgtgcattgatgtacatattccctccagtctggagcggagaggagagagactggactgctgagacggctggcttcactttgtgaggagatttgccctgtgccccaaaccccttccagtattagccccgatgcctgagaacctgaagccggccaccctggagacctctgctctccacatgcacacggaactgagttggtcagctgcacttaggaaaccgtccaagctaagctcattatcttcacagggtgagggggtggtgaggggtaccatatatcccactgcactgagggctcaagctggctgaagctgagttctggaactaccccccacttgtgccccacatgggccagtcactgttgagtcctttctcaagaaggactgcaactgttacttcccaggtcatcgtgggtytgytaggttcagtgatggcacattcatatctgtgtccagtggaagttgtatctggcaraggggtgkcctgtagtgttggsccactmttgcytacasccattttmgagactcygtgagsccagytttcattamcykyavccskgtrkacygrgcytgwcsywhyacwtgywntssctktgkgaktgsvywskhtcyttaccccgtaaggagccytgtcaktgagryttcytgggtagactcagcaggakggsccyttcmcagtcctctcytccccctgtsttggcatcagttgttttctatgaaaacagtgggttggtyttgtrcaggstyttgggttagaaccaatggatttgaggagktttytmhwttgrywwtsyaymttttgtacmytwwtawtawacastggaargagaarmmrmwmawwwaaaaamaaaaaaaaaaaa

SEQ ID NO: 6827 - DNA, 1400 bp, Rattus norvegicus
ccaactgtgtagaccagggcagccggcccgtatgccagtgcctaccaggctttggaggtcccgaatgtgagaagttgctcagtgtcaactttgtggaccgggacacttacctgcagttcactgacctgcagaactggcctcgggccaacatcactcttcaggtctccacagcagaggacaatgggatcctcctctacaatggggataatgaccacattgcagttgagctgtaccagggccatgtccgtgttagctacgacccaggcagctaccccagctctgctatctacagtgctgaaacaatcaacgatgggcagttccacacagttragctggtgacctttgaccagatggtgaacctctycatcgatggtggmagccccatgaccatggacaactttggaaagcactacacactyaacagtgaggssccccyctmtgtgggagggatgcccgtggatgtgaactcagctgccttccgcctgtggcagatcctcaatggcaccagcttccacggttgcatccggaatctatacatcaacaacgaactgcaggacttcaccaagacacagatgaagccgggcgtggtgcccggctgcgagccctgccgaaaactctactgtctacatggcatttgccagcccaacgccaccccagggcccgtgtgccactgcgaggctggctgggggggcctgcactgtgaccagccagtggacggcccctgccatggccacaagtgtgtccatgggaaatgcgtgcccctcgatgcacttgcctacagctgccartgccaggatggrtactcgggggctctgtgcaaccaggtcggggctgtggcagagccctgtgggggcttacartgcctgcatggtcactgccaggcctcggycaccagaggggcacactgtgtgtgcagcccaggtttttcaggcgagctgtgtgagcaagagtccgagtgccggggggaccctgtccgggactttcaccgggtccagaggggctatgccatytgccagaccacgcgcccactgtcatgggtggaatgccggggcgcgtgcccgggccagggctgctgccagggcctgcggctgaagcggaggaagctcaccttcgagtgcagcgatgggacctcgtttgctgargaggtggagaagcccaccaagtgcggctgtgccccgtgtgcgtaacgtgcgggtggcacactakcagctgggctggggcgggcatcaccaggatakcgcttgggtcctggtgggcscggggacactgagctgcctttccagcggactgmactgccagggcagaggagcaaggcccgggttgccaagccctctcccaaagtgccttgcacarataggcgcttaataaatatttgttgartgmaaaaaaaaaaaaaaaaa

SEQ ID NO: 6828 - DNA, 600 bp, Rattus norvegicus
gctgcagaggatgtttccgtcgccttatttctaccacccaagcctgctggggagcatggacagcacgacggcggccgcggcggccgcggcaatgtacagcagcatgtaccgaactcctcctgcaccccatccgcagctgcagcggccactggtgccccgcgtgctcatccacggcctggggcctgggggacagccggccctcaaccctttgtccaaccccatcccaggcaccccgcatccccggtgaggaaggagggacagtgcagcccgagcagccctccaggtttccacccggccgccgacagctgccccacctctccccgcaccaaaccaacaggaatagaggcagacgagtaaagggggggagctcaccggtgggctgggtccccaaggaccggccagccctctgttctccatctgccccctcagaggcagggccgcaaagctccccaacagtgtgactggagaaaatactgaccccactgaaagtgcaaccagtaagtgaaaacacccacccacccacccacccacacacacacacaaaatgaaccctcgagttctttctttctttctttttttttttttttgaaaaaaaaaaaa

SEQ ID NO: 6829 - DNA, 1400 bp, Rattus norvegicus
tcttcaaagccaagtggcagacggccttcagtagcaccaacacccacaagatggatttccatgtgactcccaagaagaccattcaggtgccaatgatgaaccgcgaagatatatattcctacatcctcgaccaaaacatttcctgcacggtggtggggatcccttaccaaggcaatacatttgctctgtttattcttcccagcgagggcaagatgaagcgggtagaggatggcctggatgagagaacgttgaggaactggcttaagatgttcacaaagagacagttagatctttacctccccaagttctccattgagggtacctataaactggaaaaaatcctccccaagctgggcatccaggacatcttcaccacccatgctgacttgtctggccttactgaccacaccaatattaagttgtctgagatggtacacaaatccatggtggaggtagacgagtcaggaacaacagcagctgcctccacaggaattctcttcacactcagatctgctcgaccgagctctctgaaggtagaattcaccagaccctttctggtggtcattatggatggtacaaacctctatttcattggcaaagtgattcagccctgaggtgggactccttctgaaactcacaggcctatacagaaggagccaggcatattctacagactatccacctcttggtagctagtgattttcatagagtagattgactaataaggtgttgtaagtgagaagatcaatatcctggtggaagcttccttgatcacagttgcaagatgtgctcttgctctattttttcattattgacactgatgctaaagaggccacttgattgctccaaggtcctatcaccatatttgtgacatagttatgcccagacctcagacctctcttgctcagtctagcgctacaaagctctgcaagaggctggtcagcatagataaaggccaccaggaagcacggttataaacctggtctcacacctattagcaccatsgkyrmgarrggacattggactgagattctgaaatggtgctaatagctatgtaactcgaaaatgaaaatgttcctctctgcctgtgtttctttgagtatccagtcaatgatcagaacaagtagcccattcagtgatctgtgaaattgttacacaagggttggctactctatgctagccatggttgatgtaagaactcagtttaatagcatacttgagcaatcagggtaaaagtgttccaccatgaacaaaggtatcaaatcacaaacctggctgactgcagttggatgttagaggtctgttgtaaatagtagaacatagattgcagactgacttgttgatttctactttggcaatagcaataaagcactttgcaarggaaaaaaaaaaaaaaaaaa

SEQ ID NO: 6830 - DNA, 600 bp, Rattus norvegicus
attgctcttgmacsagrtaaaactgtaaaaaaggttcaggataagttccgtctggacctgtcagatgaggaggccgtgcattacatgcagagtctratcgacgaaagtgttcacgccctgttcgytgcggtgrtggagcaratccataagtttgcccagtactggagaaaatgaaagtggatttgacccatcgtgawgcctgacttagtaagaaaacacatgagaaaccactgctgtgtactgaggacattagagaaagaaccaggaagagaaggtgtccaggagttacggcatgctcaagcwttgtgccagtggacsccactgctgaaatccggccgagagggtttgtctaaagctgctgctgtagcgtaggcctcagatytgcaattccaaacctcagaggytgaagcatgaagagtaycacagttgtgaagccatcctcagctgcaaatgacttytgggttggacaaaaagcactgtatatttgttttataatgtataaagatggaraatggawwawrwawawrwwwwaagaattcaggggaagktytattakgaaacagtaaagcattttagcctytgaraaaaaaaaaaaaaaaa

SEQ ID NO: 6831 - DNA, 600 bp, Rattus norvegicus
gtcctctgtggttggttcttctgctccttcgagttcatgcagctgtctcagtggaaactgccacatgcacctctctagccctctgactgtactcatcttcacactcccctttacctggtcagtctggtgaccgagtgcacgcggtcagtgtcagtcacacagtgacagtgcctgtgctgcagggagcaggagcaggcatgttgctgccagtgtctgcctcctgatcatttccacatctgaaggagttaagagcgccaagtggcagaccaagttgatggttttctgtcatcacccaagtctccagaaaagctagctgattcagccggtctggtcctggcccaggtgaagtttctgtggttaatagtttcccaatataaagtggtggtgtctacattatgccctgtgatgtaagtccccttagtactcaaagctgcctttgtctcttaagagtatgctctgagaaagactgtgggaacggaaggcttattcttagacagggtggattgtttacgacatgtctggacttgttctgagtttgaggactattctgctacactggctgtcccaattaaagatcctattttctgtctcaaaaaaaaa

SEQ ID NO: 6832 - DNA, 600 bp, Rattus norvegicus
ccctccctttggagggagaaagcaagggataaggcttccctaggtgtacaggggtggccacttttgaggtggccgaagccttgcaggatacaccctatctgctgctcactcttcttcgtccaccagaaaggagcagtgggacagatggacagggtccttccatgctacagttccttgcttcttggagactgggcctwacatcctgagagagcccaggcccaggggatggatggggttgtgagggctggtggttaatggtggaactttctctgaagctcctttctcccttgctattggtccctatctcccgagcaagcctaccctaaacccccagagtgcacccaatgaccccctcccttggggtgactcctgatgaagcacaactccccgcagggccccaacccactgcagtggccatatttgggcagttcccagtcctgtgggytgggctatytggggrgcagatgtggggtctggggctccctgrggagtgggtcctgggwttggatctttccctagggggtcctytwacccttctcttcctcccctattgctgtaaatrtttcamcaaaawrraaaarraaaaaaaaaagacaaaaa

SEQ ID NO: 6833 - DNA, 1400 bp, Rattus norvegicus
ggccgggcttcctgggcgaaggcgargcgttgctgtccctggccatgctgctacgtctctacctggtgcctcgcgcggtacttctgcgtagcggggtcctgctcaacgcgtcttaccgcagcatcggggcgctcaaccaagtccgattccgccactggttcgtggccaaactatacatgaacacgcacccgggtcgcctgcttctgggcctcacgctgggcytctggctcaccacagcttgggtgctgtctgtggctgagaggcaggctgtcaatgccacgggacacctcacagacacactgtggctgatacccatcacgttcctgaccattggctatggggacgtcgtacctggcaccctatggggcaagattgtctgcttgtgcaccggagtcatgggggtctgctgcacggctctactaktggctgtggtggcccggaagctggagttcaacaaggcggagaaacacgtgcacaacttcatgatggacatccattatgccaaagagatgaaggagtcggccgctcggctgctgcaggaagcctggatgtactacaaacacactcgaaggaaggactcccgagcggctcgcaggcatcagcgcaagatgctggctgccatccacacgttccgccaggtacggctgaaacatcggaagctccgggaacaagtgaattccatggtggacatctccaagatgcacatgatcctgtgcgacctgcagctcgggctcagcgcctcgcaccttgccctggagaagagaatcsatgggctggcarggaagctggatgccctgactgaactgctcagtwctgccctgcagcagcagcagccgccagaacccatccaggargccacatagctgcctgttatcgatctacattctactcaggacccacagaagaatcaggctatgtaccgaaggactgagctcaaggacatcctccctgcstattctgaccaagccccatgaataaatcacctcaagatgccaggrcacargtggatccacgttgagatgcatggactctggtggtggcagccatgagtggacactggcttggacctcccatggcagtggggttactatggtcaccastacacataggccatcatcaaaagtcctttctgctgtgctgctgctgttcatgacccctcaagctctgttggaagaggaggtgcccggggtccaagatgctaggaagaagcttcagtcaccgcaggccggcctcgctgaaggaaccaggtccgagcggcgggaggtgctgccccmtggtggacgctgcttcccccagaatgcggaaactgcgcgggagtarggtgcggggtgccgctcaccaatccacsmatymyactttgtaataaatggtaarcaaagmmaaaaaaaaaaaaaaaaaaa

SEQ ID NO: 6834 - DNA, 600 bp, Rattus norvegicus
agtgggccaccccagatgtgttcaacccagagcactttttggagaatggacagtttaagaagagagaatcttttctgccattctcaatgggaaagagagcttgccttggagaacaactggccaggtctgaactgttcattttctycacttctcttatgcaaaaatttaccttyaagccmccaaccaatgagaagctgagcctgaagttcagaaatggcctcacactttctccagtcacgcaccgcatctgtgctgtccctagagaatgatgctggagaagcaaagagaaaaaggaagatgtggtgtatgccctraagcatctgggcttgctcaagtgagaggagaaggtgtyacrgaatgaatgtgattcgagcaatattgaagaaatttgacttagaaaattgaagcaaactcctagaatgatggcctcttgatttggtggtgggcacatcacttatgagctcagtggcgtgcctttgcatctaaaagttaggaggacaatggtgattcttcctataaayaaggtggaktagtgaatttaaaatgaattaaacatcaaaattaaaactataattattattttaaaarwaaaaaaaaaaa

SEQ ID NO: 6835 - DNA, 600 bp, Rattus norvegicus
attcagctgcttctactcctgtagctgggcaggctagtaatgggggccacactagcgactactcttcttccctcccatcttcacccaatgttggacaccgggagctccgggctgaggcagctgcggtggctggswygagsaccccagggtccttacatcgagcagccaagcggcggaccagcctttttgcgaaccgtcgaggcagtgattctgagaaacggagcttagacagtcggggcgagacaacagggagtgggcgagccatccccattaaacagagtttcytgctaaagcgaagtggcaattccttgaacaaagagtggaagaagaaatacgtgaccttgtccagcaatggctttytgctctaccaccctagcattaatgattacatccacagtacacacggcaaagagatggacttgttacgaacaacagtcaaagtcccaggcaagcggcccccaagggctatctctgctttcggcccctcagccagcatcaatgggttggtcaggatatgagcactgtccaratgggtgaaggscctgaagcctcaactccaatgccaagccccagtcccarccccagctccctgcagctccc

SEQ ID NO: 6836 - DNA, 600 bp, Rattus norvegicus
cctctgtaggggtcagttctgtgctcaccatggccacactgggtaccttttctcgtaagaatttccctcgtgtctcctatctcacagctttggacttctatattgcaatttgtttcgtcttgtgcttctgtactctactagagttcactgtgctcaacttcctgacctacaataatattgaacgacaggcttctccaaagttctaccaatttccaaccaatagccgtgctaatgcacgtactcgtgctcgtgcccgcactcgtgctcgtgctcgtgcccgtgctcgtcagcagcaggaagtgtttgtgtgtgagattgttacctatgaggaaaatgctgaagagggttaccagtggtctccaagatcaagaagacctcagtgtccctggaggcgatgtggccgaagctatgtgtgcttcagggttctcaggaagtatttctgcatggttcctggttgtgagggcaacagctggcagcggggccgcatctgcatccacgtttatcgcctggataactactcgcgggtgcttttccccattacattcttcttctttaatgtggtctactgggtgatttgccttaacctgtaggctccagctg

SEQ ID NO: 6837 - DNA, 600 bp, Rattus norvegicus
ttgagatccatgacaagctgcaacgggcagccaccatccgaagtatggagcgccggagactgggattggaccagagggcccactcactggacatgctttcccccgagaagcgctctgtctttgcagccctggacacaggccgtttcaaggcctcatcccaggagagtatcaacaacagacccaataacctacgccttaaggggccagaacagctcaacaaacacgggcagggcgcttctgaggacaacatcatcaacaagtttgggtccacctccaaactcacaaagaggaaaaacaaagatctcaaaaagaccttacctgaggatgttcagaaaatctacaaaaccttccggaattactctctggatgaagagaagaaagaggacgagacagagaagatgtgtaactcagacaactccagcacagccatgctgacagagtgcatacagcagcaagctgagatggagaatggaatggtacccatggacaccaaagaccaggggctggagaacaattctttacttgaagacagaaactaaatgttaaagacactggagctggactaaagtgtggcttgttttggttggtcttggtttgttt

SEQ ID NO: 6838 - DNA, 600 bp, Rattus norvegicus
tgctgctcctggccgcggtggtgggcgccacgcacctcgtctaccttcgcctgctcttcttmatccacgaccgccgcaagatgcggcccgcacgcctggtgcccgccgtcagccacgactggaccttccacggcccgggcgccaccggtcaagcggccgccaactggacggcggkcttcggccgcgggcccacgccacctgcgctcgtgggcatcaggcctgcaggcccgggccgcggagcccggcgcctcctggtgctggaggaattcaagacggagaagaggctgtgcaagatgttctacgccatcacgctgctcttcctgctcctctgggggccctatgtggttgccagttacctgcgcgtcctggtgcggcccggagctgtcccgcaggcctacctgacagcctcggtgtggctgacattcgcacaggccggcatcaaccccgtggtgtgtttcctcttcaaccgggagctgagggactgtttcagagcccagttcccctgttgccagagcccccaggccacgcaggccaccctcccctgcgacctgaaaggcattggtttgtgaagcgagctctgccacccaggctccctctggg

SEQ ID NO: 6839 - DNA, 600 bp, Rattus norvegicus
ttctacaagttggtaatacagacgaccatactgctcttcttctgtctgcccatggtcaccatcagtgtgctgtacctgctcattgggctgaggctgcggagggagaggatrttgctccaagaggaggtcaagggcaggatatctgcagcagccaggcaggcctcccacagaagtattcagcttcgagatagggaacgcagacaggtgaccaagatgctaattgctctggttatagtatttggcacctgctgggttccattccatgctgaccgtctcatgtggagtatggtgtcccattggactgacggcctgcgcctggccttccagtctgtgcaccttgcttctggtgtcttcttgtacctcggctcagcggctaacccggwgctctacaacctcatgtccactcgcttccgagagtccttccgggaaaccctgggccttgggacacggtgctgtcatcgccaccaaccgcgtcacgactcccatagccaccttaggttgaccacagtcagcaccctgtgtgacaggaacagcagggatgtacccctggctgagaacagggatccagggtgtgagcaagagacagaccctcctgaataa

SEQ ID NO: 6840 - DNA, 600 bp, Rattus norvegicus
gaacgctaccagaagattggtgataccaagcgtgccacgccaatcgaggtgctgtgtgagagcttcccggaggagatggccacctacttgcgctatgtgcggcgcctagacttctttgagaagccagactacgactacctgaggaagctcttcaccgacctcttcgaccgcagcggctacgtgtttgactacgagtatgactgggccggcaagcccctgccgacacctatcggcaccgtccatcctgatgtgccctcccagccgccacatcgtgacaaagctcagctccacaccaagaaccaggcgctgaactccaccaatggagagctgaacacagacgaccccaccgcgggccactccaacgcccccatcgcggcccctgcagaagtagaggtggcggatgaaaccaagtgctgctgcttcttcaagaggaggaagagaaaatcgctgcagcgacataagtgagggactttggcggaaatctctacacccgtgtctcgtcatccccttcgagagcattaactatttaaaaccaggagagaagccgtgcgccgtccctcgtgcgcccctgttagctctaaagtccagcttgtcccctca

SEQ ID NO: 6841 - DNA, 600 bp, Rattus norvegicus
cggttcccagccattcacttgctattttaatcaacatcaaagaccagaggacgttctcctgcagcgcacacatgacgagattgtcctcctgcactgcttcctctggccggtggtggcgtttgtggtgggtgtcctcatcgtggtcctcaccatctgtgccaagagcctggcagtcaaggcagaagccatgaagaaacgcaagttctcttaacggggaggaggattgtgggaagccaagaccagaggctgcctcatgggcactcgcctaccctgcagagcccacatttggtggcgcaggagatggaagggrccacaaaaggcctccaagaggcccctccctcaacggcagcagaagcaggcacagctggaagactggggaayttgttgcttgtatcccgtgtgctgtagcaatggctaaagggtcaagctyttagctctatggagtgactgtttgggaaaccctctaagaagtcggtttcccttggaaagttacagtctattatttgtatagtgtagtatacaaaccattatgacttatgctcctcacaaatattaaaagacagtgttctgtgwwmwwmwmwwraaaaaaaaaaaaaaaaa

SEQ ID NO: 6842 - DNA, 600 bp, Rattus norvegicus
ctggagggcttgggccagcaggtggggtcgcacttcttgctgcctcctgcaggggagcgaccgccgctgctaggggagcggcggggcgcgttggagcggggcgcccgcggcgggccgggttccgtggagctggcgcacctgcacggcatcctgcgccgccggcagctctactgccgcaccggcttccacctgcagatcctgcccgacggcagtgtgcagggcacccggcaggatcacagcctcttcggtatcctggaattcatcagtgtggcggtggggctggtcagtatcagaggtgtggacagcggcctgtaccttggcatgaatggcaaaggagagctttatggctcagagaaattgacttctgaatgcatcttcagggaacaatttgaagagaactggtataatacctattcatccaacatatacaaacacggagacacaggtcgcaggtattttgtagcacttaacaaagacgggactccaagggacggtgccaggtccaaaagacaccaaaagtttacccattttttacccagaccagtggacccagagagagtcccagagttatacaaagacctactggtgtacactggatga

SEQ ID NO: 6843 - DNA, 600 bp, Rattus norvegicus
aagatggctgtttcctgctgactgctttctgagaaccagctggccatcctgcctcaggggcagggactgttgaaacttacttgagccagaggcagctaagacagaaagctggattgaccgaagtctgcagaaccttccccccctcaggtggtctgtgctttcttctctgtccacagatcaggaaggggtggtgggttcagggaccatcgtgtgagaggagggggggtggttagccaactccaggcccctgcgacaagggcttgtttagaaagcctgtcaccagagctgctgtaggctgaatgtatgtctgtgtcgtaaatgccagagccaacctggacttcctgtcccttccctcgtctttggctgaagaagaccggaattgctgctgttcgagtcactggtctgtgtaacaagccaaacaagccttttaaaaagccttctggatccatgggtagagagagagagtgagagacgttgtatggtgaagggaagtggggagggggatatctgaacacagttgacttttattttgtaaaaagacaaaagatataaaaggagctttacagatttcagatcctaaaaaaaaaaaaaaaaaaaaaa

SEQ ID NO: 6844 - DNA, 600 bp, Rattus norvegicus
gataagcaggagttycragatgcctggaaactacctaagatagcagttgatgggccctttggtacagccagtgaagatgtgttcagctatgaggtggtgatgttagtgggagctgggattggagtcacgccctytgcctccattctcaagtctgtctggtacaaatattgtgacaatgccaccagtctgagactcaaaaagatctacttctactggctgtgcagggacacgcatgcttttgagtggttcgcagacctgctgcagctcctggagacccagatgcaagaaagaaacaatgccaacttcctcagctacaacatctaccttactggctgggatgaatctcaggccaatcactttgctgtgcaccacgatgaggagaaagatgtgattacaggcctaaaacagaagactctgtatggacggcccaactgggataacgagttcaagaccattgcaagtcaacaccccaacaccagaataggagtttttctgtgtggccccgaagccttggctaaaactctcagtaaacagagcatctccaactctgagtccggcccacgtggagtccacttcatcttcaacaaggaaaacttctaa

SEQ ID NO: 6845 - DNA, 600 bp, Rattus norvegicus
agttcgcctaccttggctaacttgggcagggtggctcaagtcctgaggctgatgagaatcttccgaattctcaagctggccagacactccactggcctccggtccttgggggccaccctgaagtacagctacaaggaagtggggttgctcttgctctacctctcggtggggatttccatcttctctgtggtggcctacaccattgaaaaggaagagaacgagggcctggccaccattcctgcctgctggtggtgggccacggtcagcatgactaccgttgggtatggagacgtggtcccagggaccacagctgggaagctgactgcctctgcctgcatcttggcaggtatcctggtggtggtcttgcccatcactttgatcttcaataagttctcccacttttatcggcgccagaagcaacttgagagcgccatgcgcagctgtgactttggggatggaatgaaggaggtcccctccgtcaatttaagggactactatgctcataaagttaagtccctcatggcaagcctgacaaatatgagtaggagttcacccagtgaactgagtttagacgactctctacattagttgggacccagg

SEQ ID NO: 6846 - DNA, 600 bp, Rattus norvegicus
ttgccatcttccgggagtactcactgattgagattattcctgactttgagattgtagcctgtactgagaaatggcccggggaggagaagagtgtgtacggtacagtctacagcctttccaccctgctaatcctctacgttttgcctctgggcatcatatctttctcctacacccggatctggagtaagctaaagaaccacgttagtcctggagctgcaagtgaccaytaccatcagcgaaggcacaaaacgaccaaaatgctcgtgtgcgtggtagtggtgtttgcagtcagctggctgcccctccatgccttccaacttgctgtggacatcgacagccatgtcctggacctgaaggagtacaaactcatcttcaccgtgttccacattattgcgatgtgctccaccttcgccaacccccttctctatggctggatgaacagcaactacagaaaagctttcctctcagccttccgctgtgagcagaggttggatgccattcactcggaggtgtccatgaccttcaaggctaaaaagaacctggaagtcaaaaagaacaatggcctcactgactctttttcagaggccaccaacgtgtaag

SEQ ID NO: 6847 - DNA, 1400 bp, Rattus norvegicus
ggagcgacacgggcagccagtacctggaggacagcatcagccagggccaggtgtgcaataaaagcagctcctaagccagggacgcctccgccctctccccctggggaaagagcccttaagagtcctcgcctgtctcacaaagcacatggacagggttgtttgagggctccatgaatcactgctgggccttgtaagttttcattgtcaaggaagataagatactgcatttagtaagagtgcacagaaaagggagagatgaacagtgggctcctgctcgtcgtctgcgaaccgctccgaacatcctccagctctcgcgcaaagcatgctgggctctgccaccatcttgccgccatggtctgtgtgttttcaaagatggtgttgaaggtcckaggtcaaaagaagtagtaaataatggtacctgagcctccatgtgtagctgctagactctagttgtttccgcgtgggtttaamaygkkcagaaaatattttagcagtggacttggatttccccagaggagccatgatccggaactagatgtattgcagaaatctgggaacaaactgtatagaggggtaaacttggtgtataaccacgtgactttctgaggaaagagaacactgcaagggtggaggtgtagaagctcttctggagtggaaagagctttttgtcctttgtacacgtgggtgtacatgctacacacacgggtgtacatccacctctacttatacaattcaacttcatttaacgaagcccatccgtgatggcgagtttagaccactgcctcctagagttttcagtccaggctagtggctttagagattgtctttgtgttctaaacaagaagagaaaacactattcacttctaaaggggcaactgtacagcagagtaagtgatgatattgaccagcaggctgaacctcttccacatagcgccaaatacgagcatgaggagatcgctagatccccccgtcttggtgggcggaaaccactgatgggagtgctggagtatccatgtgcgaagagaggctgcacaagctagtatgttagaccggagctggccagcatactctatgcgtacttgtggagctgaaggtttgatcttgcatttggttttctccgtcaaagacctatggagaggcagatcagtgagaaacacaaatagtgtttcatacacataggctactgaccagtgttttctatgtgagacatttagagactattctgacgtaaagaataacttcaaggcaggtactatggtatttatgtagtttgcaaacgtttacatgttctctctctctctctctctctctctctctctctctctgctgttgtgatgtaacatttatgtgcacaaactacttgtaataaaagattttaagaagtaaaaaaaaaaaaaaaa

SEQ ID NO: 6848 - DNA, 600 bp, Rattus norvegicus
tccagccccatcacagaccgagagccggcctttggacagcaggctccgtgcagcatggccacagaaagcaagggggaactcgagaagattctggcccatttagaagatgagaaccggattcttcagggagagctgaggcgcctgaaatggcagcacgaagaagcagtcgaggcacctaccctagctgagggctctgctgaagcaaccccagaccaccgcaatgaagagcttctagctgaagccaggatcytgcggcagcacaagagccgcytggagacacgcatgcagatccttgaagaccacaacaagcagttagagtctcagctgcaacgcctgagagagctgctcctgcagccacccactgaatcagatggcaatggctctgcaggctcatccctagcctcctccccacgccagtcagaaggcagtcatccccgggagaagggacagactactccagacactgaggctgcagatgatgtgggttcaaagagtcaggatgtcagccatagcttagaagacatcatggagaagctccgccacgccttccccagtgtgcgaagctctgacgtgactgcgaacactctgctggcctcttga

SEQ ID NO: 6849 - DNA, 600 bp, Rattus norvegicus
cagagtatccacaccaccacactggcaagggctaaaggcgaaatcctgagagtcattgaaattcttatcgaaaagatgcctacggatgttgtggatcttcttgtggaggtcatggacatcatcatgtactgcctggaaggatctttagttaagaagaagggtcttcaggagtgtttcccagccatctgcaggttctacatggtcagctattatgagcggagtcacagaattgcagttggagcacgccatggctcagtggccctgtatgacatccggactgggaaatgtcagacaatccacggacacaagggacctatcactgcagtgtcctttgctcctgatgggcgttaccttgccacctactcaaacactgacagccacatttctttctggcagatgaacacctcacttctgggaagcattggcatgctgaactcagcacctcagctgcgctgcatcaagacctaccaggtacctccagtgcagcccgcatcccctggctcgcacaacgccctcaggttggcccggctcatctggacttccaaccggaatgttatcctcatggcccacgatgggaaggagcaccgcttcatggtctga

SEQ ID NO: 6850 - DNA, 600 bp, Rattus norvegicus
tacaccaccgtgctctttgccactatctacctggctccactctccctcattgttatcatgtatgcaaggattggggcttccctcttcaagacctcagcacacagcacaggtaagcagcgcctggagcagtggcatgtatccaagaagaaacagaaggtcatcaagatgctgctgactgtggccctccttttcatcctttcctggcttcccctgtggactctgatgatgctctcagactatgctgacctgtcacctaacaaactacgtgtcatcaatatttatgtctacccttttgcccactggctcgccttctgcaatagcagtgtcaaccccatcatttatggtttctttaatgaaaattttcgcagtggtttccaagatgctttccagttctgccaaaagaaagtcaaaccccaggaagcctatggcctaagagctaaacgcaacctggacataaacacatctggcctgttggtccatgaacctgcatctcaaaacccaagtggggaaaacttgggatgtagaaaaagtgcagacaatcccacacaggaatccttgatggaggaaacgggagaagctaccaacagtactgagacttag

SEQ ID NO: 6851 - DNA, 600 bp, Rattus norvegicus
  misc_feature (561)..(561): n is a, c, g, or t
gatcttccataccatcgagcagctcaccatcaagcttcacagactgaaggacatggagctggcccacagagagctgctcaagtcccttggaggagagtcatcgggtggaaccacacctgtggggagttttcacacagaggcagccagatggacagactactccctctctcctccagccaaggaagccctggcctctgattcccaaaatggtcaggagcaggggtcctgccctgaagaaggctccgacatcgccctggaagacagtgccactgacacagctgtgtcaccaggaccatagcatccagacaaccagagtctggcctgcctcagagcacaaccctgggagacccaagcctccccttgaaagatgccacagggccagggaatccctcgtgttgcctggtctgtttccaccagacagtccagttcagtgtctcttcctctgttagcccaagtctccatggcttttgtctcctgagcatgttgaccacaacagaaaggcctccaccctgcatagccacatagccagtgtggggtgtgctgtgtgcacagtgccctcangtgtgcatgtcagaggaggaggcttatgtgtgattgcac

SEQ ID NO: 6852 - DNA, 600 bp, Rattus norvegicus
cggtgcagaatgtacagcctccaactccctgggctcatacaccacggtcatcattctgaagctcgtcactttaaccaccctcacacatgactccagccaaaccactggcctcagcacccccacagtcagtcctcacagcagagccaacagcacctccacagagaaaaagctgccacagcaggagagcaaaggtgtggtcatcgtggctgtgatagtatgtacgctggtgcttgctgtactgggcgctaccctctattacttctacaagaagggcaaactgccttgtggacgctcaggaaaacaggagatcacgctgcccccgactcgtaagagtgaatttgtagttgaagttaagtcagataagctcccagaagagatggctctccttcagggcagcaacggtgacaagagggctccaggagaccagggagagaaatacatcgatctgaggcattagccggttcaccaatgttttgggctccctgctcagtcttcaccccaagctaaagcctccagagggacagcggggaagatccttactcaactgccctgtagaccaggtccagagagctgcaacaagagtcacctggaagacctcac

SEQ ID NO: 6853 - DNA, 600 bp, Rattus norvegicus
accgcagcgacctcattcagaaactccctgcaggaaatcgaccctgggttgtacagagatatatttgtgcgacagaacattaggagtcttcccacagatgacattgcagctctaccgatggaagaacagttgcggaaactccaggargagagaacgtgtaaagtgtgtatggaccgagaggygtccctcgtgttcattccctgtggccatmtggtcgtgtgcaaagaatgtgccccctctctgaggaagtgtcccatctgcagagggaytatcaagggcacagtgcgcacatttctctcctgaacaggactggactgatggtccacggttgtgaccccagccaggaggagcagaagttcaatgtcactcccagctccataaggaacttgaggccggcctggatgacatgagacactgcctctaaatagtgtaaaaatgaaaaacatggggaaaaaaaaccttttgtctaaactcaaagaatggattacttacataataattttaattggtttccttaaaagtgctatttattcccaactcagagaactgttttcagtaaagtattttcatactatctgcatctaaaaaaaaaaaaaaaaa

SEQ ID NO: 6854 - DNA, 1400 bp, Rattus norvegicus
cgtcccctgaacaagacgtttttattgaaggaccatctcgtgggctgctaaagaacagatctactaagtgtgcttactggaaaatcagctttggagagcttgtgaaatatgagaggctagagacagcacaggagcaagaaaagaaagctcacgagccaggggcagcttcccccaaggaagtcaccagtgaagatggaattcccacagaccctgagctcgagaagcccttgttcatgaataaagcactagtttcacaagagaccgatcccatagaaagggtccctggtatgtatcacacttcagagaaagatttaccacaggattttgatttaatgagaaactttcagatttatccgggacaaaaaccttatgtctgcagtgaatgtgggaagggttttagccaaagtcttcatcttctagagcacaagaggattcacactggggagaaaccttacaaatgcagtgagtgtggcaaaagcttcagccatagatcttccctcctggctcaccagagaacccacaccggagagaagccgtacaaatgtagtgagtgtgagaaagccttcggcagcagctccacactcatcaaacacctgagggtgcacaccggagagaaaccttaccgctgccgggaatgtgggaaggccttcagccagtgttcaaccctcactgtgcaccagaggattcacactggggaaaagctctacaaatgtgctgagtgtgacaaagccttcaactgcagagcaaagctccacagacatcagaggatccacacgggtgagaaaccttataaatgtgctgagtgtgggaaaggatacagccagttcccatccctggctgagcatcagagactccatactggaggacagctttgccagtgcttacagtgtgggagaacctttacacgtgtgtctacccttatcgaacaccagagaattcatactggacagaaaccatatcaatgcaacgaatgtgggaagaccttcaaccagtattcctccttcaacgaacatcggaagattcacactggggagaaactttacacatgtgaagaatgtgggaaagcctttggctgtaaatcaaacctttatcggcatcagaggatccatactggtgagaaaccctatcagtgtaatcagtgtggcaaggccttcagccagtattcattcctaacggaacacgagcgaatccatactggagagaagctctacaagtgtatggagtgtgggaaagcctatagttacaggtcaaacctctgtagacacaagaaagtccacctgaaagaaaggctctataaatggaaagaatacggcacacctttcatgtacggctcatccctcgctccacatcagaggtgtctgaagggggagaagcctgaggaccttaattcatccctctga

SEQ ID NO: 6855 - DNA, 600 bp, Rattus norvegicus
ggakcakaagacccattgcttcaakgagcggactcggarcctgctgcgggaatggtacctgcaggatccctaccccaaccccagcaagaaacgagaactggcgcaggccaccggcctcacccccacacaagtaggcaactggtttaagaaccggcgacagygcgaccgcgcagcggcggccaakaacaggctccagcaccargccatcgggccgagcgggatgcgctcgctggccgagcccggytgccccacrcacggctcagcakagtcaccgtccacggcagccagtccgaccaccagtgtgtccagcctgacggagcgcgcggacactggcacttctatcctctcggtaacctccagcgactcggaatgtgatgtatgatagccaaggccgccctcctcctccttcccctcctccccctccaccttcccctcctcctcctagccctgctcctcttcctcctcttctactccatccctagaacaaaccgaaatcaggatacacagccacacacacacacacacacacacacacacaagtccatacacactcccaccccagccaaaaatatatttaaaaaaaaaaaaaaaaaactcgag

SEQ ID NO: 6856 - DNA, 600 bp, Rattus norvegicus
agccgtgccctggagcgcgctttcgcgctctacaacctgctggccctatacctgctgccgctgctcgccacctgcgcctgctacggtgccatgctgcgccacctgggccgcgccgctgtacgccccgcacccactgatggcgccctgcaggggcagctgctagcacagcgcgctggagcagtgcgcaccaaggtctcccggctggtggccgctgtcgtcctgctcttcgccgcctgctggggcccgatccagctgttcctggtgcttcaagccctgccsctcgggggcctggcaccctcgaagctatgcgcctacgcgctcaagatctgggctcactgcatgtcctacagcaattctgcgctcaacccgctgctctatgccttcctgggttcccacttcagacaggccttctgccgcgtgtgcccctgcggcccgcaacgccagcgtcggccccacgcgtcagcgcactcggaccgagccgcaccccatagtgtgccgcacagccgggctgcgcaccctgtccgggtcaggacccccgagcctgggaaccctgtggtgcrctcgccctctgttcaggatgaacacactgccccactctga

SEQ ID NO: 6857 - DNA, 600 bp, Rattus norvegicus
  misc_feature (35)..(35): n is a, c, g, or t
ccgaggggacaccgtgggcaccgcgcgcacgcacntgcaccgcgcaccgggtttcgggacttgatgcaatccggatcaaacgtggctgagcgcgtgtggacacgggactgacgcaacacacgtgtaactgtcagccgggccctgagtaatcacttaaagatgttcctgmggggttgttgctgttgatgtttttstttttgttttttgtyttttgttttttttttggtctwattatttttttgtattatataaaaaagttckatttctatgagaaaagaggsgtatgtatattttgagaaccttttccgtttcgagcattaaagtgaagacattttaawhaamhwykkydsgagaatgtttaaaaammwwwwrrrrrmagtagttggcttttgaaaaaaaattttttttcttccctcctgactttggatttatgcgagattttgttttttgtgtttctggtgtgtagggggctgcgggttatttttgggttgtgtgtggtggtgggtgggggtgtcgcatctgggtttttctcctcccctggcagatgggatgccagcccctccccccaggagagggggcagagtgccgggtcaggaattc

SEQ ID NO: 6858 - DNA, 600 bp, Rattus norvegicus
gtcggcgtgtacgargcagccaagctgctcaacgtagacccggacaacgtggtcctgtgcctgctggctgcggatgaagatgacgaccgggacgtggctctgcagatccatttcaccctcattcgtgctttctgttgcgagaacgacatcaacatcctgcgggtcagcaacccgggtcggctggcaragctgttgctactggagaacgacaagagccccgctgagagcggrggcctggcgcagaccccggacttacactgtgtgctggtgacgaacccacattcatcacaatggaaggatcctgccttaagtcaacttatttgtttttgccgggaaagtcgctacatggatcagtgggtgccagtgattaatctccccgaacggtgattccccgaacggtgatggcatctgaatggaaataactgaaccaaattgcactgaagttttgaaatacctttgtagttactcaagcagtcactccccacgctgatgcaaggattacagaaactgatgtcaaggggctgagttcaactacaggagggctaggagatgactttgcagawggasagagagstgaramtraaggaggaagctgtgtgg

SEQ ID NO: 6859 - DNA, 1400 bp, Rattus norvegicus
ctggaacgaaggcctctgccagcaaaggccacagttggaccaatcccccgggtgagtgtggggctcccgcagggtggtaggggcgggtcagggtctcctctgcctatctggaaaccccagttcctaggagatgctgtccgtgaaatcagatgatttagcattggatctctttctgtgttagctcctttcgtcttctggccctgtgggtgggtggatgtgattgtgcaccatttattagaagaggaatctgaagttcagagatctgagatgacttggccaaggtcatacagctaggagcagatctgagccggtgtctcttgaggactgaaaccctggcctggtctcactgccgtccacacctcctcctgctcccgtccttgagctccacctgaagctttggcagcctccctcatgtcggtctgttgccatttttggggggcaccagtgagtggaacatcactggctgcagcacagtcaaatcatgcaggttgtaagctgagtcagcacacccgtggctgaccacgggagaccgggagacctgagtaacggctagcggtggctttctgttgtctcctgacccggctgactgggtttgagggtgatctgtctcccggttcacccccttctcttcctggctttgctgwttctcagcagcctgaagaagaccctcagacagcwcgagrcccctccttccrctgcctggccaagtccgacccttccttgctttcctctgagacaggacccccacccccatgtctgtcagcagttctccctctgtcttgatagatcttwcsmbkcttgtaggacaggctgaaagaaccccagtccctcattctgaaactggggccaaagctgtgcctgctggmgccccagggggtggaagcaacctgtgggtagattggttggttacyagacccagctctgaratggtgtrrgtgsgcacrtccytagggtagscagttattggggggaccctttctatcccttgaacctctcrcgtaaagggacttccccagtcctggttggcttttggaamctggkccttcttgctgttttttamccttccccgtttcwaktactgcgtgtaacgtaaagtgtatctgagtragggtggtgggarccctstgyccagtgctgtctytgtctcctrtggsctgtgagtttccttstagwgttctactcttctccacctcwttgctcawacagagctgtggccttggcgcctgccmtgcwtstgcagtgcttcattgtctcgtagcttgtcagctkwyrmygkawbbrysdaygkgmyraakacstbrygarrtaamaravmwwvdravaktcgatttgtattgatgtatgtgccaatgtgggaaataaagaccttgtgagataaaaaaaaaaaaaaaaaaaaaaaa

SEQ ID NO: 6860 - DNA, 1400 bp, Rattus norvegicus
ggcttcctgtggattgacggcttgcttagaagcagaacaagccatccctacctccccaggaggcacttgggtgcagggaagcaattctccacaggtttgggcctagtttctgtctgtaaatccaacactcacctgaaagctgtgaagaggataaaagcctggattctagaccaagagtctgttactggggaccgcccgggacctctggactgagatgccgggagcctgtagctttacactaacctacacggcctgggcccgccgggccggatgagtggactggcctgagggcctctggttcagcaaggtgcaggacttgaagcgatagtatgagtttcagaaacggggccgtcaaaacgtgtgaaatgacagagcggtttctccttccatcctagccatgccctttggagcaggttttgaagagtcttagtagtggtaaaacctacaggatccaaaaaaaaaggactggtttctgctcagcagcccagggaccacatcagtgtgtggggaatttccacttcagcaccctgtctcaacaagcagtctcaaaaacaccaaagaaggtggggctggaaagaaagcggccctgccgtctaaaagccccacacccaggctggtgggctcagtcagaaacttaaggtgttgcctaacaatagatgggttctggatgccagtgtggtttgcctcagactttgggcctaagcagggagaagggggtcccattaatttctttgcacccttgtggcagctactgcataycctctaggatgtctggtccaggcagcaacttgggacaggcattggtgsmtgmtgagtcccaaactgagatatgaagagagctccctgagctggaccttgtagagtcyaccyctgttgtgctggyccagctyacwksctgakmcacactcgagggccgtgggcatgggaaactctaggggcactttccacccctggctaccaggtgtccagsgacyccgtagctcmccaaggttcgccatctcctaagtgggagctcacatcatatttaacacattgggaatgggtttggttataaatacgtgtgagggtttgtgctggtggggggatccggggagagtggctgctcttattagctttwatctgtggggtgatatgtgaaatattttgtacatagacaagatgaattatgggatgggaagtctttggccactttamwwrmwrwrwaramwrwacttgtgtgtggagtttgcaaacgtgccgcagagggaatcctgaactcccgacatcagtgtggttcagcgtcctgcggcgaattatgcacgcgctgtccccagcgagtgtgggagtggtgggcctgcactgggccatgaggcagactaaataaattaagcagttaacrgrgmaaaaaaaaaaaaaaaaaa

SEQ ID NO: 6861 - DNA, 600 bp, Rattus norvegicus
cattaggctaggaaccaggtcccagcaggtgtgtctccagctgcactggcaggggacagtgaggagagaggaaaggacatacattctggggaccgggactgcagaacacccagccagtatggtagaaacctgggttccaccccaagctcgcaaaaaaacaggcatgggcactggggatgtagaggcaggaagatcagaacttcagggtctttctcagccacaggatgggctcaaggttagcctgggctgcatgagaccatgtctcaaagacagaaatctcagtgtgctctctcatgttcctaacacgcctgattgtttccctctggaggctgctgtgccagcctggccagcctgcgtttggtcgcagccttgtttctcagctctgggacaaaaactcaaatctgcatctctgcccacacctccagttccccctccccgggtgactcacaggccaaggacaaagtggcctcttgctcccagggagggtaggatgtgctggtgtagcctgtgtacgtcctaagcactggagccctgcctcggcctagagacgcttagggaaaccagaacacatcagagcaattaggagccaagaatggtggc

SEQ ID NO: 6862 - DNA, 1400 bp, Rattus norvegicus
tcactcagcctgtaaagagtctggtgacggggactgaagtacagagcgacagaaacaaagagaagaaacctcagagtgttctaagcgtaattccaacagatgtccacaatactaacgactactcagaagatacagagaaccaacagagggatctactactccagaacagcccaggacaaagcaaacacacccctcgggcccgacgaagcacgcactacctaacacatctcccccaaatcagaaagattctcagtgacttcgaggacagtgcttccccagaccttctagtgaggggggataatgatgtccctcctttcagtggagatggacaacattttatgcacactcccgacagaggaggtgctgttggatctgatcctgaaagctcagctggtcaccctgtgtcaggctccagcaatgtcgagattgttgacccacacacgaatggactgggctctaatgagatcccagggagagaaggtcacataggcggtgcctatgcaaccagaggaaaaactgcgcagggggcaggttccgcggatgtgagccttgtggagggcagcaatgaaatcacgggcagtaccaaatttagggagctccctggaaaagaaggaaacagagtcgatgccagcagccaaaatgctcatcaaggaaaagtagaatttcactacccacaagcgccctcaaaagagaaggtaaaagggggcagcagggagcacacagggaaagccggttacaatgaaatccccaagagcagcaagggcggcgctagcaaggatgcggaagaatctaaagggaaccaagtaaccttgactgaaagccaaaggttcccaggcaaaggcaaaggccagtcttctcacagtcttggtaatgaggttaaaagtgaagaagactcttctaatagtctcagtagagaggggattgcaatagcacacaggagaacaagccaccctacacggaatagggggatgtcacagcggagaggctcytgggcctcgagaagaccccatccccaccggcgcgtaagcacccgccaaagagacagtagtgagtcatcatccagtgggagttctagcgagagcagtggtgactagaccccggggttgaaccagttcccagctctggtcctggagaaagagaggacgcagcagggactgagcaaggtaccagacttggtcacctccaggacactgtgctgttttagtggttgtaataagaatccctactcaaagttctaatgctttctgaataaaaactttcgtaagaatttatataataggtaatatttgactaggcggcccattaaaatagtctgtggatgtcacaggtgccttgatatgtgatttgctcttcagacatgaaaataaagaggctttctctatgaaaaaaaaaaaaaaaaa

SEQ ID NO: 6863 - DNA, 600 bp, Rattus norvegicus
tgccatgccctccgggatgcccagtatccctgtatgaggtcatggagcagacctggcgtctggatccagaggagaggcccacctttgagtacctgcagtctttcctggaagactatttcacctccacagaaccacagtatcagcccggagaccagacatagcctgactgggtatcagtgaccctctgagactatgtactaacccttgccaatcsscasgrsrctctggtcccagtgcccgagacttggwaccctgtggaatcctagcacgtcggaaaaagtccgaagctctgaagccattttatagagggtgcaaatggagactagaaattcatctcttaccttcgctggccccaagcactctttyttcccttcccacccatgccccatgcaaaaatytagggcacccagtcatttcacagacggagtaaatggatgctcagagttcatctctcgtacactctgaccccagtaccatktttcctgtcccattaggctcstacgtaccgttagtcccccccccatctcctaaaaatactcatacattgtgtagttatttataaaattgtatttctcttcttccamwwaaaaaaaaaaaaat

SEQ ID NO: 6864 - DNA, 1400 bp, Rattus norvegicus
gcaaatattaataaaatgcaaataaaaaataaaatactaaaatttcttcataaatattttacattatagagtcaaatctagaaaattgtgttattttgtacaaatagtttactcttggtacgtatgttctattctatacagtctgacttagaaaaataaggtctttaagtaaatgaaattaaaaatattgcttgttataatgacaagtagctgaaattccagctacttaatctacataaaagttacatggcagcttaagcctagttgtttaagagcagcccaaacaagccaggccattggacaagcaggcttttatatcatctggtgttacatgttttttctaactttaatgttttaaaaaatgtacctattaaattttgaagtttgaagagcagaagtctttgaatatttaaataaaatatgaaactgaaattttcgacgacttttttgtaggcaaaaatttcaggtttgaatcaggattgatgaatggctaatggagtgccatacaaaggattgagcacatactgaataaaaaccattagcactgtactggctaactgtatgtcaacttgacacaggccagagtcatatgggaggacagaaccacaatagagaaaatagtatccaactataaggcatattcttaatcagtgtttgatgggggacaggccagcccattgtaggtggttttgatagtttgaggtgtagccttattgtataggtgtctcactgtgggcatgggatttagtacccttgtcctagccacttggaagtcagtcttctctttgcctttggaacaagatgtagaactcaggttctcctacacagttcctgcctggacactgccattctcctgccttcattataatggactgaacctctgaacctataaggcagccccagttaaatgtttttataagagttgccttagtcctggtgtctctttacagcaataaaaccctacctacatcagtggttcgttgtctgggctgatagtcctaggttctatatcaaagcaggttgagcaagccatggaggtgaaaaccagtaagcagcgctcctcgaggtcctttgcatcagctcctgactgcaggatgttgcccggtttgtgttcctctcttgacttccttcagagataaagaggaatatggaaatatgtgtgaaatatgtctgtgagtgtgtgtatgtatacatgtgctcataaatgtgcacatgtacaagtgactgcaaaggccagaagagagtatctggtcatctgtcttggagttataggtggttgtgacacaccaggcatgggttctgtgaacttaactgaaggatttagggagaccagcatgcatatttaacatctgaaccctctctccaacttcccctttctttttaagataatgtttcagatc

SEQ ID NO: 6865 - DNA, 1081 bp, Rattus norvegicus; identical to SEQ ID NO: 2769

SEQ ID NO: 6866 - DNA, 1400 bp, Rattus norvegicus
aacactcaaggtctgatattcgtggttgatagtaacgacagagagcgggtcaatgaggcccgggaagaactgaccmkmrtgcyagmakwmkwtgagctcagagacgcagtcttattggtgtttgtaaacaaacaggatcttcctaatgctatgaacgcagcagagatcacagacaagcttggcttacattcacttcgccagagaaactggtacattcaggctacctgtgcgaccagtggagatgggctttacgaaggcctggactggctctccaaccaactcaagaaccagaagtgatcagaagcagcccattccccatgccttgtggcaaaggcagctggcctttcccgtgtgcatgtgagtgcgtgaggagccatgtggccgtgtggctgggagtggggcagctttctcacaccgtgccttatccacgctatacgaacaccagtactccattttaagaaaaccagtgttacatttggaatgctaccgtccatttcacgagctttgatggtcttttcgctgaggcctccccggtgtgatagccagaatatctctaggctggaaaagaagagagctggaggcaggcaggtcccgttgttgccatcctgggtttggcctctccacacactcggaatcccgttggactttggtgtccttttacaaaaagaaaggaagggctgccattctttccattgtgccaaagctagcagctcacttgtagtgctttaaagctgtcaagaagaaggatacgttattaccacagtgtgagaggttcagaggggaatacttccccagagttctgttagttcaaactgacgcatttagctgttttagtccaaggaatcagtgacctttttcattagagtatcaagactgtwacactagagaagtttccagcctgtcccatacttgccaaacggaaactctgtgggctgctggcccaacaggaggccagaactcttccctaagcctcctggtccacagcggagtaaaggttgtggggagtgaagtgaggtakctcttgtgtctggcatcacgtytcagtcccctgaggctgcttctcccacttctctgctctgtgctgagtgttcttcacatgsagcagacagtgctcctggtggagttgtcactgtgtccccttgtccwggtctactgtgggcttttgattagtatctgtttcyagaaccgcacacccgtgagttctgagtgtgtgtgagaaagtcaggaggttaatttagaagatgaaggtcccagtggcccccatactccctgggtggtgctaaactttgctctgagaagcgccttttcttcagactgctctcactctccctcatcaatggcagtggcatctgaagagcagcctggatatgtgtgctgtgtcgtcctgcagatagttgata

SEQ ID NO: 6867 - DNA, 1400 bp, Rattus norvegicus
  misc_feature (1363)..(1363): n is a, c, g, or t
tgtataaactgaaactaggggagatagtcaccaccattcctaccattggttttaatgtggaaacagtagaatataagaacatttgtttcacagtttgggatgttggtggtcaagataaaattaggcctctctggaggcattacttccagaatacccagggtctcattttcgtggtagatagcaatgatcgtgaaagaattcaggaaggagcagccgtgctgcagaaaatgcttctggaagatgagctgcaggatgctgwgctgctgctttttgccaacaaacaggatttgccaaawgctatggccatcagtgagatgacagacaagttaggtcwysagkctctccggaacagaacatggtatgtccaakccacttgtgctacacaaggaactggtctgtacgaggggctggawtggctgtcaaatgaactttcaaaacgctaaatgaaactggatatctaaccaaggacatgtttgatwgaattggtctargcttgttacaacaaaattagtttgcatcttggttattaaaggatatctgagacggtttgggcagwaattacagcrttyadarsttgktttgktgccaattattswykascaagaacaatgttgctskttakcaatatgcttggswykargagawattctccttgsgggawaaaagwgtccattattatacttcccctgwacctgaatgcctggatagatwgcgattgygacmcccytaaataaatctgttttgagwgytytttgagcccacaccaataatgttttwawgttmcccscttggaactcactgatacctatmattcctcrggcwgtctgctgagttaaaaatgtagcattccatttgtatttatttcccccttgccaaaaagatttttctaataatgcttgtactggscagggatgagctccacaacactattcagttttcttgtactgaggattcccccacctycctcacattattgactcctggcttctatcarccaaactttgatgtastttggatttgayagctaattcwgggctggtttcaaagagttcatattgagataacttttaayactcagcamawtgkcttcctttatattatcttttttatgkygcatgkygccttttggaatcagcctgactctttgcccmgcatatgatagktctgctggtattttactgkttactgrtgaacatatcttcattaagaattttttgaaaactcatcaaattcaatgaataagttttcttcataacccatttggaattwttcctaataaaatgattttwaaaaacatgattgtgtgttcttttgagcctttgcaatatttgaaactgatttccttacataacaaagtggattntcatattttacatagtatggacaaattccagtgaatt

SEQ ID NO: 6868 - DNA, 600 bp, Rattus norvegicus
tgggcctgacccggattcgggacaggaactggtatgtgcasccctcctgtgccacctscggggacggactctatgaggggctcacatggttaacctctaactacaaatyctaatgagcgccctccacccagcccccsgaaggagagaaatcaaaaacccattcataggattatcgccaccatcatcacctctttsaattgccactctcttkwwtgaaactgaactygagttactgttytaccgtttagtggggttgggggtwttmtttgttccccttaccccccctstthtatttccktkcggcwwtgsrttargatgctctgatctgacatwtgacacgaatacagtkmtatatgctmttgtgacttccagcaaacggggtggggtaatagcaactcttggtaaagtcctttataataatggtwtgattttkytwttyatttcgagagaatctccccccatgtatgcctttttcswttttgsccagtttyttatcacttgctgkagawggyktakwtkgymtkcatgcagaytatgtkccaagtctgtttcatctagtaaactgaaaattaytgcktdwdmaaaaaaaaaaaaaaaaaa

SEQ ID NO: 6869 - DNA, 600 bp, Rattus norvegicus
aacakaararaarmmmttktcttccctgggaagtcagtcatttctttatgtgggaccatcagcgtctcttactgagatwagccatctggtctcctattttacaacagatccaaagttctcatgagccccctttctttggctwtgcctgtcatgttagctgacagttgctgagcctggtaggggsaggcttcatctcattgtaccctgccaccattttctactcgtgaggtgtaacaaagtaaccvgcacatcaaacaagttcaatttcaagcgtggctaggcagaccacgtgtgtttgtcagtcatgctgaacattcctcagttttagggttactaccctaatcttgctcaagtgatggtcaagrgtggactmggccaaggttgtcctggtaatgrgatgctmtgggtgtggctwgcctaagaagagtttttttytgctaaaaatagttcatctctmtgaaycgtttatttgatccccmctgtgcccttttgatcttattcagaaactgwgcttgcatgtaatcctcaagtttggtttgtwtacaacatgrgacatttttaattaaaaatggtrrctttawccamrwrraaaaaaaaaaa

SEQ ID NO: 6870 - DNA, 1400 bp, Rattus norvegicus
aggagacctggcaaggctgatcctggggctcatgatgccacctgcccattacgatgctaagcagctgaagaaagctatggagggagccggcacagatgaaaaggctcttatagaaatcctggccacccggaccaatgctgaaatccgagccatcaatgaggcctacaaggaggattatcacaagtccctggaggatgccctgagctcggacacatctggccacttcaaaaggatcctcatttctctggccacagggaatcgagaggaaggaggagaaaaccgggaccaggctcaggaagatgctcaggtggctgctgagatcttggaaatagcagacacacccagtggagacaaaacctccttggagactcgattcatgaccgtcctgtgcacccgtagctatccccacctgcgcagagtcttccaggagttcatcaagaaaaccaactatgacatagmgcatgtcatcaagaaggagatgtctgkggacgtcaaggacgcatttgtggccatcgttcagagtgtcaagaacaagcctctcttctttgctgacaaactgtacaagtccatgaagggtgccggcacggatgmgaagaccctcaccagggtgatggtgtcmcggagtgagatagacctgctcaacatccggagggaattcattgagaaatatgacaagtctccacaccaagccattgaaggtgacacctctggagacttcatgaaggctttgctggcgctctgtggtggagaagactaaaactcatggccttggagggtccccctgccatgcagtggccaaccgcaccagccaccgtgacctgaccaagccattgctccagcttcagagactaaggaagaagtgaggggtggagttggactgtgatccggctggggtgctctcttgccattgagggtcccaggcggtcccttctgttatccctcctgctcatggctaagtggctggtgaaccacagccatatatgcattcaaccctgctccccgtctgcctccttctccgcccaccctagcttccatccctccacacgaatccctgcctgatttaagctttgtcacatctctaaacacctccttggatggagccaccctgcccccagccctgaacagccgggggagggtagagagttcctcagagctggctcccagctgtgtccatcattggagtggcagcaggcaggtttcatacagtgctgtggactcgagaagccgttacactggactggaatggtggacagttgggtcacttactggaccccaatggagaaaagtgtgtcaccactcctcgccaagtctctgcttgtcttttccaataaattcggaaaagtggatcaagaataccttggcagggaataggggggcaaagtttagaacagagggaattc

SEQ ID NO: 6871 - DNA, 600 bp, Rattus norvegicus
tgaagtcactcggtktgggctttgccaccagacaggtsgctagcatgmccaagccgaccacaatcattgagaagaatggggatmccatcmccwtaargacacacagtaccttcaagaacacagagatcagctttcagctgggagtagagttygrcgasgtcasrgcagatgacaggaaggtcaagtcggtcgtgacactggacggaggcaractggtccatstgcasaagtgggacgggcaggagaytacgcttacacggraactaagtgatgggaaactcatcctgactctcacccatkgcaatgtggtgagcactcggacttacsagaaggaggcktgacytgkctgcyccgtcactgactgmtcstytgmcaatggctacccctaactcagcaccacgttgcstcatgtttctcccctctgacgttttatataaatactckhygswtgkgyttttcctggrgatatgggacmccagcytggacccaggtcccattgtgtatgtggtttmktktktaaaactgtatccaaagggtgcyccaaggtcaataaagcagagccaagkccvmmmmaarwwrwrmrrmmraaacctcgtgccg

SEQ ID NO: 6872 - DNA, 1400 bp, Rattus norvegicus
gcaacttctcagaacgtttctacggcggcggtggcggcggcggcagcccgggcaagaatgccgagggccgtgccagccccctctatgccagctacaaagccgatagtttctcggagggcgatgacctctcccagggtcatctggccgagccctgcttcctccgagcgggtggtgatctgagcctcagccccagccgttcagctgatcctctccctggctatgccaccagtgacggggatggggataggctcggggtgcagctgtgtgggcctggcagtagcccggagcccgagcacggctcccgggattccctggagcctagctccatggaggcctctcccgaaatgcaccctccaacccgcctcagcccccagcaggccttcccaaggactggaggctctgggctgagccgcaaggacagtctcactaaggcccagctctacggaaccctgctcaactgactgccatcagcaggctgcagtcaggggctccctaccaccctgccccatatagggagtagctaaccccctcgtcccaacccctgctaaggaactccagttccagttccagttcctgttccagttccagttcctgttccagttcctgttccagttccagttcccgttcctgttccagttcctgttccagttccagttcccgttccagttcccgttcctgttccagttcccgttccagttcctgttccagttccagttcctcctgaccctgttactaacaccccagtagaacctgaaaagaccccctctgccaatcgtcttgtccaccccagcctctgctgcaaaccctacccagaatatttccgctctgcacccttccctgaagtgagcatcccctgttttataagtgaagctatttttttagggaaaaagagcgtttgttcacgcacttgctgccaacttctggatggcagccttggcgtaccccacacgaagttccttcatttccagtgagggtgcttggggcctgccccagggaaggggaggctggggccctagagggaccagtctccacaagtagggagaagccagcaacaagggaattctgaagttctgaacactgaggaggggaaccaaagccacttagggcgcagaaaatgtcttatgctcgctcccgtgtcacagtgcagccagcctcskscckrattccaccytgagctcttccgtggcccggcctgtgggcccaagaggggccagggacacccccagaacagccggtgctcgttcctmmcctccccctcccaacaccacccgactctacctcagacatgaggctcctcccacccttgtgcacctgtcgtctgtgatgcatgccgtccgttagaactgtatttcacattccttaataaargacagcagtggaaagaaaaaaaaaaaaaaaaa

SEQ ID NO: 6873 - DNA, 600 bp, Rattus norvegicus
  misc_feature (327)..(327): n is a, c, g, or t
aagatgctgtcatctatcatggasaagggagagctggtgccactgrasacggtgctggacatgcttcgggatgctatgttwkccaaagtggactcttccaacggcttyttgattgacggctacccsagggaggtkaaacagggakraragtttgawcggaagatcscacagcccacaytgstactktatgtggacgcasgccccsasrccatgacccaackactcctawakcgaggggagwccagtgvccgtgtggacgataacgaggagaccatcaagaagaggctkgagacgtatwacaaagcmacagaacctgtcatctcyttntatgrcmmwcryggcrktrtscscaaggtcaatgbtgarggctcakkggacactgtcttctcccaggtytssacctatcttgactccctgaagtaactggatccctcgrccagttcccagcccaccccgcccttgccccctgaccccaggcagcctggctcgagcccagcacctccaccctgccgggctgtgcacagacacaggaagctrttatcctgtcccatggacatttgagcactaaagaaattgccaaggraaaaaaaaaaaaaaaaa

SEQ ID NO: 6874 - DNA, 600 bp, Rattus norvegicus
gaaytcgcwggagdmkymbghdbkcarsatgaaagsmactgwkgavgakgagaaacttcaaggcmmgatcaatgrtgaagacaawcagargattcttgacaagtgcaacgawatcatcagctggmtggataagaaccagactgsggagaaggaagaatttgagcatcakcagaaagaactsgagaaggtytgcaaccctatmatcaccaagctgtaccagagtgctggtggcatgcctggaggaatgcctggtggcttccctggtggaggagctcctccatctgstggtgcttyttcaggccccaccattgaagaggtcgattaagtcaaagtagagggtrtagcatkgtkccacaggsasccaaaacaagtaacatggaataataaamctakttaamtkggcvmmhwaaaaaaramaamaamrrarawrwvrwramhmarmwrhaahmvmrrmamhdarrrrgsksmggaaccaattcgcgaaagtgaggcgttaaaatactggcggcgtgtaaacggcggagcgggagacccgggttcccaagtaacgctggagaaactccctagccgcgggggaaagaaaagccgaaatagctccag

SEQ ID NO: 6875 - DNA, 600 bp, Rattus norvegicus
gtacaattaaccagaacccacagcctggagaagcaaacctgcagagggtctcagtggccaagacagtgtgcggacctgcaggctcccaacttgttctgctcaagcwsgagrgacctgtgatcctgaaccatcacgtggccaggatttgcctacctcctgaacagtatgtggtacctccagggaccaactgcgagatcgctggctggggtgaatccaaaggtacaagcaatagcacagtccttcatgtggccaaaatgaaggtcatctccagtcaggaatgtaatgtgaagtaccggagacgagtacaagagagtgagatatgcaccgaggggttgctggcccctacgggcgcttgtgagggtgactacgggggcccacttgcctgctatacccatgactgctgggtcctacagggacttatcatcccgaacagagtgtgtgcacggcctcgctggccagctatcttcacacgtgtgtctgtgtttgtggactggattaacaaggtcgtgcagctggagtaggcctgctttcgatctcttagagatgacaaggctgcttatcaaactaaagcaaacttttctctaaaaaaaaaaaaaaaaa

SEQ ID NO: 6876 - DNA, 600 bp, Rattus norvegicus
ggaatcatagatgttttgcatgatgcacaagcaccaattatgactaacccattgagrcacagttarsctaacaccaaataaataccggttaagtcaawrwawrrmamaraawattatttgactatcargacttttagcataatgaaaaaagtctatatatatgtgtatatgaattatgtgggcattcttgatactkctagtttgaaaaaatacattaatktaattttacacaaaaatatttatgcagattttcagwctttcatatcagsaaataaccttttwatgtctgttaaatatccraacgatttgctaccgtgttvatctgcatggtcttctcacctgctgtagwtgccttgcaggtggtgcataaagtggacgggtgggatgagtcctgctgccccaacccagaggagcgtgcggagacccggtagcctaggagtcagattcctgattttaggatgcmaaacsccaacttaattgttgtatatggttgtacwaatagrttctgtgtgttcctctraggagggcagagaagagtatgatmccatgaaggctgaaattcmacgtacaacttctctaataaaaaaaaaaaaarraaaa

SEQ ID NO: 6877 - DNA, 600 bp, Rattus norvegicus
cctcaaggcagaagacactgacttctcggtgaaggaggactggaaatacgtggccatggtcattgaccgaatcttcctctggatgttcatcattgtctgccttctgggcactgtgggactcttcctgcctccctggctggctggtatgatctagggacgtggtggtgcccagctcccacatctctgtagggccatacgactcgtcagtcacccacatcttccaaaccggctgaccatgagacaccctaggagagagatgatgcttcttgggagatggaagttggccctggttctagtcagactatgggcgtggttggagagaaatgagggctgatacagttgcaggccgagtccccattaaagtttctccagagcaagtggcagtactccctgacttacagacagcacacacccatctgtgtcacagagaatgatcccgagttgatctcagttgtcctttgaggccatgaaaaattcatccaccttgaggaaccagagcctctcatgctgtgggatcaataagaccaggaatctcccactgtgactctgctggccacaccctctccctcccccaagaagtggtccctcatcccccaattc

SEQ ID NO: 6878 - DNA, 600 bp, Rattus norvegicus
ggagccggagcccagagagacctgtctcaggcctacacaacagccatgaaatattttgaaggaaaatgaaaccaattaagaagacaaagcctagggagggactggcccctgggccttcaggagggcgggggtggttggttttcaatatccacgagctgggtactgagatcagaaaagcccgaactatttattcaaaacatgaccactctgggctatagaagatgctgagtgctcgagagactgccatacataawmgakggcttcctagggatctgaaatccatagactaagagaaaactgtgtatagcttgcccgaacaggagtccttactgatatttattgaacagtcgattcccytaccccactcccacccccaacccccaacccccagtttatgctgctttaaacctggaaatgagagagagaagtttggtttgctgtctatgcttaagagccaagccgggaacgcattaatcatttcttcgttaacagaggaatccgctctgcatggcatctctccaagtgamgacaggcttctttacaaaaraaaaaaaaawawawawrwggtgcccacccatcaacacatgcagaagtcggtca

SEQ ID NO: 6879 - DNA, 600 bp, Rattus norvegicus
cctcstcaaatkckgcmgagcgcacccccaatcatggtggtcacctccagggcgagcacccgtacctgacaccatccccagagtctcctgaccaatggtcgagctcttcaccgcactctgcgtctgactggtcagatgtgaccaccagcccaactcctggagggggtggaggcggtcagcggggacctggaacacacatgtccgagccaccacacagcaacatgcaggtttatgcatgaagagtgcctcagttasasatggacgtgcccatcacacgcactcctgagggccgagtgaaggttatccaagagaaatgaagagacctctaaccagcctctggaggcaggaggaaagacgctcctgacttcacacaagcatgagcagcattattttcatcttcactgagtatctgtgcagtttagggaggactcagctcctactgacctttgcccatcctgcaagttcatggagatgcaagatgaatgcaagccttggggcccctcgctctcttcttggagagtacgatgaatgcctgttgtcgcccggacatccttgcagcttgtaacatatcaagccctggaggcttctgcctccatgtgg

SEQ ID NO: 6880 - DNA, 1400 bp, Rattus norvegicus
cgctaccgatcacaaagtagccctaagacataataaaccctcaactgctccgtagtttttcttatgaaagccaagtaaaggggacgtaagcaaaaaaatatttttttttgcgtgaaggattccaaaaataaaattctctggggattgagaagaaagaaaaaaaggaaaatgccagctgatataatggagaaaaattcctcgtccccggtggctgctaccccagccagtgtcaacacgacaccggacaaaccaaagacagcctctgagcacagaaagtcatcaaagcctatcatggagaagaggcgccgggcaagaataaatgaaagtttgagccaactgaaaacactgattttggatgcacttaagaaagatagctcccggcattccaagctggagaaggcagacattctggaaatgacagtgaakcacctccggaacctgcagygggcgcagatgaccgccgctctcagcacagacccgagcgtgttggggaagtaccgcgccggcttcagcgagtgcatgaacgaggtgacccgcttcctgtccacgtgtgagggcgttaacaccgaggtgcgcactcggctgctgggccacctggccaactgcatgacccagatcaacgccatgacctaccccgggcaggcgcaccccgccttgcaggcgccgccgccgccgcccccgtcaggacctggcggtccccagcacgcgccattcgcgccgccgccgccgcttgtgcccatccccgggggcgcggcgccccctcccggcagcgcaccctgcaagttgggcagccaggctggagaggctgccaaggtttttggcggcttccaagtggtgccggctcctgacggccaatttgctttcctcatccccaatggggccttcgccyacagcggcccgswcrwsscggtmtacaccagcaacagcgggacctcggtgggtcmtaamgcagtgtcgccttccagcggctcctcgctcactgcggactccatgtsgagrccgtggcggaaytgaggggctcaggccactgctaatcataaactccstagcccacctctctcttctgacggacactaaatacgaacttsgactttaggagmgacttttataagtcggtggttactttgttgyttytttaamttctaaaaagttactttttgtagagasctgtawyaagtgactgaccatgcactgcatttgtatatattttatatgttcatattggwttgcgcckttgtattataaaagttgagatgacatttcsttttttacacgagatttctttttttatgtgatrccaaagatgtttgaaaaatgctcttaaaatatcttcctttggggaagtttatttgmgaaaatataataaargagtgaaggctttthaaaaaaaaaaaaaaaaa

SEQ ID NO: 6881 - DNA, 600 bp, Rattus norvegicus
gtgtcataccacccctgctccagcaggatgtcccctcagtattagctgtcatatttctctgtcctccagacagtaagggagaggagcgcagctgggcctctcgcccaactagagagaaagactgggcatgtccctgagggtttgagccaggccccgccagggtttaggtaggcacccagatgcactcatagattgaatgtgagggtggccatcttgagaggacatacgactcagtatttgggttattagtatcaatctcatctcccctttgggggaaagactctctggtccctattgtatccacctagtgctcatggtctcttgttggccctgggccactgccctgccactgggcccagagacatgggccttggccctgtcctgttcacctggatgtgacctgtggtgtttcctgtggtaaaggctgaggcgagtcaggagtctgccagtgttcatactcccatgtacatatacactgtctcccagccaccgcctcggcccggcaggcaagcagagtcagcagcactgctctctactgctttgcctggcaacctgtggctgagggtccccagagacccccccaacctcccaaatactaag

SEQ ID NO: 6882 - DNA, 600 bp, Rattus norvegicus
gtccactgtcccccggagcaccggccagccctgcctccccctccatgtggacctctcacagcggtgccagaccaggcctcagcctgcagcaggtgctssctctgcctctgccgccaaactcagattcagactccgcttcagggggcacctcgggcctgcagctcacagcccagcttctgctgcctggagaggccacmcgggaccccccgccacccaccagggccaccactgtggtcaacttctttgtcacagactctgtggagcctgagatacggccgcatccactcagttcccccgtgaactgaccaggtcaagagctggccattggaggccacattcccggagctctcagcccactctccctgagactaggaggtggtaggtctcctgagagtgtgctgaattgaggtatcctcagctagccccatcttctgctgcaggctccttgacctgaggggtagtcagamacatctctgtggggtactccagtgcaatgttgcttgtgtagtgtggctgggaggggggcggtctcagagccgggccatttggttcaggtcagtaggaaagcaatctgtcctcatccctttctctcatggtggg

SEQ ID NO: 6883 - DNA, 600 bp, Rattus norvegicus
aacgaggcctgctaccttgtgtgtctgaaactcccaggatgctgggcctccgtttacatgtgcacaccctcacccacctgcccgctacacttgggaggatgswsgmskgcagcggccaagaagccaaaaaatcttttccttttttttttttttttctttctttctcagatactgtgctccgtttttggagaggggaaggtaggcattcctcgayggcyaatgcactsttcccmcagcttctgccctgragcccccacccctctcctctgcaccccttggagcccataacactttttttcaagaacacacttggggtgttttttgttttttggttttttttttttttaatttttgcaactttactctgatgtttgcagcagagaaaagatggagagccttgctctgggagtgggaactgggagmgggtgtcgggcacacagaatagagtatgaagtgggcttctctgggaactgctggcctctgcctccttgatgctaactaaggggctgggtaggtatagcgtgtgaacccctctgctcacctgcctctatctaccctttgcagcagccgcaagcttattccctttagtgagggttaatt

SEQ ID NO: 6884 - DNA, 1400 bp, Rattus norvegicus
tcccctgggaattgaaaaacatgtcagttctttcaactaggaactaggaggcaaggcatcagggattaacttttaccagttcagtgatgtcaggaccctagctgcatttctgttgccatggtgaaaatcctgacaaaaagcaacttagaagaggcaaggtttattttagcttacaatcccatgtcattgtatcacagcaggaagtcactgtgacaagatcttgaagctgattacaccacatccacattctaagaggagagagacattcacggatagcttgcttcctgatttgtgctcaggtcaatttctacactcttaaaaagtttgggacagctttgcctaggtaatagcatgacacacaataggctggactttccaggatcaattaacgtaattaagacaatctctacagacatgtccaaaaggccagtataatatagagaatcattttcaactctttgcaactctctttctgggttattctaggtactgacaaattggatcacttaagctagccattagaccactaagactcaaactttcccatctatagcaagcattgtctgtgttcaactggtcacaggtaaccaccagtggtaagtgaggctccttgttacctttatattcaagaagataaaatgggcaacttaaccccttagaccattatcctaagcctaaacacacacacgcacgcacgcacgcacgcacgcacacacacacgcacacgtgcatgcacacacactcacctcattcccattttgggggataagcaggtggcaaacacaatcccgtgaccagtgaacaacaatcagcacagtgaatgtaaatgcaaagtgttgattggcttggaagaaagtctgcactgaagctgcgaatataaacttctccaagacaagtttcttatttgaaaaaaaaaattgagagattgattcctgagttggtgtccaatcacagaactattaaagatgaattaactgttggaattaatctatgtacatgtaagcattcatttatcatctcaaacatgtctgaactgacttgaatctgaatcatgtgtgaagaccacagagaaggaaaagcatttgtaagataaagtcgccattaatattttaatcagttgacagagcatggggtagcttccgttgtttatttcagattgcctggtcaaatgtaaccaaggagaagacattcaacaactaggtggctaaaatgaaatttttaaaaaaggactcgcttttcctgagttcatttcttcaggacagattctacttggggcgtatgtataaaggaggagcactagtctcatttcattgtacaaattcaaatgctttgcacttttatgtggtagctgataataataaatttgtagtaagttctggctttgaaatataaaaaaaaaa

SEQ ID NO: 6885 - DNA, 600 bp, Rattus norvegicus
acccgtgatgatcacgttaaacaattccatgtactggcaggagtttgaggacacctgtgtctatgagtgtctggatggcaaagactgccagassttcttctgctgctatgaggagtgcaagtctggctcctggagragaggccgsatccacattgacgtctctgagctggactcctactctcgggtcttcttcccaacgtccttcctgctgttcaacctggtctattgggttggatacctatatctttaagtgctgctctgaaggatgacagaagagtacttgattcatgtttttccttccatcatccccagacaagtagtgaccaaccaaaaagtagcagggaaggacactactccagcttgttgtgttacctttcagcaggatgggaagtactggaaagtattctttataaatatttcactcacacacacacacacacacacacacacatacacacacatacacacacacatacacacacacatacacacatacacacacatacacacacatacacacacacatacagacacacacatacacacatacacacacacatacacacacacacactcatgcactcatgcacacaggcacgc

SEQ ID NO: 6886 - DNA, 600 bp, Rattus norvegicus
tggccccgtccytcccctacctgtctatgaagccctttaggaygrmsgcargaggtttccttcttgctgctcgatgttctttgatggaaaactgagaacaagtcttttttgagataaatgcagtatatttcatgtttgwaagcacctctgagatgtttggcaagaaatcccctgatttccacccaaacttaaccttatagagcacaacgttaagggtcgtacaattactgtgagaactgtgaatatgtgwaacttttctttttwagtttttgcccagagggaagaagataattgtattatcatatatgctwttttttgcaataaggatttattctcagaacaccaagtaaatttatctctatataaaaagtatatgtaatatatgcctattcagactatatacagagcctgttttaaaaaawtacagtattatttagtaaaattatctgktctatggaccaaatgtaaaatatttatacatgaagatgtrtyttamatgtctaycamatgatatcacamctagagcacgggcgttatstacgtttmtaagaatttagagraaaaatamtmrwggttctatgatawawrrvaaaamraaaa

SEQ ID NO: 6887 - DNA, 600 bp, Rattus norvegicus
cagagggcaccctgcccgagaaattacagaagttgacagtccccagcgctgatctgaaaatgaggggcaagcttggggccagcccacggatggtgaccgttaatgactgtgaggccaaggtcaaaggcgacggtaccatctctgccatcacagagaaggagacgcacttctgatccccgccagccacttggatgtgtctccagccttccttccctgcgtgtaaatgaatcctgaaccttgtatttcacctaatgttaggggcttgctcgtctgcacaggatttattaacaagttaactcccagccggccactgtgtgccctgtaccctcacctcaccccagcgatcgtgggcatatccacctcaccaagataattctgtacagtgaccagcagatcctggcccagggtggctcagcctgtgctttctagagtccttgtattatactgtcagcttctgtgctgggggcaggcggagtgagggagcggtgcccatctgcctctggttttcaattgctcccgattttatctctgaacttccctggccaccctcctctgtgccctaggatcagtttgttttattttgaaaaaaaaaaaaaaaaa

SEQ ID NO: 6888 - DNA, 1400 bp, Rattus norvegicus
catttccagctggagactttgagcctggagcagcccccaacagctcagcggatccccgcgtgcgcagggcggcacaggtatccaaacccctgcaagacaatgaacttccagggctggacgaaagaccagcgcctgccctgcacgcccagcatttccacaagcacgagttctggtccagtcctttccgggcactgaaaccccgcaccgggcgcaaagaccgcaagaagaaagaccaggatacattcaccccctcctcctcgcaggtgctggactttgatgagaagacgatgcagaaagccaggaggcggcagtgggatgagcctcgggtctgctccaggaggtacctgaaggtggattttgcagacatcgggtggaatgaatggatcatctcacccaaatcctttgatgcctactactgtgctggmrcswgsgagttccccatgcccaagatcgtccgcccgtccaaccatgccaccatccagagcatcgtcagagctgtgggcattgtccctggcatcccggagccatgctgtgtcccagacaagatgaactcccttggagtccttttcctggacgagaatcggaatgtggttctgaaggtgtaccccaatatgtccgtagagacctgtgcctgtcggtaaggtggcttcaagatggaaggcagacctccttcacccctgctgtgcagagtggcattcttggagccaggatttgactcgagcaagtcccaggtgctagayggagcttatagacagccaggctgagaccaagatctgtccaccgagccacagttctcccgttcttccgcgtcgtggtagctctgtaaggacttttttgagttcctggaaggaatctggaattcaccatggtctgaaatttgcccacatttttcaaggcctagaaatagcatgtgtccacagatgtcaaccccaaggcatctgtcctctcagaacctggaaagactatgcaaatctcggggcactccccgccccccacggcagtaaatgcttatttgaaaaccctcaagcggcatactagaaacaggscytaaagcatggcatggatgggtatttctcttacatttcactacacatgcttttatacatgcagtacgcaacatgtactcgagactgatttcttcttttaatatatgtattttgatttcaaagcaaagtggacagagttgacccccatgccccacagacgtaatactgaaagttaggtgwgggctgtttaaacatgcgtatgaaaaataatacagtgatatgctggaatactaaaaaataaccaagattctatatttttgtaaattatactttgtatactgtarawwrwrarwrwwmwrwgtttttatggaaagctaataaattaaaggtacagtgaaaaaaaaaaaaaaaaaa

SEQ ID NO: 6889 - DNA, 600 bp, Rattus norvegicus
gccaactctggccctcccagcgtctccattgggttgccaccttattacacacaccctgcctgtcccacagtacagggaaaggccacagggtttcctggggccccactgctaccagcagacttcacagtggtgaccctaaacgatgcgcaaggcagaggccacccggtcaagcactgcaatggccaccacctgacgacagagcagaactgggccagcctaggggcagagccgcagactccagccagcaagccctcttcagcagcctccagccctcatggccgcaaggggctcactgacagcagtggcagcagcttagaggagagtgccttggtggtgacaccagagggagagcaggctttggcgaccacagtggagatgcactccccaccgttggtcctcctggacccagaaaggtccagcaagtccagcagcggacgagccagaccaggtgacttggccatctagccacagtctctccagatacctttataaaccttctctttaccccttagaaaccaaaaccaaaccaaaccaaaacaaaacagaaccaaaaagcatttcaaatcaacaggtagaaagagaaaaaaccaaaaaaaaaaa

SEQ ID NO: 6890 - DNA, 600 bp, Rattus norvegicus
cagccaccatgccctcaattcagtgcaaacacaggtcgcccaatgggggactgtttcgacagagtccggtgaagacccccatccctatgtctttccagcccgtgcctggaggcgtccttccagaggccctggacacctctcatggcacctccatctgactgtgtcgcctgccctcctgcccgccacccagcccacccgaccagcagagctttttaatacaagaaaatgacaacacagaccacacacacacacacacacacacacacacacacacacagactctttcatttttcttgtacatacgtgtaaataatgacagaatggagtggggtaaaagtgtattttgaatattcccaattttcgaagtcagtaaaaaaaaacaaaacaaaacaaaaactgtatgaatgactttgtaaattttgttctatatgaataaaaaggcaaattacttgtgatctattttatttctgtgagtggggtaggcaggccagtacagaggggattgatctgcaggtgctggtcctgcagggtccaagtggctcccccttcctggttgcatgaccctgtgccaggatgccgggacatcggtttgcaggtccg

SEQ ID NO: 6891 - DNA, 600 bp, Rattus norvegicus
agtgcagtcggctccttccgcatgcgccatatgccggaggtaccagtgcgcatccgcattggtctgcactcgggcccgtgcgtggccggtgtggtgggcctcaccatgcctcggtactgcctgtttggggacacggtcaacactgcctcacgaatggagtccactggactgccttatcgcatccatgtaaacatgagcactgttcggattcttcgggctctggaccaaggcttccagatggaatgccgaggccgcacagagctgaagggcaagggtgttgaggacacgtactggcttgtgggcagagtcggcttcaacaagcccattcccaaaccacctgacctgcaaccaggggccagcaaccatggcatcagcctgcaggagattcccccagagagacgcaagaagctagagaaagccaggccaggccagtttactgggaagtgaagctctactggggacaggattattctgcaaggcccttcctgaagttgctgtgatatgggggactaaggcccaaggcttctgtccaattctgcctccaaggattctgagccaggagtctgctgcaaaccagctctgtgaccctggaaagttctg

SEQ ID NO: 6892 - DNA, 600 bp, Rattus norvegicus
tacatacctatatattttatatgctgagggtagcccatttttaaattaagagcacattatattcagtaagttccgaattatctcagctgggaggaaagtaactgtgggatgttacagtaaaaaatcttccccccacatgattctaaaccccaaaaaaatttttccttggaattatgttttccaaaattgagcccccattgggggagtaatcccaaccccaaactaagtaggaaaaaatgtgtggataaaacccataaaatcccccccattttattacccaataaaaagatggtcttaatttctgggatgaaaaaaaaataatctccactttatttcataactggcccaaaaaaaaactatcattgcaaatgcctcccagtgaaaccaataacttctcaaatatttagaattattggttataactcactaacctagtttcctaacatcaatttaaaatttgatttatagtaaagaaataagaaaatgatgcttctaattattttgttttgtccttttggaatggaaaatattgatatattaatagaaaaagttttatttggaattaatggtagattatatttcttattctgattgtgcccg

SEQ ID NO: 6893 - DNA, 1400 bp, Rattus norvegicus
ttgggtacacacttcagtcagttaatgacctttatattcagaagcagtttcccatacgggaggacttcaaagctgccatgagagagttttactttgctgaggcccaggaggctgacttctcagatcctgccttcatatcaaaggcaaacagccacattctgaagctcaccaagggcctcataaaagaagctttggagaatacagactctgctactcagatgatgattctgaactgcatctacttcaaaggagcttggatgaataaattcccagtagaaatgacgcataaccacaacttccggctgaatgagagagaagtagtaaaagtctccatgatgcaaactaaagggaacttccttgcggcaaatgaccaggagctagactgtgacattctgcagctggagtatgtagggggcatcagcatgctaattgtaattccacggaagctgtcgggaatgaagactcttgaagcacagcttacaccccaggtagtggagagatggcaaaaaagcatgacaaacagaacccgagaggtacttctgcccaagtttaagcttgagaagaattacaacctggtggaggtcctcaagtccatgggaatcacaaagctcttcaacaagaatggcaatatgtcaggcatctcagaccagaggatcatcattgatctgttcaagcaccagagtaccatcacagtgaatgaagagggtacccaagctgcagctgtaactacagtggggtttatgccgctgtctacccaagtcagattcactgttgaccgtcccttcctgttcctagtgtatgagcaccgaaccagctgtctgctgttcatgggaagagtggccaaccctgccaagtcttmaygrkgctggtctgggcacctgatgtagtttggggacactctgtaatcctgttttcattctaagaggacagagatattttgatattgataatctatgtagtttgagataataatctaacagtaaacagtgtcataagtgcacagatgttaatgcaactaatggtcgtgccagctattccctagaggtcctagacacagactgcctcagcgccaacgcctctgtcactgagaatgggcagagtggagctgacactttctcctcagttagccgtaccagtcaaggtgtctcctcagccaggcccctccatatggatggtactgaggaactctcacccttccagggaggatgtccaaggagcaccattcttgcctagtggaaaagaaacctcaacatgtctgagacatttggacttaattcaaggctgaaccttttaaattcatgtaaatatcatctgttctgctttgtgtcaatagggctaccatagcctattctagagacaaataaacaaccatatttactaagcaaaaaaaaaaaaaaaaa

SEQ ID NO: 6894 - DNA, 1172 bp, Rattus norvegicus; identical to SEQ ID NO: 2798

SEQ ID NO: 6895 - DNA, 600 bp, Rattus norvegicus
cctgccccgaacacgcgtgcacactcacgtgcatgttcttcttgtcacccacgtgcctttaagcccatagcccacggacccccagaccaccccaccccccagcctgttttttgagctaagactgatgtatctcctcattccagaagatggacagagagagagagagagctcaagacctgggggggagggtgtgtattcacgggggtgaccccactatttctcttatccctcccagctcagacctgsccttccgcgtgtttytgtaagataamccaytyttaacacataccactctgctstatataagctgacgctgctgtaaatacagaaaggaagaggtcggggtgggggtttgagaggaagggtgggccccccaaccccgccagctgggcaagcctctcgagcctccwacttgagatctcttccgctctccttccatgtgtacatagctgtcactcaagaaggtgattgacagattctgatttatatttgtgtatttttttcctggatttataggatgtgactttttctgattaatatatttaatatattaaataaaaactagacatgtwrmwrraamwraaaaaaaaaaaaaaaaaa

SEQ ID NO: 6896 - DNA, 1400 bp, Rattus norvegicus
tcgatgtgcagaactgctctctgaccttcaccagctggctgcataccatccaggacatcaacatttccctgtggcgaacaccagaagaagtgaggtcggacaagagcatcttcataaatcagggcgagtgggagctgctgggggtgttcaccaaatttcaggagttcagtatagaaaccagtaacagctatgcggaaatgaagttctacgtggtcatccgccggcggcctttattctacgcagtcagcctcttgctgcccagtatcttcctcatggtcgtggacattgtgggcttttgtctgcccccggacagtggtgagagagtgtctttcaagatcacgctccttctgggatactcagtctttctcatcatcgtgtcagacacactgcctgcaacggccatcggcactcccctcattggtgtctactttgtagtgtgcatggctctgctggtgataagcctcgctgagaccatcttcattgtgcagctggtgcataagcaggatttacagcgccctgtacctgactggctgaggcacctggtcctagacagaatagcctggctgctctgcctaggggagcagcccatggcccataggcccccagccaccttccaagccaacaagamtgatgactkctcagccatgggaaaccactgcagccatgtcggaagccctcakgacttggagaagacctcgaggagcagagatagccctcttycaccaccaagggaggcctcgctggctgtgcgtggcctcttgcaagagctgtmctccatccgccactccctggagaagcgggatgagatgcgggaggtggcaagggactggttgcgggtgggatatgtgctggacaggctgctgtttcgcatctacctgctggmcgtgctggcttacarcatcaccctggkcacgctctggtccatttggcattattcctgagtgggtacagcctggcagggaggggatgtgagtyctgcatcctgtttccaacaccaattcatctgagcaaccccagtccccttgtcccctaaacttagcactgaagacccggtcagaccccccgayytcsctatcatggctttaaagcatgwtatcctagatcaagaggaaccaagactcctytaacttattaagacatcaagccctggttcctttyccagtacttctgtgattatggcccttgggatggctcattyccacagtttytttttcctttttgatcagaggaaagcaaattctcttgcctaggtgcctgagacgtctgtgcctgttttatccaggccccagtggcttcttcttcagctcacttgtgggtacttccctagcgctcagcctcatcaaccaacggggggaggggataataaaatgctatgatwtccymmraawwmaaaaaaaaaa

SEQ ID NO: 6897 - DNA, 1400 bp, Rattus norvegicus
taatgaggaatagtagcatctgaaagatcatacatagcactatgaagccccaaagtactattagtattccttttgttacatccactgcacaaataattttcagagtctggcagaagcatggctaccctgttgcatggtactaattaatactttgtatcacaggggttgggaaaggaaagcagmasrakggtaagattggatttcaaacatggcttacttttttatcactggaggcagggagaagggtacaaacaagatcattattcaaagtttctggctgccgtggtttcagggaaggttgattcctatcaagagtgaaaagttctgattgctcaacatgagagagagaaagcctcgtctctgtgaaataactcttgatttcttcttagaccatctccgttttttaaccataattcctgttgaggtagtaacaattcacctacttataaaatgtacattgggtgggaaaaagtgaagtataagagttacacataaaaactcaaggaataagcaacatggctcctgctttgctttctcctaaggttagcctgcctgggatctgtggacgttaaagataatccttgactcacaaaaggcagtaaaaccatacatgtcatgcaagagtaagaatgggctatagrgatcagggtcccatgagatgggggwcacggaggtcactcatctcacatgggagactgctgywggatakcaggtccactcctggcagctggyccaacagtcgtatcctggtgaatgtctgktcagctcttktactgasagagaatatgactgtttccatatgtatatagtraaatacattactatgatttatatgtactttataagtattggktygtttgttccttctaagaaggrctatagtttrtaataaatgcctataacatatttatttttawacatttatttctaatgataaaaccttttaagttatatcgcttttgttaaagtgcatataaagrtagrgtatttatacaatatatgttaactrgaaataataaaagaacacttttgaawrwrwwwrmmwawwwtytgaagtgggcttaactcctgggcaagaaatytaatgrgacacaagcattggatttcaggacagctttaaaatytggktgaatgaactgtatttcctgtttatagacatactaataaaaaagaagttgatgatgtctttagtgataagattgttactaacgtggttggcaaattactgtaaagagtcagatagtaagcgtttatggcattgtaggctatatttcctgccacaaccctgtgacagtgaatgctttgtaggaatgrgagcasccataaatgacatgtacmccatagctgtgctttaataaaaccttatttrcaaaaamaaaaaaaaaaaaaaaaaaaaaaaa

SEQ ID NO: 6898 - DNA, 1400 bp, Rattus norvegicus
acgggaacgacaaatccaataccaaagcagtggaagtctcggcctccgcttcctccctcaactctaatgatgtctttctgctttggactcaggcggagcactacctgtggtatccgaaggggtcaagtggggacgaacgggcgatggctaaggagctggcagagcttctctgtgatggtgacgcagacactgtagctgagggccaggagccacctgagttctgggaccttctgggaggaaaagccccctacgctaacgacaaaaggctgcagcaggaaaccctggacatccaggtccggctttttgaatgttctaataagaccggccggttccttgttactgaggtcacggacttcacccaggatgacctgagcccaggtgatgtgatgctcctggacacctgggaccaggtgttcctgtggataggagcggaggccaatgccacagagaaggagggggccctctcgactgctcaggagtacctggtaacacaccccagtggccgagaccccgacacaccgatcctgatcatcaaacagggctttgagccccccactttcacaggctggttcctggcatgggaccctcacatttggagtgaaggaaaatcatatgagcagttaaagaacgagctgggagatgccactgctatcgtgcgaatcaccacggacatgaagaacgcaaccctctccctgaattctagtgaaagtggsccaaagtactaccctgtggaggttctgctgaaaagtcaggaccaggagctgcctgaggatgtggaccccaccaaaaaggagaattacctctcggaacgagattttgtctctgtgtttggcatcaccagagggcarttygkcwckmkgcctggctggaaacagctccagctgaagaaagaagcaggccttttctagaacaaggcgtgaccacaggagagggctaatgcagtgccaasatcagcaaaggttcatctacgactgagcccgacacacgctgccctagatacgacagatctcagggtcgtgtattctgtcttttgcattcatccttgcatttctaggttgctatacactagatgccaactatttgccttttagctttggtggtcctttagcgaawgyctcagcagagagagwgaaggcataaaggtagagagaactagaaactaagctcaaaatatttaatgcatcaggacccacatttgctttgaactataccctgcaatccccaaagtggtggagtcagcacacgcttcctgcaggccggactccaaatgcccaggtctaccatgtgccacaccatgttcatgtgccacaccatgttcagcctttcaaataaagaggccatgtgccawrwwaaaaaaaaaaaaaaaaaaaaaaaaaaaaaaaaaaaaaaaaaaaaaaaaa

SEQ ID NO: 6899 - DNA, 1400 bp, Rattus norvegicus
caggctctgcagcggcaacccccaccggcttaagccatggcgctcttcacgaaacccagcagcagcgttgctgtaacggacaaagataccttcgagttaagcacattcctcgataccagcaaatccctacaacatgaccgagatgagcttcctgaacagcgaagtgttggcgggggacttaatgtcccccttcgaccaktcgggtttkggggctgaagaaagcctaggtctyttagatgactatctggaggtggccmmscmcwwcaaacctcatgggttctccarcgacaaggcgggctcctcagaatggctkgctatggatgggttggtmartgcctcagacaccggcaaggaggatgccttttccgggacagattggatgttggagaaaatggacctgaaagagtttgacttcgatgctctgtttcgaatggatgacctggaaaccatgccagatgagcttttggccacgttggatgacacatgtgatctttttgcccctctagtccaagagactaataaggagccccctcagacagtgaacccaattggccatctcccagaaagtgtaataaaagtcgaccaggctgccccctttacattcttgcagcctcttccytgttccccagggtttctgtcttccactccagatcattcctttagtttagagctgggaagtgaggttgatatctctgaaggagataggaagcctgactytgstgcttatattactctaacccytcagtgtgtaaaggaggaagacactccctctgatagtgacagtggcatytgtatgagcchtgagwcvtacvtgggcthtccccaacacagcccttccacytycagggccccaccagacagtctgccttctccaggtgttcmtcgtggttctcgacccaaacyttatgacccmmctggagttagtktgacagctaaagtgaagactgaaaagttggataagaagctgaaaaagatgkrgcaaaacaagmcagcakctabtaggtwcckccaraaraaragggytgagcaggaagccctcmmtggcgagtgtaaagagctagaaaaraagaacgaggmtytgaaaragaaggcagattctytcgccaaagagattcagtatytaaaagacytsmtavamraggkccgwaaggcaagggggaagamragagttccttaatagggtagtcaggtgctttgtgcttkwwyatagtcytgtgaygskgtgyytgctstaataaattattttrwagtgaaarwaaaaaaaaaaaaaaaaaaaaaaaaacctttgcggccgcaagcttattccctttagtgagggttaattttagcttggcactggccgtcgttttacaacgtcgtgactgggaaaaccctggcgttacccaacttaatcgccttgc

SEQ ID NO: 6900 - DNA, 1240 bp, Rattus norvegicus; identical to SEQ ID NO: 2804

SEQ ID NO: 6901 - DNA, 600 bp, Rattus norvegicus
ctctsrckmkgggaaagtgggggtgggagggtcatcctactgagtggttccatgggtttctctgttttgctgttcaaagggaaagcsgcacstacccccacastacccctgaagcaataccaggagccatstcatgaccctcagcagctcttgyttctaaatacagtctgacstagggatrsywygmsstgggcttgtatcmtagtgtcctcttctctctctgkgacstatccastgcacstcattgggytcaggtccaggagcaggggatcctgtgggggcctctstatattgtacatgtcastgagtgcsttcaacatagctgtstcttgcctgccactgtgtgaatctggcggctgaatatctcaggcctctttgcctgtctccagccaccagcttggttcagcagaggggggggktctggtccctyccaagtgtccatgtaaatatgtacatttctcaggccaggsccagcaggggataccctgagcccgtttttcatgcgatgacttgttacaattattcttttcaaaggtacttggataataatgaaataaaatgtttttgamcctcmmwwrraaaaaaaaaaaaaaaaaaaaa

SEQ ID NO: 6902 - DNA, 600 bp, Rattus norvegicus
ctgctggacatakttgtccagagctcttcctgaaagggaaaggctacaggattcgcccttctcatccagtctaagaaactacttagtcaactcctagtgtctaagcagaargcttcagstatggcttctccccttgggaggaagaggaagaggtacaaattcttgttttgctgctcccagggaaaagatccgtggacagtttctactccttactgccacctggaggaagtcaatggacctaccatakgacctgccatccggcaagttttggtggcgtattggatgcccgccgaacaaatctgttgctcttccgcyctgggcccactgccctcttccccacactcctaactgtatgttcccctcaccataccccccgccccgggccttactgtttacactgtgtacatagttcattgtgcctgtctgtgcccatcacttctcactgggattccaggctgcmaaaggggagagccttatttatcattttgaaacctatttattggtaagagtacttatattttgttcagactgtgmaaamwrwmmawmwwwrrmwwrwaawgcawmwarrrmmdmmwwmwtcyswwawmvwdarrmmaaaaa

SEQ ID NO: 6903 - DNA, 600 bp, Rattus norvegicus
agaagaacgkacagtgctgcatagcagatttgggymwrsmarwmawrmawwmccagagcacgaatcagcttgatgtgggaaacaacccccgtgtggggaccaagcgctacatggcccctgaagtgcttgatgaaaccatccaagtggattgctttgattcttataagagggtcgatatttgggcctttggcctcgttctgtgggaagtggccaggaggatggtgagcaatggtatagtggaagattacaagccaccattctatgatgttgttcccaatgacccaagttttgaagatatgaggaaagttgtctgtgtggatcaacagaggccaaacatacctaacagatggttctcagacccgacattaacttctctggcgaagctgatgaaagaatgctggtaccagaacccatccgccagactcacagctctacgtatcaaaaagactttgaccaaaattgataactccctagacaaattaaaaactgactgttgacattgtcaccggtgtcaagaaggagagtcaatgctgtcattgtccagctgggacctaatgctggcctgactggttgtcagaacagaatccatctgtccccctc

SEQ ID NO: 6904 - DNA, 600 bp, Rattus norvegicus
ggtgcgcctggagcagatccgccaagcagacactctggagcaagtacgtagcattctggacgaggcacccctcagggacattaaggacattaaggacwsgkgaggggmcaggmsasmggycwscmksctskbbhmsctgccmywttcyctascagaactgtgaggtgtkgactgcaggtctcagaatggagtccgtcagctgcaaacctggacagtggtgtcccgggccactacttccacccagggtggctggccctgccctcagggatgatacctggaagagggtcctagcctcctcccagaaccaaagctttcaggctgccatgctccctcatggatccagttctcccaccccgtcacctcgggccagcagccagtcccactctctgcgtacccagcttatggctagaagctgttggattcagtggctcctcacatagaggccctgggacacacagctgctttctggactgtatgacactaaggtttttgtccataggtacccgaaataggccccaagacataaggaagcaaggccagacttttctgtcatttattttcaataaataagcagtcagctaaaaaaaaaaaaaaaaaaaa

SEQ ID NO: 6905 - DNA, 1400 bp, Rattus norvegicus
acctttaaagacactgcraatctcgttaaagaagattccgacgtatagcctcgccagctctctagggaacatttagacactcacttttgcacatatattttttacagacaaatgaaaaagaagttaacattcaatactttataaaaaaaatatatttttctctgtttgcctataawwraarrwrwrwmgtgtgtcttttttactgatgccacttcatatttttacaattatcacgggcactgtgtatatcttggactgatgttgtctggaggtgatgctgtgaacattactggacttgtgtaaactttggaaggattatcacacctctgcccctgctaacacgaaggtgcccgttgagtgggtcgctgagctgaasaatacacgatctggtgaggaaaggaattggcctagggctttggatctgtctagagaggagataacactcatatttcctttgaaacaatacaggaattctttatgctcatttgagggcccatttttacacattggcacttaattaatagtcaacgttcaacatcacgtgtcaacctgattagtgagtgtgcagataggggccagtgttggcttcatgcgctgtagatggctcagacaacacagacggtacacagggtgactcagctggacccttctgcgctcctccgccttctgaggccagctatgttttgattgtgcttcgtccctagttgccaagtcaacatttgcacytgccgtgtcacgtcccatactgagtttctgtctcatggaacgagctcttgcttgacagaccttaaatcaacttaagcccttgcctgtcatctcaggtgtcccctaccttcgtgactggaatyccgtagttgactgtatgtactaaagccrgacccgtgtctccacagagcagggcgccgaacagacaccagtcgatcgaagcctcagctgggtgtctgactctgggtgcmcaatgttattgtactgactatttatttcctcagtkgacsacgaatagaaagggaaaacattcttcmtgagcctttctcaggcctttgcctaaatccgtgcatttgtgtccgracgtacwgtacgtyccagctcttmttttgagtggktggtgtatcctctgtcacaggaagtatggcacgagcatgmgttttccacagcgagtagcattcstggttmtstgtgttcaccwtgcacatgtgttaatgaatgaatggsagsgtgggagaatgratgaatgaaatatahdastgattattttattytcgagtcctcsaaatatttygttgctygtattttgagtacccattgtaattactttgattagaaattaaaaagytactggraacgcygctgctggaaatttctaataaatgtgtattttatcrwaaaaaaaaaaaaaaaaa

SEQ ID NO: 6906 - DNA, 1400 bp, Rattus norvegicus
acattaaaaagcctgtctttccgttgaagaggacaggggttaaaatgaacgaagacccgaaggtcaatttaagcgggctgcctcgggactgtatagaagctggtactccggagaacatctcagccgctgtcccctcccagggctctgttgtggagtcagaacccgagctcgttgtcaacccctgggacattgtcttgtgcagctcaggaaccctcatctgctgtgaaaatgccgtcgtggtccttatcatcttccacagccccagcctgcgagcacccatgttcctgctgataggcagcctggctcttgcagacctgctggctggtctgggactcatcatcaattttgtttttgcctacctgcttcagtcagaagccaccaagctggtcacaattggactcattgtcgcctctttctctgcctctgtctgcagtttgctggctatcactgtggaccgctacctctcgctgtattacgccctgacgtaccactccgagaggaccgtcacctttacctatgtcatgctagtgatgctctggggaacttccacctgcctggggctgctgcctgtcatgggctggaactgcctgagggacgagtccacctgcagcgtggtcagacccctcactaagaacaacgccgccattctctccatctccttcctcttcatgttcgcactgatgctccaactctacatccagatttgtaagattgtgatgaggcacgcccatcagatagccctgcagcaccacttcctggctacgtcgcactacgtgactacccggaaagggatctccaccctggctctcatcctggggacctttgccgcctgctggatgccttttaccctctattccttgatcgccgattacacctacccctccatctacacctacgccaccctcctgcccgccacgtacaattccatcatcaaccctgtcatatatgctttcagaaaccaagagatccagaaagccctctgcctcatctgctgtgggtgcatccctaacacgctgtcccagagagcacgctctcccagcgatgtgtagcagcgttctccccacaggacgctggctctactaagcgccccactgcccagggcagccggtgacttcctccccttaaattctttgcactggatctcacaggcagaagcaacgayatcttttagactagtgttggcagtggaaatcatgttaccagtgttttaaaaaactcaacytctcggcttagcattctgttgtttggtttgggagttaggagttgtttgtttgtttgtttgtttggagggtgtagtggcacctcatgtggccgtaaaattatacacaagtctcaggatttttaacctagacttgaaaataaatcagttttaamggmaactggaaaaaaaaaaaaaaaaa

SEQ ID NO: 6907 - DNA, 600 bp, Rattus norvegicus
tgggaaatgtgaccaaaccaacggtgattatcagtcaggaaggcggcaaagtggtgatccggacacaatgcacattcaagaacacagagatcagtttccagctgggagaagagtttgaggaaacrwgcatagatgacaggaactgtaagtctgtgattcggttggatggagacaagytcattcatgtgcagaagtgggatgscaaagaaacaaattgtgtcagagaaattaaggatggcaaaatggttgtkrctmwswcctwwgggkmtgtcrttkctgttcgctgttmtkwmaaggcatagaagaaatgccgggtcttktgaaaamttggtttcstgaagttccagagttabccagytastgaagcaytggtcactarttwtaagtttgtstttggtgtggaggcagaaaattataatttaagrtgtgytagyccaactcgtgggattttgatatgcaaatttactgttttcagtttttttaaataaytttacaatatttttttktkataaagatggggatstaccttataatttcstktggtgtgcaaaccaaattggamtaaraawtrtwcacwctgwwaaaaaaaaaaaaaaaaaa

SEQ ID NO: 6908 - DNA, 752 bp, Rattus norvegicus; identical to SEQ ID NO: 2812

SEQ ID NO: 6909 - DNA, 600 bp, Rattus norvegicus
ttttctactgccttgtgtaaggccatgaacagaatgctagaattcaaaacacttcacttttgaatcatgagataaacaacaggaatgcttaactttaagaacctcaacaattagttttacactcatgataaaagtagcattttcatgaggctggtgtaggacttaagtttttcccaggatagatttctatagagacccccacattgaacattaaagcttccttcattgtatcaaggaaagtatgtatttctaagatatcttcaagtagctttaaagcctagtccttaaacactatttcattctgttgaacttatgtttcgatgtggggggatttagagagacaaatatgcattgtggctgtgctcagaaaaaaaaaaaaaaaacctattctttctatgcacaagctgtctgcatacgtttatatctagaagttattaacccttattttttattttagtcatgatgcttccgagattagacttctctctcatgtgccatctcctggttttagttccatttttctttacttatgtcacacatttgatcatttatcttacagtactgacaaacctgatcacattattaaaaaattcacattgc

SEQ ID NO: 6910 - DNA, 600 bp, Rattus norvegicus
tgagtgcacagatgtgcatggaagtcctcaggtcgagaatgacggagaactgaaaacgaggctgtaatgagttttctactgccctgtgcaagatcatgaacagaatgcatacttcatgtcctttgcgtcacgagaagcactagagcaactctttgatgctctcagatgcactctggcattcaggtgyatcaagttgtgtgtcgtttcatgctgctacttggggtattttaggagtatttttctaaaatatatcagggctggatacagtgtaagatattctccaaaggccactgtctcatcctcaggaggtctctaatgttcagtgttcatattattcatgtgtcctcagagcacatggctactaactttcaaaatcaacttagggtaaaacctttaaggaggggacagttaaatatctcagtggagaggtgtgctttctaccaagcctgacaaggtgggtttgatctctgggaccaacatagtaggccagaaccaactttttccagttgatcttctccctttactcctgtactgtggtgaatatgtcstaccacaaacaaacaaataaaaaatttrgaaagtaaaaaaaaaaaaaaaaaa

SEQ ID NO: 6911 - DNA, 600 bp, Rattus norvegicus
tgacaacttccagctgccgcacacaggacacatacgccaggcgggactggatctcagccatgtctggaacctttaccttgtctgcccaggggtttagccgtttccacaggcaaccaccagccagacaggctgtccccataggtgctgagatccgtctcatcctggcttcccacgtcgatggcaatgaccgttttggcccccatgctgcgggcgatatccgctggcaggttgttgatgtagccaccatccatgagcaggtgcccatccttcgggtcgcacagcggggcaggtagcccgagagcgtcatgctggcacgcacatagcgccacagggagccatctttgtggacacgcatggcggatgcagtgatgtctgtggtcacattgaagtaaggcagccacaggtcctcgatctgcttgtcctggaagacacggtggatacttcggttaaaggccgagccagtaaacatggaggtgacaggatatgtgaggtccaatacaggctccagtacagaagtcatgctcttggcccactcccgggctcgctgtttggtacgactggcgctgcgttcctcggcatacagggccccaatgaaggaag

SEQ ID NO: 6912 - DNA, 600 bp, Rattus norvegicus
tgtccccaagtaatggagaaagaagatagattgcaccgatggcgtctgtctggtgaacgctggcttctgacaacactagttttacacattttacgatttctattgagggtcctatttattttatgtatttatttattccaccaagtgtgtggtttttattttacattaatatttaacgatgtggatgcgtttcatcgatggtcgttcaattccaattgtgcagtttaaagatggtaggcgttaaatatctcgttaaattaatatttattgggagaccattargtgtcaaccactgtgctagaaggtgttgagcgggaagaagggcggagagatgagagtctgggatcgtgttttgtgttagggtgaggaatgtgtgagaggctatgttgtatgttttgaaagaatgttatttattgaaagttgtctttcatattttatggtcaacattgatgtgttgaagcttcccttggacattttatgtctagtttgtagggcacaatgccttttatattctttaaccaatgctccttctcgtctcaggacagagaagttcmaaggactgttacaaatgaaataaaaataaaagttttattaaaaaat

SEQ ID NO: 6913 - DNA, 600 bp, Rattus norvegicus
attttgttttccttttggtaattatttttgttatataattcctcctatccagaattggcgctcactgtcttgaaccatactttgaaagaaatgcctcttcctggagtctgccttactgcatctgatcaccatgtgcatacctctgatcaaattctggagtctttgttctcggtacctcttaaaaagggaaattgtgtawmawrwrwarwrwrmwtttattttcaaaatcttcatagcctttattctagccatttttacctacatactcattctgtacaaaacagctcactcggtctcacggctgatcctcagtggaaatgatttaaagtagagctgtgtacgaatttcagaattcatgtatttaaaaacttcacactaacactttactaagatattgtctcatatcttttatgargatgtcagctgattttcaatgactataaatgtatcttagctatctaaatcttttgaaatttggttttataatttctggtccctaacttgtgaagacaaaraggcagaagtacccagtctaccacatttacactgwacattattaaataaaaaaatgtatattttaaaaaaaaaaaaaaaaaaaaa

SEQ ID NO: 6914 - DNA, 600 bp, Rattus norvegicus
cccgatctgaacgtctctgcctgcatcctgcttttcccccacgaggcttggcactttgcaaggatggtggagttgaacgttttgggtttcctcctccccgtgactgctatcatcttcttcaactatcacatcctggcctccctgagaggacagaaggaggccagcaggactaggtgtgggggtcccaagggcagcaagacgacggggctgatcctcacactggtagcctccttcctggtctgctggtgcccttaccacttcttcgctttcctggatttcctggtccaggtaagagtgatccaggactgctcctggaaggagatcacagacctgggcctgcagctcgccaacttctttgcctttgtcaacagctgcttgaacccactgatttatgtcttcgcaggccggctccttaagaccagggttctggggactttataaatgatgcaaccgagaagcctcatgcccatgtggcccaacaggaagggactcttccaattatcctgctggaattsaaacagcakkgagccaagaagcctggcttcttgaccaaccatctctggtatcataaagaccatctggtcagctgacccacagccc

SEQ ID NO: 6915 - DNA, 581 bp, Rattus norvegicus; identical to SEQ ID NO: 2819

SEQ ID NO: 6916 - DNA, 1198 bp, Rattus norvegicus; identical to SEQ ID NO: 2820

SEQ ID NO: 6917 - DNA, 600 bp, Rattus norvegicus
aaaccggcatcgttggaagtaaaagcaactgctataggtgtgccgacaagtatgtcctaaaacagccaaccaaacctccttcaaagaaaagctggagatggcggcagtgcttaaaaatcaacaacaaaaaataggcagaggaatgtcactttctcaaaggaagactcagcatcgccaatgctgctcctgaccaagggaaagagaggtgaaagttcggcattttaattgactggcttcaaagggtactgtggcaaccaaataaaacaactccattttytagacctttcatgtaacttttctgtcaggactgcagttaatgtgaacatttctgtattttttttaagtatagaagagtagttgaactgagcaatacctcctcctgtgttgtattacacatwttagccacgagtttttgcagtgaccagataaacttgaattgacacgtggtgtaacggaaaggacaggttctgtagactagacacagtgagtgtgtggacctcttttwtaaggaaaaaatacattttggattmcmatcaawwrmwwwwrwmwwrwttctgtttctaaataaagaataatttctgggaaaaaaaaaaaaaaaaa

SEQ ID NO: 6918 - DNA, 600 bp, Rattus norvegicus
cgaggggcatcagggagggacctgctcagtgcccacccacccccccttcccgctgagaagggtgtagccccgtcataacaaaggtaccatcgtaggctggctcccagcccttctctcggctcatacactcgtatgatactctgacactgttcttggctcaatgagcatgctcacactttaatataagctatttttctaactacaaaggtttaaatgaacaagagaggcgttctcatcggaaatttagcatcgtagtgctttgagagaggaaaggactccttaaaagagaaaaaaaaaagctgagatttattaaagaaaaaaatgtattttatgttatatataaatatattattacttgtaaatataaagacgttttataagcatcattatttatgtattgtgcaatgtgtataaacgagaataaagaaaagatgcactttgctttaawawaaacgcaaataacatgccaaattaaaaaaaaaaaagataaacacaagattggtgtttttttctatgggtgttatcacctagctgaatgtttttctaaaggagtttatgttccattaaacaatttttaaaatgtataaaaaaaaaaaaaaa

SEQ ID NO: 6919 - DNA, 808 bp, Rattus norvegicus; identical to SEQ ID NO: 2823
  misc_feature (679)..(679): n is a, c, g, or t

SEQ ID NO: 6920 - DNA, 600 bp, Rattus norvegicus
caagtttactcagccagggcctccccttctcctccatgcccactgcctacaacacagattaccagctgcccagtgcagagctttcctccttaccagccttcagctcacctgcagggctggcactaggcaacgtcaccgcctggcagcagccccagcagccccagcagccacaaccaccacaaccgccacagtcacagccacagccaccacagccacagccacagcagccacctcagcaacagccccacttggtccctgtttctctcagcaacctcatccctggcagccccttgccccatgtgggtgctgctctcactgtcactacccacccccacatcagcatcaagtcagaaccagtgtccccaagtcgtgaacgcagccctgcacctcctccaccagctgtgttcccagctgcccgccctgagcctggcgaaggtctcagcagcccagctggaggatcctatgagaccggggaccgggatgatggacggggggactttgggcccacactaggcctgctgcgcccagccccagagcctgaggctgagggctcagctgtgaagaggatgcggctggatacttggacattaaagtgatggt

SEQ ID NO: 6921 - DNA, 600 bp, Rattus norvegicus
agtacccctcatgtggcagagcctgctgagaatgaacatgatgagcaggatgagaatggagccgaggccagtgctgagctgcgggctgatgctatggccaaggaccgcagtgaggaagaacgtaccactgaggcagagaagaatgagcgtgtgcagaagcatcttaaggcccttacttcagagctggccaatgcccgagatgagtccaagaagactaccaatgacatgatccatgctgagaacatgcgactgggacgagacaaatacaagaccctgcgccagatccggcagggcaataccaaacagcgcattgatgaatttgagtccatgtagtgggcgcgcagccgttagggacccctcctccttcttccttgtcccccacactcctatagttttgcctaactaacaccctgctggagccactaactagaaaagccttggagccataccaaacattcagtatgaccatgggaccaaatttagtttccctattcatatccttgggcaaacaaatggcccacctgtgtagccaatggaacctcctcttccttctttgtcacactcattcaacatagctctctagaatagaccatttccccc

SEQ ID NO: 6922 - DNA, 1400 bp, Rattus norvegicus
tccagggaagtctctcagtggaatttggacacgttggctttccaggaactgaagtcagaactaacagaggttcctgcttcccaaatcttgaagaatcaatctggtcatcccaggagcaaagagggagacaaaggatgtggagtgctaatgtgggtaggagagccagtcaccctgaggacagctgagacaatcactggaaagtatggagtatggatgagagaccccaagcccactcacccctacacccaggagaccacttggaggattgacacggttggcacaggcatccgccaggtgtttgagtacagtcagataagccagttcgagcagggctatccttcaaaggtccatgtgctcccccaggcactggaaagcacaggtgctgtggtgtaykcrgggagcctstatttccagggtgctgagtccagaactgtgctcaggtatgaactgaacacagaaacagtgaaggcagagaaggaaattcctggagctggctaccatggacagttcccatacgcatggggtggctacacagacatcgacttagctgtggatgagagcggcctctgggtcatctatagcacagaggaaaccagaggagccatagtcctctccaaattgaacccagagaacctggaacttgagagtacctgggagaccaacatccgtaagcagtctgtggctaatgcctttgttatctgtggcatcttgtacacggtgagcagctactcttcagtccatgcaaccatcaactttgcctatgacactaacactgggatcagcaagaccctgaccatcccattcaagaatcgctacaaatacagcagcatggtcgactacaaccccctggagaggaaactctttgcctgggacaacttcaacatggtcacctatgatatcaagctctcagagatgtgaggagcctctatccctaccagagaaggcagaaaaagggggaagttccaggctcccaggtgaagcagctgcargaggaggcagccagatgctgggggcttctgcttctcaagatttgtttgtccargtcaatacctcggggcttgtacagttgcatatattctgctctcttctgtcagctttcaaaaggggtgttcatcttttaaaaatcatatagtgtacartccaagaaaaactagaaktgttgtttcctcatgaaacattgctttttgccaagctgtatggttactacmagaccttgagaggcagcaacagttctacccaagaggagggagataacggggagggggtgaccaccactcctgtggttagaactgctcctgcagtatttactccagtttctaaggctacagatatagcatgtacattaaaccctttgccctgtgaaataaagttatcttacacgacgttaaaaaaaaaaaaaa

SEQ ID NO: 6923 - DNA, 1233 bp, Rattus norvegicus; identical to SEQ ID NO: 2827

SEQ ID NO: 6924 - DNA, 1400 bp, Rattus norvegicus
ttcctgctcctccatctcttaaatcaagtctctgcaactctgcgctgcccgtctcggtgcccgagccagtgccccagtatatcaccgacctgcgcccccggggtgcgctcggtgctagacggctgctcctgctgtccggtgtgcgcccgccagcgcggggagagttgctctgagatgagaccctgcgaccagagcagcggtctctactgcgaccgcagcgcggaccccaacaacgagactggcatttgcatggttccagagggagacaactgtgtgttcgatggggtcatttaccgcaatggagagaagtttgagccgaactgtcaataccactgcacctgcagagatgggcaaattggctgtgtgccccgctgccagctggatgtgcttctgccaggtcctgactgcccagctccaaaaaaagtcgcagtgcccggggagtgttgcgaaaagtggacctgtggctcagaggagaaggggacactgggaggcctggcccttccagcctacagaccggaagctaccgtaggagtcgaactctctgactccagcatcaactgcattgagcagactacagagtggagcgcgtgttccaagagctgtggaatgggcttgtccacccgggtcaccaacaggaatctccaatgtgagatggtaaaacagactcgtctctgcatggttcggccttgtgagcaagagcctggggaagcaacagacatgaaagsyaaraakygkcwcsggaccaagaagtccctgaaatccatccacctacagttcaagaattgcactagcctgtacacctataagcccaggttctgwgggatctgcagtgacgggcgctgctgtacgcccttcaataccaaaaccatccaggtggagtttcagtgtttgccagggcaaatcatcaaaaaaccagtcatggtcattggaacctgtacctgccactccaactgccctmasaacaatgaggccttcctccaagagctggagctgaagacsagcagaggaraaatgtaacaggtgcccagggaagtgcattygttgaggcaaactgttgytgtmacaaggcccgccatyacctgtwtataaraaacatagtgaaggagttgycccgtgtatgyttctgtgatcawawgaggtcattwawatttgtckctgwtttwaatgaaaactgttccmaatgtaaacttakaatcaarataagctcaggatatggcttaggggkgacttgctttcctgksctgwtcattacaagtgcaaatttgtgtaaatttaagycacatasatgatctagttggtaraatgtgtcacatcacactcattttytgkmcattagttaaatcccaataaatgttacagrrwtgrwwrrmamarwraaawmwaaaaaaaaaaaaaaaaaa

SEQ ID NO: 6925 - DNA, 600 bp, Rattus norvegicus
gaagatgagattgatgatgactatgaaggagattggaacaactcttcctctacctcaggggctggtagtccctcatctggcaaagaaaagagctggctgtacacactggaccccatcctgatcaccatcattgccatgagctcgctgggtgtcctgctgggggccacctgtgcgggcctcctcctctactgcacctgctcctactctggcctgagttcgagaagctgcaccacactggagaactacaactttgagctctacgacggcctcaagcacaaggtcaagatcaatcaccagaagtgctgctcggaggcatgaccgattgtgtctgaatcgcttctggcgtttcattccagcgagaggggctagggaagattactttttttttcctttggaaactgaatgccataatctggatcaaaccgatccagaatactgaaggtatggacagaacagacaggccagtctaggagaaaggaagatgcagccgtgaaggggatcattgcccacagaggacagtggtggtcaagttaatgcaggaaccgggcccgtgttctctgccgggacacagacaggagcgcatctcctcggagtcaacag

SEQ ID NO: 6926 - DNA, 600 bp, Rattus norvegicus
aaaaggctgcatgagtgatgggacctatgccccagactactctctgtcagckgtggacctgaagagcttcaaaaacaacctggtggacatcattcagcagaacaaggagaggtggaaagagttggctgcccaaggcgaacttgatcttcataagaactcagaagacttagaagaaaagcatgctgacacacatccataggtgtgaacgaactttaagagttcagttattttaaacacaagaggaaaatgaaagcagcatgaaaaacatgcaaagaccttgatttttctgcaaaaaaatatatgtttggctcaggccattttagtcgactcctccataaggaacaagagcataagtttcactcttcttagctcagcaaagcagtacctgcaagttatcattaggattctggctgctgtttctgccatcgttctccctccatgatttggccatcttcaatgaagccagagaaatctggagactttcaactttccgtcatgtttgacttggcctgaagacagaatggttttcaatgcacttcttgcaccgtgtcactcaagaggacccacaaccacacaattgttaacaacacaaggacaaca

SEQ ID NO: 6927 - DNA, 600 bp, Rattus norvegicus
  misc_feature (363)..(363): n is a, c, g, or t
tttctaccagaaaccctggktccccctcactgcctgcatagtcctrgtctcccacgtggctgcctcgcttgccttatgcccacaccctgtacaggcacattgggctggtttcttcgtcagtagtaagaaagatggagagagmcksrskwrvckrkgbccaaccytgtvtcwgrwcmtksrgcstytytccatytccactytggacaytaaagttgccactgggaacttgagaatgggtgsccgttytcacccaaggcccaccgagaaggcctaagagtaacctgtccccaaggcgatcttagcaaygkywckrccgcttcytggcytggcatgtcctcacgtgtatacctcccytgcccagtntacgctcaccytatccctgcttgagctttagaccccagacttcmtatgcccactatgtgtgcacagrcgactcaaacccaggatgccccatgtacatagccagtktkgtaatytcagatgcctcacccttgccctccgcacacaggggttaaagccgtgtgcccctcccagtggctgggatggtgayagtgacatccacagtaaatagrtgaaatgwgraaaaaaaaaaaaaaaaaa

SEQ ID NO: 6928 - DNA, 1400 bp, Rattus norvegicus
cattggttatagttatgggaaaggaaggtgtccacacaggcacaattaacaagaaaacatatgaactcgctttatacctgaagaggtctgatgtataagcagcctctcccatctacctacctatcaactgtcttcatcaccaccctaattatggtcataatgctaccagattgtagatggtagctagtttttccttccttattttctactgtcatgattcccaagggtcatttgtatgttagccactgtgtgcccaacccttatctggcatcgtgatcgcagcacaataatgatttgcatgatatcttgagattgggggargggggcatgccaagtcgggcatcacttcgtcttagcaattagtggaatactgattactaaaataagttaatattaagcaaggtgccggtgtacaatctctaatttgatcagtgtkttctcagcactttgagcatttacttagctcatttagtcttccttttgtagcgcatggttgskaggaaaaagtgcatgcatctgtacttcacacctttctcatcccctcccttcgaacatgaggcgtttggtttgcttccattctctttgtgtagtgcctggkttatttaacctaatcaatacctsctckctgagctgtgagagtykcagtgatttactttgatacastgaktgcacttgggacacactgtttgtagtgtcaatagcacgtgatgagtgcagctgtggagagaaaggcacttmctyccatgaccttactacagtaaccataccgatcaaattcccagggacwttcgatcattgcagtagctcagacttcttgkcttttctttgcacaccagctgtactcttgagtaaaatkgtaaaaggctgscattatggatattaggtaacccrrcayravsatctggagtgtgysmagtttatttttcmtmrswyywwtttttwtttgcagmttadgktyttatatgaagwtgcwttattgtggactkggstkkcykgtgatgkatttttttcatatgtatcctgtgscatactawtgttaaaatgaaskgttgytattgtgaratggaatttctttcgaatggcavwactttaggramawtmkarwatkkgctkskattgkttgggcattgtggataatgtacagatttaaaaacaaatcttgktgstgatttgtccatttctttccctgcactttgttacatctgggawacagtctaacycatctgatttaatatgcatttaaaaaaatgccataactattaaacmccttgtttacagacagatgaaatwmatttattccmmccmmrwaaaaaaaaaaaaaaaarwrarcktgcsgccscamsctyrtkccctttagtgagggttaattttagcttggcactggccgtcgttttacaacg

SEQ ID NO: 6929 - DNA, 600 bp, Rattus norvegicus
ggcttccyhckgaywgkgaakywggcyswmrwgcyyratgamytcrtgsayrrgrggaaagagaagctsgattcagtcatcgagttcagcatccaggactccctgctgatccggagaatcacggraaggctgattcaccccaagagtggccggtcctaccatgaggagttcaaccctccaaaggagsccatgaaagatgatatcactggggagcccytgatccgcaggtcagatgacaacgagaaagccttgaagacccgcctggrggcctaccacactcagaccactccgcttgtggaatactacaggaaacggggcattcaytgcgccattgatgcgtcccagacccctgacgtggtgtttgcargcakmskggcagcsttstccaaagccacatgtaaagacttggtcatgtttrtctaatgytgggtwtgaagkgcctcttttcttcctctctgtgaaaggaatggwgggtggtcatggttaggtaggtagaaggaacttcctttctcagacagcaaggdcaccttmtaatgtactgattaagcacttacktgmwrwrdmwmrwawaaaaacaaacaagaagtgttgtgcggccgc

SEQ ID NO: 6930 - DNA, 600 bp, Rattus norvegicus
ttaaaggatgcccgtgctgccgaggagtcaggagacagcagggctcactccagctacccgaagaccaagaagggccagtctacgtcccgccataaaaaaccaatgatcaagaaagtggggcctgactcagactgacagcctctgcatcctgtccccatcaccagcctccccgtcccctcctttcttgccattttatgactttagggcttgttatgagagctgacaagacaatgctagtcccttcactgcctttttttaccttgtagatagtactcggccccctctatgcaaactggttcctggcccagattggggaatgggttggtagttgctgggtctctgctggtccagcgaaatcctatccggtcagttgttggacctggcacctacagtgaaatttcaccccaccccaccgcctgtaagattctatcttgggccctcatacgatctgtatcctccggacccatttcctccactctgcaaagcctgtctgcatttatccatcccccacccctstccctctttttatctckttttatatatccaatttcttattttacaataaacttttgttaccacttgaaaaaaaaaaaaaaaaaa

SEQ ID NO: 6931 - DNA, 600 bp, Rattus norvegicus
ggacagacagaattggwaacctgaagaactcccagatttcaggcttatcctgtacttgttaactttgggtgaaagaaagaaaagcaaagaaagaaaggwaaagcctctgatctgtttttamtgaaggaaaagttactgtagattttttttttttgtagatttgkgctgtcattccccaaagtgcttttgtcatgttgaaaragatataaggatttagaagaagatacttkagacttgttcttggsccagtatataaggtaaactagcaggatgcvcagtagtgaggagagcttaaaggacctggaagaamccaatcaagataaaggaaggtgaaataatctatatcttttatttggtttgattttaatatcataacagataaccamccactccctgaaaacctcacacgtatatatacacacacgcatgcacatacaaagagagttaatcamctgcragtgtttccttcatttctgawatagaattttgattttaacaacataaaggrtraactcttagaaactcatcttacaamatgtmttttataaaattaaagaaaataaaattaagaatgttctcmrycaaaaaaaaaaaaaaaaa

SEQ ID NO: 6932 - DNA, 600 bp, Rattus norvegicus
catttcccaatgccagaacttcagctgtcaatttcattccccaatttgacggcagayggttatcctgtactgtacccaattggrtggtcakcttcagataatgtgaactgtakaccccggagccttgaggacccctttggsatcaactctgggaagaaaatgacaatatcgaagtctgaggttctcaaaagaggcacaatccaggactgcagtagtacgtgtggagttrccaccatcacgtgtagcctccttccttccgacctgagtcaagtgaatgtctcgctcctcctgtggaaaccgactttcataagagcacatttttccagcttaaaccttactctaagaggagaacttaagagtgaaaattcatcgctgactttaagtagcagcaaccggaagcgagagctggctattcagatatccaaagacgggctcccaggcagagtgccgctgtgggttatcctcctgagcgccttcgcggggctactgctgctaatgctccttatattggctctgtggaagattggattcttcaaaagrccactgaagaagaaaatggagaaatgaaaggtttcatagaaaraaaaaaaaaaaaaaaaa

SEQ ID NO: 6933 - DNA, 600 bp, Rattus norvegicus
caatcctctmccatcctgcagctgaaatgggaacactggctgcctctctaaacctaaactcytggatagagtttctgggaggtggaggctggactagagacctggggagggggatgggagggasgaggggagagaagagaagargcwmtagkttaactccyccagagtsaagmcmggmtgagcatthtaytacaggacagggcctcaccccaagcaagccagtgagcagcccagccagaccstgstggaytgagaaacccakctgctgacakaccctgggacttgccttytttgccaagtcaaggggaawccaaaaggagcttccctcmtattmttcctagctcccctccctgccctggctctgctcctccccacacttccctgctacagtcccagttgctgtaacagccacctccactctaacaataaaccaagttcattgcgrwmmrrwrwarwrmwrmwwaggttttcccagactcctccctacagtaagctgtcccggatcccattcctccgtttcagttagcagttatcttggaagactcttgattattcaaacccattccaggacccaggagagccaacacgcgtgagaggagg

SEQ ID NO: 6934 - DNA, 1400 bp, Rattus norvegicus
aggacggggaagccggagccgaggacaagcgctcccaggaggaggcgccaggccatcggcggaaggatgctgaggggacagaggagggcggggaggaggatgacgacgacgaagagatggatccgcagacgatcgatagtctcattgaactgtccaccaaactccacctgccagcagacgatgtggtcagcatcatcgaagaggtggaggagaaacggaagcggaagaagaacgcccctcccgagccggtgccgccccccagggctgccccagccccgacccatgtccgctccccgcagcccccacctcccgccccggcccgggatgagttgccggactggaacgaagtactcccaccctgggatcgggaggaggatgaggtgtttcccccggggccctatcaccccttcccaaactacattcggccgcggacactgcagccgcccgcatcctcccgccgccgtcacttccatcacgcgttgccacctgcgcgccaccatcccgatctggaggcccaggccaggcgcgcgcaggaggaagcggacgcggaggagcgccggctgcaggagcaggaggagctggagaattacattgagcacgtgctgctgcaccgcccgtgacccgcccctgcgcgcccgctcccaactgcgcgcgccgccacgccccccctccgtgtcgctcctcctccctctcggtgtttgcatgcgccccggctccgcccctcggctgccgcccggccccgccccacaaggccccgccccgggttctgtcaggaccagacctgtcagacttctttggggtctgatcctggggccagcccaggcgggtgtgtggtttgtgcgagtccccttacacccccacttcctccaggggcctcgtccccatctagtttctctagcgacttcctggtcccaaacggggaaaagctgttctatttaatcgtgtgaagtgtctgtctcccagccttggggcccccggagcctcccttctccaaattgctgtgaacttacccacatcttgcccttctgttgtaaatacccctcacggaggaaatagttttgctaagaaataaaagtgactattttmttarramwwwrwwwwmmawwawwcacccgtccccttgggcctatctggtcctttccaaggggcggtgagggaagcgccagtctccctagtctcagaccaaagccagactgggtgggagaaaggagtgaaggtgaacctggaaagggaatgttctagtaaaaggtacacgttgccaagcaagacatgagtgtcataccagggtaccttcctactgaccactgcaagttctctccctgacttccacatgcccaccttggtacgctcacccacccacaaaacaaatgtaataaaaaccataacaaaaaaaaaaaaaa

SEQ ID NO: 6935 - DNA, 600 bp, Rattus norvegicus
accaccaccttttcaattggcttatgaggcagaactgggcagcaatcccagtgcctgtgagctctgggccctggcggtcgcggagaggaagcgccccaacmtcccttcctcttggagctgctctgscmyrgaccctagggggctgagggagctcctggaagattgytgggacgcagacccagaagcaaggctgacagctgagtgtgtgcagcagcgcctggcagccctggcttatcctcaggtggcttcctccttcccagagagctgtccacagggctgcccagagaactrccctgcagcgcctgcctmtgcrgctttcccctgcaggcctcagcagagttcttgtctcctcagtgttcagcaaggctctggctctaagtcctgagcctgtaagtgccactgttcaggtgtatgtaaatgagcagctcatatgaactctgtacaggctgacatgcgtgtggccgacatgcrtgtgtcgggtgtcagcctcatgcctgttgatgtcattctgtgtgggtttctaacccatcgggtagctatgctcaggaaagagaataaagcaagattcccactcaaaaaaaaaaaaaaaaaaaaaaaaaa

SEQ ID NO: 6936 - DNA, 600 bp, Rattus norvegicus
catcattgtggcttgggccattgggaagctgcactacgacaatgaaaagtgctggtttggcaaacgtcctggggtatacactgactacatctaccagggccccatgatcctggtcctgctgatcaactttatctttctcttcaacattgtccgcatcctcatgaccaaactccgggcatccactacatctgagaccattcasymyaggaaggctgtgaaggccactctggtgctcctgccccttctgggcatcacctacatgttgttcttcgtcaaccctggagaggacgaggtctccagggtcgtcttcatctacttcaactcttttctggagtcctttcaggrcytcyttgtgtctgtgttctactgttttytgwrcmgygaggtccgctccgctatccggaagaggtggcgtcggtggcaggacaagcactccatcagagcccgagtggcccgagctatgtccatccccacctccccgaccagagtcagctttcacagcatcaagcagtccacagcagtgtgagctccaggccacagagcagcccccaagacctgaggccggggagatgatgcaagctcactgacgagccagtctgc

SEQ ID NO: 6937 - DNA, 600 bp, Rattus norvegicus
gaattcttgtctcagtttctgtttataatatgaatcactgtaaaactctaagacttggctaatcacgtaaaagattgtggcttcagtgttttctctkwaggcattgtgactggcttccagagcatcacacacgcccagaagggtcatctcgcacagcacaggctcagcaagccytgggccgctcacaggaggccgaactgttccytgtggaggaaaacagttytacagctttccagtgaacaacgttccgtccggcacctttccccatttaggaaggaatktgcagtctytgggcggtgggcatrccgtkcggatcctgtcagagctcctgcagcacatctgcctttactgkccyttaaggatgkataaatgctghacagtgctgttgkatctcccgacacktgttttcsctcagcttagtgcatttaaatacttgkatttatttatttgtttgggacatattaatatatatgaacatatagktactgttttatatattmttagcttattcaaagccatgatgctgtaaatgtgcttgtctttagaatgataaataataaaaactgacaagaacattgaamwmaaaaaaaaaaaaaaaaa

SEQ ID NO: 6938 - DNA, 600 bp, Rattus norvegicus
aagcctgcctcatcagcttgggttmtsmtatkggywacracmyscagkgagaggcagaatttgcccgratcatgagcattktrgacccmaaccgcttggggkwagtgacrttccaggccttmatcgacttcatgtcccgagagacggctgacacagatacagcggatcaggtcatggcttccwyvargatcctggctggagataagaattacatcaccggggatgagctgcgccgcgagytgccacytgaccaagccgagtaytgcatcgcgagaatggccccytacgcgggccctgactccgtkccgggtgctytagaytacatgtcyttcyccacgrckststacggssagagtgacctmtaacccacccvtgcytccccccaccvtggmctthtgcgcgtgcgccccaccstgctcytgcwccgcccagtatggctgtstgcgtttggtttcagctcagccaccaaggggacagagckccgacccaggcggcacckagcytccctacccgcaargtgacagttyacaaaattatyttytgcaamaaarraraaaaaaarttacatttaaaaaaaagtttaaaaaaaaaaaaaaaaaa

SEQ ID NO: 6939 - DNA, 600 bp, Rattus norvegicus
gaaagaccaaagagwcaagcgtcaactggtgcttggctgatggctatgacctggagatcctggatggcaccaggggcaccgtggatgsacsagggaaagagttgtcgcgggtgtctaagaagaatattttccttcagtttaagaagctctgctccttccgagcccgcagagatttgctgcagctctcctatggggaggccaagaaagctgcccgtgactacgacttagccaagaactacttcaagaaaagcctgagggacatgggctatgggaattggatcagcaaaccccaggaggaaaagaacttttatctctgtccagtgcccaatgactgatagtggggtgtgttcccatggggtcrgasgrrggtcatagcattcctcatcacattgggccagagtttaggggccttttttaaccccctcccccccattttttaatggagaaaccataatagatggtaaagacctttrrwwmmmawwaawmmwrmwwrmwwtgggatttcgaggtggggtctggccaagtccccacctcccttttcccaagggaagaggccgagattaaaggaagaggaagcactaccaaaaaaaaaaaaaaaaa

SEQ ID NO: 6940 - DNA, 600 bp, Rattus norvegicus
cgtgctctgccccatcctctggagcccctgcagactagttcctgtgacccagtgacatactgtttggtgtctgcgcgtgcmcaggttgtcctgccacttgcactgtgcttgctcctaagcaggasrvgrrggaaccatktcctggaaggagagcattggaagaagtgatgaagaggtgaagtgaacacacattcttaaggcaataaaaccggggggtgwatattatcttctggtgcatgttcttctytggaaaatacggkagytcgtaactgcatycmtartytgwtattcaaacacmcagkatttgtgaataagctgatcccgtcacccaacatggwgtctgtgttcacytacccatgtgtctcawtgccagtggtcgtccttgggggctcagytgagactytcagcttctgtcaccytgmtgtcctgtyttgtggcagcagcacgttgccatccatyaccagaattwgtcctcacagcytakgaccagttttgtaccaaactcatsygatgttttsatgccatttgtcwwwhgtaaggttaattcattmamagwtttatgdwctttgdwddrwarwrmmmraaaaaaaaaaaaaaaaa

SEQ ID NO: 6941 - DNA, 600 bp, Rattus norvegicus
  misc_feature (397)..(397): n is a, c, g, or t
  misc_feature (583)..(583): n is a, c, g, or t
cgcttctcctctgagttcgagctgcagcagctggagymgywtrmagmskryaactmsgccacwgkstttggytmcrgcactckrkyybtggmscaagccctggagaagactaaagccaacatcaagtgggtgaaggagawcaaagacgtggtactcaagtggttcmcagaaawcagctagttagtcccgggccgagaaccatctgtcccggsgtgacgcmtatgactatytcarcagcctgtgcagggtmtmtgtbttcaragcgccagacaccggyatbtgaccctcaaggtcaaagtytccarcctatggagvtarcctagbtchtaattgtcagavtgccaracacctyccgkyccttgcccytygtrccaaythtgccccaggcccaggcctntggggctkatytcagggaarccsagcthtgagtytagatttactggacaaagggtagcmtaraaaragtytccctgaawkccttaytactttcccyccacaagacccagaaccaaagaatcaacagggcmcaaagatstmtatrtatttttaagagaaaatgtaaawaaagaatttytwaaatgwnaammaaaaaaaaaaaaa

SEQ ID NO: 6942 - DNA, 1400 bp, Rattus norvegicus
cggccctcgagcgctggtttgcacagtgtacagtgctgctcattgctcaccgcctgcgctccgtgatgaactgcgccagggttctagtcatggatgaggggcaggtggcagagagtggcagtccagcacagctgctggcccagaaaggcctgttttacaggctagcccaggagtcgggcckagcctgagtcaggactcttcccaaacctcctggagccagccacagagcctgcagtagctggagatgccagagactcaggggccacatgatgcccaatctaaactcctttttgggaggaagatagcagagagagtgacagagtattggaataccagacccagaagaacccagcatgcccaggttggcttgagcaaggccacacccaccccaggccaaaaagaacagtgactctcagcccaagctgtctacttcaaggccatacccaccccaggccattcaggttggatgccctggaccggggtgatggcgtgcacatatcccctaactccttattttgaggtcattgtagagttcactcacagttttaagaagccacatggagagaagccgcaaaccctctgccctgtttattccgggggtgacaccttgtccaaccctaggacaagatgaagcatcacactgactccgactgacttgtctttacctytgctgcgtgtgcatcagtgtttggactccgtgctttgkgctctcattggtttttkaracaggatttcacatagcccaggctggccctgaactcactttgttgctgaggatggccttgaacatytgatgctcctgccttccctcccaagtgctgggattatggcctgtgtcaccacgccctgtgtgggggtctcaaacaaggctttgtgtgtgcttgacaggcactcactytaaaaactgtgwwamarmmmmrrmwmwrgattcggywckactcctgtttaaaattgtagtggtgaagggtctcttgctcaaactggcctcaaactcgagatgctcctgtctcggtctccagagtgctggaatgacagacgtgtgccactacacctgccttgactcaccacagctaagtagtgacatccccatgggccagggctggtgagtcccgtgcgtgacagtgtgctgagcagtacccttcgcttytgctcagagatgcccttctaaagctgtggcaaagagatttccacacactgccgtgcccccccaggactgcatcatgaattgatccgccctaatagcacccatgactccctgagcagtgatatgttgggttcaggagaggattcctgcttgcttcttggacagggcttgctcttccctcgaccctgaggcttctctgattggctacccttaataaaggatttacgggatttcctttcaaaaaaaaaaaaaaaaa

SEQ ID NO: 6943 - DNA, 600 bp, Rattus norvegicus
tgtgtcttggggaagaacagcgaccagaaagctgtgtttatagtgacctgccatttcactttacagtcttactgcaacatgaaagtaaggagttttagagagacactatcattgcgcccatgctccgttttggaaagactaccttattaaactctcaccttataaaccctgtcagtttaggagcaccgagaaattgaaagaggcatgctgaaactgcagatctaaggaaaaatctctactgtctcctgctctcttgaagaagggcgtcagagtctacaatttcatgtctctgcacaagaagaataacctagtctatttgttgtttctttctgttgttcccctgtgtggcggtgagaaagaaatgacacattccatgctaacacagagacctacatggaaagaagcaggcactgtacaatgagagagaagaagaaagaaaatcaaataggatgcagagatggtctgcagagcacgagcatatatatcctcggctgtgctgtgctctgatcggaaggatttcaacacaacaacctgcttatttcttctctcttgccccctcccctgccgatggaaatcaagaaagccaacaacaaccagtcg

SEQ ID NO: 6944 - DNA, 600 bp, Rattus norvegicus
cctgccatcaccactgtaacagtgccaaccccgatttaccaaactagcagtgggcagtatattgccattacccagggaggagcaatacagctggctaacaatggtaccgatggggtacagggcctgcagacattaaccatgaccaatgcagctgccactcagccgggtactaccattctacaatatgcacagaccactgatggacagcagattctagtgcccagcaaccaagttgttgttcaagctgcctctggtgatgtacaaacataccagattcgcacagcacccactagcaccattgcccctggagttgttatggcgtcctccccagcacttcctacacagcctgctgaagaagcagcacgaaagagagaggttcgtctaatgaagaacagggaagcagcaagagaatgtcgtagaaagaagaaagaatatgtgaaatgtttagagaacagagtggcagtgcttgaaaaccaaaacaaaacattgattgaggagctaaaagcacttaaggacctttactgccacaagtcagattaatttgggatttaaattttcacctatgtggtggaaaatggactggattggccacaaccagaa

SEQ ID NO: 6945 - DNA, 600 bp, Rattus norvegicus
agagactccggcgtctccagctcacacaactccacagacccaaaatacaagtggccgtcgaagaagagcagctaatgaagatcctgatgagaaaaggaggaagtttctagaacgaaatagagcagcagcttcaagatgccgtcaaaaaaggaaagtatgggttcagtccttagagaagaaagcagaagacttgagctcactaaatggccagctgcagagcgaagtcaccctgctgagaaatgaagtggcacagctgaaacagcttcttctggctcataaagattgccctgtaaccgccatgcagaagaagtctggctatcatactgctgataaagatgacagctcagaagacctttccgtgccaagcagcccacatacagaagcgatccagcacagctctgtcagtacgtccaatggagtcagttcaacatcaaaaacagaagctggagccacttcagttctcacccagatggcggaccagagcaccgagcctgcactttcacagattgtcatggctccttcctcccaggcacagccctcaggaagttgattaaaaacctgcagtgcaacagggtttagatactgattagtgacttcata

SEQ ID NO: 6946 - DNA, 600 bp, Rattus norvegicus
aaacatgaatcctcaggggtgaagaacagtttgcataattttctgaatttcaggcactttgtgctatatgaggacccatatatttaagctttttgtgcagtaagaaagtgtaaagccaattccagtgttggacgaaacaggtctcgtatttaggtcaaggtgtctccattctctatcagtgcagggacatgcagtttctgtggggcagggtaggaccctgcatcatttggagcccagaaggaggccgactggccaggcctcaccgcctcagtatgcagtccagctccacgtcatcccctcacaatggttagtagcaacgtctgggtttgaacgccaggcgtggttatattattgaggatgcctttgcacatgtggccatgctgtgttaggactgtgccccagggcccggacttgaagctagagctggcagaagagctcctggcatccatggtgcgatgctgccgccacccagtttctccattggaagacaagggaatgagaagactgctgtgtatgtgtatttgtgaacttggttgtgatctggtatgccataggatgtcagacaatatcactggttaaagtaaagcctatttttcagat

SEQ ID NO: 6947 - DNA, 1400 bp, Rattus norvegicus
  misc_feature (332)..(332): n is a, c, g, or t
accaccacacggatggcgcatacttsggcactggtttccctcacatgctcttcatggtgcatcccgagtaccggcccaagyggccggccaaccagtttgtgcccargcthtacggtttcaagatccatccaatggcytaccabctgcakctccaagccgccagcaacttcaagagcccartcaagacgattcgctgagtgycctcccacvtcctctgcctgtgacaccaccgtccctccgytgccaccctttcaggaagtctatggtttttagtttaaattaaaggaattgttactgtggtggggatatgaaataaaggaagaraaggcwwnraaaaaaaaaraarwvmrrmykcgrsrksksrccyaggtgtaymcarytgcmsattaccaatggctgcagaacacccaatcatgacctctagtgctttatagcaaaagtgtaaagtggtacctgggtgaccagcattgccatggttacatccatttgcgtaatcaagcagctgtgcaactgctcttctaacagatgaacagctgcatgcatctccagcaggcatggattgtctcttgtctatgatcctcagtgcgttcacttagagtatttctagagtttgagtccttgccgtgatagagccatgtagggaatgcactgattgcatgttaccccaagcgtcatgaaaccttccgacacggtgacctatttaatggtcttgtttgttgacatgacaaattaacattcttagagttacatctcgaaaaaagcatttgtgatagataagccctttgagccttgtggctaaatttttgtggctttgtttaactttcaaaggttatatatgcactaaccttttttgatggctaagtaggctttaaattacagtaaattttttcaaataaaactggctgtaaaatatattttgaattagagttgttcactttttcatagctacttatgtttttttcccaataatttatttcacatctctaccagtgaacgcagcccatcactagaaaatgaccttgtcctgatttcagtttcaactattagttttaaagctcactgttgaataagaggaagtggtggtgcattttaaattgactttcatgtgcttttaaaatatgacagatctccttgataatgtacttttatttgatctcaagttgtataaaaccaataaatttgtgttactttgattgcagtagtatcttatgcatagtgattccatgttatatgcagactagttaggcaactgttttcttagttacaagcttcacttttgtgcagttaaaaaaacaaaagtaggctacagtctgtgccatgttgatgtacagtttctgaaattgttttacaagactttgataataaaacccttaaactcacaaaaaaaaaaaaaaaaaacc

SEQ ID NO: 6948 - DNA, 1400 bp, Rattus norvegicus
gaggtctgcaaggaggccaaagtagcagcagctcctcaggtctgggctggctgtgcagaggagcctcctcgggcacaggaacctcccctgttgcaaagcagccccacggaggacttgatgtgcacagaatctcctgagcaggctgtcctggcggcctctccagagcctgatgcctctgtcacctcagtagctgatgctcatgcagctgacaccatcgagaccaccactgccactactgccaccactattgccgacaacgtcacccctgccgccgccagcctcattgatctgtggcctggtaacggggaagaggcctcaacgcctcaggctgaacccagggtgcccaccccaccctcaggtgctgaggcctccctggcagaggtgcctctgttgaatgaggcagctcaggagccgctgccaccagtgggcgaaggctgtgccaaccttcttaatttcgatgagctgccagaacctccagccaccttctgtgacccagaggaggaagccgaaggagagccgctggctgcctcccaggtcctaactatgccctcagccctagaggaggtagatcaggtgttggagcaggagttggagccagaacctcatctgctgaccaatggagagaccactcagaaggaggggacccagcaggccagcgaaggatacttcagtcagtcacaggaggaagaattcgcccaatcagaagagccatgtgcaaaggctccacctcctgtattctacaacaagcctccagaaatcgacatcacctgcygrgrtgcagacccagttcctgaagaggaagagggcttcgagggtggtgattagtagtggcgactgccccctggctgccctcgccaaggctgcccacctgcagtgcctctggccagccggcttgcagcgccagcattagcagcagccccgcctggctcccactctggattccggcactggccggggacctgtctgcttctctacccacagggcctgacttttacagcttttytyttttttttwaaagttgatagacttgtacaattgactggttttcctcccgttggtagttgaaacaatgttgcagattccacccccttcctgcccagaccagattgtagcttagtccttcctgctcagctgaccagggtggaggcctcaccctgcttgggacctggtgggggtcgggggttctggtgggaaaatgttcccccycatcacttttcctagttttatgtttcttggaaaaaaaatatcactttgtattctctatccagggcttcagatattttgcacgaaatttaaaacatggcaataaatggctcgtgggctctgrmwmmmwrrrammmmammmmwwmwmwwwaaaaaaaaaaaaaaaaaaaaaaaagttatcttatgcgcctcgtgcc

SEQ ID NO: 6949 - DNA, 600 bp, Rattus norvegicus
tggaaacctacgtcccttccaccttcctggtggtgttatcctgggtctccttttggatctctctcgagtcggttcctgcgagaacctgcattggagtgacaacagtgttgtccatgacaacgctgatgattggctcccgcacatccctacccaacaccaactgcttcataaaggccattgatgtttacctggggatttgcttcagctttgtgtttggggccttactggagtatgcagttgctcactacagctccttacagcagatggcagtcaaagatagggggccagcaaaggactcagaagaagtcaatatcaccaacatcatcaacagctccatctccagctttaaacgaaagatcagcttcgccagcattgaaatttctggcgacaatgtcaactacagcgacctgacgatgaaagccagcgacaagtttaagtttgtcttccgagaaaagatcggcagaatcattgattacttcacaattcaaaatcccagcaacgtggatcgatattccaaactactgtttcctttgatttttatgttggccaatgtattttactgggcatactacatgtatttttgagatgccattgaactct

SEQ ID NO: 6950 - DNA, 600 bp, Rattus norvegicus
gaagaagcagtaccgccgtgcagtgctggtrgyrcrwsstgataaggccacagrkcwgcyakrwgrayrgkmtrcyrrgmtgawctkcatskasctgaatgatgcatggtctgagtttgaaaaccagggctcaaggcccctcttctgaggcctgtgatgactatgsctgcargagctgctcatgaatcctgaatgctgctggcctgactgaggcacaaatgggaccataacaggtgyggcasgwgrtatcgcyccaggggcctggaccatctactcccaatcatccctgcattcatcatggmsaaataccattccatggctgggagagaaagcattcctcagatctgatatttgktgttttkwttttywtwttyttktcccrgaggaaaagtgttgatttatattccttccacagctgtcacaatttgtgatttacttggtgthtggtggctgtcacctcttgaatggcacatgtcgctggcamttctctcctgtaatttytycaaatatggggtgcatccacaccccactytgataagtttgccaatcatctgtacataattaamctmktkyccgatrrmwraaaaaaaaaaaaaaaaa

SEQ ID NO: 6951 - DNA, 600 bp, Rattus norvegicus
ttgacggacgtggaccgcatcgctacagtaggctacctgcccacccagcaggatgtgctgcgggtacgtgtgcccacaactggcatcatcgagtacccgtttgacctggagaacatcatcttcaggatggtggatgtgggcgggcagaggtcagagcgcaggaagtggatccattgctttgagaatgtcacgtccatcatgttcttggtggcattaagcgagtatgaccaggtcctggtggagtcggacaaygagaaccgcatggaggagagcaaggccctgttccgcacaatcatcacctacccctggttccagcactcgtctgtgatcctcttcctcaacaagaaggaccttctggaagacaagatcctgcactcacacttggtcgactacttccccgagttcgatgggccacagagggacgcacaggccgcccgcgagttcatcctgaagatgtttgtggatctgaaccccgacagcgacaagatcatctactcgcacttcacctgcgccacsgacaccgaraacatccgcttcgtgtttgctgccgtgaaggacaccatcctgcagctgaacctgaaggagtacaacctggtctga

SEQ ID NO: 6952 - DNA, 600 bp, Rattus norvegicus
agcgagtatgaccaggtcctcatggaggataggcgcaccaaccggctggtggagtccatgaacatcttcgagaccatcgtcaacaacaagctcttcttcaacgtctccatcatcctcttcctcaacaagatggacctgctggtggagaaggtgaagtcggtgagcattaagaagcacttcccagacttcaagggcgacccgcaccggctggaggacgtccagcgctacctggtccagtgctttgacaggaagcgcaggaaccgcggcaagcctctgttccaccacttcaccactgccatagacaccgagaacatccgcttcgtgtttcatgccgtgaaggacaccatcctgcaggagaacctgaaagatatcatgctgcagtgagacagcccctctgccagtcctctcgtggcctctgtgtggccacatgtctctggtgtgtctgccacctgcatggacctgcagtgggcatctcgaagccacaccatctaatacctggcactaagaatgctggactgtcagccacaccagcgagctgcgggcaagaggatgggagtgtcagtgatagctactgaatcggggactgaaactactgaatcc

SEQ ID NO: 6953 - DNA, 600 bp, Rattus norvegicus
gtaccccttcgacttacagagtgtcatcttcagaatggtcgatgtaggaggccaaaggtcagagagaagaaaatggatacactgctttgaaaacgtcacctcgatcatgtttctggtagcgcttagcgaatacgatcaagttcttgtggagtcagacaatgagaaccgawtggasgagrgcaaagcactctttrgaaccattatcacatatccstggttccagaactcmtctgttattmtgttcttaaacaagaaagatcttctagaggagaaaattatgtattcccacctagtmgactacttcccagaatatgatggaccccagagagatgcmcaggcagcacgagaattcatcctgaagatgwtcgtggacmtgaaccccgacagtgacaaaatcatstactcgcacttcacgtgtgccacmgacacsgagaacatccgcttcgtgtttgctgctgtcaaggacaccatcctgcagctgaacctgaaggagtacaatctggtstraccacgcctcccagaacccattcttccmttccccatgggctgttgaagataaacaagwgggactgtacttctgtggaaaaaaaaaaaaaaaaa

SEQ ID NO: 6954 - DNA, 600 bp, Rattus norvegicus
attttttggcacagcgcagtcagcagaaaagctctacatacaaactaccacgcttacaatctccatgaacctaagtgcgtcagtggcgctgggaatgctatacatgccgaaagtgtacatcatcattttccaccctgaactcaatgtccagaaacggaagcgaagcttcaaggccgtagtcacagcagccaccatgtcatcaaggctgtcacacaaacccagtgacaggcccaacggtgaggcaaagacagaactctgtgaaaatgtagacccaaacagccctgctgcaaaaaagaagtatgtcagttataataacctggttatctaacctgttccatgccatggagccacagaggaggaagaccttcagttattctgtcacccassstggcattggactcttggtcctgcccgcttcctatctctggaggagcttctcswsccgggagagcaatgttagaggatccacacatcctgaacagctgctttatgagacacctttactttatcttggcttaagaagtcattggcatcagcactgccatcttggctgtaattctggactccctaagcaaagggagagttgagactcaagtccca

SEQ ID NO: 6955 - DNA, 600 bp, Rattus norvegicus
agctcctcagataaactgtcattggaaggaatagtggttcagagrgcggaatgccgacctgctgccagtgaaaactacatgaaactaaagagattgcaaatagaagaatcttccaaacctgtaaggctctcacaacaggctgacaaarktgtawccmccaattacaagcctgtcgstwaccatcagtmcaatattkratwtkaaaggaagaagaaagaagwtggwaarcgagcwysggcagacaaacaacacgtyctagacatgctgktctyarmctttgagaaacatcartactataatcttaaggacytggtggacayyacaaagcaacctgtgggatacctgaaagaaatcttgaaagaaatcggcattcagaatgtaaaaggaattcacaagaatacgtgggagctgaagccagagtacaggcattaccaaacagaggagaagagcgaytgagagaagcgtgtgcaacagttacaggcagatctytgccaccacacgctgactgcctgcccaccctgacaggacaaagacaactgagtctgtctgccattcctcagtaaactgttaaagctgggactccawaaaaaaaraaaaaaa

SEQ ID NO: 6956 - DNA, 1400 bp, Rattus norvegicus
ggcctgagttgggcatcacgttgactaaactccactgctggtcactcactcagtattccaaatgtgtgttcatggatgcagatactctggttctctcaaatattgatgatctttttgaaagagaagaattgtcagcagcaccagacccagggtggcctgactgtttcaattctggagtctttgyytatcamccctcaattgaaacgtataaccagctgttgcatcttgcttctgagcaaggtagttttgatggtggggaccagggcctactgaatacatattttagtggctgggcaacgacagatatcacaaaacacttgccatttgtgtataacctgagcagcctctcaatatactcctacctcccggcatttaaagcgtttggtaaaaatgccaaagttgtgcacttcctgggacgaaccaagccatggaattacacgtacaatccccaaacaaaaagtgtcaaatgtgaatcccaggacccaattgtgagtcacccagagtttctgaacctgtggtgggacaccttcaccaccaatgtcttacccctgctccaacaccatggccttgtcaaagatgccggttcctatctaatgatggaacatgtcacaggagccttgtcagacctgtcctttggggaggccccacctgcatcacagccttctttgtcctcagaagaaaggaaggaacggtgggaacagggccaggctgattatatgggagcagattcttttgataacatcaagagaaaacttgacacttacctacagtagaagcactgccattttcttgtggacacatccatswckwrggcacrtttcgatacatagtatgtgaagtctgttacaattgttagaggctttcactaaacctcagcaratgaggggtttgggcaggacaacaggtgagaactgggcaaatgttattaagtaataaywckaktatgtggacaagtgytgtgtttaaccctagactttttcaaaaactctaaattcttaaatygscarwgkgtgataaagaaaagccaacattragctactaaattaggctctttcaaatggtgcagaacttgactctccatcttcaaaacaaggtatgagattctccaatatttgcttgttgtatccttcactagacctgcaatgtagaattgttcaaagcctgtcagagaagtagccttctagactaaagtggcctttattaacactgcggagtgattcataagcctaccagctagtgttagttcaccagttttctatgcaccatgaaggcggcatgcagacctgctctttctcagttatctacttgaaaattgcagtgtgctctctgayggtagctgyggaagcactgtgtataacaaataaagacttattgacmtmmmwmamaaaaaaaaaaaaaaa

SEQ ID NO: 6957 - DNA, 1400 bp, Rattus norvegicus
ccaccggctcctcgtcgctgctcgaggactcggaggacgacctgctgagcgacagcgagagccggagccgcggcaacgtgcagctggaaaccagcgaagacgtggggcagaaaagccattggcagaagatccgtaccatggtcaacctgcctgtcatgagtcctttcaaaaagcgctactcctgggtgcagttagcagggcacacagggagtttcaaagctgcgggcaccagcggcctgatcctgaagcgcagctcggagcctgaacactactgcctggtgcggttgatggctgatgtgctgcgtgggtgtgtgccggccttccacggtgtggtcgagcgggatggtgaaagctacttacagttacaggacctgcttgatggcttcgatgsacmkkgcgtgcttgactgcaagatgggtgtcagaacttacctggaagaagagctgaccaaagcccgagaacggcccaagctgcgaaaggacatgtataagaaaatgctggccgtggaccccgaggcacctactgaggaggagcatgcgcagcgtgccgtcacaaaacctcgatacatgcaatggcgcgaaggcatcagctccagcactacactcggcttccgcatcgagggcatcaagaaagccgatggatcttgcagtactgatttcaaaactacacgaagcagagagcaagtgactcgagtctttgaggagttcatgcaaggagatgctgaagtgctgaagaggtatctgaaccgcctacagcagatccgggataccctggagatctctgatttctttagacggcacgaggtgattggcagctcactcctcttcgtgcatgaccattgccatcgcgctggtgtgtggctcatcgattttggcaagaccacgcctctccccgatggccagatcctggatcatcggaggccctgggaggagggcaatcgtgaggacggctatttgctggggctggacaatctcattggcatcttgsccaacctggctgagagatgaggctgggccttttccctcagcttgggccagctggtcagagatgtggacctgtggctgcatccccaccatgcatgccggcaagagactggaaccccgctggcggcagttcacatggtcctggaggacyaggtgccatccactaagggggtgtagtacattaggagctggcttctacacaagcctgyctcccagagctgaatgacactaatttataggagaggaaggaaacagtgggcttctcccccagccttgtcaagtgactttgcacctctccagagggtcccgatccagaattgtacttcacaggtatatagacttactggtctaacttcctacactaccatggacacccttcctaataaaactcaaagattcaaaaaaaaaaaaaaaaaa

SEQ ID NO: 6958 - DNA, 600 bp, Rattus norvegicus
gcgatcagaaggataggagctgcttcagtctgctgtaacctaaccctccatccgttgtgccagcagcccacagttcgacaccgtggcttcctcctgtgggaactatccaaaagatttcacctaacgagactctcactatgtcaaaattaatttttttcagttgtactttttctttcccctctacaagatgaaagattataaagtgaaattttataaacatcaaccaaagcaaaggcactttctaggacactgacttcataaagatgttagaaatgaggaaatttgatgtcaggtgagagtttatacttgttatgtatggttactaatgcagcgggtgtagctgactgaagtttgatatagttgtattctcacatttatagtgatattaaaaatacagtcacctctgacttctatgccagggaaggcttttttaaattttaggttattaaaatccatattggttaaaagtcacagttcccactgaataatatttttaattcacagaagggtttgttcccaggtgtgctccattctgcatcacaagagtttagtcgaagacattttctaaattaaaataattgtttgtaattagaaaaaaaa

SEQ ID NO: 6959 - DNA, 600 bp, Rattus norvegicus
tcctggaatctcggtcaataccccctaaaatagaagacacagaaataacgtccccagtttctgagcgtcctggcgaaagctctgagacagaccccgagaaccaggcggccgtgtcttactgcccacccatcattgaggaggaaataacaaacccagcagcagatgaggcgggaggggcttcccaggtcgtgtacattgatgtgcagtccatgtatcagccacaagccaaagcagaggacgagcaggacactgaccccgtgatggtggcaggctataagccacagatgcgcctccccattaaccccacagcggaagacacaacagcagaagatgaagcggacaagaccgcaggttacagacctcaggccaacgtaaatacttggaatttggtctccccagattccccaaggtccacagacagcaacagtgaagttgtctcatttggaagtccgtgctccatcaattccaggcaatttttgattcctcctaaggatgaagactctcctaaatctaatggaggagggtggtcctttacaaacttcttccagaacaaaccaaatgactaaccaggtcaccctttgtcacttcagtctgccatct

SEQ ID NO: 6960 - DNA, 1400 bp, Rattus norvegicus
tcttctagaaaactccaagatcaaaggaaaggtcttctctaagctgaaacaactgaagaagctgcatataaactacaacaatttgaccgagtccgtgggtccgctcccaaagtccctacaagacctkcagctggccaataataagatcagcaagctgggctccttcgacgggctggtaaacctgaccttcatttaccttcaacacaaccagctcaaagaggaggctgtctcggcttctctgaaaggccttaagtcactcgaatacctcgacttgagcttcaatcagatgagcaagctgcccgctggccttccaacatctcttctaactctctacctagacaacaataagatcaccaacattcctgatgagtatttcaatcgcttcacsgggcttcaatacttgcgtttatctcacaatgagctggctgacagtggcgtgcctggaaactcatttaacatatcatctctgctcgagctcgatctctcctacaataagctcaagagtataccaaccgttaatgaaaaccttgaaaactattacctggaggtcaataaactcgaaaagtttgatgtcaagagcttctgtaagatcctgggaccactatcttactccaagatcaagcatttgcgcttggatggcaatcccctcactcaaagcagtctgccccctgacatgtacgagtgtctacgtgtagcaaatgaaatcacggttaattaacctcctctcattctaatacattgaagtatgttccagagcagtacttcatggatgggtatttgctggatgtgttaaagttttcacaatatcctttacattgttattgtcattgttgttgttggtattacttcatggattttaattaataaaggaaatgttttgtgaamawwwammamwwwwwaaataaaagatgaaaagcagrmmwawwwmawmrwragaacagacacataaaacccgttaaacttaagtctatttgtgaatttaatgttttctatagctmtatgttcaggtgattatgaagcctttttactgattgcttggaagtccaccaggtttctatggttcctcacatttwacattrgtgacttcgaaaacatgaaacaaacatgcatggatgtttgttatcmtratccaaatttttgtgacatgtcaaktttgtktkacagargtttagatcctatgttttgaaaccagtgatttgcaacataccaargaaaattactaaagacctgtctacttaaagaaatgtmgttagcagtaagaatttcccagttacttaatgaaacttytcktgagtcatttycctgtcakatytatgyttctttctgattgyttgcatgttrtgatyaacaagctgatagcaaawtaaaacaatgcaawtggwaaaaaaaaaaaaaaaaaa

SEQ ID NO: 6961 - DNA, 1400 bp, Rattus norvegicus
ggttcacgcttaccaaatggtccgtacagactctcgggaccagaagctcgatgcctttatgcagcctgtaagcaggcgtctgcccagccagccccaggaccctgtccctgggaacaggacagagggctctcctgaaaaagccatgcagaaggatcaggagatatctgagctcccggcccccatggaagcagctgctgacagtgcgagtttggagagagaatcagtgattggggcttcggaagtggtggcaccccagcggcacccctccagtccaggcagctccagaaagagacatccggaggactccgatgtggaaatgatggaaaatgattcccggaaggaaatgacagctgcttgctacccccggaggaggatcattaacctcaccagtgttttgagtctccaggaagaaattaacgaccggggtcatgagactctccgggagatgctccgtaaccatacctttgtgggctgtgtgaatcctcagtgggccttggcacagcaccagaccaagctctacctcctcaacactaccaagctcagtgaagaactcttctaccagatactcatttacgattttgccaacttcggtgttctcaggttaccggaaccagcaccactctttgacttcgccatgctggccttagatagtcctgaaagtggctggacagaggaagatggcccaaaggaaggacttgcagaatacattgttgagtttttgaagaagaaagccragatgcttgcagactatttctctgtggaaattgatgaggaagggaacctgattggattacctctcctgattgatagctatgtgccgcctttggagggactgcctatcttcattcttcgactggccactgaggtgaactrkgawgaaraggagtgtttcgaaagtctcagtaaagaatgtgctgtgttttactccattcggaagcaatacatactggaggagtcagccctctcaggccagcagagtgacatgcctggctccccttcaaagccctggaagtggactgtggaacacattatytataaagccttccgctcacaccttytgcctccgaagcatttcacagaagatggcaatgtcctgcagctcgccaacytgccagatctgtrcaaagtcttygarcgstgctaaatgcaatcatagccaccatagagagactgcatggccatccaaggtgaagyraagcgtatggcactgatytggaagccacagawtaggacacttggtttcttaggctccagggtttccagtgctctctgttcttgctctgtatcccagtattggtgctgcaatttaatgcatttcacytgtggattagctscaawtaaacwcacatgtgttgawrwrawwwwwwwwwrmmmrmrmamwrraaaaaaaaaaaaaaaaa

SEQ ID NO: 6962 - DNA, 600 bp, Rattus norvegicus
cagaagacaactttgtagggtcggttctgaccttttgtttttatggggcatctggggattgaactcagctggcttttgtgacaagtacttcacccgctgcaccaccttaccggcccttttatttattatgtatgtggtcatgttcacacacatgtatttaacctatagaatgcttactgtgcgtcgggcgctgctccaactgctgtataaatattaaggtattcagttactcctactggaaggtattatgtaaccatttctctcttacatcggaggacaccaccgagctatccactcatcaaacatttattgtgagcatccctagggagccaggctctctactgggcattagggacagaggaatttattggatgttggttcttccttcaagaatcgctcagggattctcagtgtcctcaaaacatgctgaaaccggaccccagactccactctggagaatccaacccactcacaggggaaacagcccgtttaaagtgcatgtgtgctagagaggtagggtagccgagatgatccctcagtggaaggataaccaagtatcttcctcggacactcttttttaaataaatgaataaatgaaaa

SEQ ID NO: 6963 - DNA, 600 bp, Rattus norvegicus
  misc_feature (231)..(231): n is a, c, g, or t
tggacaaggtctgacccccaccactggcccacccgcttctaccacaaggactttgcctcctccgaaggcagtggcagccggtggtggcaggtgggctgttctcacccatcctgggctccctccctccagcctcccttctcagtccmtaattggyttctcccaccctcaccccagccttgcttcatccataggtggktsscwygasggmtgrkmagaasmtggtytsgccwnwgsccytcaagggaccctmatagcttggtgtgtgbccaaccctatwtgaatgttgtcaaggctctgcacttgaaggcaggrccctctgaccttacaggcaaaggccaaatggggtcatctgcttctcttccatccccctarctacatatyttaaatctytgaastatgacctcaggaggctttgggcatatgagccctatamrtaccargtgtacccagttggcagcctcccgtcactctgahtaaaaagaatcttcagagtgcatatttggaggtsgaaagattgttcagttaccctaaagactttgraaraarraarraawraawraarrrarraawraarraaaraaaraaaraaaaaaaaaaaaa

SEQ ID NO: 6964 - DNA, 1400 bp, Rattus norvegicus
gatatccagaagaatggcgttaaattcaccaacagtgaattgtcttctttaaatgaagaatacactaagaacaaaggagagtatgaggaggcccaggatgccattgttaaagaaatcgtcaatatttcctcaggctacgtggagccaatgcagaccgtcaatgacgtgctagctcacttagatgccgtcgttagttttgctcatgtgtcaaacgcagctcctgtcccctacgtgcgaccggtcatcttggagaaaggaaaaggaagaattatagtgaaagcctccaggcatgcttgtgttgaagttcaacatgacgttgcttttattccaaacgatgtgcactttgaaaaagataaacagatgttccacatcattaccgggccgaacatgggaggaaagtcaacatacatccgtcagacgggggtgattgtgctcatggcccaaattgggtgttttgtgccgtgtgagtcrgcagaggtgtccattgtggattgcatcttggctcgagtcggggctggtgacagtcarctgaaaggcgtctccacattcatggctgaaatgctggaaactgcttctatcctcaggtcggcaaccaaagattccttaataatcattgatgagctgggaagaggaacctctacatacgacggctttgggtyagmrkgggccatatcggagtacatcgcaacgaasattggtgccttttgcatgtttgccacccattttcatgaacttaccgctttggccagtcagataccaaccgttaacaatctccacgtcacagcgctgactaccgaagagaccctgactatgctttaccaagtgaaaacaggtgtctgtgatcagagtttcgggattcatgtggctgaactcgctaatttccctaggcatgtgatagagtgcgccaagcagaaggctctggagcttgaggagtttcagagcattgggacctcacmggsacasgatgaaacccasccmvckgcamagagscgctgcctggaaagagagcaaggtgrraagattattctggagttcctgtccaaggtcaagcaagtgcccttcactgacttgtcggaggagagcgtctcagtraagctgaagcaactgaaagctgaggtgctggcgargaacawcagctttgtaaatgaaatcatctcacgggtaaaggctccktgagaggacagtggagcgaakccagtagggagagctcgcccttaccmtgctgtttcctgtagtacttaacaccagaacccggggagcagtgtgctgaagtatttagtgatacttgaaaacatgacggtctatagctgagtaccgtttaaatgggcatggacaactttgagcactatgctgaattttataaataaaatcatgtagtttctaaaaaaaaaaaaaaaaaa

SEQ ID NO: 6965 - DNA, 600 bp, Rattus norvegicus
  misc_feature (548)..(548): n is a, c, g, or t
  misc_feature (554)..(555): n is a, c, g, or t
  misc_feature (588)..(588): n is a, c, g, or t
ggcctacctgtcggagcgcaagtttgtccatcgggacttagctaccaggaactgcctggttggagagaacatggtggtgaaaattgcagactttggcctctctaggaacatctactccgcagactactacaaagctgatggaaacgatgctatacctatccgctggatgccacccgagtctatcttctacaaccgctacaccacggagtcagatgtgtgggcttatggcgtggtcctctgggagatcttctcctatggactgcagccctactatggaatggcccatgaggaggtcatttactatgtgagagatggtaacatccttgcctgccctgagaactgtcccttggaactgtacaaccttatgcgcctatgttggagcaagctgcctgcagacagacccagcttctgcagtatccaccggatcctgcagcgcatgtgcgagagagcagagggaacggtaggcgtctaaggttgaccatgctcaaacaacacccaggaggatcttttcagactgcgagctggagggatcctaaagcagagggcgnataagnncagataggaagagtttatctcaggcagcacgtncagttggttgtt

SEQ ID NO: 6966 - DNA, 600 bp, Rattus norvegicus
aggccgccaagcaggccctgaccggctgcgggtttgactgctgggagaccagcattggagcgcctggggtctccatgcactcagccacctccatagaggaccctgkccgasragccctgggsctctgacatgtcatcctgccaagaagcttccacgkatctkgggctggagttggcccctgtgctggccactaacacatttcctgctggtagtgccttgtakactctgagaggcaccacctccatggsccatctgtatcctggcactgctgaagccagacaggcatcagttgccgggtcttytgagacagcaggctgacacagtaggccttccccctgggtgattctgcctgggcctsgcctctgtcggcctcacacaaactctccggctcctagccacgcaacccttctgtcctcagaygccggcccctttggaaccgcctagccmgtggctcatgtctcctgtcctctctcggggatcatcggctraggcaaggcatgccgactgctttatccccgtgtgtacctgtggacaagctgcccatggtggggcgagggaagggggaataaaatgagctcgtmcaaamaaaaaaaaaaaaaa

SEQ ID NO: 6967 - DNA, 600 bp, Rattus norvegicus
cgargctgagcggakccgtgtggacaatggctgratctccttgtacaacstgcaaatgcaagaatgggagagtctgctgctytgtggatbtggmgtstattgagaataactgaagattttaaatggactcgtcacgtgmgaaaatggrcaaaatgatcatcccacctgaggaagaagagggsctgatwtcttttkcttkttaaccacagtcaattaccaamgkcwcsakctgaggaaggcgttkggattgccttwgccacttwgctcatccttgctgacctagtctagatgcctgcagtaccgtgcatttcggtcgatggtwstkgagtctcagkgttgtaaatcrcatktccctsgtcagatcatttacagatamatttaaaggggttccatgatwaatgttwatgtractttwgtkyatttygtgtactgrcataatagagacttggcaccatttatttatktkyctkgatwtttggatcmaattctaaaawtaaagttgcckgttkygrmwwwmrwmdmarwaaarmmrmrrramaggaagaaagaaatcagggggggggccaaaccatgaggtataaacaggcgttaacggtgaaa

SEQ ID NO: 6968 - DNA, 1400 bp, Rattus norvegicus
cattaacctgcctgggtggtaccactgtgagtgcagagatggctaccatgacaatgggatgtttgcgccaggtggasamkmskgtgaagatattgatgaatgtgggactgggaggcacagctgtgccaatgacaccatttgcttcaacttggacggtggctacgattgccggtgtccccatggaaagaactgcacaggggactgcgtgcacgacgggaaagtcaaacacaacggccagatctgggtgctggagaacgacaggtgctctgtgtgttcctgccagactggatttgttatgtgycracggatggtctgtgactgcgaaaaccccacagttgacctctcctgctgccctgagtgcgacccaaggctgagcagccagtgcctgcatcaaaacggggaaaccgtgtacaacagcggtgacacctgggyccaggattgccgtcagtgccgctgcttgcaagragaagttgactgctggcccctggcttgcccagaggtagagtgtgaatttagtgtccttcctgagaacgagtgctgcccacgctgtgtcaccgatccttgtcaggctgacaccatccgcaatgacatcaccaaaacctgcctggacgagatgaacgtggttcgcttcactgrgkcttcckggatcaagcacggcacggagtgcaccctctgccagtgcaagaacggccacgtgtgctgctcagtggacccacagtgcctccaggagctgtgaagttaactgcctcatgggagatacctgttaaagaatgatttctcatttaaaarrrmmaaaaaamaaaaaaraaaaaaarwrawrwrmrrccagccaaatgcaactgtgtcaatggctgggcagactgatggcgattacggctctgyaragstttgaggaacatcactgaggaaaccagatggcagttccgcctttactgttcctgggatcacyttaygsaggaatggctktgaatcmcaggcyktgacwtccccagcymtggagaagragcstgagcccatcagctstggggaagtctmtccctstctccbtccytccacaggcacaggacatgtcmtagctcagactcttcytgaaccagcgaggttcctcaytgaagccatggaatgaaaggcagtgagtgagctatattttcagaatccaagaagctgacacatctgtacagtgcactccgaaccctgawacamgctattgtaatgataaaatactgcacaggcatggttatgtaacattttctaaccggagaagtcaccccacccccatttcstcgtytactgcacttaatgttatttggtytgaawwtgttcastagaagctcgttcttstgcaaawtaaaataactatttctcttmccttaaaaaaaaaaaaammwmrwrccgaattc

SEQ ID NO: 6969 - DNA, 600 bp, Rattus norvegicus
ttacagtgttgggagagatcaaaaccggcaactctcctgtgaaacaatatttttatgaaacgaggtgtaaagaagccaggccagtcaaaaacggttgcagggggattgatgacaaacactggaactctcagtgcaaaacgtcgcaaacctacgtccgagcactgacttcagaaaacaacaaactcgtaggctggcgctggatacgaatagacacttcctgtgtgtgtgccttgtcaagaaaaatcggaagaacatgaattggcatctgtccccacatataaattattactttaaattatatgatatgcatgtagcatataaatgtttatattgtttttatatattataagttgacctttatttawtaaamttcagcaacccttacagtatataagcttttttcataatcgggctgctcaawaaaawwmgtgtgsttgcmwwmrmwmarrmmwmwmccatctgttaaccttgttttgtgattgggctmtcgggmmccttctgtaaamcctgtgtacaccagtatttggcattcagtattgtcaaggccatgactgtggtttcagtaaactttsttaaaatcgvaaaaaaaaaaaaaaaaaa

SEQ ID NO: 6970 - DNA, 600 bp, Rattus norvegicus
tggccctcaccggacgagatgagcattcatgtggacagagggctggccctcaccggacggtgcaaagagatgtgggagagggagagtctaggaggaccacaggagttctcacacagacccaacctcaatgatgcccaccccagggggagaagggggtaagagtccttcccactagccttgcatcaatccttttcttccctctcctttccccacagcccccatcataatgtgtgatggggtactgtctccctaacaccagtgtcaattcctgggtagtatccagagacctggccaggcttcatctctccaatagagacatcaggaaaggaaagagcacagcctccaagaaggtagcttatagcccctcattgggcaaggctgagttcaccaagatgctccctagaagaagatggagacacgtgtcctaagaggatctcataccccagactagaataattcttccccacatgcctggacctcttctgggccttcagtaagtgtgtaaactccatgctgtactctccttgtctgaaccaagtccacttcgatgtgctagatgtcagctaatcatagaaattacaacgaccagcttgtatctga

SEQ ID NO: 6971 - DNA, 1400 bp, Rattus norvegicus
tcgccatgcccatctacaagctgttacaagacctgttccccaaggcagcagagctgtatgaacgcgtggcctccaatcgtgagcactggaccaaggtgtcccacaagttcaccatccgaggcctccccagtaacaactcgctggatttcctggatgaggaatatgaggtccctgatttggacgtcaccagggctcctgtcaatggctgctgcagcctcgagggctgagtgatcccctctagggaccctccctgcccggccctcctttcacaactctctaccagtctgtctgatgcattgggaaccagagccatgggtcctgggttctagaccaggatgtcccctgtgacctggcacatgccacccttcctgggcttcgtctttctcatctgcagaaggaattcgagattcgcagtctcacacagacttggccgtttgttcttcaagagcacagtagtgaccagtggcagtgggcttccttctgcacctctgactgtaccgtgcccagttctgcccaagccactccatctttgagccacagaaccttctgtgaacccattagagccccattacgtcagtatccttgttttcctggaggaatcccaggtctctggagacttcgagatcctcatggaagaaggagaggccaccgagagagcagagggtataaatcagtcaccagctagaagtcgccatagggtgaagggaccctgagggtgcctctgtgcttctggcaggactgggaccctggaggaagctgacagccaggttgctcagtgctctgcaggaggcagtgctccagcagagaaggcaggaataagggacagaaggatcctcaagctgggagacagtccctacacacccctgcccttcaggtgttgtgacctgaagtgagttcctttccctagctagccaagacaggatcattagacagcmtattctctctttagatcaaagtctccgtcattctgtggagtccgtgagtggttgtggcatgctctgccaccctgaggcacagagagcctaacctcctttcctctgagtgtatccccbtggtytgagcccctctcccattcctgccatcagagaggggcctggcctctctccacagggmttctctcctcttcaaggccatatccacacctgccccccggagggctcaggagactctcccagggctgggcctcttgggtgagtggccactagcttctccttctgttttgttctgtatgtattgtgggtgggggagggggccacctgccttacctactctgagttgcctttagagagatgcatttttctaggactctgtgcacctgttgttgtatgtrgtcctgtgggctgagtgctttgtacatgagaataaatctatttctttctmmmaaaaaaaaaaaaaaaaaa

SEQ ID NO: 6972 - DNA, 600 bp, Rattus norvegicus
catgatttggacactaactcttttgaactagacttacagwtttcagaaratgaaaaaaggttgttattggaaaagcaagccgskggaaacccttggcaccagkttgtagaaaataatctaatattaaaaatgggcccagtggataagcgaaagggtttatttgcaagacgacggcagttattactcacagaargsccacatttatattatgtcgatcctgtcaacaargtcttaaaargtgaaattccatggtcacaagaactccgaccagaggccmaraattttaaaactktcktygkscacacgcctwacaggacgtattacctgatggatccaagcgggawtgctcacaagtggtgcasaaagatccaggmggywygrrggcaacartmccaragcagtccasatgctgctrtkcartgacstgkcctkcgkccggkctgcmtatcgctgccaggacacctgcctcagckcggctcgsccgccacscaggacgyttccagaccacstgccagccatctyaaggagaacatagatggcaaaaacyktgcagcttttttatttaamaraaaamaaaaaaaracaaaagttgtgcggccg

SEQ ID NO: 6973 - DNA, 600 bp, Rattus norvegicus
aaaacctaaatcacaaaatcccacctacctaaccacctacccaagggaaatggaaggcaaaaaacacaaaggatcatgtggtaaccatgagagctggccaaagggtaggagagccaaccatggggtccagacttgctggggcttccccacctcttgctgtgtcagtattgccacctgacagatymcaggactcactgccctccagagaacagagatgatgaacatgaggaggactggaaccttcttcccctcggggatctcatcttttactwtccctgggtcccagcaagatgggaggagtgggttcttggtacttaggacttaatcctatgtttggccatgctgstgcccaactctgtccccatytgggggstracccctagcccacattcccgacaggtgggtccwgcacttgcttaggttccccatcatgggggtaaggaagggaamtgacmcgatccctctaatatattgagggtattggcttagccatggggaaatttctcaccctgatcctttcctcacacccagggaaatagctctcattttttttttttaatttttaatttttgtttgaaataaagtccttagttagccatc

SEQ ID NO: 6974 - DNA, 600 bp, Rattus norvegicus
ttcctatgattaaccaggatgagtttagaaacttttcctatgtgtcaccagaattgcaaccgtagccttatgggaagcaacaaagagaaagggggatctttccagagatttcttgtgtgggaagtccccagctcctgccttttaacaccaccttcaccttcacggagcaaatgttcacaactctgcgaaggcggagcctcaagagagccactctgtcaagtcccggggagccatggtacacttcggtagttgatactgaggtaagatgttacagagacgtgcaccgcccaccccggagtctccatggctttcaggcttggagtaaaggacagaagccaaaagaagagatgctgggtaacacaggaggtcctagggatcctcagccaaacaggcttcttgtttttaacttcaagagacaaatctagactttccgtggagcaccccacactgttcttcacgccaatagtgcagtctgcgaaagatcaaatgctgatgaagaagccaaaagtctctctagggaaacggacggcattctaagcagactgattcgcttcgaacaaaccgcagttgggcgtcttaagctccaactaaccagtgttg

SEQ ID NO: 6975 - DNA, 600 bp, Rattus norvegicus
agctgtaggacgcttcgccgaatgcaggtgtatagttttacactctagtgccatatatttttttttaaaaaaacctttctttccttacaaaaraaaaaaaaaraawaaaaaagtgttgtgtttacttcgtgacgaggaagcagaagccgcccttctgtgctagctgtcttgtcaccagactgagrmwwrmmmrwmararcatctgtggcacccgcaggtgggatgctgggccaacaagcctatcttcagggatgaggtcacgtgtgtggatcaggttggagaggacgcaggccccatccaggtctgtaatcaatccttcagggctgagcaggaggaacatgtgcgtcagtggggaccaggaggcacggtcaggaaggacgctaagcaccaacaccctgaccagaggacaaaagccagtttgtcgtcatgaatgcccccagtgctttgtttgtgatgtctgttacctttagtatcttagaagctgagtcctgttcttatttctgcagtggactgctgggaagtggcttaatgacaataccaatacatagatgtccctgctggaaaaaaaaaaaaaaaaaaaaaaaaaaaaaaaaaaaaaaa

SEQ ID NO: 6976 - DNA, 600 bp, Rattus norvegicus
gtagcctgagaggccccgggtctcgccggagaggagaaaggacttctatggcggaggagacggaccacctcattctcctggccattatgaccatcaccttcgctgtatgctccctgcctttcacaatctttgcttatatggatgaaacctcttcccgaaaggaaaagtgggacctccgagctcttagatttttatcagtgaactccataattgatccttgggtttttgtcatccttagaccaccagtcctgagactaatgcgctcagtcctctgttgtcggacttcactgagagcaccggaagctccaggagcttcctgttcgacccagcagacggacctctgcggacagttgtgagcatgcgctgcttgagggaacctgggccaaagcctttaaatggcctcgttggaggaacgtaaagggccggaatgtaaacaaatggccttgctttgagaaaccagatgcagaagactttaacgaggtggttggggctgcacacgtgatgacgtgatgacggggccctttgtggtaagtgtcagaggatgcataaagttcacatcgggtggcctttgagggacaaccagctgcatctaagacccag

SEQ ID NO: 6977 - DNA, 600 bp, Rattus norvegicus
gtgggagatccgcatgcactgcgagctcttcttcaactccttccagggattcttcgtgtctattgtctattgctactgcaacggagaggtacaggctgaggtgaagaagacctggactcgttggaatctgtccatcgactggaaaaaggcgccgccttgtggcggccacaggtacggctcggtgctcaccactgtcacacacagcaccagcagccagtcacagatgggaccaagcacacgcctggtgctcatctctagcaaacccgccaagactgcctgcagacagatcgacagtcatgtgactctacctggctacgtctggagtagttctgagcaggactgtcaaccacaatctaccccggaggagactaaaaaaggtcatgggcgacaggaagatgatagtccagtgggggagtcttccaggccagtagcattcaccatagacacggaaggatgcaagggagaatcccaccctatctgaatcaccatttgcagctcttgtggattggcggatctggctgtgtgggaggacctaagttggaagactggaattctgaaataaggcgtcgcttaaacatttccagtttctatgagtgggat

SEQ ID NO: 6978 - DNA, 1046 bp, Rattus norvegicus; identical to SEQ ID NO: 2882

SEQ ID NO: 6979 - DNA, 600 bp, Rattus norvegicus
aaaccgtwtgaacactttttcttcttcctgccataaaaatamagtaatttgccttttawaaaaaaaaccwaaacccactctgaccaarcatcctggycyctactcycctcacgcttctgaracaratgtttacagcaggtcagcaggcggaagctgaraagccagtcttctacttgaaagggctgcactctggagtctgttctctacscyskksckcacggsctaacttatgtacagctgaaactaccaactgcagactactacacagtactcattcctctctgttctgttagtttacgtaaacacaactcacttctaacatagtcagaaaaacacttaagcctcaaggtccccagtgatttggagtactgaactagctctgccctggcacttccgacagaagtagcgctttactcagagagaggtctccgtgagctgctgtgaggacctacgcacacacaacactgataccagtcactgttcacgcggtttactcttcaggccgtcctttgccatcagtcagctttaactaggcagagtccagcagraaagtgcacggtgcccagatccaccacctttaggttgctactgttttctctt

SEQ ID NO: 6980 - DNA, 600 bp, Rattus norvegicus
cagctggagacagctcgaagccggaatgctcatcccyccgttcatcccagactctaggactgtctatgccaagaacattcaggatgtgggtgccttttccacagtcaagggtgtggtttttgacaaagcagacacagaattcttccaagaattcgcctccggcaactgctccattccctggcaggaggagatgattgagactgggktcttcggggacctcaacgtgtggcgcccagacggtcaaatgcccgatgacatgaagggaatcaccgtggaggaggcagcccctacagccaaatcagggatgtgtctcatctcctagcctagtgtytgggggaagcctggggctggctgtatagagagagggaaggatacagagctcaggggaggagagtgaccctggtgtcagcctgtgcccactccatccaggtcaccatgcaactgtgtcttcacaaggagccagcaagamtcccggtytagaccctagargcatggcagtccatttyttttgtcctgattcattcaaaaaagacaaaaaaaggccacagattgamcawtaaaaaaaaaaaaaaaaaaaaaaaaaaaaaaaaaaaaaaaaaa

SEQ ID NO: 6981 - DNA, 600 bp, Rattus norvegicus
tggcatgtttttaagccaccgcctgccctagagtgtcgaagatgccatgttaagtcccacagggaccatctagacaagaaagaggacttgattcccccatgcaaagtaagttatgatgtaacatcagcaagagatatgttgctgttagcatgtcctcaggatgaacaaaagaaatgggtaactcatctggtaaagaagattcctaagaaggcaccttctggctttgtccgtgcctctcctcgaacgctgtcgacaagatctactgcaaatcagtctttccggaaagtagtcaaaaatacatctggaaaaactagttaaccatgtgacctactgctgtgttggaatcatatggatgctacctgatcaccaggctgtttaacatgtggaacagacaggctgtttcttttgacacaaataccaccaggcttttcagggttaagattgctgttgttctgtcttgttgggcacaaaagcacactgaggattgttttgtttcttgcgggtttgcctacggtagttagattaattattactatgcatcaggtacatgggaagctgctaggttttttaggtggctctttggataaggaatccttacac

SEQ ID NO: 6982 - DNA, 1248 bp, Rattus norvegicus; identical to SEQ ID NO: 2886
  misc_feature (31)..(34): n is a, c, g, or t
  misc_feature (37)..(37): n is a, c, g, or t
  misc_feature (914)..(914): n is a, c, g, or t
  misc_feature (1069)..(1069): n is a, c, g, or t
  misc_feature (1228)..(1228): n is a, c, g, or t

SEQ ID NO: 6983 - DNA, 1400 bp, Rattus norvegicus
  misc_feature (1395)..(1396): n is a, c, g, or t
acctcaaacccagtaacatcctgtatgtggatgagtctgggaaccccgaatgcctacgaatatgcgactttggctttgccaagcagctacgggctgagaacgggcttctcatgacaccttgctacacagccaactttgtggcacctgaggtgctgaagsgtcagggctacgatgaaggctgtgacatatggagcctgggcgttctgctgtacacgatgctggcaggatacactccatttgccaatgggccsagtgataccccaraggagatcctcacccggatcagcagtgggaagttcaccctcarygggggaaactggaacacggtttcagagacasccaaggacttagtatctaagatgctgcatgtggacccccaccagcgcctcacagccaaacaggttytgcagcacccgtggatcacccagaaagacaagctcccccagagccagttgtcccaccaagacctgcagcttgtgaaggggsscatggcagctacatattctgcactcagtagctccaaacccaccccccagctcaagccaatcgagtcgtccatcctggcccagcggcgggtgaggaagctgccatccaccaccctgtgaacsrcagygcgagcaaactcctykgaggcagagtccttccagagggagcaagcctgagtcacagaccaagtggaatggagtcctaaaggaagcaactagcccagctcacccgtgcgggtgtgaagtgccttcctccccaggacgggctcttctgggctcaggctccattgtgtgaaatmsamtyackgyacrarswwtttttwaraaarraaaaaraaaaaatgacatcatttaccatggattttttttttacaagatccatttgsctttttggccattgcagtcccaggaggaacacccagtcccatgtgtggccragrctcccgtgatagctttgggactccgcccctctgttggtcaagsmsccaycwgcrcccrcmkccrarcasgttckgcgywscctmtcasmswkrwmgacwrgctcctcagcagaacttggtgtcmccagccatctctttttccattctgttctggggttctcgaaccactttytgctaagagcccgrgacyccaccctgtgcagctyttggctcaggcamcagcatccacagygccccatgcgcagttgggcccctgcagtcagaacgggcagccccgtggarakgagacggmgagcactttttgggagacttcctgttctgccactggacagagttcacaggagaccagggaggtagtccacgggggatgagggctttttccctttcctcctcagctggtaactcagggttcatctgtccaaggcctttytaataaacctacagtccagtcaaaaaaaaaaaaaaaaaannaaaa

SEQ ID NO: 6984 - DNA, 708 bp, Rattus norvegicus; identical to SEQ ID NO: 2888
  misc_feature (162)..(162): n is a, c, g, or t

SEQ ID NO: 6985 - DNA, 600 bp, Rattus norvegicus
ggkdmaamaraytacttsamaawgsassammtgagmrtgctcatggaaassrwgwtscytrbrtttywsgaraatcaaaaggaccytctggctgtggacaaaataatgaaagmcytgkaccagtsccgagatggaaaagtgggcttccagagctttctatcamtagtggcgkrgytcatcattgcatgcaatgactatwttgtagtacacatgawgcakaagaagtaggccawctggagcmctkgtacccacaccttgatgcgtcctctcccatggggtcaactgargaatctgccccactgcttcctgtgagcagatcaggacccttaggaaatgtgcmmmtaacatycaactccaattcgacaarcmgagaargaaaasttaatccaatgmcmgaggagctttcgagttttatattkdttgcatccggwtgccytcaataaagaaagycywtttytttaarwwmmraaaaaaaamaawamwawmaawtmmtmwwmawamaaaaaaatttgagggggggacccgggaccccaattccccttatcatgaggtcgaattacaatttcccttggccgccgatataaccatgttcgagactgg

SEQ ID NO: 6986 - DNA, 1400 bp, Rattus norvegicus
gctttgggacaacatgagctgctggccctcctctgcaccagcacggacagtggaagtgcagtgtccgaagttcctcctgatgctctcaaacaaaaatgggtctctgttccggaactgcacacaagatggatggtcagaaaccttccccaggcctgacctggcctgtggggtcaacataaacaactcctttaatgagagacggcatgcgtacctgctgaaactcaaggtcatgtacactgtaggctacagttcctccttggccatgctcctggtcgccctcagcatcctgtgctctttccggaggctgcactgcactcgcaactacatccacatgcacctgttcgtgtccttcatcctgcgcgccctgtccaacttcatcaaggacgccgtactcttctcctcggacgacgtcacctactgtgatgcccataaggtgggctgcaagctggtcatgatcttcttccagtactgcatcatggccaactacgcatggctgytggtggagggcctctaccttcacacactccttgccatctccttcttctcagaaaggaagtacctgcaggcctttgtgctcctcggatggggttctccagccatttttgttgctttgtgggctatcaccaggcactttctagaaaatactggatgctgggacatcaacgccaatgcttccgtctggtgggtcattcgagggcctgtgattctgtccatcctgatcaatttcatcttcttcataaacattctaagaatcctgatgaggaaacttagaacacaagaaacaagaggaagtgaaacaaaccattataagcgcctggccaagtccaccctcctgctgatcccgctctttggcatccactacattgtcttcgccttctccccagaggacgccatggaggtccagctgttcttcgaactggccctgggctccttccagggtctggtggtagctgtcctttactgcttcctcaatggtgaggtgcagttggaagttcagaaaaaatggcgccagtggcaccttcaagagttcccgctgcgccctgtggccttcaataactccttcagcaacgccaccaacggccccacccacagcaccaaggctagcactgagcaaagccggagcatccccagggccagtatcatctgaggctgcagcaaggcgccagcggacgaagggttggatattcggtaggacggacatctgtctgatagccatctcgtgctcgactggctgaacaggcttgtctctcgggtccgagcttcctcggagatcaagcaagaggagactactaggtcatcgcggagcaggaaacggacccatgacttggtttttcttgttcttctaagaagagcaattcagcaactccagaaggggcaggggaataaaatgacacccagag

SEQ ID NO: 6987 - DNA, 600 bp, Rattus norvegicus
ccctcgctgtctgcctgagctacttctacccagtgctcttcgtgctcttcatgttctttggaatggcttttaacttcatcgttaacgacagtcggaaaaggccagtctggaacatcatggttygggcttccctcttcctcggccatggagtcattctgtgcttttactctcaagagtggtatgctcgacagcrctgtcctctgaagaaccctacatttctggattatgtccggscacgrrsctkgacttgtmgbtasstgkyytwgaasccctgsctctgcctcctktctctgaagtgctaggattacagaagacatctccatgtctggccaagatttttttaaaaaaacttttaggttataacttctttgaagttacttagaagtatcctttggtacaattcctttgtctaatgtgtagtgactttccttgttctagactagtgagtccatagtagaagtactgatctctactgataatactaaaatggccactaaggatccagaagctggcttctgaaacgtctgctcagtcattatactttaacagtatatttttagatgaaataaattactatgtgatcawwwaaaaaaaaaaaaa

SEQ ID NO: 6988 - DNA, 600 bp, Rattus norvegicus
tatggcatatggatcttatccagtctgctgttctgtacagcgtgatgacgttagtaagcacttacttggtagcctttgcatacaagaatgtaaaatttgttctcaagcacaaagtagcacagaagagggaagatgctgtttccaaagaagtgacccgcaaactttytgaagctgataatagaaagrtgtcccggaaggagaargatgaaagaatcctgtggargaagaatgaagttsccgmttatgaagstacaacattcwccatcttstataacaacactctgttcctggttctgrtwaktgttgcctccttctttatactgaagaacttcaaccccasagtgaactacattctgtccawargtgcttcatctggactcatcgccctcttgtctactggctccaaatagactgtgtagcttggccccatgcctttgtatctaggggtggcctgtggtatatgagaaagcatcagggtggccaggttgggagacacataacatgtttttatagtctggagtttgagggtttaaaaatgcagtagaatgtaattcagtgtttgtttattggctgcctttctttgaaaaaaaaaaaaaaaaa

SEQ ID NO: 6989 - DNA, 600 bp, Rattus norvegicus
gtttgtggaggtgatgacaaagtacaatgaggcacaggtggacttccgtgaacgcagcaaagggcgcatccaacggcagcttgaaattactggcaagaaaacaacagatgaggagctggaagaaatgttggagagtggcaacccagccatcttcacttctgggatcattgactcccagatttccaagcaagccctcagcgagattgagggtcggcacaaggacatcgtgaggctggagagcagcatcaaggagctccatgacatgtttatggacatcgccatgctggtggagaatcagggtgagatgttagataacatagagttgaatgtcatgcacacggtggaccatgtggagaaggcacgggatgaaactaaaagagccatgaagtatcagggtcaggctcgaaagaaattgataattatcattgtgatagtagttgtgttgctgggcattttagcgttgattattggattgtccgttgggctgaaataagagtggcctaaggggctgctgcactgaaatcttggcctgaccactcttgtctccagatgggaacaaagattaaatggccttcctgagaatgaggggtactgttcttt

SEQ ID NO: 6990 - DNA, 600 bp, Rattus norvegicus
tactgaaggacacacaggtgacccggcaggccctgaatgagatctctgcgcgacacagtgagatccagcagttggagcgcassatccgtgaactccatgagatctkcacttktstagctaccgaggtggagwtscagggagagatgatcaatcgtatcgaaaagaacwtkctgagctcwgcagactatgtggaacgtgggcaagaacatgtcavgrtrrckytmsakrwycvkamswvksssmsgaagaaaaaggtcatgattsccakctgkstttckgtcactsttykcathttgrckgtcmtcaktggcatcwccatawccgttggawartgtcacatstthttgscmctgggagaaacararacycmgcawttgtggaggcagggsaggcctccagstggacccaccytcacaytggcccttgtgcaraagggmawatggctyttytggkktggcagctgstygttcatggagtccttcccytcagbccmcaawksmtgggaraaagttyccaatgtcctgtktgtytgggacawatggttwtrtaaaraattamaaaarcawraaamcmaaarvmmrraaaaaaaaaaaaaaaaaa

SEQ ID NO: 6991 - DNA, 600 bp, Rattus norvegicus
gtgtctagctcccaagcagctgtcagcagtgctcgctttggccactggcataaaaacaaagctggtatagaggctcgggctggacccaggctcatcgtgtacattgtgggtggtgtcgccatgtctgaaatgagggctgcttatgaggtgaccagagccactgaaggcaagtgggaggtacttataggctcttcccacatcctcactccaacccgcttcctcgatgacctcaggaccctggatcagaagctggaggacatagccctgccctgactcagctgcttgctctgccctctcctcctgttccagagaaataaactcttcccttcatctttccatcagggctcacctcactttcttcccagagagagctgtataaaccagacccatgctgccggcctccccttatgttactgttctgcctgaaccttcccttggcccccagaagcagctttagcttccatgaacgttgggaacctgggctctggctctctggctgggtccctccatccaaaccctgatcttagcagacaaactgcagaggagacagagagctgccaatcagggaatggcagggctgcaaccccattgtcactagaa

SEQ ID NO: 6992 - DNA, 600 bp, Rattus norvegicus
gaaaaagagactcttttaggatcagatctgtgagcacgttggcgaggaaaaacaaaacaaacaaaaaaaagaaccttgtgtctgtctggtgaaaaaaagaaaaacaaattggaagagaggaccatgagaattttaataaaacagaaggaaactaatggaccttccaggatttaytgtggayggatgtggatatattctgtacagraacwacmcatatggaagtggactgaakcctatgtagaracacacacacactgaacattgttattcattttgtaaaatactagtctttattttgcatttttcgtaaaatttaaacmtcgtatgcgcataaacaaaaatgaacaagaattaggsggaaataacatttyccaaataatwataaaatatttgtcctgtgtstatgtatmwatatctgttttgtatttttttctggttccaaaccagatttcctgtgattctatactaataattwttgatmtaaccctttgcttcttmtaatgagtgcgatatatsttgtcgaggctgttcttcaagaattaaaattgaagtgaaaatttaaacaaaaataaaagaatttagcaaaaaaaaaaaaaaaaa

SEQ ID NO: 6993 - DNA, 1400 bp, Rattus norvegicus
ctcagccwgtacaacaccataaaccccgaagcttctgcttccccttgctgtgtgtcccaggatctggaaccactgaccatcctctactacattggcaatacgcccaagatcgaacarctttccaacatgatcgtcaagtcttgtaaatgcagctaaagtcctcgggaaagccaggatgaaaatcacggtgacaatgacgtatgacgacaatgacgatgataatgttcgtgacgtgagggagttttgattcatcagtgttgaaaaaaaaawwrrasswmrwraaaatcggtactagttcaaacactttgcaagcttgtgttctgtttgttaaaactggcatctgggattacagcaacaacagccacaaaaatggaaggcgytagtctgcatctcacctacttcctgagagacmcaaaaagaaaacatcttttttttttaaaggaaaaaataaacactggaagaatttgttagtgttaattatgtgaaaraaaawacaaaacaaaacaggaaaatccgttcagtggagttgtatgtattgtttccaccccattcttcaccccacgcctctcttgtttcctctgtattgctctgcaatgggcgccctccccatcccttcctctgagttaacagtgggttatttattgtgttactatataatgaacctttcattgcccttggaaaataaaacaggtgtataagtggagaccaaatactttgccacaaactcatggatggcttaaggaatttggactcaaataagccagggggaaggaggtcatactggatgaccccctgtgagccgttatagaactgagcaagtctgagaaaaaaaaatcaaagccccagaaaacatgtgctgtgcactgcctgccgaagcttcatgagcagccatctgtccagaaggcctgttaacaagaaaacttggaatcagtgggaatctggaagattggttttttttccttctaattgtaaatggttctttgccagtttaagcaagccggtgaaatggtgacctgcttggatgtgtattgtcagacttttgaccgtgaagtggctgttgatctacaatacaggttttttttttccctttgtctcggtatacggtaattacatggatattattaaaatagacgggtctagaagccagcatgatgaaaacacactgcaaatctgttttacaaactattaaatcgaaacagtaactactttacatgtaatgtgtagatcttaccacatttttaaatattctgtaataatgattatgatttagattgaacttaaatttgaactctctctctttttttaatgatcattcagactgtatgtttgcctcctttagctggccagtacctttgaataaaacccctagattttgacttgcactacaaaaaaaaaaaaaa

SEQ ID NO: 6994 - DNA, 600 bp, Rattus norvegicus
acggcctgaaatccccagcttctggctcaaccaccagggcatccagatcgtgtgtgagacactgaccgagtgctgggaccacgaccccgaggcccgtctcacagcccagtgtgtggcagagcgcttcagtgaactggagcacccagatagactctccgggaggagctgctcccaggagaagattccagaagacggctccctgaacactaccaaatagctttttctgggcaggctgggcaagactccggaagtccgtcctctarccaaagaccagaggtcagcaggattgctttcctgactgatgcttctggaaamccaaggacttgctcccttcttccytagtagctgctccatgttcagaagcagcagtggcagcggtggcagcagcaaccatagcagaagcggtgggggaacgagtgacagaaggcatcctatgccttgggtgttgtcctggcataagctgtgctagcacctcctcaggaaatgagattgattttttttacaacagccaawaamrwwwrmamwwwawwaawrmmwrwrwrwaaatacgaatagctatgttttatatatatctwtawmwmwaaaaaaaaaaaaaaaaaa

SEQ ID NO: 6995 - DNA, 600 bp, Rattus norvegicus
aactgctggccctggacttctgaacaggcttcaaggattcagagccaagattattcctggtcagctaaatcaaacctccgggtccttagaccaaatccctggatacctgaacgggacacacgaacctgtgaatggaactcatgggctctttgctgggacctcactacagaccctggaagccccagacgttgtgccaggagctttcaacaaaggctccttgccactcaacctccagagtggacttcctcctatcccaagccttgctgctgatggatacacacttttccctccttcacctaccttccccacccctgggtctccaccccagctcccccccgtttcctgacccctccaccaccatacctaactctaccaaccctcatccaggacttggtctcagtaagcgtcccgtgcactggcacggagagcgatcgtctgcaacatctctcaggggcaagcttcctcaggaaggctctgaggcagctcactagacatcctgctctcgcctaacgggccctgggaaagggatacacaggccaggacactgtacaaccttaggagcgatttttttcttaacctatcaacaatattcatcagagc

SEQ ID NO: 6996 - DNA, 1400 bp, Rattus norvegicus
ctggggggaggcccagcctgggttagatgacgagaagtgcttcagccacaggcagttcacagaagggcggggttcatttcttaccacgtagagagatgagaacactcgtgtcccttgagtagttttggaaggtttcggatgagatgagcacagcamagrttykgmaysacatacayatcaggtactttgtttttgccatttatacttgagaccagctttgcagtgtgattcttttaaagcgttggtttcgagaatatagaggctgaaattacggtacagaaatgcagctagaaagtgagtttgtgtcatcttctmctagagwtatcytgcttattattcctagtctttacagtcaactccgtggacgtggctaagtatagaaaactatcatttcttccactgtyrwwggtwtttgaggttgaacagctgtacattgctaaggggagcccaaggattggaactctcattaatttaattgcttggaagtgcagctaaagttcttttttttggccttttgttttgaaaswtkarsyakwwywctctaccttagatattagtttgcttgcagttttttgtgtagatttgaaaactgtacacyaawstgttymmwawaramwwaarawacgctgcgctttgtttagaaaacaatctggcagtgaaaatatgtgtcgtaaagaagagatgtcaagaatttgagatgactccttgagaaagatggcttatgtcatcagcaaaggacacttacgtcagacgtacactgtttctatcaaatcaggaagttagtgmccatcacagatggacaggtgtccttttatttatargarttygkcasgakgtctgagtagataggtaggaaattgttactagaacattcacttccgacttgacaaggatattcatggtgcagatacgttcttcctgccgytgcagtgtctgggtgtccgggmaactccgagactttaaagtgtcataatgtggtcacacckgcagttctgggratccaragccttgcttgtgttctgtaagctctgtcaccragttgtatccccacctgaaascagtgacttttgctamcagtatttstgttctgttgtaaagtggatagaagacacacttggtagtaamggtaaattattcaaagtccmcagtgaaaaactcmccatmccttcccatttaaaccgtttstgtatctcataggtttytgacatgcaaacttgaacccttgaaaaaaagagttttyttaaaaattataaaaaaaatcrcgagttwcaatttgcmcaatattttttgttgyactttayaccttgtttacaataaagrcttttstttggtahmaaaaaaaaaaaaaaaaaaaaaaaaaaaaactcgagggggggcccggtacccaattcgcccgatag

SEQ ID NO: 6997 - DNA, 1400 bp, Rattus norvegicus
  misc_feature (1181)..(1181): n is a, c, g, or t
  misc_feature (1185)..(1185): n is a, c, g, or t
  misc_feature (1187)..(1187): n is a, c, g, or t
cctggccgaggacatcatgcggctgcgagaaaaattgcaggaggagatgctccagagggaggaagccgagagcaccctgcagksattcagacaggatgttgacaatgcttctctggcacgtcttgaccttgmacgkraagtggaatccttgcaggaagaaattgcctttttgaagaagctgcacgatgaagagatccaggagctgcaggcccagattcaggaacagcatgtccagatcgatgtgsacgwkkccaagcctgacctcaccgctgscctgcgtgatgtccgccagcagtatgraagtgtggctgccaagaacctccaggaggscgaggaatggtacaagtccaastttgctgacctcyctgaggctgccaaccggvacaacgatgccctgcgccaggcaaagcaggagtcaaacgrataccggagrcaggtgcmgtcactcacctgcgaagtggatgcccttaaaggcactaatgagtccctggagcgccagatgcgtgamaysrragagaattttgcccttgaagctgctaactaccaggacactattgsccgsctgcaggatgagatccagaacatgaaggaagagatggctcgycaccttcgtgaataccaggmcytgctcaatgtaaagatggctcttgacattgagatcgccacbwrsaggaagctgctggaaggsgaggagagcaggatttctctgsywyktccaaacttttcttccstgaacbtgagagaaactaacctggagtmacttcctstggktgacacccaytccaaaagamcactcmtghttaagacggttgaaaccrgagacggacaggtgatcartrrgayktcycagcaccvcgatgacyttkratraaaactgcacaggmtcagtgcaacggygcagtmccagcmaraagdaaaaarrrmwhgtatcttagraaaaagagctttcaagtgcmtttrytgcagttttcaggagcgcaagawagatytgggatagamacgagctcakmacatamcaactgacwcccccaaaaggcgtagaaaaggkttacaaaataatctagttttmcgaagaaatcttgtgctagaatactttttaaagkatttytgaataccattaaaactgctttmtttttccagaaaatatctgrccaacttgktmctgsttcaataaaamttcnswhntnmwmamaamammhraaaaaaamwmragggggggcccggtacccaattcgccctatagtgagtcgtattacaattcactggccggtgtttacaacgtcgtgactgggaaaacctggggttaccaatttatcgcttggagcaatcccctttgccgcggcgtatacgaagagccgtccgatgccttccaaagtggcgctgatgggatggcatgtacg

SEQ ID NO: 6998 - DNA, 600 bp, Rattus norvegicus
tcaatgccttttcccatgctgcctccgtgtatgggcagttcacgggccaggccctcctctcagggcgagagatggtggggccatcgctgcctggatacccaccccacatccccaccagtggacagggcagctatgcctcttccgctattgcaggcatggtggcaggaagtgagtattctggcaatgcctacagccacaccccgtacgcctcctacagtgaggcctggcgcttccccaactccagcctgctgagttccccatattattacagctctacaacaaggccaagcgcaccgcccacctctgccacggcctttgaccatctgtagttgtcatggggacagtgggaacaaccaggcaacaggaggacttggcctgagacgggccccagagagtcacacaaaggaatctttatttattacatgaaaaataaccacaattccagcattgccgctcactccctgtgtggtcaattaaatgaaccatgaaagtcaggatgaccttggggaaggccaaactgtcctccaagagtcatttcgtgatgtgacaggagttccaggaaccaagaaccatccatttcaaaagagcacggaggagaaa

SEQ ID NO: 6999 - DNA, 600 bp, Rattus norvegicus
agaccctggaggtcactgtctgggactatgatattggaaaatccaatgatttcatcggtggggtggttctgggcatcaatgccaagggtgagcgcctgaagcactggtttgactgtctgaagaacaaggacaagaggattgagcgttggcacacgctcaccaatgagatcccaggggctgtactcagcgactgactgtcccatctgctgccacccacccttgccacccagcccacacaggtccaaccctgggctttctcagctgccaccaagggctgtggccctcacaatgggcaagatccaggttgtctgctcggacatagccactgcagcccctgctaggaggctaggaggccaagagcacccagcctctcgcagagggacaggaaaacacaacatgaaacctgtttcagctcccctggcaccccaaagggccagagctgggagaaatcctcagcctcagctctgtccagtggaagggctatctacagtgaggacctatcagaggtgaggggtggaaccctgctgcaagcacagaaatgggggtactctggctacctggagaccacagagggaggactatgggcaggcagagcccagg

SEQ ID NO: 7000 - DNA, 600 bp, Rattus norvegicus
gttaagggrmccatggatcaacgagggacactaccagaggactagagctctccttgcccatctcactgccacattcctgtcagatggctatggggggaccctgtcacagggaaggagccccgtgccaccccctgagaagccgttcagatctagggctggactctaaggagctggactctcacctgtccctggtttcatggggmacaggaracaagctgggctgactgggtccytyccttcaggcggcmtccccctcaccacagctgatggmayggvtggacagctcmgkcasggagrcstgcwstcagcaggacttthwaaarccacctsatcchttgggctctttggarggttytgggtrchtarccctccthtmtgayccacmcaccytgggcatcccagaaactcaagagcctgmtgtattyrcytgcccrytgccmtgyttggcacctaccbtggtswtcctcctcatgyaccmagycatttcattycsgactgtatggcctggggtgggggstggggctcccacggtgacttgtttacagctgggtgtgactcagtaaagtgaakktktkttcvwwhhwwrwwrmraaaaaaaaa

SEQ ID NO: 7001 - DNA, 848 bp, Rattus norvegicus; identical to SEQ ID NO: 2905
  misc_feature (741)..(741): n is a, c, g, or t

SEQ ID NO: 7002 - DNA, 1324 bp, Rattus norvegicus; identical to SEQ ID NO: 2906

SEQ ID NO: 7003 - DNA, 997 bp, Rattus norvegicus; identical to SEQ ID NO: 2907

SEQ ID NO: 7004 - DNA, 1400 bp, Rattus norvegicus
tgtctttgccacgcgtatatctcgtggaaggaccccatccccaccccaccccaacctcaagttcaaggcatctactccctgcttctcagcagtaccggaaacttcagctccatataaggtgcctgtggacgtcacagcttcatcttagagaggggaccccccctccccccgccacgtgttgccgacacccgttccctgtggacgtgacatctcggtctctggaggacggaagtggctgcagcatgcaccagagcgagggctttccagaacttcgcagcagggctacccatgttctcccactcggtctggggttccctttctttcctcaratcctcggagcgtgaaggctctakggtggtagtgaagaagctaarccataggccagtgccgtttggttctggggggtgagggtaactttccaactgccttataactycaccacccatatcacagcgattctagtcagtgtttataagtacatgcsttcagtttcagtcactcatgacactygggaacaaggggcatgggagtggcccatgtgtwcgcaccccgmggaagkagataggakctgwgggaagactctctggrggagcttassccggyctatmcaktccttactttacttcgtgtcaccgtaggttgtcaagggaggcacagagtgggacaaggaaaaaggtcagtcacttgggattctgagaatcaacctcaacacagcttttgaggttgcagtcaggatttggtctcctatatcctcataccatgtmccgacctgacgaggccaacattactgagtgactctgctgtttattcacaaacagaaggagagccatcccactcgaggacctgtcgatgtccctctgagcaccgggagtcccattctccgtgcatgcctgtggcacgaggccctccgtgttcccgccgttcatctgttggtctgaacatcctgtattgtaaaccaaggctgggttgctaaagtgcctgagaatctcgatataaaaaacaaaaaacaaaaaatccttgggcaaaaagctcagagtaccatgtattaamaaaaaaaaaaaaaaaraaagaaagaaagaaaaagacatgtattgatatgcctatgttttttttaccggcacattgtattttttgtgtagactcgtttttggaaaataacgcaagtgtccaccggcacgccgccgtgtgtctctgcatctgtgtgtaatggctttatctgttaacgactctcggtggtgtttaagtggtgtttccagtgtaagtaagcgcagtgaccctggaaggcagtggtttttctcgcagcctccctaagctgtgagggacagctgtcccctgtccctgtacatataagccttctaataaaagacatatttcttcctrwwmaaaaaaaaaaaaaaaaa

SEQ ID NO: 7005 - DNA, 600 bp, Rattus norvegicus
gcaaagctgtttttgtatawactgttgggatttgcttcattgtttgacatcaaakgayrakgtaaagttcaaaagagtgaatatattgccatgttcagttaaagtgcacagtctgttaacaggttgacacattgcttgacctgatttatgcrgaattaataagctattcamatagtgtagctttaatacgctgcacatgattytggcagccctagagttcataaatggacttgggactcagcagttttgaaacgtgtatatggagtttaagaaatttattttccaggtgcatccccttvtaamtaaaattttcttcatcttgtacmcttawcrgcwsrarragatatatatatatatataacttgggagtgataatgggtcaaaatttacaaaataaagtactgttttggtgtgggarwwrwmawrarvmwrwgttraagtracttaamtrtgggatgttggtatccattgagatggatttgttcasccatttacattaatgagcatttaaatgcamcagatcatttsgggtgmctttaacatgaatgaataaaaaagtcaatgctaaaaaaaaaaaaaaaaaaaatctcgcggccgcaa

SEQ ID NO: 7006 - DNA, 600 bp, Rattus norvegicus
cctttgtcctccttatggtcatgtactttgactttgaactggtggaccctgacatgcctgtgccccctatcgacccaaggcgstggggcttcggcacctcccagcccagccatgaggtacgytttcgsyacmgsctgaagcccatgcagtgagcttagacctgagcacaccytgcagcccagagcggcactgaacacccatcctctggctccaaagcacccctacctctccccggcatccctgccatcttgcctcctagacatctcagaggtctgccatgctccctgtaagatgccatccccccagtggtttctgcctgacccacctctcaggaggaaaacctgtggtcagttcgatttacagctggttacccacccaagtttgactcatcccggaggacagtaccagctcccatgagtcaaacagtatcttgcaaatgctgcctcagcccatcctacctgccttacttgatgcccttactccaaatcctatcgattcagactccagaratgttactcaatggaatcaagccatgtgtgcaattgttaagttcttaatagatatgcactaaaagaaaaggattrcaaaaaaaaaaaaaaa

SEQ ID NO: 7007 - DNA, 600 bp, Rattus norvegicus
caatcactgtgagcaagagaatccatgtttgggagagatagtccgtgaagccatccgccgccagaaagattatgcctcctgtgccacagcatccaaggtgcccatcatggtatgccgcgggggctgcgggagccaatgctgccagccgattcsgagcaagcgsyggaamtacgtcttccagtgcactgacggctcytcgttsrtggaagagstggagagacacttggaatgtggctstcgtgagtgttcckgmrcsmskccccctctgccgcccactcatcctccgccttcgggactccacgtggaacctctttgagattcagaatgaaggagagaaagcttggagaccaagaggcaaaagagagaatattaagtatattgtaaaataaacaaaaaawtrgaacttawwwwwawwawrraaartgactattttcatcttttattatataaatatatcacaccgtctgagtatatggactatacagtgagttatttttaccaagttttgttttgtgttgtgtatttgttgtgtttttataaacagctgtttaaaattttaagacaaaaaaaaaacactaataaaaatgttttaaacacaag

SEQ ID NO: 7008 - DNA, 1400 bp, Rattus norvegicus
tctgggctgtcccaacccccggctggtgaaagtcagcgggcagtgctgtgaggaatgggtctgtgatgaagacagcattaaggactccctggacgaccaggacgacctccttggattcgatgcctcggaggtggagttaacaagaaacaatgagttaatcgcaaytggcaaaggcagctcactgaagaggcttcctgtctttggcacggaacctcgagtcctttacaaccccctgcatgcccatggccagaaatgcatcgttcagactacgtcctggtcccagtgctccaagagctgcggaactggcatctccacacgagttaccaatgacaacycggagtgccgcctggtgaaagagacccggatctgtgaagtgcgtccttgtggacaaccagtgtacagcagcctaaaaaagggcaagaaatgcagcaagmccargaaatccccagaaccrgtccgatttacttatgcaggatgctccagtgtgaagaaataccggcccaaatactgcggctcctgcgtggacggccggtgctgcacacctctgcagaccaggaccgtgaagatgcggttccggtgcgaagatggcgagatgttctccaagaacgtcatgatgattcagtcctgcaagtgtaactacaactgcccgcatcccaaygaggcgtcgtttcgcctctacagtctgttcaacgatatccacaagttcagggactaaaggtctcctgggtttctagtgtgggtcggacagaggtgttgagcatcgtggagacgtgggcagacggtgggcgaacagtgccttgctcatcatcaagtaggattaaggtgtttcaaaactgccgtaggggctgctgytatggatggacagtaacgcagtcgcagttggagaatacttcgcttcatagtactggagcccgggttacgtacgcttcawattggagcatgtttawarawgatgttctgttttytktttgtaaawtattttgcwaagkgtttttttttcyttyyttttktttttttttttttgcyccatttytccccctccccccttggttctacaattgkaatagagatwaaataagactagttgggtcaagtkwaagccccgyttgtcctttgacagaagtaaaatgaaaggcctytcctgcctyccccartgraggsrggggacmctctgtgagtgcccttraggmtacwacctgcaytytaaactgcaaacagaaaccaggtgttytaagattgamtgtttttatttatcaaaatgwasctttcggsgarggatggggaaatgtaawmstggratamtttgtaaatgattttaattttawatcagtgaagrgaatttakttatraamytmrtcmkttaataaagaaatatttmcytmrhrmaaaaaaaaaaaaaa

SEQ ID NO: 7009 - DNA, 600 bp, Rattus norvegicus
aaaccgactacacgacaggtggcgagtcctgcgatgagctggaggaggactggctcagggaatatccacctatcacttcagatcaacagagacaactgtacaagagaaattttgatgcaggtttacaggagtataagagtttactggcagaactcgacgaggtcaacaaagagctctctcgtctcgacagagaactggatgactacagagaggagagcgaagagtacatggctgctgctgatgaatataacagactaaagcaagttaagggatctgcagattataaaagcaagaagaattactgcaagcagttaaagagcaaattatcacacatcaagaggatggtgggagactatgacagacggaaaacctagacagatgctggttgctggagaagtgagatagaggtgcatctatctacctgcccagtgtctgcagttctccccagaggcaaactgactttggactctcgtctgggaagttaaaactttgtgatcattacaaagtttccatagctttaataccatccgtttcctgtctccagtattgaagcattttataaatggcttttgataattgactgggctgaacactccaatt

SEQ ID NO: 7010 - DNA, 1400 bp, Rattus norvegicus
ggcrcgcttgctgagtgctgccacatcccgcaagctgagcaggtatcccaactctgttcctgcccggtagaccacccgaggtgtgagtgtggtcttgtcttccagattcgtaggacagaagctccaggaggaggacccgcccaacatggcatcggagagygkgwagctatggggtggccgatttgcaggctcggtcgaccccaccatggacaagttcaactcatctatcgcctatgaccggcatctgtggaatgtggacctgcagggaagcaaggcctacagcaggggcctggagaaggcagggcttcttcaccaaagctgagatgcagcagatactgcaaggcctggacaaggtggctgaagagtgggcccaaggcatcttcaaattgtaccctaatgatgaagacatccaccttcctcaaggtgctcattgaagccatggtagaccgggcagaggcggagtgtgaagtcctcttccctgggtacacacacttgcagagagctcagcccatccgctggagccactggatcctgagtcacgccgttgcgctgacacgagatttagagagactgaaggaggtgcagaagcggatcaatgtcctgccactgggcagtggggccattgcaggcaaccctctaggtgtggaccgggagttcctctgtgcagaactgaactttggagccattacgctcaacagtatggatgccaccagcswgwgwsmcttcswggctgagttcctgttttgggcttctctgtgcatgacccatctcagcaggatggcagaagacctgattctctacggtaccaaggaattcaactttgtgcagctctccgatgcctacagswmmggaagcagcttgatgccccagaagaaaaacccagacagcttggagctgatccggagcaaggmgggcygagtgtttgamgtktctgayaccatgacwgmtgtcctccaagtagccactggagtcatctmtacactgcagattcatcgtgagaacatggcacaggcactcagccctgacatgctggctaccgaccttgcctactacctgstmygyamakrgatgccattccgccagcccacgaggcctcagggaaagctgtggtcgtggcagagatgaaaggggtggctctcaaccagctgtcacttcaggmsmtgcagaccgtcagtmysstgttctcgagtgacgtgaatctcgtgtgggactacagccacagcgtggagcagtacacagcsttgggtsgcacagcacagtccagtgttgagtggcagatcagccaggtgcgggccytgctgcagatgtagcagccctagrttccacccagtcaaagctgcgccccaataaagtggakccytggwgaggscgccwtwrammwmaaaaaaaaaaaaaaaaaa

SEQ ID NO: 7011 - DNA, 1348 bp, Rattus norvegicus; identical to SEQ ID NO: 2915

SEQ ID NO: 7012 - DNA, 1400 bp, Rattus norvegicus
ttaacctcgtctgctcccttcttcatcttctccttgttgtcctggtgggtaccagagtccatacgctggctggttctatctggaaaatactcaaaggccctgaagacactccaacgggtggctaccttcaacggcaagaaggaggaagggaaaaagctcaccatagaggagctgaagttcaacttgcagaaggacatcacctcagccaaggtcaaatatggcttatctgacttgttccgggtgtccatccttcgtcgtgtgaccttctgtctctctctggcctggttttctactggttttgcctactacagtttggctatgggggtagaagaatttggagtcaacatctacatactccagattatctttggtggggttgacatcccagccaagttcatcacaatcctctccttaagttatctgggccggcgcatcactcagagcttcctcctgctcctagcaggaggggccattttggccctcatctttgtgccttcagaaatgcagctcttgagaacagcactggctgtgtttggaaagggatgcctatctggctccttcagctgcctcttcctctacacgagtgagctctaccctacagtcctcaggcaaacaggtatgggtatcagtaacgkswsgrskcgagtaggaagtatgakrrccycactggtgaaaatcaygggtgaactgcrgccyttyatscctaatgwcatctttgggaccacggycctactgggaggcagygctgccttctttytgctygagaccctcaatcsgccyttaccggagactatcgaggacatacwaaactggcacaagcaagtcmagaaaayaaagcaskagtckgmagcasaaaaggcatcccaaataatcccgctgargactggtggataggaccctagctgagaacarcagartcytctttyctggycacragagactgatccyaagcagwaccctwctggagttccttgggcaccttgggggttggrgaaagycctargtgggcccatgctcttggmacaaaarcttctgagagtwcagymmaggtgttctaccctmayyacctmcaccawagccyacaacccagacsyggcctgctcacagctytagccatasgcttcccatactcctgcactcatccwccctgcagyccagccctgcywttcttctgtcaacccttgccatattggccattkcctccattgtcccacctccatttkccttgagatcccctagcrgttctrakggtttcttmttaccttgcccaractmtytcctkggkgggaaatttcaataaaccmcratgaagaaytywmwwwwwrammrawarrgggaaaaacccctttgggggccccagtctattttccttttagggaggggggaaatttatccttggg

SEQ ID NO: 7013 - DNA, 600 bp, Rattus norvegicus
aaaaatggtgtgtgtacataatgtttcatcagcatagactgtggaggagtgcagagaactcggaacatgtgtatgtattatttggactttggattcaggttttttgcatgtwaatatctttcgttatgggtaaagtatttacaaaacaaagtgacatttgattcaaccgttgagctgtwgttagaatactywwtkkytwwtkwyttaatktwktaaatttwtwttaattytcytkytgtytgwywtgttttggggagggatwaaagttcttagcacaaatgttttacataatttgtaccaaaaaaaattwcacacacamrcacacwcacamacasacacrcacacwcwwawaaaarraaarwaaagtwaaaggggtggcctggtastggcarcamtarcaagtgtgtgtttttwaaaaacaaaacawwcaamcawaaaaaattaataaagagraaaaaaaraaaaaaaagcytykwrmctggagagacttytgaaacagctttgcctctgtgktgtgkaccagaatacaaacaatacacccctgaccccagcgttstgaataaaaagctaattttggatctggaaaaaaaaaaaaaaaaa

SEQ ID NO: 7014 - DNA, 600 bp, Rattus norvegicus
tgcctgcttttgatggtagttatagaaaagaccggctgatttggacywgagttgcccaatcttaagtacaaatrgmamrmkgagactatgctgggtgtgttggtgcacgcctttaatcccggcactcgggaggcagagacagtctcagatctctctgagttcaaggtcagcmtggtatrrtaagtgaattccaggacasccagggytacacagaawctctgtcttggaaavccaaaaargaaaactgagaatattagagaktgtgcattttctcagaaagcaggaagaawwchmmaykcwrwtsksarmwkkkwgryaasgcmctkgagamttttcattgaaaktkctgtactyacmtaaytttggaagmaawtgatgmcyrcaatcarctgtgaraactgttgrtttctckgtagtttartyrtstaatgttgmtagmgtgmcctttgtatgtagtttgagtgtatatgtgtgtgggtgctgataattttgtattttgtggggrgtggaaaagkyaagcmatygraacygttctstaagatgcrttttyaykmmyywwrwwaaaragttytgttaaamwrwaaaaaaaawaaraarama

SEQ ID NO: 7015 - DNA, 600 bp, Rattus norvegicus
tcgatacctgactgcgggttctgcagctctgtttggtagcactgctggcagggaaacttcctgcctcctggatgaaggaagggtttactcatcaycactggcagctgcaggaagtcgggggcctgataaacaagttcataacccctttctgstagtccgtctgccagaagactcagaggacccaagcagggcagctgtyccacaggcgagccactgtcagctgagtaccgtgatgctgccccaggatgggagaagccatgtcgtccwacactgtcagggcacttttcagcttctggagaagtgtctgttctctctrccctcccaaagcacttggtgttatttaaggcgtgmggctgtctgtctgmgatggttcatcagaattgtgacasccatggggagcaagacctctgcagatgaccacattgctaaagcactggagtgaaccccccctgttgtaacttaagacccatcctgaagtgccctgaagtgcccmccaaccaatgtgaaaggagaatgaggaaggggagggaaaagaacagaaagaaagaaagaaaawwawwaaaagcttttgaggagccmmwrwaaaaaaaaaaaaaaaaa

SEQ ID NO: 7016 - DNA, 600 bp, Rattus norvegicus
tcagtcaaacacattcccagcctggcaactgtgatcctagtgaagaccatgattcggaaacggtcttttgggwacccatttgaaggtakccggcgggaggagcgttccttgtcagcacccggaaacctgctcwccaaaaaaccaaccagggagtgggagccyttgtctgagcccaaggrrrcaargmarmraaramarmctccggggcccagagccagcccctgtgggggaggaggaagtgctcttgtgaaaggtggtccctgcgtggaaagttgcggggctccggcccctggctccccgccacgcacgcctccacagcagcccgaggaggccatggagccggagtagctgcgcggaccacctgacctcgcatgcctggctgtgtggccctgcacggggctgctgcaccctgcgtttccatagcagcatgtcctacggaaaccaagcacgtgtgtagagccttgactgtcatctctggttatcagttttttgtttttgtttttgtttctttttgttgttgctgttgtttttcttgtggtttttcttttctttttttttctctycctttgttgtctaaggggacaaagaaaaaaaaaaaaa

SEQ ID NO: 7017 - DNA, 1400 bp, Rattus norvegicus
  misc_feature (893)..(893): n is a, c, g, or t
tcagctttgttctcctactcgggctgggacacccttaactatgtcactgaagagatcaggaatcccgagaggaacttgcccctctccattggcatttccatgcccatcgtcaccatcatctacctcttgaccaatgtggcctattacagtgtgctagacataaaggacatcttggccagcgacgcggttgctgtgacctttgcagatcagatttttggaatattcaactggacaattccattagcagttgcattatcctgctttggtggcctcaatgcttccattgtggctgcttctaggcttttatttgtgggctcgagagaaggccacctcccggatgccatctgtatgattcatgttgaacggttcacaccagtgccttctctactcttcaatggtatcttggcactgswckasktgtgtgtggaggacatcttccagctcattaactactacagcttcagctactggttctttgtgggactttctattgtgggtcagctttacctacgctggaaggaacctgaccggccccgccctctcaagctcagcctgttcttccccatcgtcttctgcctctgtaccatcttcctggtggctgtcccgctttatagcgataccatcaactccctcatcggcatcggcatcgcgctctcgggcctgcccttctatttcctcatcatcagagtgcccgagcacaaacgacctctgtgccttcgcaggatcgyagcgwskaccacacggtacctccagatcatctgtatgtcagttgctgcagaaatggacttggaagatggagagttgcccaaacaaggtcccaagtctaaatagagcrtggrakkbtgagatgcgggcaaactcggcgtttctcatctcccattggccagaacctntggaggccccacccagagcmcaggcttggcagcttcawytykkwwyttkyttttgagggatgaagagtaatttatttgttttgctacgtgttgtttcggactttmtaagtggataatgcagaytgtggyggaagcaggccatttytraggcttggttytggcagcacccggggtgcctacccactcctctcttcctttaccagggccaacaatgctccaaatttgtctcctttagagggacacaaaactgtcmcagatgcaaaacaataaaaagattatgttcctwarrwmwrarwrrwwmwattctgcttagtggccctgggatatttacgcagttcaaacagacatggaaactaaatgaatcaacttttccctccgaagccagctgccaaaggcaataaaaccaatttctacaacgaaattgttggactaaaatgtcatgaatgtaaaaggctagtgcataaacacttcagttttttcctaaagtgcgttgcatgtgcaaaggcc

SEQ ID NO: 7018 - DNA, 600 bp, Rattus norvegicus
ggggcattgccctctcatccatgatcctggtacctgcctacgtcatctacaaattcttcagcatacggggctccctttgggagagagtggcctacggaatcaccccggagaatgagcaccacctattggctctagaaatagagctttccagccttcagagctttgttattacttcatgtcccatagatcctcttttgtcgagttttcttttcatctcctgccagaaaaccttggtgtttaagaagtcaggtccagcaccattgatttgacacttgggtagcattgagaaggcaragagggttgctmtgccctgtgtttgcaggtmtggggaccccacagytytgccccacaggcaggatgcytggccytggttggtgaatgtgaagtytggggggtgccttccttgctmtactgtctmtacatctgtgtaaataggattgtttcactcccatgttctctgtgtcacagactgttcaagtatcattygmgsgctygwgymtgcmttggatttaatttgaaagttgttctcttcgtggaaaaaaaamcaaattaatgtacagaatawtaaagaacattcytgggcaaaaaaaaaaaaaaaaa

SEQ ID NO: 7019 - DNA, 600 bp, Rattus norvegicus
tattgatagcttattatacacaaccacacggagttgtattggaaacaggtctatagacatgcatgcttcctttagtcttctttccccctcctgtgttacactcctttgaataatgcatatcttctctttttaagactatttggaaaagcaaagtgttgcaactgtccccagggaaatagaagtgaaattcagcctggatctattacaatatcagcataattagtcattttagaaaaaaaaaatcatgttttaaatttcaaaatgacatttgtctagtaatgtaatgtgatcttggmaaattttaaaagaaaataatcctacttttttataattgttttcagaaaaaagtttacagtcttaaggaaaaatattcaggtctatcatatggtttgacagagtttttaaaagttatttttggtaaggtcttcttttrgaaaaaaaaawmwmaarrgttttttgtaccactataatctctaatactcagaattactgtgtacttacttaatttcttattatgtgccttattatgtgcttaagatataataggttaggattttatctaaatatctaggaagataaattgtgggcttggtgagcaaa

SEQ ID NO: 7020 - DNA, 600 bp, Rattus norvegicus
ctcaagagggacgaataccgcagagagtatgagmrgcrsgagkctgaaagggccaagcagagagagaggcagaagcagaaagcaattgaagagcgccgtgtgatttacgttggtaaaatcagacctgacacaacgcggacagaactgagagaccgctttgaagtttttggtgaaattgaggaatgcaccgtaaatctgcgggatgatggagacagctatggtttcattacctaccgttacacctgtgacgctttcgctgctcttgagaatggatatactttacgcaggtcgaatgaaactgacttcgagctgtacttttgtggacggaagcaatttttcaagtctaactatgcagacctagattcaaactcagacgattttgaccctgcttccaccaagagcaagtatgactctctggattttgatagtttactgaaggaagctcagagaagcttgcgcaggtaacgtgttcccaggccgaggatgacagagagatggtcaatacctcacgggacagcgtgtcctttcccaagactcttgcaagtcatacttaggaatttctcctactctacactctctgtacaaaaaaaaaaaaaaaaa

SEQ ID NO: 7021 - DNA, 600 bp, Rattus norvegicus
catcatcatgctgacctgttacttcttcattgcccaaaccatcgctggccatttccgaaaggagcgcatcgagggcctgcggaagaggcgccggctgctgagcatcatcgtggtgcyggtggtgacctttgccctgtgctggatgccttaccacctggtgaagactctctacatgctgggcaatttgctgcactggccctgtgactttgacagcttcctcatgaatgtctttccctattgcacctgcatcagttacgtcaacagctgcctcaaccccttcctctatgccttctttgacccccgatttcgccgagcctgcacctccatgctctgctgtgaccagagcgggtgcaaaggcagccctcacagcagcagtgcagagaaatctgccagttattcttctgggcacagccagggccccggccccaacatgtgcaagggaggagaaccgatgcatgagaaatctatcccctatagccaagaaacccttgtggactagggctgggaccagagggaagcctggtgcctcggggcctgacccaaacttcatcctcacgctctgagaaccaggtagcatggcttctcctggactccgaattc

SEQ ID NO: 7022 - DNA, 600 bp, Rattus norvegicus
cacatgaaattgtgacttcctgaacatcgaaccccggtgtcccgatcctgtctgctcggaagcatgtacacacctacgtgaaagggacggttttttttttttttttatcggatggtcacgccckgttcccatcgtgccctgttcccatcctagcccatcagttacctgttttacaccaaaagtagtctttagggtgtagttagcaatttcttttgtgccattttagggtggagagggtgggcatgatgaagccagtcattcaggacttaattcttccttgtgttgtggtgtggttttcttcctttcttctgtttttttttttttaattccttttttttttgccattgcaccagagtatgaaatagcttccaggttstccggctcagagctgggcgggtgattgtggtcacaccctgacaacactagggatctcaacggactcctyttgtagccgcaccactatttttagcagtttaatgggtacattatagagtcttccattttgtgtggaattagctcctccccttcaaatgctgtaattaacmtcacttaaaataaaacttgaataaaatactgaaammwmaaaaaaaaaaaaaaaaa

SEQ ID NO: 7023 - DNA, 1380 bp, Rattus norvegicus; identical to SEQ ID NO: 2927
  misc_feature (1300)..(1300): n is a, c, g, or t

SEQ ID NO: 7024 - DNA, 600 bp, Rattus norvegicus
gggagagacttacccgatggggcagatgtttgacttttccaattggttagggggctrctragcaccccacacccstaagctgcgtccctgggtgtcccctggtggacctacctgcgtttcttgcccaggaaacctgggcccatgccttacccatgctgtctagtgcagcctgaccaaatgccaagtactgacctctgctcggcctccacgccgcggaatgacatcttccatctcccagtccttgccgaaccaggacttggaaatttctcaggagaaagaattttacaatgacaatctgctttttatcaattaacttgaactgctggaggactctgctgaaaatatgaagaattatttttatacaaaggatccttaagcttggagcacaataaagatgacctctgtctctcacccccactgtctagaactttccaacctggccaaagtgtggacgggtcgggccctgagggcaagatgcctggctgcacccttcttcctcttccgaagcctatcctgacgctgatgtttggccagtgtgggaaccctgctattgcaaagtgtactattctataaaagttgtttttcayygraaaggaattc

SEQ ID NO: 7025 - DNA, 1341 bp, Rattus norvegicus; identical to SEQ ID NO: 2929

SEQ ID NO: 7026 - DNA, 562 bp, Rattus norvegicus; identical to SEQ ID NO: 2930

SEQ ID NO: 7027 - DNA, 600 bp, Rattus norvegicus
tgacagaatgctggaacaacaatgtcaaccaacgtccctctttcagggacctttcccttcgggtggatcaaatccgggacagtatggctgcatgaaagaggtgacctttactcagagaccaagtagacttccagaaccagagcaaagctctgtagccacatggycatggactcgtgtccacgrgsccttatcatgatgctagccagaasraaatgtgatgctgwctgctcaagactttggaagcgtkgtggatttttatgtaccatctgtaacccaccgcaraaggctggcaggatgctgtgaamtggtgcacggcactcactgcgtcatcgcgtctcccctggcaaaagaagaaaatwgacagttttcagctcagctctttgagaaatgaaaaaagttgtaatgtaaattttgcagtgtaagagatgcacasgacacacatgtacagttyttaccacgtggtgtgtatcatactttggcatccgtgtgatttacatgagggctgctgwtyattaatgttttttaatttttccatagctgatctataataactacatgatacacattaaaatctcagaaaattaaaaaaaaaaaaaaaaa

SEQ ID NO: 7028 - DNA, 600 bp, Rattus norvegicus
aaagtgtgatttttgtacattacactaaattattagcatttgttttagcattacctwwtytttttttttytkttcgtgcaaactgtcagcttttatcttaaatgcttattttaaaaggacagtggaaaccttcttttctctaagtgccagtattccctgggttttggacttaaamtagcamkgcmygwggaagagactaaagacctgagactctgtcttggggtttggtgcatgcagttgattccttgctagttctctaccaactgtgaacattggtgtgamccagaataatgaagcttttgamccatccstactstgtgttccacgtagtcatcaaatggattcattagtaattacagcttcacttgagaccttgtggytggttctcmtaagmctaagggaktatggatktatgggcttccctttgattcacttccagcatgtcctagaakttatcatccktyataastgtagktagactgttcataaaggctttctytagctttccmctgvymgwawtsttgctcactcccccaaatagtatattttttctagaaaaggggraaaadtgaaaaaawwwaaaaaaarcgaacgcggccg

SEQ ID NO: 7029 - DNA, 600 bp, Rattus norvegicus
ycagcaaaaagtttgtccacagagacttagctgcaagaaactgcatgttggatgaaaaattcactgtcaaggttgctgatttcggtcttgccagagacatgtacgacaaagagtattatagcgtccacaacaaaacgggtgcgaaactaccggtgaagtggatggctttagagagtctgcagacgcaaaagttcaccaccamgtcagacgtgtggtccttcggtgtgcttctctgggagctcatgacgagaggagcccctccttatcctgacgtgaacacatttgatatcactatatacctgttgcaaggcagaagactcttgcaaccagagtactgtccagacgccttgtatgaagtgatgctaaaatgctggcaccccaaagcagaaatgcgcccatcsktttctgaactggtctccagratatcctcaatcttctccactttcattggcgagcactatgtccatgtgaacgctacttatgtgaatgtaaaatgtgttgctccatatccttctctgttgccatcccaagacaacattgacggcgaagcgaacacatgacggataagaggcccgccagcccacttccaagaaacagttc

SEQ ID NO: 7030 - DNA, 1400 bp, Rattus norvegicus
tgcgcagactgaatcctgcttcagactaggtacaattgccccttttatatatacacctccacaagacatgcgtattaaacagattgtctcattcrwwrmawmwawwwwmmatatattcatcaagagaccattttatgatgcattaagaagaaagaacctttttgaaacaaactccagaccctttgttgccagtggctgggcctggggttgccccggggacgttgctcagttgctctgcatgctctgtcctgccgacaggtaccttagttctgtgttcatgtggccctgacccttccaccacacccggtcttagagcattgtgaacccaacctgcacttgtctctcatttcctctgaatagtgatcgctgtctcggtgagcaaactgtgagaagggctttggcggcttaggaggggtgggtttgggttgggaagcagcatccatttggggtgrccytgcccctcaaatttatggtgtccccactgtctcatgtgaatagccccagagttctatgcacagagaggacagtggcctcaacatataaggtgccccaggtggcagccatcacagtgacttccaggtggtctctgagtgtctggcttgatgatgccctccctcctcaattcaggagtgagcctctgtgacccttggggtgctcacagaaggcctctccaaccagtcaggccctcttgcaaattcagccamtgctttgagcccaaaatgggaatattagttttktktcggaggtgtgttccaagtttktcaatgaggccmcrgagcytcgagaacagatgccatctgcctgaatgttgacgccagtgggsgtgtgccctccatttccsttcsctcctwtggacagtgttacaatgaacayttagcattctggtyytssttggtagttgagcagactracrwwwcrgmamrhgvsktagacmytgcagcamtwargmcaatgttaaatgtattatttgsctvtaacaacytcagtgtattaggttttgtctgtgctttatrycatgtacctstgtaktgaagtmgaaacattcagtgacagcascaaatcrgtsttaatgacaagcccmgaccygtggcaatgtgctygaaaacacagaccttttgggttaaaagctttaacatctgtgaggaagaattggtcamatgggtttggaatcyhtgatttyccctgtatgaattrtactggctgttgmccaccagacacctgactgcaaatatcktttcttgtactcccatatttytagacaatgatttttgtargacrataaatttwttcrttrwvddwawwwrmrmmwrmwmwdwwwamwtggaggaaaaagcacccgttgagaayaaacagacctcaataaacaagaataatcatgtgaamawrraaaaaaaaaaaaa

SEQ ID NO: 7031 - DNA, 600 bp, Rattus norvegicus
gaggaggaacggactccaaaccatgacggagggaagcacacagagcccaacgagaccacaccactgacagagcccgagaagggtcctgtagaaacaaagtccgagccccaggagtcagaagcaaagccagcgccaactgaagtcaagacggtccccaatgaagccacacaaacgaaagagaatgagagcaaagcatgatgggtaccagcaaaaagcaaagatcaaaataacaaattgacacagcggcttcaccagagcatcccmaaataacccccccccyctctctctctctctcasacacacacacacacacacacacacacacacacacacacactcactcctctagtgtcttttgccttttaaaaaaacaacaaaaaacagataaacatgggattgcctttttgtaggtttctagaaagggytcctttgttgcacactcasttgttaagaaaaaaaaararamaaaaaggttaaacccacagccaaactaggacactccgttccctgaaaccatttaaaaatcaaacaaaagggccccaaattaagaatctaggaagctcagactgaagagaaaamcrrgaaaaaaaaaaaaaaaaa

SEQ ID NO: 7032 - DNA, 600 bp, Rattus norvegicus
tagctgtagccccagcctcagtcccagctcccacagaagcagcccagccactcaatccccatgaccacctcgacacatggacagccctcacccctgccctggctttctctgccttcctactggccatgtgacctatcagcccagccctgcttgtccttccrgacagaactggggaccttccaggggggacaggaggkagaaggcagtgactctgtggacagaggcctggaccctgagatggactgctctctcctggcagcctgggctggcatcaggggccaggcattgagccacgtgaggacytgggcctgagccctcacccagcttgccatgtcttcatcaccagcaaacaccagggcctggctccctgtcctccgaactcaagccatcaccccccagttggggaacttccccctgcttcggatggtgacagaagatgcccagggtgggggagaccccctgtacatatcytgcgtaccaacccccagatattaattctcgatggttttgtttttawwwwaawwwwwwhwrhtttgkttttttttaataagaattttcattttaagcmmahwwaaaaaaaaaaaaaaaaagtgagcggcc

SEQ ID NO: 7033 - DNA, 600 bp, Rattus norvegicus
ctcattcactggcargatgatcccaatgagtcggytggagwactacargagaatcaccagcwgcaggtgtcccaaagaagctgtrgtatttgtcaccaagctcaakagagagatctgtgctgaccccaataaggaatgggtccagaagtacattakaaamctggaccagaaccaagtgagatcagaawctacagtcttctataraattgcatcaaycctaaggrcttcagcacctttgaatgtgaacttgacccataaatctgaagctaatgcatccactctctttwccacaaccacctcaagcacttctgtagaagtgaccagtatgacagagaactagtgtgatttggaatgtgatgccttaagtaatgttmaacttatttaacttattgatattacactattccsttccatgaatactagaawtccttaaatgcaagatgtagatccatttttttatttctctgtgaatcytggttcaacactttcaatgtatgagagatgaatgggtaaacyttgtgtttgagagtccaaggtattgtttaaaatattattatggatattcctaattattaaaagaaatatattatttttgtacac

SEQ ID NO: 7034 - DNA, 1400 bp, Rattus norvegicus
agctaagaagacatccatggtactggtgaattacatctactttaaaggcaaatggaaggtgccttttgaccctcgggacacattccagtctgagttctactctggcaaaaggaggyctgtgaaagtgcccatgatgaagcttgaggacctgaccacaccctacgtccgggatgaggagctgaactgcactgttgtggagctgaagtacacaggaaatgccagcgccctgtttatcctccctgaccagggcaagatgcagcaggtggaagccagcttgcaaccagagaccctgaggagatggaaggactctctcaggcccagcatgatagatgagctctacctgcccaagttctccatctctgctgactacaacctggaggacgtccttccagagctgggcatcaaagaagyyttctccacacaggctgacctgtctgggatcacaggggataaggacctgatggtstytsaggtggtccacaaggctgttctggatgtggctgagacaggcacagaagcagccgctgccacaggggtcaaatttgttccartgtctgcaaaactggaccctctgattatagctttcgaccggcctttcctgatgattatctctgacacagaaactgcaatagctccctttttggccaagatatttaaccccaaatgagattcgaacttcccaagagttgatssttctcctsasgcakkkagcctgtctgtgggtctctgtgtgcattttsgcttctatgctstgattggccatggcggcatgcctggatgagacagtaactaactgtgtaacagtcctcatgtacagacgcctgtgcagagtcgctgccatgctcccaaacttcttggtaccactagctcatatttctgagcctaaaatttgyctttcccytgcccytgctctctctccccygtatctgcctcaacccagaagccagggccccatcaggttgtctcagtcccwwcttaggcyytagttatatcttccttcagcgttgctgtsttgatgggrctgtgcrcgattaccggccaacccacatggaccaagaagaacacwtgctggtccstatcwttctgcagtatgtgggaatcacwtggtgcccagtgctgcctcactatttccttcstbtgggcamagtgctccttgcagyactggcctgacyttgtccamatytggcacarrgcwggagccctcccttytgcaratgcatggcacctgtggktcagrccaratccccstccccagcactcctamttwgrgcaatgcagcctttyttttagttcccagctgaccaacctcacacaaaarrtrrccaacaacaaccaaaatgaagaggtwggrgcaaaggatcaataaacacatcactgcattgaaaaaaaaaaaaaaaaaa

SEQ ID NO: 7035 - DNA, 600 bp, Rattus norvegicus
ctttcatgtgtgcgtacccaggctgcaataagagatattttaagctgtcccacttacagatgcacagccggaagcacactggtgagaaaccataccagtgtgacttcaaggactgcgagagaaggttttctcgctcagaccagctcaaaaggcaccaaaggagacacacaggtgtgaaaccattccagtgtaaaacttgtcagcgaaagttttcccggtccgaccacctgaagacccacaccaggactcatacaggtaaaacaagtgaaaagcccttcagctgtcggtggcacagttgtcagaaaaagtttgcgcggtcagacgaattagtccgccatcacaacatgcaccagagaaacatgaccaaactccasstggcgctttgaggggtccgacccggagacagtccagcgtcccaggcaagaaagtgtgtgcttaaactgcttccaaatctgattttgaaattcctccctctcacctacaaaaggacatgatggtggatcttcatccgacttccaagacagcacacctgtttactgagtcctatcaggtttgccggaaggagtcggtctctgcccactcttgattaactcccaggcc

SEQ ID NO: 7036 - DNA, 1400 bp, Rattus norvegicus
catgctttggtggaagatgtttacataatactactagatcttgtgaattctccaaaggttgtttctcccaactgcaggaatttgcagtcccactacttctattaaaccgaagagttgagcagagaggctgttctgaagacaattgtactgaactagcattctcggcaacactggggattgattggatgtttagttataaccatcaatgctgctacagtgaacagtgcaacaacaagcccattaatgtgtctccattgtctttacaacccaatggtgttgaatgtccaacctgctacagtgaacttggcacgtgtaggccagtctccctaaagtgcacaggggcacagacgacgtgtgttaatgtcactggscaaggaattagggaggacttcattaagatacacgccatgggctgtgcaacccagactgcctgcaacttgaagaacgtgatcatcttgaataatattaaaatcgatacctcctgtgtcagtgggagccccccactcaggtactccccctctctcagcacggatcaaaagacgagctcagcaactgctcccacactgtgcctgcttgctgctgtgctccctgccatcatggtcatggagtcattctctgaactgtgaacgctcagtaaactctttcttttggaaatttccttggtcatggcgtcttcacagcaatagaaaagaaactaagacatcatttctggaaaagtagtagcatcaaaaccccctttcaataagaatagcaagaaccagaaccggctaaagtgatctcattttaatttgatcatttctataaagatcttgccttgggctggagagatggctcagtggyyaagarywckgacwgckwkksmagaggtcctgagttcaattccyagcaaccacagggtggctcacagttatctgtagtgggatcagatgtcctcttctggtatgtctgaagacaacaacagtgtacccacatatataatcttgtcttgccaacttgacacaaaccagggtcacctgggaagagggaacctcaacagagaaaaatgcctccatcagattggtttgtagaaaaattcgtggagcatttccttgattgatgtttgatgtgggaccaagcccactatgggcagtaccatccctaggcaagtggtcctgggaggaatgagaaaggaggacatgcctagcaagcacaaggccctgggttcggtctccagctccaaaaaaaaaaaaaaaaaaaagaaagaaaggaggacaaacataagcctgaggagccagtcagtaagcagtgmacctccatgatactacatttcctgtctccaagttcctaccttgagatcctgccctggctttcctccacggtgtaacctgtaagataaaataaagactttccttcctcgtgcc

SEQ ID NO: 7037 - DNA, 600 bp, Rattus norvegicus
cagcaactcggtgatgtacttcagtcctctggtgccggtgtttcagaaagtgaactctattatcaccaagccggtgacgcgagctcccacaccagtgcctcctcctacagggacaccccggcccctacgaccagaagcttgccgacccggggcgagtggctcagtggagggaatgggattgggcttcgcctgcgatatttacatctgggcacccttggccggaatctgcgcggttcttctgctgtccctggtcatcactctcatctgctgccacaggaaccgaaggcgtgtttgcaaatgtcccaggccccttgtcaagcccagaccttcagagaaattcgtgtaaaatggcgccactaggaagccacaactactacatgacttcagagatttctcacaagagaccgggccctcctttttcagagtttcctgctggcttatatattgtcctctgtattgttttaggggtaggatggggacagttcctttttctttatgaattctctttgatacaaaacatacttgtatgcacacaatggggtaaagatcagactgtaacaccagagatagtcccagtttcagggtcagcgtagctggtgg

SEQ ID NO: 7038 - DNA, 600 bp, Rattus norvegicus
aatgatccgcgcccacgacactgacagcctgctacaaaggactcaatataaagcaagacctggaccaacgagagacgacgcatttagctcaagctgtctgcctgaactgctgcaagtcctgtgaatggtcaggcacgttacctggagtctcacagagaaggccccagaatccaggctcactcacggagtgtgctgaagaaccaagaactcccaccatgacacccctgtggcttttgtacccttcttggactggaccttggatggcagccttgcagccaccatctttgtaagttgcttggtagggcagcatgactggctttttggcgtctcatgggagagagctaggtggcagccctgcagaagactgcacatcctcacacagagaggccacctcatgaataaggtttcctgcaaacatcttctgggcccttggcagccatcttgctctctcaggccttgctgtggttttgggaagctgttggctcagaagacagacttctacttcatctcctagtaggaaatttcttaagcttcttctccctcgtggcttatatatttcttccctcactctctgtcctttttatgaaaatgtcctggatc

SEQ ID NO: 7039 - DNA, 1400 bp, Rattus norvegicus
atcgcttcacggcccccgatactttgtttgccaacgggtccgtctacccacctaatgaaggcttctgcccgtgccgcgagtccggcattcagaatgtcagcacctgcaggtttggtgcgcccctgtttctctcccagccccacttctacaatgctgaccccgtgctgtcagaagctgttcttggtctgaaccctgacccaarggagcattcyttgttcctwgacatccacccggtcmctgggatccccatgaactgttccgtgaagatgcagctgagtctgtacakcaaatccgtcaagggcgtcgggcaaacagggaagatcgagccagtagtcctgccattgctgtggttcgaacagagcgggatgatgggtggcaagaccctgaacacgttctacacgcagctggtgctgatgccccargttcttcactacgcgcagtatgtgctgctggggcttggaggcctcctgctkctggtgcccatcatttaccaactgcgcagccaggagaaatgctttttattttggagtggtagtaaaaagggctcgcaggataaggaggccatgcaggcctactctgagtctctgatgtcaccagctgccaagggcacggtastgcaagaagccaagctgtagggcccagaagacaccacgagccccccaaacctgatagcttggtcagaccagccgcccagtccctacaccccrcttctygaggactctctcagcggacaacccgccagtgccasgtcctgagcccccagatgtcacactgtccmcacggcacatagtgtgcggaaacactcakggaccakggacagacccgctgctgagtagagcctgttgggccacaggcgacctcttctargkgacctgtgagccaggcygwgggaactgtagctgcccctcctgtaggagctggcsccsccggggytcctgactttctccgtctttytccagcaggctgaaagccttagttcccacagaggacmcagatctgtcactcytaggggctgggcaaacatsggcmkmwtksgkcacgrskggacaagcagttccagatyctgaccagtytgcacacacactctggcgctgwatctggcccttytcmtacagtytctgctgtcacctgaacactgaattggccactgtaagtggcarcgktggcaggccccctcagggtccttatttttcaggsgtggggtcaaarararaggtgtgggccgtytacccykggcrcctagtatatctcmccaragggtagggtatacarrggcccagsgtcccmcaatcgaccccttttttttytactggaaragaaattttatcgtcttttgaaagaaagtcatgactgaagcaataaaccttttcmcaaattmmaaaaaaaaaaaaaaaaaaaaa

SEQ ID NO: 7040 - DNA, 1400 bp, Rattus norvegicus
aggacagagatacagaatctatcatctttcggtgtcaaaatcgaagaataaatttgagtggcccagcatccagttaacagccacaaagagaactcagtatcaacagctgccggtttccagtgagaccctgctccagctttaccagcccagggagctccttcccttcagcaaactgtcagatccagccttccagccaccttgttctgaagtggatgtagtaggagttgtagtttctgttgtaaaaccaataggtcttgctcctttggtctacttgtcagacgagtgccttcatttattagtggtgaaatttggaatagaccttaatgaagacataaagccacgtgtgcttattgctgcgagcaacctccagtggcggccggagtccacgtcacgagtgccaactttatttgctgggaacttttccgtattctctgccagtccaaaggaggcccactttcaggagagggtcacgaacatgaagcatgctattgagaacatcgacacattttacaaggaggcagaaaagaagcttatacaggtgctgaagggagacagtccaaagtggtccaccccgaacaaagaccccacccgagaaccctacccagcctccacttgctctgcttcagaccttgcttcaggaggtcagttaccgaggagttcacctactgatcagcaaagttatcgaagtcctttatcatgctgcacaccgacggggaaatctacacccctggcccactcagcctggatggcagccaagtcttgtagtggggagaatgagattgaggaccccaagacctgtcgaaaaaaaagggccttggatctcctaagwsggctgcccttaccgccaccgctcagtcctgtmtgcacctttgtctcwcsrgmtgcacagaagkcytttcagccaccacggagctgtggcaccaaatacccaacacctctaaaaaaagagggacccagttccccttggagcagggcgccatttcagaaggccagtggcgtttctctchtggactgtgaytcagtasctgatgaagaacktgccttgctcagtacccaagcccttgtgcctcaytcagtgggagkaagtgaacaagtgtttcmcagtgattccacaaggacagaaggaccytcagccagcacagagkccagaccascawatagatccargagggagtctctgagggactgtagakatgacagcgatgggaaattggctgctgagacagttccagactactcataagtgtccgtgtgtccagacaggaatacacttattgacgcatttgtttactctacagatgctytacctggtaactctttaggattagacttgatcaccacaagaattattttgcatacaaaataaacatagctttgcttttaaaaaaaaaaaaaaaaaa

SEQ ID NO: 7041 - DNA, 600 bp, Rattus norvegicus
sactggatatgccctacatggatgctgtggtgcatgagatccasasattcatcamtcttgycccttccaasmtascccatgaagcaaccagagatactgtgttccaaggatatgtcatccccaagggtayagttgtgattycaamtctgractccctcttawatgacasccatgagtttccasatccagasaagtkkaaacytgagcatttccygawtgaaaatgggaagktcaagtacagtgastatttcaaggcatttthtgcasgaaagcgtgtgtgtgttggagaaggcctggccmgcatggaattgtttctgctcctgtctgctattctgcagcattttaacctgaagtctctggttgaccctaaggatatcgacctcagtcctgtcacagttggctttggcagtatcccaccccaatttaaactctgtgtcattccccgttcatgagacctgaaaacttcctgatatccctyccattgttatcccttaaactatgactgtttttaaaaaacccaagcatatagagttcctatcataaaatgaaaccgaaaaaataaataaamccttgatgawwwrwwaaaaaaaaaaaaaaaaa

SEQ ID NO: 7042 - DNA, 1400 bp, Rattus norvegicus
aaatctcaagctcccagttttggttgcactttatgaacatgctcacttcaykagsgtttctgagccagaggctggctctcttccatggggctctgggagctggcactgtgtacacctgctccttggttgtccgagtctcctgtgattaccaatgtttatatggttggggctgggactttgcaaggctgaatgccaagtgacacaaggcctgtctggtgtctgccacagtcctcccagcagaccctgtasagsarttctcwctttggwawctggctggstgrctgcctgaacccccaccaaagccccttttataaagggctacctagagaaaatacaaagctccctgctgacgattgtgcacttttaaaacagtttttttccctgtgagcacccctccttcctgtctaggtaggaagcccaacgcaccctctgaggtcatcacttctgktattttcctcatctaggaatgagtcatctcaaaccatgttctgtgaacccatctcatggtccactcctaggcctggggaagatacagggygaggttctggggctgktctcacttttttgkttttttaaatgaagscctttgaaaagcataggacctcygctccttttggctctaatgkcctatgattgkagctgtcmccmccttcccccaggagtcagaccagggactgactcctcaggggagtgaaatgtttcaggacatacaggactagagccaagttcctgatccagtcacamccggtccccgactcccctgmttccacmtactattttaggcttcacatattttaatttttttttaaagaatcactgtaacagtgcattttwttttaaagcagatttcttcagaagctatcatggtcccagggaccaggtagagttaagtttaatgtggactctagctttatcagactactcatctttgttamtagtgcctagaacatagtaggtgctcaataaatacatatggrgtaattgaawwamwwwmwmwwwwrrcatctgtatgtacagaatactgaacaatgttcaaagatcttcctaactgttcacaaggcaggaagtcctgtaccatacttagatgaacctaaytgyacctggaagatgctcatgtaactaattacccccgtcctgtgactctgccagccttccagtgytcacacagcgtatggaaggaaccatgtcatgccttactaggcaaataaacataccaccctacatagctgattatgaaaccgaatgaaacctgtcgttatgagggattatttttgaaaagcctccatttgtatacatttgcccaaacatagcaagtattgtacagtttttcattgtatcaaatacttttttaaagactacaaataaagtctgttaggactgtgammmarwaaaaaaaaaaa

SEQ ID NO: 7043 - DNA, 1400 bp, Rattus norvegicus
tagtcatttgaatattggagagtgagcatctttggagctgaaatcttcacagggttttggaggggtggggagtactggaaggtggggcagggtatcagagtggttgcgtgagccacctagctccttctggcctggagatcagtggagaagagaacttgaaagtttgtgtgaaggtcacgtgtggtgatcagaaccatggacagctaccagagtgcccggaagtggtgcagcccggccctacagctagatgcttggtagccgggcagggcctggattacaggttcgaggacactctcccagagaggctggtgatggtgggtgctaactggaagtgtttgtggatgagtcaccccataagccccacacccgccccagggtgggaaaactgggggttcttccctgtcatttccaatacgggtggggcacggtattaaaggccctcaggttttgcatgatagaagggagcaggaaacaaggacctgttagtgtcccccacacactcccaccctagcccagcccatgcctatacaaggcctgcggtttatagcctccacccacaacgaacactccacagaggcacagaggggtgaattctcaggtcctgagctcagcaggcaggaatgtgtctgataaatcagagataaccccacccctactccatgagaagggctggccggacacccagcmcsmggatamarkkyrgmkkswccgwtkcwkwgagrcyakygcwsgsrakytgcytkcggaggcsagaywmgmsmgagcmggacaccwtcgcagstgsytggcccatcacttctgcmrcmtggatctccmgaaggtgstgccccaratgattmtgctcctgcttttccttaatctgtcgccsctgggaggtcactcccatcccctgggaaktcytagccrgtcyccrgmmcrakscacgatgcmgaagctgctgkagctgataagagwaaagtcagaggaaatggytcmkrswcagstctcaaaggaccaaggccstacaaaagaacttctaaaaagagtccttakgtctcaagacagcgccttccgratccaggagagacttcgaaattccaagatggcacatagttyaagctgctttgggcagaagatasaccggatyggcrcagtcagtcrywtgggctgtgacgggctgaggttgttttaggaagacctcctggstgcagactyyggcttytgacthtgcctgcggctyttctttccccagctytgggrccacctytcmagtgahcctgtytmytwawwtsbyymyyymytyayytttatgttgctgattttbyacaagamtgtttyttatyttccagcacaaacttgccmcagtsymmymmmcayagcctattthhtgcttttgrraaarrraaaaaaaaaaaaaaaaa

SEQ ID NO: 7044 - DNA, 600 bp, Rattus norvegicus
gggcactgctggaagccggggcttcaccaaacgccccgaacactttcggtcgtaccccgatacaggtgatgatgatgggcaacgtcaaagtggcagctctcctgctctcctatggtgcagattcgaactgcgaggaccccaccaccctctcccgaccggtgcacgacgcagcgcgggagggcttcctagacactctggtagtactgcaccaggcaggggcgcggctggatgtgcgcgatgcctggggtcgcctgccgctcgacctggccctagagcggggacatcacgacgtcgtgcggtatttgcggtatctactctcctccgctgggaacgtttcccgggtcaccgacaggcataacttctgctcaagcacgcccaggtgcctaggacttcgaggccaacccccaaagcagcgctaagttaggcctcagccctcctttttctccttggcttcacttctggcaacgcgagactagcatatggctttaaaaaaatacataatgctttttgcaatcacgcggggtgggtggggggaggttagcagagggagggagggacagagtggactattaaaaaaagattaaatactttttaaaaatg

SEQ ID NO: 7045 - DNA, 1400 bp, Rattus norvegicus
acaaagctttcacccacggtgttgccatgactggaggaggcggtgtgaatatgggttcccatcagaagtggaaagttggcgagattgagtttgaagggctcatgagaaccctggacaacttgggctacagaacaggctacgcatacaggcatcctctagttcgagagaagcctcggcacaagagtgacgtggagatcccagcaactgtgactgcattctcctttgaagatgatagtgtgccactctctcccctcaagtacatggcacagagacagcagcgtgaaaaaacaagatggctgaattctccaaatacatacatgaaagtgaatgtgccggaggagtcccggaacggggaaactagtcccaggaccaaaataacgtggatgaaagcagaggacccctctaaagttagtagtggaacacctatcamrakkgaagatcccaatcagtttgttcctctaaacacgaacccgactgaggtgctggagaagagaaataagattcgggaacagaatcgctatgacctgaagacagcagggccacagtctcagctgctggcggggatcgttgtggacaaaccgccttctaccatgcggtttgaagacgatgatcagggcccaccagcccctcctaacccattcagtcatctcatggaaggagaacttgaagaatatacgaagacaatckagagamagcagcaaggcctggacgaaaaccacgagctgttttccaagagcttcacctctgtggatgtgcctgtcattgtgaatggcaaggacgagatgcacgatgttgaagacgagctcgctcagcgcgtcagcaggctcacgacgagcaccaccatagagaacatcgagatcaccatcaagtccccagacagaactgaagaggtcctgtcacccgatggctcgccttcaaagtcaccatccaagaaaaagaagaaattccgcacaccttcttttctcaaaaaraamaaaaaaaaaggagaaagttgaggcctaagtagtctttctgtaatttgtacattacattgtggcattgcacagttaaataccatattttagttaatcgttaatatacggtggtagagcmtattgggggtatatagcaaactggactttaaaactggaaagaggttttactaaaaggaaaaatattattgaaaactttcaaattcatctctttttatatgtccaaaagtgactgaccttttcagcagtaaactattgcacctttttgctaatgcttctctttacttgctttgacataatgaatgagccgtgaactcagtatcctgtggaaaaatgtgtaaaagttatctgatattgctcttagatgttatgctaattaatgttaaatcacaataaacagtattttaaatataaaaaaaaaaaaaaaaa

SEQ ID NO: 7046 - DNA, 600 bp, Rattus norvegicus
aagaaacgctttgttcctcatcgaagtaaactgttatcatgtytggggtgmccctttcattwatagcaaatgttcytwgtgactgtcagcacatgatatgtcatktattacatcattttaaagatttaaggatgaaaaatgamcaattcacatatgadccattgmwaatatawtgkttaagcctctccctctmtkgtgtccttggcaacaacaaggccaggtatcmcagatattttttctttthactttctwaacacagagcttaatatgttctgttcctcgccatgaaatgmmctatttttagcacattttagctcttkaattttaagtawgttgtcaagttccaggctgcctagctcttttgaaaactgrgtaggwttttytytttywgctcagccacaactaatgtaacttcagagagcwgttatagtgktaaaaratgwaatttwtaataaatggrttatgatatwgaatcttamaaaarmwwraawwrrctttaaatatgtatttgtggtaatatattctgcttttataatcacccmgaaataactggtttctaacattaaagatgttmwtaaattcmaaaaaaaaaaaaaaaaa

SEQ ID NO: 7047 - DNA, 600 bp, Rattus norvegicus
tctgggaagtgatgtcttacggagaaaggccgtattgggagatgtccaatcaggatgttattaaggccgtggatgagggttatcgcctgccacttcccatggactgcccagctgccctgtatcagttgatgttggactgctggcagaaagacaggaacaacagacccaagtttgagcagatcgtcagcattctggacaagctcatccggaatccaggcagtctgaagatcatcacaagcgcggctgcaaggccatcaaaccttcttctggaccaaagcaatgtcgatattgctacgttccacacaacaggtgattggcttaacggtatgaggacagcacactgtaaggaaatcttcacgggtgtggagtacagctcctgtgacaccattgccaagatctccacagatgacatgaaaaaggttggtgttactgtggttgggccacagaagaagatcatcagttccattaaagctctagaaacacaatctaagaatggtccagttcccgtgtaaagtactggaaggatgtgaggaaagggaagatgcagcgtcatccagcaaacagatagaaatggtggagatgctgcagaagctccaagtc

SEQ ID NO: 7048 - DNA, 600 bp, Rattus norvegicus
ggtgtcccatcagtgattgtctcccgtggacatagagatgctggagcccgcacatacatgtacgagtttcaatatcgcccaagcttctcatcaaaaatgaaaccaagtacggtggtaggagatcatggagacgaaatctactctgtctttggtgctccaattttaagaggtggtacctcaaaagaggagatcaatctcagcaagatgatgatgaaattctgggcaaactttgctaggaatgggaatcccaatggacagggcctgccccattggccagagtatgaccaaaaggaaggttatcttcagattggagccaccactcaacaagcccagaagctaaaagaaaaagaagtggctttctggtctgagcttctggctatgaagccactgcrtgcaggacacactgagctatgaacgggagctctgccagcctcatcctcagggcagctcacatggaagatggttttggccaaggctttgaggagacttcagaactgtgtggtgggagtgggcagaggccagggagaggatatttgcacatgtggactcaaactgaaaaataaattttsttttataaawmaaaaaaaaaaaaaaaaaaaa

SEQ ID NO: 7049 - DNA, 600 bp, Rattus norvegicus
acgtgaggkctggcccccacccttgggcagcggcaccccggcccytctgcacctcctcccagggtccctggtctcagccaaagccttgccctgggcagtgcagcaacaggagcaaatgccctccccgggcttggctggtgtggggcccagaccctttgtcctgggcagktggtttacatcatcagcatttccctattccctgaacctgcagtcctcagacttgtcccactcctgggtcccttctcccaggatgtaaagtgtgttttcacaccccttgtggctcacttctgagagccaatagagactcgtgtatgtgagagagacagacagacagacaggcaagcagcaggcgagagctactatttactgmtgttkkwgckcygcctctgagcacctatcctgtgtctgtactgctcaaaacagccaggggcttcagcagaaagggtgtgaggagctatgcagcctggagcaggctctgtcagggaacccacgtgtgccccacatgccgtctgtgtctttgtccaaaagacagggactggttctatgcctggggcttgtgatctgaagatcacatgaagactgaattggaattcaccaaca

SEQ ID NO: 7050 - DNA, 600 bp, Rattus norvegicus
gcagtcaggatgtgttctactctatatccacagtgaccacctgyttmatatatagggttaggacatatstragtaaggcctgagtgtgctgccaaattggaggttggyatgagagctgatgcctaaagtggctcatttgcaaggactattatggtytggaatagcaatggggggcatgggaagaagagtctataccttggagatmtatttgatggttcacagaagaggttttstamacgccctttctatgggtcagatatcaaaataccagcaacgttggatagattytgaccttttactgrgacctcggtcagatgstytcatgtcatgcagagaacstaggctggttcctgtgtcagagagacctggrcttmtggggagkccagggttcttcckwtracacktgtgcgggagccrttasctctagagttktcktgstaatgctaagaaactwtgtgaawttgtatatctktatgtawttaagcatgcaacargtgtcatktccatkcatgtagctagccctgarcctgcctstggggtaatgaaggastkctcatmatamacacttwtccwgtgammarwaaaaaaaaaaaaaaaaaa

SEQ ID NO: 7051 - DNA, 600 bp, Rattus norvegicus
agtgggatgactactcagataccgtgaaagacttggtatctcgcttcttggtggtgcaaccccaggaccgctgctcggcggaagaggccttggcgcatcctttcttccaggagtacgtggtggaagaggtgcggcacttcagccctcgagggaagttcaaggtcatctgtctaactgtgctggcctcggtaaggatctactaccagtaccgtcgggtgaagccggtaaccagggagatcgtcatccgagacccctacgccytacggccattgcgcagactcatcgacgcmtatgcttwccgcatctacggccactgggtgaagaaagggcaacagcagaacagagctgccctcttcgagaacacgcccaaggcagtgctcctctccttggctgaggaggaggacttctgaggggtggcggggcacaggggagaaagcaaacaggktacgcgcccccagaactgtgagaagaggatgcctcaaggaggaggcttctgcaaaggagctgtgaccctactctgcactckcaaaggctcgccaytagatgcgggmrttcccattaaacagcagtattaatagctggaaaaaaaaaaaaaaaaaa

SEQ ID NO: 7052 - DNA, 600 bp, Rattus norvegicus
taccatgaagacattctgtggtacaccagagtatctggcaccagaggtattagaagataatgactatggccgagctgtggactggtggggcctaggtgttgtcatgtatgaaatgatgtgtgggaggttgcctttctacaaccaggatcatgagaaactctttgaactaatactcatggaagacatcaaattcccccgaacactctcttcagatgcaaagtcattgctttcagggctcttgataaaggatccaaataaacgccttggtggagggccagatgatccaaaagagataatgaggcacagtttcttttctggagtaaactggcaggacgtatatgacaaaaagcttgtacctccttttaagcctcaagtaacatctgagacagacaccagatatttcgatgaagaatttacagctcagactattacaataacaccacctgaaaagtgtccactataaaataagattaattgatttggaccaatctggttcaatttcaggaagacttgcattatcttagtgttcttcataaggacattccaatataatttatttaattggaaatatctcttggatatatctatttattctacctc

SEQ ID NO: 7053 - DNA, 1400 bp, Rattus norvegicus
aagatcagaagatttggataattccattgacaaaacagaagctggaattaaagagctccagaaaagcatggagcgctggaagaacatggagaaggagcacatggatgccataaatcacgacactaaagagctggagaagatgaccaaccgacagggcatgctgttgaagaagaaagaggagtgcatgaagaagatccgagagctggggtcccttccccaggaagcatttgaaaagtaccagacactgagcctgaagcagttgtttcggaaacttgagcagtgcaacacagagttgaagaagtacagccatgtcaacaagaaggctctggaccagtttgtgaatttctctgagcagaaggagaaactgataaagcgacaggaagaattggacaggggctacaagtcaatcatggagttgatgaatgtactcgaacttagaaaatatgaagctatccagttaaccttcaaacaggtatctaagaactttagtgaagttttccagaagttggtacctggggcaaaagcgaccttggtgatgaagaaaggagacgtggagggcagccagtctcaggacgaaggagaggggagcggcgagagcgagaggggctctgggtcacaaagcagcgttccatcagttgaccagttcacaggagtcgggatcagggtatcatttacaggaaagcaaggcgagatgagagaaatgcagcagctttcaggagggcagaagtctctggtagcccttgctctcatttttgccattcagaagtgtgaccctgctcctttctacctgywygakgagatcgaccaagctttggatgctcagcacagaaaagctgtgtcagatatgattatggaactagctgtacacgcccagtttatcactaccacttttaggcctgaactgcttgagtctgctgataaatyctmcgggaagtcagaataaggtagtcacatcgacgtgatcacagcaagagatggccaaagactttgtagaagacgrymcsasgcatggttaactgaaagataacgcctgccgtcttggaagatgtgtatagtaatgtggtccgtacctgggaacgtaaattttaaaaataataattggttattactgagtttttggatttagaatacacagtccttttatacttgtctttgtattttataagctcccctgtaatgttacatttctacgtatagtcgaggrattttatttcmtacacgacwwwwwgtaagtgtcctcctattttaaawcytttgagrttctaaatattcccmattattttatagcttcyattwaataattggtttgtgmmtaacttagtgtaaatgtggccttttgtctttgtaattgttagaaacattcrrtrrrtattttgcwtaagaaaaaaaaaaaaaaaaaa

SEQ ID NO: 7054 - DNA, 1400 bp, Rattus norvegicus
ctatcgcagaatggtggggatttgctatcaaatcgccttcaccgttggcctcctgatcctggctggagtggcctatgtgattcccaactggagatggctacaatttgctgtgactctgcccaacttctgcttcctgctctatttctggtgcataccggaatctccaagatggctgatctcccagaacaaaatcgtaaaagccatgaagataattaaacatattgctaagaaaaawrraaarwmrrwrccggtctctcttcagaacctgacaccagatgaggacgctggcaagaaattgaamccttcawtcctggacttggtcagaacccctcagataaggaaacacacgttgatcttgatgtacaattggttcacgagctctgttctctaccagggcctcatcatgcacatgggccttgcaggggacaacatctacctggatttcttctactccgccctggtggagtttccagccgccttcatcatcatcctcaccatcgaccgggttggtcgccgctatccctgggctgtgtcaaatatggtggcaggagcagcctgtctagcctctgtttttatccctgatgatctacagtggctgaaaattaccattgcatgcttgggtagaatgggcatcaccatggcctatgaaatggtctgcctggtcaatgctgagctgtaccccacatacatcaggaatcttggtgtccttgtctgctcctccatgtgtgacattggcggcatcatcacgcctttcctcgtctaccgtctcacggacatctggatggagttcccactggttgtatttgctgtggttggccttgtcgctggggcacttgtgctgttgctacctgagaccaaagggaargctctgcctgagaccatcgaggatgccgagaatatgcagaggccaagaaaaaaagaaagaaaagagaatttacctccaagtcaagcaagcagaccgtccgctaagctaaaaagaaagggcatcattgctgctggagctgactttgctctctctgaggccagagatggagcttctctctcccctccccccaaacccacacaaaccaacctcacttacccctgaactccatcagcaagagctgtagcttgcacggtctgttgcactgatgtgtcaagctcttcctcccagccaggattttccgcctcactctgctctcagcactcccaggaaatgaccattgctttactggattcgttatggttgttttttcatctttacattctttatttagtttccttctccaccacaacatcaaaccaaaatacccaagggagctgtgggccaggacaaccaactattaaagaagtaagaaatctgaaaaaacaataaacgtgggagaagagawwwwmaaaaaaaaaaaaaaaaaaaaaaaaaa

SEQ ID NO: 7055 - DNA, 555 bp, Rattus norvegicus; identical to SEQ ID NO: 2959

SEQ ID NO: 7056 - DNA, 600 bp, Rattus norvegicus
ctctgtctctctctctgtctctctctctctctctctctctctctctctctctctctckswckctskctctctgtctctctctctgcttcccgtagctcccaaccagtactgtcttggactggcacatccatccaaatacctttctactttgtatgaagttttctttgctttcccaatatgaaatgagttctctctactctgtcagccaaaggtttgcttcactggactctgagataatagtagacccagcagcatgctactattacgtatagcaggaaactgcaccaagtaatgtccaataataggaagaaagtaatactgtgatttaaaaaaaaaaacaaactatattattaatcagaagacagcttgctcttggtaaaaggagctaccattgactctaattttgactttttagttattgttcttgacaaagagtaacagcttcaagtacagcctagaaaaaaaaatgggttctggcctgctatcaggataaatctatcgacgtagatagattcaactcagtttcactttctgtcttgggggaaatgatccagccactcatatgacgaccaaccaaccacaggtgcctctgctccctgt

SEQ ID NO: 7057 - DNA, 1400 bp, Rattus norvegicus
gttgtcaaccagcatgaacctggctggaagccwsgrrsctatcttggcgacaatccttgctcasagctacagctggcgcagcaccctggccctgtctgggtcactgtgtgtggttgtctccttcttctgtctsctgctcatccacaacgaacctgctgatgttggactccgaaatctggaccctsscccctccaagggcaaaaagggctcgtcaaaggaggagagcaccctacargacctgctgctgtccccctatctctgggtgctctccactggctacctcgtggtctttggggtaaagacttgctgtacagactggggccagttcttccttatccakgagagagggcagtcggycctygtgggtagttcctacatcagtgccctagaggttggaggccttgtaggcagcattgcagctggctatctgtcagacagggctatggcaaaggcagggctgtctgtgtatgggaaccctcgccacagcctgttgctgctcatgatggctggcatggcagcatccatgttcctcttccgggtaacagtgaccagcgactctcccaagatctggatcctggtattgggagctgtatttggtttctcttcttatggtcccattgccttgtttggagtcatagctaatgagagtgcacctcccaacttgtgtggtacctctcatgctattgtggggctcatggccaatgtgggtggatttctggctgggttacccttcagtaccatcgccaagcactatagctggagcacagccttctgggtggcagaagtgatctgtatagccagcacagttgtcttcttcttgcttcgaaatatccgcaccaagatgggccgagtatccaagaaggcagagtgaaaagagcactcactatagagcatccccaactgcaacctcattggcaggacacagaaaggaagagaggctgctctggctagaacagagcsttwmcatatctgtgtctacactgtctctstggacctccgyggyrctgmrrgttaccagtggctaatgaggtcctatgctctatttaaatgatgtttggttttaggctccattggcttcwgkttmtaccttytagcagrcagacaactcctaaattcagggtgtctcctatacccytcttcctctcctgagtccccatytcctagtgaggtggttctatctctgcagctgcagaatattaatggcctgtggtytctgctgtaccccarggcttcttgttaggggtcaacactgttgccaatacctcagtccywaagggaggagaggaggccaccactytcatcagtwmcctggggacaaaagggaggaatgtagagagcaaactgtcttgtatrgactaataaaactagatttgatmctaaaaaaaaaaaaaaaaaaaaaa

SEQ ID NO: 7058 - DNA, 1400 bp, Rattus norvegicus
gacaccctgcacctgtccttggacaccaccccagtgcccacagggggtacccctggtgctggatggctgtggctgctgtaaagtgtgtgcacggaggctgacggagtcctgcgaacacctgcatgtctgcgaacccagccagggcctggtttgtcagcctggggcaggccctggcggccatggggctgtgtgtctcttggatgaggatgacggtgactgtgaggtgaatggccgcaggtacctggatggagagacctttaaacccaattgcagggtcctgtgccgctgtgatgacggtggcttcacctgcctcccgctgtgcagtgaggatgtgacgctgcccagctgggactgcccacgccccaagagaatacaggtgccaggaaagtgctgccccgagtgggtatgtgaccagggagtgacaccggcgatccagcgctccgcggcgcaaggacaccaactttctgcccttgtcactcctgcctctgctgatgctccttggccaaattggagcacagcctggggcccctgctcaaccacctgtgggctgggcatagccacccgagtgtccaaccagaaccgattctgccaactggagatccaacgccgcctgtgtctgcccagaccctgcctggcagccaggagccacagctcatggaacagtgctttctaaggccaactggggatgcggatacagggcctgccatcctcagcaaatgacccttggaccaggccctggactgctggtagatgctcttctccatgctcttggctgcagttaactgtcctgcttggattcactgtgtagagccactgagcgatccctgctctgtctgaggtaggcggagcaggtgaccagctccagttctctggttcagcctggaattctgggttctcctggctcattcctcaaaacatccctgtacaaaaaggacaaccaaaaagacctttaaacctaggctatactgggcaaacctggccaccgtgctggggataaggtcaatgttaggaccagacagcagattgcctgaaacttccaattcccttcttggacttctgtatgcttgtaaccaaagatgatgaatgaactcgtaagtgtaccttccctgacctgagaacaccctgcctgctcgggaagtattcaggggcagaattctctgtgaacatgaagagatgaatcacactgtccttaagaaattcctcaaagtccaggagcttgagctttgtattttcaggaatgcacatctcttaagcactcgcaaaacaggaaggctccacacctctaacagccagggcctttctcttcagcatgagaaagacaagggacagcagagtactctcgtctggaggactagtctagcctagaataaacacccaaatcaagcgtgaaaaaaaaaaaa

SEQ ID NO: 7059 - DNA, 600 bp, Rattus norvegicus
tgctctcctgatggacaggatcgggcgcttaacgatgctaggtggctccatggtgctctcggggatcagctgcttcttcctgtggtttggcaccagcgaatccatgatgataggcatgctgtgcttgtacaacggactgaccatctcagcgtggaactctcttgatgtagtcacggtggaactataccccacagaccggagagcaacgggctttggcttcttgaacgcactctgtaaagcagcggccgtcctgggaaacttaatattcggctccttggtcagcatcaccaaagcaatccctatcctgctggcttccaccgtgctcgtgtgtggaggactcgtggggctgcgcctgcccgacacaagaacccaggttctgatgtgacaaaagccattctcttctctcaccatgggtcagccctattgcctgactcaaggcttcagagtttttatgtatagaaaggtggccaagtatcagaactcaaacttttgctgtgacgtaaatgtagctgtgtattgtccccgccagtgtgatttgcagggtcctccccctcccccgcgccttgttatcttttcctaattgtgatgttcctgcttccg

SEQ ID NO: 7060 - DNA, 1400 bp, Rattus norvegicus
agaaatccggaccaagctacggctgcaggctcagtctctgaacactgtagggccccggcttgcctctgagtacctcagtccggaggagatggtgactttcaaaaagaccaaacggagagtgaagaaaatccgaaagaaggagaaggaggtaataatgcgggcagatgacttgctgccccttggcgaagaccagactcaggacggggacytysrmtycaggmytcggggccggggtcggcgccgagttcctgaagtggaggasgaggsccktgakgatgaasagaaggaccctgtggcccakccgccaccatcagatgacactcgcgtagagaacatggacatcagtgatgaggaggatgggggggctcttccctcggggcccccakakctggaggakgacgaascggagctggagctgcagaagcagctggagaaggggcgccggctgcggcagctgcagcaactgcagcagctgcgggacagcggtgagaaggtgctggagattgtgaagaaactggagtctcgccaacgtggctgggaagaggaagaggatcctgagcggaaggggaccatcgtgttcaatgccacttctgagttctgtcgcactctgggggaaatccccacttacggattagctggcaaccgagaggagcaggaggagctcatggactttgaaagggatgaagagcgckcggccaatggtggctctgaatcagatggcgaagagaacattggctggagcaccgtcaacctggatgaggagaagcaacatcaggatttctccgcttcctctaccaccatcctggatgaagagcccattgtgaacagagggctggcggctgccctgctcctgtgtcagaacaaaggactgttggagaccacggtacaaaaggyggcmcgrgtaaaggctcccaataagtcactgccttcagcagtgtactgcatcgaggataagatggccattgatgacaagtacagccgacgtgaggagtacaggggcttcacccaggacttcaaggagaaggatggctacaagcccgatgttaagattgaatatgtggatgagacgggcaggaaactgactcccaaggaggcattccggcagctgtcccaccgcttccatgggaagggctcagggaagatgaagactgagcggcggatgaagaagctggatgaggaggcgctcctaaagaaaatgagttccagtgacacgcccctgggaaccgtggcactgctccaggagaagcagaaggcycaaaagacaccgtacatcgtgctcagtggcagtggcaagagcatgaatgcgaacaccatcaccaaatgaagcacctccctgtcccagatgtaatgttaaataaagttcccgccttawwwwwwmmwmwwaaaaaaaaaaaaaaaaa

SEQ ID NO: 7061 - DNA, 600 bp, Rattus norvegicus
ttggataccaagctmatatagtytagtcagttggtctgtatcagccaatacatatttgacwwmrwrmmrmwarwwttatgtcacttgacacaaattagagccatctgaagagaagatacctcaatggagataatgtctccattagatcaggctgtaggcaagcttgtagggcatttgtttaattggtgatggattagggagggcctagcccattgtaggtggtgtcagtcctagcctgatgttcctggatgccgtagcaatgcaggatgagcaaggcatgatgggcacaccagtagacagcacttctccatggcttctgcataacctcttgtctccaggtcctacctggtttgagttcctgtctaggatttcctctgtaaattaaagatctgtgacttcagatctaaatatgtgccaaataaatcctttcttcttcaagttgcctttggtcgtggtatttcattatagccgtagaaatatacttagttcaaacagttaacaatgttgtctttttagagcacataaggcaggtgacagaatatcatcaagcatggttaatttttttgttaaaacagtttcattttatttatttgtatttta

SEQ ID NO: 7062 - DNA, 600 bp, Rattus norvegicus
gcagaggatcccccaaggatgccacagattggtgctgtgtgactcatgactgttgttacaaccgtctggagaaacgtggatgtggcacaaagwwhstgacctacaagttytcctaccgagggggcsraatctcctgctctacaaacvagkwctcctgccggaaacagctgtgccagtgcgatarasstgccgctgartgttttgcccggaacaagaaaagctacagtttaaagtaccagttctaccycaacaagttttgcaaagggaagacgcccagttgctgaaagmgmcatcttckgaaacatccagacatcctctaacacctstcctagcccaaccaagttccccagtgatcaagaaaacacccctykccaaccstagaagcaggcgggcccttctgtcttcacccagaaggagccgctgaagcctgatctttycccaacactccacagccttggatccgcccacttttcccttkgcatccaacttcctgctgcgtagtacctaagagrgtcctgagaggctctcgcaagtaaagcaattcatcaacwwawaaaarrrwaaawwttaatatgcaactggtccgtgttttaaaaggtg

SEQ ID NO: 7063 - DNA, 600 bp, Rattus norvegicus
cagatatmtttaattgtgtcctattaaacsttstgatttcawawwwrawrrwmwwwamttgggaaagtgagagcagttcagtcccacgagggcctttttatttcccaaagatgtaaatccaagcacagcccttctccagagcctgagaagcaccactggcttgtcttccgcaccaggctcataccaggggcttctacatcactgggatttcactatttaaaaattaccgagcgatcgttgagggctgcagaactccacaggatgggtgcactccgccctgctggaagctgcctccagccctcatcaaagctccacctcactgagactcgtcctcctgccccatccacattgtctatgtcagcctctcatgccacaggaaaatgcttctgcacagctcaagctctggtgacaggaacggatgtaattgggagcaaggcttcctgggttctttctttcctaagaatggtacatctattttgttttttttaattaactcattggtttatgtacaaaataataaaataatgaatttcatcatacacacacacacacacacacacacacacacacacacacacacacaaataaaccatctcgtgc

SEQ ID NO: 7064 - DNA, 600 bp, Rattus norvegicus
tgtgactttccaagtagacacagcctctgatagcccctttctcattctacccctgactttctaccatgtggtagatgagaccagccccttgmaagatctccccctccgcagcggggagggtgacttcgagctcgtgctgatcctaagtgggacggtggagtccaccagcgccacctgtcaagttcgcacttcctatctaccggagrrgatcctctggggctacgagttcacacctgctatctcactgtcagccagtggcaaatacgtggctgacttcagcctttttgaccaggttgtgaaagtggcgtcccccggtggtctccgagatagcaccgtacgttatggagacccagaaaagctcaagttggaggagtcattaagagagcaagctgaaaaggaaggcagtgcccttagtgtgcgcattagtaacgtctgacatcctgttctctcctcctcagccctctggccttttcctctcccagtgtcctgggaaaaggatactatctgggttcgctggagagccctggaagtacccatcctctactttaccttaaaccggaggcctatgagcagtctaggcctgctggagtcctactcttt

SEQ ID NO: 7065 - DNA, 1400 bp, Rattus norvegicus
gactggtttcaagttcctccccttctcctttgagcacattcgggaagggaagtttgatgagtgagtctcaggcagggcgcatgctcagagcagctctcctgcctgcctctacagtgactgtgtctcttgcctgctggttgtgatccctggatactcgggcgtttgtgtcaccctacaacccctgtccccgctgtgactcatttaggttgtgctggccttccctgggtctctttctcccaagccttgggtgttacgtacagactttcgactgagagctggatggctgtgcctgatacccacccatccccatggcaccacttggcctcctggcctccagacagatagccctattccatcccctaatggtgagccaacctgcacagacacataggggcacggagccctcaggatgcaaggggtccctcatcagtccaggagttcttggtcacgccttggaggaagatggcaatgggttctctcctagaaggggatattgcttatggaacatacccgactccgctggcagggacagtcaggaagatgctgctgtcaccctttgtccagcctctccagtgagtattcaggaaactcagttggccctacctgggccatctcaaaggttccaggataacccccaccctcctagcccccaccctcctaaacactctcctcccccagccctgttggcacagcatagctagcatccgtagaatgggagggtcgcactgacttgcagcaccgggcttccggaccttagattcccttctytgtcagtgcgtgaatgggccttgccaacactacaccccaaggcagaagttaaaattggcacwctcccggcatatccctgagcccttctgcaccctgatcatgatgtcctgaggctgtggtcagtaaggttggttctgccggcaggcctgccttgatctgcccacttattactccctmymcaatccccatgctgaccccaggtttcaggagtggcgtcctggacagggaaggtcagtgkcatttacaatktgctaatcagaggcgactgttgggctaccagagcagatgtgggagcgctgctaagcccttgccgcstacctcatgtactgtggatctcagacccttytaatcatgtgctgaytccmgaaattcaytcactgccttccstgtggaggtaatactaaatyagcaaggcccctcccctcccccaccytggcgctcttgasccgctcccacggtgaattgttyagagcccctctgtccttttgtgcccagttwacatgatgatctctgctgttwacagagaggcccacagcagaggtctctgtggggaccctgcccaaggccttctgttcagacattcttatccggaataaagtgtgtttgactctgmmaaaaaaaaaaaaaaaaaa

SEQ ID NO: 7066 - DNA, 1400 bp, Rattus norvegicus
agaaagacttgaaggtgtatacaggaacaatattgatgatgtagtaaggtttttggattcaaagcataaaaaccattacaagatatacaatctatgtgctgagagacattatgacaccgccaaatttaactgcagagttgcacagtatccttttgaagaccataacccaccmymgykagaacttatcaaacccttttgtgaagatcttgaccaatggctaagtgaagacgacaatcatgttgcagcaattcactgtaaagctgggaaaggacggactggtgtaatgatttgtgcatatttattgcatcggggcaagtttttaaaggcacaagaggccctggatttttatggggaagtaaggaccagagataaaaagggagtaactattcccagtcagaggcgctatgtatattattatagctacctgttaaagaatcacctggattacagaccagtggcactgttgtttcacaagatgatgtttgaaactattccaatgttcagtggcggaacttgcaatccccagtttgtggtctgccagctaaaggtgaagatctactcctccaactcaggacccacgcggcgggaggacaagctcatgtactttgagttccctcagccattgcctgtgtgtggtgacatcaaagtagagttcttccacaaacagaacaagatgctcaaaaaggacaaaatgtttcacttttgggtaaatacgttcttcataccaggaccagaggaaacctcagaaaaagtggaaaatggaagtctttgtgatcaggaaatcgatagcatttgtagtatagagcgtgcggataatgacaaggagtatcttgtgctcaccctgacamamrakgatcttgacaaagcaaacaaagacaaggccaaccgatacttctctccaaattttaaggtgaarttatacttyacaaaaacagtagaggarccatcaaatccagaggctagcagttcaacttctgtgactccagacgttagtgacaatgaacctgatcattatagatattctgacaccactgactctgatccagagaatgaaccttttgatgaagatcagcattcacaaattacaaaagtctgattttttttttcttatcaagagggataaaataccaagaaaaaaaacttgaataaactgaaatggaccttttttttttkytttkttaatggcaataggacattgtgtcagattgcagttataggaacaattctcttctcctgaccaatcttgtttcaccctatacatccacagggttttgacacttgttgtccagytaaaaaagsttgtgtagctgtgtcatgtatatacctttttgtgtcaaaaggacatttaraatkcaaktaggatawmtaaaagwtggcactttcaaaaaaaaaaaaaaaaa

SEQ ID NO: 7067 - DNA, 600 bp, Rattus norvegicus
atgaaatgagagaggagaaagagaacaaagaagaagaaaaaggtaaacataataggcatggtcttgctgacctctcagaaccgcagctgaggactctttgcatagaggtgtggcccgtgctagcagtgataggaggagttgatgctggtcttagagttggaggtcggtgtgttcacaagcaaactgggcgccatgccacgctgctgggagtggtcaaagaaggcagcacatctgccaaggtccagtgggatgaagcagaaattaccatcagcttcccaactttttggtcgcgtagtgatactccattgtataacctggaaccctgtgaaccactgctgtttgatgtggcgcgattccgaggcctgacagcttctgtgctgctggacctaacatatctgacaggcattcatgaagatattgggaaacagagcatcaagcgacatgaaaagaaacaccgtcatgagtctgaggaaaagggggacattgagcagaaacctgagagtgaatccattttagatgtgcgaacagggttaatatctgatgatgttaaaagtcagggtaccacaagctccaaatcagaaaatgaaatagcgtcgtgcc

SEQ ID NO: 7068 - DNA, 600 bp, Rattus norvegicus
cctctaatggcgtggtctcacccctcatttggatgattccatttctcttgcaaggatccctttggcccatcttcctggccactccttggactgcccttggagacccagcttctcctggcctgctccaggcgctagttcctatcttttggctttagcctgctcttggtccctcccttttctcatttgccttgggcactggacaagaacactccsttyttcaatggrttcytgcacatccatactttbttatcaattkgrcctytygcctkgragggrgtacmgggrtktacmatgrgrctttkgttgrgrgggrttgggtkttggggtccmgrgraggtkcactggggraacmgtkggchtaaggaaggggtgrggrgaaatagctgtcatggcctyttccttagctctctctggccctgttaaaggaagrtgcaaaggrgaggaacccatgaagtgctatgtcactgtgtctcctaacatctytgctctctctgttctattgccgctggttcactccccaggtcaaaaggggaaagtgctgatcctgacatggttctatactcttctgggagtaattttgccaaaaaaaaaaaaaaaaaa

SEQ ID NO: 7069 - DNA, 1400 bp, Rattus norvegicus
ctcgccttcaagctatgtaatgtcaatwctgttttttcttttctccatggggttaatgatactagaggtagggaatgttagcaatcagtttttgtcatggctggactatccacagcacggtcgttactgtgtggaagggrgtcagatggcttatgagagccaaaccagtttatcctgagaaagacgaattaccctgtggctaaaatacactgtttttactaammwrwrwarmawwrwmycctttaataagtttaggtcttctgtccaaactgagaaaaaccatggtcactttggcaaatttccggcagtgtgtgtccctgccgctgcttagcaagggcggcggtgacttggctaatctactcagactcattgcatggctcttgggtatcaysragwattcsagcakagagcctgaccagcagtaaatgtctctcctggtacagttactgtctgctkgwctaagtgcgctgagatggttctcaatggagaatgcttaatttgcttttaacytcttgtttttgtgaggtgggtttagttttaagcttatgtcccataagaactccattcacaggcaagcagctctttccgcacacagcatatgcatcttctgaggtaatggctttataaggaagctgttcataacataagttattattattattgaacacaggtggatgtgarggattttttttcattgaaraaccaaakgrttykkcykttttctgttcagtgagcccacagagaccctggcaggaacagcattgctgscagcattgctgctgggcttttccagtgtagttcttgctcctaggtcacrygasagygaacacgatgcctgaggaccgcgcagacaggtttcccaccgcacagccgsccarggtcccgccatgrtycggyagckmsttttcttgtcytcccytctgcccatctccacctgcagtamtgagtggcgtttcccagtaccytktggggccacctcagggaacgggtttgcctggtattcagccagcggcacccaccytgccccacgaggctccctcagatccgccccacatccgtgtgttgaagaggagaaargaccagggaaccaaaggagtggactgttgagttttatttawttattwtttgtttttttttctcctaagtctgccagtctctgagatcagaacgacagtgtagggtagccgcctaatcatgttgtgattctattggtgggatgaaatgttccgcccccatggaaggagtacactcktcgtttatgttctgtaatcgcmcaatgtactgtarmccaaattccaattccatgtatttttattacagtttytctgggaaaaaaaaatgtgaamcaataaaaaggtgttgmwtcmcrdrwrwrmmwraaaaaaaaaaaaaaaaaaaaa

SEQ ID NO: 7070 - DNA, 1400 bp, Rattus norvegicus
  misc_feature (1135)..(1135): n is a, c, g, or t
  misc_feature (1137)..(1138): n is a, c, g, or t
gtatgcatttgagcttgtggataagcaggcattactagactcggaaggcagtgctgacatcgatcaagtggataacttgcaggaggggcccagcaaacccgtgcacagcagtactaattacgacgacgccatgcagttcctgaagaagaagcggtatctccaggctgcaagtaacaacagcagggagtacgcactgaatgtgggcaccatagcttctcagccttctgtgacacaagcagccgtggccagcgtcattgatgaaaacaccacagcatccatactagattcccaggcactgaatgtggagattaagagcaatcatgacaaaaatgttattccagatgaggtcctgcagactctgctggatcattattcccacaaagctaatggacagcatgagatttccttcagcgttgcagataccgaagtgacttctagcatatcaatcaattcttccgatgtacccgaggtcacccagtcagagaatgttggatcaagctcccaagcatcctcctcagataaagctaacatgttgcaggagtactccaagtttctgcagcaggctttggacagaactagccaaaacgatgcctatttgaacagcccgagccttaactttgtgactgacaaccagacccttccaaatccgmsrgcattctcttccatagacaagcaagtctatgcgsccatgcccatcaatagctttcgatcaggaatgaattctccactaagaacaactccagataagtccmactttggactaatagtcggtgactcacagcacccatttcccttttcaggtgacgagacaaaccacgcctytgccacgtcaacagcagactttttggatcaagtaacttctcagaagaaagctgaggcacagcctgtccaccaggcttaccaaatgagctcctttgaacagcccttccgtgctccataccatggatccagagctggaatagcaactcaatttagcactgccaatggacaggtgaaccttcggggaccagggacaagtgctgaattttcasaattccccttggtgaatgtaaatgataatagagctgggatgacatcttcaccagatgccacaactggccagacttttggctwraaaaaaaaaaaaaaaaaaaananntgtgtaaataatactggcactttagaacagattaatcgagagtggggttactctgtaaaatggagtgctgtacagatctaagagcagtgcgttcataacaagctgataagaatagcaagataatccagtaactgcatttcgtttggttagtccgcattccttgaactgccttacgtgtcgtcaccgttagagaagcgatgcattacctgttttagatcaggatcttgctattcacccacaccaagataaaaaaaaaaaaaaa

SEQ ID NO: 7071 - DNA, 600 bp, Rattus norvegicus
gaacgggaagagaggatgggacagttgcgagggtccgcgaccagagccctgccccctggcccaccaacaggggctaccgccaaccgactccgaagtgcagccgagcctgtggcttccaccccggcctcccgcatccagcaagctggcaatacttctcccagagcgatctcacgggcagaccgagagaggaaggtgagcatgagactccacagaggtgcgcctgccaatgtctcatcctcagacctcactgggcgacaagaggtctcccgaattgcagcctcacagacaagcgtgccawywswccatctkgkgamatgrgtcacactccagccacctgttctcaccaccgcccaccacgtgccgggccgccatcggaggtgcctgaagagcttgcatcagggagtggtttggccagtcaaagacaagtcctaggagatttcatcgagccttggatgacgcgccatcagccctcgggtgatgacagtggccagctttgtattggactttcccacaatcccctccctgagcatcccggtcaccacacacacttctcacctctctgcagagatcctgagggtgcagtgagatggtgaccatgat

SEQ ID NO: 7072 - DNA, 600 bp, Rattus norvegicus
ctggccacacaaggcaggatgggtcagtggccactagagacagagcagctcaacagtcctgaacccctgctcccttctcccgagtactcaactcagactaacaagcaccagcaccaaagagttaggtcaactaacctgccttgtctttaccagcatccacatggctttatctgtataaatcttctgcctttgatcatttctggatggtgtaggaaaaaaggaatagtgaccattacagtcttgggccagacaacactatttttacctaagtctcttaacctaaattacgtcgcctcttcctgaggctcagtctcttgtttaaatgttaccttggtgcaaataaaagtgataaactgtcccccactgcctcctgacgagacacatctgtctaatggccagcgtgtggctggaataagcagcattgtgaccacaggatcaggggacttcatcttctatcattagagcagaaggtatttggcaaatctttgttttatgtactgtacgagtaacttattcttgaataatgcaaattttcctacaatgtacaaattgctgtatgtgaattaaaaaggttttcagaattamaaaaaaaaaaaaaaa

SEQ ID NO: 7073 - DNA, 600 bp, Rattus norvegicus
tcagtatattttctgtatttaattataaaaggtaacttwktttwwktttwtttgcaactgcccttcttcccgtttggcactatggtttgttgcctgccgagctgatctgagaagtcagcttgtcccgaggctgtccatgtacgttaagtaaagtgctcactgtgtatwggaatctgtattttggaggtgcttgatctatctacaaagaaraaaattaggaatttattataaaatgctcctagaagtcttaatggtgtttattttttaaaacyttgtaatgttagacttgtktgcatggaagtgattaaggtacatcattattgtagtktgaacattgtacatgdtaagcyttcccccacccccgtttttactgtatgttyttattgaatrawctattccccatcchtaggcaagcatgaataaaattaggttaaatgtarmawrwmamwrmwmartcttttagagttgtttcgtctgttttattttgctgaatcctgtctgtatctttggttatcctctttgaaggaaaaagaaaaataaagwtggccmkcrkgcamrrmwmmwrwwwramwmwwwrgaaggraaaaaaaaaaaaaaaaa

SEQ ID NO: 7074 - DNA, 600 bp, Rattus norvegicus
cccagccatggtttcaccacagaatttctagagatgaagctcagcagttgattacccggcaggggcctgtggatggagttttcttggtacgggatagtcagagtaaccccagaacttttgtactgtcaatgagtcacggacaaaagataaaacactttcaaattatacccgtggaagatgatggtgaggtgttccacaccctggatgatggccatacgaagttcacagatctcatccagctcgtggagttctaccagctcaacaagggggtccttccttgcaagctgaagcattactgtgctmggatggctgtttagccaaactgtctgtgactcgttaaactatggaagatggaggatscaaagaagaatgattagagagagagagagagagagagagagagagagagagagagagagagagagaggagatcacaaggctggaaacaratcatggtgaaaagaagattcacctgtgggttacaaaaaaataggtcacgtattgcaaattagtgaagacttggattcgtattactctcgttactttaaatttattagttaaaattaaaccttmttaaaaartaaaaaaaaaaaaaaaaaa

SEQ ID NO: 7075 - DNA, 600 bp, Rattus norvegicus
ctcggaacaaggcacaagccaaagtatttggaactggttatcccagcctggcaactatgamggtragtgactgktatgamcagcatcagaagtacggagccttaccagatcggggaatagccaagccgccatcagctgattttcaaagagcagctcagcagcaggaagatcaagagcaaaaggatgaagagaatgaggagaaagccttgcacaggatgcgagagtgggatgactggaaggacacgcatcccaggggytatggcaaccggcagaacatgggctagtcattccagarggccaaaggacaasgtggtgcacmccttcacaccaaggacaacttcaggagggtgcagtgagggcasccatgtggagtcttgcatkgcatttgatagtgtcaaataatkgcttgwmccctaggtaatgmccagtgaatttttgtttggctttattaatytcawmawrrwrwawwmwrawwwmwwaarmrrwmaraaaararcaccaagaaatggctctatrtaatcaacgatagtatgaagtaattctcttaaaaaaaataaaacccccctattatgtgggcctatgcmmaaaaaaaaaaaaaaa

SEQ ID NO: 7076 - DNA, 600 bp, Rattus norvegicus
  misc_feature (540)..(540): n is a, c, g, or t
cwggagcccasccgtgtggmggctmtgcwsyagmmmtatgtggakgccctcckskcctrcasgarkatcragcdkcmgsrvsacsmkctgcgcttcccacgaatgytcatgaagctggtgagcctgckcaccctcagctccgtgcactcggwgcaggttttcgcattgcgtctccaggacaagaagctgccgcctttgctgtccgagatctgggatgtgcatgagtasgggccgccacaagtgccccakcmttggtggtgtctacttgcagatggacgcttcctttgcctttcctgrggtgggaggacactgtcacagcccagtcccctgkgctcggrctgagcgagtggcagttggcactagaaggksccamsmmwycsgctragwsttccagragtggtgagggtmacaggcybtakccthtgwtctktrccagywgcccttcctsccgakcttacacctcagsctaccacaccatgcaccttgagtggagagaggttagggcaggtggctccccwcagttgggagaccwcrkgccmnytcttctgccccttttatttaataaaamavdhrrmhwmmwmtrwrvmdmrwdmmraattc

SEQ ID NO: 7077 - DNA, 600 bp, Rattus norvegicus
catattattatgaaatgattcgttgcatagtgtccttatttgtatgaacatttgtatgcacgttctattgtaatcgctttgcctgtatttattgcaagaccaccagctcctggaggctgagttacagaataatcaaatggggtgttcgtggtgacttggatacaccggttagaaattaaataagcatatatatatatataaaaacatagcaggttacatatatatttataatgtgtctttttattaaccatttgtacaataaatgtcacttcccacgcagttattttatcctttgtttgcagtgacctttaaggcagcactgtttagcactttgatatgaaattttttgcttatttttttgctaaattcaaataacgtttgaagatttttaggtctaaaagtctttatattatatacwctgtatcaagtcaagatacctttggccgttttgctaagactcaaactttgaatgtcaaaccaatgtcacggtagcttctgttagcttttaatcatttttgctttagtctttttttttaaaaaaaraaaaagaaaaaaaacaaactatactgtttatattgtcattaaattatacaatcaaac

SEQ ID NO: 7078 - DNA, 600 bp, Rattus norvegicus
cctcctgagttctgccaaccagacatgtcttcaggcattgtcatgtgtgccctgggggacattacagcacccccctcccagggccatcgcccacaggggtctgtggctgcagacaccagcatcactgcttcccagacccacagtccagctggcccagtgtgaatacctggatctggactgcgtctcatcaaagtttccagaagggttaattcttccttgagcacagtatttatccttaaacaataaatcttagscaaaarramwrwmwwwwrmmtgtatcatccccaccctcactytgctcttcctacaatggagactagctttttcctgagtatttctctgtgttccaaggtctcggcctgagcccaggagttgactgaggtgggagccagagtccccactgatcaagtctcctgtctgttggttaccctagtggggacacctggacagtgtctcccagtgtcttccttgctaagtgagcctggtcctccagtggcagtgactgggcaacagtgacatgctggcctcccctgggaagggtaccatccccgtctttaaagctgttctgcttyaaaaaaaaaaawaaaaaaaaaaaaaaaa

SEQ ID NO: 7079 - DNA, 1400 bp, Rattus norvegicus
gaaccccccagggtgcctttggccctctgcctgactcgctggggcttatggagctgaataccacacctctgaaaagtgttcccctcttcgactcaccccgggagctccttaactcagaagcctttgaccttgcctctgatccctttagcagttctccaccaccacatttggaagccaagccaggctcccccgagctgcaggtccccagcctttcagccaaccgttctctcacagaaggccttgtcctggacacaatgaatgatagcctcagcaagatccttctagacatcagtttccctggcctggaggaggaccctctgggccctgacaacatcaactggtctcagttcatccctgagctgcgatagaggcagggtcttacccttgccactcaagccaccagttatcctggcacttgtgtggctggatagtgcaaggctcagtgtaccccaaaccgtctgagggagctagcaggcaagggctgagcggtgccctttgacctaattatgccaaggtaaaagccacgtctaagccactgctgggacctatgcaagcaataggatctcccagagtcctccactccctgctggcaagtgaagtgggtgtgacagagccgtgaggaccaggaaatgcccacccattagtcacctgctgctcctggcaggataacccttgtaaatggtgtcagttccccaagttgtcctgtaattataaatgtagccatattcccttagctctcattatccagagactgccaggatgggtagggtgacaaggggttgcattagcttctgcttgtgscctttgggggcaggacctgcagttcagcctcttcacactgtgggttctgctgtaggcttctagacacacaggtgtccttgccaggaccccacttactgccctttcctcacagctccccctggttctaagccagtggtactgcatgaagaaatcctgcggcaaagcctattgkctctgggtgtgtggggacgggtgtgcctgaagcaaaagcatgggtactcacgtgagtcctttaggtgtttctctgatcgtgttcccaatcaygscasggagkckarcaktgagaactcaggctgaggcctgaggaggaggaggaagtgaccactgacttgcctggcttccttagcttgcacctgagttttgcaaaaagccaccctagaccccactctacaagctagcacaagaacactactgtaactacctactgaataaagcccaggtggcctgatctcggaawwrarwrarrrrwrawggagcccggagatgatgggcaggcctgcacctgctgcatgggccttgcacaggttgtctctccacatccttctttgactctgaaaaaaaaaaaaaaaaaaaaaaaaaaaaaaaaaaaaaaaaaaaaa

SEQ ID NO: 7080 - DNA, 600 bp, Rattus norvegicus
cccgcgctagaccaggtgcaaacccatcagagttgttgttctcataaacacccagcagaagcgcagagaagagacgaggacgatcggaaagacagactctggacaactgcacagcttgtgaagtgagcgaaacagcccacgtgatgaggtgcccctgggactttctaccctgtactgctggcttgcagctctgaacagtgcaagctaacggctacagaaagtatcttatttatatatagatatatatatgtaatttatataaatatatagaattattatatatatatattatacactcttctataatatatatatatattcacatacattggactagaaaaatctatggagatgtccatcaatggtacctatgttattagagaaagtttaattttcatattcccaatcagatgacatcctatgttccactggttgggaaggggttgacaacagtagtaagtgctataccaaagacttggatttggtattctcttcagagctaaggtttgctccaggtggggccaacctacaggaagagaaggggctttggctgggagcttgagcttggagacttgactgaaagcagttctgcccctgcag

SEQ ID NO: 7081 - DNA, 1400 bp, Rattus norvegicus
agaagatggggaagtgtgacctcacgtttgacttttatttataataccagaatccgcaaacttgcatgctcacggtccccagacgctctactagctaaaagtcctgtttgcgttcatttattccttgctggacactccggaagttgcttggaaacagcagggggcgagcctggtggagagagccgaggagtgagatgatgctgtctacagcagccgcctggccgtagcgtttgagtctccacgtgctggccataccacacgcacgggcaggcaaatgtctgcccctgkaccccatgttattcactgtattttatagcgcttttcactgaaaatcgaaataaatatgtcaaccaaawrmaarwmmawwwmcamgkgkgagcaggagcgagctgtgcckggatgctmkgaarctcksaggggtcackgtratttttatagtcttctctctaggcacagccatcccaccttgtcmcgagrtcaaaggacasgttggsgggagctgsagaggtggsygwagcctgtgsagytcagttttctggaaccatmctgacaccaagccaggtcctgtyccargtstctgagcccagtacagaatgttctggaagggamgctggcctgaggctgcggatggcatctgaaggcatcagtggtgtgwgaagcgtrcccacagacaccagactgcaccaagaactagwwtatctsatagccttyactkgctccccaaggccskgactgkcmcactcccaatggcaagagayatgacataccatggytytgaagtscctagtcatcgtcacgkstgtgscacctgtgccaaggctytygctcgggagacccagtctgmaggttgactgtcctccatgcasataggattgscaagcccacctgwctgagggggcmcytagccctcaaggdkgkytgagggagcaatggscccwkgtactgtccaccctgrcacbwaccggctctgkswtmcagctccaatttgsytmaagtgatgaccasatgatgggkggaccassarattgctgcttgtggggaccaayttattytgttcyttaccaggatgggaagarkcttaacgkggtggggggaggctctggctgtggaaggtgcctgctgtgcgccatctctgaagcaggtttggttgtagcagcgttacctctgtctagaggaaagcttgtgtgggtctggtgcatggttctctgaggtgggcatggcagtgcctttcctgtgtgtctggggaggaaggctgctttctgtgaaattttctttctatttttctatttttagtactgtacggatgttctggaaccacacacggtactctgtgcttgcttgcatctttaataaaagacacctcccctgwmaaaaaaaaaaaaaaaaaaaaaaaaaaaaaa

SEQ ID NO: 7082 - DNA, 600 bp, Rattus norvegicus
tgtgacaggtgtttctccaggtctgaccacctggccctgcacatgaagaggcatctctgagggagcagaggatgaatcctgtaggctaaaagaggcttccaggctaagaggcggccatggaaggagggatacctgtaccagccaaagcatgccattgcttcctacccagttacctccagaggcctctctttggaaggtcttttgagggctacaaaagtcatgtcagaagcggcatagcacccacggtgcatggtgtttgggtgaccccggactcaccactggtttctaaccttctgagaggctctaagcttttcgccgtgagcatgcgcactgagaatgttaatgggtgggaatgactgactgtatgttgaggatctattactgactgtatggcgaggcagactttttttttycccccttgtggtagcaaatmcctgcaagrgacagaaaaaaaaagcagtttgaatkttttgtgtgtgaggagtattccaagggatgagttgaccmccaatcatttcctgaaggktgkmwgcacmwwrrraaaaaaaawaaaamcaaaaaaaaaaaaawaaaaattaaaattaaaaaaaaaaaaaaaaa

SEQ ID NO: 7083 - DNA, 600 bp, Rattus norvegicus
ctgcctgtaytgtcaggattctcggacccttggtacttcactcttgctggtgacctctcagtctgaggagagggggccttctgagacccttcacaggcagtgcatgcatgaaaagcatgctttgctgctactgaaatgagcaccagaacgtgtacatcatggtattttatttttgcttttggtatagaactcagcagttcccatttaaaaaaaaaatctaaccagagcccatcactgccatgatagctggggcttcagtctgtctactgtggtgattttagacttctggttgtatttctatatttatttttaaatatactgtgtgggatacttagtggtatatgtctctgagtttggattagtgtttctaaattggtagttattttgaatgtcacaaatggattaaggaatcaacstmkcaagagttctatctttcttccagtctaagtaccaatgctattgtaaacgtgtatagtgcctacaaattgtatgaaaacccttttaaccactttactcaagatgtttatcaaatctaatctcttattctaataaaaatactatcaagttaaagtaaaaaaaaaaaaaaaaaaaacggaattc

SEQ ID NO: 7084 - DNA, 600 bp, Rattus norvegicus
ggaagacagagctggagcagtgtcaagtggatgcagtggtggataccctggacgattycatgtcactctttccatgggcagaggaaaatcaagatctaaaagagcggacgttcaatgacttgctcacacgtcaagcacctcatcttctgaaagatttggacacatacttaggagacaaagagtggtttattggcaattatgtaacttgggcagatttctattgggatatctgcagcaccacacttttggtcttaaagcccgacctgttgggcatctaccccagactggtgtcactacggaacaaagtccaagctattcctgctatttctgcctggatcctaaagagsccrcaracmaaactctaaatgattctggacccatcatcagatgagaagtccatcagccggctacagcatytgcaaacttctcgccaccavtaggccttcctctcactttgtagtattgtgcttgctgtgtaggattcctttgttgtgactttgtctttttytgtaggcatttagtttccaatattttttcaaaacttcacacgttttataayymcagggaaatagttcmcrwwwwwaaaaaaaaaaaaaaara

SEQ ID NO: 7085 - DNA, 600 bp, Rattus norvegicus
gggagctatggggagctcactcaytgcaccaaactcgtggcaaacaagattggctgtttctggcccaatccggaagtggacaagttcttcattgctgtccmccaccgctacttcagcaagtgcccrgtctcgggcagggccctgcrggaccctcccaacagcatcctytgccctttcattgtgctccccatwacggtcacactgctcatgactgccctggtggtctggaggagcaagcgcacagagggcatcgtgtaggtktcccaggtgatgggggattggggaaccatgggcctggyccagcaacagcatcagkgacagaccccacattgcatcctgctytagcctagttrgcacaggatktgaaagcagatytgcattacactraacctgccccarccagaggcttstaacaggggagcagrgacctgcctctgtttacctctgaaagagcgctaagcgccaggtctctggtrtacttcatcaccaccatcatgtgggcatyccgacctctgaggaagactgcacagatgtgtytstggatgcatagtttgtsattaaacgagcgttcttaaamwwrraaaaaaaaaaaaaaaaaaa

SEQ ID NO: 7086 - DNA, 600 bp, Rattus norvegicus
  misc_feature (436)..(436): n is a, c, g, or t
  misc_feature (445)..(445): n is a, c, g, or t
  misc_feature (452)..(454): n is a, c, g, or t
gaatcaatctcatcctactgaggacagccttctgtcaaaagggaagatggaggactacgaaacaaatgtcctaccttgctggtattattacaagacttccatggactctgtcaaggactggtgcaactggactttgattagcaggtattacagcaacctgcggtattgcttggagtacgaggcagacaagtttggcctgggcttcccaaatcccttggcagaaagtatcatccttgaggctcacctgatacactttgccaactgctccttggtgcagcstaccttctccgatcccccagaggatgtgcttctggccatgatcatagcccccatctgcctcatccctttcctcgttacgcttgtggtgtgkaggagtaaagacggyratgckcaggsgtaggmwsmgcctmtswrcagccmhywbbkmhmtgbvssnwgskkkmanmmbrrknnnwmvtsscctccbtacccmcwtactcccatccttcccmcagacyttsggattggtggaaatggaaraaaggggaactgwtagcmcaatgtccgtcgtctttaaaataaaatatgttyttgkhmaawmvwmaaraaaaaaaaaaaaaa

SEQ ID NO: 7087 - DNA, 600 bp, Rattus norvegicus
catggacwtaaagttgggccccgccatcaagctctgccatcacatagagagaatcaagtttgcgttctatgagcagtttgccaactgagaaggacaagcagactgagctgggtctttgaagcacagtgcagcaagccctttgccctgctctacgggcagctgcagtcgtcctgggctatcggcctgcaagtgctggcttgctatctttgcactttcagggaaggagggagcaaaaagagcacaaaatggctytcctgcaatggaattgtggacttctgtttagaagattccagtttaaaastcgtgaggaagaaaaaaaacccttaaaagtctgagtgaccattaacgggacctgaaatcaaagaatgactgtgacagctggaccacaccaatttggttattttcattctgttccttccctctgtagattgaactctgttctctgctttctctttgttraaaaaagaggacatagctttaagtcggcactggcttgggatggtgcctaaggcacggcagtgccccactgttgttgtgtttttaagcttttctaaattaaagcagttcattttggggawamwraaaaaaaaaaaaaaaaaa

SEQ ID NO: 7088 - DNA, 1400 bp, Rattus norvegicus
cagaagatctcctgacagtagcctatgagcacggtgtaaacctgtttgacaccgctgaagtgtacgcagcaggaaaggctgaaagaaccctaggcaacatcctcaagagcaaaggttggaggagatcaagctatgttatcaccaccaagattttttggggaggacaggcagaaactgagcgaggcttgagtcgcaaacacatcattgaaggcttgcaaggatccctggaccgcctccaactggaatacgttgacatagtatttgccaatcgttcagaccccagcagtcctatggaggagattgtaagagccatgacctatgtcatcaaccagggcctggccctatactgggggacatccaggtggagtgctgcagaaatcatggaggcctactccatggccagacagttcaatctgatccctcctgtgtgtgaacaagcggagaaccacttctttcagagggagaaggtggagatgcagctgcctgagctctaccacaaaattggtgttggctcagtcacttggtctcccctggcgtgcagcctcattactagcaagtacgatgggcaagttccagatgcttgcaaggccactgtcaagggctaccagtggctcaaagaaaaagtgcaaagtgaagatggcaagaagcaacaagccagagtgacggaccttctccccatcgctcaccagctaggctgcaccgtggcccaacttgctatagcctggtgtctccgaagcgaaggtgtcagctcagttttactgggggtgtccagtgcagagcagctgatggaacatctggggtccctacaggtgctgggtcagctgacgccgcaaacggtgatggaaatagatgcgctcwygrggaacaaatcgcattccaagaaatagtccgttgtgggcgcgggaacccaacgcggagtgattgcaccctttggaaaaccactttcctgcatcctgcaatcagctctggatccccaccaaccaaaccctgctcccacgcagcgccgcggcagaatcagggtagccccgccccaccaacgagtsccggcttcgagtascgattcscatgaacaaagccatatcctttcaccgtggggcaccgggcmssasasggaaagtwgatctcccgcccaccctctacgcccctgctgtttcctarggctaggccttctcgctaatccagggcatgagccttctctccgccatttggtctcgcaccgctctgctcatttcttccccctgttgctgaaacctagaaaacatggagcagctaaaagaaacattgaaagcatctcaaaaatgggccttgaaatgtcatsaagggggcaagaaccyacactgggaagggggctttgtagtatttgtccaatagaagccaggctggccctggcagaaagtaaa

SEQ ID NO: 7089 - DNA, 600 bp, Rattus norvegicus
gtctcttagcctggcctccgtggcttcctaggggaggttcctcagagcaatgggggtggggagggttactctattgctgactccccacgtctagtgcagcgctgagatctggtggttctattttgggttgtttttgttttgagacagggcctcactgtgcagctctagctggcctggaacttgctatgtagaccaggctagcctggaactcagcgatctgtctgcctctgcctctctagttactatgcccagccttcttttgttttactgacctaggatctctatagcccaggctgggtttcagtccacagcgatcagatcctttctcaaccacctaagagctgaggtgacaggcacaccatcacgtgtggcacttttgtgggtgtgtgatggcaaatctcccacacccatgtgtccagacgtgagacagcagagtagagtgtactggatgctgctgtatccctctcctccatctctcagggagacagacaaccttctgcccggaccaagatgctgccatgttttctaacccagagcctgtctttactaaaaccctctcagcagacctcagtaaatctcctgcctcagatcccggaattc

SEQ ID NO: 7090 - DNA, 600 bp, Rattus norvegicus
cgagaggcgtgagaagacccggtagagctggctggtcagggactggcaggtggagccagtttgagagcctggatgctgatgtcatctgtctgcagccctgaggtgctgggaccttcctaggcaaaaggagttccagtccaagggaccagtttcaccaggccaagcctggtgagtgctgcaagacagcttgtcagcagggccctgtgagaacaaaagtatgcatctccagcttggaaacaatctgccctacagggctgtgagtggaagaagatcccttctcttttgctctctgaacacctagtgtggcaagaatcaaattggtatgggatctgtcaccaaacaccttccctttttacctcagccccaggtctgacagaactttgactgggaccatcccccccccaaccccccagcatgacctcagttcctagaaaggagaaggtgggtggagtcagactttcccgtccctaccaggggacagcccccagagactggcctcttgacaggagggatgaagcaactatcttccctttttcccagaagctcagccccgcctcccctcccctcataaactactcacggacccgccctacaccttcc

SEQ ID NO: 7091 - DNA, 862 bp, Rattus norvegicus; identical to SEQ ID NO: 2995

SEQ ID NO: 7092 - DNA, 600 bp, Rattus norvegicus
tgctttcattccgtctcagygtttgtcagagctggagacgggggctttgtgttctccgggcytgggtcacagtgtgactgcaaaytgagctgacgggvacswrkcacaccactgccccagatgggttgctttttgccttccagctcccagagcacattggtccttattctgggtcatatccaggccatrrsagrggttagaattagccctccaacattccagaatccctcataaaagtrgacatgtssccagcaataawmmaammwwmmwrtgtgtgccygcgggaggcgggtktgagtdtatwycattgtgtgaagrgagtaggktaagkytgtgcytaagccccagamcstagccytrrcctttcccaractgtgatggytgtcctgatgctwgtaaggacagtatgggaccatamggccctggcgtttccatktttaaasmcmatgtgagctsccatstktctatgaccaatgtaagctgccatgtgtctgyctgtgtgaatacagtbtgwgcwcaarrmwrrmmarmhvmhvmwrmwvmmwcwytraaaaaaamraaamwmmmtcttaaaaaaaaatctcgcggccgcaagcttat

SEQ ID NO: 7093 - DNA, 1400 bp, Rattus norvegicus
ctggcaagatgcggaggacccctggaccaaggccaggcaaaggctgtcagggaggttctgaggagtggaagagccccctatggtcccccatcgacgtggtcagtctccaccctggatgccctgcagggtttgctggtagtgttggatgagtccattgtccacagcatccctaaggatgttatcactgaatggctgcaaggcatctccagagagccctccaggctggggtctaagtggactgtcacacacccaaggttccggcgggacacagaacagaaagcctgccctccagggaaggagcctaacgtggtggatgaaaacctcatcttctaccagaattgggagctggaggcttgtgtcgatggtaccctgctggccggccagatggaccttgtgaatgaaattccctttacctacgagcagctcagcatcttcaagcacaaactggacaagacctacccacaaggctatcccgagtccctgatcaagcagctgggccacttcttcagatacgttagccctgaggacatccggcagtggaatgtgacttcaccagacacagtgaatactctgcttaaagtcagcaaaggacaaaagatggatgctcaggtgattgccttggtcgcctgctatcttcggggaggaggcaagctggacgaggacatagtaaaagccctggacaacatccccttaagttacctatgtgacttcagcccccaggatctgcacgctataccctccagtgttatgtggctggttgggctccatgacctggacaagtgcagccagaggcatctgggtatcctctatcagaaggcctgytcagcyttccagaacgtgagcgggctggaatactttgagaaaatcaggacatttctgggtggggcytccagggaggacctgcgggccctcagccagcacaatgtgagtatggacatagccactttcaagaagctgcaggtggatgccctggtggggctgagtgtggctgaggtacaraaacttytagggccacacattggggacctgaagactgaggaggataaaagccctgtccgggactggytyttccgacagcagcagaaagacctggacagtytgggtttgggacttcagggtggcatccccaatggctacctgatcctagacttcaatgtccgagaggccttytccagtggagccccactccttgggccaggatttgtgtttgcatggattccagytytgctytcagctttaagactgagctgagaccaccactcctaaggctcctggtcccagctytattgtcgagccccatyttgaccaggargggataccaggggtcattgccaaagtttgaggattyttgaacccaataaacagtggcatgtgcccccttraaaaaaaaaaaaaaaaaa

SEQ ID NO: 7094 - DNA, 1400 bp, Rattus norvegicus
ctcactatggacatttattttgatgagaacatgaagccactggagcacctgaaccacgattctgtttggaacttccacgtgtggaacgactgctggatgaagaggccagatctgccctcaggctttgatgggtggcaggttgtggatgccacaccccaggagaccagcagtggcatcttctgctgtggcccctgttcagtggagtccatcaagaatggcttagtctacatgaagtatgacacacctttcatttttgccgaggtaaacagtgataaggtatactggcagcggcaggatgacggcagcttcaagatcgtgtatgtggaagagaaagccattggcacactgattgtcacaaaggcgatcaactccaacatgcgagaggacatcacccacatctataagcacccagaaggctcagaagcagagaggaaggctgtggaaaaggctgcggcccatggcagcaaacctaatgtgtatgccacccgggactctgctgaggatgtggcaatgcaggtggaggcacaggatgctgtgatggggcaggatctgactgtctctgtggtgttgaccaatcgtggcagtagccgacgcactgtgaagttgcacctctacctttgtgtcacctactacactggtgtctctgggcctaccttcaaggagaccaagaaagaagtggtattagccccaggagcctcgsacaskgtggccatgcctgtggcctacaaggaatacaagccccaccttgtggaccagggggcaatgttgctcaatgtctcaggccatgtcaaggagagtgggcmggyackagscaagcaacacaccttccgtttgcgcaccccagacctctctctgacattactgggagctgcagtagttggccaggaatgtgaagtccagatcgtgttcaagaaccccctgcmtatcaccctcaccaacgttgtcttccggctcgaaggttctgggttacagagacccmasgwsstcaatgttggsgacatcgggggtaacgagacggttacaytgcgccagacatttgttcstgtgcgamcaggcccccrccagctcattgccagtctggacagtccacagctttcccaagtacacggtgtcattcaagtggatgtsgccccatcctctggaggcagaggtttmtcagaggctgtwrstgacwktmsctsygskgakaayawacctwtkkyawtkmrarrwsgasmtkmgscmkgggccaggagcaatargactgaaatcagatgaacaaggacattgccccaagatggggtcctaccmtaaagtagctcccctggctcggacaagaaggytggggcacccggggaggctgttactctttacctgtgctgataataaaccgttttttmwtgaaaaaaaaaaaaaaaaaa

SEQ ID NO: 7095 - DNA, 1400 bp, Rattus norvegicus
ggagcctgagcgcagtcgtgccctgggcgtggcgctagcctttattagctttggaagcctagtggcgccaccgtttgggggcatcctctacgagttcgcgggcaagcgtgtaccctttctagtgctcgccgctgtgtcccttttcgacgcgctcctgctcctggcggtggctaagcccttctcggctgcggctcgggcgcgagccaacctgccggtgggcacacctatccatcgcctcatgctagacccttacatcgctgtggtagccggcgcgctcaccacttgtaacattccccttgcgttcctcgagcccaccatagccacgtggatgaagcacacaatggccgcatccgagtgggagatgggcatggtttggctgccggctttcgtgccacacgtgttaggcgtctacctcaccgtgcgcctggcggcgcgttatccacacctgcagtggctgtacggcgctctcgggctagcggtaattggagtgagctcttgcgtcgtacctgcctgtcgctcattcgcgccgttagtggtctcgctctgcggactctgcttcggcatcgcgttagtggacacagcgctcctacccacgctcgcctttctggtggacgtgcgccacgtatccgtctatggcagtgtctatgccatagctgacatctcctattctktggcctacgcgctcgggcccatagtggcaggccacatcgttcactctcttggctttgagcagctcagcctgggcatgggcctggccaacctgctctacgcaccaktccttcttcttttgcgcaatgtaggcctccttacacgctcgckttcggagcgcgatgtgttgcttgatgaaccgccgcagggtctgtacgacgcggtgcgcctgcgtgaggtgcagggcaaggatggcggcgaaccttgtagcccacctggcccttttgacgggtgcgaggacgactacaactattactcccgcagctagcagacccgcttctcctccaggccacctacccgccccatttaggtcaagatggtcattctgcaagagcactgtccaactttggcttggggcccacctcctctaatgaataccctagcccctcgcccgtcctgaattcctttgctggaatcscwyswssatgacccctcccagtctaggcccctccccaaacacactcgtattcattggggaaatggagcagggaggcagaagaagctgttgggctcttggcagaggtgaagaggtgtgcgggtgatcgccaatcacctactgagagcccccaaatagagtcatgcatctgtttgtccttcctgcggatctttccagtgccaaacttggtctctgcactccggtgcctccggcctgaattaataaaccatatctatctgaraaaaaaaaaaaaaaa

SEQ ID NO: 7096 - DNA, 600 bp, Rattus norvegicus
actgaattgagcataagaaaagccttcatcacaagtactcggcaaattgtcagggacatgaaggatcagatgtcagcttcatctgtgcaagcgttggcagaaaggaaaaacagacaggcgctactaggagatagcagcagccagaattgggatgctggagtgacggatcgatatgggcgccttgatcgggagctgcagctggccaactcccatttcatcgaggagcagcaggcacagcagcagttgattgtggaacagcaggatgagcagttggagctggtctctggcagcatcggggtgctgaagaacatgtcccagcgcatcggaggggagctggaggaacaggcagtcatgctggatgatttctctcacgagttggagagcactcagtctcgactggacaacgtgatgaagaaacttgcaaaagtgtctcacatgaccagtgatcggcgccagtggtgtgccatagccatcctcttcgcggtcctgctggtcgtgctgaccctcttcctagtgctgtgatggtggtgccttggcgcttctgcacgaggacccagggaagaggagcagcaagcactcggccacttacactcgtgccgg

SEQ ID NO: 7097 - DNA, 600 bp, Rattus norvegicus
awawmaarwwrmagattttaatccatgaaaattgtgttttgtgccgaactgtatttgctgatcccctgaaattggcctctctttatcaggcttctctgggttattccagttttccatcaccgcaggagaaaagtctgctcttgtaaagccccatgtccccatcatccagtcccttttgctgtcacctctcacatctctgctctttggctgagttacaaatcctgaggtctgtagtaagtgaggaaatgagtggggtttccaggagaaagagtggttgagaatgggatgtgtgggtagtaggcagccagtgactagagattcccctgatgagctcaggaggagtggggctggacttaggactctgatttctccagaaggagcaatggagggttcacctagagcgaggtacctgtgaacagtaccagcgcgtcctgaaagctgcttgcaggtcaggggaccaggggatgaaataagatgtccatgtggccctctgtggtgggctcttcatcagtggtcagcagtcccaggtttgtaaggttacactggcttttacttttccagaactgtgccgggcgctcaggcatctcttcattatgtagc

SEQ ID NO: 7098 - DNA, 1400 bp, Rattus norvegicus
tgccctacaggccgttgatcaacttggtaaacgtcaggtgatgtctctcaggctggcccagtatctccgagtgcccatgaaaaatacaaatgtgtaraararawaarwmwmwygggtctgctaagtttgagggattcctttaccaggtatttggagcstatagctctacttgtcgatgtgttggttacagaatactggttttccaagtttctttatcagtcgtataacttcgctattcatgaggatgtcaaaaaacgttacatatagtatgacycaatccagaggctagcttgtcagctaggaagtctaacatgattttaatagatggcagactatagaatggcgttgtatctacacatggaagatacctcttttctgatttaccacagtggtttatcaacttacccaaccaggcttttctcagatcctgaaaaccacaattaaggacagtagtcagaatcgtggggacacgggggtgcacataaactattcattctcctgtactacaggataytaaagaactctcctgctcctggcctgggcgtgctcctctgtgaacatctgtctaaraaactaactataactttgcaacccaggcttttccgtggcgctgggacagcttatctttttcagtgcatcttattctgcgtattacagcargtyttcaataacaaaatgttyttytaacccaactycctgwaatttttttytatttagctcctttgttatgcatctttacttttcctgtaatttttgtttacatttctccctttgggcttagcagtttctkgkttattgaaaagggataatactaacatcctaggtytgaagcgstaaactgtgctagtcatcaaatggacaaggacctgcatdagaaasttattaaaaatytgtggcdaggtgggacaggtgcaggttttgtttgtgcgtgtgaacaaaaggagttgagagrcattgtctcacgtgtaataacgtgggtcaggggacgagtttgggatgtcaggactgtgtcatgtattcctaggagaaaacgttccctgcccctatatgaaagacctctcatttctgttccttttactacactgttcccttcaacggccatgttgaattgcacattattagtaatgtaatatattcttaagcgaatmtgctccagttmgtcaagctttaaatacttcagtatttaagtaccgagatttcagaaagcataaawgaggtcacaataccatctactttcctcagatgacttaatgagaacctgtccagactcctttagaaggtgttcactttccagaagctttaactcaaactctttgatgaattttgttttaaaagatgttaacactgatctgtgaataaaattttttacatacaggtaaawwwaaaaaaaaaaaaaaaaa

SEQ ID NO: 7099 - DNA, 600 bp, Rattus norvegicus
aaccttcagtggtgttggccagcagccacggtgtcgccagctttccatgtgaatatgcatcttcacacaacactgatgaggtccgggtgacggtgctgcggcagacaaatgaccaagtgacagaggtctgtgccacgacattcacagtgaagaacacgttgggcttcctagatgaccccttctgcagtggtacctttaatgaaagcagagtgaacctcaccatccaaggactgagggctgctgacaccggactgtacttctgcaaggtggaactcatgtacccaccgccatactttgtgggcatgggcaacgggacccagwtttrtgtyrymgatccagaaccatgcccagattcagacttcctcctttggatccttgctgcagttagttcggggttgtttttctacagtttcctggtcaccgctgtttctttgaacaggacgstarwgwaaagaagtcctcttacaacaggggtctatgtgaaaatgcccccaacagagccagaatgtgaaaagcaatttcaaccttattttattccaatcaactgaaaggccatttgtgaagaagagggagcattcttcagtctctaaaagctgaggc

SEQ ID NO: 7100 - DNA, 1298 bp, Rattus norvegicus; identical to SEQ ID NO: 3004

SEQ ID NO: 7101 - DNA, 600 bp, Rattus norvegicus
ttgctgtggtgctgactgtctttgctgtctgcttcgtgccyttccacatcacccgcacaatttattaccaggcaagactgttgcaagctgactgtcatgtgctgaacattgtcaatgtggtttacaaggtgactcgacccctggccagtgctaatagctgtcttgatccagtgctctatctcttcacgggggacaagtatcgaaaccagctccagcagctatgccgaggcagcaaacccaagccccgaacagctgcctcctccctggccttggtgactctacatgaggaaagcatcagcaggtgggcggacacccaccaagacagcaccttctctgcttatgagggagatcgattgtaaccctgctgctggatatgaagggaactaactgcagggcagaggggagggagcttgttagtatcacttgacaggggcatcagctgtcctcttttatagccgaagtttgaaggagctactcctctgcctctactttctcttcttctatccctacctggggccactgttcctgtttctagaacctcagtatcatttgcccaggtccttccatggcatggatttctctgaccagagtagagaattc

SEQ ID NO: 7102 - DNA, 1077 bp, Rattus norvegicus; identical to SEQ ID NO: 3006
  misc_feature (908)..(908): n is a, c, g, or t
  misc_feature (1031)..(1031): n is a, c, g, or t

SEQ ID NO: 7103 - DNA, 1400 bp, Rattus norvegicus
  misc_feature (1050)..(1050): n is a, c, g, or t
ttcatcatcaccatgatcaagattgtgctcattaactcatttggtgccattttgcaagccagccttttcggtctggcaggcgtcctgccggccaactacacagcccccatcatgagtggccagggcctggctggcttcttcacctctgttgccatgatctgtgccgtcgccagtggctctaagctgtcagaaagtgcttttggttacttcatcacggcctgtgcagttgtcattctggccatactgtgttacctggccctgccttggatggaattctaccgacattacctgcagctcaaccttgcggggcctgcagagcaggagaccaagttggatctcatcagtgaaggagaggagccaagaggaggaagagaggaatctggggtgccaggccccaactctctacccgccaacagaaaccaatccmtcaaagccatactgaagagtatctgggtcctggctctgtctgtctgtttcatcttcacagtcaccattgggttgttccctgctgtgactgctgaggtggaatccagcatcgcaggcacaagtccctggaaaaactgctacywcrwssctgtggcctgcttcctgaatttcaatgtctttgactggctaggccggagcctcacagctatttgcatgtggcctggtcaggacagccgctggttgccggtcctggtcgcctgcagggttgtgtttatccccctgctgatgctctgcaatgtgaagcagcaccactacctgccctccctctttaagcatgatgtctggttcatcaccttcatggccgcctttgccttctccaatggctacctcgccagcctctgcatgtgcttcgggcccaagaaagtcaaaccggctgaggcagagactgccggaaacatcatgtccttctttytgtgtctgggcckggctmtggragctgtgttgtcyttcttgttaagggcacttgtgtgagcgaccctgtgtggacaraggaactacactgcstgcttcctgctcacttccttcgctgttagggacgagcaggggtccaragggctgctyttntgctttcctccggtgmtggrcccrratgtccaggaacaaaggagggagcctctgaggatggacttgggattgggggtcaragtggtagggggacaatggtctytgacggacagctctgactgatccctgcytaagccaagcacaaragactccmcaaggatggggtggagacaratggctgactgtgtatcatgatbtgatgtccsttgcccttctttyttytgtgsctgttccaggtccccgatccttgtcattttactgccttttttatactgacaraadccaggtsccttcaraggccatstgattaaataaacatttttttcctccwwaaaaaaaaaaaaaaaaaa

SEQ ID NO: 7104 - DNA, 600 bp, Rattus norvegicus
gctgccaggacaggaggcatttctgagagcccaggtggagacaacgttagaagaatacgtggtctatgagcccatcttcctcgtggcgggcagctcggtgggaggtctgctgttactggctctcatcacagtggtactgtacaagcttggcttcttcaaacgtcagtacaaagaaatgctggacggcaaggctgcagatcctgtcacagccggccaggcagatttcggctgtgagactcctccatatctcgtgagctaggaatccactctcctgcctatctctgcaatgaagattggtcctgcctatgagtctactggcatgggaacgagttccctayagctctggactagcctggggaaygtcccaggcgtgatgtcatacctcctgagatgggagatttttatgcttttgccgaagtgtcagacttcagtgctgatccacttttttttgcaagagcagggatggggtcagyataaatttayatatggagaagatttagcayccaatatagactgacaggagtatgctcagtatccaatgtgttgcttgtatgtattttttaaaaaataaatatgaaaatgcaaaaaaaaaaaaaaaaa

SEQ ID NO: 7105 - DNA, 600 bp, Rattus norvegicus
aggaagtggtggggggcactggaaggagatctgtgacttccccaggagacaaattgctaagtggcatatgctctgtgatggttagcttcctggccrccagctacaacttaaaggtttttactaggcgagaagcaattttctttcttatacgcgattgtaagcttgtggcccagcaagctactttactatttatttgttttggttagaagtggattaaattagtagaccagaagatagctgtaaatgtgtattatgataatttcctcttttattagaggcgttggccaagttttcataagatactgtttccctctgtgtgtattaagtgggccaaccaagcctgttatgagcattctagcttaacctcaagtcacagatgtgtgttgtgggtgatttcattttttgccttggtagtggaaatcaggtgattgttaagagttaaaagtgggaaaaaaaacaaacctaagctagaatttcagttaggaatacagttgttttttatataaaaatctatcagtgtacaagtgtattttcaagattgtctttccccctcacagtggacatggccacctaagttttttaacttactctttcccaggc

SEQ ID NO: 7106 - DNA, 600 bp, Rattus norvegicus
tcccagcacccacatcstwtttcttstacagttatttaaacattcaatttttccctctgtttcttttcstgaattaaaaagaacraagtccwwrrarwwavwmawmwrwwmwgaactgtacccytcataggtgattctgaggaggtaaagatgtttgggggaacaaggcaactctgataacctckyacrmskgagaagccttttcatgggctctgcactcsgaagtccccccacagagggmtgagtattatggtttrgaaaaatcaatttattatgccaggcatggtggtatgtgcctttaatcctagcagttaggagtctgcagcaggaaagtaagttaaagghtagcctmagctatatggtaactttcaaactaacctgggmtatatgagaccctttctcaaggggaaaaaagggaacaaaaaaaaaaaaawmcattgtcccctcttcagattcctctaaaagagtaatgccttgggaagaatttctggttcacctgaaatggccttttgtaaatacagggtctttattacagrctmawrwwrrwwwawmwmagcacccataaagcggtcctcttcctgtgaaaaaaaaaaaaaaaaa

SEQ ID NO: 7107 - DNA, 600 bp, Rattus norvegicus
ctgttccaaaacacgactgatacagagtgacttcttttgttggctgtaagtttattttcagtttctaaaatgcctttttactttatataackrcayragstccttacattggtctgagaaaagaaatagccatgttttctttctgtaaacactgaggaatgggttataaagagacagagaggtggtgattttctaaagctctgtcaaccagccactctagataagcgttgttcttgtttctcaaagatgatgcaaaccagtttcctctctgtccttacaatgtgcaacatatataaagagctttgtgaatgggaatctgataccttgccatgtttctggtagcgctcccgggytggcaytgcgccacgtgggagacttttgattaatttactagtaattaacyccacaggactgactccttttagttttaaagtagcgctgacgtatytaaaaacgcctaggcgctgcctgcgagtgttggagttactgctttgacaaattaaagtaatggagattgtgttcttatttaaatgaaaccacatwttatccactcaggawtaaaaaaaaaatcctaaytsctwaaaaaaaaaaaaaaaaaaa

SEQ ID NO: 7108 - DNA, 600 bp, Rattus norvegicus
cgaattgacgactatgacattgtgatcagattgaactcagcacctgtgaagggctttgagaaggacgtgggcagcaagaccaccctgcgcatcacctaccctgaaggtgccatgcagcggcctgagcaatatgaacgagactctctctttgtactagctggcttcaagtggcaggacttcaagtggctgaagtacatcgtctacaaggagagagtgagcgcatccgatggcttctggaagtccgtggccacccgagtgcccaaggagccccctgagatccgcatcctcaacccgtacttcatccaggaggctgccttcacgctcatcggactgcccttcaacaatggcctcatgggcagagggaacatcccaacccttggcagtgtggcagtgaccatggcactcgatggctgtgatgaagtggcagtcgcgggctttggctatgacatgaacacacccaacgcccccctgcactactatgaaactgtgcgcatggcagccatcaaagagtcctggacacacaacatccagcgagagaaagagtttctgcggaagctagtgaaagcacgcgtcatcactgacttaagcagtggtatctga

SEQ ID NO: 7109 - DNA, 1400 bp, Rattus norvegicus
  misc_feature (758)..(758): n is a, c, g, or t
gatctccactgaagttggcatcaccaatgctgatctttccactgtggacaaggatcagagcatcccacccaaaactacccgggtgacctacccagccaaagccaagggcacattcatcgcagacagccatcagaacttcgccctgtttttccagctggtagatgtgaacaccggtgcggagctcacccctcaccagacatttgttcgacttcataaccarragactggccaggaagtggtgtttgktgctgagccggataacaagaatgtgyataagtttgaactggacacctctgaaaggaagattgagttcgactctgcctctggcacttacacactctacctaatcatcggggacgccactttgaagaaccccatcctctggaacgtggctgatgtggktatcaagttccctgaagaagaagctccctccactgtgctgtcccagaacctttttaccccaaaacaggaaattcagmayyygkymcgagagcctgagaagagsccccccactgtggtgtccaatacattcacggccctmatcytctcgcccttgctcytgctctttgcactgkgratccggattggagccaatgtcyccaacttmacctttgytcctascacrrktatctttcacctgggacwtgctgcawtgctggggctcatgtatgkctactggactmagctcaacatgtyccagaccctgaagtacctggccrtcctgggcactgtgacatttctggytggcawyvgmayrnkgsymmmvyrrgswshywrsarwwcrgcacrttagttccagaagaagtttgaagaccctgaastsggmamtgassgtttaacaaagrgtggrgacagttcagagtktggaaagaatygggggacagawtwggrgaagrggaaatacctgttatttaaagrgagaaaagtcgagctatkcttacacgtttacttgtttctcactttttgcttcactgaacagatatgtttggacccagattgtctgtccctttgttgtgwtgcytgsccagattytgtgawtwtcccaggttmcccrgaggttgtmtttgaaaagttgaaatctgtaattcatcagctttggawtaargrgaatggtggamwmmmardrwwrawrrarmmwwrmawgtgtcatgtgaggagggctccgcagtcttcagttggtccatctcacccctttcttaacagtactgcaagtggcctagaaaaggcctgtctcctttcggctccagtagcaagcactttgtaggagccatgcttgtctttggagagtcttctgtgtttagccacaaatacctgctccaggcttttggcttgagcgtttgggcttggtgtatagagaagggttgaaattgtctcggtaaataaagctgactgcctgggtc

SEQ ID NO: 7110 - DNA, 600 bp, Rattus norvegicus
ccttgcctgaaccctcctccctcattctgagccactccatggagggcctggaacccttctggaaggacaggtggccactattgccactgagcctgtgcagggtagttgggagaaagsccatttccttggaactgctaagaatgscmmgwgkycmwgattysysasccwwgkstcwggccaswstgkcskrcyytcaggcccatgaaacacactggttctggatttggcctctgctgtgaagtggcagggaacagaagccagytagggccagtggggaggttgtctctaccatgagatttttataaacccagaccagcctcccctaaaggtaactggcagcaagaggaaacaatgccctccttsccttctggagagtgaggtgaggaagtaaaactatcccagggaccaacttaatcatytgggtcatctagaacttgactgccaccttctcctcaccatgtgaggtgggggggctytgagccytacagttgcacaaacctgactttggctactggtgactctcaatctgccaaacatgctgcagcctgtttcctcccaattacagcaagactgtcagccttcaaaaaaaaaaaaaaaaaa

SEQ ID NO: 7111 - DNA, 914 bp, Rattus norvegicus; identical to SEQ ID NO: 3015

SEQ ID NO: 7112 - DNA, 600 bp, Rattus norvegicus
gggatatctagtgaatttcatgataccctggggtacatagtgagacatgtttcaaacaatgttagccaccaaaggccagggtggaagtatgtacttgaaagcctagcactttggaggagtggaaaggatggtcaagtggtcaaggtcatcttcagatacataggagcctacgagtaagaggcaatccaggaacacactagacactgtaaaaatagataaataagccaggcttggtagtgcatgccttcagtctcagcactaagaaagtagagacaggcagatttgagcaaatctttgtgagttcaagaccagataatctacatagtaagctccaatacagccagggacatacacataaatcttgtctcaaaatacataaacaaaatagggccagtaggatgactcagaagtaaaggcacttgcaaccatgactaatatcttaagttcaatcagcaggaaaactagaatgagaaaaggaactccaagaaatgttatctcatttctacctaagtccttgatgtccttcccacaaccaataagtacttaaaacaattaaaaaataaacaaaaacaaataaccacaaaaaaaaaaaaaaaaaaa

SEQ ID NO: 7113 - DNA, 600 bp, Rattus norvegicus
cagctccatgttgcaaagcagtcagccctctgtggcccaggacttcacaattgagccttatttcatctacttcctcctcaattctgcattccctgaccctgaccctcagtttctgttcctattttgaccgttccaatggcccaggaaagtgctgctcaggctcagacaatgggtccctcctttgkgacattytatatcactccaargaaaacacctctstgaactgttcacaatgaaagccaagcctgaccccagccagtctggctccaacctgtgcaagttgtcagaaatcctaatgggacagtccaaggaaaaaacagcaastgaagawccagaatcacagactccctcttcwgatgcccagcctgaggatgttgaratcctttcagacacatggatgggattgggggaacgggaataagctatcatcccttmccaaatgatactatcytgrgaatttctgcccacaacataccaaaagtgctcttattccaaagatytatgtatcacaagtcaccaaacatkttytaggtgaggaaaatacttgcaccattwtgatktgaaattgaaaatcatatttaaaaraaraaaaaaaaaaaa

SEQ ID NO: 7114 - DNA, 600 bp, Rattus norvegicus
agagagagagaggtccagtcccatgtggccaggcagtggccttcgctcttgcttcgtgtccatctcatttcctgatcaaagccactttagtaagaagtaggtaccagtcctcaggatgagccaggagccctcaggggagagggcggatgatgcctgggaacacagctgacagggagggtccagcccacaccacagaggctaggcagagggaatgaggtagccatccaccagcaccccagccctcccggttcatctcagcacccttcctgggcctctccccgtggctggagcagccccaccccctccctgggtgcatctgccctctgagttctttctgtgtgatctattttttaagaagagtttgttttgttgttttgttttaggtgggtgggggtgggagggccatctcttcactctgcttcagttgaacacctagggacgtattaaaactgtgaagctttctcagtgcactttgaacatggaagagaatctgaacccccgcgggaccaggactgaaagaggcaaggcctgcttgcctcggcccagtgaccgtgataggaatgaacccaaactcaataaaatcaattctgtgctcccccc

SEQ ID NO: 7115 - DNA, 1400 bp, Rattus norvegicus
  misc_feature (1181)..(1181): n is a, c, g, or t
ggatcagaagaaactgcaccggaagtgcgcctaccagatcctagtgcaggtgaaggaagtcctctgcaagctgagcacgctggtggagacaacgctgaaagagacagagaagattacagtgtgtggggacacccatggccagttttatgacctcctcaacatatttgagctcaacggtttaccctcagagaccaacccctatatatttaacggcgactttgtggaccgtggttccttctccgttgaagtgatcctcaccctctttggcttcaagctcctgtatccagatcattttcatctacttcgaggcaaccacgagacggacaacatgaaccagatctatggcttcgagggcgaggtgaaggccaagtacacagcccaaatgtatgagctcttcagcgaggtgttcgagtggcttccgctggcacagtgtatcaatggcaaagtgctgatcatgcatggaggcctattcagcgaagatggtgtcactctggatgacatccggaagattgagcggaatcggcagcscccagactcargtcccatgtgtgacctgctgtggtcagatccccagccacagaatgggcgctccgtcagcaagcgtggtgtgagttgtcagtttgggcccgatgtcaccaaggccttcctggaggagaatcaactggactacatcatccgcagccatgaagtcaaagctgagggctacgaggtggcccatggtggccgctgtgtcaccgtcttctctgcccccaattattgtgaccagatgggaaacaaagcctcctacatccacctccagggttccgacctrmrgccccaswtccaccaattmacagcagtgcctcacccmaamgtcaagcccatggcatacgccaacacgctgstgcagctaggaatgatgtgaggcagtctacagcagtaaccagggcctgcacagctggagggccccgccttcggcytgmtgccccgccycagggcagcgttgsaccccytttwaytttgtaaagttkgtattkattcccctttaggttgcagagggggtgrggrcagygtggggcagcagabgmcaggctyhtggtcagagaaassagbagtygaaatygggggtagggcmcagcyygggcatytgragraaggccaacytgggtrgggstaggrccgaraggaggtchtgccccbtngcstgcatggctcytcccytggymwdsmaataggaccytgccataggaagaccccaaaagagggtcatcagggagrchtcctchtgstagcctyagggtggggcgakgytgggscccahcccccagctattttatgtwctgtaattmaatatgttamamtaaaawaaarwmawtwytgtawgtcaaammwmawmwmaaammmaaaaaaaaaaaaaaaaa

SEQ ID NO: 7116 - DNA, 600 bp, Rattus norvegicus
tctttctactgggcttacccacccattaatgacaggattagtgtttactgtagttataaaacaaaagattcctgcctttgtactcccaaccagatgttacaaaaagactgtcatcaatccccttgataaaaactagagtaaaggagttgacatgaaatatctctagtgttttcactacttatcgaaaatccagaccctacaaacacccatatgggttttgggaaggagttagatggtactttaaaaaaacaaaaatcacaggatgggtgatttcagaattcaatcaatgtattattttgcttcagatcttcaatacattttgagatcaactgaaatgcagaggtaaactgaagtgctttgtgtaccaatatttgatgagagcatgcttttaatgcatccaaggaagcaacaatgtatcttagaagagtctagtgtaatcacaaggcacaagtctctgcaaaaaatcaagaagaaggagtgtgatgaagttgaccactatgtacatttaagtgaaaagtcttgctaccttttcacccttgaatatccgcagatgtgtctgcacgtcatcgtgtaaaaataaaaataaaaaaaaaaaaaaaa

SEQ ID NO: 7117 - DNA, 1400 bp, Rattus norvegicus
gaagtacccctcggccaaatggttaacacaccaatgcttttaaaattgtacccaaaccaggaaatgaaattcacaggtgaactgcagtcaaacctaagttgttgccacaaaccactgatgaaactcagtgcttcagccaaatcccagcatttgtcagccgtgcaggtgctgagagggtggagactgggaggggcgacacctagtccatggcagcgggatgtcagggagactcgacaactgctcccgcactctttgctccaggacatagctctcccacccggtgtcaacaccctccaggctttccagctgtcctctgattgctgaggttcctgttagggacccaggtactaaacctgggcgggtggatttgtcggcctcatccattgtggctcgagaccggccttcgggagtcggctctcagtctaaacatcctttctcattcatagtgtgtcacccgaagatgcttgtttgtgacattgtgacagtctgwcakractgtcccrgtrcctttgtgatgacttaaactacactgaggagcttgccaacttgtgaatgcccttcagagggtctggcagtcacagckrkkccagagcccgagggmmgaagattccggagcccggagtttgaggccaacctaggcaacataatgggaccctctcattattattcctccataacaatcccctcgagaccctcgatttgaatgttatataggtcttcaggataaatctgcttattttcacagcacaacacaaaaaaaatttacttttgaaatcttagagagattcctacagatcttagcatggagctgttcctgtagtgaaaggggggttattaracatgaggcttcagaactcatggggcagggttgttggagactaccgtgagctgagggggcacactgaagcgatgggatggccagaagcrcacctgagcaagcggggcagcattctctgtcagaccctaacatggctacacggggatgtggcagagagatctgtgysgyykgctgccagsgctggttaggcctgaagctccaagctgcagaggtctcattgccttcccaggatccaaattaagactgcccactcaatgagaatgtcacttgcgtatgtacamccatgtttgctgagtaacctgttccaccgttgaggctgtctgaagtgtattgtatgaggtatcaagaacgagtcattggcccatttggcaaatagttgcttatgtagcaattgtcatggactaatcataaaatattttgcacaaaatttcaatgttraacttgcactcactgttgttaaattataaatcacagcttctagttaggccaaaatatttacatactctactaatcttcaaaataaatgtatcccrkmmytyawwrwraaaaaaaaaaaaaaaaa

SEQ ID NO: 7118 - DNA, 600 bp, Rattus norvegicus
ccaactataccactctaccctccagtatcatggaccactctatatctcctttcatgaggaaagggatgcctggagactggaagaactactttactgtggcacaaagtgaggattttgatgaagactaccggaggaagatggcagggagcaatattaccttccgcacagagatctgagagcagtgaggaagagagaagccctagatttcctgactatatgctttagctatttgagcttcattcctgagttttgtatgtcctgtgatactatttcatcaaaatgtaatcagaccttccacactaggtgattatccttattgatacctactatacaaccatgcacttttactgcacttacgcaaataacagataccttcactagcctgtaattgtcttgtttcacggcaaatctcatgaatagagagacacacaaaacaggttagacataagaaagtaaataagaaaagccaaacgaatgagaagtgagcactgtgcattaaccaaaggctatttaattttcttaacaattgtcttcatctgttctctttaacgaaatacctaatttgtttataaagaataaaaatgatttcttatgcaaaac

SEQ ID NO: 7119 - DNA, 1400 bp, Rattus norvegicus
agtacaaagaccttctttcatggactactttgataagcaggacttcaagaacaagagtcatgaaaattgtgatcagagcatgcgtgagccatgccctatgtcaaacaatgtttttcctgacaactggagagttcctcaagatggagactttgattttttaaaaaatctaagtttagaagaactacagatgcggctaaaagcactggaccccatgatggaacgagaaatagaagaactgcatcaaagatacagtgcgaaamgacagcccatcctggatgccatggatgccaaaaagaggaggcagcakawtttytgaccagatcccttctgtytctgkgtgaccagagaccaaggamcacaggaattgaaggaactgtamtactttttaatccctaaaatgtmtactctacaatttttttagaagtcaaaaatgatggtacacacctagataaatttcccaaaagcaaactttgcagttgtgtcctcgatgacgtcggtttaaacggatgagaacaatacacatgcgcacctctctctctgccagccgttacctgcaacagaaccaacctgcgactgaagccgcctgtggaggcggagtccagcgccattgctttgggctcacagcactgcagggcttgtgttgccctgatcttccttcctgtggagaagcctatttattgaccccctaggtagacttatttatttatgcagctttttttttttggaggggggggttctaaaaaaagatcaggatagttttggtgaatgtccagacacatcacagattgtaacactcaaccaaattgtacactaagcagggagctatgggtgtattcctttatctccagtaaaaataaagccataatgtccacatggaccagacaattttataagtgttaattcttgattttgatattggtacaaataaaactatatatacataggtcaaaaagagttatacagtgtaaaaccaaagaaatcaatgaatttttgcaccaaaaaagtgtgggaaatatttttaaagacatgaaacccaagaagacagtgcagtcgtwaatgtttcctttattggtctgtagtaacttcaagttcattctatgggacatgcttctgtcacagggcttttgttgamttcattcwwctcctgggaattggtaagcatcatgtatctgacaataaagcagtaatatgtttatactaaaactgtgtgtccttagggcctaaaaaatgaaagcattagaaaaaggctcctttctgagaagcaattagcatttgtgtaattgacctgggaccagtcatttcctgcactacacagggccattttgatatcgtgttcttttatgtgttaattactatgtgtgcakcacaaagacaaataaattccactgwgccacccaaaa

SEQ ID NO: 7120 - DNA, 1400 bp, Rattus norvegicus
ctgtaccacagcgcggcgctcatgattggcctccacggatgcattgtggttggggctacatttgctttgcggagcaaattttcagccagccagttttgggacgactgcaggaaatacaacgccactgtcattcagtacatcggtgaactgcttcggtacctctgcaacacgccccagaaaccaaatgaccgggaccacaaagtgaaaatagcactaggaaatggcttacgaggagatgtgtggagagagttcatcaagagatttggggacattcacatttatgagttctacgcttccactgaaggcaacattggatttatgaactatccaagaaaaatcggagctgttggaagagaaaattacctacaaaaaaaagttgtaaggcacgagctgatcaagtatgacgtggagaaggatgagcctgtccgtgatgcaaatggatattgcatcaaagtccccaaaggagaggttggactcttgatttgcaaaatcacagagctcacaccattttttggctatgctggaggaaagacccagacagagaagaaaaagctcagagatgtttttaagaaaggagacgtctacttcaacagtggcgatctcctgatgatcgaccgtgaaaatttcatctattttcacgacagagttggagacaccttccggtggaaaggagagaatgtagctaccacggaagtcgctgacattgtgggactggtagattttgttgaagaagtgaatgtttacggtgtgcccgtgccaggtcatgaaggtcgcatcgggatggcctcgatcaagatgaaagaaaactacgagttcaatggaaagaaactctttcagcacatctcggagtacctgcccagttactcgaggcctcggttcctgagaatacaagataccattgagatcaccgggacttttaaacaccgcaaagtgaccctgatgraaragggctttamcmcmtcagtcatcmaagatacyttgkatttcatggatgacacagaaaaaacatacgtgcccatgactgaggacatttataatgccataattgataagactctgaagctctgaatgttgcstggctcctaacacttccagaaagaaacvcaataggcctagcawagccccttcacatgtgtaatccaactttaacttgattaaaggttataggtgtgatttttcctaggraattattcatttaaaggacaattgtttgtttgtttgtttgttttttattaattacaccagaacgtttgcaagtaaaaagatttaaagtcacttatttttcaatgtgcacctgccatttgtccttgcaaacttagcttcttggagagagggycttatttttttaaagacataataaactatgtaaacmctammmwrwraaaaaaaaaaaaaaaaaa

SEQ ID NO: 7121 - DNA, 1400 bp, Rattus norvegicus
cagctgctgaaaaagcacaaatccagcggaggcagcctcctgctgcacgcgtcggaggccgagggctcgtcctgagcgcggcccgcaccgcggggatcccgaccgcgccccacagccggtcccgcggtccccccccgcaccccggctgctcgcccggctttactattttctaaratgtacatatctatttttttaacctaraaattttggcggggagggtgggggtcgtcggtaggacggcgcggtgatggcraggaaaggagcccgccaagtgcactgctcaaaaaaccccgcagccgaacccgcatccccgcggcttcccaggacccttcccacccgcgamgtcaggcgtccccggtccaggctcggtcctttgctttgcgttccctgagcaccgggccgtgtttccgaaaggtcgtcggccaccgcctggtgggaatctcagagccaccgagggcagctgccaccaagggagaaagggacgctacccctccccccaactgctctgccgaccaagtaacctgttgacggctctctatgtaaataaatcgtgagtcacactgactagaagttactttattgtgaatatttaaaatgtaaaaggctttttggaatttggtataaagagatgaactgtactctcgttgatttaaggtattcacaccacttggccgcctttcatattaacttgaaaagcttagaaaaacgacgtcatcgccctactcagacgcctcccgactcactcctctttcggctctgcttctttcctaaccgcttttctccttcaccaattcctgcagggccccaggcagccccaggcccccaccccggtccagctccaagacttgcagtctgagatcccgggacccacgagcttctcacaccagcctttgggttcccttccgaatttgcacagtcgtttgttgctatttattagtgattaaaaaaagatatcggggaggaaaggactacagtaccttgtatttaatttaactcctttctgataaaaatgcgtgttaaaagtagatggtgggaattgttacaagcgctctggtcagaacataaacgttccatttaattgctgtaattgaattcgaagtgttttgtatcataagaatactatagactatgtaaattgttttcttttaagctaataacggtgatatatcagcctctttaacacttattaatttatatgaggaattcggtttgtaaagaaaaggcagcccctttgcgagaaccatgaaatgtaatgcactttctgtttcaaaggataaatcgaattaaaaacagcaacaaaaaatagtttgaagacgtctgttgccttaagggaacatgtacaggttacctggcctcatcagagatctcaaataaagtcaagagcacatttaaaaaaaaaa

SEQ ID NO: 7122 - DNA, 600 bp, Rattus norvegicus
cctgctatcacagccatggtgaccaccagctccaatagccccgggaagtggagtcagttcttcaaccctatctgttgcttcctgctcttcaacgtcatggattggctgggccggagcctgacttcctacttcctgtggccagatgaggacagccagctgctgcccctgctggtgtgcctgcgcttcctgttcgtgcccctcttcatgctgtgtcatgtgccccagcgtgcccggctgcccatcatcttctggcaggatgcctacttcatcacattcatgctgctcttcgccatttccaacggctacttcgtgtctctcaccatgtgtctggcacccaggcaggtgctgccgcatgagagggaggtggccggagccctcatgaccttcttcctggccctgggactctcctgcggagcctctctctccttcctctttaaggctttactctgaggaccaccgcactccacagtcctccctcactgctgcttctggagctggacattcccggggaaggacctctgctataccgggtctcttggtctgtgggtgccaggagggggcagaaactaccttggctggtagccacattgcatatggtga

SEQ ID NO: 7123 - DNA, 600 bp, Rattus norvegicus
  misc_feature (208)..(209): n is a, c, g, or t
  misc_feature (410)..(414): n is a, c, g, or t
aaattccatttttattgacttcagagacctgaatcttgtgttgtttctatttcatctccaaagcccatatcatgccagctcctaaaaataatcattaaactgtctgcattttcattcccccattttagtcttgacaagagataaggaacccaactcacctatgctcaaagataccaacccaagaaaacagctcacagccatatctgcnnaaaggggattcacggggaagcacagcggcaaaacttcgatcaacttagtaaatctgattcatcagctagtaaggcaacaaccaggataccacgttcttctggagaccaagagctatatgatgcaatgactcacagtgtacaaaccatgttagggtatcagtaaattccccactccaccactccattcaaccttacttagcnnnnnacgagggaaaaagcaatcctttataccctgctgctacagctgtaattccattgcctgtgagttgaagtaaaaaccctcccccgtctccggagcgcggcatccagtgcacacaaagccacagcagctgcagcctgagcccgtcctgcttcagatcactcctgcgctgaggactgcgcgcctcgtgcc

SEQ ID NO: 7124 - DNA, 600 bp, Rattus norvegicus
ttgaccttccttagagccactgactctacacctgtgacttccgagtcatcccatcgacccattagkcmttgrgaagttcacagctctcctttcagaagacagaccgcttyycggtaaggacgcagcgtgccctaccgtaytcccccgtgagtgtagccycttattattcagatgctgtatttcggcatcagttggagactgtccacattcaagttgcaaggacattcatamtyatgagcagttcgtcatcccggggcttmtcrtacgmacgctctccgtcaaatcctgccaaatcstttatcgrgattttttktktktytktttyttttcccyctgtccgaatgagcatgaataamcaagtgagaaggamccmaggctatttttgtggtcarccgaggatgctgccwmrwgcysccctgtgtggctgtgtggatgtggagaacatgtgggcactccmcggatgawaccccctttthttgacatttttwaacmagcmcaaatkatatttgtaaaaaaaaagtttaatkttatttmttatggctmrtdmmstmttttmwacstgaaaaaawaaaaaaaaaaaaaaaaaaaactctagcggcc

SEQ ID NO: 7125 - DNA, 1400 bp, Rattus norvegicus
tggctatgctctacggcacgggccccttgtccagcatcctcgtgacgcgctttggctgtcgcccagtgatgctggctggtggactgctggcttcagcgggcatgattctggcttcctttgcctcgcgcctcctggagctgtacctgacggctggggtactcacaggcctgggcctggctctcaacttccagccgtcgctcatcatgctggggctctacttcgagcggcgacggcccctggccaacgggctggcagcagcaggcagcccggtgtttctgtccacgctgtcgcctctcggccagctgctgggggagcgctttggctggcgcggcggcttcctgctgtttggcggtctcctgctgcactgttgcgcctgtggggctgtcatgcgtccgccccctggaccccagccgcgcccagaccctgcgccccccggtggccgggctcgccacaggcagctgctggacttggcagtgtgcactgaccgcactttcatggtatacatggttaccaagttcctgatggcgctcgggctctttgtgccggctatcctgctggtgaactacgccaaggacgcgggtgtgcctgatgccgaggccgccttcttgttgtctatcgtgggcttcgtggacatcgtggcacggccagcgtgtggtgctttggcgggcctggggcgactgagaccccacgtcccctatctcttcagcctggccttgttggccaatgggctcacggacctgattagcgctcgtgcgcgctcctacggcacccttgtggctttctgcatcgccttcggcctctcctatggcatggtgggcgcgctgcaatttgaggtgctcatggcaaccgtgggtgcaccccgcttccctagtgcattgggcctagtgctgctcgtggaggccgtggctgtgctcataggaccgccctctgccggccgcctggtggatgctctgaagaactatgaaatcatcttctaccttgctggctctgaagtggccttggcaggagtcttcatggcagttaccacctattgctgcctgcgctgctctaagaacatctcatcaggtcgatctgctgagggaggagccagcgacccagaggatgtggaggctgagagggactctgagccaatgcctgccagcactgaggagccgggcagccttgaagctctggaggtgctgagcccccgggctgggtccccagaacaagaaccagaggaggaggcagtgcctgagctggatcacgagtccataggtggccatgaggcacgaggccagaaggcatgaaactgtggcttcctctctgagggcctggtacatggggagccagcctggggtggtctcttgggaacccaatatgttagaccctgttcacagtgaataaagggcccctaaaagatg

SEQ ID NO: 7126 - DNA, 600 bp, Rattus norvegicus
acccagytytgctcagraaaayymgycrgtgccactccttagagccagraragggcgccccaaacgccaartyccgggccararatkgrgaataggccgrcgcacgcgcaatcgtgtactcgtgtgtctgcctagatcctgtgtgctctytytccagtkaaraggaaratsstcacgcctmcgtgtgragtscgtggacgcttgtgtgtggtatggcatraggacttytcagtagttgtatgcatggtaacagcacctgcactytggctcccagytaggcctccagatctctttgcactgtatttattaaaactytgggcagraggcccctgggrgcaggramwmmaarrwrmawwaaaggctgttcattttcagtagaatccgggtgtttcccggtgttcagggcctggaagcagaggtcgcgcacccctgccagaccgtttggagtgggcgcagccacccagcaaagttgcagtgacttcaccagcggctaattgggagttgccagtccctgcgtgcctttgggaaaaccggcctccccgttcccagagcactccctggacatttacataaaaccctctgcccctgccaaaaaaaaaa

SEQ ID NO: 7127 - DNA, 1400 bp, Rattus norvegicus
ctttaaccgaggtcctgcctacggcctgtctgctgaggtaaagaacaagctggcccagaaatacgaccaccagcgtgagcaggagctgagagagtggatcgaaggggtgacaggccgccgcatcgggagcaacttcatggatggcctcaaggacgggatcattctttgcgaatttatcaacaagctccagccgggatctgtgaagaaggtcaatgagtcaacccagaactggcaccagctggagaacataggaaatttcatcaaagccattaccragtatggggtgraamcccacgacatttttgaggcmaatgacctgtttgaaaacaccaatcatacacaagttcagtctactctcttggctctggccagcatggcmaagacaaaaggaaacaaagtcaatgtgggggtcaaatatgcagagaaacaagagcggagatttgagcctgagaagctgagagaaggcaggaacatcattggcctacagatgggcaccaataagtttgccagtcagcagggcatgacagcctatggtacccggcgtcacctctatgatcccaaactgggtacagatcaacccctggatcaggcaactatcagtctacagatgggtaccaacaagggcgccagccaggctggcatgactgcaccgggcaccaagcggcagatctttgagccaggtctgggcatggaacactgtgacacgctcaacgtcagcttgcagatgggcagcaacaagggggcctcacagaggggcatgacggtgtatgggctgccccgccaggtgtatgatcccaagtactgcctgaccccggaatatccagagctggacgagcccacccacaatcaccacccacacaastactataactctgcctaggggccccmaaggggctggctgctgctcttggctggacccagytggcccagccaaccccatytcstgcatggcgtcmtccagccccytggcacctgcytatagggttacagtttggggagatcagsccgagggggscagtrggaagaaggggbccccctcatcmctggagctttcccasggccsarcatagaattgggtgtccccaacaacacccaaaggargcactgagtaaagccatttcagcttccccctttaytccctcacaagtaagtacctcccagamccrgaaacccttcaagcgaassccccagaacccaggcttggcctgccccmkgcmcsvkkcytgmarygggagcggaatgcatgcctggaaatgcagtggacacasacgcagtttggttttgcagtgactggcgttygtggatgtgacagcagcgtttgtaacttgaacacyttytttttytwtttcactggrgcacaataaatggctgtgrcvtcvwhddwaaaaaaaaaaaaaaaa

SEQ ID NO: 7128 - DNA, 600 bp, Rattus norvegicus
tgctatggcaaaaatcattttgaggcacctcatcgagaccccagtgcgttatcaggaagagtttgaagctcgaggcttagaagactgcagactggatcatgctctatacgcactgcccgggccaaccatcgaggacctgaggaaagccagaggcacaccaaaggctcttgcagaggactcagactccgccgrgacgccacctggagamggcaarkcccgtttccagatcttgctggatgtggtccagttcctgcccgaggacatcatcatccagaccttcgagggctggctgctgatcaaggcacagcacggaaccagaatggacgaacacgggtttatatcacggagtttcaccagacagtacaaactgccagatggagtcgaaaccaaagatttgtctgccatcctctgtcatgatggaatcttggtggtggaagtaaaggatccattagagaccaagtgaaaactttttgattcctgttcatgccataggagaaagaagaaagcccgggaattcttaaactcttgagagagactgctgtaacttgtatgaggattaaaaatgtatccmcmrwwmmwrrwaaaaaaaaaaaaaaaaaa

SEQ ID NO: 7129 - DNA, 600 bp, Rattus norvegicus
  misc_feature (581)..(581): n is a, c, g, or t
gggtattgcaccctttatttctctagctaccctggacccatgctgcagacacacatgggactttccttccctctcctgctcacagacccaggcacattcccgtagtccctggccacccctgctctctgctctctytgcacactctgaacacacctccattttcatacggggtctctttccggtcttgccacccccataccgttactctccttctcatggtggcactcctgtgccctgccttctctattttctctgacacttagcacacccctcccacactcgtggccctgaactctcttccaaatgtttcactcsttccctcccctaggcctacctccagtagttacaagcaggggcaagatctgttattctggtccatttaatgatgtaactttcagttattactttagctttaagaggaaataaaagggttcagatttgaaatggggtggtacgggtgggggatgccaacaaaagaacactgattgtaatgtgagaaaagtgtatttttgtattttaataaatattgttcaatttttaattcaatgtccccaaagggttaaattgaataagattctganccaaaaaaaaaaaaaaaaa

SEQ ID NO: 7130 - DNA, 600 bp, Rattus norvegicus
taattctcctcttaccctcagatgaagcacaaggaggtcttatctgcccctgccatccagtgacyctggctgggtctgtgtccccatctgtgggtccttccagggcctgagatcaatgtctcttctagtcctctcttctgggcctccctcccmtagtttcctggtccctctcctcagcttggtgctctcacttcttgaaagctctaggccccgcaggctccctgttgactcctggcattccaaggccagctgagaaagagcaggaggtggaagcaggcagcccaggctgcagatgtgaggggtgcagggccgggcccagagagggctcagcctagaggcttccaatcttggattcttctgcctgtggtcatctgtctgtccatcagcccargtcagagcastcagwgssgmaaagtactggagcccccccagagctcagcttcccctcagcctgggtgacatcacagcatttcagtgtcggtcacattttaaactgatcagcctttgtacaatgttttttaaatcatttctaaataaaacagaaatacagtgwmwwwwwmmmwrrrrwrwaggaacaaagaccagggcatatgtgtgccc

SEQ ID NO: 7131 - DNA, 600 bp, Rattus norvegicus
tgccaaacccggacactgacctctactggttcactctgtaccagtttttcctggcctttgcccttccgtttgtggtcattaccgccgcatacgtgaaaatactacagcgcatgacgtcttcggtggccccagcctcccaacgcagcatccggcttcggacaaagagggtgacccgcacggccattgccatctgtctggtcttctttgtgtgctgggcaccctactatgtgctgcagctgacccarctgtccatcagccgcccgaccctcacgtttgtctacttgtacaacgcggccatcagcttgggctatgctaacagctgcctgaacccctttgtgtacatagtgctctgtgagacctttcgaaaacgcttggtgttgtcagtgaagcctgcagcccaggggcagctccgcacggtcagcaacgctcagacagctgatgaggagaggacagaaagcaaaggcacctgacaattccccagtcgcctccaagtcaggccaccccatcaaaccgtggggagagatactgagattaaacccaaggctaccctgggagaatgcagaggctggaggctgggggcttgtagcaaccacattccac

SEQ ID NO: 7132 - DNA, 600 bp, Rattus norvegicus
gtccaaggtcaagtagctgcttatctgccggccagtgctgctctgggtagaaactggtcactgtctccatcgaggacgccgcggtgagagcaaggagtcctccttcaggacagagggttatctcttgcatctgggaaagctccctgcgcactgagcctgctctgtaatctgcactcaactgtttgagccagttcaaggccaagagctaaggacccaaggctactggtatttcttaactaagtttagtttgtttactataaggaagcaaatttatttacctttaactcctgtgagtagggtggggagccctttccyattctggcatctcccaggctcagggaggccaaggtgacaaaaggagaagtagaggtcgctggtcaggtgtgttgattgtaccgaaggctcagggtattggtgtcactgtacactacagtggatctgccagtgtgaagcaggggctctctaccaggacttcgacttttcattccctgccaccatgtcacctgatgtcccttactcttaggaaattctatgcatggaatggaaatgcatccgaatcttaagttgttacataaaaaaatctagtaaaacatagtagga

SEQ ID NO: 7133 - DNA, 600 bp, Rattus norvegicus
tcagaagatccattcagatcccagaagaagatcaatgtcctcattccaagaaactctgtcctgttgacatgctgtgggataacaccaaatgtaaatgtgttttacaagatgagaatccactgcctgggacagaagaccactcttacctccaggaacccgctctctgtggaccacacatgatgtttgatgaagatcgctgcgagtgtgtctgtaaagcaccatgtcctggagatctcattcagcacccggaaaactgcagttgctttgaatgcaaagaaagtctggaaagctgttgccaaaagcacaagatgtttcaccctgacacctgcagatcaatggtcttttcactgtccccttaatttggtttactggtgacatttaaaggacatactaacctgatttattggggctcttttctctcagggcccaagcacactcttaaaggaacacagacgtttggcctctaagaaatacatggaagtattatagagtgatgattaaattgtcttcttgtttcaaacagggtctcatgattacagacccgtattgccatgcctgccgtcatgctatcatgagcggaaaagaatcactggcatttaa

SEQ ID NO: 7134 - DNA, 600 bp, Rattus norvegicus
cyttccgcctgcagaaacctcttcggcccggtcaatcatgaagawctaacccgggacttggagaagcactgccgagatatggaakaagcgagccagcgcaagtggaatttcgactttcagaatcataagcccytggagggcagatacgagtggcaksaggtggagaggggcagcttgcccgagttctactacagacccccgcgcccccccaagagcgcctgcaaggtgccggcgcaggagagcttggatgtcagcgggagccgccaggcggtgccttcaattgggtctcaggcaaactctgaggaccggcatttggtggaccaaatgcctgactcgtcagacagtccggctgggttagcggagcagtgtccarggatgaggaagcgacctgcggcagaagatkmttcttygsaaaacaaaakgkcyrdcwgmrcmgwagmwmmtstttsmkacgrttcccygwwygctkgcmctgtggagcagacgcccaagaagcccggccttcgacgccagacgtaaacagctccgaattaagaataattccttgtttattagatacatcactgctttatgaagcaaggaagacatacatgaaaaaaa

SEQ ID NO: 7135 - DNA, 600 bp, Rattus norvegicus
ctgctgatctgtaggcttggaggcaaaccttgaccctatggactggagatgacccagatatttatttttttaaaagtwtttwktwktktcttccctycagcywtatyctgcktgtaagtsyccagtccctcaccctttwctgtgtccmwccatwcctttccctmmmytsscmswskccmtsmttytcctccccgaacctgatcatagktkgsctttacccttgtctccaaactctkatgtgaaamaraaaaaaaaamammmmwmamcgcagaaaaatattttttttcgctagcttkggcaatttaatcggggatttcaggtaaccagagcaaaagawtttaaacaaargttaaaatgtktcaactgamcactaactagttaatagtgctggawtatcacagaatttaaactcaaggaagtrgggtytwgattttttttaatctttgtktttgaaagggkgagcckgggttttatgatwgywgctgtdgwtwwkwtttttatttagaatgacaaaasaggtaataattattaaacttttkatgccggswwmwamasskytataaatttttgacagtgtttcacatgtgcagaggatccttt

SEQ ID NO: 7136 - DNA, 1400 bp, Rattus norvegicus
gcggacacccggagctcgtgggcagcctgaaaagtggggagaagtggcagaccagagctcggggcacaggcctgcaggagcccagctcaagacccctaaccaaggccagaccaaggccagacctgggcaggcacctccatcacagcgccttctgcagtcagaacttgttgctgtccacaggggaaagtaaaacatgacggagacagatggcttctacagaagtagggaagtgttggatccagccgagcagtacaagatggaccacaagaggagaggaactgccctaatcttcaatcacgagaggttcttctggcacctagcactcccagagaggcggggcaccaacgcagacagggacaaccygactcgaaggttctcagagctaggatttgaagtgaaatgctttaacgacctccgggcagaagaactactgctcaagattcacgargtgtcgacttccagccacgtagatgccgattgcttcctgtgtgtcttcctgagccacggggaaggcaaccacatttacgcatacgatgccaaaattgaaattcagaccttgactggcttgktcaaaggagacaagtgtcagagcctggttggaaaacccaagatattcatcatccaggcctgtcggggcagccagcatgacgtgcccktggttcctctggacgtggtggatcatcagacagacaagctggacgacaacgtgacccaggtggatgctgcctcggtgtacactctgsctgcgggggcggacttcctcatgtgttactctgttgcagaagggtattactctcaccgagagactgtgaacggctcctggtacattcaggatttgtscgagatgctggccaggcacggcagttccctggagttcaccgagctgctcacgctggtgaacaggaaggtctctcagcgccgtgtggatttctgcaaagacccargtgcaattggcaagaagcaggttccctgctttgcctcaatgctgaccaaaaagctgcatttctgtcccaaacctagtaagtagggccgtccgacttgctacaaatgtttcacacacatttcccttctacacagaggccagctggccaaagactccgcccaccaacggacactgtttgaatttttaaggtgctacagaaaagtaatgttttgcctttgttattattttcaatcatgttggggatggggaaggctaaagaaatctaggaaattactgtgcgcaaatgcccaatacatttattatgtttctggtaaatggcaagattactaagaataccaactactttgccttaccttttgtgacactatttatataggctcattgtataatgtttttaaagatctttgaaactcaagaatgagatcgttttctcctaataaaaatgtctaaaacccgg

SEQ ID NO: 7137 - DNA, 1400 bp, Rattus norvegicus
gtgtgtacacagcatgtcagaattccagaacgaggatggagaagtggatgaccctgtgctggaaggtgtggagattgcctgcattgcatggttcaccggtgagctggccatccggctggttgctgctccatcacaaaagaagttctggaaaaaccctctgaacatcattgactttgtctccatcattcccttctatgccacgttggctgtggacaccaaggaagaagagagtgaggacattgagaacatgggcaaggtggtccagatcctccggctcatgaggattttccgcatcctgaagctcgcccggcattccgtagggcttcgttctcttggggccacgctgaggcacagttaccacgaagtggggctactgcttctcttcctctctgtgggtatctccattttctctgtgcttatttactctgtggagaaagatgaactcgcgtccagtctcactagcatccccatctgctggtggtgggccactatcagtatgaccacagtgggctatggagacacccacccagtcaccttagctgggaaaatcattgcgagcacctgcattatctgtggcatcttagtggtagcccttcccatcaccatcatcttcaacaagttttccaagtactaccagaagcagaaggacatggatgtggaccagtgcagcgaggacccaccggagaagtgccacgagctaccttactttaacattagggacgtttatgcacagcaagtacacgccttcatcaccagtctgtcttccattggcatcgtggtcagcgatcctgactccacagatgcctcaagtgtcgaagacaacgaggatgcttacaacaccgcatccctggagaactgtactgcaaaatgagcaggggcatttgcacggacagctcatgtcccttcctcacgttaggttaacacagctttataaacctcartgggtttgttcaaatcaatcatttaattctcagggtgtaccttttagccatagttggacattcattgccgaattctgaaatgatagaattatctttatttttctcagtgagatcaattaaaatgccttgttctgaaatttwttttttaacaagagagagttgtaatacggttttttgggggraaaatgtmaatgatattgggaaggatttattgctacggcttacgcatcattctgtatctgccattcactcacattgagctaactataaattactgatgttagagcagaggcccagccgaccgaagacgacatgcatgtaagatctacaacatgagacaatgcatgtaaatccatgttcatgttccagacacgggaattaggagcccahywmrykyctaattcggtatggaraaaaaaaaaaaaaaaaaaaaaaaaaaaaaaaaaaaaaaaaaaaaaa

SEQ ID NO: 7138 - DNA, 600 bp, Rattus norvegicus
gatagtccaggctctgtctaactcagttggagagattcacatgaagaccatgcctgcagccatgttcaggctcctcacaggccaggagacaccgctgtacatytaggtacaccctgcctcgccaaggagcagggactccaggcagacccacctgggcccagaggagccagargccaggacaaagccctgacccctgaccccgcagcccaaccaagaactytggctytcccccctccccacccccaagggtgtgtccttgtcacctaggttttttttttgtttgtttgkttggttggtttgggtttttttttgtttgtttgtttgttttattttgttttgggttttgcymwmrwraraaaarrraaaaaaaaaagctatgtccttactgaaggggagtcacaggacaatcctttgtaaaacttaccagtcttctgccatattttcattgcggctgatgaagggtgctcacaggtagttctatgtgtggtgtgctgtgtctctactccctgaggctaatgtgaatgtggcgcccaacccgcccgcacatctgtgtggctgtgaagggagccctctgtgatgcagctgcagccttttctgccc

SEQ ID NO: 7139 - DNA, 600 bp, Rattus norvegicus
gagcgctgcggggccctgagcatagggsacmgkgtcactgccatcaacggraccakyctggtggggctgtcgctggccgcctgccaggccgctgtgcgcgaggtacggcgacactcatccgtgacgctgagtatcatccattgcccaccartcaccacggmcgtyatccaccggccccamgtgskcgarcagctgggcttctgtgtggagaacggcattatttscagcctgctgcgtgggaktscgsytgagcktgktgragtccgcgttggacaccgcatcattgaggtcaatgggcagagtgtggtggccatgccccacgcgcgcattatccagctgctcacagagacaagagaaatccacatcaagaccatgccagctgccacctaccgactgctcacgggacaggaacagccagtatacctgtgatcgccccgcccacatgtgccttcgccccgcccacgtgtgccttcgccccgccaycgtcacccctcggccggcggggaccaaagaatcctcagtcttgtgctattttctaatgtaaaaaatacttttaaagrttwattaaatggtcagaagcttgaaaaaaaaaaaaaaaaa

SEQ ID NO: 7140 - DNA, 1400 bp, Rattus norvegicus
gccgtcttcggtgctgcggagccctgcaatgggtacactgggcagtgatttcctgtctagtctcccactacatgagtacccacctgccttcccgctgggggctgacatccaaggtttagatttattttctttccttcagactgagagtcagcactacagcccttcagttatcacttcactagatgagcaggacacccttggccacttcttccaattccggggaacccctccccacttcctgggcccactggcccccacattggggagctctcaccgcagcgccactccagcacccgctcctggccgtgtcagcagcattgtggctcctgggagttccttgagggaagsrcrwggaggacccctgccttccggtccctctttgactggctgtcggtcagacgtcatttccttggactgagttatywsgakkgcaaaatcaatttctactggccctagcactgagcagatacattgtgggttcccaacccctggctgctctgatccctcaggggtcattggtcaaaggccaggccagatcttcatggacacctgcttttggccttatcactgcctaacaaggccagtactcaaagggttaacatttaaccttttgaaaaaggacattggggtctgtttttggaagtgttctttgatgtagcacattcctttgggtagggtaacctaggcagtgggaggcagatggaagggtaggggttcctcacccttcaccagatcttcagcctcttggggaaagggcagtttcctgcccctcccccaggactcctttccgtacccaaacccaaacatctgttctttttcgtccattcccttctctttggccatactgtcaggtgrmagrkmagrgatggacrgacaactctattttgggttgcagatttcttytttgyacataaataagaaaacyccaamttmwmmaaarawramwwmmcttgccttttacttcccmgtgtgmctcgmrgaggaaacamggccttagttgtgatccccaggggctcgggaacagggcgtggcctgcmtactgcctgggtctctmtatttmtmtakttaagttcacaatgtttttatgctaaacagtcaagggcctaagsttstagtgacctgtgctcaggcytagattgttcttgcaccttttatgggacatgggggctstgttmtccttcccaatactcagcgccccttcagggccaaagccctgtgatgtgatttcactttttatccccagagctgtagcagagttctsgcctacaataaaggttgtgaatgttcwrwrarmrwmawrrarrrrararawrwwrwammwwrwtttccagacccatggtttgtggggcagagggtccatgttctatcctttcacttagaaaaaaaaaaaaaaaaaaaaa

SEQ ID NO: 7141 - DNA, 1400 bp, Rattus norvegicus
tgccaccttccccagatgatgtgaagcgccgggtcaagtctcccggtggtcctggcagtcatgtgcgccagaaggcagtgcgtaggccgagctccatgtacagcaccggtggcaaacggaaagacaatccaattgtggatgaactcgtctttcgtgttggcagtcgtggaagggagaaaggtgaattcaccaatttacacccgctgtccgctgctagcagtggccgaatagtggtagcagacagcaacaaccaatgtattcaggttttctccaatgagggccagttcaagttccgatttggagtccgtgggcgctcgcctgggcaactacagcgtcctacgggtgtggcagtggacaccaatggagacattattgtggcagactatgacaaccgttgggtcagcatcttctctcctgagggcaagttcaagaccaaaattggagctggccgcctcatggggcccaagggagtggctgtggaccggaatgggcatatcattgtggtggataacaagtcttgctgtgtcttcaccttccagcccaatggcaagcttgttgggcgttttggaggccgtggggccactgaccgccacttcgcagggccccactttgtggctgtgaacaacaagaatgagattgtagtaacggatttccacaaccakwsrgtgaaggtgtacagtgctgatggagagttcctcttcaaatttggctcacatggcgagggcaatggacagttcaatgcccccacgggagtarctgtggattccaatggaaacatcatcgtggctgactggggcaatagtcgcatacaggtattcgacagctctggttccttcctgtcctatatcaacacgtctgcagagccactgtatggcccacagggcttggcattgacctcggatggccacgtaktartggctgatgctggcaascactgctttaaggcctatcgatacctccagtagctgcacaagggccctgcttggctcatggagggacggacataggggtgattggacaagagggtctggctaagaggtgggccagacccsgcagcactgaawrtgggcgtgggcatggatgtgcccaatgcccttccyttcckscmcrassccacggktgcactttatttattcsgttcttgctttgstgactgggtgggcytggactgktyccaaggatgtgtgcagagcttcamcctaactyctttacacamcytyccttacaccytmagtytgstsybtgaccccmagcykgggscrraamagcctcttamttyagaagtccstctggktgkstycytaamaccccatacacactgrcagagacagcaataccccaccccatattaawtaaatgtgttygccavrrwrrraawwmmwrrmwrawgcggtctcaaa

SEQ ID NO: 7142 - DNA, 600 bp, Rattus norvegicus
gcaaaagcccacatcagcattccagcagcagcatttgaacctgagccaggttcagcatttcggaactgggcatcaagaatggaatggaaactttgggcatcgaagacagcaagcatatattcctactagtgttaccagtaatccattcactctttctcacggaagtcccaaccacacagcagtgcatgcccatctggctggaagtgcgcacctcggaggacagcccactctgcttccgtacccgccatcaactgccctcagtagtgctgcacccgtggcccacctcctagcctctccgtgtacctcaagacctatgttacagcatccaacttataatatctcccatcccagtggcatagttcaccaagtccccgtgggcataaatccccgcctgttaccatccccgaccattcatcagactcagtacaaaccaatcttccctccacattcttacattgcagcatcgcctgcatatactggatttccattgagtccaacaaaactcagccagtatccatatatgtgaaaactcgaaagcagtttattgaggaagctcaatgatacaaacgtttgattaaaaataaaaacatggtatggaat

SEQ ID NO: 7143 - DNA, 600 bp, Rattus norvegicus
tcgagctgagctggctgctcccatggaatctaccagtgctttatcctctgaacaaagctcaaatgcaccagatggtgaaacattacacagcgagtgtcaggctgactccactgcggtttgtgaaatggaagtggacactgagcagaagacagaccgtgtccctctgaaagactcagcagtagaaccagtgtcacctcttaacccaagagtggaccctgaagcagcggcaccagctgtggtggcctcccctcctatcactttggccgagtctcaggaaattgatgaggatgaaggcattcacagccatgatggaagtgacctgagcgacaacatgtctgaggggagtgatgactcaggactgcatggggctcggccagcaccacaggaagctacgtcaaaaagtggaaaggaagggttggctgtcaaagtaactgagggagagtttgtttgtattttttgtgatcgttcttttagaaaggaaaaagactatagcaaacacctcaatcgccatttggttaatgtgtacttccttgaagaagcagctgaggagcaggagtagagtagctgatcctcgaggagaagcgcaatgcgactttgtaa

SEQ ID NO: 7144 - DNA, 1400 bp, Rattus norvegicus
gcggtggcagcatgccttcctctgctgccattagtcagtcgctctctgaacttctgggcgggcccattgagggctgtgatctgtccctgtgtaaagctttcaaccagaagcacactgaaggcacggtggagttcaatgactctgactccggcatttcactgaacacaagtcccagccgagcatccccagagcactctgtggagtcttccatttacggagacccaccgcctgggttcagtgactcggaaatggaagagctagacagtgcccctggaagtgtcaaacagaatggacctaaagcacagccaacacattcttctggggatacagtacagcctctgtcgccagctcaagggcacagtgctgctgtgcacgaatcccagtgtgaaaatacaacaaaaaaagaagtacctgtgagtcctggtcatcaaaaagtcccattcacaaaagacaaacattcaagccgattagaggctcatctcacaagagatgagcttagggcaaaagctcwcsakattccattccctgttgaaaaaatcattaatctccctgttgatgacttcaatgaaatgatgtccaaggagcaattcaacgaagctcagcttgcattaattcgagatatacgcaggagagggaagaataaagttgccgctcagaactgtaggaaaaggaagctggaaaacattgtagagctggagcawgacttgggccacttaaaagacgagagagaaaaactactcagagaaaaggragaaaacgacagaaacctccatcttytgaaaagaaaactcagcaytttgtatctggaagtcttcagcatgttacgtgatkaggatgggaaaccttactctcccaktgagtactcthtgcagcagaccagagatggcaacgtgttccttgttcccaagagcaagaasccagatacaaagaaaaactaggttcggraggatggagccttttctgagctagtgtttgttktgtacggctaaaacttcctactgtgatgtgaaatgcagaaacactttataastaactatgcagaattatagccaaagctagtgtagaaataatatgaaactttacaaagcattaaagtctcaatgttgaaycarwwwmawwwwaamwmwmaagtwawtttcttgsgcaccatttgggctagtttctgtgtaagtgtaaatactacagaacttatttatactgktytcatttgttacagtcatagacttatatgacatctggctaaaagcaaactattgaaaactaaccaaaccactatacttttttatatactgtatgaacaagaaatgacatttttatattaaattgtttagctctgataaaaattaaaaggagctagcactaataaagraawatcatgacttaaaaaaaaaaaaaaaaaa

SEQ ID NO: 7145 - DNA, 600 bp, Rattus norvegicus
tgcgggagccgtgaggaccccactgtcccaggttaacaaggtctgggaccagtcttcagtataagtctcagcctgaagaactcctcctcatctcagtctgcaggaagacaactgcgccctgggtctccaccgcaggggatcccagcaccgtctgctcgccgcattcggcacagctgggtccagactgtccttggcacggatacccccatctccgaggggtgcagatagccaaggctcttaggcgctgccagcgctcagttcccccctcggaggggggagcaccctcctgcggtcatctctgcactgttactctctcacagcattcacagacttttgtacttagctccagcctgaacccrttcatcaaaaggaaaccaacccrgactcgaaccgtggctggaagtccactgctactcttaagatccttgggttggttattttttatttttccctttgsttttgatcatctcctcctcttcttcttcctccctcttgttcctcttcctcctcctttctccttttttttttttttaagacaacagaawtmcgtcgctaccaagtctactaggaattctgttgtcttaaaaaaaaaaaaaaaaa

SEQ ID NO: 7146 - DNA, 600 bp, Rattus norvegicus
tactgtcctgtagctcttcctcctactgcctggaatatttttaacagcttgaaatggctcccagtattactgtacacaggatagctggstccccaccctraagtcatattatamcaatataatattwaaaaccagggagggctagcacccatggctgcccagggaaagsccacaggaaaggttagtggtttccccactgtgacactttctttatgggttttcaatgtttctgtgggagacagggtaggcagttcttgtacacacttggaatactccccccaagctcagttcagcagggaactgaacggagaggctgcctgggggactggcccaggtagcccccagtgagyttttccttggtgagggacctgacagcttaggggcatgggtccctcaggtctggcataagaccctgagttgtctggacaagagaaggaggatctggactggtatttcttggcagctgtcccctgtcccctgggctaagggtgggtgaggctgtsccttgcagggtrggggagggtttccatatgctcatctctgaaatcaactattaaaggaggatttgthmcaawmmarmmwraaaaaaaaaaaaaaaaa

SEQ ID NO: 7147 - DNA, 1400 bp, Rattus norvegicus
acatgtctgtctgtgtgtatgttttgcatacacaggtgcatatgtgtawatgtaatgaaatttatgttgccagtgtttcagattttaaagcgatcatgatttggtaggttmcagattttgktgktgbtgttgbttwagttttttcttttcttttttaagtaagcattcaagtcagatcaagmcattmcagatttcatggaggmcaaagmcaattgaaagaacatcgtgtagctttgtacagttatccagttatgtaaagtaratgatctgtaagtttcagtggagaacatagcgcagactttcatcatcttargggaaatgtcagaaaagcatttcagtagtgkagtacttgtgcyccatgaaaacagactgcgktaataccagctggatatcttctygtttccmctcagaatattaaagaaamcaaggttaagtgattttttccaagttcttcttacattataatataatattgttccatttattgtaaattttgcagagtttagggcagtatagaagaatcatattagcaaaccatatcatgtgtggatctkctgaatggatactagggcatgggctgaatgctgctatcttgaaatgtacacagctagacttgscttttatttttaaaggktttccctcattcaggaaacttcattgkgatctgkactacagaaactwaatgkcatacatcatacgtgtgtgttcaaagkacataaaatggatctcaacgcacctaacagggagggtggcgacactgtgaagtgatgccmgcagcagctctctactcttgraaaccgscttycgtcgtcagstaacacgagctgscaggccagacgttctcaaggktgcagtagtactctaaaacgaaacttctcaayggktaattcttagacatctagctagtattagagctgktttcatttwacgctgkttkgawtatttkgatgccmaattatgttttagtcctaatcattrrtaatamckkmamdakrcgcmgkggcatttgagctcattcttgggataakttaaaaacytgagtgcgttcaaagagaacskcgttgrtkattaacggktcactaaatcagrwattcattkgkctcatcttttccttcytgyttkgttttccttcactcttctcatatggctctcctgacgtgtgtgtggtttgttwtgttttgtttttttaagactatggaaataatttaatgagttgagctccggtgatgatctgmtaagtttgaaaatgtaatattttgataatactgtactgtacctgtcccaaatgcttttgtaatgttttaaccccgagtattgcagttgctgctccgtacagaggtwwctgcaataaaggaagtggaatcawtwaaactttaawawhwaaaaaaaaaaaaaaaaaa

SEQ ID NO: 7148 - DNA, 600 bp, Rattus norvegicus
cttcctagtccccacagtaactgtgaggctccccgaggtccccacccggggaccagccacaggaatcggactatcttctccccgggccaagctgaggcactggagaaagagttccagcgtgggcagtatccagattcagttgtccgtggaaagctggctgctgccacctctctgcctgaagacacagtgagggtstggytytssaacasaagwgysaaatggcgcagacaagagaagttgaaatgggaaacacagatgccaggtgcttctcaggacctgatggtaccaaaagattctccagggatcatctctgcacagcagtcccctggcagtgtaccctcagcagccctgcctgtgctggaacaattgaatccttccttctgtcagctgtgctggggggcagtaccagacagatgttccagtgacaccacatcccaagcctgtctccaaccctactgggaatgccactccctccttcctgtggcttcttcctcatacatggaatttgcctggccctgcctcaccacccatcctgtgcatcatctgattggaggcccaggacaagcgccatcaacctattacttacactggccataagag

SEQ ID NO: 7149 - DNA, 600 bp, Rattus norvegicus
gcccgagggagaaccacacttgggagtcagagaaaacgccggaagtcagtgactccagacccgaaggaaaagcagacatgtgacatcaggctgcgagttcgggcggaatactgccagcacgagactgctctgcaaggcaatgtcttctctaataagcaggacccacttgagcgccagtttgagcgctttaaccaggccaacactatcctcaagtcccgggacctgggctccatcatctgtgacatcaagttctctgagctcacctacctcgacgcattctggcgagactacattaatggcycawkawtwsaggcactgarrggcgttttcatcacagactctctcaagcaagctgtgggccatgaagccatcaagctgctggtgaacgtggatgargargactatgarctggsccgacagaaactcctgaggaacttgatgctgcaagcattaccctgacctttcccmgcctcacctttctggggactgttygctccgtcacctctggagccgacatactgttctggggtttgttctcwaccctttccaaccaaycacwccdccttyytttktyttwwhhtttaaaaaaaaaaaaaaaaa

SEQ ID NO: 7150 - DNA, 1400 bp, Rattus norvegicus
ttgctctccacttccttctttgtggtctttggcatcatgctacacttgtacgtgcgcatctgccaggtggtctggcgccacgcccaccagatcgctttgcaacagcactgcctagcaccaccacacttagcagccaccagaaagggtgtgggaactttggccgtggtgctaggcacttttggggccagctggctgcccttcgccatctattgtgtggtgggtagccaagaggacccggccatctacacctatgccaccctgctgcctgccacctataactccatgatcaatcccatcatctatgccttccgcaaccaggagatccagcgtgccttgtggctcctgttctgtggctgtttccaatccaaagtgcccttccgctccaggtcccccagtgaggtctgaagggctcctccgtgtctcctcacccacatcacaaatccaacatgccggcctttggtgagcttctaggtgcctgctgatgaactcttgaggactcagtggttcggcgcgagtctgactgccccgcaaagggactggatgtgaacgcaacaaactgactcagacaaagaggcttgttggcattttacatatacagtgtatacacgtgtacatatatatacaaatatttgtatcttctggaggtgttcagggcctggagcttcccgttctgtgaaaaaaactaacaaaatgtggttgtatactcaatcgtacatcacatttgtcaagtgaagacattccaatactgcttaataatagcactttatttttagctgctgaaatgccaagacagtgttgccatccccaagagcaggagaaagggagtcagagatgtatttttgttgtatgtgatagaatattttgctgcacatgcatcagtaaactacaacatattttgtacacaaataaacacattataaaagtatgatcttgggtatgtgataaattgtggcattgtttggaatctgaattgtgagtgtgtttattttaaaagtctactgcacatctatctatcatctgtcccagggagagccacatgaaataccagatctaaaccatgggatgaggcagtaacattcatgagtcatggaggaagtaacattcacacgtggcatccccagaacacgagaaggaaggctgttactggtgcaagttaatgtgctctcttggtggccgggttgggaagacatgtttcagaggtcaaaacaattcaagtcacataggcacaggtgtaaactctgaagccacaacttaccagcataactttacaaacatgccaagatttctcaacatggcttattcagactgttgctacccaggtctggtagccaggtgcagagcccaataaaaccaataaaattctcctaaagcaggattcccagatcttcatggggtaactg

SEQ ID NO: 7151 - DNA, 1400 bp, Rattus norvegicus
  misc_feature (1299)..(1299): n is a, c, g, or t
taaagaataattctaagctgaaaggcttccttctatcaaaccatctaacattttcttagggctattgaatagatataaaatcgawttctctttctctctgtacacagkgtatccaaatattataccttaaggattcctaccaggktttcctgagaagkagcttttatgtgaggcaagaaagaagtaggttgtaggkagaatcattttctagttctttaaatgagacaatcactttgttttctaatagttgtgatctgtgtagcttaaagaaaccttarggtttgcaagagattgctatagatttccagtgatgatgccctggctgaataggcttgkctctcctttagcctgtacctcttttcttcctccttggtttcagtccccatgtgctataatcatgcaaacttttatttcaatagcttctgtcaagcactaagtttgcagtcctggggtcgcttyccccttgcctctgacacactgcactagtctagagggtgtcattggaaataggctttggtttcctgcctcatgcaagtgtgtgcttgcttgkttgtttagarkagcacagtttagcacttggtttccagggttttataatagaaaaggcagtttgatgtgaattggktcataaagtgaaacgaatgacgtcwckakktccttgtcacttgctggtacagctgaagtttgttttacttgcacatttgtacatatatctaatgttttcaagtgccttacttgtttaaaytctggcttcagaggttttggsrsrargataggtttacctcacagttagtttccattataatmtaggttcctcacacaaatctatttcagtgccatggctgttagttttcagtgagtgctcaagttcttttgaaagtacacagaattcccattccttaaawwsgksvcarrwycagtttgtcayttgsywcsakgtgactcmwtgcaccatataaatgtcrgcgtaygkmrsargttwtakgagarkgtaacttaatktgaaggtcctgtaattttgagcaytgctctaacactgtaggaagttagtgacagtttgcaggtctbwacataagctctcgccacagagttcacagytgccctgaytctttcccatttttgtttagcaaggtagtatwttgagccatcagtgattttgggtytyttaatccagaaggtatgtmgaaacctttcagagttttsatctgatttgtcyggaggctctagttctgtcaaataccttatttcacctttcctatatttgctgyacaagcmgayactgctgtacttagaaatttntatttgagttcaykaaaaarctayaaamctaawrwrwahrmrwawmaaactgatttaaaataaatatgtttattmgtctcttgrwmaaaaaaaaaaaaaaa

SEQ ID NO: 7152 - DNA, 1400 bp, Rattus norvegicus
ccagcagacagttcgaaacctggctctgggagacaagttcttcytgckcgtgactgcagtaaactccgcaggggcgggccctccagctgtgctagaccagcctgtccacatccaggagatcactgaagcccccaagatccgtgttccccgacaccttcgtcagacctatatccgccaggtgggagagtctgtcaacttgcaaatccccttccaggggaagcccaagccgcaggcctcttggacccacaatggccacgccctggacagccagagagttaatgtgcgcagtggggaccaggactccatcctcttcattcgctcagctcagcgctcagactcaggccgctatgagctcactgtccgtctggaaggcttggaagccaaggccgccattgacatcctggtgatcgagaagcccggcccccctagtagcatcaagctattggatgtctggggttgcaatgctgcccttgagtggatgccaccccaggacacgggaaacacagagctcctgggctacacagtgcagaaggcagacaaaaagacagggcaatggttcacagtgttggagcgataccaccccaccacctgcaccgtctcagacctcatcattggcaactcgtactcttttcgggtcttctcagaaaacctgtgtggcctcagtgacttagccaccaccaccaaggagctggctcacatccacaaggcagctatcactgccaaacctagagagtttactgagcgagacttctcagaaccgccctccttcacccagccggtggctgaccgtacctccactcctggctatagcacgcagcttttctgcagcgtccgagcgtcacctaagccyaagatcatytggatgaaaaacaagatgagtatccagggggaccccaagtatcgtgctgtctccgagcaaggggtctgcaccctggagatccggaagcccagcccttttgattctggggtctacacttgcaaggccatcaacgtgctaggagagcctgccgtggattgtcggttggaggttaaagcctctgccacacactgaagaccaacacaggcagagactgggacaaggagacagcttggtcacataccaggatcgcgacggacattctctgccaggtcctgcagacctgaggatcaggcgcccaggcatcyccaagaccaagataccacaagaacagctaatgggggtgaacctccagaacctgctggctctctccaccagaggttgggtccagacccaggagtgggcctggcgggccccaggtcatacctcctgggtatgagagggccccaagggtgcagagactggcacccctctgcagaattgtacactgtgtgagaayatcmaataaaggtgtgtggtgttawarmaaaaaaaaaaaaaaaaa

SEQ ID NO: 7153 - DNA, 600 bp, Rattus norvegicus
gtgtgtgagcggcagtgccgtkccagagacctggtccacctggagctctgaggggcaggggaaccagagtagtgggacmagcattgraagtcagmttccctctacccaacctgggacggggactgtcagggtcaccagctgtggtccagttgctacccctacttgtatccctatcctataawcttaaaaggwaaammamwwmhmwmmatctctccccatccmctgtgggaagtgtgytgmccaggcagrggacagagcacctgcgcctgggrmtggctcsccgggtccccaaytcagmtggtgrytgtggaactgagcccctctccmtagcctctgcaaggccagcacccacatcactacytgtacctacagtgacccacccagaaggcctggggatctggctgcagctgaaaaagctggcaaggcactgacagcacccaccagytattcccccaaccaccttcmtagcctgtggtggtgggtagctgtcagaaggtgtgtcatgtacatttgtatcaaaaataaataagtgrccatgwrmmamwwmwrawrwmwararrwmararrwrrrrctcagcccggtaaaaaaaaaaaaaaaaa

SEQ ID NO: 7154 - DNA, 600 bp, Rattus norvegicus
tattttttcattgttctgtgggaacagggtttacacttataactacagccctcaggaggctgagacaggaggatcgccgtgagttcaagaccagccttcatagtgaatgctgggctagcctgagctatggagtgagatcctgtctcaaagcaaaagaaacaaacaaaacaacaaagactaagtagtgagtctttccagagtgtattatatgatacagccgatgacattgtggcttatatattctcctttctctcctttaaacaattttatttatttttattgtatgtgtatgatgagtcttaggcctgcaccggcttgcagtgcccatagaggtcagaagaggacgctggatccttggaactaaagttagagcagtgtgagctgcctgtgtctgttaacagaactcaggtccacagtaagagaaacaaacaattaaaggctgagctacctctccacctgagacatgtgcacacacagtcacacattgttttgttttgtttggaaacagcccacgctatcttggaactctcaatcctcctgcctcagaccctcctgccctggaattaaaggcataaaccaccaaaaaaaaaaaaaaaaaaa

SEQ ID NO: 7155 - DNA, 1400 bp, Rattus norvegicus
agggagaatttggtggctttggttctgtaacaggaaaaattgratgtgaaattaaaattaatcatgaaggagaagtaaatcgcgctcgttatatgccacmgaacccacacatcattgccacaaaaacaccatckkcygatstttygrwtttygrcwmkasaaaacaccctgcaaaaccagatccaagtggagagtgtaatcctgatcttagattaagaggtcaccaaaaggaaggctatggtctctcctggaattctaatttgagtggacatctcctgagtgcatctgatgaccatactgtctgcctctgggatataaatgcaggaccaaaggaaggcaaaattgtggatgctaaagcaatctttactggccrctcagctgttgtagaggatgtggcctggcatctgctgcatgagtccttgtttggwtctgttgctgatgatcagaaacttatgatatgggacaccagatccaatactacttctaagcccagccatttggtggatgcacacactgcggaggtcaactgcctctcattcaatccctacagcgagtttattctggcaactggctckgcagakaagactgtagcttyatgggacctscgyratctgaaactaaarctccayaccttkgaatcccayaaggwtgarayttttcaggtccaytgktctccacatmaysarrctattctggcttcaagtggtrctgatcgccgcckgratgtgtggratttaagtaaaatkggrgargaacaatcagcaraagatgcagaggatgggcytccaragctcctgtytattcayggaggacacactgccragatttctgrmttcagtyggmacsmsrrtgaaccttgggtcatttkcyctgtgtctgaagatarmayyvkgcagabrtggcraatggctgaaaatatttacaatgatraagagtcagatktcaygacakcggaactggagggscaaggatcttaaacccaaagtatgagttgtytctattraatgtattkyywywcgawtgcttgwttwrwmaarmrmmaaaaargcattgtatagtagraaatgtaagtgggatggcttctggcattctttaccctctgattsyagcactttcaagtgagctgttgcgtactgtmtcatattgtagctattaggggaacaaaaaggaatgttgcttamgaatggacmtcattgttttaaacacacattgytgggtattgcctttgattcaactgtcattttctcaaacttttaagtgcttgctcaagttcccaratatgygaggakractytwacacttktyccttscaacmcttcktkattggmwwwgcagraataaagtyttwaadwwaavaaraaaaaaaaaaaaaaaaaacacattcggccgcaagtttgttc

SEQ ID NO: 7156 - DNA, 1400 bp, Rattus norvegicus
attatgagccagaattccagtttcaccaaaatatcgaatatggagctcccttttatcagaatattttaggttgtgctaaggaatgcttctgtccaactaactttccaacatcaatgtactgtgacaaccgcaaactcaagactatyccagatattccaatgcacattcagcaactcaaccttcagttcaatgatattgaggctgtgactgcagattcattcatcaatgcaactcatcttaaagaaattaaccttagccacaacaaaattaaatctcaaaagattgattatggtgtgtttgctaaactttcaaatctacagcaacttcatctagatcacaataacttagaagaatttccatttcctcttcctaaatctctggaaagactccttcttggttataatgaaatctctacacttccaacacatgccatggatgggctggtaaatgtcactatgcttgacctctgctataaccatctctctgactccacgttaaaaggaaagattctttccaaactggaaaagctcatgcagcttaacctgtgcaataacaggttagagtcaatgccccctgggttgccgttatcacttatgtatctatctttagaaaataattcaatttcatctataccagagsaykastttcaraawcttccaraacttcatgctctaagaatatcacacaacaaacttgaagacattccatatgacatctttaatctttccaatcttatagaactcaatgttggacataacaaactgaagcaagcattctacattccaaggaatttggaacatctatacctacaaaataatgaaatacaaagcatcaatgtgacaatgatgtgtcyttctcttgatccattacaccatcaccatttaacataccttcgtgtggaccaaaataagctgaaggaaccawtaagttcatatatcttcttctgcttccctcggatacacagtatttattatggtgagcagaggagcactaatggtgaaacaatacaactgaagacccaagttttcaggcgctatcaagatgaggaagaggaagaggaagacgacagtcaggaccacactcttgagggtcaagaagaaacagaagagcactttaattctcattactatgaaatgcaagcatggcaaaatactatataggtacatatttatgactccataaagccttamtaattacaaatgywagcgtatacctgctcataataatatatctagaagtatgtgctagtataaagacccgaattgcatttgagatgttagtgagaatggttttacttcataggcgtagtgcttactagaaacgatgcaaaccttaagaaatataaagtagaatggcaagtgggaataaacaaaactaagctcaaaaaaaaaaaaaaaaaa

SEQ ID NO: 7157 - DNA, 600 bp, Rattus norvegicus
accaccgttgacctgaaaaggaagcctgcasatctgcagaacttggctcctgggacccacccaccatttataaccttcaacagcgaagtcaaaacggatgtaaataagattgaggaatttcttgaagmagtcttgtgcccacccaarwamwwaaarmwmwmaccaaaacacccagagtcaaacactgctgggatggacatctttgccaagttctctgcgtacatcaagaactcaagaccagaggctaatgaagcactggagagggggctcttgaaaacgctgcagaagctggatgagtacctgaattctcccctccctggcgaaatcgatgagaacagcatggaggacatcaaatcgtccacacgcaggtttctggacggcgacgagatgacattagcagactgcaacctgctgcccaagcttcacattgtcaaggtggtggccaaaaaataccgcaactttgacattcccaaaggcatgacgggcatctggagatacctgacaaacgcctacagtagggatgagttcaccaacacctgtcccagcgacaaggaggtggaaatcgcgtacagtgacgtcgccaagagacttaccaagtag

SEQ ID NO: 7158 - DNA, 600 bp, Rattus norvegicus
ctctgtcacccctttccccaaagtctcccagaactgcacaggggcacaggctgactgtcactaagtttatggscctcacctgtcagsccaaggtggggttcttraggggttagacagagccctcaaacctctctggctgcccaggtggggtctaacttacttatttattgctagcttgcctgctccaagggcggcagctggtcacccagtggggcagtttgcacgctcmwttcskcacskgcaactcggcacatgacagcacagtttgtgttgaaggtatgtggaggatggctmgtagggamgacaggagagagvcctgscactwatctactgtcttagtctcaatggcgggtgrgmrwbaacasaagagctgaagatgtggggtcctgtcctgtcactgttctcctggtggctgcccatcagcatgtsccactgccatctcggcacagcagccccacacatmtacacgagacactgtgtcaagaagtctgagcgactgggtagttcacatagagctgcttctgtgtaaatgctgcttctgtstaaatgctattwtaaacactaaaaaaarcgtbtrwkykdhmrmaaaaaaaaaaaaaa

SEQ ID NO: 7159 - DNA, 1400 bp, Rattus norvegicus
aggatgggtctgaratggaagccaacgtgagcctcgcgagctgggatgtggagaagccagctagctttgctttcaatatttcccatatcaataacaaagtccgaatcctrgagctcctrccggcccttacaactctgatgaaycacaacaaatacttgatcgagtctggaaatgaakatggcttctttaaaatcaaccagaaagaaggggtcagctacctccacttcacgaagaasaagccagtggctggaacctactccttacaaatcagcagtactccactttataaaaagaaagaacttaaccagttagaagacagatatgacawagactacctcagcggtgaactgggcgataacctgaagatgaaaattcagatcttgctgcattaacttaccatccagagaccaaataattaaaaaaraaaaarmaamwttaggtaggtaggattakattttccccaakccagaacctgcayggyacraksvkkcacygagkcsatmwrwvyhmatsmkcaccattcttggatggcarcaccaaggtacagcgacgatcctagttcaaacaaaccactctctcaagcttctcgtgagtagctcagctaccctgtcatgggtattgattcytgagaactgggacatgagtatcggcggaagtkggccgtgcgtgccgaccgccatctttccagccgccccacagaagcatgtttccatctgayggaccgctccgtgggtcttcaaatttcgaaactttgcykmkscgagtgcargtastasaggtckttgctgtctgwttggtgctagtaaattctcaaaatagatttatcgatgcactgtaataaggacacaaggtaggaaccaaaatgctaagtactcrgywcrarkgcttcattcatttcaatcaaccaaagttagttcagtagcttatctcacttatgagtatggtgcagtacatgtaaattaagtgtgtgtacactgtaacgtgctatttttatcattgaaacatttataaactacaataataaagyyckkmaygwgrrrrwwwrwaawrrwrmttattaagaccaaagacttgttaaacatctacaccaagtggtagtggattctgagactggcccgcgtgtgcactgaggttggggaggacaaggaaacgscctcagccaccagaggatcaccagcscagcctccatcacgccgcctgtgcaatatgccaaaaccgctctcsgtcattchtsccaascagggsttaatgtcatgatgtcacawyaaagtgatcytcccctccctmcctgttttagtytacaccttggtwttgtgttcttgtgtgggttgaggctggaraggcctttctggaggtgaaataaagtctcctgggtttaamgtaaaaaaaawaaaaaaaaa

SEQ ID NO: 7160 - DNA, 600 bp, Rattus norvegicus
aaaagaagtggaggtgaatattatttccctctctcccagacaggtgtatgttttgatctgcattgacaccagctcttacaaatcagacttcattatcttcacagttgaaagtcatctctttgtagtttcagttttcctccagtgtttcttatcctttgttcatatatttagaagaaagagcttcttgcaatgtttctgcagttgccagatcaggtttaagcacccagctcaggatatgggaggaagtgtttatcggcacacctagaatatgaaggtcatgagccagaggcacccaggagcaggctctgttgttctcatggtgaggcctcctccaccatgttttatgctccttgtttcatacttctgagtcacccaagcaagttatgtggactgtgggaggatctggaatgttctttcccttattcagagcttttagcctgaaagttggtgaacatcaacgcatagttttacctaacaataggatctaagaagtatgcatgcttatcacaaatttttggtttaaaagtcagacaatgttcactgtcaaggaaatgacttttcttcaaattttcatttgctggctttccctccgttgcccag

SEQ ID NO: 7161 - DNA, 600 bp, Rattus norvegicus
tgttcatctgttgcagtataaccatcggwtgaagaacctcagggaaatcakccaactggggatcattggtgacataaccctcaccagcgcttcccacgccatgatmtaagccagaaggggtgggccggcamcrgaactgccytgtgtgttatgagcgggaaactttgcatttctctctccttatacttcttgtaagacatccwtttaataaagtytsgtgytgrgrrdwaaaaaawamaarrarwamacgtacccacaaacaggacaaacagcaaggaaagcccgagggggggccggtacccaattcgcccatagagatcctatcccactccatggcggcgtgtacaggtctgactggaaacctgggataccacatatgacttaggaaatcccttggcacagcgtaaacaaaagccgcagatccctccacatggggccgagtggaggcattaccgtcatggaatggtactgtagaccattccaggcacgcacctatagaacgagggggcggaaaccaagactggactggcgtccatgtctgcatgcggccgtctctcgcactagacagctctacacacgggagcgagcggcgccgaagac

SEQ ID NO: 7162 - DNA, 1244 bp, Rattus norvegicus; identical to SEQ ID NO: 3066

SEQ ID NO: 7163 - DNA, 1400 bp, Rattus norvegicus
gacctcctactatgaggaagtggctcacgtactggaggagcttgataccacaattaaggagctccctgattgggctgaggatgagcctgtggccaagactcgccagacccagcaggatgacctctacatccactcggagcccctgggtgtggtccttgtcataggtgcttggaactaccccttcaacctcaccatccagcccatggtgggtgccgttgctgcaggaaacgcagtgatcctcaagccctcagaagtgagcgggcacatggcagacctgctagcgacactcatccctcagtatatggaccagaatctgtacctagtggtcaaagggggtgtccctgaaaccacggagctgctcaaagagaggtttgaccacatcatgtacactgggagcacagccgtagggaagattgttatggccgctgccgccaagcatctgactcctgtcaccctggagcttggagggaaaagcccttgttacgtggacaaggactgtgatctagatgtggcttgcaggcgtatcgcctgggggaaatttatgaacagtggccagacctgtgtggccccagactacatcctctgtgacccctcgattcagaaccaaatcgtggagaagctcaagaagtcactcaaagatttctatggggaagatgctaagcagtcccgtgattatgggaggatcatcaatgaccgtcacttccagcgggtcaaaggcctgattgacaaccagaaagtagcccatggaggcacttgggaccagtcctcacgatacatagctccaaccatcctggtggatgtggacccccagtccccagtgatgcaggaggagatctttgggccggtgatgcccattgtgtgtgttcgaagcttggaggaggccattcaatttatcaaccagcgtgagaagcccctggcactctatgtgttctccaacaatgagaaggtgatcaagawwmkgmwcgsrgagacatccagcggtggagtgacagccaatgacgtcattgttcacatcaccgtgcccactttgccctttggtggtgtggggaacagcggcatggggscctmccatggcaagaaaagcttcgagaccttctcccaccgccgctcttgcctggtgaagtctctgttgaatgaagaagctcacaaggccaggtatcccccaagcccagccaagatgccccggcactgagagagtgctgctgcacctgacacatgttttgctggctgtcttgtccttgaggagttgctcatggagcctcatcctggcttattcccacctgcygtcctgtgcttaactccccgaaggactctcacctcactcctccaaattccactgtttgctgggcacagaaatcaataaaagcctctgaggaaaarwmaaaaaaaaaaaaaaaaaa

SEQ ID NO: 7164 - DNA, 1400 bp, Rattus norvegicus
  misc_feature (1165)..(1165): n is a, c, g, or t
ttcatagtggaactggcagcccagcaggaggccctgctggtctttgctgagcatcggtattatgggaaatcgcttccattcggtgtgcagtccacacagcggggatacacacagctgctgactgtggagcaggcgctggctgacttcgccgtgctgctccaggccctgcggcacaatcttggggtccaggatgcccccaccatagcctttggagggagttatgggggaatgctgagcgcctacatgaggatgaagtacccccacctggtggctggggcactggcggccagcgctcctgttatagctgtcgcaggccttggcaaccccgaccaattcttccgagatgtcacagcggacttctatggccagagtcccaagtgtgcccaggctgtgcgggatgctttccagcaaatcaaagacttgttcctccagggagcctatgacaccatcagccagaattttgggacctgccaatcactttccagcccaaaggacctgactcagctctttgggtttgcccggaatgcatttactgttctcgccatgatggattacccgtaccctactaactttctagggccccttcctgccaaccctgtcaaggtgggctgtgaacggttgttgagtgagggccagaggatcatgggtctacgggcactggcagggctggtctacaactcctctggcatggaaccctgttttgacatctaccagatgtaccaaagctgtgctgaccccactggctgtggcactggctccaatgccagggcctgggactaccaggcctgtacggagatcaatctgacctttgacagcaacaacgtgacagacatgttccctgaaatccctttctctgatgaactccgccagcaatactgcctggwtacatggggcgtgtggcctcggccagactggcwssagrccagcttytggggtggsgaccttaaagcagccrgcamsaksattttytccaacggtgacctagacccytgggcagggggtrgrawccagsgcaacctgagtacatcaatcattgctgtcaccatccargggggagcacatcacbtdgacctcagagcathtaamtcagaagaccccccgtctgtygtgraggtgcgtaagctkgaagctaccctcattygsgagtggrtwgcagcagccagantaaagcawccmgcagaggcacagtggcctgggcctaagtagcagcsttccarccgagatgcagcaaacccagagaccctgttytatgtgarccsctgtgtgacagctcgccttamgtctgatamtatccmgamtcatggtgctttgtytgagctggacctcarcaaggagctkgtgggagatkgagagacmgaataaacacgtgctatgtcmwwrwmwaaaaaaaaaaaaaaaaa

SEQ ID NO: 7165 - DNA, 600 bp, Rattus norvegicus
gcaccatctcagccgcacaagatcctaccatggagagctaasrcmcsmrscaaccagcagaatggacattytgacatcaccagytgaaaccytgaatctcggtgcagaagagaaagtgtcaactgcgtgcascactgggggabtggagggtktggktgktggaggaagagggttaagaaaactagtggggccctmttgctgtccmtkkcmtatggcacgcrtattcctgccwwgytscctcactccccctytccchtscyttccaaagccccaccccccaaaaatgtgtcacttgattcggacytattcaaccagtaattggatcccacctttaccaaaacaccgtytytgacccccggcccttcactgatcttgcttatccctggtctcacgcagcagttgtggttgctattgtggtagtcgctaattgtactagtttacgtgtgcattagttgtgtctccccggmtagattgtaagctcctggagacagggmccmcctccacaaaaaataaaaaaacggmcctctcctgtcttgtagtgtsctaggaccctgcagggcagtgggggtgcmccaaaarwwmaaaaaaaaaaaaaaaaaa

SEQ ID NO: 7166 - DNA, 1400 bp, Rattus norvegicus
ctggggagaatagaaagaagacaattgacaaaatcctcaaatgtaaacttaatttgcctccctacctcacacaagaagctcgagatctgcttaaaaagctgctgaagagaaatgctgcttctcgtcttggagctggccctggggatgctggagaagtccaagcgcatccattttttagacacattaactgggaagagcttttggctcggaaggtggagcgcccctttaagcctctgttgcaatctgaagaggatgtgagtcagtttgattcaaagtttactcgtcagacacctgttgacagccccgatgactcaactctcagtgaaagtgccaaccaggtctttctgggttttacatatgtggctccatctgtacttgaaagtgtgaaagaaaagttttcttttgaaccaaaaatccgatcgcctcgaagatttattggtagcccacgaacgcctgtcagcccagtcaaattctctcctggggatttctggggacgaggtgcttcagccagcacagcaaatcctcagacacctgtggaatacccaatggamacragkggaatagagcagatggatgtgacaacgagcggggaagcttcagcgccacttccaatccgacagcccaactctgggccatacaaaaaacaagcttttcctatgatctccaaacggccagagcacctgcgtatgaatctatgatgaaacaatgcttttattaatgcaaatgcaaaaaggaaacaaatcctggaagggsatgtgtgagratcctgcaagataaaaatgagaaaatggcagtctcaaagagtcagtgtcattacctggaatgctttcgatggaggaaaaaataaacatggatttttaaaaaaatcaatcaatggtgcaaaaaataaacccacaaaaaactcaaacaaaatagtattgtggaacccacagacacatcaactgactggttcctaccctagcaacatctcagcgttcgtaaggattctcatgctgatggcygtaaactgacagtattaagggtaggatgttgcttctgaatcactggtaaagtctgatgatgtcacataagggttatcctaataggcaaagtacaagattgcctgtaatacttgcaactaaggacaaattagcatgcaagctttgtcaaactttttccagcaacacagaatcaaagacaaaagaaacttatcgattgatgttttacgtgcaaacaacctgaatcttttttttatataaatatatatttttcaaatagatttttgattcagctcattatgaaaaacatcccaaactttaaaatgcgaagttattggttggtgtgaagaaagccagcttctgttcttctcttgatgaaataaaatgcaaatgratcattgttmmmaaaaaaaaaaaaaaaaa

SEQ ID NO: 7167 - DNA, 600 bp, Rattus norvegicus
cgacttcataggggaaatgacgaayggaataaacacagaaatcggggagaragggagccagttagctgtgggacagaarcaacgtctggccattgcccgggcccttgtgcggaacccgcgggtcctcatcctggatgaggctaccagtgccctggacgccgagtgcgagcaggcccttcagacctggagatcgcaggaggacaggacgatgctggtcattgctcaccggctgcacacggttcagaatgctgmccaagttctggtgctcaagcaggggcagctggtggagcrcgaccagctcagggatgagcaggatgtmtacgctcacttggtacagcagcggctggargcgtgaggcctccagacactgagccctctcaggactgtggccaggatctgacccacagggactgtgstggaggctagcgtcaggataaagattgggaccctttggactttgtttattwtggtgggcttggtgggtgaggkccaggggatgggatggytgctgggtggggtgggtggtttaaacattatttttttctaaatataaaamtamtaaatmtatwkataatamwwwaaaaaaaaaaaaaaaaaaaa

SEQ ID NO: 7168 - DNA, 600 bp, Rattus norvegicus
cagttgtacccaggacaaagccccctcaaaaagaaaccatatgagyacgrrkgtgtgaagatgctgcactggggacctaagcagatgttctgaggtgaatactggtgatgggtgacctgtgagcgggacaccttagacagcctggccaccctcagagaaaggtctcttattgacatcagcatcatttgaaaacactaaaggcacaaaatttcaagccccatcccagatgtttgactccgaatctctggcccgtggggaccaatgtcttaacaggcccccttgtttccaccaatgttaagttttattcaactcattytattcccatccctgamtcggccatgtgcaatgaataacgtyytcatctgtttccagtattaatctcttcttgcatagcatcatytaaatcctytagtttgtgcgggaggctgctattgtccagagtgaaagatatttytttattgwacatttgtgtggtggtagcagtgattttttagtggggaggcaggggagaaagacacagaaataaaaggtytytggaaaaaaaaaaaaaaaaaaaaaaaaaaaaaaaaaaaaaaaagaaaaaaaaaaaaaaaaaaaaaa

SEQ ID NO: 7169 - DNA, 1400 bp, Rattus norvegicus
ccatgacgacggatggattgccatactcttaggttttttggtggccttcctgctgctggggcttgtgggaatgctggtgctgttctatctgcaaaatcatcgatacaagggctcctatcacaccaacgagcccaaggccacccatgattcccaccctggcggcaaagctcccctacctccctcaggccctgcccaggcccctgcccccactccagctcccacccaggttccgaccccagccccagccccagcctctggcccaggccccagggaccagaacctcccccagatcttggaggagtccaggtctgaatgagtcacaagggcttcagggaccaaggccaactcctctaagtyccttmagctcctgcctctcctctcccctgtcagggacatttggctcttcttagcaggctctgttcaccaggaggatcccctcttgccaagtttggtgtgcagagctacagatgggaccaaagggagtggccgagtctcactgcctaaaccaatgccctgcccccaccccccaccccagctcctggctgtttgcctgccctacgggagaaagctcatggagctgaggcgggcctttcctgccatctctgtcccagctgctggcaaggattaacaaccaagggcaggggagrtgaactgcctcccttcctgtgggtattatcagcagggacagatgtgggggatcgaggggctgcacagggcaggcagggagggagggaggasrckrskaaaacacaccctggagcctcccccctgccctrctgaccggctgtcttccatctrcttcctctcagctggggttgagggaagaayttcatcsccaccccccacctcacccaaccstttttgttcttacagagaccaagaggcctcagcttagtcactttagtacctccactgcttcayatgctttascsaaagccrtaaaaagcytgcaagtagaagaartaatgcagaccctgcccarccagtcctbtgctcctccacccctttccaaaatacgcaatagcctgggtgcctgtgtgcaggcctggccccccyscgtgmatgargagccccccctcccccgctcagagatgctgcgwgwtcgtccaggaggtcatattcttyatatatattytwtgwtgyaaagcctcwmwmwararaamwawawattactctaattttttaattatctgtttatatataaaagaactcagtgggcmrwmmwrwrmwrwrmmmarwwwgtagtgagctccttctgtgttggatgtctcatgagtcytgccagccactcacccgcctgccgggcctccattytagagcagggcagagcccgctgtgccctcacytgagcaggttcaataaaagcagmgtggcagarmmmmaaaaaaaaaaaaaaaaaa

SEQ ID NO: 7170 - DNA, 600 bp, Rattus norvegicus
ttcgagacctcaagggagatgaagccacggtcagggatgcacacagcaaacgtgacaccaagtgccagtcacagggctctgtaggagaagagaagagcacctcaacgctcaggggtggggaggttcccgacagaaaaaggcccgagtctgtctactctacttcaaaggacaccaagtaccagtcggtgtatgttctatctgcagaaaaggatgagtgtgttatagcgactgaggtttaaggtggaagtgatgtggcaaagttcccatttctcttaaataaaattccaaggatatagccccgaggaatgctgctgagagaggaaccggagaggaaaccccagggactgctgctgagaaacagactcaggcggagggttcatctcggagttagcagagaaccggacacacccagcccaggattgatgccgctgtactgcctgctggatgttcccgttgcactatggacagttgctttgaagagtataatatttaaatggacgagtgacttgagttcacacaggaagcacgcactgccggacatgtctatcttggattactatgagccagtctaaacttgaactagaaacacaactgccttta

SEQ ID NO: 7171 - DNA, 600 bp, Rattus norvegicus
atggacggcaccgcgctctatgaggccttggcagccatctttattgctcaagtcaacaactatgagctgaaccttggtcagatcaccacaatmagcatcacagccacagctgccagcgtaggagcagctggcatcccccaggcaggactggtyaccatggtgattgtgctcacgtctgtcggcctgcccacagaggacatcacattgatcatagctgtggattggttccttgatcgacttcgtacgatgaccaatgtacttggggactcaattggagcagctgtcattgagcatttgtcccaacgggagctggagctgcaagaggctgagctgactctacccagcctggggaaaccctataagtcactcmtggcacaagmmaagggggcatcaaggggtcggggaggtaatgagagtgtcatgtgagaagcttctagctctttgtccagggcggagggaaggggctgggaggggagtcctggggacaatctgttgcacaactgactgtgggctgcacawacatgttctgtgtgggttctctggggactgctgagataaaagagaaggaatgaaaggtraaaaaaaaaaaaaaaaaaaaaa

SEQ ID NO: 7172 - DNA, 600 bp, Rattus norvegicus
acatccctttgaaaatattctctatggtaatttcctgaatggagtaagtttcttactataacgtcattagtgtaagaacacgatcaatatggatttacacatagctggccctgctaggggagctaggatgggtgaatggctaggcctgccgcggtgggaggggcacaggtataacattaggttttcttaaaatatttcagcaacagtgcacgttggagaccataataggtggtggtaaatgtttcgcccaaatataggaatgattttaactaagatgtatgctattccctatgcaacagatgatcaaacaggatatgtcttgtgacctgtttttttttttccttaaggacacattcttttttttttttttaatagctgaaaaaaatctctggtaatgaattagagtgtgtggtaacactgagcattagtgatatgaccctatttttaaaatccaagactaagaatttaaggagtgaagagtctaatgaaatgagattcactttctgggtaggcaaacagaactcatgcagctcagaagtctgcagactgctacaccgaggggtgcacagcacaatgacttaaggacgacgacgatttggt

SEQ ID NO: 7173 - DNA, 600 bp, Rattus norvegicus
catcagtggttgagagggggcttccaccagaccatgggggtaaagacttcagtcactggatggccgccagtaacaaagacaagaggacaacattaggcgtttgacccacaggcaagaacatggcctgttggctctgtagatgctctcatttcaaacgctcaccttcctmatgtgggcattgcttgacctggtcaaaagggatgttgatgtaaaggcacactgaaaccctttgtttatctgtcactctgtgtagtgaatgaaaactgtctcccattcagtacagttatccagccacccaaacgttccattcaaggtctgtgcattttaagcttgctctcaggacactgggaaatgtgctgttgcattcgggatatggattttaaagggaagaaatctagattcccaagacgctctcatctgcggaattttaagtggttgttcaatatatgtttgtgtgccawwwrmwwrwwrrwwwwrtttgtgtttttacagatttgggataagtggttaggttcataaaagatgacatcaaaagcagtcgggaccttaagagctgttgtgacccacttgaaaccacattaagaaaaaaaaaaaaaaaaa

SEQ ID NO: 7174 - DNA, 600 bp, Rattus norvegicus
tgaaagagtctggggtttccaccctcaactctgaatccagagcccagcagggagcaggcagggcaagacaggcccagcccacactaactacaagctgtagcccagtgggggctcaacaggccaaagtctgactccttcactctctagtgatgttgaccacttccgaataccagagggatttccagcttcccccaaaggatatcccaggcaggggaccattcactgtccaccctaaccaggtatggactgacaacttctcccmtaaagtgaagagcrrgsccctcaagccytgtgataagcccttygtgcagcctgcctcctccttgmtggtcagaggtgccggagagatgttcagactccagtctcttcacgccacatccmtcagccagcagstgagccacagcaaggttaagggcatcgcggtttmtcmcagsatcggttccttgggcatcacacctcccagaaatcaagataatytctggtgattcagactctgtgttttaatgaatttcatagtatgatcttgattgagaggcttttgcaaataaagctgggacatgccaggttaaaaaaaaaaaaaaaaaaaaaaaaaaactcgag

SEQ ID NO: 7175 - DNA, 600 bp, Rattus norvegicus
tgaacatgggcattctagtgcccagtgtagcattagggacagatggagacccatggtggctcagccccgctcttcccaagggtcagagctctctggggactacatgtacatccctgactatcccagtgctaggctgggswckmkggasagsygmmkcaactatgtggacctggacctagtccctcccctggaggttcctggagcggccccagggaatagtccacatagctatgccagcatcaagttctagaactttcagaagataggggaggagaaccaagcattggttagggaagagaggaaaagaagagaaaaccttagcactgttcagctcagcttctgcacataggagccagggactctgaggccttgtgaggtgctatgctgccccmttgcctgctctgtctcttccagctgtaccgcctcagaaacacctcaggaagaagtgctccaaagaaattagactcttaagagaaagtactagaacatctctctgcacccccaccccaaacccaaacaacaaacaaataaaacacctacagaaccagtaaaaaaaaaaaaaaaaaaaaaaacattgcggccgcaagcttattcccttta

SEQ ID NO: 7176 - DNA, 600 bp, Rattus norvegicus
gcgagtgttcatcaaccagttatatcagccaagtgtggtgaaagacatcagcagaaacccggatttgcaggccatcagaattgcttctgtgaaccccatcctggacccttggatctacatccttcttcggaagactgtgctcagtaaagccatagaaaagatcaagtgcctcttctgccgcattggtggttctggcagagacggttcagcacagcactgctcagagagtcggaggacatcttctgccatgtctggccactcccgctccttcctctcgcgggagttgagggagatcagcagcacctctcasaccctcctatacctgccagacctaactgaaagcagcctcggaggcaagaatttgcttccaggtacgcatggcatgggcctgacccaagcagacaccacctcgctgagaactttgcgaatttcagagacctcagactcctcccagggccaggactctgagagtgtcttgttggtggatgaggttagtgggagccagagagaggagcctgcctctaaggggaactctctgcaagtcacgttccccagtgaaacgctgaaattatctgaaaaatgtatatagtagcttaaagg

SEQ ID NO: 7177 - DNA, 600 bp, Rattus norvegicus
aaataataaaggtcctaggaacaccaacaagggagcaaattagagaaatgaacccaaattatacagaatkcamrwksycmsraatcargrcacayccywggacrarggtctttcgsccccgaactccaccagaggcaatcgcactgtgtagccgtctcctggagtacacgccgaccgcccggctaacaccactggaagcttgtgcacattcattttttgatgaattacgggacccaaatgtcaaactaccaaatgggcgagacacacctgccctcttcaactttaccactcaagaactgtcaagtaacccaccyctggccaccatccttatccctcctcacgctcggattcaggcagctgcttcacckcctgcaaacgccacagcagcctcagatactaatgctggagaccgtggacagaccaataacgccgcttctgcatcagcctccaactctacctgaacagccccaagtagccagctgcgcagggaagaccagcacttacttgagtgccactcagcaacactggtcacgtttggaaagaaaattaaaaararraaaamaaaaacaaammywwrmrrccscaagcttattcccttta

SEQ ID NO: 7178 - DNA, 1301 bp, Rattus norvegicus; identical to SEQ ID NO: 3082

SEQ ID NO: 7179 - DNA, 1400 bp, Rattus norvegicus
tgggcgtgtgtggacagatcattccgtggaacttcccgctcctgatgcaagcctggaagctgggccctgccttggcaactggaaacgtggtggtgatgaaagtggccgagcagacaccgctcactgcactctacgtggccaacttgatcaaggaggcaggcttcccccctggtgtggtcaatattgttcctggattcggccctaccgccggggctgccatcgcgtcccacgaggatgtggacaaagtggccttcacaggttccactgaggttggtcacctaatccaggttgccgccgggagcagcaatctcaagagagtaaccctggaactggggggaaagagccccaatatcatcatgtcagacgctgacatggactgggctgtggaacaggcccactttgccctgttcttcaaccagggccagtgctgttgtgcgggctcccggaccttcgtgcaggaggatgtgtatgatgaattcgtggaacgcagtgtggcccgggccaagtctcgggtggtcgggaaccctttcgacagccggacggagcaggggccgcaggtggatgagactcagtttaagaagatcctgggctatatcaagtcaggacaacaagaaggggcgaagctgctgtgcggtgggggcgccgccgcagaccgtggttacttcatccagcccaccgygwkcggagacgtcaaakwyggcakgaccatcgccaaggaggagatyttcggaccagtgrtgcagatcytcaaattcaagaccattgaggaggyygyggggcgagccaataattccaagtacgggctggctgccgctgtcttcacaaaggacctggacaaggccaattacctgtcccaagctctgcaggctgggactgtgtggatcaactgmtacgatgtgyttggggcccagtcccmrkywsgdsrykakraratgycggssarhggcaggrasytgggcgagtatggcctgcaggcbtacacgkaagtgaakacggtcaccgtcaaagtgccacakaagaactcgtaaaktggygtgcaggyttcctcagccagcgcccraaaacccaacaagatcctgrgaaaagccmccmccaagcacaytgcgcytgccaagagaaaaccccttcmccaaagcgtcttggsccmmgaaagtcaggatttgataaacagggcaggkytgktggscggykykyggggagcdtccccmgtaaactggggaagggaggagctytgtgcagabyaccacrcgcacgcacacacgctcaytgggtccttctgtgctggatgctggtyccaccctcagtgsttaaacaaatgrgcaataaaaatcagcagwtaaarmmwmvrrrwmarwwctytgagccctaarwwhwrrrwmwwwaaaaaaaaaaaaaaaaaa

SEQ ID NO: 7180 - DNA, 600 bp, Rattus norvegicus
aagaacgaatgtcccacgggcctsgtsgatgaagataccttcaaactcatttattcccagttcttcccccagggagatgccaccacctatgcacacttcctcttcaatgccttcgatgctrmtsskmacssksccatcymctwtgaggactttgtggttgggctctccatcctgcttcgagggaccgtccatgagaagctcaagtgggccttcaatctctacgacatcaacaaggacggttacatcaccaaagaggagatgctggccatcatgaagtccatctacgacatgatgggccgccacacctaccctatcctgcgrraggacgcacctctggagcatgtggagaggttcttccagaaaatggacaggaaccaggatggagtagtgactattgatgaatttctggagacttgtcagaaggacgagaacatcatgagctccatgcagctgtttgagaaygtcatctaggacatgtaggaggggaccctgggtggccatgggttctcaacccagagaagcctcaatcctgacaggagaagcctctatgagaaacatttttctaatatatttgcaaaaagtgaaaaaaaaaaaaaaaaa

SEQ ID NO: 7181 - DNA, 600 bp, Rattus norvegicus
ctcaccagccttgtgttcgtcttttcagcctaagggtgtgaacactttttctcctgaaggaagattatttcaagtggaatatgccattgaggccatcaagcttggttctacggccattggcatccagacatcagagggtgtatgtctagctgtggagaagagaattacctcgccactaatggagcctagcagcattgagaaaatcgtagagattgatgctcatataggttgtgccatgagtgggctaattgctgatgctaaaactttaattgataaagccagagtggagacacakaaccactggwtcacctataatgagacaatgacagttgagagtgtgacccargctgtgtccaatctggctttgcagttcggagaagaagatgcagatccaggtgctatgtctcgtgccttaggagtagcattgttgtttggaggagttgatgagaaagggccccaactgtttcacatggacccatctgggaccttcgtacagtgtgatgctcgagcaattcggtatgcgtcagagggtgcccagagcttcttgcaggaaggttaccacaagtctatgactctgaaggaggccatcaagtgttcact

SEQ ID NO: 7182 - DNA, 600 bp, Rattus norvegicus
atmmtgctggtgggcaacaagagcgacctscgccatcttcgggctgtgcccactgacgaggcccgtgcctttgcagaaaagaacaacttgtccttcattgagacctcagccttggattccaccaatgtagaggaagcattcaagaacatcctcacagaaatctaccgtattgtgtcacagaagcaaattgctgaccgtgcagctcatgatgagtcccctggcaacaatgtggtggacatcagtgtgccacccaccaccgatggacagaaacccaataagctgcagtgctgccagaacmygwgrctgccctgcacctccacccagcgtgcgtgcacgtcctcggtccttggccagcccctcaccagtgtcctcccggcccctcccttgtccctctaggacaggctgctcccaccctccaagtgagctccgcctgccagcccgatggcccaggaagagcaggagtccagtggcctctcctgtcctgcctgcttgagagaagctagaagcccccttgcttatgtacctgctcttggatattgtgggcatcttgacagggtagggaggttggtaggatggacaggaccagccagaggtgaggaa

SEQ ID NO: 7183 - DNA, 600 bp, Rattus norvegicus
aaagtagtatttggtcattcattgtatgtgtcttatatacccacccacacacagacacaaaggaaatctatcaaattaatcctgattgtattygaagtggktattcaattcatttatggcagagyaatatcagtcctaatgactcgtgaaagtgttactaactgaatcattatcttacatttactgtktagtaagcatattytgaaaaatgtatggctagagtgtcataataaaatggkatatctttctttagtaattacmttaaaattaatcatgtttgrttdamwrrwwmmwmwrawrwarwrwrwmatttcttaacatatagagaactgtagagcattttttttatttaatggcagtgtttgcaactcacaggcacagaaacacccagactaatcatttatcatagagatatagaacttacaggttaaatgattcacaatgtatgtaagagatgtatgattgtatgacatatgtgtggaataagctgggtggatgagaccaacatcacagaatctgacccaatagtgagtcatacctaacccataatgcaagcatttgggaaaatatttcctattaggagcatacccagataatact

SEQ ID NO: 7184 - DNA, 1400 bp, Rattus norvegicus
catctggagacatttttgcagaactttagggagctgggaccagcagtgctactgaaaatcttaacagattcgtttcaatagtgctgagctgaggacccctggtgttcagcaagggagtccctgagcgagacgaggagggctaaaattccaacctttctcccagaggacacttgccctacctgaggggatgggatggtgccctttcctcggtttagccaaatactctgaggaatgggggaggcatagttcttcttcgccaagaagaaagcataccatacctcattccacaggctcccaggtgctgatctgtgctaaaaaaaatttttttaaagaaatatttagtctttagtaggtcaaaaagtcagacactgtcatctctttgtagcacacaggtagcaggtgagatgagataaaggtcttcactgctaccgttgccaatggcagcagaggatcagaagccacagaacacgcccacccctacccccaccccattccgacccaggcaaataggcactgaagatagtaatggaagtctatagaaacaatgaggcgtcgttcagtgcacaggtatggaaagggcccagaatatattaacttaaaaaaaaaacaacgtgcagaatcgaggaaaggtctttgctgtccttccctggaagaagacaaaaacacactatcccacagaagagtgtccgtccacgtgagcagaaggccttgggtctctgacctccgtgcatgggttcacctggagcgttttcctgtccagtgcacatttaggaccaccaactttgctttatttcctgggagagctgtgggcagttgctctgctcttcgtccccagagttaaacagatcagctttttaggaactggccagaccactgacacagagcttgagacaaagccagtaaatggcctcttccttaataacgctagcaaacctgaaggagatgtgttttcaacactcaggaggcctgggggtgagaatttcaggtgtttgaaggagtccctagggaagtggggagcggtacacagaaactaggaccaagagcaacccttgcctttccacacctcttctttctaggctggggaggtgaaaagaacgaatggaaggtctgaactgaaggtggcccacagcagggacaaacctgccccgcccccagccccgcccctattcccgccccgccctctcacactgggaggagggatcgctacaatggaccctctgcgggctttgtgcactctccgaatccagcagtcgccgccccacggagccccgtgtccccggagggcgcccatttccgggccgcccttcacccggagcgcattggcagccacagtcccagcggagcccacagccgctcccgccttctccgtgtcgggcgatccccagtctgtccccaaaatg

SEQ ID NO: 7185 - DNA, 1400 bp, Rattus norvegicus
  misc_feature (850)..(850): n is a, c, g, or t
ggaatgaactttgtcatattgcagaaaccatggctagaggattggcatatttacatgaggatatacctggcttaaaagatggccacaagcctgcaatatctcacagggacatmaaaagtaaaaatgtgctgttgaaaaacaatctgacagcttgcattgctgactttgggttggccttaaagtttgaggctggcaagtctgsaggtgacacccatggccaggttggtacccggaggtatatggctccagaggtgttagagggtgctataaacttccaaagggacgcatttctgaggatagatatgtacgccatgggattagtcctgtgggaactggcttctcgttgtactgctgcagatggaccygtagatgagtacatgttrccatttgaggaggaaattggccagcatccatctcttgaagatatgcaggaagttgttgtgcataaaaaaaagaggcccgttttaagagattattggcagaaacacgcaggaatggcaatgctctgtgaaacgatagaagaatgctgggatcatgatgcagaagccaggttatcagctggatgtstaggtgaaagaattactcagatgcaaagactaacaaatataattactacagaggacattgtaacagtggtcacaatggtgacaaatgttgactttcctcccaaagaatctagtctatgatggttgcaccatctgtccacactgagaatcgggactctgaactggagctgctaagctaaggaaactgcttagtttattttctgtgtgaaatgagtagggtgcctccgggacacgtatgcaagcagccccttgtggaaagcatggattgggagacttcctgcagngtctgcaacacggatatgaagggggtctaaggggaaactgcgaactgtaaagaacttctgaaaacttacacgaagaatgtggccctctccaaatcaaggatcttttggacctggctaatcaagtatttgaaaactgacatcagatttcttaatgtctgtcagaagacactaattccttaaatgaactactgctattttttttaaatcaaaaacttttcatttcagattttaaaaagggtaactttttattgcatttgctgttgtttctataaatgactattgtaatgccaacatgacacagcttgtgaatgtgtagtgtgctgctgttctgtgtacatagtcatcaaagtggggtacagtaaagaggcttccaagcattactttaacctccctcaacaaggtatacctcagttccacggttgctaaattataaaattgaaaacactaacagaatttgaataaatcagtccatgttttataacaaggtattacaaactcactgtgttatttaagaaaaaatggtaagctatgcttagtgccaatagaagct

SEQ ID NO: 7186 - DNA, 1400 bp, Rattus norvegicus
ggagagtgcrggtgcagcctcagtgggcatgcacattctgtccctgcccagcaggagcctcttccacagggctgtcctgcagagtggcacacccaatgggccctgggccactgtgagtgcgggagaggccaggcgcagggccacactgctggcccgccttgtgggctgtcccccaggtggcgctggtggcaatgacaccgagctgatatcctgcttgaggacaaggcccgctcaggacctggtggaccacgagtggcatgtgctgcctcaagaaagtatcttccggttttccttcgtgcctgtggtggacggggatttcctcagtgacacgccggacgctctcatcaatactggagattttcaagacctgcaggtgctggtgggtgtggtgaaggacgagggctcctactttctggtttacggggtcccaggcttcagcaaagacaatgaatctctcatcagccgggcccagttcctggctggggtgcggatcggtgtaccccaagcgagtgacctggcggccgaggctgtggtcctgcattatacagactggctgcaccctgaggaccctgcccacctgagagatgccatgagtgcsgwggtaggcgaccacaacgttgtgtgccctgtggcccagctggctgggcgactggctgcccaaggggctcgggtctatgcctacatctttgaacaccgtgcctccacattgacttggcccctctggatgggggtgccccatggctatgaaatcgagttcatctttgggctccccctggatccctcactgaactacaccgtggaggagagaatctttgctcagcgacttatgmrryackrgrccaattttgcccgcacaggrgaccccaatgaccctcgagactctaagtctccacggtggccaccgtacaccactgccgcgcagcaatacgtgagcctgaacctgaagcctttggaggtgcgrcggggactgcgcgcccagacctgcgccttctggaatcgttttctccccaaattgctcagcgccacagacacgctggacgaggcggagcsccagtggaaggccgagttccaccgctggagctcctacatggtgcactggaagaaccagttcgaccactatagcaagcaggaacgctgctcagacctgtgaccccttggggacccaggtcctgccgtcctgcccgagcccctgattgtrtatacactatttatttaagggctgggatataatacaaccgagcccccaggccctgtccacccckccccgacttcctcccactaggggatcctcatcttctgcatgttttrrrctgagctcccctccccgcggwgccttsscccctctgggccgccaataaactgttmcwgctmmwaraaaarrrraaaaaaaaaaaaaaaaa

SEQ ID NO: 7187 - DNA, 600 bp, Rattus norvegicus
tctagtactgttgctgcctcaaacacagaactgaaccataaaacaccagaaagtttcagaggtggtgtacaaaatcagtctggaagtgttgttccaammgaaatcaagactgaaaamaaaraaaaarawraaaaccttcatgaacctccttcatcagatgacatgaaatcagatgatgagtcctcccagaaagacatcaaagtctcatctagaggcagaacaagcagtaccaatgaagatgaggatctgaatccagaacagaaaatcgaaagggagaaggaaaggcggatggctaacaatgccagagagcgcttgcgtgtgcgggatatcaatgaggcattcaaggagctcggccgaatgtgtcagcttcatttgaagagtgagaaaccacagacaaaacttctcattcttcatcaagccgtggcagtcatccttagtctagaacagcaagtcagagagaggaacctcaaccccaaagcagcctgccttaagagaagagaagaagaaaaggtctctgctgcgtcagcagagccgcccaccacgttgccaggaacccatcctgggcttagtgagacaaccaaccctatgggtcatctgtaa

SEQ ID NO: 7188 - DNA, 600 bp, Rattus norvegicus
acccccgtcgactggaggtgacatggcagacsccctcaacttggcctgatcccgaatcctttccactcaagttttttctgcgctaccggcctctcatcctggatcaatggcagcatgtggagctctcgratggcacagcccacaccatcacggatgcctatgctggraaggagtacatcatccaggtggccgccaaggacaatgagattgggacatggagtgactggagtgtggctgctcacgccacaccctggactgaggaaccacggcatctcaccactgaagcccaggcccccgagaccacgaccagcaccaccagctccttggcacccccacccaccacgaagatctgtgaccccggggagctcagcagcggcggaggaccctccatacccttcttgaccagtgtccctgtcactctggtcctggctgccgctgctgccacagccaacaatctcctgatctgagccctgcatcccatgaggacacgccagacgcctacagaggagcaggaggccggagctgagcctgcagaccccggtttctattttgcacacgggcaggaggaccttttgcattctcttcagacacaatttgtag

SEQ ID NO: 7189 - DNA, 600 bp, Rattus norvegicus
aacatgaggaaaagaacaaatgcattagtccactcagaatcagatgtcaacagcagaactgaggtggggaaccattccagcaagaccaccgctgcccaggagtcttctgaaaccactcctaaggcccacttggcttccagtccaaatccattcagcagggcaaatgcagctgagactatctctgcagcagcaagaggtctttcgtctgccgcatcgccctctcctcacgggacactgcagccagctcctttgcggtcggcgtctgctcgcccggcatttggagctagacttgggcgcattaagacaacagttaatacgacaggggtgcctgggaatgtgtcagccacacctcctccctctgctccaccaccttctggatctggcacaagtaaaatagacaaatatgctcgtattctctttccagtcacatttggggcatttaacatggtctactgggtggtttatttatctaaggacaccatggagaaatcagaaagtctaatgtaattttgttgctaaagcaatttcataaccgtgatggaaatacagactgtctttttaaatgtttttaaaggtaagtattctttactaaaataaaaa

SEQ ID NO: 7190 - DNA, 600 bp, Rattus norvegicus
ggaactaccaggaactytgcaaaagtaaggaattgaagaaagccattctggatgacatggtgatgttggggaaagaaagtggactgcattcttttgaacaggttaaagccatttacatccattgtgacatgttctcagttcaaaayggcwygmkgacaccaacactaaaggctaagaggcccgagctgagagagtacttcaaaaagcaaatakaagagmtgtactcaatctccatgtgaagctcaaggaggcccttctcagcccagcaaagtttgcagcaatattctaattattcttgagagaaaggagtcagaatgccmcagctcagagtgaacgagcacctgattttttttttttttgcaactgagcctttcctgacctgagaagtctctaacaatattttctctaccatcaccaagtacactttatttttattaaatgatattgtagcaagctgctaaaaaaattattgcaaacggtaatgtaaaaacaaatcaagacactttctcaagaactgtgtaccactaaagtaatatattcgcgatgttcacagaattccattaaacataaaraaaaaaamrwwaaaaaaaaaaaaaaaaa

SEQ ID NO: 7191 - DNA, 600 bp, Rattus norvegicus
cacatcagctcctggaaggcagccaccatcagagagcacaaagccaccgtgacactggcagccgtcatgggagcgttcatcatctgctggtttccttacttcactgcattcgtttaccgtgggctgagaggggatgatgccatcaatgaggcggtcgagggcattgtcctatggttgggctatgccaattcagccctgaaccccatcctgtacgctgctctcaacagagacttccgcacggcgtaccaacagctcttccactgcaagttcgcaagccacaactctcacaaaacttccctgaggttgaacaactctctgctgcccaggagccagagccgagaaggtagatggcaggaggagaagcccttgaagctccaagtgtggagtgggacagaactcacacacccccagggaaacccaatcaggtaaaggttgtgggttggaagtgctgggagacaccccaccttcagtgtagatggtgctaagaccattccatgagcattttacagaaatcatctctcatcctcccaatggctggctctcttaggtaaaacgtttaccttcagttttaaaaggccacattaaaggtagcagagatct

SEQ ID NO: 7192 - DNA, 600 bp, Rattus norvegicus
cggggttgtccggaacaacgaagccttagcaagactgtcctgtgcatttaagacagaaaaccaaacccggcaggtggtgtgtgaccttgggaacccgaagaaggctggaactcaactgcttgctggccttcgtttcagcgtgcaccagcaatcagagatggatacttctgtgaagtttgacttgaaaatccaaagctctaattcttttgacaatgtcagcccagtcgtgtcttacaaggtcgaccttgccgttttggctgcagttgagataagaggagtttcaagccctgatcacatctttcttccaattccaaactgggagcacaaggaaagccctgagaccgaagaagacgttgggcctgttgttcagcacatctatgagctgagaaacaatggtccaagttcattcagcaaggcaatcctgaacctccagtggccttacaaatacaacaacaatactttgctgtacattctccattacgacattgatggaccaatgaactgcacttcagatatggagatcaaccctttgagaattaagatgcctgaaaagaatgacacgggagctgagcaaggaggaaggaatcatctcatcaccaa

SEQ ID NO: 7193 - DNA, 450 bp, Rattus norvegicus; identical to SEQ ID NO: 3097

SEQ ID NO: 7194 - DNA, 600 bp, Rattus norvegicus
ttttcctgtgcctggttcttgggcgtcctttgctctggccttggcgtgtgtctctgcggtgtttgcttgtgcctcgtcggtttctttggggtcttttgtttctgctcttctgtcttctgctcgtgctgggccttggttgggctgttctgctgcgtccgtggccgttgcgtctgtgggctgtgcctgtgctctgtgcctggtgcctttggggtgtcgtgtgtgttgtgcccttcctgccctgttgcttgctgctccttgtgtgtctgtgtggtttgctcgctgcttctcctggggtttcctgtcttcctgtcctgcctcctcctgtgctttgttgtggtgttctcgtgggttgtctgcttcgtctttgtcgtcctggttgctgtgctttgcttcttcttttctgctttggtctgcgttttgttgttctgcttctctgttctgccctttggtttgtctttcttgtccgtcctctgggtgcctgtgtgtggttgtgccccctttgccttgtccttcctgctggctgtggttggctgcttcctcctggttggtttggctctcctggctttctggtttcttctcgtctccttcctcgtccgttgt

SEQ ID NO: 7195 - DNA, 600 bp, Rattus norvegicus
aagaccaaaaagggcatgttccgcaccgtgggccagctctacaaagagcagctggggaagctgatgaccacactgcgcaacaccacgcctaactttgtgcgctgcatcatccccaaccatgaaaagaggtctggcaagctggatgcatttctagttctggagcagctgcggtgcaatggtgtgttggaaggcatccgcatctgccgtcagggcttccccaacaggattgtcttccaagagttccggcaacgctacgagatcctggcagcgaacgccatccccaaaggcttcatggatggaaagcaagcctgcattctcatgatcaaagcccttgaacttgaccccaatctgtacaggattgggcagagcaaaatcttctttcgtacgggagtcctggcccacctagaggaagaacgagacctgaagattactgatgtcatcatggctttccaggcaatgtgtcgtggctacctggccagaaaagccttcaccaagaggcagcaacagttaacagccagtaaggtgatccagaggaactgcgctgcctaccttaaactccgcaactggcaatggtggaggctcttcactaaagtaaagccg

SEQ ID NO: 7196 - DNA, 1400 bp, Rattus norvegicus
cctcaaggacctactcaaggaggctacccaccagggccattacccacagagccccttcccccctaacccctatggacagccaccacccttccaggaccctggctcacctcagcatgggaactaccaggaggaagggcctccatcctactatgacaaccaggacttcccctcggtcaactgggacaagagcattcgccaggccttcatccgaaaggtgttcctggtgctgaccctgcagctgtcggtaaccctgtcgactgtggccattttcacttttgtcggggaggtgaagggctttgtccgggccaatgtctggacctactatgtctcctacgccatcttcttcatctccctcattgtcctcagctgttgcggggacttccggaaaaagcatccctggaaccttgttgccctgtcgatcctgaccatcagtttgtcctacatggtgggcatgatagccagtttttacaacacggaggcggtcatcatggccgtgggcatcaccacagctgtctgcttcacggtggtcatcttctccatgcagacccgctacgacttcacctcgtgcatgggcgtgctcctggtgagcgtggtggtgctcttcatcttcgccatactctgcatcttcatccggaaccgcatcctggagatcgtgtacgcctcgctgggcgctctgctcttcacctgcttcctggctgtggacacccagctgctcctggggaacaagcaactgtccctgagcccagaagaatatgtgtttgcggccctgaatctgtacacggacatcatcaacatcttcctatacattctcaccatcattggccgtagccaaggaataggacaagccccagctcaggtggcatggtgggctcagacccatgcccctgscatgacattgccatctgtgcttccccctctctggtycccagscatggcckggagcagagggagcccctctcgccctcgtgtatgtacactgcaaatacttaacgttcggaccctctctgccacagcatggmmmcctttatccctttkgccsktgccaaggggtgacagggctgcatttctgtgccaccttctgtctactcattgttgcatgagccctgtctgccagcccatcccggggtctgggatcaacaccaggtcccaggggagaaggatcataccaagaggtgagggtgcacgtcttccctcctgtcccagctcccctggcatagagtccccatgtcccctcctcaccctgccttctgaggggcttgcagggtggggyctcgttcttgttctgggccccgagascaagagagggtggcatgtttcaggggagaggctctcttgtgtgctgccattgtaaaatgccaataaaagggtatcttctgcwmwmwraaaaaammraawwmaaa

SEQ ID NO: 7197 - DNA, 517 bp, Rattus norvegicus; identical to SEQ ID NO: 3101

SEQ ID NO: 7198 - DNA, 1400 bp, Rattus norvegicus
  misc_feature (1382)..(1382): n is a, c, g, or t
ggcgatagggatcagtgtcctggwgattattgtcattatcatcattgwgtggwgtgtctcttwatgaakaacagaggaaatgaakcctgacggcaggatcttcttcgagactttctacttagaactgcgtgttgtcgcacttcccatgwttwtttktkttwkttyhcmyamagttmwktgsytagwtrywtwywkktywkwkccyaaawatgtgcctttgtttttcatatacactcgaggtgtgacctgccctgcccacattttgcacagtgcctttacagatttatggactgggaaagaggacttgtgtgtttcagagtgctgagatctaggtggwtgttgtcactgatggcttgtggattcaaggaagaggattttgttcaagtcagctgtccccacacctaacatggacttcaaaaccacagtttaaacctttgggtaattagattcccaacttggaccttccaagaagaacactactgcctaacaaaaatcagtgacaacagcagggcrtgccttattttgataactaggtaacttttcattaagagtacttttgtaagcactaccgaccccgctgtatttaasaygmtggtgaagagctcatgctcttatgttagatacggagatgttcactttctagttcttgttgwgtatcacttctaaaacagtattttaatcagaaataaccctttaggaagtttttatagaactgtgaccaaagtttctattttgccaaaagttaaatacaaatgaattgtccataagtttgtcccccagtagtarattcaaataagtgccaagtgtaaytyaaggtgccctttaagaaaaaatgttrgtactgtctgagcccscagcatcttgacagtccttcctgtggaatgctgtaggtacagcttctcatcctgatgtggwttctttcctasagckatagaggtgacctcaaatcacacctgtatgcaagatagtagtttgcagamtgcamtagcctgtggccamtastgtgatgrgagcagcatytgaagcstcacaaaggcaacagtytgcacagagttctgggagactgtggcagtsccmccaggatgtcctgaaatgtgtgtctgtgtgcaaagcagcattagccaaaatgtcataggatctggwtctagttttttttatctgrtcccctaacattacygaaacaaaacaagtgttgaagacatgccttgccacatagctagggcctctgtcctggtctgaccccacaactttggtgctgtctcctcgtactctgtcccatgtaagtcgttggctcctgtattaacacagtaatacctcgcttctctgtgcatttagctgggaatgttcccgctatggtgaccggaataaagttwttamcdygnvwmrwraaaaaaaaaaaa

SEQ ID NO: 7199 - DNA, 600 bp, Rattus norvegicus
  misc_feature (44)..(44): n is a, c, g, or t
aaaataaaatadtaaaawmmwgtargcwcggaagtgctvvahrnmmamwvarrmwmwmwvttrawrmggcygaaccaaatacaccccaagcatcctgtctctatggagacagcttacctctcagctccccaaatgaacctgcctataaataacacaccactgttggctcctaggagatgagaaatagtgtctaagcaccctgaactgtggagaaatgctgctatggccttcgggaggttgttggtttttggtttggtttgttttttttttttttttttttttwaacwacwgcaaaaccggcccagaagagcgtctgaactggtagcgaatttgatattaaccagctgctgcacctccactctgtgatcccccaaagcttaaagttccagggcccttcgcatcctcttcgttacccttttttttttccttttttaactagtatatttatttgcttacggaaaacacagtcttgacgctgaaattttgctaatcttctcagaggtcaaaggcagccaagacagaaacgcaaatgatctgtctgagcccaagggaaggaaaattgattacaaaaatcattaattttcgtctgagtctctttgg

SEQ ID NO: 7200 - DNA, 600 bp, Rattus norvegicus
agcccctctgctatctatatcctggcttctaatcaggcccctgcttctcttccatagagcctgtcaaggggtcctgcctggtgggtgtcagagcacaggtcagggcctcatgcttgatgtgggacccctgggcctggcatttgtcagtgaggcagttagggactgcctggagcttggcaggagcccaggctgcccagcagtgggccccacactggtgacaggggggctctctcagggatagaggaaggacagccatggctaagtgcccaccagggcgaagcataatctagggagacagatgcaagacctatcggctaagactcgcattcccagaggccagacagacttgggaggggaggatctttgtcagctagtgtctccttttggacttccccccagtgtcttcggaaaggcagagctcttgagtctgtgtattaaacctaatttcagctaagcatcttgggaatgcatgaatggttcccacatctcttccccagtaacccctggggacagctgagactccagggtcacctcccacctagccccattctctgcatgaacagaggcttaggtgcaaggctctgtaacaggctgggatcc

SEQ ID NO: 7201 - DNA, 600 bp, Rattus norvegicus
tacatcctggcctccagcatcggatctttcttcgctccttgcctcatcatgatccttgtctacctgcgcatctacctgatcgccaaacgcagcaaccgcagaggtcccagggccaagggggggcctgggcagggtgagtccaagcagccccgacccgaccatggtggggctttggcctcagccaaactgccagccctggcctctgtggcttctgccagagaggtcaacggacactcgaagtccactggggagaaggaggagggggagacccctgaagatactgggacccgggccttgccagccagttgggctgcccttcccaactcaggccagggccagaaggagggtgtttgtggggsayctccagaggatgaagctgaagaggaggaggaggaggaggaagagtgtgaaccccaggcagtaccagtgtctccggcctcagcttgcagccccccgctgcagcagccacagggctcccgggtgctggccaccctacgtggccaggtgctcctgggcaggggcgtgggtgctataggtgggcagtggtggcgtcgacgggcgcagctgacccgcgagaagcgcttcacctttgtgctggct

SEQ ID NO: 7202 - DNA, 562 bp, Rattus norvegicus; identical to SEQ ID NO: 3106

SEQ ID NO: 7203 - DNA, 1400 bp, Rattus norvegicus
cccggccgttcagccgggcgctcaaccggcaactcagcagcggtgtgtcagagatccgacagacggccgatcgctggcgcgtgtccctggacgtcaaccacttcgctcctgaggagctcacagtgaagaccaaggaaggcgtggtggagatcactggtgagtttcccttatcccaagaggggacgaagctggtggggcgagcgagtaccgtggtggcagtggaggtggggggtgggggtgggtgctgaaaccttgagggacaggaccctgaaaagttagaaatgagctcagggacccggagacccgcgtcattctccctagcctgcttctcttgccccggaacgcgggtgcaggtttgctcctaaaagctctgtcatcttcgatgataaggaccaacagctgggggtgtagctcagggcagagtcttgcctggcaagcccggagccttgaggcttgaccacccgcagcacagaaacaaaatgaaggaagacccaaggcaccttctggaagacctcatccccaaataagcaagtggcaggactccagtcagggacctccagtcagggtccctagacccagccgcggtgggggcgtgcgcacagcttcgagtatgcctacgatctggcatccaagcctgggtcagagccaagcccaggtccgggacctttgcatccccaaatctcagaagcgaactttctggaaagttttaagatcccagacagtcaggcatcccaccacactcttaatttgtttgcctccttgggccccagccattccttagctaggactgcagagggctgcctctgacctccttctgtcccacccacaggcaagcacgaagaaaggcaggatgaacatggctacatctctcggtgcwysasscggaaatacacgtgagttctggttccttgcatggagagctggggggtgggggagcggacmctgggcvgagsvcgrrgwmaggmdgrayrwrydrhmyhtstysbdksttycbgswmmtmyasgctccctccaggtgtggaccccmccbkggkgtcctyttccctgtcccctgagggcacactcmcsktgraggytccgytgcccaaagcagtcmcacaatcagcggaratcvccattccggtcactttcgaggcccgtgcccaaattggagscccagagtcggaacagtytggagccaagtaraagccttcagcttsbtacccatccccagtagccgtcaccagccctccctbtytgtcaatytgaatgctcttttgawacatgkactttctgwtttwytcaartaaaagttggaaactaywrmwhvmmmmmmwmwmaraawaaaaaaaaaaaaaaaaaaaaaaaaaaaaaaaaaaaaaaaaaaaaaaaaaaaaaaaaaaaaaaaaaaaaaaaaaaaa

SEQ ID NO: 7204 - DNA, 600 bp, Rattus norvegicus
cgttgactgcagactctcagggccgcgtgggctggcgctggattcggatcgacaccgcttgcgtctgcacgctcctcagccgaacaggccgtgcctgacgtccaggcttgggaaccgctcaggttgaggaggaaaaaaaaaaccctggatgctgaaaggaccacagggatggctcgactgctctaccgtgccttctgactgtgaactgaaataaccacagaatcaaatctctctcattttgagagctcagtctgtgtggaatgtatgaggaaaccaaatggggtttcaactgatgaataggagttctcccgaaggaacttgacattaataatagccaatgtttactatctactgtgtatcagacctaatgtgtgactctgctaaccattttaacatcagaggaccctgacttaccctggcaagagagacgaggaaagactacgtgaaaaatcaatgtatgagctggggctaggcctcgatcagtaggctgtttctggttgcctagcatgcacacagtcctgggctctatcctgagcaccgtatcataaaccatgcacggtggtactcatctgcagtgccagttcttggcggccgcgaatt

SEQ ID NO: 7205 - DNA, 1400 bp, Rattus norvegicus
ccgcctgacaaccgcactccttgtgtggagaacattaatggcatgacttcagcctttctgttttctctagagactcaagtgaccataggttacggattcaggtttgtgacagaacagtgcgccactgccattttcctgcttatcttccagtctattcttggagtgatcatcaattccttcatgtgtggtgccattttagccaagatctctagacccaaaaaacgtgctaaaaccattacgttcagcaagaatgcggtgatcagcaagcgtggcgggaagctctgcctcctcatccgagtggccaatcttaggaagagccttctgattggcagccacatatatggcaagcttctaaagacaaccatcactcctgaaggcgagaccatcattttggatcagaccaacatcaactttgtcgtcgacgctggcaatgaaaatttgttcttcatatccccactgacgatctaccacattattgaccacaacagccctttcttccacatggcagcagaaactctttcccaacaggactttgagctggtggtctttttagatggcacagtggaatccaccagtgcaacctgccaggtccgcacgtcatacgtcccagaggaggtgctttggggctaccgtttcgttcctattgtgtccaagaccaaggaagggaaataccgagttgattttcataacttcggtaagacagtggaagtggagacccctcactgtgccatgtgcctctataatgagaaagatgccagggccaggatgaagagaggctatgacaaccctaactttgtcttgtcagaagttgatgaaacggacgacacccagatgtagcagtggcttttccacctacaaaaagcctcccaaggacctaagggttgactgtgttcagaagcatctgacgggggtctgaaagcaggatgagaacatgcgaaatctgctagcacagtcacccctgaaccccagggctatggttctacaagacacatagctctctaaggctgcatacggtgcatgcatgtgaatgaaactgtggaagccaaaggggcccacttggatcctcactatgactgtgtaagctcatatcgtgttgatggaaacaaagtcattcaaggacaaaacttaggagctttagaaagcttcaggaactagccacatttcctgtgtcttccaaagggaacaagttagcaggagaacttctttggaggaaggttctagtgtgaaggtcttgtttcttcatttccatacctgtatcattccaaattcaccttgaaaaaaaaaagtagagttcaaagctgctcaaagatcaaaatttttccggtatgtgattaataaatttctgaaacgtaaaaaaaaaaaaaaaaaaaaaaaaaaaaaaaaaaaaaaaaaaaaaaaaa

SEQ ID NO: 7206 - DNA, 600 bp, Rattus norvegicus
gcgcggcrccacgcctttttccgcagtcctcgccggatgcggcctctggtggaccgcttggagccgggcgaactcatccctaacggcccmttctccttttatggagattaccagagtgagtactacggtcctggaggcaactacgacttcttcccgcaaggaccaccgtcctcgcaggcccagacaccagtggacctaccctttgtgccatcatctgggccttcggggacgccccttggaggtctggaccacccgctgcctggccaccatccttccagcgaggcgcagcgattcactgacatcctggcacatcccccaggggactcgcctagtcctgagcccagcttgcccgggcctctccactccatgtctgcggaggtctttgggcccagtccacctttctcatctctgtcggtcaatggtggagccagctacgggaatcacttgtctcaccctcctgaaatgaatgaggcagccgtgtggtagcggggtctcgcatgggccacgggagctcgtggttgtacagagacgagcttttatttcagaaaataggagatttaaaaaaaaaamwdamraramwawwwawmammaggagaatta

SEQ ID NO: 7207 - DNA, 600 bp, Rattus norvegicus
gagatcattaagatcacagaacagctgatagaagccatcaacaatggggactttgaggcctacacgaagatttgtgacccaggcctcacttcctttgagccagaagcccttggtaacctcgtggaggggatggatttccataagttttactttgagaatctcctgtccaagaacagcaagcctatccacaccaccatcctaaacccacatgtccatgtcatcggcgaggacgcagcttgcatcgcctacatccggctcacccagtacatcgatgggcagggtcggcctcgcaccagtcagtcagaggagacccgggtgtggcaccgccgggatggcaagtggctcaatgtccactatcactgctcaggagcccctgctgcaccgctgcagtgagctcaggcacaggggcattaggagattccagctggaggctgaaccttcgaagtcagtgactctggagggcctgagtgacagccgcggtcctgtccatttgaggtttaaacaattacattacaaagcgcagcagccaatgacgcccctgcatgcagccctcccgcccgcccttcgtgtctgtctctgctgtactgaggtgttttttac

SEQ ID NO: 7208 - DNA, 444 bp, Rattus norvegicus; identical to SEQ ID NO: 3112

SEQ ID NO: 7209 - DNA, 853 bp, Rattus norvegicus; identical to SEQ ID NO: 3113

SEQ ID NO: 7210 - DNA, 1400 bp, Rattus norvegicus
cagctcggaccctgagtgccatcctgctggccttcatcctcacctggacaccatataacatcatggtgctggtatctaccttctgcaaggactgtgttcctgaaaccctgtgggagctgggctactggctatgctacgtcaacagcactgtcaaccccatgtgctatgcactgtgcaacaaagccttccgggacacgttccgcctgctgctgctctgccgctgggacaagaggcgctggcgcaagatccccaagcgccctggctctgtgcaccgcaccccctcccgccaatgctaacggcccccttctcctgcatccttccaccccagctccagggagaggccggtggaaagtgtcccggaaaacgggctgcatcttcagccccagagccctgctcaggactcccctggcttcccaggcccctgggtcaccttcctggacagcccagagagactctactagctttccaaactttgctattcccagacggggaatgaaacccggggaactggttttctgatccccgctgtgtgggaatgggcccagcaggaggatccgggctttggactgtttgcgtttaggcaggaagtcaggagccagcggggtgggccggccggccagtagtttaaaggtgcagtctttcttggcccagcagggggcctggattgcagtggtcatagaacccactgcatctacatttgggagatgacaccaagcacagagagaaaggtttggaacggggaggggggagggggtggggtgttggagggagggaggttgtgacccctggctggamaykmsstcctttcctaggcagagctcatccaggtaggccctaggcacactctccaggatcgttcaacctccttacaaatgaccccaggtcatccctatgtggatcatctccaagacaaatatccaagcgtgagcaggacaatgacactaggggagagcagcttggctaaacacaccaagtcccaaagcagcatcaggaccagatgtcaggtgtcctaaccggcccattctatgccattttcctgggggtgggggtggggtaaggtgcctgctccagtcccacaccctttctcctctctccctgccccgaagtgacctaggcccctcccttctggctcacagccattacctgggtggatctgctctgggcagatctagccagacctcctgcatgctgcctgcctcctccagcctggccccacacaggtctggcccagccagcagattctcttctgtaaactcctgaatccaatccatgcatggcctccctgccaccctgatctccaggccctgcctgcccctgttctttctttccatcctcagcatatgctgagtctgtgaataaagccacgtaactagtgggaactacaarraawwmaaaaaaaa

SEQ ID NO: 7211 - DNA, 1037 bp, Rattus norvegicus; identical to SEQ ID NO: 3115
  misc_feature (552)..(552): n is a, c, g, or t
  misc_feature (642)..(642): n is a, c, g, or t
  misc_feature (661)..(661): n is a, c, g, or t
  misc_feature (813)..(813): n is a, c, g, or t

SEQ ID NO: 7212 - DNA, 600 bp, Rattus norvegicus
aagaaagttgctctgagtacccagcctacaacttgctggcaagataaaaacgatgtgctgcagctccagttcacgggcacctctgcctactatacttacctgctcctgctcctcaagagcgtgctctacttggccatcatcagcttctttctgcttagaagaacagctkcctgtggcaataagaagagmtcctaaggaaataaacggtggaccagcaagtccrttgatyttyatccttactgtcataaaggtgacttatgggggtccagctgccttctcttgctggctttgacttctgtaaagtcacatgcacakcattctgttattgtgcaaacatttttctcacatttgtaagcaatttyagcaayttctctctaactgagctcaccttcctgattccatcctctccagcagtcccctcccccagaagcccaaagtatcaaagctctggtacgcataggctgcaggatttcccttgttgctcttgaaccagtcaactctctgaaagcctccgctctagacaacctgaagagccttctttattgttggattctgtgccttgtatttcatattagagacaataaatattttttaaaaatc

SEQ ID NO: 7213 - DNA, 600 bp, Rattus norvegicus
atgctactgttctggaagcttgcwygaragkaagkaaggatatgctgcagcttcaggtcaccaccacctctgccttctacgtctacctcaccctgttcttcaagagtgtggtccacttggccttcgttgtrttckggctgttcagaagagtaaatatgccttgtgatggccaacgttccagtggatgatgaamcaggaaggtcatgctatcttcatccytcctacmtytcaatatctgctgaggrtctagcttggcttgcttgctgrctttgatgtccacaaggacacatatgtgkggtttttgkrtcattacwataattctcagagcagagaaatcaacttcactctmtaacaaatrktagcttccaagcacccaatsgtcytgacccatcctytctcagtccctbtagtagccctagcaacacaggcccawtgtatataaactccagtttcctagtaccccacttcatgccctagaaccagatagtgcccccaaagcctttacttyatatgctstaaataactttattaggatttamattttgtgttttgttttataraatataatawaaaaatccagcctaamvmaaaaaaaaaaaa

SEQ ID NO: 7214 - DNA, 327 bp, Rattus norvegicus; identical to SEQ ID NO: 3118

SEQ ID NO: 7215 - DNA, 600 bp, Rattus norvegicus
ctccctactgggtttgagacagacactttttatatttacctcctgatggcatggagactctgagagcaaatcatgtagatgactcgatgccacaactcgcactgcgtgcagtgggaaggacagaaagcccagtgcatctggcatgttgccaggagtggtgatgggtgctgggctcgcctgggagcagcccccataccgtgttgtccactggactgcaggtttcctccagggaccagtcaactggcagatactgagaggaaccggaagtgtcctcccttttacctgtgggcagtcctgagccacgccatccccttctcatctggaggaccgcccctagagacacaacctgctgcctgtctgtccagccaagtgcgcatgtgccgaggtgtgtctcacattgtgcctggtccgtgcctcgcccgtgtgtgtgtgtgtgtgtgtgtgtatgtgtgtgtgtaggtgtgtgtgagtgtgtgtgttagtgtaggtgtgtgagagtgtgtgtgtaggtgtgtgagtgtgggtgtgtgagagtgtgtgtaggtgtatgtgagtgtgtaagtgtgtgtaggtgtgtgagtgtgtaggtgtgtgagtgtg

SEQ ID NO: 7216 - DNA, 1400 bp, Rattus norvegicus
atgaaccctccaacgactgccagaagcatgctgtcattgtgtctgtcatcaacagctccacctccatatttgccagcattgtcaccttctccatctatggcttcaaggccaccttcaactatgaaaactgcttaaacaaggtgattctgctgctgaccaattcttttgaccttgaagatggctttctgacagccagcaacctggaggaggtgaaggactacctggcatctacttacccaaacaagtacagtgaagtgttcccacacattagaaactgcagcttggaatcagagctgaacacggctgtccaaggcacaggcctggccttcatcgtctacgctgaggccattaaaaacatggaagtgtcccagctctggtcagtgctctacttcttcatgctgctgatgctgggaatggggagcatgcttggaaatacagcggccatcctcacccctctgactgacagcaaggtcatctccagctacctgcccaaggaggccatttcaggtctggtgtgcctcattaactgtgctgttggcatggtgttcaccatggaggctgggaactactggtttgacatattcaatgactatgcagccacgctgtctctgctgctcattgtgctggtggagactatagctgtgtgctacgtgtatgggctgaggagatttgaaagtgatcttcgggccatgactggccggcccctcaactggtactggaaggccatgtgggcttttgtgagcccactgctcatcatcggcctctttatcttctacctgagtgacyacaksctcacgggaacgctgcagtaccaagcctgggatgctactcaggggcagctggtgaccaaggattascctccacatgcactagctgtcatykgtttgctggtggcttcatctactatgtgcatccccctggtggccctggggactttcatcaggaatcgcctcaagaggggaggctcttccccagtggcctaagaatggacctcccaaagaccgaagtcagccactctgkkkcacagttaccacctgctggtgggatcttcttggctggagkgctggtctgtggcctcctgagtctgtatagaagatgagagagcttagcaaaagaagactgccttggggaggggaccacatcccttaggaggggccctccatcctctgccgtctgaaggtcataccttatagcctctttgtcatcaaaggttaaggccagtattgaagattgttgttttcttgattctagaaagttctagaatttaaggtaaactgtcattagaaacttgactgtaactctaaggagccaaacaagcaattacattttttttattgttgttgttgttgtttaaaagaaaacaaaatactagagggtatttgcttttcaaccagtgtcag

SEQ ID NO: 7217 - DNA, 102 bp, Rattus norvegicus; identical to SEQ ID NO: 3121

SEQ ID NO: 7218 - DNA, 600 bp, Rattus norvegicus
  misc_feature (589)..(590): n is a, c, g, or t
gcctgctggtggtggtggtggtcgtgttcgcgctctgctggctgcctctgcacattttcaaccttctgcgggacctggacccgcgtgccatcgacccctacgccttcgggctggtgcagctcctctgccactggcttgccatgagctccgcctgctacaaccccttcatctatgcgtggctgcacgacagcttccgagaggagctacgcaagatgcttctgtcttggccccgcaagatcgtgcctcatggccagaatatgaccgtcagtgtggtcatctgatgacactctgccaggtctgagctggggagcttcagagtcattagccccggaagtcatcatgagatcttattcccatttgccaacacaagtgaaattcctacccagccctctagactagctatatgtctgtttgtgtgcttgtgtgaaatgttagataggctttggagtagaagagcctgaggagagagaagcagatttatcaggtctacccctgaaagcaaaagagatatttttctgggttcagaaaaaataaatcagaagcagtctttctttccttctctctctctctctctctctctctctctctnnctttctttct

SEQ ID NO: 7219 - DNA, 1400 bp, Rattus norvegicus
tgccaaagataaagggacaggacgtgagcaacagattgtaatccagtcttctggtggattaagcaaagatgatattgaaaacatggttaaaaatgcagagaagtacgctgaagaagaccggaggaagaaggaacgtgttgaagcagttaatatggctgaaggaattrttcatgacacagaaaccaagatggaagaattcaaggaccagttgcctgctgacgagtgcaacaagctaaaggaagagatttccaaaatgagagaactccttgctcgaaaggacagtgaaacaggagaaaacattaggcaggcggcatcttcccttcagcaggcatcattgaaactctttgaaatggcatataaaaagatggcatctgaacgggaaggttctggaagttctagcactggggmacagaargaagatcaraaggaagagaarcagtartagtggcagtgcattgtggagcyaggacgacatactatgaagcttgggagtaaaggaacttcctgagcagaaaaggggcaaacttcagtctttttactgtatttttgcagtattctatatataatttccttaatatataaatccagtgacaatatataaatccagtgacaatagctataactcatttaatggtaataaagtcagcaatagcaggttcacacttctataactagcctgctgttttcagykgcacgyaaaggggtgggatgggsctgbgyacsaatcattattaggtaaatctggtttgtgctgaagtagctatgttwtcragatggaagcccatttcacatgcarkasagkwratctgtcatggaccytgaattgrggttcatatgcagatgctwgttgaccaagagcactgctwwaaatgacctgtgtgkacatttgctccttcaactgatgccttgcaagactaagctctctgtgtcatggyctataggyacagargttaggtcaatggataacagctgtgttagccatagcttaaagkgatyyatcargaattatacaagcctctcatgggcctaaggcatacttctccagytaccctcttgggtggmcaatgtctgacatctatattcttgatgattkktyytttytcaymcattctggattkttwtttwwtttaataaaattctgmamgccwmwwrawmwvmwwwrwraawrrkagtagctcaaggactatgactgtaccayyaggkttgygagtagaggtaaaaaatcaacmcykgctaaaaggttgaacaaattaaacatggtgagggactaaataacatgttggcatgtatgctggatgtggaagcccactcaggaagcagtgtgaagccaggcggggctacacaatgagacaccccgtcttaataaaatactggcataaacgaaaammwmrwrmmraaaa

SEQ ID NO: 7220 - DNA, 1352 bp, Rattus norvegicus; identical to SEQ ID NO: 3124

SEQ ID NO: 7221 - DNA, 600 bp, Rattus norvegicus
atctggtgctcactctgcccacagagcccttgtctacctctctgggtccctctctagaggtctcctcagcccaaagccccagtctctgtctcaagctgcccagggtcccttctgaaagtccagctcttgcaccagcagtgtttgaagattacgtggagctgcctccaagcatgagccagcctgccaagtcccttccaggcaatcctgctcctcctgggccaagcagccccgcagtgagcccaggagagcccagggaggaagtaggcgcagcccccacacaccctgaaggcctccttgttcttcagcaggttggggactactgcttcctccctggcctgggacccagccccctctcaccacccagtaagccaccctctccgggcctgtgtctcgagactgaggacctagacaaggacttgtctgtcaaaaagcttccctaccaacccataccccaggtgccagccattcagtttttcaagtccctaaagcatcaggactacctgtcactgcccccttgggacaatagccagcctgggaaggtgtgctgagtctcccccctcccaatctcaccagcagccctgcgcctcagcctgtggacct

SEQ ID NO: 7222 - DNA, 600 bp, Rattus norvegicus
ttgcagcatataagtaggccgcgcacgttcggccaagggaccaaggtggaaatcaaacgtactgtggctgcaccatctgtcttcatcttcccgccatctgatgagcagttgaaatctggaactgcctctgttgtgtgcctgctgaataacttctatcccagagaggccaaagtacagyrsraggtggataacgccctccaatcgggtaactcccaggagagtgtcacagagcaggacagcaaggacagcacctacagyctcagcagcaccctgacgctgagcaaagcagactacgagaaacacaaagtstacgcctgcgaagtcacccatcagggcctgagctcgcccgtcacaaagagcttcaacaggggagagtgttagargswkaagtgcccccachtgctcytcagtwmcagcctgaccccytcccatcctttggcctctgaccmtttttccacaggggacmtacccmtattgcggtcckccagvtsatctttcasctcacccccctcctcmtcmktggctttaattatgctaatgttsgaggagaatgaataaataaagtgaatctttgcacctgtgmaaaaaaaaaaaaaaaaa

SEQ ID NO: 7223 - DNA, 772 bp, Rattus norvegicus; identical to SEQ ID NO: 3127

SEQ ID NO: 7224 - DNA, 600 bp, Rattus norvegicus
aacaatctcaaggccggcggaggaccatttctgccacggaccggggacaagggcatgttgggcggcggcagtgacgcgggcctggccaccgccgcggcgcggggacaggtggagacggtgcggcagctcctggaagccggcgcagatcccaacgccgtcaaccgcttcgggaggcgcccgatccaggtcatgatgatgggcagcgcccaggtggcagagctgttgctcctccacggagcagaacccaactgcgccgatcctgccaccctcaccagacctgtgcatgatgcagctcgrgarggcttcctggacacrctaatggtgctgcacaaggcaggggcacggctggatgtgtgtgacgcctggggccgcctgccggtagacttagctgaagagcagggccaccgtgatattgcgaggtatctgcacgctgccactggagattgattgcaggtcctcagcctcctgcaaggaccattttttttttctccccagccctatctaggaagactgtaaacgtggagaggatcagcagcgcacagcctgctggccttccagaacccacctaccaggaaggcaagcaatcagaatacttctagt

SEQ ID NO: 7225 - DNA, 1400 bp, Rattus norvegicus
gagaacaccaaacaagtggtcctctttgtcttctacctggccatctttgtggtagggttagtggagaacgtcctggtgatatgtgtcaactgccgccgctcaggccgggtggggatgctgaacttatacatcctcaacatggccgtcgcggacctgggcatcatcctgtctctgcctgtktggatgctggaggtcatgctggagtacacctggctctggggcagcttctcctgtcgcttcattcattatttctaccttgccaacatgtacagcagcatcttcttcctcacctgcctcagcattgaccgctacgtcaccctcaccaatacctctccctcctggcagcgccaccagcaccgaatacggagggccgtgtgcgcaggcgtctgggtcctctccgccatcatcccactgcctgaggtggtacatatccagctgctggatggctccgagcccatgtgcctcttcctagcaccttttgaaacgtacagcgcctgggccctggcagtggccctgtcggctaccatcctgggcttcctactgccttttcctctcatcgcagtgtttaatatcctgtcagcctgccggcttcggaggcaagggcagacagagagcaggcgccactgtctgttgatgtgggcttacatagytgtctttgycatctgctggctgccctaccacgtgactatgctgctgctcactctgcacacaacccacatcttccttcactgcaacctggttaacttcctctacttcttctacgaaatcaytgactgcttctccatgctacactgtgtcgccaaccccatcctctacaactttctcagcccgagcttccggggccgactgctgagccttgtggtccgttaccttcccaaggagcaggccagggcagcaggcggtcgagcctcctcttcatcttccacccagcactccatcatcattaccaaagagggcagcctgccgytgcagcgratytgcacacccacgccatcagaaacgtgcaggcctcctytytgcctccgaacacctcacytacactytgcaattccatagccagytaaggtrgattytagcttcttccmccaagaacaaagttgrgagggggatsccagaggtctktgggaggggktgggaaggactggcttkttcagggtcaatgttaagtatatcaaaatgttsctktagggagagggagaaggttcgggacgsacggagaatsrgtcktbcckwrdtvgtttamytawwwrwwwrrrwamwrwatgtctaagagggcacacaggtgggggtggggcagagaagcgaaataaataaatcatagagacagmaawwaaaaaaaaaaaaaaaaaaaawrraagcggccgcaagcttattccctttagtgagggttaattttagct

SEQ ID NO: 7226 - DNA, 600 bp, Rattus norvegicus
aaagtgacaatgtgcttttgggaatggaaggctcagttaaactcactgattttggcttctgtgcccagatcacccctgaacagagcaaacgcagtacwatggttggaacgccatactggatggcaccggaggtagtcacgcggraagcctatggccccaaagttgacatatggtctctgggcatcatggctatcgaaatggtggaaggagagcctccatacctcaatgaaaatcctttacgggcattatacctgatagcaacgaatggaacacctgagctccagaatccagaaaaactttcccccatatttcgggatttcttaaatcggtgtttggaaatggatgtggagaagaggggttcagccaaagaactattacagcatcctttcctgaaactggccaaaccattatccagcttgacscctctgatcctggcagctaaagaagcaatgaagagtaaccgctaacgtcgtcagcgaggcctcatgttcctttatccattttctaaagaagtcttttaatacatgaaattgttactctgaggggtgtaaagagacagtttgcatcacatggagaaaagcaagcaaacttattattttc

SEQ ID NO: 7227 - DNA, 600 bp, Rattus norvegicus
ggacctactcagatgcagagtgctgacatcagggatctttgagacacgattccaagtggacaaagtgaactttcacatgtttgacgttggaggccagagggatgagagaagaaaatggatccagtgttttaacgatgtcactgccatcatctatgtggcagcctgcagcagctacaacatggtgatccgggaagataacaacaccaacagactccgggagtcgctggacctgtttgaaagcatctggaataacaggtggttacgaaccatttccatcatcctgttcttgaacaaacaagatatgctggcagaaaaagtcttggccgggaagtcaaaaattgaagactatttcccggagtatgccaactatactgtccctgaagatgcaacaccagatgcaggagaagatcccaaagttacaagagccaagttctttatccgggatctgttcttgaggatcagcacagccacgggtgatggcaaacattactgctaccctcacttcacctgcgccgtggacacagagaacatccgcagagtgttcaacgattgtcgtgacatcatccagagaatgcacctcaagcagtacgaactcttgtg

SEQ ID NO: 7228 - DNA, 395 bp, Rattus norvegicus; identical to SEQ ID NO: 3132

SEQ ID NO: 7229 - DNA, 251 bp, Rattus norvegicus; identical to SEQ ID NO: 3133

SEQ ID NO: 7230 - DNA, 600 bp, Rattus norvegicus
cgccatggagaaagtcccccacagcttccccaccctctgtccacctctcagaccccacgcttctaaggaccattgctgggttggctttsaaaagctgctgctctcatctggtgccaaaagttcatttgcagcttctacaccgttytgtgtggtttggggattgactttattcccccacaaaagaggwamagycwktagaagccmkccwcccctccttttgrtgytswkmcmamtbtgargmrygagcttgcttgtaagccacattggtttctgtgagcatctgactytcccccgtccagtattttccccggaactggagattcgagtgccattcggctgctacctgcttagtgamtscaggctgcrtcatgtwtcataatttatwttaaagacaaagtgattcagtggggaaatttataaagctataaatattatataytytatttttcatacatgtttaaagtgcsgatccatggatgttccatttgtaggrccagcttgacgtgcccatyctgacawtgtatsccrcaagagctmwtktgatgatggartwttgattaaagtkcamtggaagatgmwwwraaaaaaaaaaaaaaaaaa

SEQ ID NO: 7231 - DNA, 600 bp, Rattus norvegicus
cgcagrawtgagcgagccatgctggccaataaaaacgcttctctcctcaagtcctactcaggagacgtgactgccgtggaacaacccattgtacctcgtcctgctcccagacccaccgattatctctcctgggggacagcctctccgtacagcgccatggmtacttattmtgccacatgtgccaacaatagccstgcgcagggtatcaacatggccaacagcattgccaacctgagaytgaaggccaaggaatatagtttacagaggaaccaggtgccaacagtcaaytgaggaaaaaaataattaaacaggcctaagaagaaatcaaaarccataagacacstatcctgytctgtcatttcytcrtscgctggaaaaaaaagataaaagcaaacaaacaaagccagaactaaaatattgggaccatggcggagaaaagcaggagaggaacaaaatgaaaattagttaacaaatgtttcttcttcctcttggataccatcaccatttgttgtgtgtgtattttttttccttctacccatgctttgctaagtatacttcaggcttcttctattaggctcaacccacccattcctataattg

SEQ ID NO: 7232 - DNA, 600 bp, Rattus norvegicus
  misc_feature (78)..(78): n is a, c, g, or t
ctttacccgwaacccatgtcagaccgttggtttayccaggatcattcmwwtgrwtagtaaataaatgcgtytgtgbtnawwmhwvmaaaaaaawaaaaaaaaarhmhwhrmrrmmrmaarmwwakkssskytmgtgccgaattcggcacgagggacagacagctacgagcckmssataatggcacactccaaatggcgctcctgatccaataaaagatgaattgccttttgcaatccagtgcactgatgtctggggcgagaactccacaagaaacccaaaggtgctaggggtgcacggtgctccacacagcccacagcccgyttcatcctgtcaccccagacgtgagcrccgcctgacccactgtccagggtttgccacctcaggtccctcgatgggctgtgcagatagcaawcaaggaaactggtttctkccaccctstacacrgaattccatctttccgggccccaaaacacaaacttacgccctgtgtggcamtacgtagytgcttccgtggaagtcatggctttctgtggaataaagatggtccaaaggtagacggaaaataagtaggtaaataagtgtaaaaaaaaaaaaaaaaa

SEQ ID NO: 7233 - DNA, 1400 bp, Rattus norvegicus
acatcvctggtcacacagggacaggmtggtgcatcttygtctataacctgtcccctgattmtgatgagaktgtcctctggcagstctbtggcccytttggcgcagtgaacaacgtcaaggtcatyygtgacttcaacaccaacaaatgcaagggattcggytttgtsaccatgaccaactacgatgaggcagycatgsccatcgccagcctcaatggttaccgcytgggwgacwkwktkttkywwktttcctttaaaaccaacaaagcccacaagtcstgaatttctcacccttacttattaaaaaatatwtataaatatatacgaacaaaacatgcgygcacacacatacacaaaagagagagacaaactttccaaggcttatattcaaccatggactttataagcccgcgttgcctaagtattaaaacattggattatcctgaggtktaccaggaaaggattttwtaatgmwwagaaaaaaaraaaaaaaamammaaamaaaatacctttkatgcattgaatgttctttcatagctgwcgytgttgaatataatatacatagatagcaatgtgcagggatttttacccagccagctaactttactaccttccttgaaggtgggtctyytyrwgmygaccattcgctcatttgaagaagaaaaacamamaamamaaaaaaataacaatttttacaaagtaatggaattcaraggaagaaaaaaaagatttttcttttttgccaaaatgttgatccaatcagattggytaaaaacacccccacacaaattaaagaggaataataaamawtgcaaaaattaaaaaaaaacttttgcaaatttttttatttttccttytttctttyatatcatgtgaactaaaacagtcttctgytaggggacggsgaaagggggtacctgatgacattaacaatttaatamcattaacattgytgccaamgaggtggtctctttgctgaaaatgggtttyamgaaaaatctatttttatmaaatatamagaayttttacamgagaayctggatttgagaaaaaatattttgactgsctaatttagggsaaaytgacamctttgycgcgytcatactgcactkgkaactytttagagatcaagatgtgygytttamactggrttcgtagactgttttttgaaggatgggctatwaacagatgaycttcatatcwtttcatagcatgtaataatwatwaaamatmttwattggctaggggaaaggartgttcgttctamccagggtaccaccagttccccacagtcaaaaccyaaaagcamggagatkmsttgaaagacagwktttctttaagycatcartatgggatgtcascagaacaawaattaaaaagattcattttccttttaatttc

SEQ ID NO: 7234 - DNA, 1400 bp, Rattus norvegicus
gaagatacgttaagggtttgtttgtttgkttgttttttaaaagcaaaacaaaacaacaacatakaagcatgtaagagtaaaggattgcaagagaagttcagtttttcagtttactaagttggaagcctttcgttagttctgtggcttggaatttcatttgagcaatatactataggatatgtatttattattaattgttatttaatttttttccaatktacttgtattaccaaattgggttctccaataatgtaacattgccttgcttcaagatccattgtttggcaataatataaacccttaaagatttccgcatgtgtctgctacatcgttcagatctyackagragatcttttgaaaccaagtgagttaatttaaggctatttataatttgctttgtcatcttactggcttcgcattattttaattgatgagatttacctttataatgtaaattgtaatcttcttgttttacatgtggatttctatagttttaattttttcagcttttaagatacaagttttatgtmawttggtawaatttttaactgtttatgttattttaaaagctcagaatatcacatcaaaatactataaatacattttaaagtatctattttagatctaaggaaatacagagatattttcatgggttcagtaacctttcattttataacattgggcacggtacagagtggctgtcacatcggtacytaaattatttagttcyatttttacaataacyttaaattttttaagttttgcaygtattgaatttartgctgaacatgaagagtaaactatttaccaaaaagaagttcctggagtttggagaagtaacgaatgtatccatctgkacatgatttacatgttgtggatgctttgtaaacatttccccatgttttaattgtgtttcagcaggttgtaattgcctctgtgtgtagctgaacatgagtcattatctggtcctgtatgaaatggaatgtatggtattttctgtatcattttcctgaggctgtgtttggggagccacacattcgaatacagttttcctgatcamwwrawwwmwwrwrmacctgatttttgctctcaaaggaattactgccacaatatattttatttattctttagattttagccttgtcagttgaagtgcttcacatgatggtgttaaaaaytacttgtccmtttaytgggggtttgggggttgttaaaagatggggaggaagaatgcaaatgggtcattgttaacctgtccccactgatcccacctgtaytcatagtccctyccaggatggtatkctgatgtttcctacaatacggtgaccataggcaacwtgttacmtgaataaaggatcgattttaaacarmmwramawarwactttttggtgtgattttc

SEQ ID NO: 7235 - DNA, 1400 bp, Rattus norvegicus
taggtcctggcagagaggaggggacagtgtggaaggaggctgcccttagcccttgccctcagccagcacgcgcccaccctctacaggtgccaccctgaccatcgctcagctgcaggcctttctgtttggctctgattcccgctgtttcacgcggatgactcccaccctagtgctgctgccacccaccgggccgacaccgcagccagcacatggccagctggacaccgtgcctttcccgcagcctgggtgcgcgcaaggacggaggaggaaatggggaggtgggaatgggtagagggtccaccacagcctcttgtgctcacagctggcccacttcgttctattccaggctgtccctggagcctgaggacctgccacacagtgctgaccccttcctagagaccctcactcgcttggttcgtgctctgcggggacctctgacccgggcctcgaacactcgtctggccctggaccctggtgcgctggccagcttcccacagggcctggtcaacctttcagaccccgtggcgctgggacgtctgctcgatggggaggaacccctattactgctgctgtcacccgctgcggccactgtgggggaacctatgcggctgcacagccccacatctgctccctgggcagcaggcctggcacgcagggtagcggtagagctgcaggcagcggcctcggagctgcgggacctcccaggcctgccacccacagcccccccattgctgtcgcgcctactggcgctgtgccccaacgactcccgcagcgccggggacccgctgcgagcgctgctgctgctgaaggcactgcagggcctgcgtgcagagtggcgagggcgggaagggcgcgggagggcggggcgcagcaaggggacagggacagatgggctgtgcgcgctgcgcgagctgagcgtggaccttcgagcagagcgctcagtgctcatcccggagacctaccaagccaacaactgccaaggcgcctgtgcatggccacagtcggaccgtaacccacggtacgggaaccacgtggtgctgctgctaaaaatgcaggcacgcggggccgccctgggtcgcctgccctgctgtgtgcccactgcstacaccggcaagmtgctcatcagcctgtcggaggagcacatcagcgcgcaccacgtgcccaacatggtggctaccgaatgcggctgccggtgatgtccgccctaccccatccmccgtgtccccagtcagcgccccaataaagattagcaagcamwmarmwrrrrwrwmwgtgggcggagagaactcctgacaacctcccttagcgaatgcaaggcgtgagtccttcccatacacccggtactcccctatgggagagctttcggtccctaccgcttttctgtgtagccctggctgtct

SEQ ID NO: 7236 - DNA, 600 bp, Rattus norvegicus
gcccaagtggagccctgcttcaagctctctgttcagctccgcaattctcatgcttctcatggggtgggaaagggggcaragccccccacgttttatacatttaggcggggtaractgcggggtcctagcctcttcctccgactttccttttgcaggtctttcactacarattgggctgctgtgggagtwgggacttacttgttttcctttttgagttcacgttggatccttgtacaacttctgcggaaggacacagtacacgctttccttcctcgagcagagctagggccctacctgagcaagtcggctgtggcccgggaggcagctgagactcctgctgtcctccagcctttcagaggagatcctattccagccaaatgcagggaaacactttattttgttttaggttttgtttttccttgagagcctttttttaggccccacagacagtggtgggcggggaggcgataggaaacacatccccagtgtgcatttaacattcatagcctacaaccacagacgtgtctggggggagcctggcaaggcsttcctcgtcaccatcgtgtttgcaaaggttcaaaaaagcaaaaaaaaaaaaaa

SEQ ID NO: 7237 - DNA, 390 bp, Rattus norvegicus; identical to SEQ ID NO: 3141

SEQ ID NO: 7238 - DNA, 600 bp, Rattus norvegicus
cagagatagccctcttccaccaccaagggaggcctcgctggctgtgcgtggcctcttgcaagagctgtcctccatccgccactccctggagaagcgggatgagatgcgggaggtggcaagggactggttgcgggtgggatatgtgctggacaggctgctgtttcgcatctacctgctggccgtgctggcttacagcatcaccctggtcacgctctggtccatttggcattattcctgagtgggtacagcctggcagggaggggatgtgagtcctgcatcctgtttccaacaccaattcatctgagcaaccccagtccccttgtcccctaaacttagcactgaagacccggtcagaccccccgacttcgctatcatggctttaaagcatgatatccttttccagtacttctgtgattatggcccttgggatggctcatttccacagtttttttttcctttttgatcagaggaaagcaaattctcttgcctaggtgcctgagacgtctgtgcctgttttatccaggccccagtggcttcttcttcagctcacttgtgggtacttccctagcgctcagcctcatcaaccaacggggggagggg

SEQ ID NO: 7239 - DNA, 600 bp, Rattus norvegicus
aagagagcaggatgttccaaaccaagagtttgttaactcggacctccttgaaaagagcaaatatcgaaaaatctattcctttactcttgagccccgcactattgaggattttgaatatgtgaatacctaccttcagacatcgccagcctctgtgtttgtaagcacatcgttctgttccttgcagacctcagaaggggtttgctgtttaattggttccacccttacaagtaggagattcagttataaggacaatgtagatctggttgagtttaagagtctgactgaggaagaaatagaagatgtactgaaaaccacatttggcatttctttggagaaaaagtttgtgcccaaacatggcgaactcgtttttactatttagggtaaattgttctccattattatctcagtcttaaacattctaaaaatatgcaaatacatatccataacagaaatcgcacagctcaatattgatcaactaatgacctgtatcttctatttcctacattttatacaaaacgaaacccagttgtcctgtcatttcaccaataaaaataccgccagttataatgaaataaacctgatcatggatgtaacgacaaa

SEQ ID NO: 7240 - DNA, 600 bp, Rattus norvegicus
accaataaaaataccgccagttataatgaaataaacctgatcatggatgtaacgrcaatcctctcaacattaatcaacaaaaattacttatcgaagaggtggcgatcttgggagccatattcatttacaaacctcycaacatcattttatggttgaactcagatgaaaaatgaatgaatatgaatgatcagagaacagcaggaagtaaagtcaggcagactaaatytgaggtccaaggtttacaagaaaccaccygtacaacttaggattagaataaagcaaagaagaatgaaccatcattwcaggtccaggtaacttcccagtcctcaaaacagaactcacgccagtggacctgggctctgggattaggtgccaagacaatgacacggcttagaaggcttagaatttcttccagagataattttgcagacacagttctttttgwatctgattttttttaactatgagaatactggtattaagtgatttataccttatatataataatctttgtagcctataatatatgtttcttggaaaaamawwawwwrwmaagtatattaagtgttaaatatatattaacattatatagtattggct

SEQ ID NO: 7241 - DNA, 600 bp, Rattus norvegicus
gaatggaacctggtacttggaccaaatcagaagagagcagtatgttccaaaccaagartttgttaactcagacctccttgaaaagaacaaatatcgaaaaatctattcctttactcttgagccccgcactattgaggattttgagtccattaatacctatcttcagacatcgccagcatccttgtttacaagtaaatcattttgttcyttgcagaccctagaaggggttcactgtttggttggctccaccctcacttataggagattcagttataaggacaatatagatcttgtagagtttaagagtctgactgaggaagaaatagaagacrtactgaaaactatatttggggtttctttagagagaaagcttgtgcctaaacatggtgatcgattttttaccatttagaatatgcagttttggtgtccttccatgtacttggactttatgttaaaatgttcaaactggtgacaaggacatacttctgaccatgttgatgtatgcgaacaaaaacccaccattggcttacagccaaatttatacagaatttgtgctaatagttaagtaaaaggaatagtgtgaaaagcattcccattcaa

SEQ ID NO: 7242 - DNA, 600 bp, Rattus norvegicus
tcaacagaaggcgcaaacacttcttcatccacatcaacatccacgactgggaccagccatctcataaagtgtgcggagaaggagaaaactttctgtgtgaatgggggcgagtgcttcacggtgaaggacctgtcaaacccgtcaagatacttgtgcaagtgcccaaatgagtttactggtgatcgttgccaaaactacgtaatggccagcttctacagtacgtccactccctttctgtctctgcctgagtaggagcatgctcagtcgatgctgctttcttgttgctacatctcccctcagagtcacctagagcctagaaccttctaccaggtctaatattgactgcctctgcctgtcgcatgagaacattaacaaggccgctgtgttacttctctgtttgtgactagtcggctcagagttactaaataggtgtgtgaggccccagaggtttctgaaaatggtcccgcagaaggtgatgcaaatcgatagtcaacatgccaagagtgaaataataataataataataataataataataataataataaaggcgtttcaaactcgcacttgtattggtaaaataaaatcattccaacaagt

SEQ ID NO: 7243 - DNA, 600 bp, Rattus norvegicus
agaaacccctgactcctacagagactctcctcatagcgaaaggtaaaatggaagggtaaagctatcgtggaggagaacctcattcagtgagagaatcccatgagcacctgcggtctctcctaaggaaactcatcctttcataaggggcgtcatcaattccctgacgctcctagttgatgaagtcaacctcttatttgtctgaactcctttctcctgagcttctccccgcgtcccagtggctgacaggcaaccaactcctaaagagcaggagtaatgtaatgtggaaggcccagccgacttggagttctcagacctgaccctaaggtcagactcactggggtcttcctttcgtcaggtgcaccattttaaggaccctcatctaatcccgatcagccagttgtccattctctacctcgatggttgttctgccctcctctcctcatgctctaagtacccagcctctagcctcagttaaatcaagtcgagggctgggacacggctgatggtcatggcggaatgcctcctsgggttccaccacactgtatccatttacgacatccctagaagtcatgggtaaataaagttgttgtgtgatgtgra

SEQ ID NO: 7244 - DNA, 1400 bp, Rattus norvegicus
gaggagaacgacagaggagtgtttgacaagattgtytctaaactgctgaatctcggcctaatcactgaaagccaggcacatactctagaagatgaagtagcagaggctttacaaaaattgatttcraaagaggccracaattatgaggaggccccggaaaaacccacamgcaggaccgagaatcaggatgggaaaataccggagaaagtgactccagtggcagcaacccaagatggctttactaaccgtgaaaatgatgacacagtatcgaacaccttgaccttgtccaacggcttggaaaggagaacgaacccccacagggacgrtgactttgaggagstccagkrtttccccaacttctatgcactactgacaagcatcgactcagaaaaagaagcaaaagagaaagaaaccctgatcaccatcatgaagacgttgattgactttgtgaaaatgatggtgaaatacggtacaatatctccagaggaaggcgtttcttaccttgaaaacttggatgaaaccattgctctgcagaccaagaacaagctagaaaaaaataccactgacagcaaaagcaagcttttcccagctccgccagagaagagtcacgaagaaacagacagtaccaaggaggaagccgccaagatggagaaggaatacggaagcctcaaagactccacaaaagacgataactccaacctcggaggaaagacagatgaagccaaagggaaaacagaagcctacttggaagccattagaaaaaacatcgagtggctgaagaagcacaacaagaagggcaacawagaagattwcgmcctttcaaaratgagggwcttcatcamccaacaggctratgctwatkyggagarrggcatcctggataagraagaagccaacgccatcawacgcatctacagcagcctgtgaaaacggcaggcaacytgagccttcmmmytgttccrgcaaaaacaatatagcttaaaatctaattcggsggttaaagatttaycagcccaggagyyttargatgkgctgactytatarwagttaawyccttakaaatgagwraaakagagckctcttgccataaacmccttatgaarggkaaagttgtaaagagcctcggtttttctatgtagaatccttaatccttatttcctcttggatttacattttataatcasaratatgctgttytggaasagactctgatkggttgaacatacatytgaacctmyttcccactgtcgtmagccctgtttcggcatgctagacacctgagcacatcgttggatgtttgyyatttgatgctgtttccagtagttctmtgttgggcmcggaaataaaccsacgtctyttcataamwwwrawrmwmwraaaaccaaaaaaaaaaaaaaaaa

SEQ ID NO: 7245 - DNA, 1132 bp, Rattus norvegicus; identical to SEQ ID NO: 3149
  misc_feature (1073)..(1073): n is a, c, g, or t

SEQ ID NO: 7246 - DNA, 1400 bp, Rattus norvegicus
ctcatggtggacgagaacgggctctgggccgtctacgccacaaaccagaacgcaggcaacattgtcatcagcaagctggatcctgtctcactgcaaatcctccagacctggaacaccagctaccccaagcgcagcgccggcgaggccttcatcatctgcggcaccctctacgtcaccaacggttactcggggggcaccaaggtccactatgcctaccaaaccaacgcctcgacctacgagtacattgacatccccttccagaacaaatactctcacatctccatgctggactacaaccctaaagaccgcgcgctgtacgcctggaacaacggccatcagaccctctacaacgtcaccctcttccacgtcatccgctccgatgagttgtagctcccgcttttccagaagccaagggtccaagtcctcaccccgaggacattttccataaaacagctgccaaatgattccaagaatactataacagtcctgattttgagaaatcagcgcaattttgacgccgagagatggtgtcctctctgtgttcctcctgctcgtgcaggtgggccacagatttcagaagaaaccgccatgtatgtggatggaactgcagcccaaggctccttggctgtccccatcccaccccatccctctctggtccaataactcaaagaagcaaggcgatgactgttggcccctctcacccaagaacaacccactgctaagattgcatggacatttccttaggtcgtgcccagcgagatgacgtgatggccattctccccacccacagcccccagcccccgtggcgctcggtgtaggytgcttcggcccacacgtatcgcagctgcctttttcttgactgtgktgttgtctcttagattaactgtgctgagactcccggtagctcatggacctgtgtctagtactttcccgaagcgatggtgggtgtgcgtagagtgaagttgctrtacccacgttgttgaacktgcgtaccctgtagctagatcgtgaggtgtccgtctgttatcccccscaaggtggtaackcsgtgtgttcaatttatgcaatgaatgttgtcatgcgatgctgtagtttggattgatamgtggwtggtttctgtttctaaaaaraaaaaaaaawmagtgttcgcccttataggagacatagtcaagttcatgttgataataacccagtgaaattcttctcttgtcaagttatctgaattgtgtaaccatagatgggaaggacgcatcttgggaaacttcagtttcctacgggaaggaactccccaagggcagccatgtgtgaaaagatcattttttaaaraaaaaaaaaawaagtcaaagagggcaactttgtactattcagttatctaaggaacaataaagatattaggagat

SEQ ID NO: 7247 - DNA, 1400 bp, Rattus norvegicus
tcttgaaaaagtgaaggaacaccagaagtccctggatcctgccaaccctcgggactacattgactgttttctcagcaagattgaggaggagaaggacaacctgaagtctgagttccatctggagaacttggctgtctgtgggtctaacttgtttacggcaggcaccgagacaaccagcaccaccctgagattcgggctcctgctccttatgaagtatccagasrygmrrgccaaagttcatgaggaacttgaccgtgtgattggacgccaccaaccccccagcatgaaggacaagatgaagctgccttataccgatgctgtattgcatgagattcaaagatacatcactctssttssttccagtctgccccatgctgtggtccaggacacaaaattcagagactatgtcatccccaagggtactactgtactcccgatgctgtcttccgtcatgctggatcaaaaggagtttgccaacccagagaagtttgatccaggacactttctggataaaaatggstgcttcaagaagacagactactttgttcccttctcccttggaaagcgggcctgtgttggtgagagtttggcccggatggagctcttcctgttyttcaccacccttytgcaaaagttywccmkgamgaskytggtggagcccaaggaccwtsacmtsaasccyawkactmyckgsmtkwtcaatwtgcykccaccttmcwwgctgtgmmwkrwwmctmrahaagggtktatcsttytaatcattcaaatcaaagkradkgkytyyttttwytwtwwwtwttytttttatgctaagcactgcytaggccaraaacatcatgcatgaaaaccacatggacatttatttcgatttaaaaathtaggtcttaaaagcttccagsacacaggcagkgtgtctgtgtccctcaactgctmtagaaaccaggccccaagcacawctgacaccagatatgcaagaccctcatcagacgccacctacaagtagcactgkgtgctcttctgtagctttggaaatagaattgttttckgtcattgtttyaatagagaaattaatgtaatggcctacgttcattttcctgttcacacttaaaaacatttacatgatttgtgccacattcacaaaataaattytcaccctgmcawwaaaaaaaaarraawwmmtgttggccgagttgtcagtcagcgtgaactctgccaccagctccctaagaaggggcattgaaggacccttcataggtttttggaggtaataaagccaggatatcatagagccttaagcggaccattgcagcactagctttcaggtgggggaattccaaaaaaaaaaaaaaaaaaaaaaaaaaaaaaaaaaaaaaaaaaaaaaaaaaaaaaaaaaaggaatt

SEQ ID NO: 7248 - DNA, 600 bp, Rattus norvegicus
ttcttcctcgtcttcttcctcatcttctactgcaacatggtcatcatccacacgctgctcacgcggcctgtgcggcagcagcgcaaaccggaagtgaagcgccgggcgctgtggatggtctgcactgtcttggcggtatttgtcatctgctttgtgccccatcacgtggtccagctaccctggaccctagcagagttgggctaccagaccaacttccatcaggctattaatgatgcccaccaaatcaccctctgcctcctgagcaccaactgcgtcttagatcctgttatctactgctttctcaccaagaagttccggaagcacctcagcgaaaagttttacagcatgcgaagtagccggaagtgctcccgagccactagcgacacgtgcaccgaggtgatgatgccagccaaccagactcctgtcctgccattgaaaaattaatcaatgcttattaaagccaggtccagagccttctcttttatggcccccaccgatggcgcagaaagctaagaggttcctgcctgtggccaacccccaacttggaccctggtggactcttaagtgaggagttacttactacagagagccatttgctgg

SEQ ID NO: 7249 - DNA, 600 bp, Rattus norvegicus
cattgtcaacgtgtggcctagtggtcctggagaaagtggctgggttcccctgcagacattcactcaacatcaaggtgctgtcaagrmtgttgcrksdygwssctggcagtccaatatmytkgcaacaggaggaggtaccagtgaccgacacattcgcatbtggaacgtctgctckggassmkgtctgagtgctgtggatgtgcattcccaggtgtgctccatcctmtggtctccccactataaggagctcatctcaggccatggctttgcccagaaccagctggttatttggaagtacccaaccatggccaaggtggcagagctcaawsgkcacrmrgccsgggtcvtgagtctcaccatgagtccagacggggccacagtggcatytgcagcagccgatgagactytgcggctctggcgytgctttgagytggaccytgccyttcggcgggagcgggaaaaagccagcacatytaaaagtagcctcatccaccaaggcatccggtgaaagacaaccywwkcwtttcccttcttgattttgttgttgttwatttttttctaataaagttcatatcttcmwwwvaaaaaaaaaaaaaaaaa

SEQ ID NO: 7250 - DNA, 600 bp, Rattus norvegicus
ggcacactatggaggcttcacggtgcagaccgaggccaacaagtaccaagtgtcagtgaacaagtacaaagggactgctggcaacgccctcatggaaggggcctctcagctggtgggggagaacagaaccatgaccatccacaacggcatgttcttcagcacctacgacagggacaacgatggctgggtaactacagatccaagaaagcagtgctcaaaagaagatggcggcggctggyggyayrasrgatgccatgcagccaatccgaatggcagatactamtggggtggcctttacagctgggacatgtccaagcacggcacagatgatggtgtggtgtggatgaactggaaggratcgtggtactccatgagaaggaygkytwygargatcaggcccgtyttcccacagcaatagtcccccaagcatagactttcagccttstatgtctgacattttttacattatgttattggaattttctttgatacattatatccactaatgctcaaaammmwvrmwrarwrwgtctttttttttttttttttggaatgataaaggataaagacattggaamcmgcaaaaaaaaaaaaaaaaaa

SEQ ID NO: 7251 - DNA, 600 bp, Rattus norvegicus
gttcatcyacatggccgtccagcactacatagagacgctgcarcgcmggatcgaggaggagcagaaaagcaaaaggaaaggacatgaatataccaatattaagtmttccctggtggaccagacaagtggcgatcagagtcccctgccaccttgcaccccaacgccaccctgtgcggaaatgcgggaggacagcgctcgagtctatgagaacgtgggcctcatgcagcagcagaggagtttcagatgagcttcgggtggcagcrcgcagatgtgaactttcaccccttccctaaaatgtcaagaatagacgagaaagtttccaggacccgtgttcagaagctcgccggggttgactgactgccttttgagaagcgaagtttggaaccatttgaaagagcacgtgcctaattggcacctcctttcctcagctaaggagaaactgctctgcgttgtcgacagtgctattgtcatggaattggttttgaattgtgaagcagctaaattgtgctctgtattttctacattgkgggactcaaattctagtcacgggcaggattttgtttgtttctttttatgaccttaacagacctgttaagaccg

SEQ ID NO: 7252 - DNA, 846 bp, Rattus norvegicus; identical to SEQ ID NO: 3156

SEQ ID NO: 7253 - DNA, 600 bp, Rattus norvegicus
gcacctgccagatgggccccagtgcasstgcgcaaccttcagcatctacacatcctggggcgaacgctgtgagcatctaagcgtgaaacttggggcattcttcgggatcctctttggagccctgggtgccctcttgmtactggccatcttagcatgtgtggtctttcacttctgcggctgctccatgaacaagttctcytaccctctggactcagaactgtgaggcctcgtcccagatgggcagctgcacstagaatacctcaggacccgcccaccggtctgcccctgctctagggagactggaaagggccgactssatgaagatgatttgakattcttcaagcatgaataaagggagtgaaaccagactctaccattttagtagsccatgggtataggwwwwssssagatgassaaatgtagagatggatggattcctatacagcacatgggaaaggatattgcctatgtacacacacacacacacacacaccagagttaatggatgactggctttatattcaccaaaatgtttttacttataaaaccagcatacttctcmttaaaatctatttaaatdtaaaaaaaaaammrraawtc

SEQ ID NO: 7254 - DNA, 600 bp, Rattus norvegicus
atcgagagaactttgagcatgtctgtagtgctcctgagaacattgagtgcagggcagccacagatcccaaactcgactggacagagctgggtcagaaggtacagtgtaatgtctcagaggggctcatttgcaataatgaggaccagtatggaactgggcagtttgaactttgctatgactatgagatacgagtcaactgttgctttccaatggaatactgtctttcaaccgtctcacctacaacttcaacaccaatctcgtctactcctcaacctacgtcttcaccaaccaccttacctacaacttccccactgacttcatctgctacttcaccaacaacctcacatatcacttcaacagtttcaccaaccacctcaccaaccacctcaaccacctcaccaaccacctcaccaaccacctcaaccacctcaccaaccacctcaaccacctcaccaaccccctcaccaaccacctcaaccacctcaccaaccccctcaccaaccacctcaaccacctcaccaaccccctcaccaaccacctcaaccacctcaccaaccacatcaccaatcacttcaccaaccacctcaaccacctcaccaa

SEQ ID NO: 7255 - DNA, 600 bp, Rattus norvegicus
atcagggttgtagtgaacctcgaggcagagatccttgacatgagagcaaaggagtcagcatttattcaaatcccagttttctctaaacttggcaagtcatttctctgtacctttctttagcttgaacgaggaacagttagatgttccacagggccttctgtgaatccacattcgttggtatttattaatactaagtacatacctggcaatctagtacagaccagtaagtaaagcaaatgtctaagaattgatggttttttcagccaggaccttgcagtgtaggtcttagatgattgactccagccctcttcaggacccagccaagggtagtgagttggggtgcatctaggattgtcagatcttgctcctgaaactctttctttgttttagctcaccagctcaggggcccctttctggtctggacccaaacgatgtccacacccacttacttttgatgttaacaatgtaagtcttcttattggatttcctggggtcatatagaaaggatgggtaggtgggaaggaggtggtggcttcctgtctaagggcagatgtgttaaccctaccatgccctgcctttgcctagacattgcatctggat

SEQ ID NO: 7256 - DNA, 1400 bp, Rattus norvegicus
aygtygattccctyaacaacccraaggatccttttgtggagaaarccaagaarytsttaagawttgayttttttgatccgttgttcttgtcagtagtactctttccattcctcacsccartatatgagatgytaaayatctgcatgttcccaaargattcaatagmatttttcmaaaaatttgtgyacagaatraaggaaacccgyctggattctrwgcakaagcaycsaktkgrttttctycakctsmtgmtgawbgyycataatvatkmywwasmyraagwdtctcwtmmagccctrtcygatrtkgaratcayagcccagtcartyatytttatttttgctggmtatgaamccaccagcagcacactytcctttgtcytgyattycctggccactcacccwgataywcagaagaaactgcaggaggakmtcgayrrgkcyytkcybwdtmaggcacctsmbasstwygatrywgtgakgkaaawggaatacctggatatggtgttgaatgaaacyctcagattgtatccaattggtaatagacttgagagagtctgtaaaaaagatrywsravkyratggtktgtttatrcccaaagggtcagtrgtsaygattccawcwtatgctcttcaycrtgayccacagcastggccarascctgaggaatttcryccagaaaggtwbrgcaaggagaacaagggmagcattsatccttatgtatatctgccctttggaaatggacccaggaactgcattgrcatgaggtttgctctcatgaatatgaaactcgctctcactaaagttctgcaaaacttctccttccagccttgyaaggaaacacagatacctctgaaattragyagacaagsamttcttsaaccarmaaaacccattrttctaaaggttstgccacgggatgmartcataamtggakcmtgaytttccctcaaggarttytrytgrrwtcktcasaaakgyrgtgtctaagaacayyrraccytttaatttayktmmtgaatwraattcagatraaaytrggrcttaatygactttgttttgattyggtacatyttkgmtctttctmagtgtctacrawgtacccaymtaatawaaaggarwtgrcaagtcwgtgayrgaacaggaamttmacctttgstgattctcaygggacyayctccatyyrywtctggtkgtctctgttaatttcttttgatagtaaccwtgtctstgtmmtttgatcaakaawytttsatgwaaakgtgaamwattstgryamytytawttgtagatttggtatcagatgttttwsatgcawtattctasamtaaatgytacatggaaarwawrwraawaawcmcywskkkmaaaatcmmmaddddmaaaaaaaaaaaaaaaaaa

SEQ ID NO: 7257 - DNA, 1381 bp, Rattus norvegicus; identical to SEQ ID NO: 3161

SEQ ID NO: 7258 - DNA, 600 bp, Rattus norvegicus
acgaacatggttccgcacacgmakcgscaysaksctgcacmtcagsratggcacagkamagwttrrtktsktccwggaccasaccaawctwatcygtggccccctgatggcagcagtgacctacatcaacgagaagagggacttccggacataccgcctgagccttctggaggaatatggctgctgcaaggaactggctagccgcctccgctatgcccgcaccatggtagacaagctgctgagctcgcgttccgcctgcaaccgcctcaaggcctcctaggtctycgtccttcggactggtgccccttcattctgctagckstctgctagctctgggcctgcamtamtgggstcctggggccgctgttcagtgccctggccctggggctggcagggagcagtgcccctgtgaagggttgctgtgtgtaagttattttgtacatgattgggtgtggtttgcagcctgttccctgcccttggcccactgtatgaactgtataaatatttctattgaatttgggactgccctttccttagctttatatatattaaatatttgtacatctcwmwmwaaaaaaaaaaaaaaagggcggccgctct

SEQ ID NO: 7259 - DNA, 600 bp, Rattus norvegicus
gttgggaggcctgacctccctagtcccccagcggaggagcgacttctcccagattgtactccgggcactgatcacaggggctywcgkgtccctgctaaacgcctgtgtggcagggatcctctatgtacccaggggggtcgaggtggactgcgtgtcccttctgaaccaaactgtcagcagcagcagctttgaggtttacctgtgctgccgccaagtcttccagagcactagctcggagttcagccaagtggcactggacaactgctgtcgattttacaaccacacagtctgcacatagctgggacggagcatcttcctagcctcagggctcatccagcccagagaggccgtgggactcgtcactacctccatcccacaattgggaagggtgcaacggtcatcgctgctcccatgtctgcctctccaagtacgagttmccagagtctggtctgctctcctgccctttgggagccaacattctggtcctcttgagtcctctttccttgggaacctcatgtgcaccagccaaaagcctcctcsctgctccctcccaagcacccagcttgttgggtatccccccaaaagctgtctctagagaca

SEQ ID NO: 7260 - DNA, 600 bp, Rattus norvegicus
ccgtggagctgtctgtcagagctgacttccctacccccaacataactgagtmtggaaatccatctgctgacataaagaggattacctgctttgcttccgggggtttcccaaagcctcgsctctcttggttggaaaatggaagagaattaaatggcatyaatacaacaatttcccaggatcctgaatctgagctgtacaccattagtagccaactagacttcaacrcgacgtacgaccacttcatcgattgtttcattgagtatggagatgctcacgtgtcacagaacttcacctgggwaaaacccccagaagaccctcctgatgaaaagcaaacarttccgtttgcctgggcaggayctgatgcagtcaaagccatcatcatcttcttcatcgccatcaccgtcatcgccgtcatcgccgccatcgccatcatcatcttctgcatcactgtcaaattcmgacgctgcttcagaagaagaaatgaggcaagcagagaaacaaacaagaacctctacatagggcctgtggaagcagcagcygaacagactgtttgaaggtagccatttgccttccttkarytcttctctgcccactcgagca

SEQ ID NO: 7261 - DNA, 919 bp, Rattus norvegicus; identical to SEQ ID NO: 3165

SEQ ID NO: 7262 - DNA, 600 bp, Rattus norvegicus
gcaacagtacactggcaaccattcaagctcttgcttctagtggctctcttccaataacatctctggatgcaactgggaacctggtattcgccaatgcaggaggagcccccaacatcgtgactgcccctctgttcctgaaccctcagaacctctytctgctcmccagcaacccagtaagcttggtttctsccgytgcagcctccacagggaaytccgcacmtacagccagccttcatgcctcctccacctcaactgagtccatccagaactctctgttcacagtggcctctgccagcggggctgcctccaccaccacagctgcctccaaggcacagtgagctggacgcagagctggggctttcctcactgcagggtgataggctggctatcagctggctaaaacatgacgcctgtcattggcttcctcccaccatgttgtgaggatgaggaagacatggagagaagaaaaaaattacacataacaacaaaaaaaaaraawrgagacaggacaacgtttgcctaattttataataaaaacaatgtcttttcaggattgcttcatggattggagaactttctaaccaaaaawwwwaaaaaaaa

SEQ ID NO: 7263 - DNA, 600 bp, Rattus norvegicus
gaaaaagaaggagaccagttcagcagccaccttatcaaccttctgaaccctaaaggaaagccagcaaaccagctgcttgctcttaggactttttgcaattgctttgttagtcaggcaggacaaaagctcatgatgtcccagagggagtcattgatgtcacatgcaryasraskgaaatccgggagcaataagaacatcatattgctctggctacactgaccttgaactattctgtttgtttccataaagaccataacattgaagggaaagcccaatgcttgtcagtgrttagcacaatcttggaagttgtacaagacctagaagccacatttagactccttgtggctyttgggacacttatcagtgatgattcaaatgctatacaattagccaaatctttaggtgttgattctcaaataaaaaagtatgcttctgtatcagagccagytaaagtaagtgaatgctgtagacttrtcttaaawttgctgtagcagtggggaaargaagctgaggggtttksttttttttgttktgtyytgttttgtttttttccacattttacatgactgattgkagatgatttaaaaaraaaraaaraaa

SEQ ID NO: 7264 - DNA, 600 bp, Rattus norvegicus
accacagcccaaacttgtggggccaccagaaattgctgtggtgttcagggggtacttgaatttagcaccgtaatcctgtcctcccccagggtcagttctaggtactggtctccctttccatcccatttgggcacattctctattgatcagaacccaggcttgaagtkgaaagtgctgttcttggrggacaagctggcacccttagctgaggtgtgtcatgttgtccagtgccctgcatcgtaggctgccgattcagtgtggacctagaatgttcgacmtaggactagcttccaatactgtcctgccatcactctgatttgactttgtggtgagcgtcaccacatgacaggggtgtgccagcccatcgaagcaggacagacacaggtggattgtgccccagggtgggatttgtgtgctctatgctccatgtcaagccatgtgaaggtcaggacccttctgaagcttttcttccaatggtacgttgtttgaagatgctttcctgtcacacctaaacatttggaaatatcccactgacaagaacacattgtaaaacaaaactttaattaaagrgtaatatatggcaaaaaaaaaaaaaaaaaa

SEQ ID NO: 7265 - DNA, 600 bp, Rattus norvegicus
agggaacatgcactatgttggggttgagcctgagtcytgggtcctggyatcactgcagctggtggcagtgytmggyygamymsktktytgtctttttcttagtgttgccctggccatagttgccaggttgcagctgccctggtatgtggaacagaatccgakctcttgtaagatggttctgagcccccctgtcccactgggctggakagctccctcccacatttacccagcaggtgtacctgccacaccagtgtctggacacaaagtgaatggtgtgggggctgggaactgggaytgccaggtgtccagcatcattttccctttctctgttttcttctcaggagttaaaatttaattatatcagtaaagagattaattttwmtgtaamwmwwmmwawrmmmrwgtaaagtgtgtgacttggcaaggcctgtgctgcatgtgacaaagtttatggaagtggatgcgccttctggccaccactctctctcctgtagctactcagtctagtcgggcaggtccctcatgtagccctcccaacaccctatggcacttgcacttcacacggctcctttttcttatgcattccatttgactagcaca

SEQ ID NO: 7266 - DNA, 1098 bp, Rattus norvegicus; identical to SEQ ID NO: 3170

SEQ ID NO: 7267 - DNA, 600 bp, Rattus norvegicus
tggttacatggaaggagttgagaatttggataccagttctgrrcttggtagaagaaactagggtcactctggctaacataagggtacagcatccttagtaacccgagcgtggctcgaagcgttcatgatttcatccaaaacacaacatgtaaacttaytcagctaacaatgggraaatgtattgcttctgtgcscastggacttatgtgcaatttgttcaaaagggaacaagtcattgaggagaaacaagcccaatacttasagtccmaattttgtcttatttgccaaaaaaaaaaaaaaaaaaagcaacccccgccccctaragttgatattgttacaatgtacatattgtaaaatacggaagaatcgatgtatcttactttttcattatttgctaaccaaagctgtacatttttcatacaaatctgcagccttttgagtatcaaaggggtaaacccacacccatcagccattytggaagtgcactatttatactggtaccctcgcttttttttttcccattttcttgctgagatgacatgaattgttaagtttatttttacacagtaaagagtgaagammkmrwraaaaaaaaaaaaa

SEQ ID NO: 7268 - DNA, 600 bp, Rattus norvegicus
cttcacttctccgtgtatgactttgacaggttctctcgccatgacttgattggtcaagtggtggtggaccacttcttcgacttggctgacttccccagggagtgcatcctttggaaggatatcgagtatgtcaccaacgataatgtggacctgggtgagcttatgttttcgctctgctatcttccaacagccggcaggctgaccatcaccatcatcaaagcaaggaatttaaaggcaatggacattacgggagcgtcagatccgtacgtgaaagtctcactgatgtgtgatggccggagactgaagaagaggaaaacatccaccaagaggaacacgcttaaccctgtttacaatgaagccatagtcttcgatgtccctcctgagagcattgatcagatccacttgtccatagctgtcatggactatgaccgtgtaggtcacaatgaggtcatcggcgtgtgccaagtaggcaacgaggctgagcggctgggcagagaccactggagtgagatgctgtcatatccccgraagcccatcgcacactggcactctctgctggagaaacgatgattgtggataggaagactgcttttgccaagg

SEQ ID NO: 7269 - DNA, 600 bp, Rattus norvegicus
  misc_feature (51)..(51): n is a, c, g, or t
  misc_feature (180)..(180): n is a, c, g, or t
  misc_feature (288)..(288): n is a, c, g, or t
  misc_feature (290)..(290): n is a, c, g, or t
  misc_feature (303)..(303): n is a, c, g, or t
  misc_feature (441)..(441): n is a, c, g, or t
  misc_feature (452)..(452): n is a, c, g, or t
  misc_feature (455)..(455): n is a, c, g, or t
  misc_feature (458)..(458): n is a, c, g, or t
ctgtcccaatgcctacaccccatcccagtcacytcctcramacatacactnwayycbscmcrwgrggagttaggkycccggmtcmcagggcasgrmaygagmcattaagacgcacagggtraggcaggggtkccacmacggacccargcactasaggaaggsccacagtggggaggtganccaagkktgggbccagctakcmccaaagtgaakgaagccactgaagatgbcmaccytyakccatgccctcccatyhcaggghtaccbtgakgaagaaaacayccatgntntggtgktsgwcantaattcccagmatcycymcaaagrhacacacccatbcmccatgtcchttcasaggatgacastytgcactyacacvyatggagttgtcccagcacacccagaatgcatwdarkrackykdcbtgagrgacaaawtytnymmyvcmhrsntrnryncmmhhhdvhhwdmararrawvamagtctgcacttacacctatggagttgtcccagcacacccagaatgcatagagggacgctgcytgagggacaaattctctaatacaaggctgagcaccammwmaaaaaaaaaaaaaaaaa

SEQ ID NO: 7270 - DNA, 1400 bp, Rattus norvegicus
aaagcctatctatgctacaatgccgggcagtgagggccagataaggaagaatagtcattgctccttaccagccatcttctgggaggtgggacctgttgaactcatggctactagccgctgctgctggagcaatgctaacatgcacccagtcagcccgcagttccttccttcagaggccaggtctgttcaccccagcctcacccacacaacctgctggaggctggtttccagtgtagaccgtttattgagagtaaggtaaggcagattcgataaagatgaaaagtctgtatctgcttgggttgacatctgtgtgggaggggctggagaggtggctcggtggttaagcgcattggctgctcttccagaggacccaggttcaattcccagcacccacacagtggctcacaaccgtctgtaagtccagttctcgggatcggatgtttttttctgactctgcatgctcctgcatacctgtggtacacagatgtatatgcaggtacatgtacacacacacacacacacacacacacacacacacacacacaattaagtaaaatttaaaaatatctgctcaggtctagaaaccagagctactgaaaatagatgtctctggatgggagcgggaactttatattctttgattttaaaaactaaatatattagtatttttaatatatgttaaataaaaataaaatataaattatatatttaattatacatttaaattatatatctttaaatatataatttatctgttatatcttttaatcaaaatatattttattatattgtattaatataaatctatatttatattaataaatatatgagtgtatttattaaatatgttttattaaaatacatttcagccattaaagtgtagctaacgataaaaaatggctttttctggagagttcagagcaagagagtttccaccttcacaagtgacaaacgatgttggtggtgctgtggacaaagtagcccagggtcttcttcactgttctcagtgaggtggttgagactaaatgtccctgcctagcctgtggctctgtccaggcagtggccttgccttgcagcctcatacaatctgctcatgaatgtctgtccctacctcttccagctccctgttttcctccctaaccctctcccctccccctcggactcccccccccgaccctgacaggattggggaggagtcttctggaatttcagagaagcgagtccagagtccgcagaacccagcaaacacatggctataaaagggctttccttgcgaccccacgcatcctcgggataccgaagtttgcctgctgccatggagaccagagccttctggataaccctgctgctggtcctggttgctgggtcctcctgcaaagcccaggaatttgttggcctat

SEQ ID NO: 7271 - DNA, 1400 bp, Rattus norvegicus
tataaaaaccctgaaagttggttacacagaaaaacaaaggagggactttttatgcgaagcaagcatcatggggcaatttgaccacccaaatgtcgtccatttggaaggggttgttacaagagggaagcctgtcatgatcgtgatagagttcatggagaacggcgccctggatgcatttctcaggaaacatgatgggcaatttacagtcattcagttggtaggaatgctgagaggaattgcggctggcatgcgctacttggctgacatgggatacgttcacagggaccttgcggctcgcaacattcttgtgaacagcaatcttgtttgtaaagtgtccgattttggcctgtcccgggttatagaggatgaccccgaagctgtctacacgactactggtggaaaaattccagtaaggtggactgcccctgaagccatccaataccggaaattcacctcagccagtgatgtgtggagctatgggattgtcatgtgggaagtaatgtcttatggagaacgaccttattgggacatgtcgaatcaagatgtcattaaagcgatagaagaaggttatcgcttaccagcacccatggactgcccagctggtcttcaccagctaatgctggattgttggcagaaagaacgggcagagaggccaaagtttgagcagatagtcggaattctagacaaaatgattcgaaatccaagcagtctgaaaacacccctgggaacttgtagcagacccataagccctcttctggaccagagcactcccgacttcactgccttctgttcagtgggagagtggttgcaggctattaaaatggagaggtataaagacaacttcacagcggcaggttacaactcactcgagtcggtggcccggatgaccatcgacgatgtgatgagtttagggatcacactggttggccatcaaaagaagattatgagcagcatccagactatgcgggcacagatgctscacttacacggaaccggcatccaagtgtgacacatccgcctccctcagtgaggcttaagactgcaagagaacagttccggccttcagtatacacawagaatgctgctagaagacagtttgatatactgggtccttcctacaataaagagaagattttagaagcacctacagacttgaactcctaagtgccaccagaatatacaaaaagggaatttaggatccaccactggtggccaggaacacagcagagacaataaacaaagtactacctgaaaaaaacatcccaacaccttgagctctcgaacctcctttttatcttatagactttttaaaatgtacataaagaatttaagaaagaatatatttgtcaaataaaatcatgatcttattgttaaaaaawwmmaaaaaaaaaaaaaaaaaa

SEQ ID NO: 7272 - DNA, 600 bp, Rattus norvegicus
aacaaaacgagaaaaaatagakaattctacmtactaaawhwmwmwmhwwwwwwaattttaatatttgktatcatttatttattggkgctactgtttatycgtaataatwgtgggggaaaagatattaacatcacrtstttgtctctagagcarttttccgagatattccgtagtacatatttmtttttaaacagcamcaargaaatacagatatatcttaagaaaaaammrgcattttgtattaaagaattgaattctgrwmwmaaarmwmwmmmwrrwmwctccttctctattgggtcctcctgtccactttccctcctcttttggggtacatggtgtttgtcttaggtttgagaaagcagtcctcggtgtaggatatggggtgacccatccattcctggttcactatgaagagttggtgctctagggatgggcagaggggagatggctccttagccaagggtcctcacactacacagcactcatctaggtccctgttccttgtcagacaaggacagggccacatctccaggtgctaactagagatcagagagagctgttggctgtagctggtcaggagagggaaagttggtactgcag

SEQ ID NO: 7273 - DNA, 755 bp, Rattus norvegicus; identical to SEQ ID NO: 3177

SEQ ID NO: 7274 - DNA, 600 bp, Rattus norvegicus
tccagatattagtatctttgaacctttaggaccagtttgtatttgaatctgaaaagatgaaaatgtgttttctaacaagggttttaattttccctagatttgaatttgcatgctttcctttgtgtgggtttattgctacccagatatgatttggctgttagaccatggtaagatttataacaagcataggatattttagacaggttatgtatatgtacattatatatgtttatacaatagaaagtttgtgttgtcttttcagaamgkywmgagkattgccctaactatgatgcagcttccactgccaaaggctaatggcttatctcctattcaaaattgatttagatgtctagtggggttgggtagtgtagatacaatgtgagaatgtaaaagacaatctttagtgatgcagggtgataaagatgcagctgatagttttctgccagatcttgaagctttacaatgtatttttttcttaaggccacatagtacaatcttctttgmggssgykwattyttaagtaacactaacaacaaattgagcattgctattaattttaatctgttgttagtgttacttaaaaaaaaaggattgcggccg

SEQ ID NO: 7275 - DNA, 600 bp, Rattus norvegicus
cctgtggagatccttcctttcctctacctcggcagtgcctaccacgctgcccgcagggacatgcttgatgccctggggatcacggctctactgaatgtctcctcagactgccccaatcactttgagggacattaccagtacaagtgcatcccggtagaagataaccacaaggctgacatcagctcctggttcatggaagccatcgaatacatagacgcagtgaaggactgccgagggcgagtgctggttcactgccaggccggcatctctagatcagccaccatctgcctggcctacctgatgatgaagaaacgggtgaggctggaggaggctttcgagttcgtcaagcagcgccgtagcatcatctcgcccaacttcagcttcatgggccagttgctgcagttcgagtctcaggtgctcaccacgtcctgcgcagcggaggccgccagcccttccgggcccctgcgggagagggggaaggccactcccacccccacctcgcagttcgtcttcagcttccccgtgtccgtgggtgtgcacgcggctcccagtaacctgccgtacctgcacagccccatcaccacctcccccagctgttag

SEQ ID NO: 7276 - DNA, 600 bp, Rattus norvegicus
ctgtctccaggaggcccgagaacggtggaactttgacttcgccactgagacgccactggagggcaactacgtctgggagcgtgttcggagcccagggctgcccaagatctacctgagccctgggtcccgccgccgtgatgacctgggaggggacaagaggcccagtacctcctcggccctgctgcaggggccagggccagctccggaggaccacgtggccttgtcgctgtcttgcactctggtgtctcacgcccctgagaggcctgaagactccccgggcgggaccgggacatctcagggccgaaaacggaggcagaccagcctaacagatttctatcactccaagcgccgattggtcttctgcaagagaaagccctgaagtgcccacgggaggctcgccttcttctgctgtgggtcaggaggcctcttccccatcttctgccttagccttcattcagtgtgtcttaattattatttgtgttttaatttaaacttctcctgtatatactctgcctgccccctcccmkcstscaaacttmgwtatwyaawwawmrawammaaacaatgaaattagtaggacggtaaaaaaaaaaaaaaaaa

SEQ ID NO: 7277 - DNA, 600 bp, Rattus norvegicus
gagactactctatgcgtgtggacctgcgggccggaaaggaagccgtgttcgcccagtatgacttcttccgagtagactcagcgaaggagaactatcktctacacctagggggctaccatgggaccgcgggtgactctatgagctaccacagcggcagtgycttttckgcccgtgatcgagaccccaataacttgctmatctcskgcrctgwskcctaycgtggsgcttgktggtacargractgtcaytacgccaayctcaaygggctytatggragcacagtggatcaccagggagtgagctggtaccactggaagggmttcgagttctcggtgcccttcacggaaatgaagytgagacccagaaacttccaggcccccaccaggggcacytgagcytgytgcccacctcactcacaccytggtatgactgccgagcactgaggggttgtgcccagagaagagccagtgtgtctytactgtgcctagctcaccgaggaagccttytytgccacagtctcacagcmccatgtttacaggggggaggggagggraatggagcaataaaggrgaaactgrgrmmmaaaaaaaaaaaaaaaaa

SEQ ID NO: 7278 - DNA, 600 bp, Rattus norvegicus
gggaagaccgggaaggtgtggagaaggtcctggggtctctgattttgtcatcagaggagctggcctatgggaggacaaagatcttcatcagaagccccaagactcttttctacctggaagaacaaaggcgcctgaggcttcagcagctggccaccctcatccagaaggtttaccggggctggcgttgtcggacccactaccagcagatgcggaagagtcagatcctgctctcggcttggtttcggggcaacaagcaaaagaagcactatgggaagatccggtcatcagtactgctgatccaggctttcgtgaggggctggaaggcccgcaagaactatcgaaaatacttccggtcaggcgcccgcatcactttggcaaattttatctaccagagcataacccagaaattcctcttgaatctgaagaagaatttgccatccaccaaagtgttggacaacacgtggccagctgccccttacaggtgcttcaacacagccaatcaggaactgcagcacctcttctaccagtggaagtgcaagaagtaccgagatcagctgtccccgaagcaggtgcagacactgagggaaaagctctgtgcca

SEQ ID NO: 7279 - DNA, 600 bp, Rattus norvegicus
tacgttcgccatataaaatgataccgaatccagagtaattaattaatccctctaagtcttgaagtagtaagcattagggctgaaatcaatccctcccctcccctcccctytcccttttctttgttagttttgtggttaatgtgcaatgtgctttttattttattttttgcattttaatgtgccctaattttattctcttttgggggttaatgtgctttacttttaaaaggaggtccaataaattccttaagatagggcagggagctcaacatagctgaaactcaattgcactgtaccattcctgggaggaataaaacctcaaaaggaaaggcagggggaaaatccatgattcctttttctttctgtagctgagttgtttccgggagtagttttgcaagacttgtttctccttggttttgaccaggcccgagccagttcttcaaacaaagacagccagttactaactttggttgctaggtgtggcttcagttcatatcctataaaatcaggagtccagccctccacttccagtccgaaagcatctgagcaaagcttctcttcagttccctggaagacaaggcaatacaaaggtaaggctta

SEQ ID NO: 7280 - DNA, 1400 bp, Rattus norvegicus
caacgcaaactccaacattagacttgtgggcaggccaacccagacacacyyyttyytywywkwkkttccyccaggcggagtttactgatcaagaagttttatagctgaaaccacacccatttttggacccaatccaggcatcctgattagggggctgggcgaggggcggcgcccacctctggttgtatttaaagcaaatttggrggctcacttgtcaraaccgaacaccgaagctgtgcccycctattcagttgtacycaaccatcggagtgggtctgactgaagttcattccagcatcctagggccagctagcagcctgcagagttctcccctttacctgttccctgtgttcccaatgtcagttaagctcaggcacctgggctgagtgtgaggccaattcactgaracactggagctggtccctggcttttctgaccttgtctgtctcgcccccaaagagattagtgtctaggttacccaagcctgtagcctctgcttagtggccttgccacccccacaacccgcaggtataaagccaggtgcccaaggtagggaaggtatcaagaatggagaggctccaggtaagatggtagggcccagggtacctcccgattctagcagaccccatagatggacagccttgtgacctaggggttggaggatggagaggaagggggctcctaactggtggacgtcaagtaagagaaatagatttgatggcgggtgatgggtcttgatggacagtttctctattatactgagcggctccagaacctggaatgcaaaagccaggtcagggatagaatgagacactggctatgtcccaggggctgctgctgtggctgctgctgagcccaagtgtggtgtgggcctccaggggcccccttcggccactgtgccggcctgtcaacgcaaccctggctgcagagaatgagttctgcccagtctgcatcaccttcaccaccagcatctgtgccggctactgtcctagcatggtgagctgaccaaatgggtatggacatcacytcmgmyswrsaktkctscwmscwgymctacaggttcgagtactgccagctgcmttgcctcccgtgcctcagccagtgtgcacctaccgtgagctgcgcttcgcctctgtccgcctccctggctgcccacctggtgtagaccccatagtctcctttcctgtggccctcagctgccrctgtgggccctgccgtctcagtagctctgactgtgggggtcccaggactcaaccaatgacctgtgaccttccccacctccccggccttctcctcttctgatgcccacccactaactccccattcttctggagccagcaggtgttctaaccatccctcccaataaaggcttwrcrgamtkcaaaaaaaaaaaaaaaaaa

SEQ ID NO: 7281 - DNA, 864 bp, Rattus norvegicus; identical to SEQ ID NO: 3185

SEQ ID NO: 7282 - DNA, 305 bp, Rattus norvegicus; identical to SEQ ID NO: 3186

SEQ ID NO: 7283 - DNA, 600 bp, Rattus norvegicus
tggctctgaacttacagataggagctggtccttgaaatggattgagaaagcggctgaggcactggcttgtctttgtgcttcckgwsgrskcctttccttgtcggtgacacagagtcagtcctttgctgccattgtagaagcagacagaatgttcctgaaagccattccaggtasccytsccgttggggytgcagagatgctgatcgtaagatcctcttccggtaagrcsttgcccacacacaggccagatgcaagcgcagggaaaatcccagtmtgaccttggtcaaatcctctctattstacatagamtgctcctccccatacaccggggggtgytggatgacccgctcagaagagaataaaggccttggttggccccccyccacacctgtgstaaaaggagacgcagaggtamccaggtccagcagttaggaatccctggaagagcccaggtgtgatgacstacgtactcatcctccagcactcaggagtagaagcaggaggattgctgcaaatttgaggccagmtagatstatattttgagtmccagsccagacaggamtacatagcaagatyttytsttaaawaaaaaaaaaaaaa

SEQ ID NO: 7284 - DNA, 600 bp, Rattus norvegicus
agggtgggatgtgggcagagaagggttcagaggagccaggtggcacacaccctcttatttgggagacatgggcgggtatgtctccatgagtttgatgccgtcctggtctgcgtagtaagtttcagaccagccagcggtacatagtaggatcctgtctcaagagggaaagagaaaaaaagaaggtagcatgcaactgaggtacacaccaaagtcaactttcaaccttcgaaacaatgcgcaccgccacaacgccagggcaccccaccaccctcttttttatactcaggctctcttcttccagccatgggaaaccactgcagccatgtcggaagccctcaggacttggagaagacctcgaggagcagagatagccctcttccaccaccaagggaggcctcgctggctgtgcgtggcctcttgcaagagctgtcctccatccgccactccctggagaagcgggatgagatgcgggaggtggcaagggactggttgcgggtgggatatgtgctggacaggctgctgtttcgcatctacctgctggccgtgctggcttacagcatcaccctggtcacgctctggtccatctggcactactcctga

SEQ ID NO: 7285 - DNA, 600 bp, Rattus norvegicus
agatccaagtgatccgccaggagctgcagttggctgtaagcaggaagacagagctggaggagtatcaaaagacaaatcggacttgtgaatcctaggctgtgtctccccccactttctcagcccctggtactctgaagcccttgagacactttgtaaagcccttttatattccttgacaaaggtgtggggtctggcaatgaagtgtgctgttctctgcctaaggtgcagcagcagcagcagcagcagttcttcccacaaaggcccccaggtcttcagggtagtaatcgttccgatagtaggaagctagggttagtcgggagtaaagtctgtctgaggggatcggcgagctgccagacaactctggctcctctcaaccttttcacctggtgccacaaaaaaaattctggtttttagccctttctctgcacctcaacaagagataaaaagccggcgctcatacctgtgtcttactgggttggtttttaatattactacaaaacaaaattatccaatgttgcagatttgatacaactccccaatctagatctgatctaacattctgaatgagcagggtaggagccaggaaaacgggacagaaca

SEQ ID NO: 7286 - DNA, 600 bp, Rattus norvegicus
ttttattttactgaacctttgtggactggcacctcttccgagtcaggggaggcttttcaaagtctgttcccataggtgtacagagttctgtctgggaacgtgagactcaccaagttcatctcaggagatcattggtgactccactttgaagtaatcctgtggactaagacaccagggagtctgctgtggacggctacaaacctgcctgttgtagctttaaggatgttcttggcaaattattagctgggcctccaaagaacccaggaaaccagtcagccaacagtttccacggggttgaaaactggacaaaacttagccacgtagttaatattcatgccgcatggagaaagcaggaaagatgcttgattccgaatgagcaaagacaaaggtatcctgtgggagaatagataaacacttagagacgtgatgccttatgcagacttgtaccgacaactgtttaatgattgttttccccaaacattattccctggggcaattaatttagaattaaaatcaccaccacgtgacttgcaaatgtaaaaaaaaaaaaaaaaaaaaaaaaaaaaaaaaaaaaaaaaaaaaaaaaaaaagggcggccgc

SEQ ID NO: 7287 - DNA, 600 bp, Rattus norvegicus
agttccaccaccctctagcgagggttttcaatgaactttttttttcttcttggmtacagagacctggctttctggttcatgtaatgcactgtttaactgtgtaggaatgtatatgtgtgtatatacggycccagttttaawttacttattaaaaggtcagtattatacgtcaaaagttacccggcttctactgtatttaaaaaaaataagcaagcaaagtgaaaaaaawaaagagcagagaaaagagagacttattctggttgttggtaataatgttamcctgctatttatatcccaatgcccttcgcatggcgaagcaggggggaaaagttatttttttcttaaaagtacaaagagagggggaactttkgtagaaggacttttaaaaaagctattttccatyctycggaaatgtttgktttcctagacctcgagagtatgagtcatgtatttacagtatgwawtwgagacaatggatgatatcatkgtaaattaagagtatctgctatttattctttataatatcccgtgtagtaaataagaaagaagtgcagaacaggattaaagaaaaccactaaaaccgaaaaaaaaaaaaaaaaa

SEQ ID NO: 7288 - DNA, 600 bp, Rattus norvegicus
ggaaacttgggactgttatctacctctaactgtaacattttagaattcttaataacctaagtatttaaaattatgmaygwrrcacctttttagttcactgactytaaagtgttttcctaacattttacttttacttcacaaaacttgaaagggcwctgaskgcttcagggggggataattaactgtccmccagcatgcccctccagtgattacamtcagtttcattcagtgctgaattctgtagcttcttcttagaggacagttacagcaggcttcagttcatcataacaraacattgtccaaaagatcacttacttgtcttatgtttttamtgccaaarctgtttctatgtatccttcaaacagacattcactgccatatataaagtgaaggatatcwctgttgagtgaacagattttgtgaagtgccttctgttttagcactttaagtctatcagtttgttgattcwgacaytccactttcctagagtataggaaagatctgtttatgtagtttgtttttaaaatgtgccaatgcctgtacattaacaagatttaaagaaataaagttgtatgaaacattgaaaawaaaaaaaaaaaa

SEQ ID NO: 7289 - DNA, 198 bp, Rattus norvegicus; identical to SEQ ID NO: 3193

SEQ ID NO: 7290 - DNA, 198 bp, Rattus norvegicus; identical to SEQ ID NO: 3194

SEQ ID NO: 7291 - DNA, 600 bp, Rattus norvegicus
ttgctcgtcttgcatctggaagtgagagttcattgtttccactatctcatccctctggcaaaggaggggaactatgccattgtggccaatgtggaaagcatggattatgaccctttagtggtcaagctcaacaaagacatcagtgccatggaagaggccatgagcgccagcctccagcaacacaagttccagtacatcttcgaaggtctgggacacctcatctcctgtatcctcattaatggggctcagtacttccggcgcatcagtgagtctggcatcaagaaaatgtgtagaaacatttttgttcttcagcagaatttgaccaacatcaccatgtcacgggaggcagacttggactttgcaagacagtactacgagatgctgtacaacactgctgatgagctcctgaacctggtggtggaccagggtgtgaaatacacagagctagagtacatccatgccctgaccctgctgcaccgaagccagactggcgtgggggaccagaccacccagaacaccaggctgcagagactcaaggagatcatctgtgagcaggctgccatcaagcaagccaccaaggacaagaaaataaccactgtg

SEQ ID NO: 7292 - DNA, 600 bp, Rattus norvegicus
tggtgaggatgcagatggacactgtgacacaatcgttgcagtggcagaggtcattaagctcacggacccgtststgctstacctagaagtctcaactstggtcagcaaatatccagacatcagagaysrcsrdrktggtgcgmtgctggcactgcgaggagacgccagccgggacatgaagcagaccatcatggagacactggagcagggccccatgcaagcgagccccaastatgtgcccatcttccaggagattgtggtgcccagtctgaamgtggcaaagctccttaagtagccctgtcctccctgctgtcctgtgtgtctttactttgtggctttcctattgtcactgtattaaaacaaaagtccktswmwwrdrmwmmrwrwrawrrmarwwacacgttcctgacttgtgtggcatctctactgtgagaaaaaaaggtgtttagtgagcgtcactttttcctccctattaaagtcttgctccacttaattaaaaaaaaaaaaaaaaaaaaaaacacatgcggccgcaagcttattccctttagtgagggttaattttagcttggcactggccgtcgttttacaacgtcgtgactg

SEQ ID NO: 7293 - DNA, 600 bp, Rattus norvegicus
  misc_feature (584)..(584): n is a, c, g, or t
tgctggaccggcgsaskwggcagggcctagatgaagtggtccggctgctaaactgcagtgactttgcattcacagacatggctaaggaagacaaggcttccagtgagtcacyccscctcatcttggtggtgttcttggggggctgcacgttctcrgagatatcagccctgcgcttcctgggtagagagaaagggtacagatttatttttctgacaactgctgttacaaacagtgctcgcctcatggaagccatgagtgaggtgaaatcctgatgctttcctggccagtgcggaagtaattcctgattgtggaccccagtgagaagctggtgtttcacatctaccttytaagactcccccaacacacacatcctacctcccagctatactcttcagaactgggaacttcagaactaattttcrggagagaattcgatatcmwgtcccccaggatactcctcttgcttatwaagtgtatatagttcatgctgctaaggtatgaggggagaggtattccttgctaaatcccgtttaaatattgtaaataaagcctctcttctmaaatrcaaawrwaawwawwwrranaaaaaaaaaaaaaaaa

SEQ ID NO: 7294 - DNA, 600 bp, Rattus norvegicus
akgaggagctcggrcagctgggacatttggggctcasgttctgcatccaacaacaagaacagcaatagcgatggytgggagagctgggagggagccagtgggsasgrrrgggcaaaggctaccaagaaggcagctccatctacagccgscsacgagggctgggacaaccagaactggtaggagccttgctgcaccctaacccagccctgctgggagacsgcygkgtttgcactttacccttgttcctccttcatttgacctcagtgtgaagacagtggctcaggcaggacttgagttggtgctgcctgcctggtgtggggtggctttctcttagacctcaggggacatgtcatccacctgcctcttgggtcctctgagcagccttcctggattctgggttcttgggacccaggcactgtctctgcagccctagcatagcctgggactgcagccctgtgcaatgtcagctaagccagamawmwrmwwwmrwwraaatgtctttttaaacttgaaarrwmwrmwarwwmwwtcttcttgaagaaagtgcctggagccttaaagctggaaatgaaacgacaaaagcaaaaaaaaaaaaaaaaa

SEQ ID NO: 7295 - DNA, 600 bp, Rattus norvegicus
tctaatatcggttttatgtgcygccagaaaagtgtgccatcaatggrcagtataacaatttccagttttccagagaagggagaaattaarccccatgagttacgctgtataaaattgttctcttcaactataatatcaataatgtctatatcaccaggttacctttgcattaaatcgagttttgcaaaagattaaatgtcccaacttcctttcaatatttaatcatccataaatgctctttataactttgtattctacagctcaatagaacccaattaattgttatgtaagattgctcatgttcaagttagatattgttaaattttaatgtatatgaaaacccaaagcctattccatagtcagcagttactctaaacattagtattaggtttattgtggaggtaaatgttgaagttacaatagcactgatggtagaattggtctgtagtataaactgtgttagctgatgctgcaatgaaccctttaccaaacatttccatttctataaacagagaaattaggtagcattatttatccmcaaccttttggacttgaagttaagtttattattttaaactattaaattaaactatccaaaat

SEQ ID NO: 7296 - DNA, 1400 bp, Rattus norvegicus
agttggaaacaaacctttaatttggtacccgctgaacctgcttgagcgagttggatttgaagaagtcatcgtggttacaaccaaagatgtccaaaaggctctgtgtgcagagttcaagatgaaattgaagccagatattgtgtgcattcctgatgaggcagacatggggactgcagattctctacgccacatatatccaaaacttaagactgatgyrckrgkcctgggctgcgatctgataacagatgttgccttacacgaggttgtggacctgttcagagcttacgatgcatcacttgccatgttaatgaggaaaggacaagagagcacagaaccagttccaggtcagaaggggaaaaaaaaaacagtggagcagcgtgacttcattggagtggacagcacaggaaaaaggctgctctttatggctaatgaagcagacttggatgaagagctggtcattaagggatccatcctgcagaagcaccctaggatacatttccagacaggccttgtggatgctcatctctactgcttgaagaaatatgttgtggatttcttaatggaaaataagtcaatcacttctatccgaagcgaactgattccgtacctagtaagaaaacagttttcctcagcctcctcacagcaaaggcaggaagacaaagaagaggatctaaagaaaaagkagcccaagtctttagatatttacagttttataaaaaaagacaacactctgactttggctccctatgatgcctgctggaatgcttttcgaagagacaagtgggaagatttgtctagatcacaggttcgctgctatgtccacatcatgaaggaaggactttgctctcgagtaagcacactgggactctacatggaagccaacagacaggtacccaaattgctgtytgttctttgtcctgaggaatcaatgakccatccatcagcccagattgccaacaaacacytgattggagccgacagccttatcgggtcagatacacaagttggagwgargtcatctattrarcgatctgtcattggctcatcctgtgtcatcagagacagagtaactgttaccaactgccttctcatgaactmtgtcrccgtggragaagggagcagcayccatggmagcgtcatytkcaacaackccgtggtcgaggcgggcgcggagatcagggactgtttaattggaagtgstcakaggattgaagccaaagctaaacgcatgaacgaggtgatcgtgggaaatgrccagctcatggagatctgaatcctgaacaagtctgacccmwyccttttggccccaaaamtacagatgttggctggcccacctgtttgactctgtatttatttttcaataaagaagaatktscmggcwrwamaawwaaaaaaaaaaa

SEQ ID NO: 7297 - DNA, 1400 bp, Rattus norvegicus
gagtaaygacagctcygacagygatgaygaggcycaaggacccaaaggcaccgagaatgaagawgckgaaaragagtaccaaarygacaaccaagcaagttgggtccatcggatgctaatggccttggtgagygactcrgctttattcaatacccgagaaggacgtgctgggaaggwgcataacttcatgttgggcttgaatctcaacacatcgtatccactgtctcccctgagagacttcagcccccaagattccttcgatgatgatgaactcgacgcagcggtagcagatccagatgaatttgaacgaatatatgaaccactggatgtcaaaagtaaaaagattcatgttgtagacagtgggctcacgtttaacctgccgtatcccttgattctgcgacctcagagaggtgtggatctcatcatttcctttgacttttctgcaaggccaagtgacaccagccctccattcaaggaacttctgcttgcagagaagtgggctaaaatgaacaagctcccttttccaaagattgatccttacgtgtttgatcgggaaggattgaaggaatgctatgtgtttaaacctaagaatcctgatgtggaraaggattgcmcaaccattatccactttgttctggccaacatcaacttcagaaagtacaaggccccaggtgttctgagggaaaccaargaagagaaagaaatagctgactttgacattttcgatgaccccgaatcgccattttcaaccttcaacttccagtatccaaatcaagcattcaaaaggctacatgatctgatgtacttcaacacactgaacaacattgatgtgataaaggatgccattgttgagagcattgaatacagaagacagaacccatctcgttgctctgtttccctcagtaatgttgaggcaagaaaattcttcaacaaggagttcctaagtaaacccacagcrgagtccatttgaattccatgactactggagttcagagcacatgagagatcatcttactatgcacaagagactgactgctactcasagttgytggggacggaggcgtgtgttaggtgaaaayggtgttgattatgcaatacttggcaacagtttctgacagtatgaattttttkkacataagcatagggctatatactgtawtttaaacattcctcacatttttacctgagcawttttatatatatataaaaatatcctttccttttataaatatttaatagtttaactcagtaaaaaaaagcttcccattgtgtgtgaatgttattctgaactagatttgttcatgccatgttacaacactatttttatttaaatgttcatatctacacatgcgaaataaatactttgatatacaaattgccaaaaaaaaaaaaaaaaaaaa

SEQ ID NO: 7298 - DNA, 600 bp, Rattus norvegicus
tttttcagtggccatctcctgcaagactgcgtccaaagtttcccatgctgccacagcatggcgcagaaattcgccaaggatgactccgatagcatgagccgaagacagacttcttattctaacaaccggagcccaacgaacagcactgggatgtggaaggactcgcccaaatcttccaaatccatcagattcattcctgtctccacttgagccccacgttcacgcagcccgactcttgggagggacttttgtgtccagctagagatcgtaagagcagatgtgtttatgtgggataggcagacataaatcaactcagtgtatacactgtttctagctgtgtttttcccattgctgtgaccaaaacctgaatccttttacatagaatactaatgaaaatgtgctacaccagaaatgtgtaggcccggttcgcaagcatactgactttatattttgtggctgaattttttgtgtgtgttttattgtatttttatgtcccacataagtgaggctttgacgtggtaagcactgtttctaaacaaagtgaactcgttcatgatttaaaaaaaaaaaaaaaaaaaaaaaaaaaaagtatggcggccg

SEQ ID NO: 7299 - DNA, 1400 bp, Rattus norvegicus
atgtatatgtgtgtatatttattattttcatgtaattttcaagacagagatcagtaatgaactatcaatgtgaacgaramrwwwwmmwtgtacttgaatcagggctctagctccagccttgctgtgcttcagagctcacgaggacgctctcaggcgctctggggtgagaaatcaagttgctgggttactgtggttcaagccctaaagcagaaactctagggtggcccagccatccattgacaacatctaaggtcaagctccctggagggtgggaaacccttgtcgggcatggaataagtacatttacaaagggaccgtagaggcaagatgtgctccgatagcaacagaaggcttcattcttcaagtacacttcaaggcccacttcacaaggctgtcacctttctgcccttggttttctctgaccaccagggccaaaccagcagtggcgagccatcacctaagctgtttcaaaatgggctgcataaattgaataagcttcatcggaaggtgaccaagctattctaatactgtagtctttttattttagcttttgttattttatttttttagttttttgagacagagtttgtctacatagccctggctatcctggaactcactatgtagactagactggcctcaaactcacagagatcctcctgcctctgcctccttagtgctggcctgaaaggcaagtgccaccatgcccagctctatgctgaattctwmcagaataaaaaccataaaagccgggccacaagctactgataccagtggttcaggggaaatgcttcagtctgtctctggagaagactgttctgaaaatctcggccttgtggcttagaatcctctgcctgtctttctcctgctaattyctgaagatggactattaaaattctacacttctgtccccatcctgtaaataaaacccaacaaaaactcgttcttaatgtggacggattcagaacagccatgtttctgtagtgcccttaactcatcttaaacccgtgcttttatatttgagaagccagaaatcgtgccaaagataacagaaaggtaaacgagtgttgaccatggccacctgaagctacagcctgaccctcacagtgaccagtgactccgaactttgaagtacaaatatccctattctttataggaagcaaatctaaatctaaatgaggttggatgaatactttatgtaggaatggctggttctgtcccctwatcaggtggttcttgtctgtggcactgaattaattggcagagctgtccacgagttcactggggtcatccttgtaaccagctgcttaacacactgtgctgttatctcaagaggacgcgttccatttttctcaataaacatctcccacactttctcccttaaaaaaaaaaaaaaaaar

SEQ ID NO: 7300 - DNA, 600 bp, Rattus norvegicus
gactcctaaggtcacgtgtgttgtggtagacatcagcaaggatgatcccgaggtccagttcagctggtttgtagatgatgtggaggtgcacacagctcagacgcaaccccgggaggagcagttcaacagcactttccgctcagtcagtgaacttcccatcatgcaccaggactggctcaatggcaaggagttcaaatgcagggtcaacagtgcagctttccctgcccccatcgagaaaaccatctccaaaaccaaaggcagaccgaaggctccacaggtgtacaccattccacctcccaaggagcagatggccaaggataaagtcagtctgacctgcatgataacagacttcttccctgaagacattactgtggagtggcagtggaatgggcagccagcggagaactacaagaacactcagcccatcatggactcagatggctcttacttcgtctacagcaagctcaatgtgcagaagagcaactgggaggcaggaaatactttcacctgctctgtgttacatgagggcctgcacaaccaccatactgagaagagcctctcccactctcctggtaaatgatcccagagtccagtggcccc

SEQ ID NO: 7301 - DNA, 600 bp, Rattus norvegicus
tggacagtttaagaagagagaatcctttctgcctttctcaatgggcatacttaagatgaagacgaagagaacaaagatgaattaaatacattgcttgaacacacaggaaagcgagcatgtcttggagaacaactggccaggtccgagctgttcatttttatcacttctcttatccaaaaatttaccttcaagcccccggtcaacgagaagcttagtctgcaattcagaatgtccgtcaccatttccccagtcagtcaccgcctttgcgcaattcctaggctgtgatgtcgaagaggaaagtatgaagaaatggcatctgcatggaggacactggtgtctgctcacmttraggggatagaattaaagatgactgagggagtgtgtgcaatgagactaaggaaattgaatcaagttatgggttcattaagtagaaagccacttgtgagctcaatggtacagcttcacgactgacatcttgcagagaaaaatgattcttccagaaaagaaaatgattacgggatcatggagaatggattaagtgactatgtaaatcataaaaacgatcataaaatttawammwwwaaaaaaaaaaaaaaaaaa

SEQ ID NO: 7302 - DNA, 600 bp, Rattus norvegicus
tggccagcagctttgctctcctcctgctggctcttttccttcatgctactaggtggctaagccacgacctcycgscttatccccccgtgcagagtcctcatacctactcacttcaggcaggtgagccattcgatccctcatttatgcargcttaaccagtcaggttccagtcatagccaaacgtaagctcacttcggagtaccctactgctcttcaaaggagctgcttttctatcgcaaagatttctcttatgctgtccttactagtcattccgtgccatcaggagacaacataggagtcactgccttagagtgacaggtggccattgagttgtckgggccctagtctgctaaaccaagctcatctgagccaaggaatggactcccttgtcctcaaagccccctacagtattgctgtggatgctggccatgagctggaagggtyaggaaatccacaagcagggttaagcttggaccagcatggaggtgaacctgtgctaaaaacccatgactagtgaggctgagtcaagaggcttgttcaagccagcctgtgttacatagcaaaactgtcttgaaaraaararaaaaaaaaaaaaaaaaa

SEQ ID NO: 7303 - DNA, 600 bp, Rattus norvegicus
agctctcctactttatctaagactccggaaaacttgagacctactgagccggccaacaaagaccccccccccccccaattccgctctatcatccctttggctgcagtcgccgccccgaccgccaagggggcgccgcgcgggtcgggcgacccctccgcggtgggagggggcggcacgccgacggggcggggctcggcgggggcggggccgggcgccgagtctcccgtccgtccgggacagactggctggcgggcgggcgctgacgccgcggggccagagcgggccgcgcgggagcgtgtggagaaagcagtggcaccgtccgttcccgtcggggttccataggtccccgagccgcccctggcttggccatggcgggcgcgaggcccggcgtccacgcgctgcagctggagccgcccaccgtggtggagaccctgcggcgcgggagtaaattcatcaaatgggacgaggtaagagagtggctgtaccctactctgccctgatcgaaggattccttcagtcacattcggctagatgccagggacccccacttcagtgtagcctgaccactgcaccctattcagccttgctgcactccggaaa

SEQ ID NO: 7304 - DNA, 1400 bp, Rattus norvegicus
ggcgatcgcccaaaagttgaggtccaggaagaagaaatgtctaccaagtcagtcaaagagracaaggcccaggywgaagaggacctgcakgagccaaagggagacctggcagaatcctaagatgttagttgctcattgtacatctgtaagaccagaatgtgaaaacaagtcacagaacaagatgctgctgttgggaccttgagaccaagatttcagagcccatgagatccagagagcagggccgtccaatgatttccacccagtagagcaccccgacratcctgaggcttcatcgggagctagagccagctaacatttcctcgtttcaagactgcctttgatttgccccttgatgccgtccgtgtatttcggatwtaaggtcctgcgttctcaacctggaaccaatgtctgccatacctagttccacttctcaaactggagcatcctcctttatgtatttatatgtatgtkytatgtagkcctcctcctgtacctattgtatatttttttctaacgtttaagcacatgctttttgtattatgcaatatataacgggtgtgcagccatagcgacgckttgaaaagctycaagcctcaactgtaacctgcagcaaacarataacattycttggcaagaagagacaagtcttttttaaagkttactgatgcttagatctgtgggcttctagtcctctgaaagwggtgwtttcctatgcacagcgagctcagaaataaaaaccccattttgaaacatccaggatgtcccaatattaccatgattttttcccccctttttgctaatccagtccaggttggaaagaagtctcctctgtgtcagattaagccctgtctcttaatgatatggacaaatgagtgtgcctaaggccatgrgatgtttcctaatgcagaaggaatctgwtgtacgtttttttgattgtactcttctatgctggaccgaattcatatgcagatcgaagtgaktcctgwtcttwacagatggtattttgatagatactggagttwgwctgwgttatatctgtgccccttctttaagaacaatgttgcattatgttcctttggataaawtgwgrttwgwccaactgatttaaataracatatttgcctcacttaaaaaaaaaaammmmmamacacccactacacacccaaacacaccataaactcacaattacataactaaaaaaaaaaaatcttagggggtggcccccggaacccaatttcgccttataggggaggcgtaataccaattcactggccgccgttatacaacgtttggactgggaaaaaccttggggtaccccacttaaaacccttttgagcaaaatccccttttgccacttggcgaaaaacccaaaaggcccgaccgaacgccctttcaaaaag

SEQ ID NO: 7305 - DNA, 600 bp, Rattus norvegicus
atccacaaacacacatgcacacacatacacatatatgtacacgcacgcacccacaccctacagcagacccatctgcacaaacacagacagatgtggacatgcacccgcatgtacaaaaaaacacggaggcagcctagcccccaaaggggaactggtgccccagaattgggaactgctccagaggaggagctggcagcattacagttgggtcccactcaccatgagtgtgaggccggccccccacacgacacactgcgcctcacagcattgcccgactacaccctgaccctgcggcgctcccccgatgacatcccactcatgactcccaacaccatcactatgattcccaattccctggttgggttgcagaccttgcacccctataacacctttgccgccggattcaacagcaccgggctgcccaactcacactccactacccgtgtatagctctatcccagagcacaacccatctcccagatccctccctcccagatccacaaacacacatgcacacacatacacatatatgtacacgcacgcacccacaccctacagcagacccatctgcacaaacacagacagatgtggacatgcacc

SEQ ID NO: 7306 - DNA, 600 bp, Rattus norvegicus
atggccagagcggctttcagctctggataatctcctcaatcactccagcattttcctcaagggtgcccgactcatcccagagatggaccagatcttcactgacgtggagatgacaacgttggagaaagtcatcaatgacacctggacctggaagaatgcaaccctggccgagcaggccaagcttcctgccacagagaaacccgtgctgctttcaaaagacatcgaggccaaaatgatggccctggaccgggaggtgcagtatctactcaataaggccaagtttactaaaccccggccacggcccaaggacaagaatggcacccggacagagcctcccctcaatgccagtgctggtgaccaagaggaaaaggtcattccacctacaggccagactgaagaggcgaaggccatcttagaacctgacaaagaagggcttggtacagaggcagcagactctgagcctctggaattaggaggtcctggtgcagaatctgaacaggcagagcagacagcagggcagaagcggcctttgaagaatgatgagctgtgaccccgcgcctccgctccacttgcctccagccccttctcctaccacctcta

SEQ ID NO: 7307 - DNA, 600 bp, Rattus norvegicus
cacaacacatgagaagctctgctttccttctctgcccatcttccccttttgttttacaaatcagcctggcatgcctgcgagtgtgagacctggtaagaaaactcccacaaggatcctgcagtggaacgcaggcgcatcacagtagaagttcagcatcacctgaagactgactggcaggcagcaytgaatcctcactagagagctaagcamagcttggttgtgggaccgtgctmtgaggwccaagccgwaatgcwaccacctgagtttgcctttgtsaggcattagtgtagaccaatgaagaagatgctgcaggaattggkaagcwaccctctaaarcagccactgtgytaagtttcagattatttgcacaattatagtaccaagagtttatgaagtctagaaatggcaagaratttgtttttttactctttgtttctgccaccttctaactmtgsaggccacctggtgtggagagggctgtgatgcgcatctccataacatcacaagtcctgacaacagtgatggcgtgtttcctttctagaccatgtttatcatttcttttgaaatcactaaaaatacatgattcattgactatcagtc

SEQ ID NO: 7308 - DNA, 600 bp, Rattus norvegicus
  misc_feature (368)..(368): n is a, c, g, or t
actaatcgcastgattggagackaggacacggtgactgktytcctgttgggcggcatargggagcttaacaagaaccgccaccctaatttcctggtagtggagaaggataccaccatcaatgaaatcgaaracactttcaggcagtttmtaaacagggatgacatcrrcrtcattstsatcaaccartmcmtcgmagagatggttcggcacgccctckatgcccaccagargtscattcyadccgwsctggagatcccstccaakgagcatccctacgacgcakccaaagactccatcctgcgcaggrccaagggcatgttcactgctgaagacctgcgctagggstgctcagcccttaacscwyswnksgsttycaggcctytcccagtttgccaccctbtayttaagtttcaagccttkgttkycagcccctycyttymtcwtcamtgagtggttcctaagctgttggggttmtgatgktcargtmcargbtgggtwgggaaagaaaggscaaccatytbtbyabtwmctatgccattgrgcagtatcattgttaacattaaaggaatattmtytcmrdraaaaaaaaaaaawaaaaa

SEQ ID NO: 7309 - DNA, 600 bp, Rattus norvegicus
agatcaaawtttayctaacagwtctgacaawgkcctttttttcaatatmtyamtatcaagaagctggctgccactgggtgtgsktcattahgtsactaactgsstyccagaawggaagggtcagwmcctytacasarctgccatctcstgttacgctgcacctcagaccttcacattcatcstactaccttcctcctstggtatgccttycmctgggcatttacaatgggcagtacagacgtggtcagtcatgtgmcagatactcaaamcagtaggcacctgccaccagattccaggaggaacactatcagtgtgctcctttctctgcacagccctttcccttcagacctttstgtttgccaattgcctggagctttgctctcagctgttgagtggtccgaattaggaacatgtcyagtataggttctctcccatgtaagaggctacataacatatccatgatgctgctttaaggttttagaggctatacctcaaattagctgtggattttgtctcctgcactgccagtatgcaactgatcttgcatttattaattttgtgaaaaaatmsrtggaattttkmcaaaaaaaamaaaarraa

SEQ ID NO: 7310 - DNA, 600 bp, Rattus norvegicus
ttccgccctgaaaggttcagcaagaagaatcaggataacatcaatccttatatgtacctgcccttyrsgarkggacccaggaactgtattggcatgaggtttgctctcatgaacatgaaagttgctctkktcagagtcctgcagaacttctccttccaaccttgtaaggaaactcagatccctttaaaattgagcaaacaaggacttcttcaaccagaaaagccactgcttctaaaagttgtgtccagagatgagactgtgaatggagcttgatgtagaatggcctatagtggtgttgtatcacatggaccagaaaccagttcatattgtgaatgaatccagagatgaagattgcagtaattttgttcactcctggggrttttgggtgttctttgagctttctcagcctctgtgcaagttgttttctgtggaacataaggatctaatgacataaatccaagataaatatattcaactcgtggttcttgtgggatggcctatgttaccttcattgttaccaccaaatactctgatttctgatgagaaaataaataaacatcaattamwarwwmwawmammawwwmmmmaraaaaaaaaaaa

SEQ ID NO: 7311 - DNA, 600 bp, Rattus norvegicus
ttactgttggagattccaactctaatgtcaatcgttccttatcaggagaccaagacacattccaccccagtggggggtcccataccactcatggatctgaatcagatggacactcacatgggagtcaagaaggtggagcaaacacaacctctggtcctataaggacaccccaaattccagaatggctgatcatcttggcatccctcttggccttggctttgattcttgcagtttgcattgcagtcaacagtcgaagaaggtgtgggcagaagaaaaagctagtgatcaacagtggcaatggagctgtggaggacagaaagccaagtggactcaacggagaggccagcaagtctcaggaaatggtgcatttggtgaacaaggagtcgtcagaaactccagaccagtttatgacagctgatgagacaaggaacctgcagaatgtggacatgaagattggggtgtaacacctacaccattatcttggaaagaaacaaccgttggaaacataaccattacagggagctgggacacttaacagatgcaatgtgctactgattgtttcattgcgaatcttttttagcataaaattttctactctta

SEQ ID NO: 7312 - DNA, 1400 bp, Rattus norvegicus
tgctggcactgcgagccctgcaccgggtaccagtaccaagtggaccgctacacctgtaagacctgcccctacgacatgcggcccacagagaaccgcacgagctgccagcccatccccatcgtcaagttggagtgggactcgccgtgggccgtgctgcccctcttcctggccgtggtgggcatcgccgccacgctgttcgtggtggtcacgtttgtgcgctacaacgatacccccatcgtcaaggcctcgggccgggagctgagctacgtgctgctggcgggcatctttctgtgctacgccactaccttcctcatgatcgcagagccggacctggggacctgttcgctccgccgcatcttcctagggctcggcatgagcatcagctacgcggccctgctgaccaagaccaaccgcatttaccgcatctttgagcagggcaaacggtcggtcagtgccccgcgtttcatcagcccggcctcgcagctggccatcaccttcatcctcatctccctgcagctgctcggcatctgcgtgtggttcgtggtggacccctcccactcggtggtggacttccaggaccaacggacacttgacccccgctttgccaggggcgtgctcaagtgcgacatctcggacctgtccctcatctgcctgctgggctacagcatgctgctgatggtcacgtgtactgtgtacgccatcaagacccgaggcgtgcccgagaccttcaacgaggccaagcccatcggcttcaccatgtacaccacctgcattgtctggctggccttcatccccatcttttttggcacctcacagtcagccgacaagctgtacatccagacaaccacactgacggtctccgtgagtctgagcgcttcagtgtccctggggatgctctacatgcccaaagtctacatcatcctcttccatatttttccattctgctcctggccttcccctgccatctgccctgccccctgcccctcctccctgagctgccccatccccgccatcattttctcttctgttccccctcgatctcatttcctaccagccttccccctacttggcttcatccaccaactctttcaccacgttgcaaaagagaaaaaaaaaggggggggggaatcaccccctacaaaaaagcccaaacaaaaactaatcttgagtgtgtttcgaagtgctgcgtcctcctggtggcctgtgtgtccctgtggcctgcagcctgctcgcccgccctacccgtctgccgtgtgtcctgcccgcccgcctgcccgccttgcccttcctgctaacgacacggagttcagtgcctgggtgtttggtgatggtctctgatgtgtagcatgtctgtttttataccgagaacatttctaataaagataaacacatggttttgc

SEQ ID NO: 7313 - DNA, 600 bp, Rattus norvegicus
aaaacacgatggcctatataggctttgtggaggagaagggagcactgtattgtgagctatgttatgagaagttctttgctcctgaatgtggccggtgccagaggaagatccttggggaagtcatcaatgctttgaagcagacctggcacgtgtcctgttttgtgtgtgtggcctgtsgrmaacscakscgtaataatgttttccacttkgargatggcgagccmtactgtgagacagactattatgcactttttggaacaatatgtcgcgggtgtgaattccccatagaggctggtgacatgttcctggaagctytgggctccacctggcatgacacttgctttgtgtgctccgtgtgttgtgaaagtttggaagggcagacatttttctccaagaaggacaagccactttgcaaaaaacatgctcattctgtgaatttctgaaaatcaacagttccaggaaagagaagaaatttgaaraaaaarrarraaaawwaaaawwammatttaatttttagttttaatatttatacggagttctaaaataataataatagccctgaagggataaactcaaacattaaaaatcaaatctgaaaat

SEQ ID NO: 7314 - DNA, 600 bp, Rattus norvegicus
ctcgctctgtccacggcaagtggtcttgcccatcttcacatggagattgttggtacccaaggaaaaccagctattgcccatagagatttgaaatcaaagaatatcttggtgaagaaaaatggaacctgttgtattgcagatttgggacttgctgtgagacatgattctgccacagatacaattgatattgctccaaaccacagagtaggcactaaaaggtatatggcccctgaagttctagatgattccataaatatgaaacattttgaatccttcaaacgtgctgacatctatgcaatgggcttagtattctgggaaatcgctcgacgctgttccattggcggaatccacgaagactaccagttgccttactatgatcttgtaccttctgatccatccgttgaagaaatgagaaaagtagtttgtgaacagaagttaaggccaaatattcccaacagatggcagagctgtgaggccttgagagtgatggccaaaattatgagagaatgttggtatgccaatggagcagctaggctgacagctttgcgaattaaaaaaacattgtcacagctcagccaacaggaaggcatcaaaatgtaa

SEQ ID NO: 7315 - DNA, 600 bp, Rattus norvegicus
tgcaccatccatcccgtsacacctgtccccgggcctgcgagacgtggctctgcscwgtttagaacttcaacctcargacagacctccgtcaagagagctactgawgcatcctgtcttccgtacaacatggtartcaactgctcagggtgcgcaacaaggaaagawaactcgcgggcagccacgttgatagtctgctgkcctcataccactgaccagaagaggggccagtggggagcccgcacctaagcatgtgactgacaaatcatgactgcacctgagctccgtctgcagacggbtacaactcgtgcaggagctgtaaaccgtgcctttcacaggacgctyttaggtgagcaggaaggcggtggagtttgcatgattaaatagcataaatttatttttggagcacttttgcagcaatattagcagctgggggctcaggatcaactttactgtgtcacttcttctatttcacstagggccacagcagggttstgcagttccgtctcggtttgkttgtttgtttgattttattgggkttttttttwttttgtttttttgtwtttgttttttatyactggctgtaaaaaaaaaaaaaaaaaa

SEQ ID NO: 7316 - DNA, 600 bp, Rattus norvegicus
gttcagcttcgagtcccagactctcgtcctctttggataataaagaaaaggagaaagacaataaaggaacaagacttgcatatgtcgcccctacaatcccaaggcgactaggcagtacgtctgacattgaagagaaggaaaacagagagtcttcaaatttgcgaacaagtagttcttacacaagaagaaaatgggaagatgatcttaaaaaaaatagttcaatcaatgaaggatctacttaccatagaagttgctcctttggtagaagacaagatgatttgattagttgtagtgttccaagcaccacatcaacaccaacagttacctctccagctgggcttcagaaaagcttcctttccagcacaagcactactgcaaagactcccccgggttcctccccagcaggcacacagagcaggtcatacctcactcctgttagggatgaagagtctgaatcccacaggaaagcaagatctagacaagcaagacagtctagacggtcaacacagggggtgacactgactgacctccaggaagccgaaaagacaataggaagaagccgttctacgagaaccagagaacaagaaaacgaagaaaaag

SEQ ID NO: 7317 - DNA, 600 bp, Rattus norvegicus
gcagaagaagctgaacgaatggttgggaaacgaaaacacagaagaccaatactcactgstagaagatgacgaggatttgccccaccatgwtgagaagrcsysgaawstggggagcagcaaccgaaacaaagccgagaacctattgcgagggaaacgagatggcactttcctggtccgggagagcagtaagcagggctgctatgcctgctctgtagtggtagatggcgaagtcaaacattgcgtcatcaacaagactgccaccggctatggcttcgccgagccctacaacctgtacagctccctgaaagagctggtgctacattaccaacacacctccctggtgcagcacaatgactccctcaatgtcacactagcatacccagtatatgcacaacagaggcgatgaagcgctgccctccctcggatacagttcctcaccttcaagccacccaaggcctctgggaagcaaagggctcctctccagcccgacctgtgaactgagctgcggaatcgaagccggatgtctgcacatgggactagagctttcttggacaaaaagaagtcggggaagacatgcagcctagggctgttggatgaccg

SEQ ID NO: 7318 - DNA, 600 bp, Rattus norvegicus
acgggtcatcgtccaggcgtccactagtgagctgctgcgctgcctgggtgagtttctctgccgccggtgctaccgcctgaagcacttgtccccaacggaccccgtgctctggctgcgcagcgtggaccgctcccwscttctgcagggatggcaggaccagggtttcatcacaccggccaatgtggtcttcctctacatgctctgcagggatgttatctcctctgaggtgggctcggaccacgagctccaggctgtcctgctgacctgtctgtacctctcctattcctacatgggcaatgaaatctcctacccgctcaagcccttcctggtggagagctgcaaggaagccttttgggaccgttgcctctcagttatcaacctcatgagctccaagatgctgcagatcaatgctgacccacactatttcacacaagtgttctctgacttgaagaatgagagtggtcaggaggacaagaagcgactcctcctggggctcgatcggtgagccccctgtagctggtatcctggctcaaggattccattcgtttttaaaatttattattaaagaatcaagtttgtgtacagtatgtgtctagcaga

SEQ ID NO: 7319 - DNA, 600 bp, Rattus norvegicus
gaggagctgaagacagagatsccatggagcaggaagacactgggccggaagccctgccggaagtcctgcccactgagcttgttggtgcccgggcatctccctcacaggctgactcggacgagagagaaagtttgacaagggaagaggatgaagacagtgaaaaggaggaggaggaggaggataaagagatggaagaattgcaggaagacaaggaatgtgrgaacccacaggaggaggaggaggmggamgaggagkwmgaagamgargaggaggrggaagaggaagaggaggcagaggaagctgagcatgaggcggcagcagccaagactgggggtgcagtggaggaggragcggctcakcaggcaggcagcttccagcagaaggccagcgggagcgagagcawgcgactgtctgaagagaagacaaatgaagcctaggagctcttccaaaaggaagtcctgcttggtaatgaaatttgctctatattacccacgcttttcatggaaacatggctcctgtgctatggttcctgctcactactgtgtaatstcagaactgaaaaacaaawtmctraaaaaaaaaaaaaaaaaaaccctcgtg

SEQ ID NO: 7320 - DNA, 1400 bp, Rattus norvegicus
cattctacacagtaaatccatggcctatatgcgtggcgtgtacttccgtatgaaggatgaggtgtttcggggctcacggccctatgagtctgggcccctggaggagttcctgaagcgtgagtttggggagcacaccaagatgacagatgtcaagaaacccaaggtgatgctgacagggacactgtcagaccggcagccagcagagctccacctcttccggaattacgatgccccagaggccgttcgggaacctcgctgtaccccaaacattaacctgaagccgcccacccagcctgcagaccagttagtatggcgggcagcccggagcagtggggcagccccaacctatttccggcccaatggacgcttcttggatggtgggctgctggccaacaaccccacactggatgccatgactgaaatccatgagtacaatcaggatatgatccgcaagggccagggcaacaaggtgaagaaactctccatagtcgtgtctctgggkacaggaaagtcccctcaagtgcctgtaacctgtgtagatgtctttsgtcccagcaacccttgggaactggccaagactgtttttggagccaaggaactgggcaagatggtggtggactgttgcacagatccagatgggcgggctgtggatcgtgcccgggcctggtgtgagatggtcggtatccagtacttcaggctgaacccccagctaggctcagacatcatgctggacgaggtcagtgatgcagtgctggtcaacgccctctgggagaccgaggtctacatctatgagtaccgggaggagttccagaagcttgtccagctgctgctatctccctgagcccggcctgctggcaggagtggccggcgtggcacactgcggccaggctggcctgccgctccatgtccatctgagactagggctcggagcrrrcagttccccatgaggyacctctcctgatccatccgcactttactamtccagcygarrgscmmgagktccctcggccccttcccctgactatgaaggacaactgattccatctactacccatatatcagagatcaacactaagggccagtgtcsagagggccctcccaggctccctggccactgctgcccaccccctctcccacttcctgatgtcagggattagagaaatgttccaccccgtcatcaggtgaaatccaggctaatgaaacccagcgccattcygccattcgactttgcccctcgcacctgcagcctctccaccctgcagccgccccacaaggagcgctcctagctcccaaaggtcaatcctgtgcacatgctcttctctggaaggagagtggggagggctcaaggccacctcaactgtgaaataaacggttttacactcaaaaaaaaaaaaaaaaaa

SEQ ID NO: 7321 - DNA, 600 bp, Rattus norvegicus
gctgscamgakrttcaacctgtaccctcgcaaggggagaatagctgtgggttctgacagcgaccttgtcatctgggatccaratgccgtgaagatcgtctctgccaagaaccaccagtcggttgcggaatacaacatctttgaagggatggagctgcgtggggcacctctggtggttatctgccagggcaagatcatgctggaagatggtaacctgcacgtgacccagggggccgkccgcttcattccctgcagcccattctctgactatgtctataagcgcattaaagcaaggaggaagatggcggacctgcatgcagtcccaagaggcatgtatgatggaccagtgtttgacttgaccaccacccccaaggggggcaccccagctggmtstactcgaggctctcccactcggccaaacccaccagtgaggaacctccatcagtcgggatttagtctgtcaggcacccaagtggatgagggtgtccgctcagccagcaaacgcattgtggcgccccctggaggccgttctaacakcacatccctgagttaagcaagccstcccaaagagggaggcagaagcaaraaaaaaaaaaaaaaa

SEQ ID NO: 7322 - DNA, 600 bp, Rattus norvegicus
agccaacagaaatgaaagtgtggacagagagcagtagattggcatgaggaggcatgatgtacaacccccagaccactctttycatcaccacatttgttgatgctttcgcaagccagttggtacttakaatcagttccccagggaatccttcaaaaagccataagaatgcccacccctggaatcttaccaccaccagatgagcaggtttatggtttagcaaaaggagaatgctgtcaccctctgacctcatagktttcacatactgggcaagtgttcatctgscaggatgccccawtgctcctargtcttyccaggtaccttgkagaagaacttaaatctataaaataaggctttctctaaaatggaacttycyttctaaggctccmatttttactsktgactaaawttatatgkttaatagttttttttyaaataaaaacaaacmcmaaaaggggaaatggttccacctgacacaagtttgagtggatgtggaggctttggtttaaggaaaaacaccaaacttttcggaggttatttgtgacccctaagtctccttttaaaaaatttaaaccttctttttttcttgcccagttttttaag

SEQ ID NO: 7323 - DNA, 357 bp, Rattus norvegicus; identical to SEQ ID NO: 3227

SEQ ID NO: 7324 - DNA, 600 bp, Rattus norvegicus
actgtcccctatctataatctcattcctttgacaatgaaagatgcatacgcaaagaaacagaatatggaaaaggctattgaagactatgtkaatgaattcagtgctagaaagtgctacccatgtcaaaacggaggcacagcaattcttctggatggacagtgcatgtgctcctgcacaatcaagtttaaggggattgcctgcgaaatcagtaaacaaagatagccttcaggaaacaaagcaaaacctggttcacatggaaggtggaaaaaaggacaaaaaaagaagaagagagaggagagagaagagagagagaaaagaaaaaaccccaggactttccaacttagcatcctaccctagagcgaatcctcactgccaagtagaaagcagcttgcttcatggaaatcctaccaacctctgatgtcgtctctgtttcaggtctacagtgcctttctcccctctttaatgcctataatgcttccatttttttttttatccctaatgaagaatcggcagtgagatatgccaggactgccttttcccacaggcaatgccaatctctcgytaataaaacararttaaattaaaaamaaaaaaaaaaa

SEQ ID NO: 7325 - DNA, 1400 bp, Rattus norvegicus
tgtcttttagggggtggggaaagtckgwaaastwacaaacccccaaacccagaaactgctgmtggarttgtgccctgcacatgcaaagacgtggaccttgggtgttgctttaagggtttaccgcctgatctcgttaccccactaactgtgattgttactccatttgcatctcgtctgctgatttgccactgcctgccccctcttcctcaagaagaggccytcctggtgccaggctcaaaacccgaagstacagtttgcmtwatttttcactgtttggcttgatctgtaccatctctcccagccctaatgacagagaccttgccttaaaramwwwrmrrwwmwrtaattgcagamwwmwmmarmamwmagaatcactttcaattccatagagttgttcctctccacacacacccctcccccggtgcacagaagggctgccgacacccaccagactcatacagagaaggtcacaagtactaaatgaaaggctcccagcccaccttgtctcagcccctgtcctgtgaagggactccttcctcacacagtttctgtgacttccttttgttcttaaacacatggaagttacttggcagggagacatttctagaataatttttgtgatcacgatacacccttcattctccrwwwrmwrrwawrwwwwtagttggtttggttttagttttccacatacagtctagctcgtggccagccttgagctccgaggagatcctccatcttctcctctcaaatacccagggcccagacatttgcctctgcacctgctgggctttttctctcatttttccttaaccagaaaaacaaacgggtaatttcatcgactgcctatgtaggtwtggtgtggttttgaaamccttgtttccaygrggccctttgggrgagtcagggggcccctgcacgagcccatgcttcaatgccragagattggctgctggaaccccbtgaagcatgatttcatgttttagagatgarcwtctgtggtacggtcatcatggtcwccaacatcaacagacaaggtagaaggatgtcawcgmcmaagataagttcagggctctttctagggtcaccactmtgtcctgtgtaacactgacacagtctggccagcctttcaggaggtcctggctccctcctaaacccatgtaggwyytgctgcaagtaacagtgtatgaagtcaacctgacctggracagaagtctgcatattggktaagatacagcctatgkmtcttcatacaacgatccagaagtactagacatcatttttgcagtgaattatgggkrccatacatgactttgatgatatctgcttttaaacaaataaaatctttgatcactcarwraamaawwmarwwmammwrttwggaaraaaaaaaaaaaaaaaaa

SEQ ID NO: 7326 - DNA, 600 bp, Rattus norvegicus
acagaaagtatcttatttatatatagatatatatatgtaatttatataaaatatatagaaattattatatatatatattatacactcttctataatatatatatatattcacatacattgggactagaaaaatctatggagatgtccatcaatggtactatgttattagagaaatgctttaattttcatattccaatcagatgacatcctatgttccactggttgggaaggggttgrcamsagyasymrgysckayacsamagsacttggatttgstcattctcttcagagctaaggtttgctccaggtggggccaacctacagcgcaagagaaggggctytggctgggagcttgagcttggagacttgactgaaagcagttgctscccctgcagggcagccattcctgtgcagaaagagagartgaatggctaatgacgctccggatgaaattgcctattgttctatgccgcctgacgtgtctgcatgagaggtttccwwwttgttcatttktaagctgctgttaaaccaaaaccatgttgtgctactgwrwmarmmwwwwmawwawtccaaattttacttttacmtcgtgccgaattc

SEQ ID NO: 7327 - DNA, 600 bp, Rattus norvegicus
gggcacggccaagcccggagagcgggaagcagcggggcggggcggcaggtgcggggatgcgggcggaggccgggtagcagagccccgcgttcagggcgccccgtgtggcgagcgcgcggcatgtcgcaagggccccccgcgggcggcgtgctgcagagcagcgtggcggcgcctgggaaccagccgcagagccccaaggatgatgacaggaaggttcgaagaagagagaaaaaccgggttgcagctcagaggagccgaaagaagcagacacagaagtctgacaagcttcacgaggaacatgagagtctggagcaggagaactctgtgctgcgcagggagatcgcgaagctgaaggaggagctgcggcacctgactgaggcgctgaaggagcacgagaagatgtgcccgctgctgctctgcccgatgaactttgtgcagcttcggccagaccccgtggccagctggtctgcccatgatgccccagatcacccctcttttatctggctcggaaccttggtttgacactcaggagtttctctacacatctgtgtccaggggtacggcgtccctccgagcatgcatctagagggcccgcatcag

SEQ ID NO: 7328 - DNA, 600 bp, Rattus norvegicus
gattttaaaatcagaacgatagaactcgacggaaagaaaattaaacttcagatatgggacacggcgggccaggaaagattccgaacaattacaacagcatactatagaggagccatgggaattatgctggtctatgacatcaccaatgaaaaatcctttgacaatattaaaaattggataagaaacattgaagagcatgcctcttcagatgytgaaagaatgatcctgggtaacaaatgtgatatgaacgacaaaagacaagtgtcgaaagaaagaggggagaagttagcaattgactatgggattaaatttttggagacaagtgcaaaatcgagtacaaatgtagaagaggcattttttacacttgcacgggatataatgacaaaactcaacagaaaaatgaatgacagcaattcatcaggagcaggtgggccagtgaaaataacagaaagccggtctaagaagaccagtttcttccggtgwtctctgctttgatgaactcctcacttctgagagactgcagaatacctagagggcccttccccgcctctctgaaagcacaggctacccagcctcagagtcacctcacccggctgctgg

SEQ ID NO: 7329 - DNA, 1385 bp, Rattus norvegicus; identical to SEQ ID NO: 3233
  misc_feature (1014)..(1014): n is a, c, g, or t
  misc_feature (1061)..(1061): n is a, c, g, or t
  misc_feature (1130)..(1130): n is a, c, g, or t
  misc_feature (1236)..(1236): n is a, c, g, or t

SEQ ID NO: 7330 - DNA, 600 bp, Rattus norvegicus
acaagttgtcccaaagagcatttaactacagatttaaggaatttctattatctgggtatcttcatttctatttcacaggcttcttaacatttttttgtaaaagtacaaaaatattcaaaagtcagaactctattacagatgtatgcataaaagatgattataattttgtaggagaaagatctgctcctattagtgaagattggtaaaattgtcagtttaacccggctgtcctactactaatatttaatttttcaaatatgaaaaggtttcagattttgtttagatttatatcacattaaacactgtcaaataaaggctgtttttatatgcatcgttgatgttccaaaatgtgaagtctaaatggtgtctgtatttccaattattaaataacttctaagatcatttttaaaagtctgtagatggtatggatagctagttgtttgttaatataaagtaaaagtagatagctgatttatgttgtacctatgtcgtatgtatattaggtatcgtgttgtctcactaaagtgaaagcaaacgaaaaaaaaaaaaaaaaaaaaaaaaaaaaaaaaaaaaaaaaaaaaaaaaaaaaaaaaaaaaaaa

SEQ ID NO: 7331 - DNA, 600 bp, Rattus norvegicus
ccgctttgcagcccagaactcagttcgcccccaggaakagcagaggagaggakagggactctggagtccccrtgggcrcgaggcaaggctgagctaaggaaggaaaaacggacagctctgtctgtccagagtatggtgaacactggctctcagccggagacgcgggcctcagttaggactttcggcgcgcgaaggaaaaaaaaaatctcatcagttttaatgcctgctcgattatatagaaaaaatacgaaaatctgcattaaaaatattaatcctgcatgctggacatgtatggtaataatttctattttgtaccatttttcttgtttaactttagcatgttgttgatcatgaatcataayyybyttktttytttkkrwgwgwagggatgcaggttcctgcggctgcggctgcgarcgarcaagcgagcggagtttcagttcgccggccggcttgtaaattacccgcccggccaaaccwcattgagaaggtagcagcaagctgagtctatgtttgggtttattawtatggcatttttttgtttgtaagtaaaaataaaggaaagaamgaaaaaaaaaaarwrarmggcccctcgtgccg

SEQ ID NO: 7332 - DNA, 1400 bp, Rattus norvegicus
aatgccactcacagctgtgtccgggacttgctgaaagcctggaatcactggtccgtccaaatcttggatataattccctttctcaggttcttccccaatccaggcctctggaaactgaagcagttccaggagagtagggaccatatcgtaatgcaggagctgaagaggcacaaggacagcctggtggcagggcagtggaaagacatgattgactacatgctccagggtgtggagaagcaaagagatgccagagacccagggcagctccacgagcggcacgtgcatatgtcggtggtggacctttttgtcggtggcacggagaccacggctgccacgctctcctgggctgtggctttcctgcttcaccaccctgagatccagaagcggctgcaggaagaattagacctcaagctggcccccagctcccagctcctgtacaagaaccgaatgcagctacctctgctcatggccaccattgctgaagtgctgcgtttgcggcccgtggtgcccatggccttgccccatcgtgcaactaaggctagcagcatctctggctatgatatccccaaggatacgatcatcatccccaacatccaaggcgccaacctggatgagatggtttgggaactgcccagcaagttctggcctgatcgcttcctggaatccggcaagagtcccagaataccgacctttggctgtggggcacgcgtgtgcctgggcgagcctctggcgcggctggagttcttcgtggtgctggctcgcctgctccagaccttcacgctgctgccgccaccagatggtaccctgccctccctgcagcccctgccgtatactggcatcaatctcttaattcctcccttccaggtgcggctgcagcccaggaacctggcaccccaagaccagggccagaaatcctcgacaggataggacgagccttgtgcctcagtttctcctttattgctccattcccctcccctcccccctgtaaacatggtgctgtgagactgtggcagagaaggcttcctcggtgagctaggcacagtagagacacactggctcttctctgggcacaacccctcagtgctcggcagtcataccagggtgtgagtgaggtgggcagcaggctcaggtgcccctggtgggggcctggaagtttctgggtctcagcttcatttccgtgaagggcaccgagaactcgaagcccttccagtggtaccagctcactccctgagggaagggttgtcaagggaggagagtcaagacaacgccacatctatgccaccttatccatcccaaccctggctcctctaggtgactcccagagtgcagccatctccccccatgatccctgaagtgatgtcctctcccacccgctaataaacggtcttttcaagattccc

SEQ ID NO: 7333 - DNA, 1400 bp, Rattus norvegicus
gctgaagaggcacaaggacagcctggtggcagggcagtggaaagacatgattgactacatgctccagggtgtggagaagcaaagagatgccagagacccagggcagctccacgagcggcacgtgcatatgtcggtggtggacctttttgtcggtggcacggagaccacggctgccacgctctcctgggctgtggctttcctgcttcaccaccctgagatccagaagcggctgcaggaagaattagacctcaagctggcccccagctcccagctcctgtacaagaaccgaatgcagctacctctgctcatggccaccattgctgaagtgctgcgtttgcggcccgtggtgcccatggccttgccccatcgtgcaactaaggctagcaggtgattccccagggtaagggttgagaaaggaaggcctcgctgggcactcctgactccatgccttcctcagcatctctggctatgatatccccaaggatacgatcatcatccccaacatccaaggcgccaacctggatgagatggtttgggaactgcccagcaagttctggcctggtatgaagcagaagggaaagggagtgggagagacccagcctctgctgggacaaacttctctagttatctgtctactacccacagatcgcttcctggaatccggcaagagtcccagaataccgacctttggctgtggggcacgcgtgtgcctgggcgagcctctggcgcggctggagttcttcgtggtgctggctcgcctgctccagaccttcacgctgctgccgccaccagatggtaccctgccctccctgcagcccctgccgtatactggcatcaatctcttaattcctcccttccaggtgcggctgcagcccaggaacctggcaccccaagaccagggccagaaatcctykwywkkwtwkkwykwkyyttktgcctcagtttctcctttattgctccattcccctcccctcccccctgtaaacatggtgctgtgagactgtggcagagaaggcttcctcggtgagctaggcacagtagagacacactggctcttctctgggcacaacccctcagtgctcggcagtcataccagggtgtgagtgaggtgggcagcaggctcaggtgcccctggtgggggcctggaagtttctgggtctcagcttcatttccgtgaagggcaccgagaactcgaagcccttccagtggtaccagctcactccctgagkgawssrytgtsmwkssakragagtcaagacaacgccacatctatgccaccttatccatcccaaccctggctcctctaggtgactcccagagtgcagccatctccccccatgatccctgaagtgatgtcctctcccacccgctaataaacggtcttttcaagattcccaagc

SEQ ID NO: 7334 - DNA, 496 bp, Rattus norvegicus; identical to SEQ ID NO: 3238

SEQ ID NO: 7335 - DNA, 600 bp, Rattus norvegicus
aaggagaaaaaggtgataggggagacattgcttcccagaacatgatgcgagctgttgcaagacaagtgtgtgaacaactgatcagtggccagatgagcagattcaaccagatgctgaatcagattcccaacgattattactcaaatcgaaaccagcctggcccaccaggacctccagggccccctggagctgcgggagccagaggagaaccaggcccaggaggcagaccaggattccctggacctcctggagtccaaggacctccaggcgaacgaggtttgccaggagagaaaggtgaaaggggtatgtgtgggcaaggaccccgaggacctccaggtcccccaggtccacaaggtgaatccagaacaggtccaccagggtctacaggtttaagaggccctcctggtccccctggtcgtccaggaaactcaggtatccgaggacccccaggtcctcctggatattgtgattcatcccagtgtgccagcattccatacaacgggcaaggctatccaggttccggctaacaaactttctaagtctccagtgctgcttacagtttgaatactgagaatcctgtttctgaaaaaaaaaaaaaaa

SEQ ID NO: 7336 - DNA, 467 bp, Rattus norvegicus; identical to SEQ ID NO: 3240

SEQ ID NO: 7337 - DNA, 421 bp, Rattus norvegicus; identical to SEQ ID NO: 3241

SEQ ID NO: 7338 - DNA, 600 bp, Rattus norvegicus
gaccggtaagtgttgtagttattggactccaggcgttcaaagaagaaacactcttctgtaacacacttagaagccagcagccgtccatcttccttcatagccaggtaccggttcgcacacactcccttgatggacacaactcctctctcttctgcttggagctgtagtttgacgtgtgggtcgctcttctcccggacgccgtccacgcggccgtctggatggatgcgcaggaagaagccgccgttcttgcagtagagccgcttgggatccttgaagtggccgggtgggaaggcgccgccgccgtcctccggcagtgcgggaagcgaagtgatgctgccggcagccatggcccctccgcggccccgggaccccgctgcggcagtctcggggctccccggccccgaccccggcctggccccccagcgcggctcgcccgcgggctgccagcctcccggttccgtcccgccgcgctcccagcctagtgcagccggactccgcctgaagccgagagaccgagcccctgtgtgctacagcggcccgggcccgcgtccccgcctgcaccccggccccgcgcgcccccgccccacgcgcccggaattc

SEQ ID NO: 7339 - DNA, 600 bp, Rattus norvegicus
tggttgaaaggccattttgcrcagtgttagacattgtaaaatccatagaagttgttaacttgcacaaaaaattaaatatttttaatgggacggggaggtgggcagatctttaaaatgctaaaaaataaaattcaaactcagtwwmwmwwrwmwawwawrwwattgagttgatgatttattgggaaatcactttttatactcttatcatggtactgtaactgtatccatattataaatattattatcttacgtatttttattataattttttaatgtccaagtgcccacgtgaatctgctggtaaaatttagcattcgtgtgtatattcaatctcttcttgtgtgtgtgaccaagtatttatactctggtgcgactaagtaccatgtggggaattggtccatgtgcaataaagcagcagtgcagcgcaaccgaggttatgtgccgtgtgtctgtctgtaaggggtccgtgatgacagaagagactgagtgtctgcttcaaagcacagactggcagccttttaatgtctcttcatgactcaatcgcagagcaaaatgcctctaaaccaaataaggcggtcaccaacagagagccccagatct

SEQ ID NO: 7340 - DNA, 1400 bp, Rattus norvegicus
tggaacttggagggaaaagccctaatattatttttgcagatgctgacttggactacgctgtggagcaggctcaccagggtgtgttcttcaaccaaggccagtgctgcactgcggggtctcgaatctttgtggaggagtccatctatgaggaatttgtgaaaagaagtgtggaaagagccaagaggcgcattgtggggagcccctttgatcccactactgagcagggtcctcagattgataagaagcaatacaacaaaatcctggagctcatccagagcggtgtggccgagggcgccaagctggagtgtggaggcaaaggactgggaaggaagggcttcttcattgagcctaccgtgttctccaacgttacagatgacatgcggatcgccaaggaggagatttttggaccagtccaggaaattttgaggtttaagactatggatgaagttatagaaagagccaataactcagacttcgggcttgtagcggctgtcttcactaatgacatcaacaaggctctcatggtgtcctctgcaatgcaagctgggacagtttggatcaattgttacaacgccttaaatgctcagagccccttcggggggttcaagatgtctggaaatgggagagaaatgggtgagtttggcttacgggagtactcagaagtaaagaccsygacggtgaagatcccccagaagaactcctaagaggcccaggccgaagagcaccagtgtgccaagactgccacctatcaccaggcctcctycgtcatgccctgtggcccgcccgacgtcggtttaccactcttgcctcacaacaagtgagcttcagcctgcagaagggagctgtgamgmaagcctgactctccttccttccaaccccacccccttccctctgccttccaatgaaccccattttgtgtgagcagcactggcttccttcccttctctcctgagctgccaaatcgrmrcsagkstctaacctgggtgaataccatttatttaataatgccaaacataacytaggtgtagaatatggtcatgtatctattgccttctctatttaatggttttttgctttctaaccaaaccagttttcagttttctattwataacctgcctgtccacgatgttttcaagcaagcsctccatactgttactgacaaatgaggacaacgcgctcagcagacagcccctgacatgggctttgagtccttccagcaggcgccytgctcttcctacagcgcacccatgtgaacacacgattaaccagctagctcccttcaacccacagtatagaatgtgaaawggmagatttatgacttttaatttacttcaaaagaaacctcgtgctmgcaataaagcatttrtrttgtgymvrmmwhvraaaaaaaaaaaaaaaaa

SEQ ID NO: 7341 - DNA, 600 bp, Rattus norvegicus
attaaasakcgcatcctgcatctaraactggatacagacagtagctacacagtcgsaccactttccttctcaccaaacarcacscgagggtcactgcacgtcggwggtgtcccagacaaattgaaaatgcttacactccctgtgtggaactcattttttggctgtctgaagaatattcaagtcaaccatgtccctgtccccatcacagaagccacagaagtccaaggttctgtcagcctgaatggctgccctgaccactaaccctacayagsawgattcacctttggargtaccaccagccaagtgtmcccctcccccatcaaagccatcaagccggcacagmmcacactgacagagcawtgtcattttgagttccaaccacacagacccatyactctgtytttcagtgacacatatgcattttctatcaaaccccaattcatgaagaaaatgagcaaattgtcattcaaacattcgcacaaggcttttgttaatattatttttccactaagaattaaatgccttttagagaacctttttccccaamwrmwaaaaaraamawcttgtttagagcactttatgaatacaaaactttaaaac

SEQ ID NO: 7342 - DNA, 600 bp, Rattus norvegicus
cactcggagaagaaaaggcggagggctatccgcctcatcatcacggtgctgtccatgtacttcatctgcttcgctcccagcaacgtgctgctcgtcgtgcattatttcctcatcaaaagccagaggcagagccacgtctacgccctctacctcgtcgccctctgcctgtccaccctcaacagctgcatagacccctttgtctactactttgtttcgaaagatttcagggaccaggccagaaacgcgctcctctgccgaagcgtccgcaccgtgaaacgcatgcagatatcgctcacctccaacaagttctccaggaaatccagctcttactcctccagctcaaccagtgttaaaacctcctactgagctgggtctgaggatatggagccagcttgatgatgatgctggtgatgatgatgatgatgatgatggtgatgatgctgatgatgctgatgatgctgatgatgctgatgatgatgatgtatgtgtgtgcaattgtgcgtgcatgcgtgtgtgtgtgtgtgtgtgtgtgtgtgtgtgtgtgttagggatgccaccacaacgcacggggctgtcatttccattccaagttgcactata

SEQ ID NO: 7343 - DNA, 600 bp, Rattus norvegicus
tcctcctcctcaacgggccagaacatatcccagatctcccggcagctgaaccagggccaggtggcatggacaggcagccgtccacccttcccagggcagcccagcaagacgcagtcatctgccttcggaattggatcaagccacccctacccagccgacccttcatcctacagtcctctctccagcccagctgcctcctcaccaagcggaaacgcataccccagtcttgccaacaggactccagggtttgctgagagtggacagagtggagggcaattccagggccggccctcagaggtctggtcccagtggcagagccagcatcacggacagcagagcggtgagcagcactcccaccagcagcctggccagactgaagtgttccaggacatgctacccatgccgggcgacccgacgcaggggactggcaactataacatcgaggactttgctgacctgggcatgttccctccattttctgagtagcttcaggcaaagccaggcttctactgcccaggcgctattatcataccatagatgcccatgttcaaagagtgccccctcacccagcttgccctgctgcagaacccctctcgtgcc

SEQ ID NO: 7344 - DNA, 600 bp, Rattus norvegicus
gaccctcagttggcctgctggcagcaaccatggggccacattgaattatctacatctccattagaattcaaaccattaacaatgtagggaacagacaggagcagtggcatctggccggtcagtttcattttcctgttactctctccctgtcagcagggccacacgggccatttcaacagtcacagtttctaagtgataccttcatctctggagaactgtgagagaagggccgtgcctctggtgtatgggtaacacctggttgttcttttattccgtgctgggatctgagttgatatatcctgttagaataagcttggcatggggcagtgtgaagaaaaagcagcagacaccaaacacctgcagtgagctgaagctttcctatgcggcctctcccagttgctgccgtctgggctatggctgccctgcccagaactgccccwcctcactcatctgacagttattctaagtcttctcccctccatttggctaaatgtatccatttaaagctgtgtgttgattaaagttagtgtcttaatctcttgacgacctcaaaaaaaaaaaaaaaaaactcagagtacttctagagcgccgcggcccatc

SEQ ID NO: 7345 - DNA, 339 bp, Rattus norvegicus; identical to SEQ ID NO: 3249

SEQ ID NO: 7346 - DNA, 600 bp, Rattus norvegicus
cctgaggaggacaatgaacattgtccccaggaccaaggtgaagacggtcaagatgtttctgctcttcaaccttgtgttcctgttctcctggctgcctttccatgtggctcagctctggcatccccatgagcaagagtacaggaagarytcscwygkkttcacagcagtcacgtgggtgtctttcagctsttcggcctctaaacccactctgtactctatttataacgccaattttcggagagggatgaaagagactttctgcatgtcctcaatgaaatgttaccgcagcaatgcstamaccatcacgaccagttcaaggatggccaaaagaaactatgtgggcatttcggaaatccctcccgtgagcaggacgataaccaamgactcsatctatgactcattwgaccgtgaggccagggagaagaagctcgcctggcccatcaactcaaacccaccaaacacttttgtctaatttctaagaactccttcactgttatgtgccagagatttaaaaaaaraaraaaaaaagctttaactataaagagaattgatttacttagttttcactaaacttcctttttgtaaaaaaaaaaaaaaaaa

SEQ ID NO: 7347 - DNA, 600 bp, Rattus norvegicus
accttggttctagagaagggagccaacatccacatgtcaaccaagagtggactcacctctttacacctcgcagccgaagaagataaagtgaatgttgccgacattctcaccaagcacggggctgatcaggatgcctacacaaagcttggttacacacctttaatcgtggcctgtcactatggaaatgtgaaaatggtcaactttcttctgaagcagggagcaaatgttaacgcaaaaaccaagaatggctatacacctttgcaccaagctgcccagcagggacacacacacatcattaatgtgctgctccagcacggggccaaacctaatgctaccactgcgaatggtaacacagccctggcgattgctaagcggctgggctacatctccgtggttgacaccctgaaggttgtgactgaagaggtcaccaccactaccacgactatcacggaaaaacataagctaaatgctcctgagacaatgacggaagtcctggatgtttctgatgaagagggtgatgacacagtgacaggtgatgggggagaatatctcaggccagaagatctcaaggagcttggtgatgactcactacccagcagt

SEQ ID NO: 7348 - DNA, 600 bp, Rattus norvegicus
gatgctctaagccctraaggggaggctaggggtcaggcagagtytgaaggagatgccccaggtccccrmgaggatgctgagagacaggtggagagcaagkacaacgarrgggaagccaaagacctgccagcggaaacactagagacccaaracactccaaatgtggttgaggctcayrgcatcsarstggaaaacgacgagatatgagctagacacacaggctcatgcccctcaggatctcagtgcagaacagaagcatsaagtgtgaatacagtgggtctggagccacctctgacatgggtatggtggtccaagctcgtactcccagaagcactgagagctccaggctagcctaggccacttagcaagtttgragccaggctgggctacttcgtgaggccctgtcttgaggaggggaaaagaaacgcwctcccacgtctcctttctggccctcagtagraagcaggacttttcttcgcagctcaggggagaccacaagctgagaggcagatttcaggccccaaacaatcaataaaaaacaaaatggawwwrdmwmmmwwaaaaaaaaaaaaaaaaaaacaattgcggccgcaagcttat

SEQ ID NO: 7349 - DNA, 600 bp, Rattus norvegicus
atctctgccaactacatagacggctaccacaggccaaaccacttcatagccactcaagggccaaagcctgagatgatctacgacttctggcgcatggtgtggcaggagcagtgtgtgagcgtcgtcatgatcagcaagctggtagaggtgggcagggtaaagtgctctcgatactggcccgagcactcagacatgtatggggacatcaagatcacgctggtaaagacagagacactggctgagtacgtggtgcgcacctttgccctggagcggagaggttactcagcccggcatgaggtccgccagttccacttcacagcgtggccagagcatggtgttccctaccatgccacggggctgctggccttcatccggcgcgtgaaggcttccactccacctgatgctgggcctgttgtcattcactgcagtgcaggcactggccgcacaggctgctacatcgtcttggatgtgatgctggacatggctgagtgtgagggggtcgtggacatttacaactgcgtgaagaccctctgttcccggcgggtcaacatgatccagaccgaggaacaatacatcttcatccacgatgcgattctggag

SEQ ID NO: 7350 - DNA, 285 bp, Rattus norvegicus; identical to SEQ ID NO: 3254

SEQ ID NO: 7351 - DNA, 600 bp, Rattus norvegicus
catccaaccttctacagcccggggataaaatccttcaggcaaatggacacagttttgtgcatatggaacacgaaaaagctgttttactactgaagagcttccagaacacagtagacctagttattcaacgtgagctcactgtctaaatgtttttataaatagtgaagatatgtcaggccagagataatgtttaaaaataaatttatacatagaaacaaattttgccagttgctgaccaatggcaaacatcagtgccaggtgtataatattgtacgttagccttgaccaccctggaaaatgttacttataatcacggcgtttgcgcggttctgtatcagttccagcggagcctctggctgtgcattggtgcggttttgtttctgtttttgtttttgtttttgtttttttaaaatcaaataagttgtcttctcaaagtggatttcctatcatttyggagcacggaagcacacacaagctctttacaagttatgctctccatcagagatactgcctcaaaaaaaattgtatataaagagttgtaaccccataaagtatttctagcacaaggtatatgttggcatrtaaacaaaaaaaaaaaaa

SEQ ID NO: 7352 - DNA, 600 bp, Rattus norvegicus
gagtcgctcctgcacgagttggccaacctgagccagtccctgatccacagcctcgccaacatccagctgcctcacatggatccaatcaatgaacaaaattttgatgcttacgtgactactttgacggaaatgtatacaaatcaagatcgttatcagagtccagaaaataaagccctactggaaaatataaagcaggctgtgagaggaattcaggtctgaacagctgctstagtggtgactcatgcttaaaaaggatgcctcttgttwcttgctgctgtaacttaccagaaagtgttatatatwtatttctgtcggaacagtgttatgctacaagacttcataatgrttttgtgtgctctcgagatagtacctgcagaytagttttggatacattcacatwttgtacgttttcatataagctgacatagtgtgatttcccatgtaatgttkatagctgctgctgtctgcacatktggggrtctcymtmktkctgaagaggtaagctgacgaaaataaatagagtgtaaattctttttaatgctttagtgattaaatgttttagtattttgaactgaaatggacaaaaaaaaaaaaaaaaaa

SEQ ID NO: 7353 - DNA, 1400 bp, Rattus norvegicus
tatgcagagacaagcagccgccgctgtgcacccaggaatagcactcaatgatcctaactgttacagcaagaccactaactgtaaatcactccttattaaacgacgaaaacttcatataggggagaaaccctacaagtgtgaagaatgtggtaaggcccttggttctcttaaaacactttctatacaccagagacttcatactggagacaaaccctacaagtgtaaagagtgtcataaggcctttagtactcgctcagcactttttatacacatgaaaaatcatactgatgaaaaaacccacaagtgtgaagaatgtggcagattattttactatccttcaatgctgaaacaacatcagagaattcattctagagtgaaaccctacaagtgtcaagaatgtggaaaagcttttactgatccttcattccttaagaagcatcaaaaaattcattttcgaaaacatacctaccagtttaaagaatgtgtcaaaagattttctcctcctatacaccttcaggaacaaatccatactggacagaaacctttcaaatgtggagaatgttttaaagcctttcataatcacttagcccttaggaaacaccagacagttcattttggagagaaaccttacaagtgcgaagagtgtggccgatgttattccacatctttctaccttagaagacatcaaacaatccactctaaatacaagtcctacaagtgtgaacattgtggcagatgttattcctcaacttcctgccttaaaagacatcaaacaattcactctgaagacaacyccwacaagtgtgaagartgtggcaratrtttttcctcatctwcttgycttagaaswcatcaaacarttcattctgwrgacaaswcctayaagtgtgatgagtgtggcagatattattcctcatctttwtcccttasacgacatcaartaatccattctgaagayaatccctataaatgtgaagaatgtgrcaaaaggtttwcttrttmtgcaagycttcaggaacatcaaacaatccatacwggagagaaaccatacragtgtgaaaattgtcacaaagcctttcgtcatcamtcatccctyaggaaacataagayagtscatactggagagaaaccttacaagtgtgaaragtgtggcagatktttttccagayattcmtrccttagaakmcatcaagmawttcaytcwgawggcaaaatcccaagtgtgtggaatgtggwaaacctttsttaatgtyatckycttactcgacacatraaagttcmtmytagagagaaatcytwcwaagdtcttaaaaartstgtccttattcaggccttahwagacatcaawtamttcatactgaataaaatykytgtgactgtvmaaaaaaaaaaaaaaaaaa

SEQ ID NO: 7354 - DNA, 1400 bp, Rattus norvegicus
tcctctctcaccagcaaccacacatcaactcggtctggaagaacccagtgacagcatccgggaaagtgcaccaagtggaaaagatgacggaaggagaaagactgctgctgaagaaaagaaatcaggagagactgcgctgggccaggcagaggaggcttcttcwgtcagccaggcagacaaaagtgtactaagccaggcagaagaagctacagtgggccacacagaggaagctactgtgatccaggcacagagtcaggcaaaggaaggtaaactgarccaggcagaggaagctacagtggcccaggcaaaggaaactgtattgagtcaggcagaggaagttaaactgagccagatagaagaacctgcaattagccaggcaaagaaagctacagtaggacaagcaaaggaagctatagttagccaggcagaggaagctatagttggtcacacagagaaagccaccatgggtcaggcagaggaagctacagttggccacatagagaaaaccacagtgggccaggcagaggaagctacagtgggtcaagcagaggaagccacagtgggtcaagcagaggaagccacagtgggtcaagcagaggaagctacagttggacaggcagaggaagctacagttggtcaggcaggggaagctacagttagccacatagagaaaaccacagtgggccaggcagaggaagctatagttggtcaggcagaggaagccacagtgggtcaagcagaggaagccacagtgggtcaagcagaggaagctacagttggccaggcagaggaagccacagtggatcaagcagaggaagctacagttggccaggcagaggaagctacagttggtcaggcaggggaagctgcagttggccaggcagaggaagctatagttgctcaggcagaggaagccacagttggtcaggcaggggaagctacagttggccaagcagagaaagccacagttggccaagcagaggaacccatagttggccaggcagaggaaactgtattgaggcatgcatcagatctgaaagtaaatggagttgatgcagagaaaccaagatcagaagaaagcaaaagaatggagccaattgctattatcataacagacactgaaatcagtgaatttgatgttaagaaatctaaaaatgtccctaagcaattcctaatttccatggaaaatgagcaagtgggggtttttgctaatgatagtgatttcgaggggagaacttcagaacagtatgaaacactcttaatagaaacagcttcttctctcgtcaagaatgctatcgagttgtctgtagaacagctggttaacgaaatggtttctgaggataatcaaataaatacgctgttccagtgactccatttccaggtcacgggaagaggaattc

SEQ ID NO: 7355 - DNA, 600 bp, Rattus norvegicus
gggaaattaatctattctgaaaggcaataaaacgaagaaagttaaggcaaaaggaaacaccggtggtttaagatcctctataaggaatccatttatttatcttaagaaaatttagacctgaattttttttttaatcaactcttcttgtactctgtgtattataatggcatggcaatgattttcaaatgggarrktsggmasgarktggttctgttagtttcgtgttcatcckggwgggscmayttargatttcacacmcggaagaaagmttctgcttccgaggggcggcaaggccatttccagaggagagttcccgtactcccgccacactttgaatgctacacatccgtctagttcaacccagcccttcacatttcgggggcattttctccttcggtctcctctcactccagtacggagttcacctgttccccagcacaggatttttgttctatgtcaaatgaataaaataaaaggttttctaccccaaaaaaaaaaaaaaaaaaaaaaaaaaactctagcggccgctgccgcccatgggccgcacgccccggcgctgagcctcaaaatgcagcccacggccaccatggccacaggccg

SEQ ID NO: 7356 - DNA, 600 bp, Rattus norvegicus
ctgcagctgtctgtggaagatgtcagcatgaagttcgatgaactgcaccagctgaagctcaatgactggaagataatggagtcgcccgagagaaaggaagaaaggaagatcccccctccaataccaaagaagccccccaaggggaaattccccatcacaagggaaaagtccctggacctgccagacagacagcgccaggaagcccggcgccggctcatggcagccaagagagctgcctcgttccgccagaactctgccacggagagggcagacagcatcgagatctacatccccgaggcccagactcggctctgaggaccagaggtggccacacgcacctggttttgttctttttcacaaaatgcttgtacagtttattgcctacctggtagtttctgtctcaccctccaccggattcgcccttgccgtgctctctgcactgtagacagtggacgctccaattcctagtttgctgagctcgagctcctggcaagactgactctgaaggacatcgggctccgaggaacaggcctggtgagccctgacgtacgtccctgttctcagaagggccgccaagtggcctcttgaaaatggacccta

SEQ ID NO: 7357 - DNA, 600 bp, Rattus norvegicus
gggcagaggtggagaaactggaacactggtgccagcagatggagcgggaggcggaggactatgagctgccggaggagatcttagagaagattcgaagcgccgtgggcagcacacaacttctcctgtctcagaaggtccagcagttcttcaggctgtgtcagcaaagcttggaccccactgcgttccctgtgcccaccttccaggacctggccggtttctgggacctcctgcagctctccaytgaggacgtgaccctcaagttcctggagctacaacaactcaaggccaacagctggaaactcctggagcctaaggaggagaagaaggtccctccgccgataccaaagaagccctcgcgggggcggggcgtgccggtgaaggagcgctccctggactcggtggaccggcagcggcaggaagcgcgcaagcggctcctggcggccaagcgcgccgcctcgttccgccacagttcggctactgagagcgcggacagcatcgagatctacatccccgaggcccagaccaggctgtgacccgcccgggccgccaagcccgacccgggcccgcggttttctacccgtactgtacacccagcgtcga

SEQ ID NO: 7358 - DNA, 600 bp, Rattus norvegicus
cmtbkgtgagcagaacttgaaccctgatkccaacccccgtccgacagcccaggacytggcagggttytgggacctgctgcwkckgymcrwkgaggacatcagcatgaagttcgatgagctytaccmcctcaaggccaacagytggcagytggtgsmgmmccmygmsmasakgaaggaaragaagaawccmcccccyccagtcccgaagaagccagccrrmwcsarggcggcagtgagccgcgacaaggcctcagatgcgggggacaagcagcggcaggagsccagaaagagactcytggccsccaagcgggcagcatytgtgcggcagaactcggccacagagagtgcagacagcatcgagatttatgtccctgaggcccagaccaggctytaaggccacaaaggagaaagcactcattttaaatcattaaaaactcaatgcaaacggaamarmrwwwmwmammmtttggtatggttattatctctagagaccctgagccaactttccaattgacacgtacaagggctcacaaggtggcttttctskcgtsccsmawkctttaggttatgaagacttgactcaaaaaaaaaaaaaaaaaa

SEQ ID NO: 7359 - DNA, 600 bp, Rattus norvegicus
caatttgacatccaacacaaaggaatgaatccgtgccccatggttctggtcttcgggtgtcgacaatccaagatagatcatatctacagagaggagaccctgcaggccaagaacaagggcgtcttcagagagctgtacactgyctattcccgggaaccggacaggccaaagaaatatgtacaggacgtgctgcaggaacagctggctgagtctgtgtaccgcgccctgaaggagcaaggaggccacatttatgtctgtggggacgttaccatggccgccgatgtcctcaaagccatccagcgcataatgacccagcaggggaaactctcagaggaggacgctggtgtattcatcagcaggctgagggatgacaaccggtaccacgaggacatctttggagtcaccctcagaacgtatgaagtgaccaaccgccttagatctgagtccatcgccttcatcgaagagagcaaaaaagacgcagatgaggttttcagctcctaactggatcctcctgcccccgtgcgtgcgatgtggcggctsccccaagtgcccaagtaagggcggccgcaggttgactaaattcggacacacacggctgaa

SEQ ID NO: 7360 - DNA, 600 bp, Rattus norvegicus
ccctctcatttatgccctgcggagtcaagaactgaggaaaaccttcaaagagatcatctgtttctaccccctgggaggcatctgtgagttacctggcaggtattaagtggggacagagtgcatactaggtagagacctgcagaatttgtcactcaggcacaacctgagcagtgtacttcccaacagctgcctctactgtatagtgctttggttggaaaatatctactgtataaaatgtaagtttatgacttttgacgtggggaaaaagtctcaacgtgttatgtttattgaccttactttttttgtgtgtaaactgcttatttatgttctacagcgtgggcgctatggagttccataaaagaaaaagacacccttwttaaaamwwwramarwrwwwctttccatgttatttatcaagagtcaacccttgttctttctgtggtagcagaaatcagagccttctgaaaagctgtttccattgcatcacccccacagcacagcagaagcctgattccactgtttatggggaaatatttaaacactggatgctcgatcatttaatgagtcagctctactcgtgaaatttcactcgtgccgaatt

SEQ ID NO: 7361 - DNA, 1400 bp, Rattus norvegicus
ttgcaattgctcctgttcagtttgacagggagaaggtattccgtgtgaaactccaggatgaaaagcaagcaagtatcttgaagaacttgacccaaaccattgagcttgacttctggtatccagatgctatccatgatattgctgttaatatgactgtggatttccgagttactgagaaggaatctcagactatccagtctaccttggaacaacataaaatggactatgaaattctgataaatgacctacaagaagagatagacaaacagtttgatgtgaaagaggaaatcgcaggcaggcacagttatgcaaaatacaatgactggaacaagattgtttcttggactgaaaaaatggtagaaaaacatcctgaaatggtttcaaggattaaaattggatcaactgttgaagataatccattatatgttctcaagattgggagaaaagatggagaaagaaaggctatctttatggactgtggcatccatgctcgtgaatgggtttccccagctttctgtcagtggtttgtctatcaggcagccaagagttatggaaaaaataaaatcatgaccaaacttttggaccggatgaatttttatgttctgcccgtattcaatgtagatggatacatttggtcatggacaaaggatcgaatgtggagaaaaaaccgttccaagaacccaaattcaacctgcattggcactgacctcaacaggaacttcgatgtctcatgggactcttccccaaacaccgacaacccatgcctcagtgtctacaggggacctgcaccagagtccgagaaagagacaaaagctgtcactaacttcattcgaagtcatctgaactcaatcaaggcttatatcaccttccattcctactctcagatgctgttatttccttatggctacacaatcaaactgccacccaaccaccaggacctgctgaaggttgcgaggattgccactgatgttctctcaagtagatatgaaacccgttatatctacggcccaatagcatccacaatttacaagacatcaggttcttctttagactgggcttatgacctgggcatcaaacacacatttgcctttgagcttcgtgataaaggaaaatctggtttccttcttccagaatctcggataaagccaacatgtaaagaaaccatgctttctgtcaaatttattgccaagtatatcctcaagcatacttcctaataagttgcccttggtttgaaatgtgctaattaatccttgggtggagcctttccctggaaagacaaccttctgcatcacctggatccatcctgctcttattcatgaagtcctgcattattttctacttattcttatttacacccaatagccccacaacaataaagctttaagtaaatccaaaaaaaa

SEQ ID NO: 7362 - DNA, 600 bp, Rattus norvegicus
tccgagagtagctatgaaccagatgagctgaccaaagagatggcccacctggaaggactcatgaaggacctaaatgccatcacaacggcttgatgaccttcacctggacaggactccaagtctgagtctcgaagtcttggaactgaaccttgaaaacaaggaattgtacagagtacgagaggacagcacttgagagcaggagccagcaaaccagccagtgcctccatgtggggtcggctctgggcacagcacctgccttctggtcagcctggatcatgcttgtgtcgaggcagcttccctctgcctgctgatagcctgcaggactgggcactatgggcaagattttgtgtcagagaagaggcaagaagtacgactgcttttactttgtggtcagtggctgtgtctctgtgctgcaactgcatcacttttatggagtgtagacattggcattatgtacatttgtgtctatttatttacttaaacactatcagagccagtgatgtcctctgcagcagttgacacttgactgctgttcccagttccttacgaagtcatcgacagtgagtgttgacacatgcagcatggctgtctggttcgttc

SEQ ID NO: 7363 - DNA, 600 bp, Rattus norvegicus
agaggggtgactaccacatcgatgtctgtatcaatgactacctggatgttttctgccctcactatgaggactctgtaccagaggataagactgagcgctatgtcctgtacatggtgaattttgatggctacagtgcctgcgaccacacatccaaagggttcaagagatgggaatgtaaccggcctcactctccaaacggaccgctgaagttctcggagaaattccagctcttcactcccttttctttaggatttgaattcaggccaggccgagagtatttctacatctcctctgcaatcccagacaatggaagaagatcctgcctaaagctcaaagtctttgtgaggccaacaaacagctgtatgaaaactataggtgttcgtgatcgtgttttcgatgttaacgacaaagtagaaaattcattagaaccagcagatgacaccgtacatgagtcagccgagccatcccgcggagagaacgcggcacaaacaccaaggatacccagccgccttttggcaatcctactgttcctcctggcgatgcttttgacattatagcacagtctcctcccgtcacctgtcacagaaaacatcagggtct

SEQ ID NO: 7364 - DNA, 1400 bp, Rattus norvegicus
agcctctttgaagtggtcctggagatgcggaaacagcgacctgcagcggtgcagacagaggagcagtacaggttcctgtaccacacagtggctcagctattctcccgcactctccagaacaacagtcccctctaccagaacctcaaggagaaccgcgctccaatctgcaaggactcctcgtccctcaggacctcctcagccctgcctgccacatcccgcccactgggtggcgttctcaggagcatctcggtgcctgggccaccgacccttcccatggctgacacttacgctgtggtgcagaagcgtggcgcttccggcagcacagggccgggcacgcgggcgcccaacagcacggacaccccgatctacagccaggtggctccacgtatccagcggcccgtgtcacacaccgaaaacgcgcaggggacaacggcactgggccgagttcctgcggatgaaaacccttccgggcctgatgcctatgaggaagtaacagatggagcgcagactggtgggctaggcttcaacttgcgcattggaagacctaaagggccacgggatcctccagcggagtggacacgggtgtaatgagtgctgtaccagttccagcctgtcactcagtggtggctgggcgactgcaacccccatgctgctgtgtgctgtcttatgtatgagtgggactcatgggcctgaatcaaaataaaagtttctcagggtagaaaaaaacaaatagggactttggccagtggttatagcagtcaaagccaggggctaggaggggtaagtgggggaggtgswsgmdskactctgagaaagtttaggaaagcasatcaagagtragcatcgccactyttytccccatacacctaytggaaagtgcaccccagacagagtcctaacttgacagtgcacctcagacaggtssctacctggatggacatgctgsccytacagctagakacatgtctaawtagatcctcatgtaaacttgcaatgagctagaaagatctccgtctggtcagggaaatggatcacctagtcaggtaaatagtgtgccatccagaagacagaactgcaagataccgtctttctcaaaatggaagaaaatagatcctcaagaataaatgtatgtacaatgctmtacgccckgatcctgccctgcctcactgccataatgtcacaaacaagtcagggtctatatgacagttgttmmtctagtcagtcctgactgtggcctctgcaggctcagatagtgccttctgcagactcttggaatgcccgtcttgaacttgatgaaagcttctaccgggaacttgyaaacatcattaaaattattaatgtagaattcaawmwagwgtgggtcamaawmwmraawraawwmrwaaaaaaaaaaaaaaaaa

SEQ ID NO: 7365 - DNA, 600 bp, Rattus norvegicus
ggctggtttactgggaaatagctcgaaggtgttcagttggaggacttgttgaagagtaccagttgccttattatgacatggtgccttcagatccttccatagaggaaatgaggaaggtcgtttgtgatcagaaactscgaccaaatctcccaaaccagtggcaaagctgtgaggcgctccgggtcatgggaagaataatgygtgagtgctggtatgccaacggggcagctcgcctgaccgccctgcgcgtgaagaagaccatttctcagctgtgtgtcaaggaagactgtaaggcctaaggcgcatacaggcgacgggaaagccctcaccrctctctttcatgtctcctgctttgtgtaaatgttttcgtttcttttytgctgtgttttgttttagttctacctcaaagatgattcactacagtgttgaagtgtccaaaggcagcatgaaaagatarctytaagcatgggcaggtcttgactttcccagtttccatgttgtccgtacttttatttttaaaggtgacactattcatttttctttttatttaaggaggaagatgttatargmtacwtmcaatagtaaaaaaaaaaaaaaaaa

SEQ ID NO: 7366 - DNA, 600 bp, Rattus norvegicus
ggaagcgcaggaaagaacgtgagaggagccggctaccacgggacgagagcgccaacaaccagtgggctccgctcaatcccatccgcaaccccattgagcggccaggcagcagtggtctgggaaccgggggccacaaggacgtactctaccagtgcaagaacttcacaccgccgccccgcagggcaggcgaggcactgcmtgggccggccagccacggggctggtggggagkacgaggaggatgaggagctgagccgmggagatgggagactctccagaagcagagaagttcctctcacacaaattcaccaaagaccccagctgctccctgggaaggccagcctgctggctccggggcccaaagtggacaaccgcgccgtcagaagcaccaaggatgtgcgctgtgctggcagggagtagccrgcctccaggctggtacccagaacccttgccagcaccacgctgcctcccggaccataggaggccaaggccgtgtgcatagtttctttattttgtgtaaaaaacaaaaccaaaaacaaaaaamaaawrwttattttttacgtttctttaaccttgtataaattattcagtggctgtcaac

SEQ ID NO: 7367 - DNA, 600 bp, Rattus norvegicus
gtggtctgtcccacatatttggcttcctcttgccgctgttcatcatgctggtctgctacgggctcacactgcgcacgctctttaaggcccacatgagacagaaacgccgggccatgtgggtgatctttgctgttgtgttggtcttcctgctctgttgtctgccctacaatctggttctgctctcggacactctcttaggagcccacttgattcaagatacttgcgagcgccgcaataacattgaccaggccttgtatattaccgagatcctgggcttttctcacagttgtcttaaccccgtcatctatgcctttgttggccaaagttttcgccatgaattcctcaagatccttgctaacctggttcacaaggaggttttgacacaccactctgcttcctttcgcacgtctctcaccactatctattaaacttctgagaattaccagagagtgatcgctctccctcaaagggaaggataactattgtgccaatgtgttgtgtgagtgtgtgtgtgtgtgtgtgtgtgtgtgtgtgtggtgtgtgttgtgtatgtgcgtgcatgtatgtgtgctgtgtgtatgtatgatggatgcatgtgtg

SEQ ID NO: 7368 - DNA, 600 bp, Rattus norvegicus
  misc_feature (589)..(589): n is a, c, g, or t
  misc_feature (595)..(595): n is a, c, g, or t
  misc_feature (598)..(598): n is a, c, g, or t
ggaggcactggccatcatcttctttggtggacaacccaagcctaatgtgagcgagttggtggtggggcccctgcctcacccctcatacatgcgggatgtgactgtggagcgtcatggcggccccctgccctattaccggcgtcctgtgctgaccagagagtatcaggatattcaggagatgatctttcacagagagctgccccaagcgtctggtctcctccatcactgttgcttctacaaacgccaaggacacaacctgctaaaaatgactacagccccccgtggtttgcaatcaggggaccgggccacctggtttggcatatattacaatctctcaggggctgggttttaccctcaccccattggcttagagcttctggtagatcacaaggccctggatcctgccctgtggaccatccagaaggtattctaccaaggccgttactatgagagtctgactcagctggaggacatgtttgaggctggcctggtgaatgtggttttggtcccagacaatggcacaggtgggtcctggtctctgaagtcttcagtgccaccaggccgagctcctcctctgcarttycayccngarggnccnmg

SEQ ID NO: 7369 - DNA, 1400 bp, Rattus norvegicus
atgtaagccagcgagtctatctctatgagggactactaggaagggacaaaggatccatgtgggaccagttagaggatgctgctatggagaccttttctataagcaaagagcggtctactttatgggaccaaatgcagttctgggaagatgcgttcctagatgctgtgatgttggaaagagaaggaatgggtatggaccagggccctcaggaaatgatcgacaggtacctgtccctaggagagcatgaccggaagcgcctggaggatgatgaagatcgcttactggccacactcttacacaacctcatatcctatatgctcctgatgaaggtgaacaagaacgacatcaggaagaaagtacggcgcctaatgggaaagtcccacgttgggctggtgtacagtcaacaaatcaatgaggtgctcgatcagctgaccaacctgaatgggcgtgatctctccatccgatccagtggcagcaggcacatgaagaagcagacgttcgttgtgcacgcagggacggacacaaatggagatatctttttcatggaagtgtgtgacgactgtgtggtcttacgtagtaacatcgggacagtgtacgagcgctggtggtatgagaagcttatcaacatgacctactgtcccaagaccaaggtcctgtgcttatggcgtagaaatggctctgagacgcagctcaacaagttctataccaagaagtgtcgggagctgtactactgtgtgaaggacagcatggagcgtgcggctgcccggcaacaaagcatcaaacccgggcctgaactaggtggtgagttccctgtgcaggacatgaagactggagagggcggcttgcttcaggtcaccctggaagggatcaatctcaagttcatgcataaccaggttttcatagagctgaatcacattaaaaagtgcaatacagttcgaggcgtctttgtcctggaagaatttgttcctgaaattaaagaagtggtgagccacaagtacaagactccaatggcccacgagatctgctattctgtgttgtgtctcttctcgtatgtggccgcagttcgtagcagtgaagaagacctccgaaccccacctcggcctgtctctagctgatakagaggggttacacagctgggccagcccaggggtcacccctcacctcttgctgctcctaagcgctgaagctgcctcgactgagacagagactctgtgtgtgtgtgtgtgtgtgttctctgcaaggtgttctctgcaagctccttcctgcggttgagctggtttcgttttatgtctgagtgtgtccttgtgttcatctgtcatggggctaagctagtctcattaccttctcttcctacaatagcaractagcctactgtcccctcagggctccacctcgtgtcg

SEQ ID NO: 7370 - DNA, 600 bp, Rattus norvegicus
gagggcaaagaagattccasgttggactatgacaacatmcctaccgtggtctyyagccacccgcctatcgggacagtggggctcactgaagatgaagccgtccataagtatggcaaagacaatgtgaaaatctactcgaccgccttcaccccgatgtatcacgctgtgaccacgaggaagacgaaatgcgtgatgaagatggtttgtgccaacaaagaggagaaggtggttggcatccatatgcaggggattggctgcgatgagatgcttcagggcttcgctgtagcagtgaaaatgggggccaccaaggccgacttcgacaatasggtcgccattcatcctacctcttcagargagctggtcacactkcgytgagagccccgggactcgtggctagcggtccgaccagtgggcctctgggaggaaccaatcaagtttacgtcctgcgccagctttatagatttctgtattttaatcaggaacttctggtggtgtaaatttctagttaagcaaaaaatcgaggtcttaagtgtctaatcataaggttgttttgttaatccggggttggttttcatgtgataatatttacactagttagca

SEQ ID NO: 7371 - DNA, 428 bp, Rattus norvegicus; identical to SEQ ID NO: 3275

SEQ ID NO: 7372 - DNA, 1400 bp, Rattus norvegicus
ctaaaggctaactcattgtcttcatttccttggtgattgaaaacgcgtgatggtgagttcctcagagaagtgaaagtggcccagagggatycagtaattcctgttatcggccagctttataagtcagcgagccaggcgcctgtcttcatccggcctgaagtcccaagagtgcaaagatgtccctgtacccagcttccccatacctggcctccctgctactcttcatccttgcccttcatggtgccctgtccctgaggctctgctccttcaatgtgaggtcctttggagagagcaagaaggaaaaccacaatgccatggatatcattgtgaagatcatcaaacgctgcgacctcatactgctgatggaaatcaaggacagcaacaacaacatctgtcccatgctgatggagaagctgaatggaaactcacgaagaagcacgacatacaactacgtgattagctctcggcttggaagaaacacatatraagaacagtatgccttcctctacaaggagaagctggtgtctgtgaaggcaaaatacctctaccatgactatcaggatggagacacagacgtgttttccagggagccctttgtggtttggttccaggcgcccttcactgctgccaaggacttcgtgattgtccccttgcacacaactcctgaaacctccgttaaagagatagatgagctggctgacgtctacacggatgtgagaagacgatggaaggcagagaatttcatcttcatgggtgatttcaatgctggctgcagctacgtccccaagaaggcctggaagaacatccgtttgaggacagaccccaactttgtttggctgattggggaccaagaggacaccacggtcaagaagagcaccagctgtgcctatgacaggattgtgcttcgcggacaagagatagtcaactctgtggttccccgctccagtggcgtctttgactttcagaaagcttatgagttgtctgaagaggaggccctggatgtcagtgaccactttccagttgagttwaagctacagagttcaagagcyttcaccaacagccgaaaatctgtttctctaaagaaaargaaaaaaggcagtcgctcstaggtctcatgttgccattttcttttcttaaagtcgtcccttgcttccagataaaatggccytcgtgggtctcagctctctgcacaytcaggaattaagactggctaagctgttttcactgtccactmtggttaattttgcctggagccaagttgggaggagagccttctgttacatcaccctgaccacgggcaccytgcgaaccaccatgggtaacctgaagagacacaaagtctattccataataaatgcgtgtatttattacrccataaammmaaaaaaaaaaaaaaaaaa

SEQ ID NO: 7373 - DNA, 464 bp, Rattus norvegicus; identical to SEQ ID NO: 3277
  misc_feature (239)..(239): n is a, c, g, or t
  misc_feature (342)..(342): n is a, c, g, or t
  misc_feature (368)..(368): n is a, c, g, or t
  misc_feature (370)..(370): n is a, c, g, or t
  misc_feature (379)..(379): n is a, c, g, or t
  misc_feature (383)..(383): n is a, c, g, or t
  misc_feature (394)..(395): n is a, c, g, or t
  misc_feature (409)..(409): n is a, c, g, or t
  misc_feature (420)..(420): n is a, c, g, or t
  misc_feature (430)..(430): n is a, c, g, or t
  misc_feature (434)..(434): n is a, c, g, or t
  misc_feature (442)..(442): n is a, c, g, or t
  misc_feature (447)..(447): n is a, c, g, or t

SEQ ID NO: 7374 - DNA, 1400 bp, Rattus norvegicus
ccctgatcacacagcagatcatccccatgttgtactgtgtggtcttcatcacaggggtcctcctcaacggaatatcgggatggatattcttttacgtgcccagctctaagagttttatcatctatctcaagaacatagttgtggctgactttctcatgggcctcactttccctttcaaagtcctcagcgactcaggcctcggtccctggcagctgaatgtgtttgtattcagggtgtctgccgtgatcttctacgtcaacatgtacgtcagcatcgcgttcttcgggctcatcagctttgacaggtactataaaatcgtgaagccccttctggtgtctatcgtccagtcagtgaactacagcaaagtgctgtccgtgcttgtgtgggtgctcatgcttctcctcgctgtccccaacatcattctgacaaaccagagtgtcaaggatgtcactaacatacagtgcatggaactcaaaaacgagctggggcggaagtggcacaaggcgtctaactatgtcttcgtgagcattttctggatcgtgttccttctgctgaccgtcttctacatggccataacgaggaagatcttcaagtctcacctcaagtccagaaagaattccatctccgtcaaaaggaagtccagccgcaatatattcagcattgtgctcgcatttgtcgcctgtttcrcgmskkamcamgttgcsaskwtcycmtrsrccmaswkycmswyksaargwcactacagcwsccaggccaaggagaccctgctctatacgaaagaattcaccctgctgctctcggctgccaatgtgtgtctggaccccatatctatttcttcttatgccagscryktagrgaagtcttgaataagaagttaagaatgtcactaacagtccagaatgacctagagacttccaaaaccagaaggggaaatatgattcaggaaagcacagatactttgmaattctcaccctttccaagtattatggaccttgttacacggtaattaagatgtatgaagtgaaaagcagrmhwgkryrrtaaawayswwagstaagytmymwtgtmmartraawgtmtamarswcgcagaaaagtataataaaaatgaaaggtaagttcccatgtaaagtgaaagtctacagcacgtcacatctttttagaaatcgaatggagaagtggcatgtgggtgctagtctgcgagttaccccaaaactaaactctctcttctattaacgggcttcttagaagacacccaccctttcagaagttcctcctgagtatccttctaagtaatgctcacctctgtttcatgctttgttctgtgtatgygccaataaacaagttgtctttaaaaccmmaaaaaaaaaaaaaaaaaaaagtactagtcgacgcgtggcc

SEQ ID NO: 7375 - DNA, 1400 bp, Rattus norvegicus
tctttgtggtggtagacttcttaattggagttttaatttttgccaccattgtcggtaacataggctccatgatttccaatatgaatgcagcccgggcagaatttcaatcaagagttgatgctatcaaacagtacatgaattttcgaaatgtgagcaaagacatggaaaagagagttattaaatggtttgactacctgtggacyaacaaaaagacagtcgatgagagagaagttctgagatacctccctgacaaactcagggcagagattgccatcaatgttcacctagacacgttaaaaaaggttcgtatctttgctgactgtgaggctggtctgttggtggagttggtgttgaaattacaaccccaggtgtacagtcctggagattacatatgcaagaaaggggacattgggcgggagatgtacatcatcaaggaaggcaaactygctgtggtggcagacgacggaatyacacagtttgtggtgttgagtgacggcagctactttggcgagatcagcattcttaacatcaaaggcagcaaggctggcaaccgaagaacagccartattaagagcattggctactcggacctgttctgccyctcaaaggatgacctcatggaagctsttacagagtacccagatgccaaaactatgttggaggagaaagggaggcagatcttaatgaaagacggtctactggatataaacattgcgaatttgggcagtgaccctaaagacctggaagagaaggtcactcgaatggaggggtcagtggacctcctgcaaacacgatttgcccgaatcttggctgagtatgaatcgatgcagcagaaactcaagcaaagattaaccaaggttgagaaattcttgaaaccacttattgaaactgaattttcagcccttgaggaacccggaggagaaagtgaacccacagagtctckrcasgrskaaaaaaaacctggccaatagcaaaaaccatgcacgccgtgtgatccttttgagcgcttgaccmgrsacrakkgrkaattgggagaaaaagagttytyyggsaarkttttctatattgaaaaagtgtgtgggtagatgacacaaatytgttgtgcaacactgcaacaaaagtatcatcttatcmtgggacttttcacaatggacaytgtgcgaggaswtgaattgattaatgtgtctgtgtcaggatccgtttattctctttcccacagwtgctcyttttatgaagtaatctgtaaaaatgaacacgtatctctcactttcaggccacctgcatcactgagtcaaatgtattcagtgcaactgcgtcccttgtgcttgagacacagttatcagaagaagtagaacgcaataaagtgaaattgattacaaaammaraaaaaaaaaaaaaaa

SEQ ID NO: 7376 - DNA, 1400 bp, Rattus norvegicus
gggattgaggaggcctcaggtgcctttgtctacctgaggcagccttactatgccactcgggtaaatgcagcagacattgagaaccgggtcttggaactgaacaagaagcaggagtcagaggacacagccaaggccggcttctgggaggagtttgagagtctgcaaaagcaagaggcaaagaacttgcaccagcgtctggaagggcagcggccggagaacaagagcaagaaccgctacaagaacattcttccctttgaccacagccgagtgatcctgcagggacgtgacagtaacatcccagggtctgattacatcaatgccaactacgttaagaaccagctgctaggtccggatgagaactctaagacctacatcgccagtcagggctgtctggacgctaccgtcaatgacttctggcagatggcttggcaggagaacactcgtgtcatcgtcatgactaccagagaggtggagaaaggccggaacaaatgtgtcccatactggcctgaggtgggcactcagcgcgtctatgggctctactctgtgaccaactgtaaagagcatgacacagcagagtacaaacttcgaacattgcagatctccccactggacaatggggacctggttcggsagakrtggcactaccagtacctgagctggcctgaccatggggttcccagtgagcctggaggtgtcctcagcttyctggatcagatcaaccagcggcaggaaagtttgcctcacgcggggcccatcattgtgcattgcagcgctggcatcggccgcacsggcaccatcatcgtcattgatatgctcatggagagcgtctccaccaaggggctagaskgtgacattgacatccaraagaccatccagatggtacgggcacagcgytctggcatgktgcagacagaggcmcagtacaagtttatttatgtggccatcgcccagttcatcgaaacaaccaagaagaaactggagatcatacaatcccagaggggccaggagtcggagtatgggaacatcacctaccctccggctttgaggagtgcccacgccaaagcytccsgtacctcstccaaacacaaggaggaggtgtacgaaaaygtgywtmgcaagaacaagaaggaagagaaagtaaagaagcagcgatcggcagacaaggagaagaacaaaggttctctcaagaggaacatcagccttactccgtgcagaggcctccgctgggcagacagagacctgtagtccacmccacccccatcttgttgtaatttaagtgaccgtggtcctctgaacctgtatatggctcagcaagcctcagggagagtcagacccttctcttcttgtaaataaagcccctggacaactgwrwaaaaaaaaaaaaaaaaaaaaaactcgag

SEQ ID NO: 7377 - DNA, 600 bp, Rattus norvegicus
tcaattttccagcaagtcaatcctgatcgtgtaagctcagtctatacccggtccacaggagaacaggaagtttctactggtttatgaactaggttgagtttgtgtatcacttagttttttatgtagcttgagggtagagatggttcttttagaaaagaaattaatatagagggcctaaggtacgtgcattgttttaatatttatttgagatagattgggtctttgaaagctgagtagttttataaacgtgaatgagaatgtattgatgagacagtaatttctggcttcattcctatttaactacaattattcccaaactcttctttagccacaaagtcactattaaaatatcgagcttggattttttagagcttgagtatctgaccaaaaataacatcattttttccctatataaagcaaaattcaggctacttaaatcaggtctttgtcttgccctgagaagaaggatgagaccatgactagttagggaatagataaccaagctatatgaattgctttatagacttgtatgatcagtaagtgctctgtggcctgagaaggctgggaacaagtctttataaaaagagatttgaactggat

SEQ ID NO: 7378 - DNA, 600 bp, Rattus norvegicus
gtgcatacaaagaattttatacacagagacattaaaccagataacttcctaatgggtattgggcgtcactgtaataagttattccttattgattttggtttggccaaaaagtacagagacaacaggacaaggcaacacataccatacagggaagataaaaacctcactggcactgcccggtatgccagcatcaatgcacatcttggcattgagcagagtcgccgagatgacatggaatctttaggatatgttttgatgtattttaatagaaccagtctgccatggcaagggctaaaggcygcwmcmaagaaacaaaaatatgaaaagattagtgaaaagaagatgtccactcctgttgaagttttgtgtaaggggtttcctgcagaatttgccatgtacttaaattactgtcgtgggctgcgctttgaggaagctccggattacatgtatctgaggcagctgttccgcatcctcttcaggaccctgaaccaccagtatgactacacgtttgattggacgatgttaaagcagaaagcagcccagcaggcagcctcttccagtgggcagggtcagcaggcccaaacccccacaggtttctaa

SEQ ID NO: 7379 - DNA, 600 bp, Rattus norvegicus
swatmtysaktkkggaagaggaaaagaagcatgactgttagtccttctcaggacccatctttctcaggattaaaccagttattccttattgattttggtttggccaaaaagtacagagacaacaggacaaggcaacacataccatacagggaagataaaaacctcactggcactgcccggtatgccagcatcaatgcacatcttggcattgagcagagtcgccgagatgacatggaatctttaggatatgttttgatgtattttaatagaaccagtctgccatggcaagggctaaaggctgcaacaaagaaacaaaaatatgaaaagattagtgaaaagaagatgtccactcctgttgaagttttgtgtaaggggtttcctgcagaatttgccatgtacttaaattactgtcgtgggctgcgctttgaggaagctccggattacatgtatctgaggcagctgttccgcatcctcttcaggaccctgaaccaccagtatgactacacgtttgattggacgatgttaaagcagaaagcagcccagcaggcagcctcttccagtgggcagggtcagcaggcccaaacccccacaggtttctaa

SEQ ID NO: 7380 - DNA, 600 bp, Rattus norvegicus
gggactgcrcccatcacttaccgcctcctaagagcaaagagcaacttccagaccgtccagaagaactccaatgacccagtgacattcacagacaagcccaccagagacatggaataccagtgtatagkkgataattgccactctcaccccgaggtgcgcagcgagatcctgagggtcaaggtaatagccccggtggatgaagttacgatctccatcctgtcgggtaaygatgtacagtctgkagatgaaatggtgcttcggtgctctgtgaaagaggggactggccctgtcacgtttcagttttacaaagaaaaggagggcagacccttccacgaagaaacygtgaatgacacccaagtgttttggcaccatgaacaaactagcaaggagcaggaaggccagtactattgtacagcgttcaacagagccagcattgtgaccagtctccgaagcggccstctaacagtcagagtctttcttgctccgtggaagaaagggctcattgcagtcgttgtcattggagtggtcattgccgccttgatagttgcagccaaatactacttcctgaggaaagccaaggccaagcagaagcccgtggag

SEQ ID NO: 7381 - DNA, 243 bp, Rattus norvegicus; identical to SEQ ID NO: 3285

SEQ ID NO: 7382 - DNA, 1400 bp, Rattus norvegicus
gccacaccaagatccaccttcgccagaaggagaggaagagcagtgccccctcgtcatctgcatccgcccagtcttcagcctctggtcctgggggctcgcaggccgggggcagcctgtgcggtaacagcgccattggaggaccactggcctcctgcacctctcggaccaggaccccgtgagatgaagctccmgctgacacaccagtttcttcaggccccagaggccctctatccactcgagctgcaaacactaccgcccttctgtgttcttccccgtgatcccgtgaacctgtgatcctgggcaaaggaccctaatggagcccagctctgtcccaccttctcacagacggccttctgaaaacttaggccattttaaaggagttgactgtcactccaagaaatggggagccagaagagggctgggcgagggcccctggcctacagggctgtgctctaaccctgacagagagatgtttgactatggtctgcgagcccttccctttgaccctcgatgccagttgctctgagactttttctacaataggttgggagttgttgattcctttgagcaaggacagcgaaaaagactaaattaaagcaaaaccgatgtggcactttaatggcttgggacggacttggggtaggggtggggggttgtacagtgagcacagtttagccctggcctggccgcwgcactctgtggccctagaacagtgaatggaagtttctcgagccatctcarcccttaagcaatatgtcctataaactcaagagaacgaacggaagtgcaatgtcgggraggacaaagccaatattggctcctttttkttgagaaacaaagattattttccagtgtatatccatttagatttttgtgtattttttctttytkgatgtgcactgtttctccgagttctgaacctttgggaaaaaagtgtaaaacatttatgatctcttgaatcgagtcaaaagttaacttatttaaaggggggtgtacataggatgcatgcagtggtgttgcaagtgtcctctgtgccttgtgtgatgtgggcagtgttacagggtctgcatgtgtacaggatgccttactatgaaaaaaaaatcactccctgggtttaagtatggctgtatatttctgcctattaatatttggaatttttttagaaagtatatttttgtatgctctgttttgtgacttgaaagtgttaccttcgcagtcaaatttcagatgagagtgtgcttaacgtcactgcagctgacttgtttggttattagctcttaatagttgtggaaagattaaacaatctattctaacacagaaccactaactggagttcagatatcggacggcttatggcaatggtgtaaaataatacttttcaacaataaaaaaaaaaaaaa

SEQ ID NO: 7383 - DNA, 107 bp, Rattus norvegicus; identical to SEQ ID NO: 3287

SEQ ID NO: 7384 - DNA, 101 bp, Rattus norvegicus; identical to SEQ ID NO: 3288

SEQ ID NO: 7385 - DNA, 176 bp, Rattus norvegicus; identical to SEQ ID NO: 3289

SEQ ID NO: 7386 - DNA, 214 bp, Rattus norvegicus; identical to SEQ ID NO: 3290

SEQ ID NO: 7387 - DNA, 161 bp, Rattus norvegicus; identical to SEQ ID NO: 3291

SEQ ID NO: 7388 - DNA, 600 bp, Rattus norvegicus
ggaatggaacctcatcacaacactatgaaacattatgactgttcagtctgtaatttcggaatgatctatagaataatatgtttacattgtaacttttaaaaacttacaaatcaggattacacacatgagaattccactaagaaacaccaaggttcttaatatcgccagcgttaagatagaaagtaacatttcagaagagcacaatatacacaaaacattttttcaaattgaaatattttcctgggcattaaaaaacctttccactacaaatttattgttactgatgaaaaaaaaagcatattttctggacttaaatgttattacaaaaatcttaattttcagcaattgttttgcactttcagatagattgtaaataggttatgcagtcaatggtatagaattatttatttgctacataatagacattgtgccaaataattcctttttatttattttattcagtatgaaattttggagtacattttttctgttttcttaattagactacatttaatgtataggaattgtatgtacatatctcttctgtaaataacagccagtatcttcattaaatatacttgacaagaaaaaaaaaaaaaa

SEQ ID NO: 7389 - DNA, 600 bp, Rattus norvegicus
ggctgtgtgtcgccgtaattctccactgaactatcatgactgtttgcctatctttgagtattgaatataactcttatggtggtagtctggtgatgggayttgccsttccttaccaacaagaccagtcttgtggtattggaagggktctttcggtttgagagtagagtagttgaacactccttcattacttgcttcctgtaaatcaattctgtagatgagaaccattatactaatgagtacatttccccctcaacattgtagaaggaaccactttatttgtcatgatcaataaatatgtgaattgttccaaactgttagaagaaaacgttaaggtcttcagtccctgggaatgctctgactgtagccccccgctaacccacacgtggtggtggtgtgtattaatatgagtccaggggaaatatgaataaacgacggaaaacacttgatgctctgcgttcctgaggcttccctgcagtctgcttagcccttttatgagtggtggttaacaggcctgtcacatagtgttgagagagcgcagtatatctgtgaaagaaggccaaaattgcaatcttttccccttccaggcatatttaagttggg

SEQ ID NO: 7390 - DNA, 600 bp, Rattus norvegicus
gcctctcagccagcctggccttgttgagtggcctaagccaggcccacgcactgccactcagccctgcccaggagctccaacgttctctggccctctgggaacagcgccgcctgccggccacccacaacttccagcacctcctccgagtagcctaccaggaccccagcacaggttgcacctccaagaccttggctgtgcccccggggtcttcgattgccaccctgagtcaactctgtgccaccaagttccgagtgacccaaccggatgcatttggcctctttctctacaaggaccagggctaccatcgcctgccccctgaagccctagtccacaggcttcccacaactggttacctcatctaccgccgggcagagcgccccgagacccagagggctgcaacagagaagaccaagacaggaaatgagaggccagagcgaggagcatgggaggaggagaaagggggtctaaatggtgaagggaaatctgagatagctgttgaccaagaaggcaaggatcaggccagaggaggtcacatgcagctagaggaacaaaaggcagagggatgcccggctttagaagagtagccaggaacagctaaaa

SEQ ID NO: 7391 - DNA, 600 bp, Rattus norvegicus
ggtagaaagaatgttttctgcggtatatgagtattataagaacagagcaagaacataactcagtcagatgatacgttaatatgaactggggtgaaaaggcatactttttgttcagagtgggttttctcaatttccttggaactgattaaaaagaactacaacmtcawmaawarmwwamawwawtccctgtgcaggatacagttcaataagatgcatgaaacatgctgcmcrgrggamawarmwrwrwawrwrattgcgacgtggttgggtacttcgttgacactatcctcagstgaaccctaaatatkaattccgttgtccttgtggagagggttcctgaaggtcccctagggttcatggctcgtggacatgtgtgaactctgacatgtctactgtggtagccttcgggaaccggcgaccgctgttcggacactggccagagtacatacaggggcgcgaaggccggagggtcgaatggccatccagagctaccccggggccaggtccccaaaccgcgccgggggggaacatgaacccgcgggcaaagaaccccaaaatcaaggacaggcaacacctttggccccgggagacgacaagccc

SEQ ID NO: 7392 - DNA, 600 bp, Rattus norvegicus
cgtgactagcactgaagagaaggttcctgactcaaaacccacagcctgtgagggatgctgtacggcactgtggtcctacattctgagatgacaacacttcacagtctcagctgcatggacaatacaagattgaggggttcatgaagtttagggccaaagtccctgagagccactaacaccacgacagggttggagttcctgcaaggaggctctgagaggctgtggcatgaagctgtgaaagtgaagtctgaattgagattgtgattttgctgcagcaacaagaaagagcatagtggaaagttgagagcttttagagacgcatttcaagttcctaatcagcttacttggaaagattatcgtaaatggatctaccctgactgcagagaacattaagtggatctggacctttgctgacactgagaatctggatccacaagaagaagcaagctgttataaatgctacagccagaagaaaggatgagaattctgttctgccctgagggccctcgtgaacttatccttctagattccagccctagcttagagctcagactgttccttacacaatggtctgggcatagcaccccttaagcatgctgg

SEQ ID NO: 7393 - DNA, 600 bp, Rattus norvegicus
tgccaggagctgcagacctcacagaggagtgtgactctgcactgtgatgacggctccagtcggaccttcagctacacccaggttgagaagtgtggctgcytgggccagcggtgccatgctccaggtgacacaagccactcagagtcctcagaacaagagttcaagtccaaggaaagtgaggaacctggccagcagtcagcatccagggtcagcgaggacacccttgggcytttccagtaamccaagcagcactgccgtcccaaccaagaagtcctcctgaggccagcaggacgtgtactttaskscamgwggcttgaattctacctacctgctgcttcctcttcaagagggaccccggatgttcttggaggtgggagaggcccctctccactgattaggagcgtgatggccacgggctccttttgaaagaacttcattatcaccaaagggtcccaggagtgacagtcacttggatgcaggtatcagcctcgctctcacctcagccctgctcctgtgtcccccatccccaggaaatgaccaatatgttttataaatatactcaagagcatttgtggawwmwmaaaaaaaaaaaaaaaaaaa

SEQ ID NO: 7394 - DNA, 600 bp, Rattus norvegicus
gaattgtattaatatttctgaggcaattttccccggctgaccattttgatggcagctggggtagtcaggaaacagacaaagaaggtcgtctcagtgtaggaagagtgtatgtgcacatctagtttgcaactttacaaggttagcagctaatcttattatttattgaagtggtttttacagcgtcacaggaatgatcgactttgtgttggagctctaagaattgtgatgtactatatattctttagacatgatgactatttaatgcctctttgtcttagaatggagaagtttaaatatttattgttatttttacaaataatttgaaaataaaatattgtaaaatagtgcttgttctgtttccctgagggctgtggctaaaggttaatgcgatgatttatctcactgtttctcaagttttcttcctcttccccaggcatttagttggttagaaaattaaatcacagtctaagtcatggctctgttcatgtggtggtggctctggatccccacccaagaatgtacttttcccagggctgactcaggagaatccccacctctctgctctagttccagggcatgtgatgccctcttctggtcacc

SEQ ID NO: 7395 - DNA, 600 bp, Rattus norvegicus
aaccctttaaaatcccagaagatgacggcaatgatctcactcacactttcttcaatccagaccgagagggctggctactaaagctcggaggtggcagggtaaagacttggaagaggcgctggttcattctgactgacaactgcctttactactttgaatacaccacggacaaagagccccgcgggatcatccccctggagaacctgagtatccgagaggtggaagactccaagaagccgaactgctttgagctttatatccctgacaataaagaccaggtgattaaggcctgcaagacagaggctgacggacgagtggtggaagggaaccacactgtgtaccgcatctcggcccccactcctgaggagaaggaagactggatcaagtgcatcaaagccgccatcagcagagacccgttctacgagatgcttgcagcacggaaaaagaaggtctcctccacaaagaggcactgagggtgcaccagggcacggccagcccgtgaagctgtggccccttctcctgcctcccctgagggcgctgtggagcccagcagaggagagcagagggcttctctgccagttcctgcccactccgctccta

SEQ ID NO: 7396 - DNA, 600 bp, Rattus norvegicus
tggagaacctgagcatcagggaggtggaggaccctcggaagccgaactgctttgagctttataaccccagtcacaaagggcaagtcattaaagcctgcaagacggaggcagatggccgtgtggtggaggggaaccatgttgtataccggatctctgcccccagccctgaggagaaggaggagtggatgaagtccatcaaagcgagcatcagtagggacccgttctatgacatgctggccacaaggaagaggaggattgccaataagaaatagggaaaagtcaagatccagactccagcggatacactggcctcacaagccgcaggactggggacagtgtggaccccatgggtcctccagaagagccagccaaggccggagccctccagcctgtgctctgggacattggccagctgtgagcgtctctttcctgccaccgtcctagtattgacctttggggacccttgtccacaacagcacctggtgatgacagcctccagacctgcacagcccacgtgggactcctgttccggagccagagcctcagccacaccaagccacacctgctctctggggcagcactacatgttctagaagtcgc

SEQ ID NO: 7397 - DNA, 1400 bp, Rattus norvegicus
ccgcacccgggacggtgagcagggctcacgcccgggccctccgagactgagcacctcgccgcggcccacgggagacgggctgcagttccccgccgtctctgttggtcccccgccgccccgggcgcgccaccatggggccccggctcagcgtctggcttctgctgccgctcgccgcccttctgctccacgaggagcgcagccgggccgctgcgaaggtgagtccccttcgggctgcgctccccaacctccttccttgcacctccggcgccccgcgaggcctctttgtccagcgcctggcgcggtcaagccgcccggccctcgagggtgtcgccggtggcacggccaggtgcactcttccacaggctctcccgctcgtggtccctgtgggctgcgatcgcacatccattacggaacctcctttgttacgggctgggtgagggagacttaggaagggactgaagcttagcgcgtaccgtggccggggtgagggtaccagggagccagtgagatttgaactctcatagccaaggcgctcggcggcggggcgcgcgagtgggtcggggctggaagggtggccaggcacaccccacgccactcagagtcccacacacatgtgcaggggagatcgctttgggtgtgtttctggttgtttggagaccgtgatggttgaggccgaacagctttgggccgtttgcctggaaacatctgtatttttgctttcccacgactttgtgtagcctacggcacgcttgagaacagacgcgggctcttctccgcatcctaaaagtctctgcctctactcttgccttttatgagtgtgtgcctgaaaattataaccacatttagacttgagtgtgaaaccaaagcgaaactccatcgcattgttccctgcgcaaattgtttttttaaagtttttgtttcctctggtgctgtgcttagccaggagggcgctgggagatgtttgcaagagccagacttccagctctggaggaaccggccagactttctgccttggcctctagagaatacacttcagctgctgctgctgtgacagccatacaggcccaaaggccacaaggtgtggcctctcaagagtttgccttccccctcaaatgcttaaaaaaaaaaaaagatgtttgctgctttgcggcgcttctaatttttttttaagaagaaactgtttgttaattgtgcattttctttccattttaagaatttcccatctttcctgtaggagcgatactgatcagctatgctataaattattaactgttacatactagaataaactggtaacgttactagggggtttcttaattgagttttgcctccctggtggcagcttcttcattggttactgaagaaggatgattacatcagcaaccaacttcagagaattc

SEQ ID NO: 7398 - DNA, 851 bp, Rattus norvegicus; identical to SEQ ID NO: 3302

SEQ ID NO: 7399 - DNA, 600 bp, Rattus norvegicus
gcgacagcagcagcagcagcaggggcagccgcgacagcagcagcagcagcaggggcagccgcggcagcagcggcagcagcaggggcagccgaggcatcagaggcagcagcaggggcagccgcagctgcagcagcagcagcagcagcagcagcagcaggggcaaccgcgacagcagcgtcagcagcaggggcagcctcggcagcagcggcagcagcaggggcagccgaggcaccagcggcagctgcaggggcagccgcagctgcagcagcagcagcagcagctgcagcagctacagcagcagtgccagcaggagcagcttcagcaacaatgtgagcagcagttgctgcaacagcagcaatgccagcaggagcagcagcagcagcagcagcagcagcagcagcagcagcagcagcagcagcagcggaaaaggagaaaaaacagaaggagccggcggagcaggaagagcaagaggaccagaaggaccaggagaaccaggaacaccaggaggaggagaagaaggtaataatgagtgactgtgtctacatgtgtgggaggagtttgctgggaaaggaatattggtaaatttagtactgagaggtg

SEQ ID NO: 7400 - DNA, 216 bp, Rattus norvegicus; identical to SEQ ID NO: 3304

SEQ ID NO: 7401 - DNA, 1400 bp, Rattus norvegicus
  misc_feature (376)..(376): n is a, c, g, or t
  misc_feature (400)..(400): n is a, c, g, or t
tggcagtggtggcatggctaacaccaccctcaggaactccagcttggctactccgtgcctcctccctgagactgtcaagatctcttccctgtgaggaatgggcctgcccattcagagggccttctttattcttgggaactccttccaaagccatattttggggaggcaaagagggacagacccgggaactccttatgcccccagacaagaactatgcaatggagtttcatagaatggcccatctgatggggaagtagggaacgaggaacttccctcagttcagacagtttttcttgtgggagcttgaagcatgggactccataggtccctggcctccttgccccagcatgctggactggcctctctctcctagctngcctcttgcatgcctcttcccttnggccctctgaggcaggttaaagctttctatagtctgacatttgaggtctgsacwgrcaagagttgagagtttctcttctctttggttgtgttgcgcaggtttgggggttcagggaagagaaccctcaactctaatttagcctctagggggcaaggttttgtccttctcargcccagcatttcccagatttggaagcttggaatgcaaccctgggctggcttaatgggctgtggctctgtagtgacctgctaccctgcctgagggggtcaggctgcttctcccaacaaagagatagcacaaacactaccctcccctggctagctgctggaagtgacttcctgccacctgtcttctgctgggcctccagcaaactagcaaatagcagctgctgtcataccaatgtgcaaagcctcggaccaattcgctgcagcatatacatgtgctctgatcagatgggccacatctaactactctcttctctgatgtgctcccttcttgggttggtctgcagtctggacctgctgagataagagactaacatccagcaagagctggcgtgggctggttcatattcttgggcagaaatccagaaatagtgtgggcagaggacamaattgttcctgacccctgggagagatagaagatatcgcctccttctctgctgtaactccttttgctcgctgtcttctcctccctcttgggtcacttgratctatgctctcagaccgaatctcacgttatctcargttcccttgtctccagctctgtccctctaaagctggcagctgacaaagatgaagttttcatcagtcaataaaacctaagaggagagatgtgkrccgmaaaaaaaaarawwaaaaatgcaatgggctatcaacagtccaaggcattggctgtcaacacgtatgaacaaaaaacctgggggggggccccggtccccattcgcccctttaagggggcgttttacaatcaactggccgggggttgaaaagggggggag

SEQ ID NO: 7402 - DNA, 600 bp, Rattus norvegicus
agtggatgtggaaaggagatcgacagccacaactttgtcataaggtgtaatctagctcccgtggtggagttcgctgcggatgtggggactaagtcagatttcattaccatgaatccatcagttgtgcaaagagcattcggaggctttcggaatgagagtgacagagaaaaatttgtgcacagactctccatgctgaatgacagtgtcctttggattcctgccttcatggtcaaaggaggagagaagcacgtggaatgggttaatgcattaatccttaagaataaactgaaagtgaggactgcctatccatcactgagactcattcatgcggtcagaggttactggctgaccaacaaagttcctatcaaaagacccatcactggtctcctcatgtacacccttgccaccagattctgtgacgaaattcacctgtatggattctggccatttcctaaggatctgaacgggaaagctgtcaaatatcattactatgatgacttgaaatatagatacttttccaacgcaagtcctcacagaatgccactggaattcaaaacattgaatgtgctgcacaatagaggagctctaaaactgaccaca

SEQ ID NO: 7403 - DNA, 600 bp, Rattus norvegicus
agctgctggactctcacctgttcactgacaacttcccctgtcactttgtctctgcctttggagctggtttctgtgccacggtggtggcctccccagtggatgtggtaaagacccgatacatgaacgctcccccaggcaggtaccgaagccccctacactgtatgctgaggatggtggcccaggagggccccacagccttctacaaaggattcatgccctcctttctgcgtctgggatcctggaacgtgatgatgtttgtaacctacgagcagctgaaacgggccttgatgaaagtccaggtactgcgggaatctccattttgaacaaggcaagcaggccgcttggtactttcctcattaaaaaaggccgcctggaacagaacaaagcttctctgcccaggggtcgcaggcccatgcacgcacacgacggaaccctgcactgttactgacttgagaaactgaactaaaagagggggagagttttggtcttcgatgtttcatcctaaaacacctttgttttgcactgaccagatgggaaataaattatattaatttttaaaacctttccggttggatgcctaacatttaggccagagacaac

SEQ ID NO: 7404 - DNA, 600 bp, Rattus norvegicus
atttctgcatggttcctggttgtgagggcaacagctggcagcggggccgcatctgcatccacgtttatcgcctggataactactcgcgggtgcttttccccattacattcttcttctttaatgtggtctactgggtgatttgccttaacctgtaggctccagctggtagctcatggggcaatcacctcagttccccaggaggtcctaagcccctttgtcaagggagttgggagacaatagcaacagcagcaagcctgaggagagtttgtctttgctgctcctccttttgttggccccttcactcaatcttttaaacagcacttctcaagtaacagcccacctctctattcttcaaagagtatccatgatgttcagtgtgcccacaattgagcagataagctatctcttggttgtgtttgcagttactgtttttccccaggaggtcatggtaccatttgtggtgctaaggggcccagctcaagctcagccctagaatgcacagagcaacaacagtatagcagaaggaaggtcctcatccttaagtctttaagtcaggctatttgattttttctccctgctctctcttcctctacacacaca

SEQ ID NO: 7405 - DNA, 1400 bp, Rattus norvegicus
cagctgcttcctcccccaatggccaggggctgcagaagctctacaagtgcgccctgtgcctcaaagagttccgtagcaagcaggacctggtcaggcttgacgtcaatgggctgccctatggcctatgtgccggctgcatggcccgtagtgccaatggacaggtgggtggcctggccccacccgaacctgccgaccggccctgcgctggcctccgctgccctgaatgtaacgtgaagtttgagagtgctgaggacctggagagccacatgcaggtggaccaccgtgatcttaccccagagaccagtgggccccggaaaggtgcccagacgtcaccagtgccccggaagaagacgtaccagtgcatcaagtgccagatgaccttcgagaacgagagagagatccagatccacgtcgccaaccacatgatcgaggaaggcatcaaccatgagtgtaagctgtgcaaccagatgttcgactccccagccaagctcctttgtcacctcatcgaacacagcttcgagggcatgggtggtactttcaagtgccccgtgtgcttcacagtcttcgtccaggccaacaagctgcaacagcacatcttcgccgtgcacgggcaggaggacaaaatctacgactgctcgcagtgcccacagaagtttttcttccagacagagttgcagaaccacacgatgagccagcacgcacagtgagggacctcgcgacaggacacctctccgcagaaggcttgccggagacgccgtggggagggccatttgaacattacatccaatcaaagtgtcatttgcaacccagatgtaaaactctaatgatttgsccatgaggcgctgctattataagcagctggaaatgaatattaatggcagagattaaaagtattccatgctcagtgttttttattgtcctgctacagytagtgtgcttttagagttttcgccgcagactacatttctagtgttmgagaaacctgcttttttgaggctattgtcctttgttccttcatgtattatmttgatagttttttttaaaggrttmgtgtgattttttttgcttcttttctatttctttctttcttgkttttctttytcccccttcagttaactactttttaattgaaattytaggtaattgtgcatcgtgatgtgattgcttggctattgtctgaatatttccttttaattttttaattaaagrctaatgctttgattggatttkccagttcaccggacagtgrttaaaactctgtaatgaawwwaawmrrwwwmmrwgcaactggatggtctgcttttaaatgtgacttgatctgactgcagtaactagttcagctcaataaagggaatccatgcgttcascmmmaaaaaaaaaaaaaaaaaaaaaaaaaaaaa

SEQ ID NO: 7406 - DNA, 600 bp, Rattus norvegicus
agggaggtgcagtggctggaggtcacgctgggcttcattgtgcccttcgccatcatcggcctgtgctattccctcatcgtgcgggccctcatccgggcccacaggcatcgtggcctgcgcccacgcaggcagaaagccctgaggatgatcttcgcagtggtccttgtcttcttcatctgctggctgccggagaacgtcttcatcagcgtccacctactgcagtgggcgcagccaggggacactccctgcaagcagtctttccgtcatgcctaccccttgacaggccacatagtcaacctggcagccttctccaacagctgcctgagtcccctcatctatagcttcctgggagagaccttcagggacaagctcaggctgtatgtggcgcagaagacgagcctgccagctctcaaccgcttctgccatgccacgctcaaggcagtcataccagacagcacggagcagtcagatgtcaagttcagcagtgctgtatgagaggtacctcctagaggaaaacggacaggggagcaggcgtgcccaggagctgcacactctagcacaggtggtgggcgagctgagccatgtcatactctaaacccc

SEQ ID NO: 7407 - DNA, 600 bp, Rattus norvegicus
ttggaagctgtacctgcgcttccagatgaacctcctggggtttctcttcccactgttggccatgattttcttttactcccgcatcggttgtgttctggtcaggctgaggccaccgggacagggccgggctctgaggatggctgcggccctggtggtagtcttcttcctgctgtggttcccgtacaacctcaccttgttcctgcactcgctgctggatctgcatgtctttgggaactgtaaaatcagccaccgtctggactatatgttgcaggtgacagagagcctggccttctcccattgttgcttcaccccagtcctctatgccttctccagtcacagtttccgccagtaccttaaagcggttctgtccgtggtgctgagacggcaccaggcacctggcaccgcccacgcccctccatgtagccattcggagagcagcagggttactgcccaggaagatgtggtcagcatgaacgaccttggcgagaggcaggctgacatctcccttaacaagggggagataggaaataattaatccccgggtctgggaacggtggttctctctgagggacagcatggctgtgcttgctgcttgcccca

SEQ ID NO: 7408 - DNA, 600 bp, Rattus norvegicus
ccagtgtacaaaaaggtacgtcatcaccaatcccccctacgagtttgaactygtaccgacagacctgatcttctgcctgatgcagtttgaccacaacgctggccaatcccgggccagtctgtctcattcctcccactcctcacagtcgtccagtaagaagagctcctctgtccactccatcccgtccacagcaaatcggccaaaccggcccaagtccagggagtcccgcgacaaacagaacmagaaragmwrtggtttwcasawgmgrcggatmatgcctatcmcagaaacattsaaatsrwkymcagatgagacggataatgcctatcccagaaacattcaaatcaagcccatgagtacccacatggctaaccagatgcaaccaatataaatccacaagcagcctgatccctccaatcagagaagttgaagatgaatgttgattcccagagaccagaactatttttttttaaaggctgacaaactgcataaatggtgacgtgacaacacaacctcttacatgctgaatcactggtggaaacactagaatatgcaagaattgcaagaaaataaaattagacagatctttctctttgccct

SEQ ID NO: 7409 - DNA, 1400 bp, Rattus norvegicus
aaggggaactgaagacaggctacttgtccattgtcatggatccagatgaactgcccttggatgagcgctgtgaacgcttgccttatgatgccagcaagtgggagttccccagggaccggctgaaactaggaaaacctcttggccgtggtgcctttggccaagtgattgaggcagatgcctttggaatcgacaagacagcgacttgcaaaacagtggctgtcaagatgttgaaagagggagcaacacacagcgagcaccgagccctcatgtccgaactcaagatcctcatccacattggccaccatctcaatgtggtgaacctgctgggtgcctgcacgaagcccggagggcctctcatggtgattgtagaattctgcaagtttggaaacctatcaacttacttacggggcaagagaaatgaattcgtgccctataagagcaaaggggcacgcttccgctctgggaaagactatgttggggagctctccgtagacctgaagcggcgcttggacagcatcaccagcagtcagagctctgccagctcaggttttgtggaggagaaatccckcwktgrcskagrskmmgwmswwgctkctgwagaactgtgagaacacaacagaaactcagggtttctgctgggtggatacccacttgtctgccctggtggcagtgtctgagggttttgtcaagtggcgayggtaaaggctcasacaggatgtatccctttgttcttcctctaactccacttctgtcttgccacacacccccccctccccagtgctcagtattttagctttgtggccacgtgatggcagaaggtcttaattggttggttttgctctccagataaaatcactagtcagatttcgaaattactttatagccaaggtctgataacatctactgyatcgtttagaatttaacatataaagctgtgtctactggtttttttttttgccctygggcatatgtttttcaaaagagaaactacttttcatttkgtrccatascgtgacgagcaggggccaatgactgtwaaacatgctgyggcacatatatttatagtctgttatgtggaacaaatgtaatatattgaaacttyatattatatataaggaactttgtactatccgcatttcgtatcagtattatgtagcacgacagagactgtgaggtctgagcagctggtggctcaggacgttgagaaactcgaaggaatcctttcgtgaggatgcgcagctatccctacccatctctctcacctcaaacggaggagaaaggggaatcagagataatgtgagtgtgtccttgttctctgttcttaggaggaatgttcttaccaactgttcatacgctttataaaccaataaatgtattccgagtaaaaaaaaaaaaaaaaa

SEQ ID NO: 7410 - DNA, 600 bp, Rattus norvegicus
ttagctgagcctcatgtcagtcaatcacaaagcagagtaattaccacacagactgggaagctcagtgaagattgttagcggttggtctgacagtcttgctgtgtgctatagtgttagacccaacggaggcagtatttataaggagggcagggttccatgtttcccgtgttaaagagcaagagatgatgtttgtcagtaggcatgcagctcatggtgaaaagaaagtccagacttaaagatgtgaagtgatttgtgctttgccccaccctgacagtctctctctgtgtgccttcagctgtggtggtgtttgctttcatcctctgctggctgcccttccacgtgggaagatacctcttttccaagtccttcgagcctggctctctggagatcgctcagatcagccagtactgcaacctggtgtcctttgtcctcttctacctcagcgctgccatcaaccccattctgtacaacatcatgtccaagaagtaccgggtggcagtgttcaaactgctaggatttgaatccttctcccagagaaagctttccactctgaaggatgagagttcccgggcctggacaaagtcgagcatcaacacatga

SEQ ID NO: 7411 - DNA, 600 bp, Rattus norvegicus
actatttcagcagcacaaagacactttgtgtgatcgatccagagaacagggattctctggaagagactgacatagacattgccacagaagacaagtctctgatcgacacataatctccctctgtgtggaggtgaacattctatccttgacgagcatgccagctgagtggtagggcccacctaccagagccaaggcctgcacaaaacaaaggccacctggctttgcagttacttgagtttggagccagaatgcaaggccgtgaagcaaatagcagttccgtgctgccttgccttgccggcgagcttggcgagacccgcagctgtagtagaagccagttcccagcacagctaaatggcttgaaaacagaggacagaaagctgagagattgctctgcaataggtgttgaggggctgtcccgacaggtgactgaactcactaacaacttcatctataaatctcacccatcctgttgtctgccaacctgtgtgccttttttgtaaaatgttttcgtgtctttgaaatgcctgttgaatatctagagtttagtacctccttctacaaacttttttgagtctttctgggaaaaaaaaaaaaaaaaaa

SEQ ID NO: 7412 - DNA, 600 bp, Rattus norvegicus
tctaaacagcctgaccctatgccattacccttgactgcaagtgaaaccctagtgcctagagtcaaagaagttaaatctgctcaggagactcccgagagctctctggctggaagtcctgacactgaatctccagtgttagtcaatgactacgaagcagaatctggtaacataagtcaaaagtctgatgaagaagactttgtgaaagttgaggacttgccmctcaaactgacagtctgttcagaggcagagctgaggaagaaaatggtagaagaagaacagaaaamccatttagctggtgagatatgtgaaatgcagactgaagaattagctggaaaccctcagatactgaaagaacctgwaamagtkggagcccagaktktatgawwtgtmtksaraaactcatstwmcycwcbwrywtagtywgcwcaytraaaawawactattacttcctagaaaacctaagcctactattgggataggagatagtctgttcattaattcaggtgcttcttttcaaattatgtaagattatgttttttatttttaaaatctttagtttaataaagtattagatgtattgctaaaaaaaaaaaaaaaaaa

SEQ ID NO: 7413 - DNA, 1400 bp, Rattus norvegicus
tttcatcagagcattagattgcatgaggagcagacaaacccagggggccttgaatgagtcggatgatcctgagacaggctgcctaagcgataacaagccgacttctcgacacttctaccctgtcgccctgcttcttgtcagttcacatctgctagttgtgtggctcattttaagtcttgctttactcttagccaaataccaataagttttatgctatgttccttgcttttctacaagagacaatggactttaattctctacaagagacaatgttgtaagatttctacattttcacgattcacagaatttaaaaaaaaattagaagaagaaatgtttgaattgtggttttgttttgttcttgattttgtttttccctaaaacctaaaaggcaaaaaaaggtactatgcattgagtggattcttttgctcttttgtttatggaaaagtgctttcccgccattaaatagctaaagacaagtttttaacttgctgtctttggagtaagacaaagaatagaatcctgcaagcttgaagttctgaacctcctcatcccgggtcattcactaaagaaattaggtcggacattgcgcaggttaaacccccaagacactcgggaagtggtggttgcagactttctttccactgtgctaatattaacagagttgccgtcagctaatagaaatgtgtctgcttttcttactctgttcctaatcatcccttacccattcatgtgcttaaccttctttgtcaagtgactttatgaaaaggatggctatttctgttttgtaattaaattaacctgtttgtaactattgtttgggttgatttggctttcagactacttttctattctttttaacaaggtctcatttgtgtcttgatgcgccatttttagcacctgtgacttttgtactgtggtagaggggacaggctcttcagaaagccatctcctctctgcactgcatagctaaaacagtgaggtaaaatagggatggaacttcctttaaaaaaaatctatagggccagacttaataaattaaatgccttattcctagaactgcatccttagggctacatgtagattttaatgtgttttaagggacagatagttaatttgtggaaaagctatacaaaggcagatatatttatgaaattaaagtaaagttgtattgtggagcaaattatatttaaagagtttattaaaagttaaatatctgttaagaaacttaatcatatctttccgaaggcaataatggtattgggcctggcctaggatttaattttgtaagatgtatcatcacttgtggaaaaagaaatgtagagttgaatcttggttatttttacttggactgttgctgcaactctgcactgaacaaataaagcatatttatttaaaaaaaa

SEQ ID NO: 7414 - DNA, 600 bp, Rattus norvegicus
  misc_feature (132)..(132): n is a, c, g, or t
gcctgtccccgccgcacctgagccaccgcgatgcgataggaccgccgccgggaccgttatccgccgtgcccgcccgccgccaccatgccgcgctccttcctcgtcaagaaacatttcaacgcctccaagaancccaactacagcgaactggacacacacacagtgatcatttctccatacctctgtgagagctaccccatgcctgtcataccaaaaccagagatcctcacctcaggagcgtacagccctataactgtatggacatmagcagttcmattccactcccctctgcccagcggcctttctcmtcttactggatactcctcatckttggggcgtgtaagccccctgccttcatctgacacttcatccaaggatcacagtggttcagaaagtcccattagtgacgaagaggagagactccagcccaagctttcagacccccatgccattgaagctgagaagtttcagtgcaatttatgcaataagacctattctactttctctggtctggccaaacataagcagctgcactgtgatgcccaggctaggaaatcgttcagctgcaaatactgtgacaaggaatatgtgagcctgggt

SEQ ID NO: 7415 - DNA, 778 bp, Rattus norvegicus; identical to SEQ ID NO: 3319

SEQ ID NO: 7416 - DNA, 600 bp, Rattus norvegicus
ctgaccatgatgtcaagaagaatagtccaatgacttatatgcttggaattaatttcatttccctccccactccattaggtgaacaacccacagatccagcacaaagctgtcaatgaactcatcagagtgattcaccagctgtcaccagaatctagcctaaggaagcggaaaaggagtcggtgctgattctggggtagagagtgtgccaataagaagaattctgccagcactatttgaattttaaaactaaacctatttattaatatttaaatttatttatatggagaatatattttagactcatcaaccaaagaagtatttatagtaacaacttatatgtgataaggatgaatttctattaatatatgtgttatttataatctctgtgtccttaattattcctctttgaccaatcattctttctgactaattaacccagactgtgattatgaagttgtatctggggtggggggacagccaaccagctgactgaactcacactgtggcttgtgcacttacttcacttgccaacggggaacattcagaactgcaatgaccccgtgaggtgctgctgaccagaggaatgtctatacatcggcc

SEQ ID NO: 7417 - DNA, 1350 bp, Rattus norvegicus; identical to SEQ ID NO: 3321

SEQ ID NO: 7418 - DNA, 600 bp, Rattus norvegicus
gcctccctgaaaccgtccagaagatcgatgcagccatttctttaaaggaccaamasragrcgtacttctttgtagaggacaaattctggagatttgatgagaagaaacaatccatggatccagaatttcccaggaaaatagctgagaactttccaggcattggcacaaaggtggatgctgtctttgaagcatttgggtttctttacttcttcagcggatcttcacagttggagtttgatccaaatgcagggaaagtgacccacatattgaagrgcaacagctggtttaattgttaagaagatccatggaaggcgtcgtgtgtttcagctgaccctgatagctcttcctytgaaacttggcgcactgaagtggtttccttactytagcatgtgctatggcagagcaaaatgggagstacatatggcaccagtcaacctcaagttgtcgaaggacattcagaagcactgcttgkcttatactgtgtcaaagggrgrggrgaaaacacactcctgggstacagacaagtaactgtctctgtgtagatggtttgttttatttaataaaatggtgtgtcatttwttttaaaaaaaaaaaaaaaaa

SEQ ID NO: 7419 - DNA, 600 bp, Rattus norvegicus
agcaaatgtgaacagggagtaaaaaaaaaaraarwactcsakctcrwrcyraatccagaagtaatttatcacgactccstaagtgcctttgacaagatgtgtcttagtttgcttccytgaagctttatgcaaagctataatggrctaaaacttttattttgrctaaatttttrtmccmgtttarcarctgtaactgccctcagcaccatgccacctttgcagggcattatcttgggrgtgtggmtattagttbtacatagctmgragkccaagattttattagagtgttkgyccttgttwgtytgaamccacgtgstccacaaagtcakaggcttgagaaaagggtattttatttccttcctatcagcatatgtactgacatcaggtggttttataatttaataaaaaggagtaccttgtggtcarrawwrarmwwwrwrhwraatctctacacaccttccttttrggctgtgtggggtggaatccaagatcctcatgcattcagagtgytgctccaccgytgaactataccccagacttcctgatttattttattttaattaaaaaaattaaaaagacttwaaaaaaaaaaaaaaaaaa

SEQ ID NO: 7420 - DNA, 600 bp, Rattus norvegicus
agatgattggaagtacgttgccatggtgattgatcgcatctttctctgggttttcatcctggtgtgcattttaggaacggcgggattatttctgcaacccttgatggccagagatgacacatagactgtgcactgttcatcgaggctcacctgtgctgacgcaaggggccacttcctcaatagcactatactttatctgatcactggcttggagtttgctatttcaagggttattttcaactcatcttgatttttcgtaaaaaagaaatgtgggagacaaatgtctagttatttatcatgggtaaatgaacatttcactacccctgtgattgaaactttaggtagaaaaattttctgttcataaatattaactccattagtgcaggatctccataaactcatttctcagcccataaacttcttgaaatcgtagtgtawwmarmarmrmmwrwwacttccgttctttactatctttccatgttggcatttgtgttgctgcaaaaccccacatatcataccccgagaaatgacacctggtctcacactcactgttagtaaactactctagtctgttcaagttcctaattcagaaaaaaaaaa

SEQ ID NO: 7421 - DNA, 1400 bp, Rattus norvegicus
cttcagtacctttccaggttcacccaaatggaggaaaaaccacatctcctacaggattgtgaattatacactggmtttaccaagagagmgtgtggattctgccattgagagagctttgaaggtctgggaggaggtgaccccactcacattctccaggatctctgaaggagaggctgacataatgatcycctttgcagttggagaacatggagacttttacccttttgatggagtgggacagagcttggctcatgcctacccacctggccctggattttatggagatgctcacttcgatgatgatgagaaatggtcactgggaccctcagggaccaatttattcctggttgctgcgcatgaacttggtcactccctgggtctctttcactcaaacaacaaagaatctctgatgtacccagtctacaggttctccacgagccaagccaacattcgcctttctcaggatgatatagagggcattcaatccctgtatggagcccgcccctcctctgatgccacagtggttcctgtgccctctgtctctccaaaacctgagaccccagtcaaatgtgatcctgctttgtcctttgatgcagtcaccatgctgagaggggaattcctattctttaaagacaggcacttctggcgtagaacccagtggaatcccgagcctgaattccatttgatttcagcattttggccctctcttccttcaggcttagatgctgcctatgaggcaaataacaaggacagagttctgatttttaaaggaagtcagttctgggcagtccgaggaaatgaagtccaagcaggttacccaaagaggatccacactcttggctttcctcccaccgtgaagaagattgatgcagctgtttttgaaaaggagaagaagaagacgtatttctttgtaggtgacaaatactggagatttgatgagacaagacagcttatggataaaggcttcccgagactgataacagatgacttcccaggaattgagccacaagttgatgctgtgttacatgcatttgggtttttttatttcttctgtggatcatcacagttcgagtttgaccccaatgccaggacggtgacacacacactgaagagcaacagctggctgttgtgctgattatcatgatgacaagacatatacaacactgtaaaatagtatttctcgcctaatttattatgtgtcataatgatgaattgttcctgcatgtgctgtggctcgagatgagcccagcakrtagatgtctttcttaatgaaccacagagcatcacctgagcacagaagtgaaagcttctcggtacactaggtgagaggatgcatccccatgggtactttattgtttaataaagaactttatttttgaaccawaaaaaaaaaaaaaaaa

SEQ ID NO: 7422 - DNA, 603 bp, Rattus norvegicus; identical to SEQ ID NO: 3326

SEQ ID NO: 7423 - DNA, 1400 bp, Rattus norvegicus
tgcctgcaagatccccaatgacctgggcttcccagaggagatgtctgtgacctccctggacttgactgggggtctgcctgaggctaccaccccagagtctgaggaggccttcaccctgcctcttctcaatgaccctgagcccaagccatccttggagccggtcaagaacattagcaacayggagstgaaggctgaaccctttgatgacttcttgtttccggcatcakctaggcccagtggctcggagactgcccgctctrtgccagatgtggacctgtctggttccttctatgcagcagactggragcctctgcacagcagttccctggggatggggcccatggtcacagagctggagcccctgtgcactcccgttgtcacstgcactcccagctgcactacctatacgtyttcctttgtcttcacctaccccgaggctgactccttccctagctgcgcagctgcccaccgaaagggcagcagcagcaacgagccctcytmtgactcactgagctcgcccacaytgmtagccytgtgagcagtcagagaaggcagggcagccggcactgactgagctggtgcattacagagagragaaacamgtcttccytcgaggggttcccgtagacytagggaggaccttatctgtgcgtgaaacacaccargytgtggacctcaaggacttgaaagcatccacatctggactccagtcctcacytcttccggagatgtagcaaaaaamcaaaaaaamaaaamaaaaaaaaaacaaaacaaaaaatcaaaagcaaccgcatggagtgtattgtttgtagtgacacctgagagctggtagttagtagcatgtgagccaggcctgggtctgtgtctcttttctctttctccttagtcttctcatagcattaactaatctgttgggttcattattggaattaacctggtgctggatatttttcggattgtatctagtgcagctgattttaacaatacctactgtgttcctggcaatagtgtgttccaatttagaaatgaccaatattaaactaagaaaagatagaactttattttccggtagatagaaataaatcgctatatccacgtactgtagctcttcagcgtccatgttcattgtcatgtaactgatcatgcattgttgaggtggtctgaatgttctgacattaacagttttccatgaaaacgttttattgtgttttcaatttatttattaagrtggattctcagatatttatatttttattttatttttttctatcctgaggtctttcgacatgtggaaagtgaatttgaatgaaaaaattttaagcattgtttgcttattgttccaagacattgtcaataaaagcatttaagttgaawrmrraaaaaaaaaramaaaaaaaaaa

SEQ ID NO: 7424 - DNA, 1400 bp, Rattus norvegicus
aactctcggaagtatttgagaaccagagccctgcagccaagcatggagacgcagcatcagaagccccctccaaggacactgtagagaagagagaggattctgacaaggggcaacaggatgcctttgagggaaccacagaaggacccagacctcaggcctttccagagcccaagcaggagtcctctatgatgggaaacagtcaatctccaggggaggacacagccaacaatacccaatcaccaaccagcctccccagccaggagcatgggattccacagaccacagaaggcagtgagagaggtcccagtgcccagcagcaagccagaaaagccaagcaagaggagaaagaggaagaggaggaggagaaagaggaagaggaggaggagaaagaggagaaggcgatcgccagagagaaggctgggcctaaagaagtccccacggcagcatccagttctcacttctattcaggctacaagaagatccagaaagatgatgatggtcagtcggagtctcaggcagtgaatggaaagacaggggcttctgaagctgtgccatctgaagggaagggggagctggagcactctcagcaggaggaagatggggaagaggccatggcagggcccccccaaggtctcttcccaggtgggaagggccaggagctggaacgtaagcagcaggaggaggaagaggaagaggagcgtctktccagagaatgggaggacaagcgatggagcaggatggaccagctggccaaggagctgacagcagagaagcggctggagggggaagatgaccctraccggtccatgaagctctccttccgggcccgggcctatggcttcagggaccctgggcctcagctacgccggggctggaggccatcttccagagaagacagtgtggaggcccgaggcgaytttraggaaaagaaggaagaggagggcagckccaaccgcagagcagaggaccaggagctagagagcctgtcarccatcgaggcagagykgsasraggtggcccaccasctgcaggctttgcgacggggatgaggcactggctggtggggtccggccatggcttcaaggcccaactgctgctcaagtagggaggcttccagcctcagagcccaggttaccccttgccccttcccttctcttgctctcagcccctgccctggacacttytgcagggcagccctgaaagtcaacacagattctttctcggmacacaggcagctttctagaagtttctcttccaccttctaatccatggggcacmactgcagtagttctgatctttgggcgaaagccgagaactcctgactattaagatattccagataaaatttattgaaggaagaataaammwrmwwwrrrmwcttcaaaaaaaaaaaaaaaaaa

SEQ ID NO: 7425 - DNA, 1400 bp, Rattus norvegicus
gtcttaacaccaccagatcagctggtcatcgctaacatagaccagtctgattttgaagggttctcgtatgtcaacccccagtttgtgcacccaatcttgcaaagtgcagtatgaaactcagaaacaaaagatctaatgcctccctagcccccaatctccccagcagttgggaagtgattcttaaccataaaattttaaggctatagccttgtattttgttccacacagaggcctgaaaattctggggatattagtccataagtgatcaactttcttcccccacccaatcccaaaccaaaaaacattatcttagtggatgatgacataatatacagagtatagtttaattatgtagaagtcacatctggcttcaagttaattctttcttaggaaacaaagagacttggaccctattttttggtacgatttaatatattctccatacctttcatattttggattttcactatccaaatcaccagagataataaagtgaacccacctgaactcaagggatggaaacatttctgcccaagatatctttggaattaaagaacaggaagcccaaacagaaaacaaagagaggcagagtctcatatattcaagacctcgttgcttctattttctgcttcaatggaaacagtccctagagtctgagagggcaggatgaacctgatcactgttcccaatcatcatagcacaaccatagtgcatagtttgaaaatgaaagaaaacttcagacagatgttcgttgaatctatcatatgtactcccctgctcggttgataactatctcgataactcattctttttaagaggccaaaatcatctaaggactttgctaaacaaacatgtgaaatcatttcagatcaaggataaaccatgtgtatgttcatkytaatctctgggagatgactcttcaatccagggtsccatcagtawtcatsccactgttcacgagtgktgttasccaaccccccgccacataataatattytgctaccyttgtgggtacccttcytaggaagctaaaatgtatgccccatccccttttgtactayttatttaataagccgcagtgtcgtttatgaaagyacaatgtatagtaacttaatcaaaastactgactagcatcagtccctataggttgattttcctcctttctctagccccacatccacttagrgatgagaaaaaaaararwawattttgggttccaattcccagttctaattgaatggcacacatggagctgtaggatcaagacactttatgcttatatcaactcaaagatgttttcttgctagaaggattttaatatgttttgcgagtgcatcatgcaatggattttgcatgtttataataaaccttaataacaagttaaaaaaaaaaaaaaaaaa

SEQ ID NO: 7426 - DNA, 702 bp, Rattus norvegicus; identical to SEQ ID NO: 3330
  misc_feature (446)..(446): n is a, c, g, or t
  misc_feature (493)..(493): n is a, c, g, or t
  misc_feature (539)..(539): n is a, c, g, or t
  misc_feature (580)..(581): n is a, c, g, or t
  misc_feature (595)..(595): n is a, c, g, or t
  misc_feature (598)..(598): n is a, c, g, or t
  misc_feature (660)..(660): n is a, c, g, or t
  misc_feature (689)..(690): n is a, c, g, or t

SEQ ID NO: 7427 - DNA, 600 bp, Rattus norvegicus
cccgtgaatggcgaattcagcctggatgatctcmaaccgtggcatccttwtkgggtggactctgtgccagccaatacagaaaatgaagttgagcctgtcgacgcccgcmccgctgctgaccgaggactgaccactcgaccagggtctgggttgacaaacatcaagacasamgagrtctcagaagtgaagatggatgcggagttcggacatgattcaggcttcgwagtccgccatcaaaaactggtgttctttgcaraaratgtgggttcaaacaaaggtgccatcattggactcatggtgggtggcgttgtcatagcaacagtgattgtcatcmccttggtgatgctgaaraagaamcagtacacatccatccatcatggcgtggtgraggttgacgctgctgtgaccccggaggagcgccacctytccaaratgcagcagaatggatatgagaatccaacatacaagttctttgagcaratgcagaactaaaccccgccccccgccacarcarcggcctytgaacttgacagcaaaaccattgcttcactacccatcggtgttcatttataaaataacgtggaaagaaaaaaaaaaaaa

SEQ ID NO: 7428 - DNA, 600 bp, Rattus norvegicus
tacgcaaaatcaagcagggcctgggcctcaaattcgcagagctcgtatwcaccggwttctggcacagccctgaatgtgaatttgytcgccactgcatcgacaagtcccaskaacgggtggaasgaaaggtgcargtatmtgtcttcaagggccaggtgtacatccttggccgggagtctccactttsactatacaatgaagagctggtgagcatgaacgtacagggtgmctatgaacccattgatgccaccggcttyatcaatatcaactcgstcaggctgaagsagtaccwtmgccttcagagcaaggtcaccsccwaayagmssgysacaaagaggsygggcctccccgctytgcagctctcccaggctccagcattaattgttgtgataaatttgtaattgkagcttgttstccwaccacctgactggggytgstgtgccccccctcacctcccccccacccacaggctttgttccctggtcccctatagcctacaaaagtggtcatcgaagggaagggggggtggcaggcagctgcagaaagcrcgtaaaatgacaattaaaagaagttacattagtchwwmawwwrwmaaaaaaa

SEQ ID NO: 7429 - DNA, 600 bp, Rattus norvegicus
gtgcaatattgcatggtttcttggtgcattcttaggatgtaagtgataacgctgacctcttcatgcatccagagcagagccgatttcttttcgcagtcatgatttgaagtctatagagacttcggccctcccccctgaggctccctgaagaaactcagccaattgatttaatacttgcttagtgcctttatctgtacccacagtgaactgcagaaaagtgcctccataactcagctgggaagttatttaacagaagggaggaagggttggggcacagacctttttgctttttgttttgtttgtttttccatcctcactgtctcacttcaccactgtgagaagacctctccaccctcagagcccccaaagaagagagagagagagagagaaagcaggtgctgtctctcttggctgtctactggacttggtctctttggcagcctgactctggatatgaactgagacccatctttgaagtggacatgaaccataaactggttctattctgttttgttctgttctgttttgtttcttctcgaccagaagccaagagaaatgtttttgggaatgtggaaggccactccggacatacaaagcttc

SEQ ID NO: 7430 - DNA, 600 bp, Rattus norvegicus
tccgtggagcaaaggaaagtgtgttattgttatctgtgctggtttgaatgcatgctctatggagtaagcacaggacctagtacagtgctacatcactgatctttacaaagattctaagctaatttttwaaaaactgggggtagcatctaattttatataccytagttgtttcstaacattcattraagataaatgcattcyttttaccaaaatatgtggctatcttatactaatgttgtttatatcactctttttttataaagataaatgcattcctttaccaaaatatgtgactatatcatgctaatgttgtttatatcactcctttttgtgaagataaatgcattccttttaccaaaatatgtgactatgtcatgctaatgttgtttatatcactctbttttataaagataaatgcattccttttaccaaaaacatgtggctatattatactaatgttgtttatatcactcttttttataaagataaatgcattccttctaccamaawawrwramwawawcatgctaatgktgtttatatcaccyttttaaaaataaaatcttttcacatamwmwaaaaaaaaaaaaaaaaaaaaaaa

SEQ ID NO: 7431 - DNA, 1183 bp, Rattus norvegicus; identical to SEQ ID NO: 3335

SEQ ID NO: 7432 - DNA, 600 bp, Rattus norvegicus
atccctcagctaccagcacctctaggcagcctggggataccccagagctcagcacagtggagtcggtgacagtgtcctcccaagtccaaggtgacatggctggcagaggggacgaggtgcagcggcacggtgtggggttcttgtccatcttcctccccattgcactggtggccctccttgtcttcggagccatcctcctgtggaggaactggcggctgaggaacattaacagcataaactttgacaacccagtctaccagaagaccacggaggacgagatccacatttgccgcagccaggatggctatacctacccctcgagacagatggtcagcctggaggatgatgtggcatgaacagctgaggggagccatctctttccgggatccgctgccacccttaggcaggaaggacgctttctcacacctccccgccctgcactggtccttccacctcagtggtctctgtgttgctcaaagcaagataagagcaaaactgggctggggccaagctcagcggcctgtctgccctgggtcctgttttatatatttattgtctggggacagaaaaggctactggccatgctccagatgggaattc

SEQ ID NO: 7433 - DNA, 795 bp, Rattus norvegicus; identical to SEQ ID NO: 3337
  misc_feature (395)..(395): n is a, c, g, or t
  misc_feature (556)..(556): n is a, c, g, or t
  misc_feature (595)..(595): n is a, c, g, or t
  misc_feature (683)..(683): n is a, c, g, or t
  misc_feature (705)..(705): n is a, c, g, or t
  misc_feature (711)..(711): n is a, c, g, or t
  misc_feature (716)..(716): n is a, c, g, or t
  misc_feature (768)..(768): n is a, c, g, or t

SEQ ID NO: 7434 - DNA, 1400 bp, Rattus norvegicus
gagaaggaagctgagaaagagaagtcaacctttggtgcctttcaacataactctcctcgaaaggagttgactaccactgagatgacccagcacctgaatgcctactaccaggagtgcggaaggaacattgggagacagatccctctgatcatccagtactccatcctgcaaacatttgggcaggaaatggagaaagcaatgcttcagcttctacaggacaccagtaagtgcaactggttcctgactgagcagagtgacagcagagagaagaagaagttcctgaagaggcggcttttaaggctggatgaggctcagcggaagcttgccaaattctccaattaatcaggcttgctatgtgacttccctggtcacagctagcgtcccctgcacaatgaccctttagctgtttaccttatgttagtatgttgcctttagactgtggaagcatgccctctgcaaactctgaggagacgaagagaggagccatggagagtcattctacttcagcagtaagacacgaccctctcaaagcacaggaggctggcacctctcagggtccttcctgctcctaactgccatttctttgtcaggaggatgtcctggctgagtacttcagaagggatgtctcctggctttgtactgctctgcctggagtagtgctagaggtgtsacagrgtcctagcaggacagctctttgtaggcataaattttttgcaacctaattttagcaagggttcaacctcacttttagcccaccacccatcagaggtagtgggacagaaaagttattaggatatgggggaagtgctcagcaatagttctttgggggtgagctcaactttctttggcagcataacaaacaccaaataagactcagaagttgcagatcagtcctctaggcaggcagacaccaggcacgaaccagcagctgtakatcaatcttaaagaaagctcgccagccagcctgaggtaaggctgtggaagcagcaaacttcctcagcaacctcacaagtagttcttaggcaagtttcttctaatggtagtgttaccacaagttgagcccaacaatgctatgcaaggcawaccattacatgcacgttgttagtgaagaataagtakgcagagcaaaccaacgctcagttgctcgtctcccagtgttttgtggggccgtatttatctccttcatcatgggtcctttcacatgtttgcaatattaaatcatcctttcacctgtgtccgcttcaggacaacagtctttcacaagtttgcttcagcaagacaccctttcacctgtgtgccccagcaaaacatcatttgacataactttctaaagaaactagaagtttccacttcaagttcttccaataaaattcttgctaaatgaaaaaaaaaaaaaaaaa

SEQ ID NO: 7435 - DNA, 687 bp, Rattus norvegicus; identical to SEQ ID NO: 3339
  misc_feature (192)..(192): n is a, c, g, or t
  misc_feature (565)..(565): n is a, c, g, or t

SEQ ID NO: 7436 - DNA, 1400 bp, Rattus norvegicus
gagcagcccagggactgagggcagagactccscargggatttcgtrtwccagttcragggccwgtgctactacaccamcgggacgcwgcgcatrcggvwygtgaycagayacatctacaaccrggaggagtacstgcgctwcgacagcgacstgggcgagtwccgcgcgswgaccsagctggggcggccskmmgccgagtactdkaayaarcagtacctsgagcrgacgcgggccsagstggacasggtctgcagayacaactacgaggrghcggvggyycbcacctccctgmgrcggcttgrksagcsyaatgyggycmkctccctgtccaggacagaggccctyaaccaccacaacytgctggtctgctcagtgacagatttctacccagcccagatcaaagtgcgctggttccggaatggccaggaggagacgrcgggggtcgtgtccacacagcttattaggaayggggactggaccttccagatcctggtcatgctggagatsacgcctcagcggggagakgtgtacayctgccatgttgaccaccccagccttsagagcccygtcacagtggagtggcgggcacagtccgagtctgcccagagcaagatgctgagcggcatcgggggctttgtgctgggggtgatmttcctcgggcttggccttttcatccrtcacaagmgtcagaaaggrcctcgggggcctcctccagcagggctcctacagtgacacaggagagtgttttggttgtgtttgaagasacakgggaaacctgcccccatctytcmgcatcaaatcctgcaattcttctgtccctacagagccagagcagttagcacccccccccccccgggcmgacgctggccttgggaacagacaaaaggcagccttctccaacctcagcatcacgtcagaactcatactccctcccctggttagcaaccagcatttctctggtgcagatggctcctgmccttgaaggaggcgggagccaatatccttgaagtgatgaaagccsactctcggactatgagaaagagscaattaagtgtcaagtgtgcccasacagctgygaccagttgtgaaataccctagcttctgataacggaatgagttacttcttcccagtcaggaaggtaggccctttccagcactccccaccccatctgaacaggtttgtytcagggttggaaggatggcactcctttaccccyyccccaatmacatactgccaaagctcgagaagcccassttacgcatattcctatatatgtcacaagccccttgatgtgagcattgaattcctaacctgtggaacagggaaggcttgtgatctgatttgggtcagacccgtataataaagattctctttgttcttgmaaaaaaaaaaaaaaaa

SEQ ID NO: 7437 - DNA, 600 bp, Rattus norvegicus
ttcatcagcaggctgagggatgacaaccggtaccacgaggacatctttggagtcaccctcagaacgtatgaagtgaccaaccgccttagatctgagtccatcgccttcatcgaagagagcaaaaaagacgcagatgaggttttcagctcctaactggatcctcctgcccccgtgcgtgcgatgtggcggctgccccaagtgcccaagtaagggcggccgcaggttgactaaattcggacacacacggctgaaccgagtggccctgctctgcctcttgtcctgttgctgtgtcctggtccttcttcctgctctgggctctctcaaccccacccctgggttttctccttgactcttgggctacgatgcatcacccttgtaccctgcagtggctctcacaaaaccgcatcctccccacccccacccgattgctgccaagggcaggttgcggtgcatggctgttgctcctgttgytggggtctgaaggtggctggcgctgggcctcaggtcaccctgaaccagtcccttggccacttaagcccccttccaccctctttttatgatggtgtgtttgtgtgtgtgtgtgtgtgtgtgtgtgagaga

SEQ ID NO: 7438 - DNA, 1400 bp, Rattus norvegicus
caggacgcagcagtgtggcagtcaacaattgtatccgccagctctcctaccacaaaaacaatctacatgatccgatgtctggaggctggggagagggaaaggatctgctgctccagctggaggatgagacgctaaagttggtggagccacagaaccagacactgctgcatgcccagcccatcgtcagcattcgcgtgtggggcgttgggcgggacagtggaagagagagggactttgcctacgtagctcgagryaagctkayccmkwtrstsargtgyyamgtgtttmgctgksaggcacstgyywasaacrtcgysacyagcctgcatgagatctgctccaagatcatgtctgaacggcgcaatgctcgctgcttggtaaatggactctccctggaccactctaaacttgtggatgtccctttccaagtggaattcccagcaccaaagaatgaactggtgcagaagtttcaagtctattacctagggaacgtgcctgtggctaaacccgttggggtagatgtgattaatggagccctggagtcagtcctgtcttccagtagtcgtgagcagtggaccccaagtcacgtcagcgtggcccctgccaccctcaccatcytgcaccagcmgacagaagcaktgctgggggaktgtsgagtgcggtycctctccttcctggctgtggscagagatgtgcacacgttcgcattcatcatggctgccggccmagcyyccttytgctgtcacatgttttggtgcgagcccaatgctgccagtctctcggaggctgtgcaggctgcatgcatgctccgctaccagaagtgtctggatgctcgttcccagacctccacctcytgcctcccagcaccccmtgcrgagtcagttgcgaraygtgtagggtggactgtccgcaggggtgttcagtctctgtggggttccctcaagcccaaacgthtaggatcccagaccccatgaagagctcccatcctccctvkacmtgcttgtkttgggccccagggaactcaarggtttggggcavbtmrgsgmkgtggatgttyttcbtacaccccatgtcccccggrmtgcccctcstcagtagctggggttccctacctagsggywsggagrgagaaattgaattccttcacagaagtcatyacmctggactgatgacatsggggsmkrgaagcaaagccagccttgggctctccatccccagtgtttgaggtggagcaggaggaaytggymcragbcagkcccyatcctcaaaggcccmmtaagggcagraggggactggtctcggcatggatcccctgtcccctgttmtgcggacacctccmctgtactgatatcastaataaagtctgtctgtcgctgmhrawraaaaaaaaaaaaaaaaaa

SEQ ID NO: 7439 - DNA, 600 bp, Rattus norvegicus
agactgtggtcacaagcaaacatacattctgggagccaataaaagtccatgacatccgctggaactttgagaagtttctggtgggacccaacggtgtccctgtcatgcgctggttccaccaggctcctgtcagcactgtcaagtctgacatcctggcgtacctgaatcaattcaaaaccatataggaaggcaagcttctgatctcttcctcctctttctccctgaaagctgctctgaaaaaagactccaccttctcagcatgctctttactgaaatggactctacctgcccaagtcacccctaaattacctaagttcttcccctgcacaagcagatttgtgtctggaaagctgaagatgtttttccttgttagatttatgagttaaagaaagaaaagagaagaaaggaaaagaaaagaaaagaaaagaaaagaaaagaaaagaaaagctaaatccagaggcctcagttacaggtttggctgggtgtgttagtattcacctacaatgtgaacactcagcagacattacagacatttcagacagacagagacaagaggaacatgaattctaggccagcctgggctacaagaaatcttgtgcg

SEQ ID NO: 7440 - DNA, 600 bp, Rattus norvegicus
  misc_feature (557)..(557): n is a, c, g, or t
akaggcatttcttgttggcaaccaactcagttgggcagacatacagctamtagaagccattykgmwsshsgmvgargtcagtgctcctgtgttgtckgacttccctctgctgcrggcatttaagacaagaatcagcaacattcctacaattaagaagttcckgcaacctggaagtcaraggaagccaccyccrgatggccactatgttgacgtggtcaggmccgtcctgaagttywagtgacagsgtgctttaaagtggvtrbtgcaagggtccaatcrcascagcagytayagagcattccaraggcaagatagagctcycaggagtaaaggtyttcaaagaacmtgaaamccactctgtccaacaatgacaaatgccaattaaatagagtgaaaawytgwwhaaaaaaaaaaaaaaaaaaaaaaaaaarwwwggcggccgcaagcttattccctttagtgagggttaattttagcttggcactggccgtcgttttacaacgtcgtgactgggaaaaccctggcgttacccaacttaatcgccttgcagcacatcnccctttcgccagctggcgtaatagcgaagaggcccgcaccgat

SEQ ID NO: 7441 - DNA, 600 bp, Rattus norvegicus
ggccaggtgggcatggtgcccacacactgccccctcccggtacccaccgtggatactgcatgatgtgamccatggttttgaactcttcctgcccctcctttgagagccccgccctgcgcccacccggtgcctgccagacctggggcttgcagctgggggagsccggtggggtgaggcaggcaggcargcagccagcccgctgcaatgagaagaagcacagattgcaatggactcagttgttttttgttttttgtttttgtttttktttttttttctttctttctcccttctcaaccctttccttcmctacccagccaggctgggbtgcctccttccccccatcgctagccattttgggggtggcaaggaggtgtggwcgtttctcgtggttgtgtgtgtttgktgttcgggwtttaamaaagggaaattgagactgcaartggggggaggtggaggrtckgggggagtctgccccccaacccwggagtaccccccttgccaccaagtctcctttattgcctgcctctgctgtgaattaacttgttctgtgtattaaactgggccggacccctctgcccacmamaaaaaaaaaaaaaaaaa

SEQ ID NO: 7442 - DNA, 1400 bp, Rattus norvegicus
agctgcacctggtgatgacggctcccccgcccccacccccgcccgtgtacgagcccgtgaattaccacgtgcaggaggggctgcaggatgagggagcagagcccatgggctacagtgccgagctctccagcgagggcatcctggacgaccgtaacgaggagaagcggatcaccgaggcagagaagaacgagcgcgtgcagcggcagccgttgactctgagcaatgagttgtcccaggcccgggatgagaataagaggacccacaatgacatcatccacaatgagaacatgcggcaaggccgggacaagtataagacgctgcggcagatcaggcagggcaacaccaagcagcgcatcgacgagtttgaggccatgtagaggccaggccgggaccaagggcggagggcacctcacagcaggcaggtgtcactcttggctctttagtactctataagtctagaaacccccttgccgtgtwscagksvckhrragrgcaggtaymskgcvawgwtctgccccaagacccagtggaatcctccctggttgctyccaatagtatcacatagtgccaaacaggccagatttttatgacagttgccgaatcacttcccgttsgragcagggattcggagggctggcccgaatgacgcgattcagtgtcmctggggataataatagcactgtggctcacacacgggtgccatactttctytagtttwacaatgagctcaaatcgatkktgttcttgatttmtatgaaggatccatctckgyrygkkgaggggtgaaaaygattttgaaatttgagtcttaagacgcyccacacagtytccttcctycagacckctggcaragtytmstgcggtccctcaragtgtacggtacaggactytccgatmcaaaattbtcatgcttaccctgttagcaktcattgttggactgatacacctaatgatyttytatagagaatagtatttatatmtaagcgataatatgggtttgtaacmttagttttaaaaasggmmmgwkktgttstgtawatkwtgttaccttttacagartaaaagarttcamcmttwwdammmarwaawmmmramacttgatctgacacgggggcaggtgggagaccgatgacygraatcsccgctgtacaaaaaygkyagkgggttttgtgcatgtaaaacgcacacttcaayttcctgtcagttcttcactgagagcagtcagactbtagcccgaagggactcaggcctgtttattgtgaacaacttgttcctgttttcagtttgtcttccttccttgagccggactgtcctttttggttgtgatgtcctgtgcaggtcactccgcaccagatttacacacaataaaagttctccamggmwaaaaaaaaaaaaaaaaa

SEQ ID NO: 7443 - DNA, 600 bp, Rattus norvegicus
aagcagtggatccaggccaagttcacctgcagtgacctggaaggacggctagtcagcattcacagccagaaggagcaggacttcctgatgcaacatatcaacaagaaggagtcctggattggtctccaggatctcaacatggagggagagttcgtatggccagatgggagccctgtgggttatagcaactggaatccaggggagcccaacaatgggggccagggtgaggactgcgtcatgatgcggggatctggccagtggaatgacgccttctgccgcagctacctggatgcctgggtgtgtgagcagctggcaacctgtgacctatccgcccccttagcctctgtgacgccaacaggacccacccccaagaatgaaccctgactaagttctgtgcttcctctcctggatttctcctctacctttgtcatggaaacaaccaggccttgaggatgcccctgtcaaggcccgattgctctctgtgactgaggctaggattatgtccctcccaaactgaagtggctggtggaggccagctcctgccagctatccagaaagcctctcccgctaagctgaccattccattccgtctgccctctt

SEQ ID NO: 7444 - DNA, 1400 bp, Rattus norvegicus
  misc_feature (930)..(930): n is a, c, g, or t
  misc_feature (951)..(951): n is a, c, g, or t
tcgttmccagaaatmramtgagctgctcatccggamgctacccttccagaggttggtgagggagatcgcccaggatttcaaawcygacttgaggtttcaaagtgcarccatcggtgcccttcaggaggctagcgaggcatacctggtggggttgtttgamgawaccaatctgtgtgccatccacgccaagagagtcaccatcatgcccaaagacatccagttggctcgccggatacggggggagagagcttaagttgaagcgryykywahggywkwkkgtagkaaattctgtaaaatamwwwrrdwwaawwwdwkwykkywykwgkrrraaattgtktataatatgktgcatttgtacttaagtcatwccatctttcactcaggrtgaatggaaagagtgactgtycacagacctcagtgatgtgagcactgtggctcaggagtgacaagttgytaatatgcagaagggatgggtgatasttcwyrswyctcatgatgcatgtttctgtatgttaatgacwtgttgggtagmtattaaggtactagaaykgakarrtgtgtwcasgrkscttttgcaataaaactggttatgacttgawmmaarwrwwwaammawacatcactgtkawaraawrwrrrmwwwwwcaaaggttgaagatacaagttttagccacagtgtwacagtttcctttaaaaaarammaadwwrammtggcagctatagaatwcrctatgtgcatttataatagctattywatatattgtagkgttcaacwttttwrrmwyaarkgtttwmcmktsmcawddvdhrrvrarwmhwrwmatwaaggtgtgtrkratttmgkcmmswtggtatttctgrhhmgrstgcattkgtttttamcaaagtrraaramtgctatgsgtattaarcyttgcataagtcctcattntaccacatgttcabtaacmcntgaccctbtggytrkwaacacaaaacwctaacggggattttckttaagggctytagagtaaaacawcaagmtattmacmccrgcaysakskgttcbtwatbtagtwagtragcttttcattgtgtttggtcttacrchtagactgagtktggttttgtttttaatctttaaggggraaamctgtacaaggtwtgcttttccttgtggagtttataaacatgggggtaakagyacagcttgagcttattgsactctgccaatgaaratgggttaggttacacytggttactmtcctggcaaaahaatcccttktatadrgatggccttcwagtggtttttaaaagtatcstattsaagtttttaggtcaattatgtakgktgactawwtttacaaataaacttgtttattcmhhhdhvhdwmaawmmwaaaaaaaaatgtttggcggccg

SEQ ID NO: 7445 - DNA, 1354 bp, Rattus norvegicus; identical to SEQ ID NO: 3349

SEQ ID NO: 7446 - DNA, 1400 bp, Rattus norvegicus
catcctccccgtgcctctggaaaccagaggtccaatcagaaaagcctatacacctctatggcccgcccacccttgccaaggcaacagtccacaggctcagaccgattgtctcagacaccggagagcctggatttcctcaaggtcccggaccagggtgctgctggagtccgaagacaaacgaccagccggcctcccccagcaggcggcagaccaaagcctcagcccaagcctaagcctcaggtgccgcagtgcaaggctctgtatgcctacgatgctcaggacacagacgaactcagcttcaatgccaatgacgtcatcgatattattaaggaagatccttctggctggtggacgggtagactacgaggcaagcagggcctgtttcctaacaactatgtcaccaagatctgaggcgcccagaaattgtcatgcaggcagaggagctccagacgtggactggggaggggactttttggggactccccttctgatccacaatgagcaactgctactccaaggtctgaagctattctggtaccttccccatggaagacgcagaaaagcttgggatgggaacaaggagtttcactccgtaaatgatcctaaaaggtagtctagttcccaggagcgccaaaacaaccacccactaagatttatttattgtatttaaatctggtgaaagcagcaggggctgctgggtgtctatcccgcagcctccagcgcactcaccaagcccaggggacagcaggtggtgactatgacaagtgcctttagywsragrgcacgtttcattcattcctctcttccatacctgatacattcctttctgctaaccctccttcagggaggacccaccctctgcrggctggacttggtgtgaacaggcactcaccwgtcaatgccaagggcaggccgtccttccaagcccatgggagccagggccaytaagactgctggtggggaggaagttgggtgmtgggctgactgatggtcttgctttcccttggtctttgcttgtaatgtggctggcccatgttggttttatgtttaatgttgtgcttataagaagaaagatcyccccccccacccargytgtacatttataaaaaagtgaccatatactgtatayakaaaagtytagaagcacgtatgaatgccgcaggtagtattccactgtacccattcgtgaaggtaggttttattacaggatttgcaccaggtacttacagacgccccctctcctctttgcctagagagacagtcactgcattcctgcacagcccctcagaccccctgaccctctccatgtaggtaaatctcctgtcacccctctgccgwcctcccctacctcctcaataaatgtaacggagtcarwrmaawrwmwwmwwmwwwmaaaaaaa

SEQ ID NO: 7447 - DNA, 1151 bp, Rattus norvegicus; identical to SEQ ID NO: 3351
  misc_feature (10)..(10): n is a, c, g, or t

SEQ ID NO: 7448 - DNA, 1400 bp, Rattus norvegicus
cttgatattctacaaagacctgaaccaaagatccatcatggagagcccagccaacagtattgagatgctcctgtccaactttggtggacagctcggcctgtggatgagctgytcagtcgtctgtgtcattgaaatcattgaagtcttcttcattgacttcttctctatcatcgcccgccgtcagtggcacaaagccaaggattgktgggcccgtaggcagacaccgccctccactgagactccctccagccggcaaggccaggataatccagctctggatacggacgatgacctgcccacttttacctctgctatgcgcctgcctccagccccggggtccacggtgcctggcacaccacctcccagatacaataccttgcgcttggatagagccttttcatcccagctcacagacactcagttgaccaatgagttgtaagacaggattgggaaacaatcatggtttgaggaggctctcttcctgacacagatggccctcctatccttgctctgtctttcaatacatgactaacagcctgctgtgaaccggatagggcatgagaatccacagaagaacctgatgggacctgccccaacactcataacttccagaataagctatatgctacaacctggacttggcacttatgagctaaagagctagcagtaatggcctgggccaacagtgggctcttcacaggatcctgagagagaatcatgcttcagagccccaaactcaggagtttacccacgctaaccctgacttagcctgtggctcaagcacatgatcttgggtagcaaggccagccagctattgcctgacatgtgtgatagaagaaattagcaccatccttggatcctaacagttggttgctgacctcaaccattgacattgggacaaggtgttctctgtggcctcagacagacagttggcccagagcctggggatcatgtttggagagggcacagtagagagaagccaaggggtgtggtaggatgtccccactctgagagcagggtggggcagtagagaagagccagttaaagggcatagctggacactcctgccaaatggtattcccacaatctcagctcaagtggtatactttgagttgtaccaagcacttacataagttactctagggcataacaaacaccagcctataggcccaatcctttattttgtctttgaactgagagtatgcgtatgcgtgagagtgtgtgtatgaatgtgtgtatatgtctgtatgtgtttataatttttatatagctaatatatacatttatcaaaaagataatattttgtgacttgtgaaaattatatgagattcaaatgttactgtttataaataaagttttgtggataggcaaaaaaaaaaaaaaaaaaaaagggcggccgc

SEQ ID NO: 7449 - DNA, 1400 bp, Rattus norvegicus
gaacgctttctgccaggctgcccaactgcacctacagctccagagcaagcacgatgcagccacctgctttgtggacgccggcaacgctttcaagaaagctgacccccaagaggccattaactgtctgatgagagcaattgagatctatacagacatgggcagattcacaatcgcagccaagcaccacatctccattgctgagatctatgagacagaactggtggatgtagagaaggccattgcccactacgagcaatctgcagactactacaaaggagaagagtccaacagctcagccaacaagtgtctgctgaaggtggctggctacgycgcacagctggagcagtaccagaaggctatcgacatctatgagcaggtggggaccagcgccatggacagtcccctcctcaagtacagcgccaaagactacttcttcaaggcggccctttgccacttctgcatcgacatgctgaacgccaagcttgctgttcagaagtatgaggagctgttccctgccttctcggattcccgggaatgcaagctgatgaaaaagctgctggaagcccatgaggaacagaatgtggacagctacacagagtcggtgaaggaatatgactccatctccagactggaccagtggcttaccaccatgcttctacgaatcaagaagaccattcagggtgatgaggaagacctgcgctaggcctccagccactgccttccacccatctgtctgtcacagaggtggagccaacacctccaccaggagtctgaaggagtgggtgcaatgtrgscctcatcctccagggcaccaggcaagctctcctggatggctggtcaccmtatgcccamtgygtccttcaccmcsccatktatttaagctcccaaaggtgtcctcstgctctggaaaacccamytsgrcagakkcyccaatacagacttctctgtgtgcttmaggaammwrrarwmarmatymarwmmmawhwmvtkammarmarwrwamtaaggstattyccatatctchtaccktgtmccstdgcagagataagaacacaggtagttygtgagacttgctctccctgrctgggggtarcctctgcccstggagctttcccttgytcytacartgccaacctytcaggttagacccagccctggagctcacrgggtkccktgrccctsccctgccctgcacstgsttctctcsmtgcatmcaggtctgtctgtcgacwtgaagmtgcggctggcccaagaaagacaaaaacctsccacytktgvdwrarwmaaaaaaaaammaaaaaamcaattgcggccgcaagcttattccctttagtgagggttaattttagcttggcactggccgtcgttttacaacgtcgtgactgggaaaaccctggcgt

SEQ ID NO: 7450 - DNA, 1400 bp, Rattus norvegicus
  misc_feature (948)..(948): n is a, c, g, or t
  misc_feature (971)..(971): n is a, c, g, or t
  misc_feature (1390)..(1390): n is a, c, g, or t
agacaatttcacatggactttggaaaacatttttttcctttgcattcatctctcaaacttagtttttatctttgaccaactgaacgtgaccaaaaaccaaaagtgcattcaaccttaccaaaaagaaaaaaaaataagaataaataaataactttttaaaaaaggaagcttggtcctcttgcttgaagacctatgtgggtataagtccctttctgcccactgggcttatgataccccaaatgctgccttttctgttcctttctccaccccctcttggggcctctcctccattgctccccaaatttaagtctcccccaaagacacaggaaataatgcattgtctgcccagccagcaaaggcaatgctgaatcgtcccaccagcccctcaacccccagcttacttccctacccagcaccttcaaatcctgccgggacattgggttctcggactattgaaggagcctaaccatctggcatctccatggcctctgcaacaaatccccacacacactttgtttttgagggcctgtgctgggggagccacctgcccctcgcaggggtttggagccaggcagggtcacagcagactggaaacatcggccacacatgtgcaggctgggtgggagagactgttctgttccttgtgtaattgtgttgctgaaagactrcctcgttcktgtctttgtgtgtcaccggggcaactgkgtgggggcggggatgggggcarggtggcadcgcgcccagtttggyatcaaaggtgstacatctctgtgaaggggtgggktgggaargaatttctggyrckakrgaatctgagatgctcccytrsmccascaaatgttcctttkgydsvavgdvdddkkktmttcyttttttttttttaatggaymgrsrskwskgtkwwttttyttttmctgasggtgctaytwmmcamgggwggagagmgtnccammyccagmytgctytctctnwacccccctsttyactmttccagctcytgggccdryvygwkgatmtstctctvttvtgaaaccctcccctcktgctgvtgctccmtaccctcagmttctctctctcyctgtcytgcmtcagggtttcagagcmccattthccaaagcacaaagcagtttwtatccctggggtgggaggargcaagagactctgtacctattttgtatgtgtataataatttgagatgtttttarttattttgattgctggmrtaaascakgkggaaatgahmmrdyvmamaraaaaaaaaaamvwwhrmrkymrmaarmwtwttsmcwykmgksmgggttaattttagcttggcactggccgtcgttttacaacgtcgtgactgggaaaaccctggcgttacccaacttaatcgccttgcagcacatcnccctttcgcc

SEQ ID NO: 7451 - DNA, 1400 bp, Rattus norvegicus
  misc_feature (1173)..(1173): n is a, c, g, or t
  misc_feature (1176)..(1176): n is a, c, g, or t
  misc_feature (1182)..(1182): n is a, c, g, or t
  misc_feature (1194)..(1194): n is a, c, g, or t
agccsmrycagwcrcmatcaggaacmtcgagaagctgctccagctatgtgtgaagaggaagacagcacagctctggtgtgtgacaatggctccgggctctgtaaggcgggctttgctggtgatgatgctcccagggctgttttcccatccatcgtgggacgtcccagacaccagggagtgatggttggaatggsccaaaaggacagctatgtggggsacgaagcgcaragcaagagagggatcctgaccctgaagtatccgatagaacacggcatcatcaccaactgggacgacatggaaaagatctggcaccactccttctataacgagcttygcgtggccccagaggagcatccgaccttgctaacggaggcgccgctgaaccctaaggccaaccgggagaaaatgmcccagattatgtttgagaccttcaatgtccctgccatgtatgtggctattcaggctgtgctgtccctctatgcttctggacgtacaactggtattgtgctggactctggaratggcgtgactcacaacgtgcctatctatgagggctatgctctgcctcatgccatcatgcgtctggacttggctggccgagatctcaccgactacctcatgaagatcctgactgagcgtggctattccttcgtgactactgctgagcgtgagatcgtccgtgacatcaaggagaagctgtgctatgtcgctctggactttgaaaatgagatggccactgctgcttcctcttcttccctggagaagagctacsaactgcctgaygsrcaggwgmtcacsakcskgvatgamcrcwtymgckgcccrragamyctckkccagcsakctttcattggwatggmgtcggcggscatccacgaaaccacctataacagcatcatgamgtgtratmttgacatcaggaaggaccksyaygmkracaacgtcctctcggggggcactaccatgtacccaggcattgctgacaggmtgcagaaggmsmtcacagccbtcgmtcccagcaccatgaagatcaagattatkgywcskccagaacgcaaatattctgtytggatcggcggctccatcstggsttctvtatbtacyttccrgcaratgtgraksmgcamacrgghgywwghcgaakmtkgscyswccakkstscrcykcamwkknttntrrgbnrsgmmvcyaccnkccgcyccgccsccacccccgcccsgccsccgbyhtgtytbyagcacacamctgtgaatgttttgtggatcagcgcsttyagttstttwccaaatcattcctacmtaawrmwwwrawwwrwwamtmgtgtgtttttttttaataaatcagacatgtgytmmmmwwhwwrmmmwrrmmwrhmammmhdraaaaaaaaaaaaaaaaaa

SEQ ID NO: 7452 - DNA, 150 bp, Rattus norvegicus; identical to SEQ ID NO: 3356

SEQ ID NO: 7453 - DNA, 600 bp, Rattus norvegicus
gtgactcgggcgtgggcaagtcatgcctgcttctgcggtttgctgatgacacgtacacagagagctacatcagcaccattggggtggacttcaagattcgaaccattgaactggatggcaaaaccatcaaactacagatttgggacacagctggtcaggaacggttcaggacagtcacttccagctactatcggggtgctcatggcatcattgtggtgtatgacgtcactgaccaggaatcctacgctaatgtgaaacagtggctgcaggaaatagatcgctacgccagtgagaatgtcaataaactgctggtaggcaacaagagtgacctcaccaccaagaaggtcgtggacaataccacagccaaggaatttgcagactctctgggtgtccccttcctggagacaagtgccaagaatgccaccaatgttgaacaggcattcatgacaatggctgcagagatcaaaaaacggatggggccaggagcagcatctgggggtgaacggcccaacctgaagatcgacagcactcctgtgaaatctgctagtggtggctgctgctaggggggggtacttggggagggcacttctccagatgatg

SEQ ID NO: 7454 - DNA, 600 bp, Rattus norvegicus
cgagaaaagctttgaaacagatatgaacctaaactttcaaaacctgtcagtcatgggactccgaatcctcctgctgaaagtggccggatttaacctgctcatgacgctaaggctgtggtccagttgagattgaaagagcgtgactccaaagctccttcctcctcctcatcctccgctccctcttcaagccaaaaggagccctcccacctgtaaagaaggctgtctgaggactgactggatctccccgatctgtgaagaaggttgctggagagctaagctcagctgtacccactcagcccccttgctgctgctgaccattcacagagacgcaggggctgggctctcctggatctgaagacctcctctcccatgatagatttcccagcagaatctcttagagaatgttgtaaagaatatgttttttgtgtggttttttttttttgtatttttaaagcatccataaagaagtacatattactctttcatcaaggtgtagaaattatctcattgtctagacgctccccgctactgtgtgtattgagccacattgtatattattctgctgccgatgacgtcattaaaggtgattcagaaaaaaaa

SEQ ID NO: 7455 - DNA, 600 bp, Rattus norvegicus
  misc_feature (349)..(349): n is a, c, g, or t
gcctctaacaaaamtaggctgtctcgaacycctggcaacaggwtcgtttacctttacaccaagaaggtcgggaaagcacctaaatccgcatgtggcgtgtksccakgcagactgcgasgggtccgtgctgtgagacccaaaktcctcatgagmttgtccargacaaakaagcacgtcagcagggcctatggtggmtcmatgtgcvccaagtgtgtccgggmcaggwtcaagcgggctttccttatcgakgagcasaaawtcgttrtgaaagtktygaaggcmcaagcacagrgtcagaaagcaaaatwaatgggcagcttttttaagtmataaaaatcaagctytbwmnhhmrhrmmmwvrmmrmahmwmamamaaaaamwmrarsrsrkgcccggtcrcmarttcgccctatagtgagatcgatccaattccactgggcgccgattaaaacgtccgcgacggaaaacctggcgtacccactaacccctgcagacatacccttcgcagcgggtacaggagaggcgccgacgcctccacagaggcgcgaagggaaggcaccgacgcaaatagcaagccacaataggacgacctttacaaag

SEQ ID NO: 7456 - DNA, 600 bp, Rattus norvegicus
accatgatgatcctctggagcttctcttctagcccctgtcccttcccctcccctatcctatccattaggccagcaacgcttgtagtgctcactctgggccatagtgtggcgctggtgggctgggacaccaggaaaaattaatgcctctgaaacatgcaatagagcccagctatttttcatggccctacttgagccaggggtgaaggaggaatgcaggattggaaaccctctgactttatcacagaagggcagcattatctctgtgttctttgctcctgtagaaagttttccagagarttcccagccctggcctggaatcaggagacmgcaagamcagaggctgggggcccagggttcccatgtagatgacttttggccctgtccctgacttgctttcccaacagctttggsctctctcctcgtgcactccactgctgtccctgcagatgttccactctccacctcgtactctgcagcgkctccaggcctgktgctatagtgcccacctgawtgtcaataaacagcrscggarscaaaaaaawraaatttattcaaaaaaaaactcgagggggggcccggtacccaattcgcccgatagtg

SEQ ID NO: 7457 - DNA, 600 bp, Rattus norvegicus
ctaccaccgggagacagagggagaggagcaggcccagtacttgcaagtgacaagttgtccaaagatcccgtcctcccctgacctaaagaaaagtagaagtgcctctaccataagtaagtctgattacatggagatacaggagggagtaaacaacagtaatgaggactttagagaggagaacttaaaaacagccaactgtaccttggctaacacaaactatgtgaatattaccaaaatgttaactgatgtctgattgaaacctattaatgtactcacagctcaacaggactaatgcagatattgcataatagcctgcattgtagtcagtgttctacagtgtgcatctggttctgcatggaaagcaatagtcgtgcaagtgacttttgatcttttgatttttgatttagaacacagaatatttatcatggctttcatgaaatctttatcaccgacttacaggtttccaaagatgagagtcacccatggagccagcatctcagaaaggcacaatgcagccccctcatagcccccacaccatatcaacaccacctatcttcccacttaaacacctgggaggtgcattctcccccaccccacgcg

SEQ ID NO: 7458 - DNA, 1087 bp, Rattus norvegicus; identical to SEQ ID NO: 3362
  misc_feature (304)..(304): n is a, c, g, or t
  misc_feature (307)..(307): n is a, c, g, or t

SEQ ID NO: 7459 - DNA, 475 bp, Rattus norvegicus; identical to SEQ ID NO: 3363

SEQ ID NO: 7460 - DNA, 600 bp, Rattus norvegicus
gtggatttctgggacaatggagtagagcaggagaggtaggaatggccacagcggcaaagagcctgactccttagtgattctggaataatttggagacactgggagtgttggaggaattagacagtttctcacttggtaaaggtactctatgaggttacagtaccgagaactgagttgtgagaggtgaggagtgttactaagggcattcaggttggggcacctgctgttcatggagaaacttcggggcctggaatcacagccagtgatctacatgaacagggacagctacacattcagtcgagacttgcttgaatattaaggctcccgagaacacccattgagcagtggccatgaggtcatcagagaattgaagccctgtgggccacactcaggaccccagtccccagtattctgtgagcactgaagtaccctgccctgatggccatgatatgagagaagaagactcatctattgaaacaatcaaatgtcccagcagacttcccaatgtgtctgttaggcatcatcctgagactgggacaccatttccattcaatgagcactgactagttccagctctatccctccatccatcctggatcc

SEQ ID NO: 7461 - DNA, 600 bp, Rattus norvegicus
aaagamcataaattgaatgggaaagtcattgatcctaaaagggccaaagccatgaaaacaaaagagcccgtcaaaaaaatttttgttggtggcctttytccagacacacctgargaaaaawtaagrgrgtactttggtggttttggtgaggttgaatccatagagctgcctatggacaacaagaccaataagaggcgtgggttctgtttcattacctttaaggaagaggaaccagtgaagaagataatggagaagaaataccacaatgttggtcttagtaaatgtgaaataaaagtagccatgtcgaaggagcagtatcagcagcagcagcagtggggatctagaggagggtttgcaggaagagctcgcggaagaggcggtgatcagcagagtggttatgggaaagtatccagacgaggtggtcatcaaaatagctacaaaccatactaaattattccacttgcaacttatccccaacaggtggtgaagcagtattttccaatttgaagattcatttgaagtggctcctgccacctgctaatagcagttcaaactaaattttttctatcaagttcccgaatggaagtatgacgttgggtg

SEQ ID NO: 7462 - DNA, 600 bp, Rattus norvegicus
ctcgtwagcagcttgtggctgkaatawactattatttggatgtggagatgggccgwwctwcatgtwccawgtcccagacaaatttgactawctgtsctttycacgaccagscccatctgatgwggawggcactctgctycttycagatctwcwgcgtgccctgkwwwggcwcwcwcwccctgwcwwwatccwgctgcaaaaatgcctwwgagctgwgtctyatwrgaccatgccaatggkycyttacttgttcccctamcytgwwgkgkktwatccctgagawgggtkstycagstytkrakggcatytycggggwgttccmacmaggagacwrwwaagwrgctgctgcaggcabgwtytgcmcgtyagawcagytgtyccctggttctcttctcyttgcmgwacytgtcataccttgctytdgstmaawtaamamawwwawmaaawgaraamaammawmawmmwammwhvmwcwttctatacaacacaaaaaaacttcgaggcggcgccggtccccattgcgcctatagtgagcggatacaatcactggccgccgtttacacgtcggactgggaaaccctggcgtaccaaacttatcgt

SEQ ID NO: 7463 - DNA, 600 bp, Rattus norvegicus
cccgtacacagtacaggcatcctggaccaaatatctggactatagactgttgctcgctcctcgcagcattcgaggtttctccatcttagtgacatttttggaaatttcaacggtgccacccaatcatgcccatcagtcacgtgaatgagatgcacatttctttgactgaccttccctcaagactgagttctcatgcctgggtcttgtaatatctctaggaatggtgacaccaatagaataggaagcagctacactcaggtcccttctttagagtcctttgctttgggtcatgcgccttccttagcttctggtcacgtggtcactggcagactctggactatggaagatttcagcttgccgttttggtgctctctccagcttctggctggtagagctattagctgcccggctttgaaagttatccacagctaaatttggatggaattagagaaaatactacccaactggattatttgaaggacacgagggtcagttctagatcaatgggggccagtggacctctcagttgtgatctgtcacaggagaccacagcaggggggtctacagtagacctcaccacccagattccctgactccctt

SEQ ID NO: 7464 - DNA, 1400 bp, Rattus norvegicus
aaagatgagggagaggatgaggcaacctgtgcttagttatcagagttcagctaccagcatctcccgggcaaacattcccaccttaaatgccgccatttgaagtcccccgcaggcctcccatgaaactccagaagcctccatgggcctcccttcccccaaagctcccaaacaaaggcccaattctatgcctgtattaatgggttctaaagttagttagaccccgtgctggtgtgactatgctttaggatacattcacagtttaaacaaagggatctcacattgtttctcttcctctgaggacaggagacatgagcccagtcctgaggaaggtacagagaaagttccttcttccgggtccccttccccaagttgcccccagttaagggtaaagaatcttcgttctgttattttctttcatarwwwaarwwwrmaamaatggacaaaagctatttaatgttcaagctagctgtgtccttttttttttttttaaatgaaaaccttaaaatgataggttcttttgttcttaaaatgatctggaaagcattatacattcctcctatttcagaggttcggtttgtgatgtgagcatggtgtataaccagatctcacaaggtctttaaaacgttggccttttggttatgrgaaacctgggctgtggctgagagcccacctactgtattcatccttaggtgtgctgagtacagcccgcaacaacgttacagcctgtctcaaatgagacaaactggaagcttctcgtgttagcttctgacaagaagaggccttgattaaaattttcaaccgtaattttgtgtaagaggcagataggttatgcctacaactgccccctgccatgagcctaamtcagcccccctccacccccagbthgtytactctgtagctgtgggatgtggcagtcagtatcaaaagacttcatgagtttgcttgggaatttcactgccatggtacaatttaatggtgcagaaacaagwtggggtggttttcaaagaaccgatgaaacttytagactytaaatcctgttgattaaaactgagtttttytactttgaatgtctgtttgcctcccttttcagcattgccttytaaactggaaacagaaatgttgatatttggaaaaaatagaagaaactagtttaggtcaatgtgtaacttttytaggacaagttgaaccttagcattgtcattytgcctgatgtgttgtccacaagatgacagtcaacaaatccaacaggggacacttyttcctkccaagaatgtcgttgggaagccattctgtaacaataaataagagttgtggtttmaarwmwamamwawwwwacctaatgaagaacttattgctgatgttcagaaattcgacattgaaaggtgttttgccaatacggg

SEQ ID NO: 7465 - DNA, 930 bp, Rattus norvegicus; identical to SEQ ID NO: 3369

SEQ ID NO: 7466 - DNA, 1400 bp, Rattus norvegicus
tcggccttggacatacatcccaagggacagacaacatggcagcctgtgtgaagaccaataaatcccatgtcatcttcaagaaggtctcccgggacaagtcggtgaccatctacctggggaagagagactatatagatcacgtcagccaagtagagcctgtagatggtgttgtattggtggatcctgagctcgtgaaggggaagaaagtgtatgtcaccctgacctgcgccttccgctatggccaagaggacattgatgtgattggcctgaccttccgcagggacctgtatttctctcgggtccaggtatatcctcctgttggggccatgagtgccccaacccagctccagttgagcctgckcaagaaactgggagataacacgtacccatttctgctcacgttccctgactacctaccctgctcagtgatgttgcagccagctccacaagatgtagggaagagctgtggggttgactttgaggttaaagcatttgccacagacatcasagatgctgaagaggacaagatccccaagaagagctctgtgcggttactgatccggaaggtgcagcatgccccacctgagatgggtccccagccctgtgctgaagcctcctggcagttcttcatgtctgacaagcccctgcacctctcagtctccctcagcaaagagatatatttycatggggagcccatccctgtgaccgtgactgtgaccaataacacggagaaggttgtgaagaagattaaagtgtcagtggaacaaatagccaatgtggttctctactcgagtgattattacgtcaagcctgtggcctcggaggaaacacaggaaaaagtgcagccaaacagcactttgaccaagacgctggtgctggtgcccctcctggctaacaacagagaaagaagaggcatcgcgctggatgggaagatmaagcatgaggacacaaacctggcctccagcaccattatcaaggagggcatcgatcggaccgtcatgggcatcctggtgtcataccatatcrrsrygargctcacggtgtcaggctttytaggagagctcacatccagtgaagtggmtactgasrygmsgwycmktctgatgcacccccagcytgaggacccagcaaaagaaagtgtccaggatgaaaatytggtttttgaagagtttgctcgacaaaatytgaargatactggrgrgaatacagaagggaagaaagwtgrggatgcaggccaggatgrgtgaagacttagccttgatssstagaaactgcttgtagtcctggttgccttgtgggaaacccytggtaacctttcagagttwtgctaaatacgaaagctcgrgcattyttcccagaaataaagtytgyksgtcctyccmaaaaaaaaaaaaaaaaaa

SEQ ID NO: 7467 - DNA, 600 bp, Rattus norvegicus
attttagggaatccctgtgatgaccacttgacaggtgaaaaagcaaagatcctcgggtacacaaagtccatgaagagcaaactgtggacatttaagtccagtacgaattgcctttaacaattcttcttgttctgaaattagaaaaatactgcatgaactgacattaagaagtagataagcaaacwtttatgcagacaaatttaatgacaagcccatagtgtcttagattagtagatcaaataattccccaaggaaaagaaatcaactgattcaaaattaattttgttgttttttgtgaaaaatgaatttatttctcaccccgccccaacacctttacaaccttaataatgactaagaaagcaaaatcttaaaaccttaaagcaacaaggccttggtctttggtggtggtattctgtggccattgtttctgaccctgggtcctcttgctgctgcttcagcgctgagaaattgtaattgagttattttctgttttatttccctgtacatatttcatgrttggattatcgctctgttagcttttgtatatgaatcttaaatgttcattaaaaaaatgtaaaactgmaaaaaaaaaaaaaaaaa

SEQ ID NO: 7468 - DNA, 1400 bp, Rattus norvegicus
agtttcctcagtggatagcactcaacttactccgtagtgatattgtaacaatactgccattccctcttactgcactgcccaacatgtgtgtagcacaaacagttctcattcctaaggaccaattcagaactgaacagctatgcataggacagaaagatacatagaccgggtgtgggagaacacacagcattttgtcaacactgtgcactagtcacatttgtcctgctgccggtagacagccacttcaggaagtgagcctgctacctaacaccgcttctagactcttctcccacttgctattgtggcccgttttcacctccaggtcacagagaatggcaacatcctgaagggagagaccatcttcacatctaccaaaataaaatggaggaatgctaagcatggcctcgtgcttgatctttaggaattagctccgtgttttggacaaaactcaagagaatccccaatagggctggtggtagactttaagcacggggtcggctgctcckcctgcacacacaacacaaaagctaacccctggttgtgattcttccctcatgagagaagaggcaaaccctttgcccttcactcccatcacagcaaactttcagacctagaacagacacacaggacaaggagcaaatccttccctatggatgaacagcacgtttccaacattaaaaccacagatgataggaaacacatactcataggtrakttaaacagcagtttaaacagragaytcaaatgaggggctttcctatytaagggatcaagtcctaccaaagagaaggaacaccttaaataccagacactgacatttaatttcatcatctcccgacttgagttgtacacaatggaacatttccgaggacgcagctccgagctgccgarstgacattacttcstgcattacaatgatactagcacattctcttgcaacactgscaacatgggattgtcaccatagagttagttggtactatatcattctcttgtgagccggtgactggacytgctttmtgaccaagatccatcctctgataagccacatgtwcctttctgacaatgcagtstgaagtsttagaagctgatgccctagaaagatcctagttgcctttgtgtatacttactgcctgcttgagtgtttctatgtgtggattttststgtgtctsgtagaaatgttggggtgttttcttctgccataaggcttgtgacccgcgagcyrattcccttagctgtactttcccttcattttttgataagtggtttaaattctgtttcactttgtgtagtgaaccccatggtagttttctsattgttgytmmmaaaaatgmcttaacatmtyacatggacactcaataaaaawgttttatttcctgttrawaaaaaaaaaaaaaaa

SEQ ID NO: 7469 - DNA, 1103 bp, Rattus norvegicus; identical to SEQ ID NO: 3373
  misc_feature (3)..(6): n is a, c, g, or t

SEQ ID NO: 7470 - DNA, 1400 bp, Rattus norvegicus
stgacaggatgcaraaggmgatcamagscctgkctyccagcacaatgaagattaagatcattgctyctcctgaacgcwmgtrctcagtytggattggcggctmcatmctggcctcactgkscaccttscagcagatgtggatcagcaagcargrgtwtgacgrgtcargcccctycattgtbcaccgcaaatgcttytagatggrctgagcaggtgccaggcatytgmtgcatgagctgawtytgaagtatcgatytgccctggcaaakgtacacacctcatgctagsctyatgaaackkraatwwgcctttgaaarraaawwwrwmmwwraagctkgtatytgatatcagsactggwtcgkagaactkgdkgctgatttttgaccykgtattcwagdtaactgbtccctygstatatgtttaataccctgtgcatatctkvatwwagtmcytakdtcatgkggctcssdcacwtkgbggytggsgarakcygbkgwaragtshkhmagtccmcascytrktggatctytktrmscaccatgymgtgatctgtgmrsggtwttamccammagyarryttyyrrkatttccyragrctggcaagggttcctgaacwartkamcactycttttyttgycagwctaacagggtgkgaaagtccgagccttmggmvssrgkkkchghwvwggwtthttccctcctgaccwccatsggttgwtasttrscttgagttgggaacgtktgcatcgacacctgtaaatgtattcatycttktaattyatgtaaggttttkgtactcaattctttaagaaatgacaaatttkkgttttmtactgttcartgagaacattargccccagsaacacgtcattgtgtmaagagaaataaaagtgstgcagtaawvawaaaaaaawahmmmmmmmmmmmmmmwwtaacccaaattcacttaatacaaaaatacaaactcgagggggggcccggtacccaattcgccctatagtgagtcgtattacaattcactggcccgcgtttacaacgtggtgactgggaaaaccctggcgtacccaatttaatcgccttggagcacatccccttttcgccagttgggggaataagcgaaagggcccgcaccgatcgccctttccaaaagtttgcgcaaccttgatggccaaatggacatttgaaagcgttaaaattttggtaaaaatcgcgtaaaatttttggtaaatagagtcattttttaacccacaagccccgaaatggcgaaaaatccctctatataataaaaaagaatataccccagataagggttggaggggttgttccacttttggaacaaaagggccctctttataaagaggtggcctccacagctcaaaggccgaaaaaccggcttttacg

SEQ ID NO: 7471 - DNA, 600 bp, Rattus norvegicus
ttacttcctgtgtaaatgctctgatgatttcctgaataatgtaacagtgcctttgccattcccgcccaagtgagaatgtacaacaacgtgcctgtgcttgctgtgtttgtaaattcttattctaagacgtgctttaaactgagtgttgataaaggtcagggtgaatacctctctaatcacaacatgttcttggctgtacatcgatatcgtaggaacacttaaaatttctgtttttaccttgtaactctatgactcaagtttaacaataaaggagggcgtgggatggtggacttgaaaagtcattaacagctcatagtaaatttctgattctagacattggaaagcaagcattctaaatacctgctaagatgacatttcaaaataaattagcaaaatcttgtacttatttaattaaactttttaattctawwwmwwrwwgtccttgttggtagtaagaggctgttttaaaggataaaggttgtttgtatccacrarrarwwwawwrwwtctttttctctgtagagagctttaatgacatgtttattctgctaaggaatctttcagcaaaactcaaacataattgtatccagcagaaggatc

SEQ ID NO: 7472 - DNA, 1400 bp, Rattus norvegicus
gtccccggacctggcgcaccacgcagccagccccgcagcgctgcagggccaggtctctagcctatctcatctgaactcctctggctcggactatggcgccatgtcttgctctaccttgctttatggtcggacctggtgagatgtgggacgcgcctgagccctgtgcgacctcaccgctttccctctaccctccgcaaagaccaccattcgcccgctgctccacgcccttctacttttttctcatgtttagaccaaggaaaagtacacaaagaccaaactgctggacttcttcttcttcttcttctttcttcttcttcttcttcttcttcttcttcttcttcttcttcttcttcttcttcttcttcttcttcttcttcttcttcttcttcttcttctgctgctgctgctgctgctgctgctgcttcttcttcttcttcttcttcttcttcttcttcttcttcttcttcttcttcttcttcttcttcttctccttcttctttttctgcttcttcttcttcctcttcttcctcctcctccttcttcctcctywykmkscttgtccccactcctccttttctctttctccttttcctacgtttcccctttttttccttcatccttctccctttcctttctctttcctacctaaaacttgtggacttttttttaacataaaaagaaaatagaaacagtcaagcaaatccaacccctttacgaattctttaaccagagaaggacaaagaacaaatttgggggtctttctggtagttcaaatgggttctcaagcttaggcatggcacaattttggggcctgctctatgcttccacggccctgaactctgaagccggaaaacttccctgtggatgcactctgccagcaaagagagcttgcttgtaaataccaggatttttcgtttgtttgtttcagaagggaggacagaaactggagagaggaaagattcttcagcataacccacttgtccctgacacaaaggaagtgtcccctcccaggtgccctctggccctataggttcagtccaggctggcctttcagaaaattgttttaggtttgatgtgaacttgtagctgtaaaatgctgtcaaaagttggactaaatgcctagtttttagtwacctgtacattatgttgtaaaaagaactccagtcccagtccctggcccctcactttttaaaagggcatcatsgacaagcctgtgtatattactccacggtttggtatttgcagcaccagttgccccctcccttttttctgttgtaacttatgtagatatttggcttaaatatagttcctaagaagcttctaataaattatacgrattkraawwmaaarawrmwwwttctgattaaaaccctttttctttttaaaaaaaaaaaaaaaaa

SEQ ID NO: 7473 - DNA, 1396 bp, Rattus norvegicus; identical to SEQ ID NO: 3377

SEQ ID NO: 7474 - DNA, 600 bp, Rattus norvegicus
gaactcagtgtgtatccaaggatgactttgaactcttggtccaggtggatgcagaaggatcacatacccaacttgagcatcctttctcctagcccttttagatagacggtactcaatggctctcttgctgggggatgccacaccaggcttcctgctcctatctaacttcaatgtaatacccactaatcaatctttcctcaactctctgctactctctccagcctccagtaatcccacttctatttctacagggttgacttttcttatgttctatgtatgaatcagattatgccatgattgtctctctgtgcctggagcagcccaattttggagaaaaaaaaggggggggggacatctccttgcagtgagagtgagagccagccacaggctgagccttacttttcagtgtaactaaacttaagaagcaaagtaaatactgcaacctttctaccccacatagacagaaagcatcaaatgggaggttattcaggtatcggggtcgctggagaagccttctgcagtttactccaggaaaacggatgtatgcttttatttaattctgtaagatgttcatattatttatgacatgtttaagaattc

SEQ ID NO: 7475 - DNA, 1400 bp, Rattus norvegicus
gtaagtcagacttaggaggtatcaaggtggagaaacagatctttggggaagccaccaagcagcctggagtcgtattcatcgcagccaagtttgatggcatcttgggcatgggctacccttttatctctgttaacaakgtgctcccggtcttcgacaacctgatgaaacagaagctggtggaaaagaacatcttctccttctacctgaacagggacccaaccgggcaacctggaggagaactaatgcttggcggcactgactccagatactaccacggggagctgtcctacctgaacgtcacccgaaaggcctactggcaggtgcacatggaccagctkgaggtgggcagcgagctgacyctgtgcaagggaggctgtgaggctattgtggacacagggacswckmkkctggtggggcctgtggacgasgtgaaggaactacagaaggccattggggcagtgcctctcatccagggcgagtatatgatcccttgtgagaaggtgtccagcctgcccattatcacskyyaasctagsagkccrwwmctmygaactwsrcccagagargkacakamtmmasgtakcgcaggcwsgaragacgatctgcctgagtggcttcatggrgatggacatacccmctcccagtgkgccgmtctggatcctgggcgatgtctttattggctgctactacaccgtgtttgacagagaatacamtagggtcggctttgccaaggctgscacactctaacttgctcsttctymactgtcagggaactggatcagagtccarkakagaaagccagccagscccatmcytccacctgccccactcacacatatkcacactcgcywagtgttgctgggccyttgggaggcctggctggagctgktcmagctgttctgttctgtggtccctgtccytgggtwcagattgctgccctccgcctgtctgaaggaggccaaggcctacccagtacaaaaggctgcctttaaaggcccctactggcttggtagctgccgggatgaattgtcttgtcctgctgccctttgctgcgtgggcagcactctgaagcaggcaaatgggtcttgggatccctcccagaaacctgctctgaccagaccctcaggcagcctggggatggcaccaagctctactgccccactatctctggcctggcaaaggctgaaggtgagcagaaggagcaagaggacagaagcaaaactatatgaacctggggggggttacctgggacctgaccccaccctcctgggaaggcatgcttcagcctggggcagaggtaggatggctgactggttttggctggcctctgctgccctcatcctgggctagtcagatgggagccaaagttgatatacaaataaagttgttttgggcctcttt

SEQ ID NO: 7476 - DNA, 600 bp, Rattus norvegicus
cagccgcccacmcsggcctgggtgaggcccacaatccagcyggrcacctgtgagccgtcacagggtcttcgttggaccagggaccaccacatctctgcccggggtgcacccaggatggtcctggatgakacatctccatcgaggcatgggcagagggctctgggacacttcagggcctgggggagttggcacggagcagcccacctgtcttggcccagtaaccaagctgaagagcggctcctcctctcgattagcgggaactggaaacaaagcagcatgcccacttwtcrgaaaggaaaaaagatgccttaaytatgtcagacggaagagtcggaccgmryyctggcaaggggcggcctggtactggcttytagttcagagccacagcacattgtgcctaagcatttttcgttttttaaaaggagaataaaggaacattagttttcagatttttttttttaatgtagacaaaagttagcaagaacgaggccttccgtgtcttttttttcccttaactttcttttccgtatgttttgtaagcaacaaatttttgtmtaaaarwmwmawrwmwrwttctgttwmwaaaaaaaaaaaaaaaaa

SEQ ID NO: 7477 - DNA, 1400 bp, Rattus norvegicus
atgataaagaagcctcagaaatcaaagccaggcgtcttttcattcctggatcctttggcttatgaaatctggatgtgcattgtcttcgcttacattggagtcagtgtagttctcttcctagtcagcagatttagcccttatgaatggcacttggaagacaacaatgaagaacctcgtgacccacaaagccctcctgatcctcccaatgaatttggaatatttaacagtctttggttttccttgggtgctttcatgcagcaaggatgtgatatttctccaagatcactttctgggcgcattgttggaggggtttggtggttcttcaccctgatcataatctcttcctacactgcaaaccttgctgctttcctgactgtggagaggatggtgtcccctatagagagcgctgaagacttagccaagcagactgaaattgcatatgggaccctggactctggttcaacaaaagaatttttcagacgatccaaaattgctgtgtatgagaaaatgtggtcttacatgaaatccgcagagccatctgtgtttaccaaaacaacagctgacggggtagcccgagttcggaagtccaagggaaagttcgccttcctgctggagtcgaccatgaacgagtacattgagcagagaaagccgtgcgatacgatgaaagttggtggaaatctggattccaaaggctatggtgtggcaacccctaaaggctcagcattaggaamksctgtwaacctkgcagtattraaactsartgarcaaggcmtcttrgacaarytgaaaaacaaatggtggtacgayaarggrgartgyggcagcsrrggrcksygrswsyaaggacaagaccagtgctctaagcctgagcaatgtggcaggcgtgttctatatacttgtcggaggtctgggcctggccatgatggtggctttgatagaattctgttacaaatcacgggcagagtccaaacgcatgaaactcacaaagaacacccaaaactttaagcctgctcctgccaccaacactcagaattacgctacatacagagaaggctacaacgtgtatggaacagaaagtgttaagatctagggatcccttcccaccagaagcatgcaatgagaggaaatcactgaaaacgtggctgcttcaaggatcytgagccggatttcactctccctggtgtcgggcatgacacgaatattgctgatggtgcaatgacctttcaataggaaaaactgatttwttttttccttcagtgccttatggaacactmtgagacttgcgacaatgcaaaccatcattgaaatctttttgctttgcttraaaaaaaawwaaaawaaaaccaacaaaaaatggacatgcaagattccagtatgcgaaaaaaatcttattaaaacat

SEQ ID NO: 7478 - DNA, 1021 bp, Rattus norvegicus; identical to SEQ ID NO: 3382
  misc_feature (699)..(699): n is a, c, g, or t
  misc_feature (781)..(781): n is a, c, g, or t
  misc_feature (797)..(797): n is a, c, g, or t
  misc_feature (908)..(908): n is a, c, g, or t

SEQ ID NO: 7479 - DNA, 1274 bp, Rattus norvegicus; identical to SEQ ID NO: 3383

SEQ ID NO: 7480 - DNA, 600 bp, Rattus norvegicus
  misc_feature (199)..(199): n is a, c, g, or t
vsmadvyyhdktgamkctkcatktracawrshaatsttdwtcytgwswwmctstcaamarctcwtgggtaatgtsctggtgattgttckrghtagtcacttcggcaatgaattcacggytgaggtacaggctgcctggcagaarwtggtgsctggggtgsccactgvtytgtcccataagkaccaytgagccctttytntagytghccagcaatcstgtrtgtcccctbtgccctsytkyttcacatgdgtastsgactggtcywtgaaaggacrgcatgtttdrtaaagatcatkswtsstkgtwhwmaaaaawwmawwwwrwmwwrwmwwtttttctacttttatgctaacgatacctatttgatgtgtttgtggaagagaggaagacacaggcatttcttcgaaaactgtaggaactcaatcaagaaacatagatgccatggaaggcttctatagggccaaggaaagtctaaagctgggaaagagttctcaaagagaagaaagaaatttagtggagaaggaattgtgtatggaacatatgaaaatgtattaatagagggtgaagaaaagggggacagttgatacctggcatcaggtt

SEQ ID NO: 7481 - DNA, 1400 bp, Rattus norvegicus
agaagatccagaagatgaaaaatctctggtggataaagtcaaggagaaagctaaagaagaagatcatgaaaaacywsgwgraaragaagaaacaattcctcctgattatcgactagaaatagtcaaggataaggatggaaaaccgctcctgccaaaagaagccgaggaacaacttccacccttaagcgatgacttccttcttgatgcattgtctcaggacttctccagtcctgcaaacatattgtctcttggttttgaagatgccaaactttctgctgctgtttctgaaacagtttcccaggtgcctgctccaagcaaccacacagcagccccaccgcctggcactgagaggagagacaaagaactcgatgatgccttggatgaactttctgacagtcttggacaaagacagcctgatccagatgagaacaraccactagatgataaagtaaaggaaaaaatcaaagcagagcatagcgagaractgggagaaagagacgacaccatcccccctgaatataggcatctcctggataatgatgggaaggacaaaccagagaagccacttgacaaagaacacagagaagcctggtcaggaccaggaccccattgatgccctctcagaagacttggatagctgccccccaactacagagacttcacagaatacaacaaaggagaagggtaagaagacttcaagttccaaagcatccaagaatgaagagaaaacaaaggattcctccaagaagacagaggaagtgcccaagccaaaggtggatgaagatgcaacataaagtttatgcattttggwatctgaataaaaattcttcagctggtggatgktgacttttgaagatcaaaggctttgatgacaatttttctgggtggcttctagacagttgtatttgttatgtcttttgacaccttaaacattgagttgatattcttttccagaacaaaaaagaatttgtctggttcatctgtgttctgtattgagtattgataaacttcaaagatttttaattgcctttaggtaggagaagkaagctttatatttgtaaaaaatatatttgacagtttcttaaaacaccaaaaatcccagaaaacctttgcaaacatttgcacattatatacatagtgcctgtaaaactcattagtaattttggtttacacccaatttttttagcaattgcaatataatgctcttatagtttgtcaatattttgatttcttattatgtctttttcttgggctttgatgtatctttgggttaatgttgataagtcaaatgtggaatattgtactttgggtgtataactcctttggagatgctaataataaattaatgatagataacccaggtaaaccttgggagcaccaaaaattaaaaaaaaaaaaaa

SEQ ID NO: 7482 - DNA, 1400 bp, Rattus norvegicus
cctccccgttccagcagtctccatccatgcctctcagccacctgccaggtatgcctgacacccacctgggcatcagccacttgaatgtggcagccaagcccgagatggcagctctggccggaggcagccggttggcctttgagccacccccaccacgcctctcccacctgcctgtagcctccagtgccagcacagtgctgagtaccaatggcacaggggctatgaatttcaccgtgggtgcaccggcaagcttgaatggccagtgtgagtggcttccccggctccagaatggcatggtgcccagccagtacaacccgctaaggccaggtgtgactccgggcacactaagcacacaggcagctggcctccagcatggcatgatgggcccgatacacagcagcctctccaccaataccttgtccccgattatctaccagggcctgcccaacacaaggctggccacacagccccacctggtgcagacccagcaggtgcagccacagaacttacaaatccagcctcagaacctgcagccaccatcgcagccacacctcagtgtgagctcagcagccaatgggcacctgggtcggagcttcctgagcggggagcccagccaggcagacgtacagccgctgggccccagcagtctgcctgtgcacaccattctgccccaggaaagccaggctctgccgacatcactgccatcctccatggtcccacccatgaccactacccagttcctgacccctcmykmksagcacagctactcatcctcacctgtggacaacacccccagccaccagytgcaggtgccagagcaccccttcctcaccccatcccytgagtcycstgaccagtggtccagctcctccmsgcattccaacatctctgattggtccgagggcatctctagcccgcccacgagcatgccgtcccagatcasccacattccakaggcatttaagtaaacagagatgtgggatgaaggaccccascttccgttcccaagctctgttgggagtcctttccagtgctccaggatgctggggcgaccaawggagccttttaaaaaaaaatgtttttatacaaaataagaggacaagartttccattttttttttagtatttatttatgtacttttaktttccacagaaacactgcctttttatttatatgtattgttttctatggcactaggggaamacatctgttycaagaaaataaactagttctgagagcctcrawwwwmmwrrwmarrrtgaagttccctgtgtgtttgtaaaatacgaacaaggattcatgatttgtaaatgccgtttatttattgattgcttctttccaaaatcgtcgagaaagaaagaaagaaaaaraaaraaaraaagaaaaaaaaaaaaaaaaa

SEQ ID NO: 7483 - DNA, 1400 bp, Rattus norvegicus
  misc_feature (1380)..(1380): n is a, c, g, or t
ccagatataggcgtgagacccacagtaattgaaactgatgtttatgtaaacagcattggacctgttgatcccataaacatggagtacacgatagacatcatttttgcccagacttggttcgatagccgtttaaagttcaacagcaccatgaaagtccttatgcttaacagcaacatggtgggaaaaatttggatccctgacacgttcttcaggaactcaaggaaatctgatgcgcactggataacaacgcccaatcgcctgctgcggatatggagtgatggaagggttctctacactctgagattaacaattaatgcagaatgctaccttcaactccataactttcctatggatgaacattcctgtccactggaattttcaagctatggataccctaaaaatgaaattgagtacaagtggaaaaagccctcagtggaagtggctgatcctaagtactggagattgtatcagtttgcctttgtagggttaagaaattcaaccgaaatctctcacacaatctccggagattatattatcatgactatcttttttgacctgagcagacggatgggctatttcacaattcagacctacattccgtgcattctaacagttgttctttcctgggtgtctttttggatcaacaaagatgctgtacctgctagaacatccctgggtatcactacggttttgactatgacaaccctcagtacaatcgctagaaaatctttacctaaggtttcttacgtgacagcaatggatctctttgtctctgtgtgtttcatttttgtgtttgcagcactcatggagtatggaaccttgcattattttactagtaacaataaaggaaaaaccaccagagacaggaagctgaaaagcaaaacttcggtatccccaggtctccatgctggatctactctgattcccatgaacaacatttctatgcctcaaggggaagatgattatggttaccagtgcttggagggcaaagactgtgctacctttttctgttgctttgaagactgcagaactgggtcctggagagaagggcgaatacacatacgcattgccaaaatcgactcctactccaggatctttttcccaacagcttttgccttgttcaatctggtttactgggttggatatctatacttataagttctgccaatagataaaaaaattcataaaaatctggcttagtccaatataatcacttcgatttcataacaggaagttagaatttaaaatgaaagtctaccagttaaaatctgaatcatttggtcatatgattaaggctttcataaataaataagaaagaattattcaggttaatttacctaactaaacatgaaattcatgtccaatatagcacatttaaancagtaaacttaataattttt

SEQ ID NO: 7484 - DNA, 600 bp, Rattus norvegicus
gggtacagtgtggaatgtggccagcaggaactgggagagagacaactgggcctctgggagtggggaggagaaagggagaccctttgccttcccatctcagcgaggggctgtggctagatccagttcctaagaaggcttctgtggagtgtggctgtgaacttagggttttagagctcagacaactgcaccagaaaggrgacccycccccccaactctcggtcttccctgtgagcaagggctgacttcctatgacctgaaaaaggtatctgtctgggggaggagagatagcacaggcaatctctggttactgagagtgtttgccaaatacaatgacagccaaacaaaaccaaactttttttttaaaataaacctttgtaattaarwrwwarrwrmawwrrtcagtccttaagccagggtgtgagagaactctccagatcttgccctgagagccctgcacaggcacacactagagtatagagtgctctgaaaactggagttctaactgcctttttttcatgaggaagagaggggtctcctttaaacggttaaagggtttgggtatatgcaaagtatatactccaaattctttttcctttcagg

SEQ ID NO: 7485 - DNA, 1400 bp, Rattus norvegicus
caatgacatcaagaaccacaagtggtttgccacaactgactggatcgccatctatcagagaaaggtggaagctcccttcataccaaagtttaaaggccctggggacacgagtaactttgacgactatgaggaggaagagatccgggtctccatcaatgagaaatgtggcaaggagtttactgagttttaggggtgtgcttgtgccccatgggttttcttttcttttttttttttctttttctttctatttttttttctggttgggggtgggggggttggatcgaacagccagagggccctagagttccatgcatctaatttaacatccactccacacccccagggttaaggagagcaggaaagtcagatactggggaaggggcaacatcagctgctccccctctcccttcacctccaccctkccctkcctgttttcaatgaatttyttagctccagtcatactcaatcttgctggtgtatccaggggcgagtagggaaagagggscccaaattcagcctccacccctaccccagcamtkgatactaaggatgaacagtaaagccaaccttyccttccatgcagccctacctggaaagggagattttatgacctatacagagggcwsswkgccarwggkkttttttttttttttttcctcattwaaattaagttccaccagtgcctcccmccctccaaattgtcccacccctytmaaccccacccccaytccytaaatccattctgatgagacccgggtwgccaactgactytgtcaaggaaggaactgggcttggaacctcgccmtgagctgctagcctmccggcccccyttyycagtggtctcatsccaattgtkctgwgcaccagcccccvtraraagcmcctccscatcctgggcgctcastthtagctwarctgtcasctgwccatcacctytwgccgkgtgkccycaytcactgmammmvcamgtytgattgygctwywtctmtcaataraaaggtggggabctgctggrgatatgaccccgkdwatccctgtgwdkakccctctcgtaacttctcccaaaraggaggrgctctyakgcctgggtggggscccckgrwgggcgaragggvccrtwcaacctgtgtghtycraaggatgagactyyctyttgaacagtgtgmtrkwgkaaacrtwtktgaaaamtvkkrccaataaagtwttgtkktdrahwdrrraaaaammwwawrrrattactaaaattaatcttttttgtgcgccaacaagtcctttttttctttatggtggggggggtttaattttaagtagtggcactctgggtctctgctttttttacaaaccgtttgttgacttgtgtgaaaagacccctgagggttatctcccccctctaaataccg

SEQ ID NO: 7486 - DNA, 1400 bp, Rattus norvegicus
aatgatgctacagcccaggccttcctggctgaagcctctgtcatgacgcagcttcggcacagcaacctagtccagctactgggtgtgattgtggaggagaagggtgggctctacatcgtcacagagtacatggccaaggggagtttggtggactatcttcgatcacgtggtcgttcggtgctaggcggagactgtctcctcaaattctcactagacgtctgtgaagccatggagtacctggagggtaacaattttgtgcaccgggacttggctgcccggaatgtgctggtgtctgaggacaacgtggccaaagtcagtgactttggcctcactaaggaagcttccagcactcaggacacaggcaaactgccagtcaagtggacagctcctgaagccttgagagagaagaaattttccaccaagtctgatgtgtggagtttcggaatccttctctgggaaatctattccttcgggcgagtgccttacccaagaattcccctgaaggacgtcgtccctcgggtggaaaagggctataagatggacgctccggatggctgcccacccgcagtctatgatgttatgaagaactgctggcacctggatgctgccacgcggcccacctttctgcagcttcgagagcagctcgagcacatcagaacccatgagctgcacctgtgacctctgcctccacctaggccatggccttgcakggatggggcctagaagatacagatttggtgccstgctgcttgctgggcctgaacttgaactgagccccagcgggctggtaggcttyttgcctctgacctgcctgtcccttytggccccccagagaccccacbtaggcctggcatcttctctcatggacccmcctatagggctyabgrsgcscactgaasgggctgagaagagaggaggccgaggagcgvgagscagtgctcctgtggtcggcyttytctyggccccatcattcgccttcttagagtkwtattcctttccttttttgrgmwykwkbbccgtrygwywrtttbhtwttwttttkcaacataaggagaaagaaagtacccagcaaatgggcattytacaagaagtacgaatcttatttttcctgtcctgcccctgggggtggggaggaatcarcctctctstakggacccatcacbccagcstgtcycccatcstgtgttccatgtcyagtgttgcctcggtckcctatgtttgcgcttgaccatgtgcgctgtttgcatgtgcccarrgcaggcatctgtcasgggcttggatttcatgtgctgtggscgctcacccacactgccttgtgagatggaatcgtaataaaccactccatgaggacaccgcyvmmmarmmwmrrmrmwwmctccgccaaaaaaaaaaaaaaaaaa

SEQ ID NO: 7487 - DNA, 1400 bp, Rattus norvegicus
aaattcgaaatgaatcccatgactatcctcatagagtggccaagtttccagaaaacagaaatcgaaacagatacagagatgtaagcccatatgatcacagtcgtgttaaactgcagagtgctgaaaatgattatattaatgccagcttagttgacatagaagaggcacaaagaagttacatcttaacacagggcccacttcctaacacgtgctgccatttctggctcatggtgtggcagcaaaagaccagagcagttgtcatgctaaaccgaactgtagagaaagaatcggttaaatgtgcacagtactggccaacggatgaccgagagatggtgtttaaggaaacaggattcagcgtgaagctcttatctgaagatgtgaaatcatattatacagtacatctactacagttagaaaatatcaatagtggtgaaaccagaaccatatctcactttcattataccacctggccagattttggcgttccggagtcaccagcttcattcctaaatttcttgtttaaagttagagaatctggttctttgaaccctgaccatgggcctgcagtgatccattgcagtgcaggcatcgggcgttctggcaccttctctcttgtagatacctgtctcgttctgatggagaaaggagaggatgttaatgtgaaacaaatattactgagtatgagaaagtatcgaatgggactcattcagactccggaccagctcagattctcctacatggccataatagaaggagcaaagtatacaaaaggagattcaaatatacagaacagaacaatgactgagaagtacaacgggaagagaatagggtcagaagatgaaaagttaacaggactttcttytaaggttccagatactgtggaagagagcagtgagagtattctccggaaacgcattcgagaggatagaaaggctacaaccgctcagaaggtgcagcagatgagacagaggctaaatgraactgaacggaaaagraaaaggccaagattgacagacacctaaatgttcatgacttgagactattctgcagctataaattttgaacctttgatgtgcaaagcaagacctgaagcccactccggaaactaaagtgaggcttgctaaccctgtagattgcctcacaagttgtctgtttacaaagtaagctttacatccaggggatgaagaacgccaccagcagaagacttgcaaaccctttaatttgaygtattgttttttaacatgtgtatgaattgtagaaagatgtaaagaaaataaaattaggagagactactttgtattgtactgccattcctaatgtatttttatactttttggcagcattaaatatttttattaawtrgamaaaaaaaaaaaaaaaaaaaaaaaaaaaaaaaaaaa

SEQ ID NO: 7488 - DNA, 600 bp, Rattus norvegicus
gtgtgaaaatgtactaatttcggtcaaaacaaactatagcattcccacgccatacwcmksccttactcacagaattccttactagaaccaaagtagatggactgtactttgtggtagagccctgaagcatctgcagtagccttcatttaaaccacggaacagcagaatgtgattctgcgtctctcgggcagactggctggacatgtacgttaccatcrggaacactggccccaacacatcagstytctctctcstaactmtgctttttcccttttccctacattagcattccacggttcagggytagagtstaaagcagaagtccacaaacagaagggccctgactctaasaatgggtttgttgaggtgagcatgctgtttgtaaaccaaaaccaccatttcctcttgtrgaaastaagactcagactgaatcttmgaatattttttaaatgtctttttcacaatcatgtactgggaaaccaatttcmtactaaactgattaaataatgcatttacaatctgtaaaamaaramaaaaaaaaaaaacattgcggccgcaagcttattccctttagtgagggttaattttagcttggcactg

SEQ ID NO: 7489 - DNA, 600 bp, Rattus norvegicus
gttcctcattgtcctgggtgtccgggtcctattccccaagcgactggtcctgctcccgagccgcgaactccagtgttcgctccagaatcttgccctaagcaaccgacgccagggaggacaggatgccatgccatagggaagacaggactccccaaaggagaacaggataccatcagggagacaggactcccccgtggaagataggatacctccaggaagacagaatgccccccaggcagccctgggacagcgggaaacactagggaccaagctatccctggttcactcgggattttgttgggttgtgggcggggctcaggaaagattgtccctgctggtcctgctccacgaccacccacccggcaaggttccctcctagagaaccttgtcagagacagaacgggtccccacaggcgcattcttctttccaacagcccatggcgcagttcctgagactttgcatctggctcgtagcgcttgggtcctgcctcctggctacagtgcaggcagactgcagccaggactgcgctaaatgcagctaccgcctggtacgtcccggcgacatcaacttcctggtaaggttgaatttgtgatgaggga

SEQ ID NO: 7490 - DNA, 600 bp, Rattus norvegicus
ccagaggccattgccttccgcactttctcctcagccagtgatgtgtggagctttggtgtggtcatgtgggaggtgctggcctatggtgaacggccctactggaacatgaccaatcaggatgtcatcagctctgtggaagagggttataggcttccagcgcccatgggctgcccacgtgccctgcaccaactcatgctagactgctggcacaaggaccgtgcccagcggcctcgcttctctcacgtcgtgagcgttctggaggccctggtccacagccccgagagccttagggccacagctacagtcagcaggtgcccagcccctgcctttgccaggagctgctttgacctccgagcaggcggaaatgggaacggggacctcactgtgggagattggctggattccatccgaatgggccggtaccgggaccactttgcagcgggcgggtactcctcccttggcatggtgcttcacatgaacgcccaggatgttcgtgccctcggcatcaccctcatgggccaccagaagaaaatccttggaagcatccagacaatgaggtcccagctgagctgcactcaggggccacgccggcacctctga

SEQ ID NO: 7491 - DNA, 1400 bp, Rattus norvegicus
caatgaacctgtggagatgctgcaccttggcatcctggtacccagccgggagctgccaattgcgttccgtccwckrwwkgatkytsaggtwkmktytsrsmccaatcaagaccagcaatcttcccctttctgcaagaaagctgcttatggcttcagtattcctaagacggcgaacttcaaggaccagagcatgggacaacctgcgaaacacggcgcacacagccttctgcagaatgattctgacaatgatgtttactaagcccattactcagggaagcacatggggggcggaaatgccaggcaccgcccactacactttaccacgtgtttacattagccaatcagagcccctaagagcctgcgatcgctccatctttgtgacgtcaacggaggctgctggtcagccactttagtaaaggttattaagtgtttctgatgcaaaacccaaagcggcagcgttaattcccgtttacatttcatgaagaaagacctactatgctttaattgtctcagtgggactgacaaaacgtttattatactcggtttcgttcaatatttgaggaaacgcctgctgtaaaccgagctaaacattaggctctcgtaaagctatttttcctgcttacaaggggaaacattgttggaaattagagagtgtctattttaagaagttctacagtgaagccagctccttgcttatgaatgcctcgttggtgcggtcagtggactctaatctcttatttcattggtacctttctctgtggtttcagggtgtggagatagacgaatcaaaagtttctaagttgtgcgtgtgtcggcgcatgcatgggaatggctgtgggcctgagggtactttgcttcagtcatgtttttatataaagacatgaggtacccaatttagtatggaacttgtcctgaaatgtaatcatagggctttctgtgccttaacttcatctattcaaatcgaggactgtaatgtatgcgctctacccatgctgcctgtaatgtacagtgggacttgaaccccttggaaaagcacaatttcgtaagcgcaaaacagttatgcactactgacaaaattttaaaatgtttacatataacgtgcatttttttcaaccagtactgtttttctatagaggtttactgattatttctatatatttgataaagatttcccttttaggttatggttttagaatagtctgaaatatatgtacatttgaatgaatatgtgtgtgtggatgacaggtatatacttcgcctttcttataaaattatatttagagttataaatccagaaactaaagatgtagttttgtggtaaagagttttggcctggtctatgttggctcctgggttcaatcctcagcactactaaacaataaaaaataaaataaagaatt

SEQ ID NO: 7492 - DNA, 1193 bp, Rattus norvegicus
  misc_feature (609)..(609): n is a, c, g, or t
  misc_feature (613)..(613): n is a, c, g, or t
atyckgywmgmrkycagrsryrassdgkgawsmtggttcgctactcccttgacccakaaaaccccacgaaatcatgcaagtcaagaggctcaaaccttcgtgttcactttaagaacacccgggaaactgcccaggccatcaagggtatgcatatccgcaaagccaccaagtatctgaaggatgtcactttaaagaagcagtgtgtgccattccggcggtataayggtggagtyggtaggtgcgcmcagkccaaacagtggggctggacacagkgacggtgsmcaaaaaagagtgctgaatttttgctgcacatgcttaaaaatgcagagarkaatkckrmackwrrgggttwggatktagactctstgkwcattgaacacatccaggtgaacaaggctcbtaagatgcgcagacgrachtacagagctcacgsccggattaacccatacatgagctccccctgccacatcgaratgatcctcactgagaaggaacagattgttccaaagccagaagaggaggttscacagaagaaaaagatatcccmgaagaaattgaagaaacawaagctcatgscacgggaataaattyagcatwawtaaatgcggntvangtwamaaaaaaaaaaaaammwmmaamaarmmararrraammawsctrrcrrygawgswtrtcsmkktrstggrgstctgcaccagaactgtcaccaggattcccaccaccagccctgccactgggttggacaggatggcattgtccttgaagatgtccccagccactttccctccggccagttggaaggcagagctgagcacgtccagggagcagacaaagaggtaaaggaagcctagcatcaacggcaccttcaggagctttgtgccaacctgggcaagcttctgggacagcctgggctctggcttttgctcctcttcctgggccagcttggcagggagcgggtcatgacattccaggacctccccatagggacagctgtgctctgtgagggctaccgggctcagactggagatggcataggtggttgtcccaggaatcctgtgcaggacttgtgggctggggacataagcaaaggctgccccatgcaccatgtgtctcccacggactggaagtggggagacagccggtccccccaatctctcgctgtaggacatcatgatgggcacccacaatgagtc

SEQ ID NO: 7493 - DNA, 600 bp, Rattus norvegicus
aatttgaaactaccttttcttaaacgtccattcatctaattacgtcactgaacaaggacctgccagatgctatacagtgtcatggtgatgcaaatcactgatatttctcaatttttgccgaccgctaaggaaagtaaccatattcccacaatagatttcaagttactgcaaaawwammwammmmmrwtcatctctgctgaaatacgtggaagccaggcactcgcacaccyaactgacttctgctaggkattggcatttatcttagagagrgaaararararrraaararagtcgtcttgcatgaccactgtactactgcttgctaggaccatgatgttgaggtcttgctgcttctcgtgggtctcctgaatcaaaaaaaaaaaaaaaattttttttttttttttaaaaacaactttccttgggggcaaattaacaagtagggtgagacactttgaatttaaaaaaaaattatttcattatttgtgtaaagttaaaagacttctaaaaatatccaaggacttaggattatgttcactgtgaaaagaacactaagaaattttctcagcaaatatgatctgagatagtcaattctaagaattc

SEQ ID NO: 7494 - DNA, 600 bp, Rattus norvegicus
cctcacacttatgcagtctgaatgctgctagggaagtgggtgatccaggtgaggagccagcgtccaagcagttgacaagttgcccaagatctcacgagaactgacttttaccaggtagcctgggtgtgtctgtctagcagagtcctgagaacatgtctstaggtgtcccatcatgatcagcrtcacacacccagcctgtccctcgttggggcttccccacagcatactgccctcatagctctcaaacacgtggcttcaggaagggacmtggctcatatcgatgttctgmttagagagactgagcagcttcatcaaggagcagacaccttgcatctgccttaactggacagagaccccagctttccccattccaccagggcgaggaaacagcagagagaaaagccccaggagccaacagatcctgaagctstatgtgatgtagaagcttgggtcttwccatggggtcagggctgcmtgggagccaagttccttacagcagagggaaggatgggtgtgcagaaggctgaattcctgtaacttaagctttatctaaataaaaatccrgaattgtatacttgttctaaaaaaaaaaaaaaaaaa

SEQ ID NO: 7495 - DNA, 600 bp, Rattus norvegicus
attcagaacggmcaggtcaaggagcacggcacccaccagcagctgctggcccagaaaggcatctatttctcgatggttcaggctggagcaaagcgctcatgagctgggagtatttgaggtgctaagtatttctaatattggtgttcaaacatggcacgtaaccaaagttaaaaggttaaaagcactgttaaaggtaatttcatcaagacgagaagccttcagagacttcataattaaatgaaccgaaattgaaaaaaaaatcattaaacagggccacattttttaattgtattatgtgattcaagagaacatatagttttttttwaaaagaaatgtgtagttttgtttcagtttttttaatttctaccctattcccttaaatgatcataaaggctgtaaaaagcacctcatttttttaarykgcctataaaaattaaattttcatataattggagtcatctgttgaacatctgaatttatctattcttccaagtagagtgccataaataatttcagctttcaggaaaagtgggttttaagaacctctcgatttttttttttttttttgtgggatggttaagcaatttaagtaatttccgt

SEQ ID NO: 7496 - DNA, 600 bp, Rattus norvegicus
acatggggagaacatatggacttcgccctcagcttggcccagctctgacacttcagaacatgaggggtctggggaggtcagaggccccgtttgttcccagagcctgggccatcactgccagtggggttctcacagtgctagcctctatatttactatgccaactggtgcacccctagttctctttctccatcctattcccattttaaaaaacccgtcccaaactctcgtgtttcaatggaaagactgatttatgtctcaaaagacaagagtctcaaaggctgtgggtaagctgaaggcttgcctccctgacagatgcttagactacaggcttcttgggacaggtggccccttcctaagctcacaggagtggccaccactcttgaccttcactctgtctatagtcccgcctcatcctggatcttgtactgagcggcagctaaaaagtgttctacccagtgccctgtcactctagactggaaggtatggggcctgatgcaaggctgaccacaccaacaaacaccgtgtgctcctctccaagactgactcgtcctcattaactgtcaacattaaactaacagcattaacacaaaaaaaaaaaa

SEQ ID NO: 7497 - DNA, 600 bp, Rattus norvegicus
tcacacctgtgctctttaaacacagagacctgccaagacgccctctcgtccaactatgcccatgctgaagtcctcaccctctcttagagcggcaccaacgtgagaaagacagacagacagaaagccagaggcttaggaaaactctggaacccaggcacgaatcttttgctgggaaagatatccttgtttgcacaagactggtggaaaaatctcccatgcaactctcagggcccagagccatctgggtctgatactctgttctactgtacattgaagagacatatatgcacatatagtatctatattcatacatactatatactcttgtgtgtagtgcacgtgctactggtggtctgtcttcatcgttaggctatgtctcccaagtcctctgcccaccctgtttccccaccccctcttccttcatggattgtttcttctgaccatgtttttggagtgtcccaggagaggtatacctgggacctgcccctccagctgggtggtcccaggctgctctcacttgggggtgtcccctgccagcaggtggcctgctgaagtcagttgaaggcacgattgcccttctggggtcactgcttcactagc

SEQ ID NO: 7498 - DNA, 600 bp, Rattus norvegicus
attgtgtctgtccattatcgtctgtgagccctcgatcccaatactccaggtccatttcaaactgtataaatggcctctaatttttcttacattaaacagattctacstacwmaawwrrrwwmrwrwwawtagaagccatacagtgttaacctctccttttccacagtctcctccaccacccacctccctgttaagcattcaggagaaaggtccatgggcaaacctggcctattctatcagtcaccatggccgctgctttccagatggttgtggcccaatgccacttccccagtcagctgggtacccccagtgtaagctctatttctaaagttctgggactccacactggactttactctttaaccattttttccaggctggagagatggctcagcagttaagagcactgactgctcttccagaggtcctgagttcaattcccagcaaccacacatggtggctaacaaccatctgtaatgagatctgatgccctcttctggtgtatatgaagtcagggacagtgtacccacatacatgaaataaatctttaaagaaaaaataggtttaaaaaaataaaaaaaccagaaaccaaaaaaaaaa

SEQ ID NO: 7499 - DNA, 600 bp, Rattus norvegicus
atgtttgaggagcwtgttttgtatacaaatacaktgtwamtctgttatgtactktactaattcytacackgcctgtatactttagtatgaygctgatacataactaaatttgatacttatatttcgtatgaaaatgagttgtgraagtttgagtagatattactttactcacykkttgaactaagaaacttttgtaaagaaattttactwtawawawawrwwmmwwwwttttttcctagcctgtttctcgttccttgttamtgtaatttgttcatgtttggtgcatagaactggtaaaaatggcaaagttctgtgtttaatgtttcttcaaaatgtgtatatatttagtgctgcaycttakagcactttgaaatacctcatgtttatgaaaataaatagcaattaaawrawrmamrwmaawrwwwwmtttcctagctgtgcgccagactctgaacggccatgcaaatagtccattccttaccgggccattttaacgttgtggaatcctggttccaggggagggtgccagtcccactagctagagggataaatggatttgtggattccacagattacaaccagctattttcaatagaattc

SEQ ID NO: 7500 - DNA, 1400 bp, Rattus norvegicus
tctgagcattgggccttctgtgctcctggacaccaggggaagaacttcccagaaggcaggtgaaaccaagtttcaggggttcttgctgcttgggcccccctgggacctacgtgtgactggtcttctaattttgtattccttctctggagggaagattgcacaccaccaggctcaggccacccggagactgactcaccctattcaggtcagctacctagtccccagggctatgcagcagcctgagggaaggagagggagaaaggaggagagggagctgaggcagtaagaagaggagggggatgggatcggagggagaagagaacagaactttgtggtgatcttgagtcaaccttctcccccttgagctaagctcagtttgcagcactgatggtttcaggaaggatctgaaggasacakgtgaccaggatcccctggagggtgcgtggggctggtgagaggggcacaggtcatgatggagtcgtgggaatgggcttggctcctcaggagggatggtaagtcctttgtgtgggtcagtcctcccatcctctattcccagggctccagctgatgtagagactaacaggctgtcatggggagtagccactgtcccagctgggtcaggacttcattcttcccctcccagagatggtccttctggtcccagcagtgatggccctggaaaggttgaggcttctgctcaaacccccaccctaccctgcagaggcagggttctcagggaacccacaaatccagatgttgagaaagctggatcttctattcacctcaagcctcttggccataccctctgtctctgcgcctcagtatcctcatcatagtgagaatgtgatcccccagttctccagtctgttagaatccaggagggaactgagtcatgccaggcaagctactgctcaccacaatggggctgcgtaaggatacaaagcggccgtgttgtacctcaggctcagcccacaccttgccctttaagtgagtggcttcggtgtcagctactggaggtgaaggtattcatgagaaatggagtgcaggaggtcagaagccaaggaccatggagaatgcaagccaccccagaaggaggaagtttgcaaacataggcatgtatggggcctgaggcccrgcccaggggttcctctgagaaggagctgggtcaggaagtaagcagtccaaccttcctggatggggtaggtgagccacgtcttgcaaaggrgtgggtgaccagttgagaagttctttgctgcttctgacctgagctcctgtcaataaagatagtgactaagaaaaaaaaaaaaaaaaaaaaaaaaaaaaaaaaaaaaaaaaaaaaaaaaaaaaaaaaaaaaaaaaaaaaaaaaaaaaaaaaaaaaaaaaaaaaaaaaaaaaaaaaa

SEQ ID NO: 7501 - DNA, 600 bp, Rattus norvegicus
agagctatgrcacggagtcagaattcacgraagatgagttgccmtacgatgactgtgtgtttggaggccagcgtctgacgttataagaggaaagtgsccaaaggaacgtggacttgwatatttgtacaaatagagttttatttttctwaaaaaaaaaaaaraaaagaaaaagaaaaaaaataagaaaggatacttagcaccacagcacacagcgcctagccccgagcattctattgtggtgattcagctgttgttcttctcaaatttggggaaacagatcattgaaattcaaaggaaatgtctcctaaggttcatgtttgtgggattttttttttttttttgaggtgattttccagaatctgataaaaggaccacatttaatttatgtgcttttggttgaaccgccatagacgtagctgaccccagttgccctctacgtaagaaccaggtcgatagtggtatgtgcttaagcaccccagctgagatttgtaccactttcttgtaaatgttgtatatggatgtattttgttggtaattatttttggtacttctaagatgtatatttattaaacagatttttacagtatcaaaaaaaaaaaa

SEQ ID NO: 7502 - DNA, 571 bp, Rattus norvegicus; identical to SEQ ID NO: 3406

SEQ ID NO: 7503 - DNA, 600 bp, Rattus norvegicus
tggacagctggttagccatgtaatttatctggtcttaaatgataatggatttttgaagcactaaaagaaaacttagggtttatggttaaaataaaattcctggcctttaatattcttaawaaawmmwmamwwmmccagaaawrmwwmwwwwrwaggaaggggaaaatggaaggtcatattgaaggttctgggttctaatgagataataccttggactaggaaaagctgaattccatctgtgttcttcaatttgtgattttattctaaattgtgtatgataaattctagggctatagaaaccagccataataatttggcccaattttatagatgtataaacctgtgttagcataatcagcatcgttttttccaacacatacacattttaaaaaatgaccttaggtgaagtaaagaaatcccatcaggtcacgtcgagaggtggttaaaaatacaagttgtgtttaggaaggaaagaggtggttttgtgcttttcccccttgtttgttttaaagggcatagagtgtgattgaactttggggggccttctgcttattggatgagcattatctgtatcctaaaagacagtagccaccgtgtact

SEQ ID NO: 7504 - DNA, 600 bp, Rattus norvegicus
tacttgcttcactttgtgtgtccttatcatgtagtcatctgcctagctctgggykrmackmsragtctaccagctagtcctgctgcctgaaaccactgtctcttgagctgtcaactttcagatcykgmmrcraagtgtttttkttatgtaattatttatttgttcttaattggaaggtaggatgttcaaaattaaaggtgtcttaaaataawwwrmmmmhaagtctcagtaccaacagataagggtgtattcttgtatatcctgtatagatataatcatgcatttattgtcgaggagatgtttttatrtgggttcatttatcaacagtattccttttagcatccttcaaggcctatattgcatttcctagygygaataaacgatgtaatatagtcaawmrwwmmmwwarwratattcaagtgcattctctcactgcctctccacaatgctgcttaacgctgtttaataccttgcctggctccatgcatagtagctctcccagggggtgtgctttcaattctgacagccagatgagtgcggctggcaccatgccaagatgccacttctttctcctgttttgtaacaccaactggaaaaaaa

SEQ ID NO: 7505 - DNA, 1400 bp, Rattus norvegicus
gagagcgccatgcggtctgagtgggacgagggcagcaaggtcaagtacgaggtcacggtctccaatcaaggccagtcactcaatactctgggctctgccttcctcaacatcatgtggccccatgagatcgccaatgggaaatggctgttgtaccccatgcgggtggagctggagggtggacaggggcctgagaagaaagggatctgctccccaagacccaacatcctccacctggatgtggacagcagggataggaggcggcgagagctggggcagccggagcctcaggagcctccagagaaggtggaacctagcacatcttggtggccagtgtcctccgctgagaagagaaacgtgactctggactgcccaggcacggccaagtgtgtggtattcagctgcccactctacagctttgaccgtgcagccgtgcttcatgtctggggccgcctctggaacagcacctttctggaggagtacatgtccgtgaagtccctggaggtgatcgtccgagccaacatcacagtgaaatcctccattaagaacttgctgctcagagatgcatccacagtgatcccagtgatggtatacttggacccggtggctgtggttgcagaaggagtcccctggtgggtcatcctcctggcggtgctggctgggctgctagtactggccctgctggtgctgctgctgtggaagctgggattcttcaagcgggcgaagcaccctgaggccactgtaccccagtaccacgcagtgaagatccttcgggaagaccggcagcagttcaaggaggagaagacaggcaccattcagaggagtaactggggcaattcccagtgggagggctccgacgcacaccctatcctggctgccgactggcaccctgagttgggtcctgatggacatcctgtgtcagtcactgcctaacttctcctgtcccaagccagcctctgggttccttccaccctttcccaagatggctctttgggggtggagatagtggagtaggttgctggcttcatgttgaaataaggcaggttctgctttctcaggggcacagatctttcccaccgtgagaaccaccccttccmakcttctccgtacaatgctgtgagacacggggcatggctggaaggacaggcatgacctggtgcaggatggagaagaaggggtamtgagctgcctctctcacccaccctgtaagaccgtcttccccaaagtgcyttagacagagggtcagggaagagatcgtgtcactgtctcaggggcccttccctcctaagtctttcctgtgctctggccttagtgtgctgtaccagcccagcggatcttgtctatttattaaaaagtatttgmcawtaavmaaaawamraawaawwaaacaaacaaaatggaac

SEQ ID NO: 7506 - DNA, 600 bp, Rattus norvegicus
cattggccrgmayrwgrccagaaggaagggtacctgaagattggtgcctcaactcaggcagcccagaggctgaaggacaaagaagtggctttttggtctgagctcarggccaaggaggcagcagaggaaccatcccactggaaacatgttgagctctgaycaggagggtcagccatgtttgagaacctgragcyaaaggggaattattccacagaagwttttgtaaagamataacacttcttgtctttgagactataacatcacatggtattttgtacaaatgcattaaagggaaaatacttaaccttattgcttcaacttgtaaaataaaacattrwytwgaawwtyrmawrrwrwwmwwwraarcggccacttgttgacaatttcatggatgccccagagagcccaagctctgcgttcaactcacctccaggagtaatatcctacgtcagcgttgacagtcagtcgagcgatgtcgaatgtctcgatgacattactgtcccacttctttcggtattctatgtcgtgcaggacatcgtagagcgtctcagctggtacgtcacagcattccatcctgcacttgatcttgtgcagagttcg

SEQ ID NO: 7507 - DNA, 1400 bp, Rattus norvegicus
aagaatgcatggagtttaaagcagtggtttacagtaacacgttgcagtccatcctggccattgtgaaagccatgactacactagggattgattatgtcaatccgagaagtagagaggaccaacaactgcttctctccatggcaaacacactagaagatggtgacatgacgcctcagttggctgaaataattaaacgtctgtggggcgatccaggaattcaagcctgcttcgaaagggcatctgaataccagctcaatgactctgcagcttactaccttaatgacttagatagactcacagcccctgggtatgtgccaaatgaacaagacgttctacattcccgggtgaaaaccactggtatcattgaaactcaattctcctttaaagacttgaacttcagaatgtttgatgtaggtggccagagatcagaaagaaagaaatggatccactgctttgaaggagtgacgtgcattatattttgtgcagccctaagtgcctacgacatggtacttgtagaagatgaagaggtgaacagaatgcatgaaagtcttcacctcttcaacagcatctgtaatcacaagtattttgcaaccacctccattgttctgtttcttaacaagaaagatctcttccaggagaaagtgaccaaggtgcacctcagcatctgtttcccagaatacactggaccaaatacattcgaagatgcagggaactacatcaagaaccagttcctagacctgaacttaaaaaaagaagataaggaaatctattctcacatgacctgcgctactgacacacaaaacgtcaaattcgtgtttgatgccgtgacagatataataataaaagagaacctcaaagactgtgggctcttctgagcaacctgtttgctaccacttgtgatggctatagtctttttaagacataaaaaggtgctgtgtattagcttggatagatattaactgatttagaaatgtgactagcattataaaacaaaaaaattcacacaaaaatattactgtgatatcacgtatatctgggtacggttttcttggggaatggagggtagagttgctgatgttctaaatctgaaatctgatgtatctggtaactgtcacaatatacattcatgctactaaagttttttggaagtgagctgtaagtgaccaatttttaatcatagagtaaacctcagaatgtgctataacattgccccagctagattttgaaagcattcaaagtcatgtctgtactacagaaactgtacaaaatgaacaaggtataattttggtcatcagcctttcaattaggctgccacaagcacacacagtacatgcttttattgatgggaaattgtatgtgtaaaataaatatatatataataaaaaaaaaaaaaaaaaaaa

SEQ ID NO: 7508 - DNA, 1120 bp, Rattus norvegicus; identical to SEQ ID NO: 3412

SEQ ID NO: 7509 - DNA, 1400 bp, Rattus norvegicus
agcagcagcccccttacctgcacctggccgagctgactgcatcccagttcctggaaatctggaagcactttgatgctgacggaaatgggtacattgaaggtaaagagctagaaaacttcttccaggagctggagaaggcaaggaaaggttctggcatgatgtccaagagcgacaattttggagagaagatgaaggagttcatgcagaagtatgataagaactcagatgggaaaattgagatggcagagctggcgcagatcctgccaaccgaagagaatttccttttgtgcttcaggcagcacgtgggctccagcgctgagtttatggaggcttggcggaagtatgacacagacagaagtggctacatcgaagcaaatgagctcaagggatttctgtccgacctcctgaagaaggccaaccgtccctatgatgaacctaagctccaggagtacacccaaaccatactacgcatgtttgacttaaatggagacggcaaattgggtctctcagagatgtctagactcttgcctgtacaagaaaacttcctgctgaaatttcagggtatgaagctgacctcagaagagttcaatgccatcttcacattctatgacaaggatggaagcggctacatcgatgagaacgagctggacgccctcctgaaggatctgtatgagaagaacaagaaggagatgaatatccagcagctcaccacctacaggaagagcgtcatgtccttggccgaggcagggaaactctacagaaagsacmkggagattgtgctttgcagtgagccccccatgtaaaggggtgaagggacaggggctgcttctgcacctccyctaaaccctkcccsyyactsccmwramwmwmwwraaamwccttcccagacctctccacccctgcaacytgcacacaccagcctgtggggcaggaaaggagagatggaaagagggtggctggtakcattcctttgagytgcaccagcccaaccctggcctgacagacagctgtgcctgtggtgggtgggtcacacggttggtgggtaggggcacaggtggggcttcyctagtctctttgctgtgatgcatgagctcctcgctgtatgattagcttccgagtccaacagagtgcactccttcctcttgytgcaccagcctccttctccccaggccccccactgacccccgcaattccaggttctgtccaccggcttgctaatgatataactgtcttctcagagctactgtggagggtcattgccctcttcttgtgttcttgacttgtgtgttccttttattttggggtttccctgtcttctcgtttaccaaagaagagtttacagagaataaagtggaaatgtcctgccgtgramrmwwammmawwaaaaaaaaaaaaaaaaa

SEQ ID NO: 7510 - DNA, 600 bp, Rattus norvegicus
aggacaccttacattatgaaaaccaccagacatttcaaccatatcagtaacttgatcgcttcagmamkwskccgaaacgaggaggtcagtgcaagggcaagcaccatcgagaagtgggtggctgttgccgmcatttgccgctgcctgcacaactacaatgctgtgctggagatcacttcctccatcaaccgcagcgcaatcttccgactcaagaagacatggctcaaagtttctaagcagacgaaatctctgtttgacaagctccaaaagcttgtgtcatcagatggccgatttaagaacctcagagaaactttgcgaaattgtgatccaccctgtgtcccttacctggggatgtacctgaccgacttggcattcctcgaggaaggaacacccaattacacakaggacggcctggtcaacttctccaagatgaggatgatctcccatattatccgcgagattcgccagtttcagcagactacttacaaaatcgagccccagccaaaggtaactcagtacttagtggatgaaacctttgtgttggacgacgaaagtctgtatgaggcctccctccgaattgaaccaaaactccccacatga

SEQ ID NO: 7511 - DNA, 930 bp, Rattus norvegicus; identical to SEQ ID NO: 3415

SEQ ID NO: 7512 - DNA, 600 bp, Rattus norvegicus
ttccgtgactgcagttgtgtttgtcgctcttggaacctcagtgccagacacatttgccagcaaagtagcagctacccaggaccagtatgcagatgcgtycataggcaatgtcaccggaagcaacgctgtgaatgtcttcctgggaatcggcgtggcctggtccattgctgccatctaccatgcggccaayggggaacagttcaaagtgtcccctggcacgctagctttctctgtcactctcttcaccatttttgctttcatcaatgtgggggtgctgctgtatcggcggaggccagaaataggaggtgagctgggtgggccccggactgccaagctcctcacatcttccctgtttgtgctcctgtggctcttgtacattttcttctcctccctggaggcctactgccacataaaaggcttctaaaggaacaatcaagatataataaatttatatatatatgtatacatatatatatacataaaaattatgtataatgaacagaggaaactgacatttgtcatgttcacttaacctgctgatggaatccagcttcaagaacgtactctgtactaggccggaagtcagaaaccatcatctcc

SEQ ID NO: 7513 - DNA, 1400 bp, Rattus norvegicus
ctccatttccttctcctggaactaccagaacaacactgaagtcatgcagggtgtcagaaccttcccaacactgaggacaggggacaaatacacagctacctcgcaggtgttactgtccgccaaaaatgtccttgaaggttcagatgaatacttggtatgcaaaatccaccatggcaacaaaaacaaagatctgcatgtgccgattccagctgtcgttgagatgaaccccaatgtgagtgtgttcattccaccacgtgatgccttctctggccctgcaccccgcaagtccagactcatctgcgaggccaccaacttcagtccsaaacagatcwyagtatcctgrctacaggatgggaagcctgtgaaatctggyttcaccacagagccagwgactgtcgaggmcaaaggatccagaccccaaacctacaaggtcataagcacactgaccatcactgaaagcgactgrctgaacctgaatgtgttcacctgccgcgtggatcacaggggtctcaccttctggaagaacgtgtyctycacatgcgctgycagtccatstacagacatsctakccttccccatccycccctmctttgctgacatcttmctcaccaagtctgctaagctgtcctgtctggtcacaaacctggcaacctatgacaccctgaatatctcctggtcttccaaaagtggtgaaccactggagaccaacactaaaatcatggaaagtcaccccaatggcaccttcagtgctgtgggtgtggctagtgtttgtatggaagactgggataacaggaaggaatttgtatgcactgtgactcacagggacctgccttcaccacagaaaaaaktsatctcaaaacccaatgaggtggccaaacatycacctgctgtgtacctgctgccgccagcccgtgaacawctgatcctkagggagtsgkccacagkcacctgcctggwgaagggtttctctsctgcagacatctykgyrcagyggcttcagakrgggcaaccmttgkcmtcagacaagtatgtgaccagtgccccaatgccagagcytggggctccaggcctgtacttcacccacagcatcctgactgtgacakakgasgaatggaactccggagagacmtacacctgtgttgtaggcyacgaggccytgccacacatggtgaccgagaggaccgtggacaagtccactggtaaacccacactgkacaatgtatcgctgatcatgtctgacacaggtggcacctgmtattgaccatgstagcgytcaaccaggcaggccctrggggtcgagttgctctgtgtatgcaaactaaccatgtcagagtgagatgttgcattttataaaaattagaaataaaaaamaatccattcaaawrwmaaaaaaaaaaaaa

SEQ ID NO: 7514 - DNA, 600 bp, Rattus norvegicus
ctctaaaaagtttattaaactccagttagggagaaagttactccccttggcccttttgaccatatccatgtgtgtgtgtgtgtgtgtgtgtgtgtgtgtgtgtgtgtgtgtamayayrkrtgkrtgtatgtgtgtctgtagttggtctccagttcagatgcccttactagcatatattcccacagggtgtgggtttcggcacaacagtgacaaacttgaaagccaagtaaatccagttggtgtttttagagagcataattagtgaagatctggtttacctcaaagtcacaaagcctctcttcctgaattgaagtgcctggcccactgtcacaaattaacatgtggaaggcagctggttgaagctttgttcacaccattggagagtatgaaaataagtgttctaagacctctgacaccgaatccgtgtaaacctgttaaatgccatgtgttccaggacttagagtgtgtgagttggtaactcagtactttgtttactastgccgtgggagcgctgtgtgcacagtggakgtgggcgtgttttaggcggccatctgcwkagtcagcctttaaactgctgtgaactttgtcatgacttgaaga

SEQ ID NO: 7515 - DNA, 600 bp, Rattus norvegicus
ttattgttaagcaaattccccatcaccttgaaactaatcagaagagggaagaaacatatgctgtgctcctcagtgctaatgctgggatcattcacaaggggtttgcattcctaagtaaacttctgccttttacaacatggctcagtcatcctcctgaagctgcttgaggccaaccaacacttggtcttgttcttttttaatgtgtctgtgtgaccggtggtggatcctaaaaaatttatcaaactccagttagggagagagttactccccttggcccttttgaccatatcccctgtgtgtgtgtgtgtgtgtatgtgtgtgtgtgtgtgtgtgtgtgtacacatacatatatgtatgtgtgtctgtagttggtctccagttcagatgcccttactagcatatattcccacagggtgtgggttttggcacaacagtgacaaacttaaaagccaaataagtccaattggtgtggtatcaaagtgtttttagagagcataattaatgaagatttggtttacctcaaagtcacaaagcctctcttcctgaattgaagtgcctggcccactgtcacaaattaacatgttcctgtaaggcagttgg

SEQ ID NO: 7516 - DNA, 600 bp, Rattus norvegicus
gggctccagcatgggatcctgcctgagaccccaggcagccagccggctggaggcgctgaactcaggcattgggcattgtccggggctcctctgcctgtgcccactaccagcctccctctctgaaaagtgggagctcagtcatctcaaaggtagccccctagtggttgttctggggagactgaagtccatctctctcttatccacacttcctagctgcctgcctcctskmsscatactgtctccaagagcaattctgtcaggagagggaattgaaccacagatgtaaaggcacatgtggcagtctgctctttctagtagcaatcttttcagaaatcaaaagaaagaagtgcttaatgcttgtagcacttcccaatgttacagttcctctttacctcaggacagggttatctgtaaggtcacccctagtagacaatattactaagtcaagatgcatgtaatacccaaaacaaacccatgtgtgtaatccccaaaccgcccatcaatccctctgtttaatgaatctgactttctatatccccrrwmmwwrwraawawwmmgggtaacaatggtggtgagtarmmwraaaaaaaaaaaaaaaaa

SEQ ID NO: 7517 - DNA, 600 bp, Rattus norvegicus
gacggagaagaaggccactgtgctggtgctggctgtcctggggctctttgtgctgtgttggtttcctttccagatcagcaccttcctggacacgctgctgcggcttggcgtgctgtcgggatgctggaacgagcgtgccgtggatattgtcacccagatcagttcctacgtggcctatagcaacagctgcctcaacccgctggtgtacgtgattgtgggcaagcgcttccgaaagaagtcccgagaggtgtaccaggcaatatgccggaagggaggctgcatgggagagtccgtccagatggagaactccatggggactctgaggacctctatctcggtggaccggcagatccacaagctgcaggattgggcggggaacaagcagtgaacacaagccatcgggcaggacgactgccgagcgtgtgaggactgctgggacctgagcttctcagcctgggttcaggaaggagcttgaagcatcctagggaatcaggcaggtgattccagtcttgtctcacggcataagcgtgctgtgggggatggggaccctggagcatagaggggttgttattactggctggtgctctaaatcccatgagt

SEQ ID NO: 7518 - DNA, 1400 bp, Rattus norvegicus
tggctttgaagaatccagataaaaatgttgtcttctccccacttagcatctcagctgccttggccattgtgtccctgggagcaaagggcaacaccctggaagagattctagaagttctcaggttcaatctcacagagagctatgagacagacatccaccagggctttgggcacctcctccagaggctgagtcagccaggggaccaggtaaagatcatcacaggcaatgctctgtttattgataagaaccttcaggtcctggcagagttccaggagaagacaagggctctgtaccaggttgaggccttcacagctagcttccagcagcctcgtgtgaccgaaaagctcatcaatgacagtgtgagaaatcagacccaggggaagatccaggaactggtctcaggcctgaaagagaggacatccatggtgctggtgaacatcctcctctttagaggcaaatggaaggtgccctttgaccctgattacacatttgagtctgagttctacgtggatgagaagaggtctgtgaaggtgtccatgatgaaaattgaggaactgactacaccttacttccgggatgaggagctgtcctgctctgtgctggaactgaagtacacaggaaattccagtgccctgttcatcctccctgataagggcaggatgcagcaagtggaagccagcttgcaaccagagaccctgaagaagtggaaggactctctgaggcccaggaagatagatgagctctacctgcccaggttatccatttccactgactatagcctggaggaggtccttccagagctgggcattagggatgtcttctcccaacaggctgatctgagtaggatcacaggggccaaggacctgagtgtctctcaggtggtccacaaggttgtgctggatgtgaatgagacaggcacagaagcagctgctgccacaggagccaatttggtcccacgtagtggaaggccacctatgattgtgtggttcaacaggccattcctgatagctgtctctcacacacatggtcagcatatcctctttatggccaaagtcattaaccccgtgggagcctaaagctcccaatatctaatagttctacccaggtccatgagaccgagcctgcatgtggatctctgtgtataacccaaccttcaaactctgattggctgttgcaaagttggcttagacagtgacatcgactatctctgtggctcccagacattcaggagcgtttggactgtaatgtcaggttctcaggcccttgggagcatctgcacatgtttctgaacctggaatctgtcttttttcttcttcccttgtgactcctctttctgtgttcataccccaaacctagccactgtcaagtacacccagtcccaataaaggctttgagcaccg

SEQ ID NO: 7519 - DNA, 1400 bp, Rattus norvegicus
  misc_feature (956)..(956): n is a, c, g, or t
  misc_feature (1017)..(1017): n is a, c, g, or t
ggctctaatggcatcaaaggacatcgaggattccctggcaatccagkwcccccaggttctcccggtgctgctggacaccagggtgcagttggtagtccaggccctgcaggtcccagaggcccagttggtccacatggacctcctggraaagatgsaysargtggacatccaggtcccattggaccaccagggcctcgaggtracagaggtgaaagaggatctgagggctcgcccggtcaccctggacagccaggaccccctggaccccctggtgcccctggtccctgctgtggtggcggtgctgchattgctggagttggaggtgaaaagtctggcggcttttcaccatattacggggatgatccaatggatttcaagatcaacactgaggagatcatgtcttcactcaagtctgtwaacggacaaatagwgagtcttatcagccctgatggttctagaaaaaaccctgstcgsaattgcagagacctgaaattctgccaccctgaactcaagagyggagaatactgggttgatcctaaccaaggctgcaagatggatgctataaaagtgttctgtwatatggaaaccggagaaacatgcataaatgccagtcccatgactgtcccgcggaagcactggtggacagatgctggtgctgagaagaaacatgtttggtttggagaatctatgaatggtggytttcagttcagctatggcaatcctgatcttcctgaagatgtccttgatgtacagctggccttcctcagacttctttccagccgggscwcsmrgmwywttacataccactgcaaaaacagcattgccyacakggatcagsccaatggcaatgtaaaraagtctcykrrgcysatkggatccmatsagggrgaattcaaggbtgaaggaaatrgcaaattcacttacacagytbtakaggatggctgcactaaacacantggtgaatggagcargacagtstktgaatrtcaaacacgcaagsccwtgrgactccycatnwtagatwtcgcmccytatgacattggtggtcctgatcaagaatktggtgyggacattggccctgtttgctttktwtaagccaaactbtytgaaaccccmgcawaacadaaaccacayccatgtgttcctcttgctttaatytcgtcaacmmgtgaaagtgvccaactaaattccagttatttatttccaaacttwtggaaaaagcmtaatttgacaaaaatmgamtacaatttttytgctgtttcacccmccaatacagttcaaatgcttttgttttatttttttaccaattccaacttcataatgtytcaatggtgctwtaataaataaacatcaacacttttdtgdtraaaaaaaaaaaamaaaaaaaaaaaaaaaaaaaa

SEQ ID NO: 7520 - DNA, 600 bp, Rattus norvegicus
tatgccctccgttaccacagcatcatgacggttaggaaagccctctccttgatcgtggccatctgggtctgctgtggcatctgcggcgtgatgttcatcgtctactccgagagcaagatggtcatcgtgtgcctcatcaccatgttcttcgccatggtgctcctcatgggcaccctgtacatccacatgttcctcttcgccaggctgcacgtccagcgcatcgcggcactgccacctgctgacggggtagccccgcagcagcactcgtgcatgaagggggccgtcaccatcaccatcctgctgggggttttcatcttctgctgggcgcctttcttcctccacctggtcctcatcatcacctgccccaccaacccctactgcatctgctacacggcgcacttcaacacctacctggttctcatcatgtgcaactctgtcatcgaccccctcatctacgccttccgcagcctggagctgcggaacaccttcaaggagattctctgcggttgcaatggcatgaacgtgggctaggaacccccgaggaggtgttccacggctagccaagagagaaaagcaatgctcaggtgagacacagaaggg

SEQ ID NO: 7521 - DNA, 600 bp, Rattus norvegicus
agctgtatgagagaattaaagttcctgtggactggagtaaagttaacaagcctccatacccaaagctgggtgccaacatgaaaaagttagaaaactgcaactatgcagttgaattagggaagaatcaggctaaattctccttggttggcattggaggacaagacttgaatgatgggaacccaaccttgaccttggctgtagtctggcagctgatgagaagatatacccttaatgttatggaagatcttggagagggtcagaaagcaactgatgacatcattgtaaactgggtcaatggaacattgagtgaagctggaaagtcaacttctattcagagttttaaggacaagacgatcagctccagtttggcagttgtggatttaattgatgccatccagccaggctgcattaactatgaccttgtgaagactggaaatctaacagaagaagacaagcacaataacgccaagtatgcagtgtcgatggctagaagaataggagccagagtgtatgctctccctgaagaccttgtggaagtaaaaccgaagatggtcatgaccgtgtttgcctgtttgatgggcaggggaatgaagagtgtaa

SEQ ID NO: 7522 - DNA, 600 bp, Rattus norvegicus
ataatttctagaggtggtagcgattaataaattccatttggcagccagaataaaaataaaccaaagcactgtgaaatttgggagcaataatctttaaaagcttaagaaacaacctttacccaagaattatgcaaaatgacaataaagagcagagcagcattatacagcatctactgctgtcctcattgtgatgaccatactacctactgtgttactggcataaaattaatctttccagaaacctaacgttgttctagaaggcaaagtggttattggggaaaatacaactgtaatgtgcaatcatgaaaacagatgaaaagaaaataatatgcccccttgagtgtcacccatcaaataattactcatcatagaacatggtggtatatatccacacagcatttcctgaaaattaatgggtaaggtttcttcattatatttacccaaaaagggtctacatccatggattcaaacaatttttgcatgaaagagactcaaaacatacaaaggatgtttactgagcatgatcttttctaccatgattccttcaaccaatctactcggggcattgattagaatataattgacttttgttttgttcta

SEQ ID NO: 7523 - DNA, 600 bp, Rattus norvegicus
tgggcaataaacctcaacctcagggaaggtgtagtttgarccatggaggctacaagcgacacaggcttgggtgttagcttagkgtggakykrycrgattttgaaggtgctaagggagttttctcaggtagagacagtgatggttcctaaatagaattcctcctggagaggatgagtgtccagcttggttctcagttggttggcggcagttgtaaggccaggacattgatttggagtgtggctgaggggctgatttgattttctgcttttgttttktttkttttgagacagggtttcccctgtgtaaccctgactgttstggaactcacactccatagactaggctgccctagaactcacagagatctgcctgtctctgcctcctgagtgctgggrataaaggcgtacgccaccaccgcctggcagaggggcagatttataaccatttgccagctgmgactgtgtgtgctccgtgggacccaagccccctgttgtgacatataggtgtttctaagactctgagctattttatcartaaaggctattttgtmrtragmaaaaaaaaaaaaaaaaaaamkgatygygrscggcccctcgtgcc

SEQ ID NO: 7524 - DNA, 408 bp, Rattus norvegicus; identical to SEQ ID NO: 3428
  misc_feature (10)..(10): n is a, c, g, or t
  misc_feature (20)..(20): n is a, c, g, or t

SEQ ID NO: 7525 - DNA, 600 bp, Rattus norvegicus
aagtgtgacatttgtcttctgactttctcagataccaaagaggtgcaacaacatgctcttatccatcaagagagcaaaactcaccagtgtttgcattgtgaccacaagagttcaaactcaagtgatttgaagcgacacataatttcagttcatactaaggactatcctcataagtgtgacatgtgcgataaaggctttcacaggccttcagaactcaagaaacatgtggctgcccacaagggtaaaaaaatgcaccagtgtagacattgtgactttaagattgcagatccgtttgtactaagtcgccatattctctcggttcatacaaaggaccttccatttaggtgtaagagatgtagaaagggatttcggcaacaaagtgagcttaaaaagcatatgaagacccacagtggccggaaggtatatcagtgtgagtactgtgaatatagcactacagatgcgtcaggctttaagcggcacgttatctccattcatacgaaagactatcctcaccgctgtgagtactgcaagaaaggattccgaagaccctcggaaaagaaccagcacataatgcgacatcataaagaagttggcctgccc

SEQ ID NO: 7526 - DNA, 600 bp, Rattus norvegicus
gaccctgctggggatcatcctgtcatgctgggccttcatttgatctgggacatagcatcacrgcaskmvggscaactgtgttctgttagttatcaatattgttacttgtagcggcctgttgtgcatgccwccatgctgctggacccggmrmgmkdwrwtctrasyctcwsgtrmaksrwwtaakctgtkmggykmwarkgttyykkyhykwkktgtgtwactcacagcattgtgytaatgtaaagccagccgcaatgctgtaggccccaggttccctagcaagctsccaawccaaarggrtyrcsrccrgcttagytgaggcgtcccaaccaggcaggacccttgagggctgctgtgyccatggtgatggggtgaagttttgkccaaagggccaaaggctggtggatcyacacagtytgccctgtgacatgaatggctttgaggggctctggctggtggtcaggttggctttgtgtattctggttgacacaccatggcgcttcccagcacakacatgtgaccagcwtggtccaggaaaaaaamaaavamaaaaaamyctmgwrmyraawtyggtaaawtcccaaaaaaaaaaaaaaaaaa

SEQ ID NO: 7527 - DNA, 517 bp, Rattus norvegicus; identical to SEQ ID NO: 3431

SEQ ID NO: 7528 - DNA, 600 bp, Rattus norvegicus
atgggyamgwkkcgtgktctccgtactgccsrraagctccgcagtcaccgacgggaccaraagtggcatgataavbagtacaagaaagcccacttgggcacrgcmcwsragsccaatcckkttgggggtgcctctcacgcaaagggaattgtrytkgaaaaagtaggggttgaagccaaacagycaaattytkccatccggaagwktgtcakggtgcagctcattaagaacggcaagaagatcacagcrttcgtgcccaatgacggttgcttgaacttcattgaggaaaatgatgaarktytggytgctggatttggtcgcaraggccatsccswggstgatattcytggrgtccgctttaaggtggttaaagtagccaatgtgtytcttttggctctgtacaaaggcaagamsgaaaghccaagatchyaaaattttgacaatggaaacmgmmtmatmaaytttwtwtccvrmaamaaaaaaaaaaaaamcaatggcggccgcaagcttattccctttagtgagggttaattttagcttggcactggccgtcgttttacaacgtcgtgactgggaaaaccctggcgttacccaacttaa

SEQ ID NO: 7529 - DNA, 600 bp, Rattus norvegicus
ggccgggctcggcctgggcgggcggggacggtagccggcgtgggccctgcagcttctcgtgtctgcgggtgctgtggagtcccgagtgtcccacgcggccktssccaggkycggywcgggkmmykcggcwyakvsdckwsbctshymrkcacsakggtgcgaatgaatgttctggcasatgctctcaagagcatcaacaacgcggasaagaggggcaaacgccaggtcctcatcaggccgtgttccaaagtcatcgttcggttcctaactgtgatratgaagcatggctacattggtgaattcgagatcattgatgatcacagagctgggaarattgttgtgaacctcacaggaaggttgaacaagtgtggagttataasccctagatttgatgttcaactcaaagmcctaragaagtggcagaacaatytgctccsrtcacggcagtttggtttcattgtgctracgacctcggctkgcatcatggrccatgaaraggcamgacgawaacatacaggagggaaaatcctggrattctttktttaaatgtaaagcataaataaaaagcctctgtggactgtgaaaaaaaaaaaaaaaaaa

SEQ ID NO: 7530 - DNA, 1400 bp, Rattus norvegicus
atcatggccaagatggggcggcccaagaagcgagcacagactctgcttttcagccacaatgccgtggtggctctgcgtgacggcaagctctgcctcatgtggcgcgtgggcaacctgcgcaagagccacatcgtagaggcccacgtgcgagcccagctcatcaagcccagggtcacagaagagggtgagtacatcccactggaccagattgacattgacgttggctttgacaagggcctggatcgtatcttcctagtatcgcccatcaccatcttgcacgagattgatgaggccagcccactgtttggcattagccgtcaggacctcgagacggacgactttgagatcgtggtcatcctggaaggcatggtagaggccacagccatgaccacccaggctcgcagttcctacctggccaacgagatcctctggggtcatcgctttgagccagtgctcttcgaagagaagaaccagtacaagattgactactcacacttccacaagacctatgaggtgccatctacaccccgctgcagcgccaaggacctggtggagaacaagttccttctgcccagtgccaactctttctgctatgagaatgagctagccttcctgagccgagatgaggaggatgaggtggctacagaccgggatggccgcagccctcagcctgagcatgactttgacaggctgcaggccagcagtggtgcccttgagcggccctacagacgggagtcagagatttgagtgcccttggcttagatgcagcaccaccctgaccacgataggttccatgtcccttggggacctgtgtttgagcagagcaggccgaattccttgggtcacagactcagtaacatcttagtctttttcatgttttcttgcaatagcttgggaaagttggcaggagggtggatkgccagaatgaccagctcatggcctcggaggctgatgtatacacacgggcaaggaagtgatttyttggggtagggttgtacaggagttggggactytgytggaggcctcgggagcaggtcctasccatggtgggagaaggctgtgtatgtacacttcattggtttttaatttgggcaagactgtttacaaacaaaaacaaaaaaaacccmcaaaacmcaagaaaacmctaacaggtggttcaatttttaaaattcatggtgtagggacagctggaatattytactcagcgctgcgaagcaatcagttgtwtggrgacccctgaaggttytcagaggtcgggtttytccctcacgtgggccagggctgcaagttgtcattyttaaggrtggatcaggcagtttgtgrccatgttacgatcctaataaagtatytgggtgtctytgggggtggggcccccttgggtgaaaaaaaaaaaaaaaaaa

SEQ ID NO: 7531 - DNA, 600 bp, Rattus norvegicus
gtctttttcggtatcccagctgtactcatgtcccgtagcctcagagatgccggagcgcccacctacatgtatgagtttcagtatcgcccaagcttcgtgtctgaccagagaccccagacagttcagggagaccatggtgatgaaatcttctctgtatttgggactccatttttaaaagagggcgcctcagaagaggagaccaatcttagcaagttggtgatgaagttctgggccaactttgctcgaaatgggaacccaaatggagaggggctgcctcactggccaraatatgatcagaaggaagggtatttssagattggtgccaccacccagcaagcccagaaactgaaaggagaagaagtggctttctggactgagctcttggctargaayccrmytcagwcagamcacwytgaaswcacakarrtgggtctctgccagcctcagtaccagaggagcaaagatggggctattccacaaaggatggctatttgccaaagatgaatcttacagaggaaactgcacaattgtacagttggggtatttgtatctcaactttgaaataaatttccttttagaaakcaaaaaaaaaaaaaaaaa

SEQ ID NO: 7532 - DNA, 600 bp, Rattus norvegicus
atctatgtcattgatyccactgatgaggagaggctgtcagaatcaaaagaggcatttgagaaggtggtttcgagtgaagcactggacggtgttcccatcctggtgttggccaacaagcaggaygwggagacttscctcyccattcctgacatcaagactgcatycagtgactktacctgcaagattgscaggcgagattgtttgacccaggcytgmtytgccctcacaggcaagggarytcgagagggcatcgaatggatggtgaagtgtgtyswacggaatgttcaycggccrccacggcagagsgacatcacataagcaccttcatcctcacagtcytggactgtycatcccctagtgttggaagagtattytctgctggcttctgtcctcstgawrmwrrrrvwwrarmwrggtttgtctgttcawtytwawhtgcywtatgtttyctcwaaramaaamwwhhmwmwvwrwmwrrraaarwrwarrwawwmaragacaaamawrrrrwamawwracagtccagagctacatgccctacacttccatcccctgacccagattagagccctccttacaggtcaaaaaaaaaaaaaaaaa

SEQ ID NO: 7533 - DNA, 1400 bp, Rattus norvegicus
aagacttccttagctacgtgttttgctcaagagacatttgggaaacagtacaagcagactatwggactggatttctttttgagaaggaktaccttaccaggaaatttgaatgttactcttcaagtttgggatataggagggcagacaatargtggcaagatgttggataaatacatctatggagcacagggaatcctcttggtatatgatattacaaactaccaaagctttgagaatttggaagattggtattctgyggtgaagacagtaagcgaagagtcagaaactcagcccctggttgctttagtaggcaataaaattgacttggagcatatgcgaacagtaaaacctgataaacacttacgattttgccaggaaaatggttttagtagccactttgtttcasscaagacgggagactctgtcttyctgtgttttcagaaagttgcggcagaaawyctgggaatcaagttaaacaaagcagaaatagaacagtcmcagagagtgktgaaggcagatattgkwaactwcaaccaggagcccatgtyaagaactkktaatccacctysgagctycatgtgtgcagttcagtgagcacacactgtattgatagttctggctgctcttccctggattgggcccaagctgcctaggaacatgttttatcagtgactgtctctgtagtcagctcacacttcctcctgctctgctccttcatcccttagtcgcctcagagtatcgggcagctccctggacaggaaggaattcagatttggaaccacatgttttgaaatctgaatggaaagtccattytytggattgagactgcctcctcgctccagaagaaccatgtkgcttctttatctcttctttttycccmgatttaaaaaatttaaacrgatwtgargatgcyccacgctktgatcatmattttytawhtgaacttgtwtatgtgaacgtgtacttkaragcactgatggkggaagttatcaaraaggkgttcctwtgctkgctwttaagagtaamctatmcaaagctgcwtytgattgaargtscttywratrwkgswksrrymrraakrttttytywtttttaaaargagcctaatgkgkttawattgkagkttawwactywyhagkmcysmkkattdrawawdrdawwwwwawyamhrdatsabggbcawtgcatattttatcawatttggcttarakggctttatgaattttgataaatggttcagctgatccyccacatggaatttytcctacaggctgtatgagagtgcttccagatgagtcatgawayccttggatcattgtggatcgatcacwctgwaccysaygtthtgatgtttttctcmcataaataaatttatttaaattmmaaaaaaaaaaaaaaaa

SEQ ID NO: 7534 - DNA, 600 bp, Rattus norvegicus
atctttggggtctggggcctacagatcagtaggtgaatggctagaagcaatcaaaatgggccggtacacagagattttcatggaaaatggatacagttcaatggacgctgtggctcaggtgaccttggagtgagtagtttktctgataattttwacatagctgttggggcaagaaaagtatattcagacaacagagtggatgcaatsaagggaaaacagtttacctgtgtccatatgtgtcagcttcaaagaagcctcatctttttttagcctgtgctgttaacagctgcatggttcctgcttcttgtgtccagtatctttgctattttgttcaycaaacagcacttgrgagtttggataattggattacaacccttggcaaagtaytggtactttgtgttktgaaaaaaaagacatttccttgagtttttawactggwacttwtgtyacwtgaatgtaaatwtaaaacaaaacaagytktaagcacaattggtgtggttagtcttgtgtaacaaaaacwtaaaargrttwaaaaraaaraaaaraaamaraaraaaaagtgraaggaaagggaaagaaaggaaaaaaaaaaaaaaaaaa

SEQ ID NO: 7535 - DNA, 1400 bp, Rattus norvegicus
gtgatcactggcacatcatttggagtgaacgtcgattccctcaacaatccacaggatcccttcgtgcagaaagccaagaagatcttaaaatttcaaatttttgatccatttcttctctctgtagttctgtttccatttcttactccaatatatgagatgttaaatttttcaatttttccaagacagtcaatgaactttttcaaaaaattcgtaaaaacaatgaagaaaaatcgccttgattcaaaccagaagaaccgagtggattttcttcaactgatgatgaatactcagaactccaaaggccaagagtcccagaaagctctttctgatctagaaatggcagcacaagctattattttcatttttgggggttatgatgccacaagcacctccatttccttcataatgtatgaactggccactcgccccaatgtgcaaaagaaactccagaatgagattgatagagctctgcccaataaggcacctgtcacctatgatgctctgatggaaatggagtacctggacatggtggtgaatgaaagtctaagattgtacccaattgctaccaggctagacagagtctcaaaaaaggatgtggaaatcaatggagtttttattcccaaagggactgtagttacgataccaatctatcctcttcatcggaaccctgagtactggctagagcctgaggaattcaaccctgaaaggttcagcaaggagaacaagggcagcattgatccttatgtatatctgccctttggaaatggacccaggaactgcattggcatgaggtttgctctcatcagcatgaaacttgctgtcataggagtcctgcagaacttcaatatccagccttgtgagaagacacagatccctctgaagatcagtaggcaaccaattttccaaccagaaggacccatcatcctaaagcttgtgtcaagagattaaacccagatttggacagtgaatttccctcaggaaccatgttataatcttcaaggagactgtttcacagaacaccagagaatttaattaacattagaataagagcaatataatataggcttcatcaattttcctcgattactgagtattcagaaattcactgaacaggctcagtggctctgcggtgtatcatctattttatgattcaaagaaaattattaactcaatggtagatgtggaggttcatyatatgattcttgtggaccatctatacagattccagttagttccatcagttctgtattctaactgcagtagctgtttctctagagttctatcaatagaaactgttgtattgacagttagtaaatgtgtagcaaattttctctttgtaaaaatatatgatattaagaatataaataaatatatctttcawgaaaaaaaaaaaaaaaaaa

SEQ ID NO: 7536 - DNA, 1400 bp, Rattus norvegicus
tttgtcctaccacattccttttctcgtgagctccattgaggatttcaaggaccacattccacgggaaaccgatatgaargttgcaatgaatgtgtatgagctgkcatctgctgctggattaccatgcgagattgatcctgccttarkagyagmkstttcctcacaaaatcagagaacattagtccaagaagaagatataaagatcgcttgcctcctgatggtctttgtagcagwttccctgcctacactggccagcaatgtgatgtcccagtacagccctgcaatagaargacactgcaacaatattcattgtctgccaaagccatcaaccaaattgctgctgctttgtttacaattcacaaaggaagcattgaaagacagacttaaagaattcctggcgcttgcgtcctccagtctactkraaatcggccaagagacagataaaactacmacgagraatagagaatctgkttatttgctactggatatgattgtacaagaatcaccgttcctgacaatggatctcttgraatcttgtttyccttatgtgktgctgagaaatgcataccacgctgtctacaaacaaagtgtcacatyctctksatagaatgctcacyycagacaagcacgagtttctgttgccttgttctatctgtaaactgtggaactattttaccttaaagcctgaaaacagttttgtggattaaattttcttcatgctgttgtattttckgmwcrwkggcttcctaacatggttgtactacaatatatttggttgattgagttatmcattctcaaaacycagtgaattctatgattttagagtatcatttgtttgaacyaccattaacaytatgtttttgataactgataatgaaammcctkgcttgttwatttctgaaaaagaattgtawttagtgattattttagatagtgatatgatagcacccatctgwgtgtaaattatttmatatagskagagttctgatctgtacvtamggttctttytgagatcaagactggatgtgcatatcggtgatgcttacgaawacatttytactktattytgracatttgccaaamtaaatacctaacastgtttaaccttrgaaatgttrgacaacttgagcattggaagcagamtcagtttctcaaacagcagmttatgctgttgcctgtagaaagcctactgatcctctcacccgtgmtgcctggtgggcatmtgcastaycttggaccctgytgtataataaacaaccagactcttgtcaactgttgatacagatgttagtcccgaatcmctttttatatgttttaaaatttgaaattcaagtgwmcctgccataacatmaataaacmytrgrcygtwwvvhwwwwwraawrmwaaaaaaaaaaaaaaa

SEQ ID NO: 7537 - DNA, 1400 bp, Rattus norvegicus
  misc_feature (591)..(591): n is a, c, g, or t
  misc_feature (720)..(720): n is a, c, g, or t
  misc_feature (793)..(793): n is a, c, g, or t
  misc_feature (796)..(796): n is a, c, g, or t
  misc_feature (805)..(805): n is a, c, g, or t
  misc_feature (846)..(846): n is a, c, g, or t
  misc_feature (946)..(946): n is a, c, g, or t
gaaccccaaggccaaccgtgagaagatgacacagatcatgtttgagaccttcaatgtgcctgccatgtaygwggccatccaggcggtgctgtccctgtacgcttctgggagaaccacaggcattgttctggattctrgcgacggtgtgactcataacgtccccatctatgagggttatgccttaccccatgccatcatgcgtctggatctagctggtcgggacctcactgactaccttatgaagatcctcactgagcgcgggtactsstttgtcaccaccgctgaacgtgaaattgtccgagacatcaaagaaaaactgtgttatgtcgccctggwtttkgwgrwksasrtggcyamyrytgcatcttcctcctctctggagaagagctacgaacttcccgatggccaggtcatcaccattggcaacgagcgtttccgctgtcctgagactctcttccagccctytttcattkgwaygrarwytgccggcatymamgrmackamttwtaacrgcatcatsamswktgacatcgakatcsscaaagacbtktacgcyaacaatgtcytgtytggaggcaccvcyakkyacvnksgrmwyghkratsgtatgcaaaaggaawtwacygcabtggctcccagchccrtgaagattargmttattgctccccbtgrgcgtaaatactctgthtggaktgggggctccatcytggcytctvtgtntacytyccaacaaatgtggatcagcargcargagtamgwtgagsccggsccytccattgtccacsgcaagtgnttntgaggcgsntmchttacastcaggmcgacagtattgtgcttggamtcctntgagsccctytcccatytmccatcagtcattgkacagtttgtwtacacacgtgcagtttgtktgtgcwwcaaatatttattgckktataaataarccagnscaggacttgchvmhhhhaawwarvmmmrwmwwmwwwcttgtgtgagtagscctggggtgaagaaggtrttctgtctgatacccccrgcatcacaatagtagagcaacacgaagtttacccaatagattcatgtggcattgaactgaactaggagttacagagctaccctttgatttcaccttttaggatggagctatgaagacttttgaatcttataagcaaaagattagttctgtggtttagttgttaggttggttctgtgtgagggataaagatagataacatagttatctataactagttgccatatttagtattaaaatatcacatattgaaatatgaatatcacatatttcatagctttatagaaaatgcacatgttggtaataagagggtcaaggctattaaatgagcttatctctatgttttcmttgtaaaaaaaaaaaaaaaaaa

SEQ ID NO: 7538 - DNA, 600 bp, Rattus norvegicus
aggactttctcagaaatgcattttgggtatttcctcccacgctgctttactccatgacacctgatgaccaagcctctttcagatgttcagatgtcagagacggccaagcccagtcgctcatgtctgccaaacacttccatttgaccttcaccttgaaccaagagcatcctgcattatatggagacgaaagaccagtgtttgtgtcttcccagagatgggaatctctgtacttcacattccggttccacatccactctccatgtttctgttcatccatcaaacaagacctcattctgtgactccacaaacagcattgcctagtcatatacccatctgtccattccagaaacctggagctcagtgttccctgaaccccgtcttgttcacccctgggtggagaagcatccctttcagattctgccccttatgtttcctgggtctttattaccgaccgtcctagcagaaatgatgctgatggttggtgcagaagctgttgaccagggtggtgaatatggtggggacgggaatgtcaatgaggacactcttcacaaggaaaccttttgtaataaagttacacattcttaaaaaaaaaaaaaaaaa

SEQ ID NO: 7539 - DNA, 600 bp, Rattus norvegicus
aatgaaaagtcgtttyccaaattgactkrccagtcatyactcatgkgtyytttccaaacatgkatttatgtatcaagtaaagccattaaatgactattttgataawaawawwrdwwwwmwwtttacgaagcactwgagratgsmcagatatmctttgtggaccaatwatkgatatatattataagtatatattaarratatatataggtatagcagagagcaattcataagcgtgcacaaagattgaaaaattcgcctgagctkkttatgtttttwtataaaatgratagagraaatagacamccaatkgtttgaatatwmctcytatgtttgtaactggaattaaaggatagtatttttatccacaaccggctcgaagatacaataatggccatttgtcaaaaaaaatgatgccctgcttcacgagaattctgaggtaatgactttggaattgctgagggctttttttcttgtgagtctttgggcagctgtttgaccccagcttactaactaaaggggcattgtccactgggtgcggacaattccacactttattttcttgactatactttatgtgatctgctctcctaagtccaacct

SEQ ID NO: 7540 - DNA, 342 bp, Rattus norvegicus; identical to SEQ ID NO: 3444

SEQ ID NO: 7541 - DNA, 356 bp, Rattus norvegicus; identical to SEQ ID NO: 3445

SEQ ID NO: 7542 - DNA, 600 bp, Rattus norvegicus
ttccaasgtttaaattatgycaggtttgaagtctcsttttagttgtttaaataagtaatattttcaaartaataaaaawcaatgwtatctcttggaawawwmwrwaaaawrtagctataaaattatattttvtactttararwwwwwammwwwwwgctcttgtgtgttttacaaatcaattatctacatgaaataacaatgttttgaaagtgwmmawrrwmwarwmwmaaaatttcctttataattatatgtataagagcaaagctttgttttaattagaaaatattattattttcatcttgggtattattatctccatgtaacttgtaaatataacgttttgcccaatttttacacattttctcattaatttccttatagtctttgaagtttcaaaaataacatgatttcaaacctagaaggctgacatgtatagccttcaagaagcagatgtgctccttgaaattcactaacatatacttttgctgggccttactttcttttgttttatgtgatttttaaggtaattgtgtaatattggaattttctgaaactcagctggtacatgtaactaaaatattacaaggtcatgaatggtaa

SEQ ID NO: 7543 - DNA, 443 bp, Rattus norvegicus; identical to SEQ ID NO: 3447

SEQ ID NO: 7544 - DNA, 1002 bp, Rattus norvegicus; identical to SEQ ID NO: 3448

SEQ ID NO: 7545 - DNA, 1400 bp, Rattus norvegicus
  misc_feature (1051)..(1051): n is a, c, g, or t
cagttgcttctgcagtcgctctgggctcctactccttgctcctcaaaacatcaaaacgtacttcctgcccagccacttcctctaggcccagctcatcccctctgccctctttcattgaggcctcttctaaggtcttagacaatcaggagacacccacaccccaaggttggtggggagctgtccaacaacctgtggaggaagaccacacattattatctgaggttaaaaggatatctaaaaccatcacacacacacacacacacacacacacacacacacacacacacaacgtcacctgtttaaagtcagcgtattgaacagtataatggtgactgatagtcatgacttaattacaaggggataaccagccctataatggaggatccatcagaggagagaagggtcaaatgctcatttttaggatccacaataagatggggaagagtcacacctcagaatggcaggactgaaggggcagccccccttccagcttcacctgaccaacatgatctgtgccccttcttgggcttttagtatcaaaggggccagtgtggtttccaaaccatgagaaagagcctctgcccatccttggatccaggtatggaggtttgttacacasasgcagrggcagactgtgccagccgtggacccacccactaacccagacaagggtgtgatctccataactggtttgtccctaaagctagagtttaaggtaccagctcttctggagatggtcactggggtacaggaagccctagccaggcccaaggcttacctacactagacatagtttcctctgcttccacactgtgggaccacaccttatactgatggtgcctgtgaygtgtagcttgkyygagagcaaccctgtyttytcctttttaaaggtgatgtygsctasgwrsagchatysggttywykagrctcwytgggaaagasccacgggtagccagtggcaagawccagttgtgagatgttascctgaggtaggtcccttcccaratgccttagrccsatgactmtgtgtgcwcttaggagcwagcttccntgaaaaggacagggtggggtggggtgcttagmctgtgccatgggttccagatcctgaaatccacaaaasccaaaccagmttgtttgaaccagggrgtbccacatgtgragcaaggytgccstgcccagagctyttgrkaagcacctgcatgcagataccatytggcctytwtaaagggtcctcagcaagaagcaagcatgrgtggtgrccaacctgaccaataaagttaktttwtaagtgcawmwrmaaraawrrawwmrwwrrwggcagcccttggtgttgccttggggcatctagtcagtcacacagaccttgaacggtatcaactctttcttttataagtgctttt

SEQ ID NO: 7546 - DNA, 600 bp, Rattus norvegicus
attaagaacatgctttactatttaaagcatgcctattacttttatgacatgtaagcagaatgccttattttgtagttctaacttgttgctacaggatttgaacttctgtggtacagttaagagagcttgaaaaagataaacccctgttgtcgaagaagaaagctgatggtgcgtctgttatgcagtagggaccataactgctgtttacattcagtgggtatggctttcgtgggatacacagctagggtttgtgaattctttacatgatagcattatcattttatatttttttcaaggataaaccaatgcatagttttcttctatgggggatagagagctkkgtgawgtaatactgaaaacctcaaaggttatgttgattcttcatttttgcctttttcataagtgtstttataacatgtatctttaaagcagtttgcgtstttggaaatatgtaaccagasctgttagtgttgcttgtgatgcttgagttakggtcagtwtatacatgtwcacacctagatagaagcatgyasattygtatttygtctcgtaaaattttmtttsaataaattcttcctgargtwamrrraaaaaaaaaaa

SEQ ID NO: 7547 - DNA, 1400 bp, Rattus norvegicus
tgtgccttattggagaatcttttgatgactacagtgatgacgtgtgtggagctgttgtcaatgttagagctaaaggtgataagatagcaatatggacgactgaatgtgaaaacagagatgcagtcacacacatagggagggtatacaaggaaaggttaggacttcctccgaagatagtgattggttatcagtcccacgcagacacagctacaaagagcggctccaccactaaaaataggtttgttgtttaagaagacaccttctgagtatcctcacaggagactgcgtcacgcaatcgagattgggagctgaaccaaagcctcatcaaagcagagtggactgcactgaagctgactccatccaagtgttgctaagatataagagaagtctcattcgcctttgtcttgtacttctgtgttcattctcctccccaccccaatttttgstagtgtgtccacatcccaatcaaagaattacagtatacgtcaccccagaacccacagatgtgttcctggcccgctctgtaacagccggktagagttaccacgacacacacttgcctttccacagtattcgaaaaagaacgtgcatttctgtcaccttagcaggaaaagatctggttttgttccactccatgcaggagcggatttgctggtgtgakagtctaagtacagctttctagcaaccttctgttttctgtcacagcattgtccttgctgtcctcttgctgatggctgctagatgttaatttatttgcttccctccttgataacattagtgattctgatttcaggtttttywtttktttkkytkkydttwttwkccbcaygtaacattggtgaaggatccaggactatgacagaaaggtggaataaacattacatttgtgcawwmwwwrrhaagwwwwwwtgttttttgtaactacaaagctttgctacaaatttatgcatttcattcaaatcagtgatctatgmtgtgtgatccctmaacataattgkggactakaaaaatgtaacaccataattacattcctaactagaattagttgtctgctwttgtatctttatgctgtactttaacactttgtattacttaggttattttgctttggttacmatkgctsawgtwgraaagcggyccmatccatattaaracagtgtacaaaactgtaaataaaatgtgtmcagtgrawwrwmwwwwvrmmaamhadmhhwvwhmwwwwawwwcwccrkcyctmgwrggaatctgtactccatattgcaaggcagtctcttgtgtcttcttagtgtcttccccatgmacagcytaagtttggagcactagtttattattatgtttattacaatttttaataaattgaataggtagtatcacatgtaattaaaaaaaaaaaaaaaaaa

SEQ ID NO: 7548 - DNA, 600 bp, Rattus norvegicus
ccttgakcagctaacaagaatatttgaaactctgggtacaccaaccgaagaacagtggcctgacatgtgtagtcttccagattacgtgacgttcaaragtttccctggcatccccytgcagcacatcttcattgcagctggagacgacctgcttgagctcatacaaggcttgttcttattcaacccatgtactagaattacagcttcacaggcgttgargaccaagtacttcagtaatcgtccagggccaacacctggatgccagcttccaagaccaaactgtccagtkgaagcrttaaaggaacagtsaaatccarccatggcracaaaacggaaaagagcggaggccttagaacaaggaatattgcccaagaagctaattttttagttgcagcgaacaatggacagtttcactgctgaaagaaatgatccaaaggcaaataacggaaaaaaaatagggaatattaaatactatataagaacttgtaaatactctacagatgtaaaatatgtaaagctatgggttatttttattaaatgtattttaaaataaaawawwwrwrawwwawgattcgagtacaagaataaaaaaaaaaaaaa

SEQ ID NO: 7549 - DNA, 600 bp, Rattus norvegicus
gacgagaggaggagaggaggagaggaggagagacctctgcgcatcctgcgtggggaaaggctggcactcacaggctgggcccgtgttccatccagggcgggctgaggagggctggggaggctgtaggccacgcgaggcaggcaggcaggcaggcagcccccgggctggggcgtgcggatggggctcgggcaggggtgaggggcgcgcggaaggcaggacgcgacgactttcttaggtstgggctctctgtcgtctgggctctgggctctgggctctgggctctgggctctgggctggggactygggactcgggactcgggactcgggactcgggactcgggggcttggggcttgctggctgtctgacgtgccaccggtgggggtgggccgggcgggcctggcgggcggctgagcgagckcarcaggctcttggggcttgtcggcgagggcygccctcgtctacggccataccaccctgaacgcgcccgatctcgtctgatctcggaagctaagcagggtcgggcctggttagtacttggatgggagaccgcctgggaataccgggtgctgtaggctttttggactcccttttggccgcgg

SEQ ID NO: 7550 - DNA, 1400 bp, Rattus norvegicus
tgtgcarcaracagtccacccccatggggctcagcctcccgctgagtactagtgtgcctgacagtgcagaatccggatgcarmwsctgkagywcccckckstrcgrccmkskrgrmcyagtggakmyccygksctkcmkgwayctsggcagkgcttaccatgcttcccggraagatatgctcgacgccttgggtatcactgctttgatcaacgtctcggccaattgtcctaacmactttragggtcactaccagtacaagagcatccctgtggaggacaaccacaaggcagacatyagctcctggttcaacgaggcgattgaytttatagactccatcaaggatgctggaggaagggtgtttgtgcactgccaggccggcatctmcaggtcagccaccatytgcsttgcttacctcatgaggactaaccgagtgaagctggacgaggcctttragytygtgaagcagaggcggagtattatytcccccaacttcagcttcatgggccagctgctgcaatttgagtcccaagtactggcccctcactgttctgcagaagctgggagcccggccatggctgtccttgaccggggcacctmtactacaacsstcktsaacttccctrtctccatccctgttcaccccacgaacagtgccctgaactaccttcaaagccccatcacaacctctccgagctgctgaagggccaggggaggtgtggagtttcacgtgccaccgggacgacactcctcccatgggaggagcaatgcaataactctgggagaggctcatgtgasctggtccttatyyatttaacmcccccccccccaaacacctcccgagttccactgagttcccaagcagtcataacaatgacttgaccgcaagacatttgctgaactcagyccgttcgggaccaatatattgtgggtacatcgagmccctctgacaaaacagggcagaagggaaaggactctgtttgagccagtttcttcccttgcctgttttttctagaaacttcgtgcttgacawacctaccagtattaaccattcccgatgacatacacgtttragagtttwmccttatttattttkgtgtgggtgggtggtytgccctcacaaatgtsattgtctactcatagaasaacgaaatmcctcactttktgtgtttgcgtamtgtactatcttgtaaatagacccagagcagrctttcagcactgatggacgaagccagtgttggtttgtttgwagcttttagctatcaacrgttgtatgtttgtttatttatgatctgaagtaatatatttcttcttctgwgaagacattttgttactrggatgactttttttttatacarcagaataaattatgacrtttctwwwraaaaaaaaaaaaaaaaaa

SEQ ID NO: 7551 - DNA, 1400 bp, Rattus norvegicus
cgccggcaggtgatgccaaatacagccatgaagaaaaaggtgctgttgatgggaaagagcgggtcggggaagaccagcatgaggtcgatcatctttgcaaattatattgcgcgcgacaccaggcgcctgggtgccaccatcgacgtggagcactcccacgtccgattcttggggaacctggtgctgaacctgtggsacwgkggcggccaggacacctttatggaaaattacttcaccagccagcgggacaacatcttccgtaatgtggaggttctgatctacgtgtttgacgtagagagccgcgaactggaaaaagatatgcattattatcagtcgtgtctggaagccatcctccagaattcacctgatgccaaaatcttctgcctggtgcacaaaatggatctggttcaggaagatcaacgtgacctgatttttaaagagcgagaagaagacctgaggcgtttgtctcgcccgctggagtgcgcttgttttcgaacgtccatctgggatgagacgctctacaaagcctggtccagcatcgtctatcagctgatccccaacgttcagcagctggagatgaacctaaggaattttgcccagattattgaggctgatgaagttctgctgttcgagagagctacgttcttggtgatttcccactaccagtgcaaagagcagcgagatgtacaccgctttgagaagatcagcaacatcatcaagcagtttaagctaagctgtagtaaattggccgcttctttccagagcatggaagtgaggaattctaacttcgctgccttcatcgacatctttacatcaaacacgtatgtgatggtggtcatgtcagatccatccatcccttctgcagctactctgatcaacattcgtaatgccaggaaacactttrrraagctagakagagtagatggccccaagcayagcctcctcatgygctgacataatgccaaatgctctttagtaamtgctgaattatggtggktttttttttttgcatcatttgtttttaatattcataatgkcayskgcttaaaarwrrvmwwwraaacgtgtgcwkamtatstcatctcttccvtagthttagkattggacgctatttwctcagctatccagtagagatcctcaagacggcctttatgaaaagttagtgtggtgttaacmctaaagtaggtggtgtgtatgggtgtgtgtgtgtgtgggtgtgttatggttacctggttataatagagtattaaagcagttatcttctgtatwatcagatcmcaaaggtggaatgttacyattttatcagcaagatattamaatgtatttctaaatcctccttggtttcaatcatgaataaacatttattattrgcaatttaaaaaaaaaaaaaaaaaaaaaaa

SEQ ID NO: 7552 - DNA, 600 bp, Rattus norvegicus
atgccaaagtctttcccagaacctcttgtattcactatcaaatatatacatgtaagttttaagtattactgttttctcagcatgaattaaaaatattccgtaactcaaccaggcaacgtagctcatgcctgtgaccccagcagttgagaagcagagacaagaggattgctgcaagtttgaggccagcctgtctacatagggaggtccaggccaagcatatatcaagatcttgtttcaaaaacaagatacacacacacacacacacacacacacrmayyawaamkwmgmtsywartmwrgcttykgcystywgkgaawaaawaaamamwrargaacacgtgtgtaagagtgtttcatatcatcggccgtcagagagatgcagggaaaaccaggaggaagcagcaagcacatcactgcagctaggaagactgtcatcaaaagaatcatcgcagatgtcagtgatcgagtgggaaaagggggcctcctgtgctctgttggtgggagtatagatgagtgtagctattatagaaaacctaaaaatagatccaccatctgaatcagctagtacacttcttagtatgtataaaaaaaaaaaaaaaaa

SEQ ID NO: 7553 - DNA, 1400 bp, Rattus norvegicus
acaggagggtgagtacctgccaytggaccagcgggacctcaacgtgggctatgacattggcctggaccgcatcttcttggtgtcacccatcatcatagtgcatgagattgatgaggacagtccactctacggcatgggcaaggaggarctggagtcggaggactttgagatygtggtcatcctggagggcatggtagaggccacggytatgaccacacaggcccgcagctcctacctggccagtgagatcctgtggggccaccggttcgagcctgtggtcttcgaggagaagagtcactacaaggtggactactcacggttccacaagacctacgaggtggctggcaccccttgctgctctgcccgtgagcttcaagagagcaagatcacggtgctgcccgccccaccgccccctcccagtgccttctgctatgagaacgagttggccctcatgagccaggaggaagaagaaatggaagaggaggctgctgccgcagcagccgtggctgccggcctgggcctggaggctggctccaaagaggagacaggcattatccggatgcttgagtttggcagccacctggatctggagcgcatgcaagccgctacccttcctctggacaacatttcttaccgcagggagtctgccatctgacctccaggccctgccctcctctatccctgaaagagcctctgccaggggtgggacatcaggacaagccttccactcttaggacagagttgttcatggctctgtggacctggaggaatgtgggggcttcaaagactgggagatcccctcctgttgactgcagggcccaggactgggaaggacccaggtactcagtcctgatggcctgggccccctggcatctccccacggtggctctgggcccccagatcttccacccttttcccactgacccttcaaggatgtaccccttctactctcaggaccttggggaaggcggctggactgctggggggtgggcatcatggggttctgggtgggcagggtgggtctgggggagggggaagggtgtgtttcttttggatgactgtggtctgtgctcttgactctcttttgtaaatatctataaatggaagagatggagacacaagtccacctctgcccatttctacctgtgagacagagagaggccgccacccctctctgtgcacccccgtccagcctcagccctacccacctacccagctggctgggcctctgagacctttgaagccagctgtgtatggtgttggattgggtagagaggggactcagacgtgggatgagtaccccctccctccttgcagtccccagattgatgatggcgtttggtaactatttttaataaagcatatggtcctttaaaaaaaaaaaaaaaaaaaaaaaaaaa

SEQ ID NO: 7554 - DNA, 600 bp, Rattus norvegicus
gtagtccattaaagtacagattgatcwttvmvmmarrmwmmmwwmmwwtctscctgtgtsccctggatactctgaccacgtgaaagaggagggaggtccatgatgagggctgggagagtagccatwkkyyktthytwtkkwtykytkywwwtgcggcyctgaaatggtttaktgttgagttcygaaaacacatgtgggaacakggcaagtccaaccargactacccttggygtarcattgmcggtccccaccarcaracatcaacatgttcytctgtgtcammraggagattccctgagtaaaggcatttccttwaagaawrwmmarrmwwcagtggctgtcctgrgtggagatgrytcytgcyggctttcaggcyasggcactacccatgacttcagagaaaccacttggtgttacaggcctcacctgctgagcttcctgcagtccaggctggatccctttccaggcsagagacttctctaatttggtcttaaaaagcaatccatgacctgggcagtctgmggtctccctgaaagctcgcttcttgcmsymgysmcggcacagattaaacacaaatctattgcccttttggatttcaca

SEQ ID NO: 7555 - DNA, 1400 bp, Rattus norvegicus
ggacactgacggggatgggaaaggagacgcctgtgatgacgacatggatggagacggaataaaaaacattttggacaactgtccccgagttcccaaccgcgaccaacaggatcgggatggcgatggtgtcggagacgcctgtgacagctgtcctgatgtcagtaaccctaaccagtcggatgtggataacgatctggttggggactcctgtgacaccaaccaagacagtgatggggatggccaccaggacagcacagacaactgccccaccgtcattaacagcgcccagctggacaccgacaaggacgggattggcgatgaatgcgatgacgatgacgataatgacggcatgccagacctgttcccccctggcccagacaactgcaggcttgttcccaacccagcccaggaagatagcaacaatgatggagtaggagatatctgtgaagctgacttcgaccaggacaaggtcattgatcgcattgatgtgtgtcctgagaatgcggagatcaccctgactgacttcagggcctatcagactgtggtcctggaccctgaaggggatgcccagatcgaccccaactgggtggtcctgaaccagggcatggagattgtgcagaccatgaacagtgaccctggcctagcagtcgggtacacggcatttaatggagttgactttgaagggaccttccacgtaaacacccagacagatgacgactatgccggctttatttttggttascaagacagttccagcttctatgtsgtcatgtggaaacagasrgagcagacatactggcaggctacgccattccgtgcagtagcagaacctggtattcagctcaaggccgtgaagtctaaaactggcccaggggaacatctccgaaactccctgtggcacacaggggacaccagcgaccaggtcaggctgctgtggaaggactccaggaatgtgggctggaaggrcamgrkgtcctaccgctggttcctgcarcataggccmcaggtgggctacatcagggtgcggttttatgaaggctcagrgywsgwggctgactccggggtcactatagacaccaccatgcgcggaggccgactgggygtgttctgsttctctcargaaaacatcatytggtccaacctcaagtaccgctgtracgacaccataccagaggacttccaggagttmcagatscagacctttgwccgcctggataattaaacyaagaaggcaatmtcrcaactgccttctaaacgcaaaccaacatcttttgywtaaaacttcctataattctctykatrttaccgtggcttttcttttrccaagcccaamwrctdyrrawcyttttatacgaawtaamgaagagmmtatttctaawaamraraaaaaaaaaaaaaaa

SEQ ID NO: 7556 - DNA, 1400 bp, Rattus norvegicus
agagcgttacataccaacagacaaactgggtttagctatcattgactgggaagaatggaggcctacctggatgagaaactggacacctaaggatatttacaggaataagtctattgaattggtccaggcagctgatccagcaattaatatcacagaagctactgtgagagccaaagcacaatttgaaggggcagctaaagagtttatggaagggactttaaaattggggaaacatattcgaccaaagcacttatggggtttttatctatttcctgattgttataacaataaatttcaagtcgataactatgatggccaatgccctgatgtggaaaagaaacgaaacgatgatcttgactggctatggaaagaaagcacgggcctttacccatctgtctatttgaagaaagatttgaagtcgagtcgaaaagcaaccctttatgtccgctaccgagttttagaatctatcagagtgtccaaagtttcagatgaatcgaatccagttccaatttttgtctatatccgtcttgttttcactgatcatgtctctgaataccttctagaggatgatcttgtgaatacaattggtgaaattgttgctcagggtacctctggaattataatatgggatgctatgtctttagcacaacgttcggcaggttgcccaatcctacgtcaatacatgaagacaaccctgaatccatacatagtcaatgtcaccctagcagccaaaatgtgcagtcaaacactttgtaaggagaaaggcatgtgttcgagaaaaacagaaagttcagatgcatatcttcacttggatccaagtagtttttctattaatgtaacagaagctggaaagtatgaagttcttggcaagcccgaggttaaagacttggaatacttttctgaacattttaaatgcagctgttttagcaaaatgacatgtgaggagacatctgatatgcgaagtatacaagatgtgaatgtgtgcatgggtgacaatgtttgtataaaagccacgctaggacccaactcagcattccacctcctacctggcaaaggcctcctccttatgacaacacttgctcacatcttgcaccatctaccacatgatatttttgtttttccgtggaagatgctagtcagtactccttagttttctctatccagagcatttgctatattatttttttgcaggcctcggtaatttgggattatgaatgtgattctattttgcaaaagcaattcaattttaataatcaagattctatttttgagtttcaaagacaaattatatactcttccaccaaagactgattgcaagcaaggctactgaacttagagattattttttgtttaaagagaatgaaaactgaataaaataactaactataaaaaaaaaaaaa

SEQ ID NO: 7557 - DNA, 1400 bp, Rattus norvegicus
  misc_feature (826)..(839): n is a, c, g, or t
  misc_feature (1059)..(1059): n is a, c, g, or t
gctgtcgactccgtgaccgactcctctgtgacaatgaagtggaggcccccagaccagattggtgctgcaggtttgagtggctatgtgctagagtattgctttgaaggaagtacatcagcaaaacagtctaatgaaaatggggaggctgcgaatgatctaccagctgaggactggtcactgcaaacacagaccggatcgacaagacccaagttcaccatcactggtctgcccacggatgcaaagatctttgtacgcgtgaaggctattaacgcggctggggccagtgagaccaagtactattctcagcccatccttgtgaaggaaatcattgagccaccaaagattcgcatcccaaggcacctgaagcaaacttacatccgtagagttggagaagctgtaaatctggtgattcctttccagggcaaaccaagaccagaactgacctggaagaaggacggtgcagaaatcgacaagaatcaaataaacattcgcaactcagagactgataccatcatattcattaggaaagcagagcgcagccactcaggcaaatacgacctggaggtcaaggtggataagtacgtggaaaacgcctcgatcgacatccagatcgttgaccgcccaggcccaccccaggctgtgactattgaagatgtgtggggagagaatgttgctctaacatggacaccaccaaaggatgatgggaatgctgccatcacagggtacaccatccagaaggccgacaagaaaagcatggaatggttcgccgtcattgagcattaccaccgaaccaatgccaccattaccgagctggtcataggaaacnnnnnnnnnnnnnnagaaaatcccmaagcccraaatcacstggatgaaaaacaaagtsscsattgtggatgacccaagatacagaatgttcagcaaccaaggagtctgtaccctggagatccgtaagcctagtccctatgacggaggcacgtactgcgcaaagcagtcaatgacctcgggacagtggagatcgaatgcaaactggaggygrmastgrrkrksdrwgwdrdrbsnywgbaaksmwgthtsmmtgtakakkgkcascmaaggtgggctgtaccttctrcgaggctcctcctagcacaggcgtgcctccaaacataatcgattcatatttgcgagacttacagtcaagcaatccggaggaatactgagggctgggcacggcctctacacaccagtgccttgacattcgattgaaaacggaaagcattttctggttttctcccaggcccycaaatgtggtcattttctctcctcctaaccttgaagaaagaaagaaaaataaattgtttgcacagatggcttgattaaaaawcgcaaacwgwtwaaaaaaaaaaaaaaaaaaaaaaaaa

SEQ ID NO: 7558 - DNA, 231 bp, Rattus norvegicus; identical to SEQ ID NO: 3462

SEQ ID NO: 7559 - DNA, 600 bp, Rattus norvegicus
ctagccgggagtgtctcattccttcagtttctcttgggcagcatcgaccaggctgctttctttgtgtgtggccccaggtgtcaaaaatgtcaccagctgtctgtattagacaaggttgccaagtgcaaaattggttattacggagggagagatttgctccattywttkttttttggaaggacagggtatgckgwckagatccaggcaataggtttgcttytgtaccccagcctacccaagcagggactggacctccatccagatagagggtargmcaaaggagccggggataggagcatgtgttccttavggccacatatggctgtttcctgttgcatstggaaccaamyatattgtcttcwgtgaagactgattcaactttgcgtatagtggagccaaagagattttagctctgtakttgtggtatcggttytgaaaacaaaagaactgatccytyrwkyygattattgtaaatatttgatcyycwcyygagagtgtttgtktgscbtgtgyttggtttttawtykytgggtykaaacgagatccmaagggagaaagagcagtatsccwcktsyykrrwhcaaaaaaaaaaaaaaaaaa

SEQ ID NO: 7560 - DNA, 600 bp, Rattus norvegicus
ggcagctgctggactttgagcggacgctgggcctcagcagcccgtgcgacaaccacacacccagtgaacagctctacttctccacacccaccaaccataacctgtttccgatcaacacgctcgagtccacgtgaggcctgatgcgctcgaataggcgcagcaccagggtctcccagccctccacagggcctggtgaggggccctagcctgctgccccttctggcttgaagaacccacagatgtcacctgtgtccggagaaccaggctgagcagtggccgagctcccatgccatcctgtgcaggacccacagcaaggccgcctgtgatagcaacttggccagattgcctcaagctttccaagacatgttgccgaagtgagcgttggcctcagcttgcagacttgtggcttgggggccagcggggccttgtctctgccccaggacatccattctgctgatggcccagccaatctggcaatttttaaagacatatccacaaacctgagtttgctacttttagcaggtaaatccgagctccctggagcagtgttcaggctctccttggtttttcttttcttttccttccttccttgccttcctt

SEQ ID NO: 7561 - DNA, 600 bp, Rattus norvegicus
tgaccaatgaaagaaaagcaaatctcctttccacccattttctgggaagtggatgtaaccggtatgattaggattccataagtgaatttctctttctctgttggagagagatgtgacatttggcccttagctccaagtctcttctgacatttacattctttcaaaacacatcattgttggccagatccwsgwggcaaacgctgctctcagtgtttctcaaggccgtggaccccatctagttcctgcgctttgtsgtccgcccactctaagcctttcctctgtgtggggagggaagaaccatgcatggcgtttcctagtgggcttctcgacctctgatcctcagctctgtggttcccttaagaccacaccgggacagttccctgccacacgcccccttcctcctatctacctgcctctgagattcgtatttagcctttaacactatgcaattttgtactttgcgtagcggggggggaaagaaactattatctgacacactggtgctattaattatttgaaatttatatttttttgtgtgaatggatttttgtttatcatgattatagagtaaggagtttwtgtwaaaaaaaaaaaaaaaaa

SEQ ID NO: 7562 - DNA, 255 bp, Rattus norvegicus; identical to SEQ ID NO: 3466

SEQ ID NO: 7563 - DNA, 600 bp, Rattus norvegicus
ggaacggagctccccakaaaggggtgttgtggggcaggcccccaagccggtggtcttgggagggagcagggctcggacagcccttcagcctcccaggctcggcakgtggggcagaggaggscctscctctgtcctgtcasccctttccacagtacctgctgcagtcagactgaagamcamaraggctgtgaaggggccgytkaggagkagsccattgctatttttaatttcctgtraggaragactgggagttagactcaaagaagtactgwacatccccaggttgacttawatgtcagggctsraggtggcatgtgggcaaggagscccctcaggtggtctgtcctggasctgtctgggctctgccttcctcatcttccctgcagcthtggamtgaraggcggtggcccctccttgccccgctcttccctaatcctcagcgcagctagtytgggaacagggagaatgtggggtggccagcctgcaragatgggtgctgggctgcatggtttttgccctggatctcttttgggggggggttccctcccatctttcacttgcacataaagtcgctttccwgttwaaawarwmrwwwwmwrr

SEQ ID NO: 7564 - DNA, 1400 bp, Rattus norvegicus
caaaaaaacaaaaaaaacgtgcactggggcacctagaaaatgggcagccaaggctccgcctacattttgcttcctccttggaatttccagccctgtgcagccaactgctccctagctgcgaagggcggagtttcccggctctataagtagtggtgccttaccggggatccgcactcctccgtaccctctgtacagcgcgcgaattatgtgccattcgcgtaaccacctccacaccatgactggcctgagggctccggcgccagttccctccaccggcccggaactccggcggggctccggtcccggaattttcaccttcgaccccctcccggagcgggcggtagcgtccgccgtgcgtccgaacacttctcgcgggcacggaaaacgcagccgacgggtgctctaccctcgagtggtgagtatcgcccgagtgggcagcaagaggtcgagtcgccccggaacctttgggaacaactagatgcggggactttcgtctgacgtttccctcttttctctgctcaggtccggcgccagctaccaaccgaggaacccaacattgccaagaggatcctctttctcctgctcgccatcatcttctgccagattttgatggctgaagaaggtgtgtcgcaggccctggctccggaggatgctaccagcgccatatcacctgagcccatctctgcgcccattactgcgcctcctgtcctcgagcctttgaacctgacctcggagtcctcggactatgctctggatctcaaagcttttctccagcaacacccggcggcattctaaacgcgatgggtcacagtccggaaaaaaaaacccaaagagcaccaggggtacctggtssgcaagaacgtatcccaaactgggacttataaggcaacgctaactcagaacactaccscmaagatsccggttcttggggcgagcccgaggcaccgtgggtcctggctaggctcaytggtgacggacgsaggtcttctcsgtgtctaattaatatttatgtayttatgtatatcctcmtaggtgaaggaggggtgtatgtaatatktaktstaactyatgcaggggtgcgagatatscccccktgctgtgacacagatatttaytacgatktatagggtccgtgagacagagytgtgggaggattagtytmgycwtggtcgggggrcatagrttkaggggtaacaykccatttyccagcacytmgactctgytgtaagactktggcagacccttgggaatacggtctstgygccdwtgatgtcttcctgactggaagycwtgggyccatggattgtcagagggcgrctgtctgggktcgcctagtatgttctgtgaacacgaataaacttgayttgcctktcdttwwdawvaaaaaaaaaaaaaaaaaa

SEQ ID NO: 7565 - DNA, 1400 bp, Rattus norvegicus
aggcttcgtttgcttccttttcttctttcctacctgtacctgttcccttgagacagaggagaggggaggaacgagggaactgactcaagagtcagtttcagggaaagagagggyrsgaksccacacctgctacattcggtgtggaactgttcagagaggcaaagtgaagggcagggcagggtccctggcaggagaggaaaagtaacggagaggcttttgaacctagtgacctagtgcaggagacagagggcttttagcagagaagaaatgaatgcagaatgcatacactcaaccagcaaattggcaagagggctctcctagatgttacaactcaagtttcaattccaactctgccactgacttagctggtggatctcagagtgactacttttctgcccgggcatcagggactaatgtaaatgtaaaacgagcgatttctgcctcccattcttttgtccctagaattttgtgaacgagcgagtagaatttgagggttcttacccacttctgccatcctcagttcggaagacagtcagggttttcagatttaaacgggcaaagggcttctattccaatttcccgagtttaggtgaatgctccccaaagcagggcaagataaaggtccggtcactgcctctggcctgctgtgatccaagctggagagggaaggtagccaatgaatcagcttggaacacttttaggcctgcccctttcctccatctccgtgtccttagtgatgctctacgtgttaccggacgcagacggtatggcccaccggatagaccctgactatctctgtgtctctcctggaaaacagccaggcaaggaggaaggttgatmacagcagacggtgtgggtgtgatactcgctgtagccactacggggcgcgcgcaggtcgcggattcccccccggttgctggtgctcgagtgcccctacaccagcactgccagttatctggatcccttatttcccggcgccggtttcccgccttgacacctccaaaccgcgcgcggggccgggagcaggctccggtctcccagacttctggggcgcgccgagcccttctttgtattaatccacgcctaccggtttgagactgacattcaagwctwhkttttttttttctttccttttcctttttctgttttyttttccttctttccaaccctgggcacttcctstgtgtctgccacttactagccatgtgaccttggccaaatcacttcacctccctgwgcctcagtttcctcatctgtcaaatgggggtttataaacacctacctcgcagggttgttgtgaggatttaatgasgtaatgtatataaagcgtcttgcacagtgcctggcacatagtaggcgcccaataaatctactcgtccctttaaaaaaaaaaaaaaaaa

SEQ ID NO: 7566 - DNA, 600 bp, Rattus norvegicus
tccactgggatagcgggtgggaggcagagccggtgcgcgcctgccccgggagtgggcatccagtggtgcctaaggtgcctcattcctgcctgcccctccgacccccccatgcctggctggtctcatggcctcttttctctttccagaggtgagcagtgtgggctcctcatgggttggccttgctgcctgactgtggggagccccaggcagcccttccatggcagaggcgagatgtaggcgaaagaagtctggtgtccaccttacccgctccctccctgctgcttgcctccctgcaccctgaccccttcaagctgctaaccttgcttagcaactgtccccttgtgcccgagtctgtccagggggatggacagaggccttactctgacagatcccgggagctccctagtcttacttcaatctgtcgccagaaagctgtaccctgacgccacctatgtttggccgagctgctgctctaagcctcctgtgggaagcccacaaccctgtctgggcaggacactaatggccgtggtcagccctaatggtgactaatggcagcgctgtgcctctctctctcccttcatgtcttccctgtccctccag

SEQ ID NO: 7567 - DNA, 1400 bp, Rattus norvegicus
tttttgcactcctgtgtggccgggtgcctcatgagacctgttgggccaagtccacgtgctgcgaagtctaaaagtaaggttggctcaagacaagattcaagtacgaagagactcagtaaggtatcaacagcagaaaagattaatcggtttttagatttcggcctttttacacatagaggatttttgatctacctgtctggaaatgtcgtgttgtttttagggatgtttgcccctattatattcttggctccgtatgctaaggacaaaggagtggatgactataattcagctttcttgctgtctgtgatggcttttaccgatatgtttgctcggccttcggtaggattaatagccaacactagcttaatccgtccacgaatccagtacttgttcagcgtggcaatcatgttcactggcatatgccatctcctctgccccctagcccattcctacacagctttggtggtctacgttatattttttggaataggatttggaagtattagcagtctcctctttgaatgtcttatggaccaggttggagcctccaggttctccagtgctgtggggctcgtcactatcgtggagtgttgcccagttcttttcggccctcccctggctggtaaattgctcgatataactggacaatataaatacctgtacatagccagtgggatagtcgtgttatcatcaggcatttacctactgatttgcaatgctataaactatagacttctcgagaaggaaaggaagagagagaaagcaaggaggaagaaatcagcctcgcaggcatccaaagaaatggaggctttgagcagatctaaacaggacgatgttactgtgaaagtttcaaatacacacaatcctccctcagacagggacaaagaaagtagtatttaacaagtctcatctccgaatcagtgttcagaaatttaattatgagtttctttgtgtttttttcaatgaattgcaaaggattttagctgcaacaaaagatcgcaaacagtaacgaaactggtatcttcctcaatgacgaactaaaaatcagtgctttaatatttgttaaagatggttaacttttgagattgtgcacataaaaaatccacacagctgcttatctgcacaccaaagctgtgatgaaaatgaatttttttaaatctttctgscaacttttacttttagstawagaatgagatytgcatcccaraccccggstgacctaagcmcmattyaacmttaattccacataactaccctyttcaaggttcatttttcgtcggatactaagtcatgaagtgaattgaagacaatcattctttytattcaacacmcaaagaattacacatgkagccacgcaaacmctgagtaacgggatatcataaagaaataaatgaatttgg

SEQ ID NO: 7568 - DNA, 600 bp, Rattus norvegicus
gytgaagtccttttggaacgcattgctctttgttttgtcacttattgtttagaggttcaaaaggagataggcagttgagaaagaagtaaactgagcaggatttcttaagagaaattccgataagctagtcaggactccagatggatggtgggaatggaaggaggaccagcagagcagagcagaaccacgtcatgcttgggagcctctgttcttgaaaggcttycstcgagaacgawccatactagggccaasggccsargaagaacctaccttccttccccttgtcctgcctgcagttgaaagwaggtttaaatgagcctgaggttctgtgcaaaggcctcatggggcagacaggaagaaatgttactgtgtttgtaatataaatgttcatatgtttgataaaacagttcacttgtarwaaaaaaaaaaammwwhdmrrvcgcaagcttattccctttagtgagggttaattttagcttggcactggccgtcgttttacaacgtcgtgactgggaaaaccctggcgttacccaacttaatcgccttgcagcacatccccctttcgccagctggcgtaatagcgaagaggcccgcaccgat

SEQ ID NO: 7569 - DNA, 600 bp, Rattus norvegicus
caaaaggtctatttctttgtggataaacaatattggaggtacgatgtgaggcaggaactcatggacgctgcttaccccaagctgatttytacacacttcccaggaatcagsccaaaaattgatgcagttctctatttcaaaaggcactaytacatcttccaaggagcctaccaattggaatatgaccccttactgsatcgtgtcrscamaasrykgmrcarkrcgagctggttcggttgttaggaagaatgtagtgaaggatgcttgctggtttttgtttcataaacatttattacatatccactgtatgctcagggtgtaactacatggcaatgatgtaatgtgaaatgaggcgagatatacaagccacatacacatagttacacagaaaagtgcttttacaaaattaaagctcttttggtaaactttwhhrmwwrawwmwmwwmwwaattttgaaagcaaatgcctccaaaggccaacttttttatctgtaagttgtttctaacaaccttyaagtaggaaaattagaattactcccctatctttactgaaatataccatttttcttaaataaatttaaagaaamcaaaaaaaaaaaaa

SEQ ID NO: 7570 - DNA, 600 bp, Rattus norvegicus
agcatgtcgagagatgtagagaatacatttttcaagagatccccaccaaagccacccgagctctcattctgtttttcaacagaaacacttttaaaaatgttataaattaacttgaattagattgtgaaattgcacacataacttgattagattaagaaagaaagttgggaaatttaagggaagggcacgttttkkaaygaktaactttgaaaattatcgttatktaayttagtgacatgggggaagcacatctgtgcctggrgatatcgtcagcgtttattaatataaagcacttttayagtagcgattacagatgaaccatagatataaccacattgggatatttatgatattaagkttaataaagtagaatgacaagtccttaaggrcatagtartaactmcatttaacatgaagattattctcagattgctttaactacrccagcctgtatctgcatctgtctgtggacatgtacacacacgtaataktcattaaattttcaytgtggtawrwkwmawrwarmmrtagagctctctgtgtaacccagtataacctcaaaccaggattaccagtatgcacgccaggctgagagttctt

SEQ ID NO: 7571 - DNA, 1400 bp, Rattus norvegicus
taccgctgctgcttctgcggaaaaaaacacccgaggcagggcagcatcttatacagcttgctcactaatgcccaacaaacgcacgtgtctcgggaagtacccgaggcacatcgcggaggcgagtggtggcagctgtcctactgtacccacaatgtgggtggcccggaagggcttcagagcacacaggccatggcgttcctgtaccgtagctatgtgtgctgtgaagagcagccccagcagagcagcgttgcctccgacacgcccgtgagagcagatcaaacaccagcagctccgcaagagcagccgagggccccctggtgggacacctcctctggtgtgcagcgtccgattgcactcaaggatccacaggtggtgtgcgaggcagcgtcggctggcctattgaagaccctgcgctttgtcaagtacttgccttgcttccagatcctgcccttagatcagcagctggtgctggtgcggagctgttgggcgcccctactcatgcttgagttggcccaagatcacctgcacttcgagatgatggagatttccgagcccaacctgatgcacgaaatgctcaccaccaggcggcaggagaccgaaggcccagagcccgcagatccccaggccacagagcagccacagacggtgtctgcggaggctgggcacgtgctctcagtcgctgcggtccaggccatcaagagtttcttttttaagtgctggagtctgaacattgacaccaaagagtacgcctatctgaaggggaccgtgctttttaacccagacctgcctggcctgcagtgcgtgaaatacatcgagagtcttcagtggagaactcagcagatcctcactgagcacatcaggctgatgcaaagagagtaccagatcagatcggctgaactgaatagtgcccttttcctgctgagattcatcaacaccgatgttgtcactgaactctttttcaggcccatcattggtgccgtcagcatggatgatatgatgctggagatgctctgtgcaaagctgtgaaggcatgcagccactcaagtgcattttactacacatggagaaagggggggctgtaggcagaagagtgctcaaatttgtgaaaacaaactttcttgtatttttacatgcatagtatatttgtatccaattgaagaaatactttagttacagacaatgtaaaaacccctctgctccatactggttgccttgtgaagaaaagcatttgttaacaaataattatttccatagatctttaagagtgttatactatgctaacaagctaatttccacaaaaataacatctctttccattaaccctgccaaataaaatttataatattaacttttaataaaatttaatgtactaaccattaaaaaaaaaaaaaaaaaaaaaa

SEQ ID NO: 7572 - DNA, 416 bp, Rattus norvegicus; identical to SEQ ID NO: 3476

SEQ ID NO: 7573 - DNA, 600 bp, Rattus norvegicus
atgtggttgatgtttttcaagtggtaaagtctctacgcaaagcacggccggggatggtgggcagctttgagcaataccagttcctctatgacatcatggccagcatctatcccacccagaatggacaagtgaagaaagcaaacagccaagacaaaattgaatttcataacgaagtggacggagccaagcaggacgcaaactgtgttcagccagctgatcctctgaacaaagcccaggaagacagcaaagaagttggagcttcagagcctgcaagtggttctgaggagccagaacattctgcaaatggtcccatgagcccagctctaaccccgagctcataggaacggattcgagtgggacaacgcaaaatgtcaaattagttgtttctatttttctagacctaatgaaaaaatatggctgtacagtggtccgtggaatctgtgttcacctttgccactgtataaaaatatttaagtttgtcaaaaggttttgtacagttttatgcctattttaaaaatgtatctatatcatttagcaagagtgtgtgtaggagagtatgtctgtgtgtgagagagtgtgtgcttctgttagtgtgtgttt

SEQ ID NO: 7574 - DNA, 1400 bp, Rattus norvegicus
gggtggaaaaggggaaggtgggtaggagggaggggacgaggagtggaaagggacaaggatcagctgccaccacatcatcatctcctccccaagtctgtgggaagaggaagggccaagatgggcacacctgagcsataccgaacccatttcttataggcgcagtgtggagcagctctaacagatggctagtgagttgcaartgtcccttaaggaacataacaactgttgtggctgatttttgccaaaccgaatgtccctatttcaggcttagaggagaatgttaccaagctgagaggtcaatggctctacccatcatgttccactgacactcctgaggtattacaggtttccaggtacagggaggaagacaaggaaatggggtagggatggtggatggcacgcaataggacctcagccctgacagacaaaatgtcacaagaggctaggacatgattggtattccacctccgaaggaggacaaggaagcttaatgtttgtcccagggtcttggccatatctctctttctagtggctccagtacctggcaagcagcaaggactgagtgcatgctccgatggatgsmtggawgsatgsawggaygtkrgatgsatgmwysgatggatgaatggacagatggatagatgaggtattggcagctagcaagagagaaggcatttaacacaaagattagtaatgcaaaaatatataagtgagtggaacagagatcatggtggatacacacagctgtctttcagctcaggagagcgagcacccagtaagcaatagaaaagcaaaaatagargargaaaaagaagaaaaaagcaggcaaacagaaacagggaaatgtaaaacacagagaccgtttgaacyccgtcagttatgaamccatagtaagtggcttgtgtttgtgacatcctgsccttgtyttcagaaatgtgtaatgacttcagaaatgcctgcggctgacacggggtagggaagtaaatgatctgtaaatacatskgyrykaktgcatttgtgatagcagctacatcctgaatgtttagtacggtcctcctaaaggggaatttaagtgtgatttttttcacctaacttgtctttgttttacacaataaatgtctttacttttmmrrwwawraaaaawawwrrwragggggctgggaaatagctcattggttacgagcaccggttgctcttccaggggtcccaggttctattcccagcacctaagatggccgctcccaaatgtttgcaactccagttccaggagatccagtgccctgttctgaccctcaagggcaccaggtacacaggtggcacacatacatacacacaggcaaaatatctatatgcatagaaataaatctttttaaaaatggraaaaaaaaaaaaaaaaaatc

SEQ ID NO: 7575 - DNA, 1182 bp, Rattus norvegicus; identical to SEQ ID NO: 3479

SEQ ID NO: 7576 - DNA, 552 bp, Rattus norvegicus; identical to SEQ ID NO: 3480

SEQ ID NO: 7577 - DNA, 600 bp, Rattus norvegicus
tctcttgagtgtggctatgcatagatcctacgaatttgctggcttcaacattatccctgcccttcccctgctgcaactcccctctcaaatacctttcacattggtctgccttctccttgagacctaattctccctctggcccaggcctgagcccagcattcccaagggattccctagcacccacccaagaagctgtgggctagttaccagggcgactctctactgagacccagcagccactgcagtaccatagacgctgagtcagacctgatgtggcagtatgaagggagagccacctgtcctgggcaaagcctgatgactctccatccacccccccccccaatactgcttttccctctcctttgatggagacagatgctggcaccagactgggcacacatccacccacccacctacccattttatctccaggctgctgctcctgttgccctgcaggatgtgagaagtgtgccaaggactgtgtttgcaaaggcgaagagggggccaaggccgagaaatgcagctgctgccagtgaggactcccacacagcctatgtgaatagtgctgcgtgtccctggtggggcgtggctgttgccccc

SEQ ID NO: 7578 - DNA, 600 bp, Rattus norvegicus
ggaacgggatgcaagcagttcagtgtctaccctggagaagacattgccacagctgctggccaaactgagccgtctggagaaccgaggggtgcacaacgccagcctggccttgtctgccaacatcggtcgtgtgcgcaagctcattgcccaggcccggagtgccgccaacaaggtcaaggtgtccatgaagttcaacgggcgttcgggggtacggctgcgcaccccacgagacctcgctgaccttgctgcctacaccgccctcaagttctacatccagagcccagtgccggcgcctgaacctggcgagaacactggggaccgctttgttctgtacatggggagccgccaggccaccggggactacatgggagtgtctctgcgtaatcagaaggtgcactgggtgtacaggttaggtgaggctggccccacaactctcagcattgacgagaacattggggagcagtttgcagccgtcagcattgacaggaccctccagtttggccacatgtctgtcacggtggagaagcatatggttcatgagatcaagggggacacagtggcccctgggagggagggactactcaacctgcatcctgacga

SEQ ID NO: 7579 - DNA, 396 bp, Rattus norvegicus; identical to SEQ ID NO: 3483

SEQ ID NO: 7580 - DNA, 286 bp, Rattus norvegicus; identical to SEQ ID NO: 3484

SEQ ID NO: 7581 - DNA, 600 bp, Rattus norvegicus
attgtacgttgwatttcttgcaacttgaagaaaatgaccyttywaacaatakgggtagtgaggaascwsatgaaagttaagwkgscmytytwtamcatcwttatwtscawatwasctcmcttatgtttcccttatttyttttatatctyctcatacmtactcatgcaratgtkttatatttgagaatctmtwawatwrcamacmttrsttktaactactgwtrttwttttygytaawwtaaatagytggktttgrttyyttcacataswtgtttacttccmctcatgtrktttgagaatctgwtatyttctcywtttgtataaagactgattacaccgtgcctatgaagccctccagaattgaaaagaaaaaaaaaatatwtatatatatatattctactggcttaaataagaagctttaaatgggttttatgatactcaatgccattgtattctcgagactgtattttgtaatgaacgcatggactcgagccttaactcttgttatctactttcgatcctcagaaactcaatgaatttaccaacttgcsttggacaatcaagtaaacgtaatttcararwmaaaaaaaaaaaaaaaaaa

SEQ ID NO: 7582 - DNA, 600 bp, Rattus norvegicus
cctcccatctctttgcatgtttaattttatgtgattctctttaaattgccctgactagccttgagcccaggatgctcacggatgctgagattataggtaaaaattcctttggagagaaacatyacattaagatattactgggctttttttctgaggcagccttggcctcgttgcccatmtgcagtgtctaggcagatacacctagtgatgacgtctaggggtcaggtaacagagaacccaggtctcgagggaacccggggctcacggatacactacgtgagtaagctatagccctagactccaggcaacaaataagcacccaccctttatttcttttctatgtctgatttttttgtttatttgagacaaagtccatgtaggctagtctagccatggactcctcctgtgatcatcctccagaggtcgagactgtagacctgtgctaccatgcccggacctatcctttatttctgcaattttgtcttttcaaaaatggtattcgacagaacccaacatatccaagttttgtaaaaacaactgtgcacggcttacacgataaaaaatttttgtttttttaaaaarrhaaaaaaaaaaaaaaaa

SEQ ID NO: 7583 - DNA, 600 bp, Rattus norvegicus
agctcagcctgrcagagcgggcccaccacrwsstcttcctcaaagaaggctctgtctgcgagcagggcacccacctgcagctcatggagaraggagggtgttaccggtccatggtggaggctcttgcggytccttcagactgacsggcttctggactgcamgctgcgcgagtccctccccctgctgtcctctgctctgtgtggcrgagaacstgggagcaaagattttaccacatccacggagatrgwygaggagcgatggtgtttgttacatgagraaaatgtaacctctaggagatgcccggaatttmccaccaatgttttcccsccccsccccctrttagacgggggatgggggtaggtaccccaggctaacactgagctgctgagtctcctgtctcccgtggagtttgcatcacggcatgcrcccacaaacctggcttatgtggcgttgggacagartgagaagaaacgcycaaaatgtacagagaaggggcaaatagcttgcaattamccaaaggcataggctggcctatgggtrttcygcgggttctygatatttataataaaactggtgttttgtamaaaaaaaaaaaaaaaa

SEQ ID NO: 7584 - DNA, 1400 bp, Rattus norvegicus
tgccgctgcctacgcgggccccgacggcgcgtacccgcaaggggcgagcagcgcgctcttcgccgctgctgcgggccgtctggccggacccacttcgcccaccgcgggaggaggcagcggcggcgtggaggccacggtggacttctacgggcgcacgtctcctggccagttcggagcggcgctggggccctgctataatcccagtgggcaactcggagccggtggtggaggtgcctatcactcccgccacgccaccgcctacccgggcgcggtggatcggttcgtgtctgccatgtgagccgggggtaggcacaaaacctcactgactccggcacgttctgaaagatgtaaatcccccggaaccggtggacaggactaaaagagtatcggactgagactcacgagtgtgcgagggctccgagggtcgcggaggctcggtgtcttgccctgttcacagaccggatttgctttggacgtgggcggacgtagggaggccatagccacgtttgggctgacacaggggaccctcgatgatgcgaagctccaaagagcatgcctttccgccattctactagggagggccctagctgtaaagggtggagtgttgcgttgttgcccgcaccagaatctagaatcctgaactgtggtggagtcgtttggcttcagcgtgtgctatgctgggctaaactcgggctttttacacgttcgcctcttaacttttgactaccgtaccccaaataaaaggctcggacagtgcctttataattaaagtgagagcaagtttgcaaaaagagttgctttttaaaaattagttcsgwksagctgggttagttttccctgcctctgagagtcacaagcctgggtcgcaatcgtaactgaattctcggtgtgatcyasccctaacacctgaattttgagtctgtctgttatacagaactgtgcgattccgccgtctcatttttaaaccccctcccattatcttgggtgccaaccttccatatttggcagcattggtcaaccacctagggcttcccagtagccatgacagaaggccatccaggaatgggaacagaacattggcaagtatttaacccaaagtyyyaggaytggctccaagtagagattgtgcttaattattgattttttttttttgttgttgttgttttgagagagagagagagattggtcakkccgcagcagtgactacccagtcaaaaatctgattttctgataagaatgtaggtggggagactttccttaactggggcttgtctrttctgtttcctgtgcgctccttcttcggcgccctcctcgaacaaaaaggaaaagtaataaattagatggttamcaaararawmwwwwwwwaattttttatttcattctgtatcttgtttgttttg

SEQ ID NO: 7585 - DNA, 600 bp, Rattus norvegicus
gcccaaggcaatatattctgggggtgtgaaggacttcagtacttgtagcttggatgacttcaaatacctgtcaacacaagaccttgaatgtctccaggacttgcctatggaaagacaaaagaagaagccttccaggccaaggagaatctgtggcaacgggatattggaaatgaacgagcagtgtgactgtggcactttgaagaattgtacacacaaaaaatgctgtgaccccatgtcgtgccgactgaagtccaaagccgtgtgtggctccggggagtgctgtggtcaggactgcaaggtaaaaccggttaatgtactctgtagaaagtcgaagaatgaatgtgactttgaggagtactgtaacggaaatgacgcttactgtgtccctgacacgttcgcacgcaacgggcagtactgcgactcagggcaagccttctgctacagtggtctttgtatgacgagtaataatcaatgcatgaacttgctcgggaaatatgtgagaggagcttccttcgcatgctatgaagagttcaattccagaaacgatagatttggcaactgtattagaaagttttgtagtttcgaaaattctctctgtgg

SEQ ID NO: 7586 - DNA, 1400 bp, Rattus norvegicus
ggtacgtatccagaagacataggtttggagggactctccatggttatcactcaactgattggccttcacataggattaacatacgacgatgttgataattgttcctgccccagagctccatgcataatgcaaccggaagcattgagttccagtgggatgaagacttttagcaactgcagcgtgcacgactacacgcattatgcttcgaagcttgacatgcaatgtcttggtgacctgtcaaatgtattacaaccaaagcaatccgtgtgcggcaatggaatcgtggaaggcagtgaggaatgtgactgtggtaacgagacggaatgtcaatttaaagagtgctgcaaccacgaaacatgcaaactgaaaggctcagcacagtgtggatctggaacgtgctgcacacccaagtgtgagctgtcagcagcaggcactccctgtaggaaggctgttgacccagagtgtgatttcacagaatattgcgatggatcctctagccactgtgtccctgacacctttgcgttggatggtcatttgtgcaggttgggatcggcatattgctacaatggacgatgccaagctcttaacgaccagtgcgtcagtttgtttggaaaaggttctcaaggcgcttcctacgcctgttttgaaaaagttaattcgcaacgtgaaaatctggcaaactgtgactctaaaaattcatactcgttaccttgtggacagaaggatgttctgtgtggaaaattagcttgttttcggccaaacaagaattataaaagctctactcaatctgtcctgtattcgtatgtccatggcagcgtgtgtctctccatacctcctgggttatctatgagatcagacggcaaagataacgcatacgtggctgatggcactgtgtgtggaccacaaatgtactgtataaatggaagctgcaaagaagttaatttcacgggaaacgactgcaacgccgctaagaagtgcaaagggaatgggatatgtaataactttggtcattgccaatgcttccctgactacaggcctccagattgtaacttacagattggatcaccagggggcagcattgacgatggaaaccttctccgaactgattcggctttggctacaaagcgtctgagtcaacacgcggacagctgggtgatcctgggcttcttcatcttcctgcctttcatcatgactctcttccttgggatcataaagagaaacgaaaggaaaattgtgccccagaaagaacaagaaagatgagggcaactcactgccccgtaaatctgctgaagaggttagcagtggatggaccaaaggaggaagtgcgtgctctaatctctctgttaccctggaaacgctttaggtctcagacttttggaaaataaaactgacaaacgcac

SEQ ID NO: 7587 - DNA, 600 bp, Rattus norvegicus
atttcctactcttctggacatgatgagcaattgttcccatcataatctacatgagaagatcattggttgggacgcttgcttgagtcaaccgcgggttgcatataagaatttcaaatatgcagttcctcgttgtggaaataaggtagtggatgacaatgagcaatgtgactgtggtactttaaaagactgtctctctaatcactgttgtggaaccaattgtcagttaattgggagcagcacttgtgctgaaggactttgttgtcaatcttgtaggtttgcacccactggaaaggtatgcaggcacacgaatggcatttgtgatcttccagaatactgtagtggagtctcagagcattgcccacaaaatttctacatcatggatggaaccccttgttctccactagcagtctgcatgtcaggaaactgtagcgaccgccaattgcagtgtcaagctctttttggataccatgtaaaggatgcttcaccagcatgctataaagaattaaataccaaaggtgaccgatttggaaactgtggggttagagaggtacgtggaggaagtaaacctctcgcatgtcaagaggaggatattttctgtgg

SEQ ID NO: 7588 - DNA, 600 bp, Rattus norvegicus
ctgaccaccttccaggaatactttggactgaataattgcagtagttctaatagactagaccaggcaatgcaggtgacagagactcttgggatgacacactgctgcctcaaccctgtcatctatgcctttgttggggagaagttccggaattatctctctgtgttcttccgaaaacacattgtcaaacgcttctgcaaacactgttcaattttccagcaagtcaatcctgatcgtgtaagctcagtctatacccggtccacaggagaacaggaagtttctactggtttatgaactggttgagttttgtgtatcacttagtttttctatgtagcttgagggtagagatggttcttttagaaaagaaattaatatagagggcctaaggtacgtgcattgttttaatatttatttgagatagattgggtctttgaaagctgagtagttttataaacgtgaatgagaatgtattgatgagacagtaatttctggcttcattcctatttaactacaattattcccaaactcttctttagccacaaaagttcactattaaaaaatactgagcattgggaaaaaaaaaaaaaaaaaaaaaaaaaaaaa

SEQ ID NO: 7589 - DNA, 600 bp, Rattus norvegicus
gcgactggaatcagcmcaaggaactggagrmaykmsgcggcgtcttcccggagaatttcacagagcgggtgcagtracggragagccthtgcagccttccggtgtgtgaaraacytttycccaaaaratgtgtgcttktytwttytttgwttttcttcctcttcwwttckgywykhkgtyttgttktkaaactcttgaaaagtgtcgggaaattggggagcggaaacctaagccaagaggtgtacccccaaagatgaggtggttttccaaaaagccgtccgacccagttcagtggacttytccagtattcccgaagytgctgtgtccccctcctagttgagttcccgatgcccgcatgttcagggcgggccgggggtgcagagccaccgccgcamttgcctgacgcttggccgsgccaccggacagggcttgggtcctyttytggcagytgccytgggcagggcctgcaytgtggcccagcytggtccgctytgcagaccaaccgtgtgctgtttgaaaataagccctagtgttcaaaatgcagsgaaacaaacaaaawtgaaaaaccggacaaammmmmmrraaaaaaaaaaaaaaaaa

SEQ ID NO: 7590 - DNA, 600 bp, Rattus norvegicus
gcagcattgcctgaatttatcttccatgagtcccaagacaattttggagatctttcctgcagtcctcgctatccagagggcgaagaagacagctggaagcgtttccatgctctaagaatgaacatttttggtttagctcttcctctcctcattatggttatctgctactcaggaatcattaaaactctgcttagatgccccaataaaaaaaaacacaaggccatccagcttatttttgttgtcatgatagtcttttttattttttggactccatacaacctggttcttcttctgtctgctttccacagcacatttttggagaccagctgtcagcagagcatacacctggacctggccatgcaagtgactgaggtgattacccacacccactgctgtatcaatccaataatctatgcctttgttggtgagaggttccggaaacaccttcggctctttttccacagaaatgtggcaatctacctgagaaaatatatttcattccttcctggcgagaaactggaaagaacaagctctgtctccccatcaactggggagcaagaaatctctgtggtgttttagttgggcagagaaaattgtcac

SEQ ID NO: 7591 - DNA, 1400 bp, Rattus norvegicus
tccgctctctgggctgggtagaggtccctgaggaggacctggcaccagggaagagcagtattgctgtcaataactgtatccagcagctagcccaggcccgaaaccggagccagcctcatgatggtgcctggggtgagggccagaacatgctgatggtcctgaaaaaagatgccatgagcttgctgaatcccctggaccacagtctgatccattgtcagcctctggttcacatccgtgtatggggtgtgggcagctccaagggccgtgacagggactttgcttttgttgcgggtgacaaagacagctgtatgcttaaatgtcatgtgtttcgctgtgatgtgcccgcaaaagccatagcaagtcgtctacaggggctctgtgcacagatcttgtcagagagggtaggactcagtggagaagctgcttgttgttccccagatcctatttcccctgaagacttcccaaggcaagtggaattgctggatgcagtgagccaggctgctcagaagtatgaggcactgtacatggggatcctaccagtcaccaaagccatgggtatggatgtgctgaatgaggccattggtaccctcactggccgtggggaccggaaaacctgggtccccgctatgctcagtgtgtctgactctctgatgactgcacatcctattcaggcagaggctggtgcagaggaagagccactgtggcagtgtccygtycgccttgtaacctttattggtgttggccatgatccrcatacctttggcctcatcgctgatcttggttgtcagagcttccagtgtgcagctttctggtgccaacctcatgstgggggactctctgaagctgtgcaagctgcctgcatggttcagtaccagaagtgtctagtggcctcagcagctcggggtaaggcctggggtgctcaggctcgcgctcgcctgcggctcaagcggaccagctccatggactccccaggcggcccccttcctccccctctactcaaaggaggggttgggggtgctggagcagctcctcgaaagcggggtgtcttctcatttcttgatgccttcaggctaaaacctctcttctccatatgtcctaaattgatcttagagggctggggaaagaggctctatactcttccagtccctagggttctgtagcctctcaccttyctgccatccctgatcccttgcctactctgtatttatgaccaagttcgttgtttatatggatgactgagaggccctgcactctaacttaggcctgtagcaccactttcctttggtccttttgttccttgcccctgtccagccctgacaattggctctacctcatcaactttatagcagaatcagtgaaaataaaaatccctcagtaawmwmaaaaaaaaaaaaaaaaaa

SEQ ID NO: 7592 - DNA, 1400 bp, Rattus norvegicus
ttcctccccaggagragaaaaggaaagtagaagaggaggtcatgaatgatcaagccctgcaggctctgtcagattcactgggcacccggcagccagaccctcagagccatcttaggcaagccaaacaagtcaaagaggcaaaagcaaaagaagaaaggcaggagaaatgtggtgaagatgaggacacagtacctgctgagtacaggttaaaaccagccaaggataaagatggaaaaccactattgccagaacctgaagaaacatctaagtgcctgagtgagtcagagctgattggggagctttcagcagattttgtccaacctacatatcaagaaaaaccatctatgccagctgcaaaaataaagaagggcgtagtgccagatgatgctgtagaaaccttggctagaagcctggggacaaggaaagaagatccagaagatgaaaaatctctggtggataaagtcaaggagaaagctaaagaagaagatcatgaaaaacttggtgaaaaagaagaarcaattcctcctgattatcgactagaaatagtcaaggataaggatggaaaaccgctcctgccaaaagaagccgaggaacaacttccacccttaagcgatgacttccttcttgrtgcattgtctcaggacttctccagtcctgcaaacatattgtctcttggttttgaagatgccaaactttctgctgctgtttctgaaacagtttcccaggtgcctgctccaagcaaccacacagcagccccaccgcctggcactgagaggagagacaaagaactcgatgatgccttggatgaactttctgacagtcttggacaaagacagcctgatccagatgagrwcaaaccmctagatgataaagtaaaggaaaaaatcaaagcagagcatagcgagaaactgggagaaagagacgacaccatcccccctgaatataggcatytcctggataatgatgggaaggmcaaaccagagaagccactgacaaagaacacasagaagcctggtcaggaccaggaccccattgatgccctctcagaagacttggatagctgccccccaactacagagacttcacagawtwcamcaaaggagaagggtaagaagacttcaagttccaaagcatccaagaatgaagagaaaacaaaggattcctccaagaagacagaggaagtgcccaagccaaaggtggatgaagatgcaacataaagtttatgcattttggkatctgaataaaaattcttcagctggtggatggtgacttttgaagatcaaaggctttgatgacaatttttctgggtggcttytagacagttgkatttgttatgtcttttgacaccttaaacattgagttgawattcttttccagaacaaaaaaraawwwrwctggtt

SEQ ID NO: 7593 - DNA, 1400 bp, Rattus norvegicus
tamcaywtttcttgkcagkttggggwaraggttttcawtttccyctatgrtatatttccygwkatawgactctcarkgktckgtcttaagcccaaggtcacccacttgtccagtatttgtcttcaggagatccttcccacagtggacacagtgaagatcagagagatacacaagcttctctccatttttcagagactttctgccaatacttagaaatacgtttccaggtgagaaaggttttaaaacctcagatcatcccctgaccaggatttctgcatgggaaaatggtagagaatatgagacagaaatagactgagcagctactgtgaacctttgaggttctcacagtgccagtccgcaagcacacttagagattttgatcctgaagcctacttcagctccatctggttttctgtagttataaccattggttcatcatcatatgatgctctcacagactctgagctcgtttgctgttgactaccttgtaggtagtaaactgaaaggtctagaatgtgccactctatatacctataataaccattcagttcagttcatctttggaccctcttagttacaaatgatcagtgacatctcactagctactgtcctgagggagggaggcaaagtctgatctctagataattgacttaacatctctgtagccagaacaccatttgcaaatcataattccaactccaggtctgtcaaatgaatcctatggaccagggctgcagatttgattctacaggtagatatattgtttgtgatgttagtgggagcatgcaaactagagagaaaaatttgtgggaattcctcagtattgtgtgtctccatttaggcaacacatcagtagttcttgktwmcagaatgtttgttggagatcaacagtcwttttytkwtttttkttaagattggkaagtgtttatggagascttgccagctaaatccatggcagtgtcatttaaatagtgcrattaagaataccccgaamtaratggaacccaaagttgaaacatrccassatgccccttttcwacccaggagaaasctwabakttggraactgtykgcctctctaaakaaawatgtgattaayaagccatatcacagtttaaggaattgtatatcwttcctgtatagcccctccaaaarccaagtatttttgcaaatagattgattttagaaagatttyraagyyggggtttatctgkgtaatgaagaccagattctttgyataygtactgtatttgtaattttcaaatgaaatttccyatatgattattaaataaagtgttgttttgcmwwrwrrwwwawwaaaaamwwamaawrtacagccammwaaaaaaaaaaaaaaaaaacctttgggccgctccaacatcagcctcgtgccgaattctt

SEQ ID NO: 7594 - DNA, 1400 bp, Rattus norvegicus
cctgccctccgggggccccgcgccacccccgccgggccatgcgagcgcgggccccgccgcgatgagctcgcacatcgccaagagcgagtccaagacgtcgctgctcaaggcggcggcggcgagcgggggcagccgggctccccgccacagctctgcgcgggaccccgggctgcgtggccgcaggctgcccggtccctgccccgactcgcctgcaacgtgcggggaccccagctcgcggaggcccctgtgccggccggtgccgcgggacgagggcgcgcgcgggagccggcgtgggctgccccaggcgcactgcaggccccgggagacgctaccgccggcccgcgggcgcgatggggaggaacgggggctggcgccggctctcagtctacggggctccctgcgatcgcggggtcgcggggacccggctcccgctggcacccccgaggcggacccgttcctccaccagctgcgccccatgctcagctccgccttcggtcaggatagatcgttacgaccagaggagatcgaagagctccgagaggccttccgggaatttgacaaggacaaagatggctacatcaactgccgggacctggggaactgcatgcgcaccatgggctacatgcccactgagatggaactcatcgagctgtcccagcagatcaacatgaacctgggtggccacgtggatttcgatgactttgtggaactgatgggccctaaactcctggcggagacagcagatatgatcggtgtaaaggaactgagagacgcctttcgggagtttgacaccaacggtgacggggagataagcacgagcgagctgcgagaggccatgaggaagctcctgggtcatcaggtgggacaccgggacatagaggaaattatccgagacgtggacctcaatggagatggacgagtggacttccsamgakktgtccggatgatgtctcgctgaggccgctgaggggctcctccaggtctgccaactcccacaggcggggagaagagctgagctcgcctcaccccgcagtagctgccgagagcccaggatgtactggcggatggggcctgcctgcaccccggggaggtgcccaccccggacccccacccctstgcactgtgaaagactcacaactcctgcaactggaaaagggggcgcccgccggcgaggaggccacagtgccaagccggtagaggacacgcaaggcgccaagtgccatctgcccarccgmtgctggctggktgggccagggagcccgccagcagaccccacacagcatgtmtgccccgagggcagagcctttcagcgccctcccgatgcccgtcccagctcgcctagccmtttgatytcagaaccawtaaaaaaaaacggagaatgamaaaaaaaaaaaaaaaaa

SEQ ID NO: 7595 - DNA, 284 bp, Rattus norvegicus; identical to SEQ ID NO: 3499

SEQ ID NO: 7596 - DNA, 1400 bp, Rattus norvegicus
cgtcaccactgccgccatgcccggagggctgcttctcggggacgaagcccccaactttgaggccaataccaccatcggccacatccgcttccacgatttcctaggagattcayggggcattctcttttcccacccacgggactttaccccagtgtgcaccacagaacttggcagagctgcaaagctggcgccagagtttgccaagaggaatgttaagttgattgctctttcaatagactctgttgaggaccattttgcctggagcaaggacatcaatgcttacaatggtgcagcacccacagaaaagctaccatttcccatcatcgacgataaggacagggaccttgccatcctgttgggcatgttggatccagcagagaaggatgaaaaaggcatgcccgtgacagcccgtgtggtattcatttttggccctgacaagaaactaaaactgtccatcctctacccagccaccacgggcagarrctttgatgagattctcagagtggttgactccctccagctgacagcatcaaatccagttgccactccagttgactgraagaagggagagagtgtratggtccttcccaccctccytgaaragraagccaaacaacttttccctaaaggagtyttcaccaaagagctcccatbtggcaagaaatacctccgttatacgccccagcyttaagtctgcgggaaytggggctgcaactgctcgmccagcaytgggacctgaggatgmcagctgacagctgcagttccgtagaaagattgtggcgtggtcacagccgaagtcgsgtaggtcgctcgctatactactggctcmttaamtggaaatggcmccaaammawwhwmrrrawwctttactctgtgccttcgccagcattctgcccctccatccatcacagcgccctgctgactggctttctttgaaacgaattatgtgttggtgactgmagggwmkcyrmasrrkcwbtkmbsdrcaaggtagtktcaswrwgrgctccatgctagaatgrtaaacatcttttgtaggttyccaaactgaatcttytgttmcccattgtggrgamccmtaaagtggggrgaamcttwcaattytgtactttcmgtaaataaascaggggagktggggggggggggagagttytytwtaggaaatccatggtgagtttytaycaaagtgggctyccaagaaygkswsgargacagcacatgtacttcbtggagtttccaggtctgctctytagtgatctgtgaatgtgaactcgcyttwtgaaagacaggcmgtgacattgtttgccactaaatgtcctaaaggagtgggttkccatttytaaattctgstgtgtgaggttcaacaataaaatcctgrttvgaaaaaaaaaaaaaaaaaa

SEQ ID NO: 7597 - DNA, 600 bp, Rattus norvegicus
  misc_feature (566)..(566): n is a, c, g, or t
  misc_feature (568)..(569): n is a, c, g, or t
atcttcaacactgtgttcgactggaatcaccagatcattgccacctgcaaccacaatctgctgttcctgctctgccacctcacggccatgatctccacctgcgtcaaccccatcttttatggattcctgaacaaaaatttccagagagayttgcagttcttctwyaacttttgtgacttccggtctcgagacgacgactacgagactatagccatgtctaccatgcatacggacgtgtccaagacttctttgaagcaggcaagcccggttgcatttaaaaaaatcagtatgaatgacaatgaaaaaatctgaagctgctgagaacatacggtcccaggctacatctgtkkawwwwcaagcacagcctgtcacatggtttcattacctgtgctcccagsgmatggattgaggcaggtttggaaagtccargacatcctgtgttgggttttactgcttttgtgatggttgccgtgattacttggcaatctagattactttgtaatctatctggcaacagttttgaccagactctgtgtgtgtgtgtgtgtgtgtgtgtgtgtgtgtgngnnccttgctggctggctggctggccggctggct

SEQ ID NO: 7598 - DNA, 600 bp, Rattus norvegicus
atttgcagaaccatggggccttcgtgcctatgtcacctggattgccttgatggtgtttgtggcacctgccctaggcattgctgcctgtcaggttcttatcttccgggagatacacgccagtctggtgccagggccatccgagagggcagggaggcgccgcagagggcgccggacaggaagccccagcgagggagcacatgtatcagcagccatggccaagaccgtgaggatgacactggtgattgtgattgtctacgtgctatgctgggcacccttcttcctcgtgcagctgtgggcagcgtgggatccggaagctcctctggaaagacccccctttgtgttgctcatgctgctggctagccttaacagctgtaccaacccttggatctatgcttccttcagtagcagtgtctcctcggagttgcgtagcctgctttgctgtgctcagaggcacaccacacacagcctgggtcctcaagatgaatcctgtgccacagccagctcctctttgatgaaggatacaccctcctgagtagctactgggctctttctactcaaaaaccctctgtagctcaactgactatctagggttggccctga

SEQ ID NO: 7599 - DNA, 600 bp, Rattus norvegicus
acccaccaaggcytcytgcgccatccagcccaggggahtgggctcaccactgggccctagacatcagactcagagtcaagtgcaggaggagcgcctggytatcggtgcatcttcaccaatgtgtgcgtccytagagccagaggccatgamtgcattctagggcttagaaatakacatgttgamktaaaatgtgtwtgtggcabwacacakcycagcgaacctstcagtgtgadtgacatakagcccayagytgmgttagggagcgggtgtgacctgtstaggagmtgcytgctggggctgacctcagtcatgagggccaccctgaccctgcaaacttccytgggtgagtgtgacttmtacggcaagggarcctcaagcyacaaacctagatgaggttctggctrgtcacstarcaaaggtgacamsgtcctcagsktggcaggtcaagsyctktgyttaagcctaacktcaatccatatggtgaaggaggacaggyttacgcagctktcmkctgaccacgtgtrctkcagcacgcgagttcacmcawtgaaataaaatgtsttytaargcawwmwwwmwrrrraaaaaaaaaaaaaaaaa

SEQ ID NO: 7600 - DNA, 600 bp, Rattus norvegicus
gatatttttaagctagcgaaagaaaatactcaagcaggattagttcttaaagcaataarcaggggaataaaaacatcatgtwtatataagaaaaccaaggcatgctcacaggtttgagccaagaaagacctggagccctaatccccaccttgtcccaggatgcacctgtcatgatcacagggaagaratgagtctgggatttacaaacctctctctaaacctcagtccagtgttgtgccgctggctgtaccacacacaccgcacaagccccgactgctcccattccattacggcacaggagacatgttctcaccctgcctagcctgctttggtggggggaggcggcggcagggaactctacaagtgtttccagtggtgacctctgttctccctttcaggagctgttttccttcatgtagctagccccatggctaccagaaagaactagaataggagctggctgattttgtcaaaccccaaaacaaacacccctttcctccgggtcttgattttgtcacctgaatctctgggacgagtggccaaggcatttctaggcttactgcaagtatcagatgacgacataagattctagaagtcaag

SEQ ID NO: 7601 - DNA, 600 bp, Rattus norvegicus
agtgaccactccatccgctcctttgatgaccttcagcgcctgctgcacagagactccgtagacgaagatggggctgagctggacttgaacatgacccgagcacattctggagtcgagtcggaaagctyrwctcgagggaggaggagcctagggtctctggctgcagcagagcctgccgtaatcgccgagtgcaagacgmgtacagaggtgttccagatctcgcggaacctcatcgatcgcaccaatgccaacttcctggtgtggccgccctgcgtggaggtgcagcgctgctcgggctgctgcaataaccgcaatgtgcagtgccgggcctcgcaggtgcagatgcggmmggtgcaggtgagaaagatcgaaattgtgagaaagaagccagtcttcaagaaggccacagtgaccctggaggaccatctggcctgcaagtgtgagacagtagtgacccctcggcccgtgactcgaagtcctgggacatccagggagcatcgagccaagacacctcaaactcgggtgaccgttcggacggtgcgaatccgccggccccccaaagggaagcaccgaaagtttaagcacacccatgacaagaag

SEQ ID NO: 7602 - DNA, 600 bp, Rattus norvegicus
gaagaagggacaccacctaacattgctaccatggcagtaccaactagcatatatcagactagcacggggcaatacattgctatagcccaaggtggaacaatccagatttctaacccaggatctgatggtgttcagggactccaggcattaacaatgacaaattcaggagctcctccgccaggtgctacaattgtacagtatgcagcacaatcagccgatggcacacagcagttctttgtcccaggcagccaggttgttgttcaagatgaggagactgaccttgccccaagtcacatggctgctgccacaggtgacatgccaacttaccagatccgagctcctactactgctttgccacaaggtgtggtgatggctgcctcaccagggagtctgcacagtccccagcaactagcagaagaagcaactcgaaagcgggagctgaggctgatgaaaaacagggaagctgcccgggagtgtcgcaggaagaagaaagaatatgtcaaatgtcttgaaaatcgtgtggctgtgcttgaaagtcaaaacaagaccctcattgaggaactcaaggccctcaaagacctttattgccataaagcagag

SEQ ID NO: 7603 - DNA, 1400 bp, Rattus norvegicus
gagcasgractcagsagyaycycrkcctsgragctggacaagttcatagaggtttacctccttccaaacaccagcttysgtgmtgaygtcaaatyagckatcaatgtcstgtgtgatttcctgaaggagagatgcttccgagrtrctgyccacccagtgagggtctccaaggtggtgaagggyggctcctcaggcaaaggcaccacactcaagggcaagtcagacgctgacctggtggtgttccttaacaatytcaccagctttgaggatcagttaaacagacggggagagttcatcaaggaaattaagaaacagctgtatgaggttcagcgtgaaaaacattttagagtgaagtttgaggtccagagttcatggtggcccaacccccgggctctgagcttcaagctgagtgcaccacacctccaacaggaggtggagtttgatgtgcttccagcctatgatgtcctasgtcatgttagcctctacagcaatcctgatcccaagatctacaccatcctcatctccgaatgtatctccctggggaaggatggcgagttctctacctgcttcacggagctccagaggaacttcctgaagcagcgcccaaccaagctgaagagtctcatccgcctggtcaagcactggtaccaactgtgtaaggagaagctggggaagccgctgcccccacagtacgccctggagctgctcacggtctatgcctgggaacgtggaaatggaattactgagttcaacacagctcagggcttccggacaatcttggaactggtcacaaagtaccagcagcttcgaatctactggacaaagtattatgactttcaacacccagatgtctccaaatacctacacagacagctcagaaaatccaggcmygwgrtcctggaccctgctgacccaacagggaacgtggctggtgggaaccaagaaggctggcggcggttggcctcagaggcgaggctgtggctgcagtrcccatgttttatgaacagggrtggttccmcagtgagytcctgggragtrycggtggatgaggcctggtcatgcatcctgctgtgaacccagcagcaccagcccaggaggctccggagtcaggggcacgtgctgctctgctgcaggaccttgacacagtgagggaggccccactcgggatcacagtccatgcttctgatgcccgcccgccatgtttgaatactgtccaatcacagacagccttcctcaacagattcagaaggggcggaaagaactcaagcttgacttccatctgacygtccacctgttgggaggttctgtccaaccatgtctgtcaacaacaataaagtacagcaggtgccawaaaaaaaaaaaaaaaaaaaaaaaaaaaaatctcgcggccgcaagcttat

SEQ ID NO: 7604 - DNA, 600 bp, Rattus norvegicus
gcttatattgtccaagagtacatggagactgacctggcatgcctgctagagcagggcacgctgaccgaggagcacgctaagctattcatgtaccagctgctgcgtgggctcaagtacatccactctgccaacgtgttgcacagggacctgaagcccgccaacattttcatcagcacggaggacctcgtgctgaagatcggggatttcgggctggccagaatcgcggaccagcattactcccacaagggttatctgtcggaagggttggtgacaaagtggtaccgctctccacgactgctcctgtccccgaacaactacacgaaagccatcgatatgtgggcagctggctgcatcctagcggagatgctcacggggaaaatgctctttgctggggctcacgagcttgagcagatgcagctcatcctagacaccatccctgtagtgcgggaggaagacaaggaggagctgctcagggtgatgccgtcctttgtcagcagcacttgggaggtgaagaggccactgcgtaagctactcccggatgtcaaccgtgaagccattgactttctggagaagatcctgacgttcagccccatggaccgg

SEQ ID NO: 7605 - DNA, 1400 bp, Rattus norvegicus
agtctgtcctgattgagccttcctcagcagccaagaaactgcaaggtacacgaatgcagagctccaggctccgagggtcctgtgcactctggaagttggtgtggacgatgttcatcttgcttgtgttagtaactggggtttcagctttcaccactccagcagtggtgcacacaggaagggtttctgagtctcccgttacatcagagaagcacccagttcttggagacgattgctggtttcgtggcagagatttcaaatcggaattgaggctggaaggtgagcccgtggtcctgaggtgccccctggtacctcattcagacacctccagcagttcccgcagccttctgacatggagtaaatcggactcttctcagctgatcccaggagatgagccaaggatgtgggtgaaggatgatacgctctgggttctgccagcagttcagcaggactctggtacctacatctgcacattcagaaacgcgtcccactgtgaacaaatgtctctggaactcaaggtctttaagaataccgaagcctctttccctctcgtctcctacttgcaaatctcagctctctcctccaccgggttacttgtgtgccctgacctgaaagagttcatctccagcagaactgatggaaagatacagtggtataagggctccatcctcttggataaaggcaataagaaatttctgagtgcgggagaccccacacgcctattgatatccaacacatccatgggagatgcaggctattacagatgtgttatgacatttacctacgagggcaaggaatacaacatcactaggaatattgaactccgggtcaaaggaataaccacagaacccatccctgtgatcatttctcccctggagacaataccagcatctttggggtcaagactgatagtcccrtgcaaggtgttcctgggaactggtacatcttccaacaccatcgtgtggtggatggctaacagcacgtttatctcagtggcctacccaagaggccgtgtgactgaggggctacascaccagtactcagagaatgatgagaactacstggaagtgtcgctgatttttgatccagtcacaaaggaggatctraatacagattttaaatgtgttgccacgaatccacggagttttcagtsactccataccacagtcaaagaagtttcttccacgttctmctggggcatcgcgytkgcacctmtgtctctgatcatcttgrttgtgggggcgatatggattcgcagaaggtktaaacgccaggctggaaagacktatgggctgaccaagctaccgactgacaaccaggacttccyttccagcccaaaccaaataaaggaawtgaawtawwamaaaaaaaaaaaaaaaaaaaaaagggcctaaaaaaaacat

SEQ ID NO: 7606 - DNA, 600 bp, Rattus norvegicus
ccctttcctcagctgcgtgcagaaatgctactgcaagccacagcgggctcagcagcactcttgcaagatgtcagaactatccaccattactctacggctggcccgctccaccctactgctcatcccactcttcggaatccactacacagtattcgccttctctccagagaacgtcagcaagagggaaagacttgtgtttgagcttgggctgggctccttccagggctttgtggtggctgtactctactgcttcctgaatggggaggtacaggcagagattaagaggaaatggaggagctggaaggtgaaccgttacttcactatggacttcaagcaccggcacccgtccctggccagcagtggagtaaatgggggaacccagctgtccatcctgagcaagagcagctcccagctccgcatgtccagcctcccggccgacaacttggccacctgaggcctgtctcctcctccttctgcacaggctggggctgcgggccagtgcctgagcatgtttgtgcctctcccctctccttgggcaggccctgggtaggaagctgggctcctcccaaaggaagagagagatagggataggctgatatt

SEQ ID NO: 7607 - DNA, 600 bp, Rattus norvegicus
gtactctactgcttcctgaatggggaggtacaggcagagattaagaggaaatggaggagctggaaggtgaaccgttacttcactatggacttcaagcaccggcacccgtccctggccagcagtggagtaaatgggggaacccagctgtccatcctgagcaagagcagctcccagctccgcatgtccagcctcccggccgacaacttggccacctgaggcctgtctcctcctccttctgcacaggctggggctgcgggccagtgcctgagcatgtttgtgcctctcccctctccttgggcaggccctgggtaggaagctgggctcctcccaaaggaagagagagatagggataggctgatattgctcctcctgtttgggtcccacctactgtgattcattgagcctgatttgacatgtaaatacacctcaaatttggaaagttgccccatctctgcccccaacccatgcccctgctcacctctgccaggccccagctcaacctactgtgtcaaggccagcctcagtgatagtctgatcccaggtacaaggccttgtgagctgaggctgaaaggcctgttttggagaggctggggtagtgcc

SEQ ID NO: 7608 - DNA, 600 bp, Rattus norvegicus
gtgcccaccccagcagcctttcagcaaattgactttggatgtggacccttctcagcctgtaccaagtactgcagttggctagggatgcasstcagtttcctgagcatcctttggagcaggtcaacctgaggctccttttgcttacccgacatctaagttgtccaggtgctcggctcctgtgtgcctggatgacgggaksgykccggggtctttcagtcaaagacttacattgaggtggggtgagagtcagagaaaagttctggtgcttttcatttgttctaagagctgagagccaggaatgcagagtcaattgggaaggagatgggatagctgatgatcttaccatgtccatgactgtgcccctgattcaagaccggatcatgtggtggctttatttctacacttcttgtccacaatggacagtctgaggaagctcttctttcagccacaacaaccacagaaagccctttcttctcccctcttgtttctccataagtcaaagccatgtttagaacggaccagccaccttgcgatgaaatcactgagttctgaagcaactttcaatttccacgagccaagtcctgggtccagggacgcccc

SEQ ID NO: 7609 - DNA, 600 bp, Rattus norvegicus
tatccatcgagacttggcagccagaaatgtgctggtaacagaaaacaacgtgatgaagatagcagactttggcctggccagggatatcaacaacatagactattacaaaaagaccacgaatgggcgacttccagtcaagtggatggctcctgaagccctttttgatagagtttacactcatcagagtgatgtctggtccttcggggtgttaatgtgggagatcttcactttagggggttcaccctacccagggattcccgtggaggaactttttaagctgctcaaagagggacacaggatggacaagcccaccaactgcaccaatgaactgtacatgatgatgagggactgctggcatgctgtaccctcacagaggcccacgtttaagcagttggtggaagacttggatcgaattctgactctcacaaccaatgaggaatacttggacctcacccagcctctcgaacagtattctcctagttaccccgacacaaggagctcttgttcttcaggggacgattctgtgttttctccagaccccatgccttatgacccctgcctgcctcagtatccacacataaacgggagtgttaaaacaaa

SEQ ID NO: 7610 - DNA, 600 bp, Rattus norvegicus
gacttggcagccagaaatgtgctggtaacagaaaacaacgtgatgaagatagcagactttggmctsgccagrgatatcaacaacatagactattacaaaaagaccacgaatgggcgacttccagtcaagtggatggctcctgaagccctttttgatagagtttacactcatcagagtgatgtctggtccttcggggtgttaatgtgggagatcttcactttagggggttcaccctacccagggattcccgtggaggaactttttaagctgctcaaagagggmcacaggatggacaagcccaccaactgcaccaatgaactgtacatgatgatgagggactgctggcatgctgtaccctcacagaggcccacgtttaagcagttggtggaagacttggatcgaattctgactctcacaaccaatgaggaatacttggacctcacccagcctctcgaacagtattctcctagttaccccgacacaaggagctcttgttcttcaggggacgattctgtgttttctccagaccccatgccttatgacccctgcctgcctcagtatccacacataaacggsagtgttaaaacawraattccatcg

SEQ ID NO: 7611 - DNA, 600 bp, Rattus norvegicus
tcttcagagactccagggtggacagaggcagggctatgggtcaggagaccttgcagaaagatgggagacggcccttttccacacatgcacagccagcagcccctgctatacagcctctccacggtgtcctggcctctctggtgctttctacgggaacatcatcctgaggaagccacttctaaccgggagtaaagagtttgctaccaacagcctaagaaggggatcaagggactcttgttcttttataagtttttgactttttttttaaaaaaacaaacaaacagggattaatcccatggccatttttctgtggtactctggcctcaaatcctaaaccaagaatcactgtgtttacatgaaatgacaatttgatactgtatttgatataaaactattttttgttactggggtttacatcaaagcacgttgtttatacaactgactgatttctggggcactctcactgagacctggcagcacaggtgctggaaggcctggtaagccaggtcctgtcctcctggtaagcccaggggctgtcctcttagccaggggggctgtctcctgttagccaggaggggcgtgtcctcctggtaagacagg

SEQ ID NO: 7612 - DNA, 600 bp, Rattus norvegicus
ckgcwgcywkccwmgcsccagcmtstctssrsstwmayacgyaswckmsswgggacatctctacactgttcccatccgggaacagggcaacatctacaagcccaacaacaaggccatggcagacgaggtgaatgagaagcaagtgtacgacgcgcacaccaaggagattgatctggtcaaccgcgaccccaagcatctcaacgacgacgtggtcaagattgactttgaagatgtgattgcggaaccagaagggacacacagtttcgacggcatctggaaggccagcttcaccaccttcactgtgacaaaatattggttttaccgcttgctgtctaccatcttcggcatccctatggcgctcatctggggcatctactttgscatcctctctttcctgcacatctgggcagttgtaccgtgcatcaagagcttcctgattgagattcagtgcatcagccgtgtctattccatctacgtccacamcttctgtgatccactctttgragsggattggsaagatattcagcaatattccgatcagcacgcagraagagatatagtgacatttcagggatggaggcttttctcccccttactatt

SEQ ID NO: 7613 - DNA, 1400 bp, Rattus norvegicus
tacgggcagctggtcttcaccgtcaaggaggccgccgcccagcaacaggagtcggctaccactcagaaggcagagaaggaagtcacgcgcatggtcatcatcatggtcatcttcttcctgatctgctggcttccctatgccagtgtggccatgtacatctttacccaccagggctccaacttcggccccatcttcatgacccttcccgctttctttgcyamgascgcctccatctacaacccaatcatctacatcatgatgaacaagcagttccggaactgcatgctcaccassctctgctgcggyaagaatccactgggagatgatgaggcctctgccactgcctccaagacggagaccagccaggtggctccagcctaagcctgsccagagactgtggctgactgtaggagtctcctgtccccactcaccccagccacagccsscacsaggagcagcacccgttggaatgaggtcatgcaggctcccycagtgttcttttctttgtttttaatsamkwsrtgaaagcaaaatgaggctccccactcaacagggacagcctgacaaaggacatccatccmccaagacccccagcctggagtccccaattcccgggggccagcgggatctgtacccctcccctcagcttgtgtctcaggaacatgacaagtgtcccggcttacggctaagtrtyyrgsacagarkggammamawarwarmwrawtaataaatgytacctggatgaarrrarraawrrrwramwraawrarwrrawatatgagtgaagggattaacagacrsgarsatggatgtcmtcaggtgcccaacctggcagacctagtcatgtttgactggaatctgtwcactgtttdacatacctgccbtggttttctmtgcaccccaccsscacsmsrgatgggatctcccaaatccggggccctgacagaatgtggctgcttcaaagacagatgmasgrrrggagaaagaaggaggaaggaagggagacacacagagaaaattgtgtgagtgtgtgagtgtgtgtgtatgtgtgtgtgcaaacactttgtatataaagagcaaaactggtagttgtgttacaggtaacaccaactaatataattaattagccmtcwwwawrrwmwmwrmwwawwagtgactgcttgggagttgggcagggcctaagcactcagataaggtatttcccccagcctcagtaggcttttacaaatgaaccagaccttcaggcctgtgtagaaatggagctggatcacagagatgaatgacagtgacagcagtgtgggctgcagtcattaggactaagaaagcattgagaccaggagtcccaggcaaggcctaggtcctcccttcagtaagaaaaccttggctcttgtctctcaacc

SEQ ID NO: 7614 - DNA, 600 bp, Rattus norvegicus
aaaattccaatttttttgggggggtgggatggaaaaggaacccaattttcttatggacagatatttttaacctaatggcacaaagtcttagaatattattatgtgccctgtgttccctgttcttcgttgctgcattttcttcacttgcrgacagacttggctctcgataaacttttrtcacaaattgaaatatatttttttcaactrccaatcwaggctgggaggctcgaccacctcaacattggatacatcacttgccaatgtacataccttgtwatatgcagacatgtatttcttacgtacactgtacttctctgtgcaatttgtaaacagaaattgcaatatggatgtttctttgtatwataaatttttccgctcttaatgaaaaawwamwrwwwaawwgacatactcaggataacagagaatggtggtgtgcagtggtccaggattctgtaatgcttcatgcaggccattttgaaatgagaattgaaaaccctttttcttatggtggagttggttcttacatgcatccttttcctgttccatggcttctgtgagtaggagaggctgtgttgaagagctcagctggtggcttacccg

SEQ ID NO: 7615 - DNA, 600 bp, Rattus norvegicus
  misc_feature (569)..(570): n is a, c, g, or t
  misc_feature (573)..(573): n is a, c, g, or t
  misc_feature (575)..(575): n is a, c, g, or t
  misc_feature (581)..(581): n is a, c, g, or t
ggaagcagcaggtctagcctgtggacccttccaggcaggttcctgttccagatcatcccacggggagcaggtcccaggtgctggccccaaaggcttccatccgagtcccagttatggtacgtctttggtagtgggacccagctcacaatcctagggcagcccaagtctgaccccttggtcactctgttcctgccttccttaaagaatctccaggttaagaaggcgacactagtgtgtctggtgagcgaattctacccaggtactttggtggtggactggaaggtagatgggatccctgtcactcagggtgtggagacaacccaaccctccaaacagaccaacaacaagtacgtggccagcagctacctgacactgatgtctgaccaatgggtgcctcacagtagatacacctgccaggtcactcatgaaggaaacactgtggagaagagtktgtcwcctgctgaatgttcttagaccacgatccttcctgaagcatcagggagcctggatcttaagttccagaaaaagttttttgttttgtttttttgttcttgttttcttttgccatnngantnatcccnctgtttttcctgtgtgtat

SEQ ID NO: 7616 - DNA, 1400 bp, Rattus norvegicus
tacagcatgtacaagcttcaacaccgctatggtgacgtgttcagcctgcagatgggttggaagcccatggtcattgtcaacagactgaaagcggtgcaggaagtgctggtgactcatggagaggacactgctgaccgccctccagtgcccatctttaagtgcctgggtgtgaagcccagatcccaaggtgtggtctttgcatcttacgggcctgagtggcgagagcagaggcgattctctgtgtccaccctgcgcaccttcggcatgggcaagaaatccctggaggagtgggtgaccaaggaggccggccacctctgtgatgccttcactgcccagaatgggcggtccatcaatcccaaggccatgctgaacaaagccttgtgtaatgtgatcgcatccctcatttttgcccgtcgctttgaatatgaagacccttacctcatcaggatgctgacactagtggaagaaagtttgatagaagtctctggtttcattcctgaggttcttaacacgttcccagcactgctgcgcatcccagggctggctgacaaggtcttccaaggtcagaagaccttcatggccttcctggataacctgctggctgagaacaggaccacctgggaccctgcccagccaccccgaaatctgactgatgccttcctggctgaggtggagaaggccaaggggaatcctgagagcagctttaatgatgagaacctacgcatggtggtagttgacctgttcactgcagggatggtgaccaccgccaccacactgacctgggccctactgctcatgattctatacccggatgtgcagcgcagagtccaacaagagattgatgaggtcatagggcaggtgcggtgtccagagatgacagaccaggcccacatgccctacaccaatgctgtcatccatgaggtacagcgctttggggacattgctccattgaatttgccacgcatcacgagttgtgacattgaagtgcaggacttcgtcatccccaaggggacgaccctcatcatcaacctgtcgtccgtgctgaaggatgagactgtctgggagaagcccctccgcttccaccctgaacacttcctggatgcccagggcaactttgtgaagcatgaggccttcatgccattctcagcaggccgcagagcatgccttggggagcccctggcccgcatggagctcttcctcttcttcacctgcctcctgcagcacttcagcttctccgtgccggccggacagccccggcccagcacccttggcaactttgctatttcagttgcccccttgccctaccagctctgtgctgcggtacgggagcaaggacactaattccagtccagctctacagggcaagctgagccacgtttaataaaccagtcttgaggctg

SEQ ID NO: 7617 - DNA, 1400 bp, Rattus norvegicus
caacaccgctatggtgacgtgttcagcctgcagatgggttggaagcccatggtcattgtcaacagactgaaagcggtgcaggaagtgctggtgactcatggagaggacactgctgaccgccctccagtgcccatctttaagtgcctgggtgtgaagcccagatcccaaggtgtggtctttgcatcttacgggcctgagtggcgagagcagaggcgattctctgtgtccaccctgcgcaccttcggcatgggcaagaaatccctggaggagtgggtgaccaaggaggccggccacctctgtgatgccttcactgcccagaatgggcggtccatcaatcccaaggccatgctgaacaaagccttgtgtaatgtgatcgcatccctcatttttgcccgtcgctttgaatatgaagacccttacctcatcaggatgctgacactagtggaagaaagtttgatagaagtctctggtttcattcctgaggttcttaacacgttcccagcactgctgcgcatcccagggctggctgacaaggtcttccaaggtcagaagaccttcatggccttcctggataacctgctggctgagaacaggaccacctgggaccctgcccagccaccccgaaatctgactgatgccttcctggctgaggtggagaaggccaaggggaatcctgagagcagctttaatgatgagaacctacgcatggtggtagttgacctgttcactgcagggatggtgaccaccgccaccacactgacctgggccctactgctcatgattctatacccggatgtgcagcgcagagtccaacaagagattgatgaggtcatagggcaggtgcggtgtccagagatgacagaccaggcccacatgccctacaccaatgctgtcatccatgaggtacagcgctttggggacattgctccattgaatttgccacgcatcacgagttgtgacattgaagtgcaggacttcgtcatccccaaggggacgaccctcatcatcaacctgtcgtccgtgctgaaggatgagactgtctgggagaagcccctccgcttccaccctgaacacttcctggatgcccagggcaactttgtgaagcatgaggccttcatgccattctcagcaggccgcagagcatgccttggggagcccctggcccgcatggagctcttcctcttcttcacctgcctcctgcagcacttcagcttctccgtgccggccggacagccccggcccagcacccttggcaactttgctatttcagttgcccccttgccctaccagctctgtgctgcggtacgggagcaaggacactaattccagtccagctctacagggcaagctgagccacgtttaataaaccagtcttgaggctgctgctgttttctgcttcg

SEQ ID NO: 7618 - DNA, 1400 bp, Rattus norvegicus
atacagcatgtacaagcttcaacaccgctatggtgacgtgttcagcctgcagatgggttggaagcccatggtcattgtcaacagactgaaagcggtgcaggaagtgctggtgactcatggagaggacactgctgaccgccctccagtgcccatctttaagtgcctgggtgtgaagcccagatcccaaggtgtggtctttgcatcttacgggcctgagtggcgagagcagaggcgattctctgtgtccaccctgcgcaccttcggcatgggcaagaaatccctggaggagtgggtgaccaaggaggccggccacctctgtgatgccttcactgcccagaatgggcggtccatcaatcccaaggccatgctgaacaaagccttgtgtaatgtgatcgcatccctcatttttgcccgtcgctttgaatatgaagacccttacctcatcaggatgctgacactagtggaagaaagtttgatagaagtctctggtttcattcctgaggttcttaacacgttcccagcactgctgcgcatcccagggctggctgacaaggtcttccaaggtcagaagaccttcatggccttcctggataacctgctggctgagaacaggaccacctgggaccctgcccagccaccccgaaatctgactgatgccttcctggctgaggtggagaaggccaaggggaatcctgagagcagctttaatgatgagaacctacgcatggtggtagttgacctgttcactgcagggatggtgaccaccgccaccacactgacctgggccctactgctcatgattctatacccggatgtgcagcgcagagtccaacaagagattgatgaggtcatagggcaggtgcggtgtccagagatgacagaccaggcccacatgccctacaccaatgctgtcatccatgaggtacagcgctttggggacattgctccattgaatttgccacgcatcacgagttgtgacattgaagtgcaggacttcgtcatccccaaggggacgaccctcatcatcaacctgtcgtccgtgctgaaggatgagactgtctgggagaagcccctccgcttccaccctgaacacttcctggatgcccagggcaactttgtgaagcatgaggccttcatgccattctcagcaggccgcagagcatgccttggggagcccctggcccgcatggagctcttcctcttcttcacctgcctcctgcagcacttcagcttctccgtgccggccggacagccccggcccagcacccttggcaactttgctatttcagttgcccccttgccctaccagctctgtgctgcggtacgggagcaaggacactaattccagtccagctctacagggcaagctgagccacgtttaataaaccagtcttgaggct

SEQ ID NO: 7619 - DNA, 600 bp, Rattus norvegicus
acacagctgcacttgctaaggactgggtggttgtggtatcagagatgcaggcaggaggacctgctggaacccagatactgtgtgaagtccccacagggacagtggtcttccatgaggtcaaggtgtttcctgacttctgccagtgcatgctgcttgggcaaaggtaattctcttgacttgtgaaagtggcccagatcataagattttttcaggtctcctttcagctgcaagtcggtagggcgaaaagttttggccaagaacaaccacttcacagggtctcctgtgctcagcactaaagcacaaatctactggagatgtgtgtgccaagttccaaggtcttagacctttgagtgtgaggcagtatagagtcggggcctttaatgatataattcgtgtgaaatgagattactgggttgtgcctactccagtgcccagagagcctcccaagaagagagtgaggtgccaggtcacagagacagacccaagtggaagacaggaagtcagacttctgtaagtggaggaaagcagttggaactcctacagtcttggctccatcactcaatcacttccctggctgtgaaaaataaacttgagttgttg

SEQ ID NO: 7620 - DNA, 1400 bp, Rattus norvegicus
acataaagaccctcatagaaaaaaccaacgcagagcgcaagtccctgctcaacagtttagaggaagccaaaaagaagaaagagggtgctctagatgacaccagggattctgaaatgaagctgaaggctttcccggaagtgtgtaacgagaccatgatggccctctgggaagagtgtaagccctgcctgaagcacacctgcatgaagttctacgcacgcgtctgcaggagcggctcggggctggttggtcgccagctagaggagtttctgaaccagagctcacccttctacttctggatgaacggggaccgcatcgactccctgctggagagtgaccggcagcagagccaagtcctagatgctatgcaggacagcttcactcgggcgtctggcatcatacatacgcttttccaggaccggttcttcacccatgagccccaggacatccaccatttctcccccatgggcttcccacacaagcggcctcatttcttgtaccccaagtcccgcttggtccgcagcctcatgcctctctcccactacgggcctctgagcttccacaacatgttccagcctttctttgatatgatacaccaggctcaacaggccatggacgtccagctccatagcccagctttacagttcccggatgtggatttcttaaaagaaggtgaagatgacccgacagtgtgcaaggagatccgccataactccacaggatgcctgaagatgaagggccagtgtgagaagtgccaagagatcttgtctgtggactgttcgaccaacaatcctgcccaggctaacctgcgccaggagctaaacgactcgctccaggtggctgagaggctgacccagcagtacaacgagctgcttcattccctccagtccaagatgctcaacacctcatccctgctggaacagctgaacgaccagttcacgtgggtgtcccagctggctaacctcacacagggcgatgaccagtaccttcgggtctccacagtgacaacccattcttctgactcagaagtcccctctcgtgtcactgaggtggtggtgaagctgtttgactctgaccccatcacagtggtgttaccagaagaagtctccaaggataaccctaagtttatggacacagtggcagagaaagcgctacaggaataccgcaggaaaagccgcatggaatgagacagaagcatcagttttctatatgtaggagtctcaaggagggaatctcccagctttccgaggttgctgcagacccctagagaactcacatgtctccagcgcctaggcctccaccccagcagcctctccttcctctgggttctgtactctaatgcctgcacttgatgctctgggaagaactgcttcccccacgcaactaatccaataaagcacctt

SEQ ID NO: 7621 - DNA, 1400 bp, Rattus norvegicus
acattctgggcttcgtgttccctttccttatcattctcaccagctatactcttatttggaaagccctaaagaaggcttataaaattcagaagaacacgccaagaaatgatgacatctttaggataattatggcgattgtgcttttcttcttcttttcctgggttccccaccaaatattcacttttctggatgtgctcattcagctgggcattatccgtgactgtgaaattgctgacattgtggacaccgctatgcccatcaccatctgcatagcttattttaacaattgcctgaatcctctgttttatggctttctggggaaaaaatttaaaaaatatttcctccagcttctgaaatacattcccccaacggccaagtcacacgcaggcttgtcaacaaaaatgagcactctttcctaccgcccttcagataacatgagttcatctgccaaaaagtctgcatcttttttgaagtggaggtagagggttcaaagcctgcaagtgaagtgatttcctgacagcagaagccagaggaccatttgggctaagcagctcactcactaccgaaggagtgttcaacctccagcaatcctttcagggttgaagcagagaaagcactcagtgtacacattttcaaaagtgggaaacaaaagcttttttcccctttaaaacaaattggagcaaagccactgttaaccgcctttttttgttgactgaataactgctttaaggacaatgtcagaaattgagtggctgtatggatttgggggttagggaggaggtgtactagcagaaacgtaatgtctccagtcccctctcaattctgttacttttgatttccacttgaaggtatttagaagctattaaatctgtagacaatcaaaaggagatgggaggtcaagagtttctaagggtccaggaagctacccatctgtttagttactagtgactatgacaccattgttcctgacacaacacagttaagacttgctagacagtagtcatcaagtttcaaaatgctttgtgaagttcagccagtgcttaagaattcagagccatgtgccaaaacagtaccacagaacagcttgcctgaataatgtcttactgtagttgcaaagccaaactgcttgtcaagctgtgattctgtcccagatagttgtgtcttcctagttggatcagtttaatttcatatctaagaaatgtataatttcatatctaagaaatgtatatgaaatgtataatttcatatctaagaaatgttaagcagatttatcataaagtatgttttatggttctaaaaatgtatattttatatatgttatgtatatctatatctctaagctgttgtttgattgaagttgtagcaaagttgtatttatcttgaaataaaaatttatcata

SEQ ID NO: 7622 - DNA, 1400 bp, Rattus norvegicus
atcgagtcttgtcaacaggacgagaacatcatgaggtccatgcagctctttgataatgtcatctagctccccagggagaggggttagtgtgtcctagggtgaccaggctgtagtcctagtccagacgaacctaaccctctctctccaggcctgtcctcatcttacctgtaccctgggggctgtagggattcaatatcctggggcttcagtagtccagatccctgagctaagtcacaaaagtaggcaagagtaggcaagctaaatctgggggcttcccaacccccgacagctctcaccccttctcaactgatacctagtgctgaggacacccctggtgtagggaccaagtggttctccaccttctagtcccactctagaaaccacattagacagaaggtctcctgctatggtgctttccccatccctaatctcttagattttcctcaagactcccttctcagagaacacgctctgtccatgtccccagctggcttctcagcctagcctttgagggccctgtggggaggcggggacaagaaagcagaaaagtcttggccccgagccagtggttaggtcctaggaattggctggagtggaggccagaaagcctgggcagatgatgagagcccagctgggctgtcactgcaggttccggggcctacagccctgggtcagcagagtatgagttcccagactttccagaaggtccttagcaatgtcccagaaattcaccgtacacttctcagtgtcttaggagggcccgggatccagatgtctggttcatccctgaatcctctccctccttcttgctcgtatggtgggagtggtggccaggggaagatgagtggtgtcccggatgatgcctgtcaaggtcccacctcccctccggctgttctcatgacagctgtttggttctccatgacccctatctagatgtagaggcatggagtgagtcagggatttcccgaacttgagttttaccactcctcctagtggctgccttaggggaatgggaagaacccagtgtgggggcacccattagaatctttgcccggctcctcacaatgccctagggtcccctagggtacccgctccctctgtttagtctacccagagatgctcctgagctcacctagagggtagggacggtaggctccaggtccaacctctccaggtcagcaccctgccatgctgctgctcctcattaacaaacctgcttgtctcctcctgcgccccttctcagtcagccagggtctgaggggaagggcctcccgtttccccatccgtcagacatggttgactgctttgcattttgggctcttctatctattttgtaaaataagacatcagatccaataaaacacacggctatgcacaaaaaaaaaaaaaaaaaactcgag

SEQ ID NO: 7623 - DNA, 600 bp, Rattus norvegicus
ttgctgtggtgctgactgtctttgctgtctgcttcgtgcctttccacatcacccgcacaatttattaccaggcaagactgttgcaagctgactgtcatgtgctgaacattgtcaatgtggtttacaaggtgactcgacccctggccagtgctaatagctgtcttgatccagtgctctatctcttcacgggggacaagtatcgaaaccagctccagcagctatgccgaggcagcaaacccaagccccgaacagctgcctcctccctggccttggtgactctacatgaggaaagcatcagcaggtgggcggacacccaccaagacagcaccttctctgcttatgagggagatcgattgtaaccctgctgctggatatgaagggaactaactgcagggcagaggggagggagcttgttagtatcacttgacaggggcatcagctgtcctcttttatagccgaagtttgaaggagctactcctctgcctctactttctcttcttctatccctacctggggccactgttcctgtttctagaacctcagtatcatttgcccaggtccttccatggcatggatttctctgaccagagtagagaattc

SEQ ID NO: 7624 - DNA, 600 bp, Rattus norvegicus
cagcatctacttctgcgtgcagaaatgctactgcaagccacagcgggctcagcagcactcttgcaagatgtcagaactatccaccattactctacggctggcccgctccaccctactgctcatcccactcttcggaatccactacacagtattcgccttctctccagagaacgtcagcaagagggaaagacttgtgtttgagcttgggctgggctccttccagggctttgtggtggctgtactctactgcttcctgaatggggaggtacaggcagagattaagaggaaatggaggagctggaaggtgaaccgttacttcactatggacttcaagcaccggcacccgtccctggccagcagtggagtaaatgggggaacccagctgtccatcctgagcaagagcagctcccagctccgcatgtccagcctcccggccgacaacttggccacctgaggcctgtctcctcctccttctgcacaggctggggctgcgggccagtgcctgagcatgtttgtgcctctcccctctccttgggcaggccctgggtaggaagctgggctcctcccaaaggaagagagagatagggataggctgatatt

SEQ ID NO: 7625 - DNA, 600 bp, Rattus norvegicus
  misc_feature (12)..(12): n is a, c, g, or t
  misc_feature (70)..(70): n is a, c, g, or t
  misc_feature (90)..(90): n is a, c, g, or t
ggcccatgcttngacagacaaatctaagcccatgactggtgtggaacaatggccatatagggctgtggcncaggctttagaggtcatccntcggaccttgatccagaactgtggggccagtaccattcgtctgcttacctcccttcgggccaagcacacacaggagaattgtgagacctggggtgtgaatggtgagactggtaccttagtggacatgaaagagctgggtatttgggagccattggctgtgaagctacaaacatacaaaacagcagtggagactgcagttctgcttctgcggattgatgacattgtctctggccacaagaagaagggtgatgaccagaaccggcaaaccggtgctccagatgctggccaggagtgagtgctaagcaaggtgactgaaccacagaaccagcagtctcccctttcctgagccagagttccaggaacactgtggacatctttgtttgcaaaggatcaggttgaggggcagcccccagtctgtcccatctcggtttgcaaaaagcactgacgtgtatctcttctgttgtaagcttccattcagtttgcttccagtgattaaatctaagtcatttg

SEQ ID NO: 7626 - DNA, 626 bp, Rattus norvegicus
caaaacagacggttacagcaccaacagctgtactatcaagatgactccaccaggaagaccttggatgcttacagactgtacctgcagtctcctcgcagctatgaagacccttacggtgatgaccgagttcacttcccagcttctactgattactcaacgcagtatggactgaaatcaaccacaaattacgtagacttttactccactaaacgaccttcttatagagccgaacagtaccctgggtccccggactcctgggtgtagcatcaagacggctgcctgccgagggccgattttcttctgactctgcttggactgaggggagtccgtcttgctgatgatggtgaccgtgaaagtgaagtggaagggatgagtgaagaggttttgtttgtttttttttttttcttttttgaggaattttcagggaagtgaagaaccccttgggagaggactttctacgctctgtgtaggtgttagatctaattacttgtagattctagtggtgaaggtgtgggtgacgtgctgagaggcttgagaagtgggtgagatgagaggggtatgtgtaggtcaaatcaaatgacagatgatttttttaatgtgaataaagttatgttcagatagtttgt

SEQ ID NO: 7627 - DNA, 556 bp, Rattus norvegicus
  misc_feature (176)..(177): n is a, c, g, or t
  misc_feature (181)..(182): n is a, c, g, or t
gactcatgggactcaacccaggcctttgcatattatgtcagcaccatgtgatggggcccatacctcacaggcccatcctcagtaccgtcagcttgcagggactgagccatgggctgcccagaacccctaaccactgattctgtcatcctcctcctgccactttgtctatttctgtnntgtnntcatcttccctggcactgaggtcctggaggcctcaatgaggcccagcaaaggcattcccacagctgagttcagaggctttgggccacttactcggtactctgggaaccccaggccaggttatgggtctctgtcttcactgaggaaagcccctacccctgctctggggtttcctgcttcactcctcaagcaggtacccaggcttagagcagtataggaatgcctaccatcaggcctctccctcctgggcttcccagtctggtcccgggcctcaatccctttcatgcctttattcctttcttttttttttttttaaaccaaaaaagtttttcttataaaataaattttgggcaaacatcaaaaaaaaaaaaaaaaa

SEQ ID NO: 7628 - DNA, 504 bp, Rattus norvegicus
aaggtgggcatcaacgatttctgccccatgggctttggagtcaagagggcctactataatggcatcagcctcttcaacaaccctgtgccctactgggaagtgcagcctgccaccttccgctgcgtcactgaccgcctggccatccaatttggaaattataagaagtagaagcagtggtagccaccatggtggccttggtgagagtctctgaggaacatagccagttgttccacaggggaaggggaagcaaagaagcaacacctttgttccccaatattaactcactgcccaccacagcttcctctggctcctaagcatgcacatatgcacatggcctggcctctcccattcccctcagcctttgagatttaaccctcacccctgggtccctgctgtggcaggaggtggtggtcagttgtacccagcaggagggagtgctgcttatgaggtcagttgtctctcaattaaagaaacactgtgcaatatgaaaaaaaaaaaaaaaaa

SEQ ID NO: 7629 - DNA, 644 bp, Rattus norvegicus
gccaggctccttgataagcttgtgggagagttcctcgaagtgacatgcatcagccttacattcatctgtgatcacccacagatcatgagtcctctggccaaatggcaccgttgcaaagagggtctaactgagcgcttcgagctgtttgtcatgaagaaggaaatatgcaatgcgtacactgagctgaacgaccccgtgcggcagagacaactgtttgaagaacaggccaaggccaaggctgctggtgacgatgaggccatgttcatagatgagaacttctgtactgccctggagtacgggctgcccccaacagctggctggggcatgggtatcgaccgagtcaccatgtttctcacagactccaacaatatcaaggaagtacttctctttcctgccatgaagcctgaagacaagaaggaaactgcaacagccaccgagaccccagaaagcacagaggccagcccctctgtctagaagactatgcaactatggcctttgcgcttgagcagcagatctggtctgagggagggaggggttcctgtgtggtgcccgcccactggacactgcagtccaaccaccacaagagagaagaattaaagaatttctttttattccttgttaccaaataaaccatttctctcttt

SEQ ID NO: 7630 - DNA, 562 bp, Rattus norvegicus
ctttgcatgcctgccttactgccggtggcttcccgccttttattgctaccccgagctctgctgtccatggcttctggaagccctccgtcccagccgtcgccggcctcgggctccggctacgttccaggatcagtctctgcagcctttgtcacttgtccgaacgaaaaagtcgccaaggagattgccagggcagtggtagagaagcgcctggcagcctgcgtcaacctcatcccgcagatcacatccatctatgaatggaaaggaaagatcgaggaagatagtgaggtgctgatgatgattaaaacacaaagctccctggtccctgctctgacagagtttgtccgatctgtgcacccttatgaagttgccgaggtgatcgcactgcccgtggagcaggggaatcccccgtatctgcactgggtgcaccaggtcacggaatcagtgtcaggctctggcaaggccctaccatgacaagccctgttcccgccacagcttcctctgctcaatgctcttgggcttccacatgatgactgagcccctaataaatcctctcctgctctcg

SEQ ID NO: 7631 - DNA, 600 bp, Rattus norvegicus
gcctccgtccttttctcacagcaatgaattcgcaatctgaacccaagtgaaaaaacaaattgcctgaattgtactgtatgtagctgcactacaacagattcttaccgtttccacaaggtcagagattgtaaatggtcaatactgacttttttttttattcccttgactcaagacagctaacttcattttcagaactgttttaaacctttgtgtgctggtttataaaataatgtgtgtaatccttgttgctttcctgataccagatcgtttcccgtggttggttagaatatattttgttttgatgtttatattggcatgtttagatgttgggtttagtcttctgaagatgaagttcagccattttgtatcaaacagcacaaccagtgtctgtcagtttccatgcataaagtttagtgagacgttatatgtaagatctgatttgctagttcttcctggtagagttataaatggaaagattacactatctgattaatagtttcttcatactctgcatataatttgtggctgcagaatattgtaatttgttgcacactatgtaacaaaactgaagatatgtttaataaatattgtacttattgg

SEQ ID NO: 7632 - DNA, 603 bp, Rattus norvegicus
tgatggtttcggaaatgtgtaaatcacctggaagaaattaatggtgtgacttaaaatatttttttttgacaagggagagtggttggtggtcttctgttctttgggctatgcatctgagatgtttgatgtgttcaggacgcatgtacataatgcgtgcataccacttttgttcttggtttgtaaattaacttttataaactttacctttttatacataaacagaaccgagtttctaaggctacctttgtattctctcctgtacctcttgagccttgaactttgacctctgcagcaataaagcagcatttctacacatataaggtcatttttttaagaaaaagaatgcacagagttgttacatttttaagtgctgcatttaaaagatacagttactctagtttgattaaattcttgcaaagtatcccttctgtaaaatttgtgatacaatgctgtgccctaaagtgtatttttttactaatagtttattatggcacatcagcacgatttctgtttagataatacaccactacattctgttaataatcattaggtgtgaaaggatttcttttgtggttattaaaaatctcaaatttctaaatctgc

SEQ ID NO: 7633 - DNA, 590 bp, Rattus norvegicus
  misc_feature (106)..(106): n is a, c, g, or t
cctctgaagccccctgtgtgtcccgagcagagactccatttctggggttttgtatatctccaggcaaggtgaaggcaccctttggacccacctcataagccatctntgcatccccatgaacccagactagctgtggtgccagaaacccaacttaacaacagctctcagtgcaaactgtcctaggaaaacttaaaaatgacaggcagggaggaagatgcatatcaaaagcttggcttgaaagcctaattaagggagttttagataaactagttatcacttcctgagtgttgcatgcagccacttgggtcccaggagtttcctgaggtgaatcagtagggtcacgcgaatgcctcactatactatgacttgagtccagtgagatctcagtaggattaatacttcagggatccttaatattttgatttgttttctgagattggattttattttattttacctgatatttcagttcatctaaatcttgtgttctgtacatgtgatgtttgactgtaccatcgactgttatggaagttcagcgttgtatgtctctctacactgtggtgcacttaacttgtggatttttttatact

SEQ ID NO: 7634 - DNA, 597 bp, Rattus norvegicus
tttggagtgaatatattatctttggggagcctggggcattttggggaacccatggatctcttacaggtcatgctggttgctgccacttctgtcaggaagcgccccagctccacgttacccctccccccttcacaaccttctgtgtacccgacctgaacataggctctgtcctatacatactggaataggttttaacgtatgccccgtcttcctgactcacacagaagcacgggtctctcctcaatctttgctgcatttgaaaaaatattccctcccatctcaggccagcgccaggttgaagcgtcctcagtccctcaattgtccacccctgcctgaggctcaggctaccagctttgggacacagcttcctggtactcgcggcatctcagaacagggtgcttctccagctccgaggactctgcctacagggctgttccccggcaagccgagaactcagtccccaggcaccctgcaaccctgcagacaccccctcctagaatgggaagcagggaacctgcccagctgacgcgtctgaactggaactgtctcacttgaacccaggagctttaaaactttatttatttatagcttcttatt

SEQ ID NO: 7635 - DNA, 600 bp, Rattus norvegicus
ttgtgggtgtgggcaatgctgactttgcagccatggagtttctagatggggacaaccgtagactgcgctcacatacaggcgaggaggcagcccgggacattgtgcagttcgtgcccttccgagagttccgcaatgcagccaaagaaacgctggctaaagcggtgcttgcagagcttcctcagcaggtagtgcagtatttcaagcataaaaacctgccccccaccaactcggagcctgcctgagcgcgggaccagccacagcatgccagctgagcccccagcctccccaggaacatgcacgttcaccctgcttcctcgtgggtggccttttttttttttttaaaccagtccacatttttattttttacaactggacctccaccccaacttccccagcccataggggctccctttgtcagagtcaatgatgatgcttccaggacaaagcaactccctcaccccgccctcctgccactctaagtattgaatgtactttgtataattttagtggaattattgttaccaaagagaataaaatttttacaatcgtaaaaaaaaaaaaaaaaaaaaaaaaaaaaataaaaaaaaatggaagcgtccg

SEQ ID NO: 7636 - DNA, 404 bp, Rattus norvegicus
aattcggcacgaggaaaaaaaattaaaagatggaatgtagtgtttacattaaagccagttttcatgatcagtcctacgtcatttctacttgcctagtatctaaccccagacctgttcacggtttcacttttaagacaatattggctgaagaccagtcacagccatttcaataatggaggcaaaaagacaaaacacaaaaaaattaaaaatacaggaaaaaaaacttgaaaaaaaggaaaaacgttaaaaaaaaaaataaaataaaaagcccacgggtctttgtaagcctttctattcccaacggtgaggtttctgtgacacctgacactgccagcctacttctctaacggattcatgtgtagctcaataaagagaatgtttgtctgtaaaaaaaaaaaaaaaaa

SEQ ID NO: 7637 - DNA, 387 bp, Rattus norvegicus; identical to SEQ ID NO: 3541

SEQ ID NO: 7638 - DNA, 1400 bp, Rattus norvegicus
cctctacaagcttcaacaccgctatggtgacgtgttcagcctgcagaagggttggaagcccatggtcattgtcaacagactgaaagcggtgcaggaagtgctggtgactcatggagaggacactgctgaccgccctccagtgcccatctttaagtgcctgggtgtgaagcccagatcccaaggtgtgatccttgcatcttacgggcctgagtggcgagagcagaggcgattctctgtgtccaccctgcgcaccttcggcatgggcaagaaatccctggaggagtgggtgaccaaggaggccggccacctctgtgatgccttcactgcccaggctgggcagtccatcaatcccaaggccatgctgaacaaagccttgtgtaatgtgatcgcatccctcatttttgcccgtcgctttgaatatgaagacccttacctcatcaggatggtgaaactagtggaagagagtttgacagaagtctctggtttcattcctgaggttcttaacacgttcccagcactgctgcgcatcccagggctggctgacaaggtcttccaaggtcagaagaccttcatggccttactggataacctgctggctgagaacaggaccacctgggaccctgcccagccaccccgaaatctgactgatgccttcctggctgaggtggagaaggccaaggggaatcctgagagcagctttaatgatgagaacctacgcatggtggtagttgacctgttcactgcagggatggtgaccaccgccaccacactgacctgggccctactgctcatgattctatacccggatgtgcagcgcagagtccaacaagagattgatgaggtcatagggcaggtgcggtgtccagagatgacagaccaggcccacatgccctacaccaatgctgtcatccatgaggtacagcgctttggggacattgctccattgaatttgccacgcatcacgagttgtgacattgaagtgcaggacttcgtcatccccaaggggacgaccctcatcatcaacctgtcgtccgtgctgaaggatgagaccgtctgggagaagccccaccgcttccatccagaacacttcctggatgcccagggcaactttgtgaagcatgaggccttcatgccattctcagcaggccgcagagcatgccttggggagcccctggcccgcatggagctcttcctcttcttcacctgcctcctgcagcgcttcagcttctccgtgcccgtcggacagccccggcccagcacccatggcttctttgcttttccagttgcccccttgccctaccagctctgtgctgtggtacgggagcaaggactctaattccagtccagctctacagggcaagctgagccacgtttaataaaccagtcttttggcgcgccta

SEQ ID NO: 7639 - DNA, 600 bp, Rattus norvegicus
tcctgcatccggatgtgcagtgccgagtacaacaggaaatcgatgaggtcatagggcaggtgcggcatccagagatggcagaccaggcccacatgccgttcaccaatgctgtcatccatgaggtgcagcgctttgcagacattgtcccaatgaatttgccacacaagacttctcgtgacattgaagtgcagggcttccttatccctaaggggacaaccctcatccccaacctgtcctcagtgctgaaggatgagactgtctgggagaagcccctccgattccaccctgaacacttcctggatgcccagggcaactttgtgaagcatgaggccttcatgccattctcagcaggccgcagagcatgcctgggggagcccctggcccgcatggagctcttcctcttcttcacctgcctcctgcaacgcttcagcttctccgtgcccactggacagccccggcccagcgactatggtgtctttgcctttctccttagcccttccccctaccagctctgtgcattcaaacgttagaaggaaagaaattctagtccagcctctaccttagtgtcatacacagattaaaacagttctgtggctgcca

SEQ ID NO: 7640 - DNA, 444 bp, Rattus norvegicus; identical to SEQ ID NO: 3544

SEQ ID NO: 7641 - DNA, 600 bp, Rattus norvegicus
cggataaattatgctcacaacgggaagccatatcgctacatctttgctgctgaagtacaatggagtccagtcccaaccaagatactaaaatatgacgttctcaccaagtcctccttaaagtggtccgaggagagctgctggcctgcagagcctctgtttgtccccacaccgggtgcgaaggatgaggatgatggagtcatcttatcagccatcatctctacagatccccaaaagctgccctttttacttattctggatgcgaaaagttttacggaattggctcgcgcctctgttgatgtggacatgcacctggacctgcatggtttatttattccggatgcaggctggaatgcagtgaagcagactccagccaaaacgcaagaggatgaaaattcagatcatcccacaggtctgacagcaccaggattgggccatggtgaaaatgacttcacggcaggtcatggcggcaagagcctttaatcctagcactcgaggcagaggcaagcagatctctgagttcaaggccagcctggtctacaacacaagttccaggacagccagggatacacagagaaatcctatcttgaaaacaaagcaaag

SEQ ID NO: 7642 - DNA, 600 bp, Rattus norvegicus
gcagtgtgaatcgttgtcaaccgttccttttaaatgcaaataaatacattcgtaaaaatttacaaattttgagttttttttccttaaaactaaggactatctctttaaaggaattctccatgcctatcatttctctacaaattaatttagtatacttttccatgggtcccctttgcatgttttagtagctaatttagttttaatactgggttagcattgcaagtagtggtatgtggtaaaatggtaaagcgggaaagcccttacctacctgaaacaatcaattacatacactcagcatgatttactatgctttataagagaacatggctttctcttagctttctgaggttgttcagactgcagcagtctgacctacagtttgttttcagacatgttcctggtaccttttttttttctttttttcagagctggggaccaaacccagggccttgctcttgctaggcaagcgctctaccactgagctaaatcccgtcctgttacctttttggtgtggataaagctttattgagcaaagaacaataacagtaaaacagttgttttgtcttttcagagtaagagaaataccagcccggccgtcgg

SEQ ID NO: 7643 - DNA, 1400 bp, Rattus norvegicus
tttcctattgcttttatctgcactgagtggaaatgcgatttccaacagtgtaacgcagcaccgttgtgtggtggtagtgacattgcacacaggtttgtgagctgggggtgtgatgtgcttttcttactgtaggcagaacaagctagaagtccaccattcctcttatggtcattgttttaaaacaaaacaaatgctggagagatggctcagtgttaagagcactgacttctcttacagaggtcctggttcaaatcccagcaaccacatggtggctcacaaccatatgtaatgagatctgatgctctcttctgatgtgtctgaacacagctatatatgataaataaatctaaaaaatattttttaaatggccagacagatggcatgagtagggcacaccatggtcaactctgctgtctgtgtatctctagacatccagtgctctttagagtccacacaaggtcattaaaaggactggggtggatggtgactggagagatagctcagtggttaagagtgtttgctgcttcatgggtggtggtggtggcacaagcctttaatccaaacactcaggaggcagaggcaggtggatctctgagttcaaggccagcctggcctataaggcaagttccaagatagccaaggatacacagagaaaccctgtttgaaaaaacccaagcctagacctggagagttggctcaatggttaagagcactgactgcttttccagaggtcctgagttcaaggcccagcaaaggcacatggtggctcacaaccatctgtaatgggatctgatgcacttttctggtgtgtctaaagcgacatggtaactcgctgtctgtaactagtaggcaaacagttcatatctcacacagacatgaatgcagatagagcaccaacacatataaaattaaatctttaaaaaatgaaaggtctgggggctggatgaatggtgtttgtctttgaaatgtctgacagtgctgtgactcacagcctgcatagcagctcctattgcctggtgttcaccatctgtcttggttataaaaaggtttcgtaatgtgaaacccttcaaatgagctggtgcccttctcaccagtttgcatcttgacaggattcctgaagggcttatattctgggccttcccattgtggaggattaggttttacacaacgtatcctctctagcattgcaatttccctgagccttaaaatcccttcatcgacgctgagccaagggatatctggcatctgcaactccttttccgtaggccgtcatttgatgaacgcttcagccaaccattcaaacaaactttctgacactttttttaactgtgtggccttccatattaaacccagaatctccactcaaagggcccatgtcaataaactcagcctgatctatt

SEQ ID NO: 7644 - DNA, 1400 bp, Rattus norvegicus
gatgtgggcaggggtgagcagtgttggtggtctcttccgtctgcagcctcaggagtgccacctgaccaggcggttgggtctctctctgagaatttcatttttaaatcattcattaaaatgtcatgacttgatgtcctgctgtccgtctcacgccctcagctgtaacagtgccgagggagtcactgaagaagagactgaatgaccagagtatgggcagcacagacaactcaacaaaaatgtcttcagaggtggagactgcggaggccgtagatgagtcagagaagaactctatggcatcagagaaggaaaaccattccaaaatagcagacttttctgatcttctgaaggaagggacaaaggaagcagatgaccgggcagaaaatacccagtttgtcaaagacttcttgaaaggaaacattaagaaggagctatttaagctggccaccactgcactttcatactcagcccctgaggaggaaatggattcactgaccaaggacatggagtacttctttggtgaaaactgggaggaaaaagtgaagtgctctgaagctgcccagacgtatgtggatcagattcactatgtagggcaaaatgagccagagcatctggtggcccatacttactctacttacatggggggaaacctttcaggggaccaggtactgaagaaggagacccagccggtccccttcactagggaagggactcagttctacctgtttgagcatgtagacaatgctaagcaattcaagctattctactgcgctagattgaatgccttggacctgaatttgaagaccaaagagaggattgtggaggaagccaccaaagcctttgaatataatatgcagatattcagtgaactggaccaggcaggctccataccagtaagagaaaccctaaagaatgggctctcaatacttgatgggaagggaggtgtatgcaaatgtccctttaatgctgctcagccagacaaaggtaccctgggaggcagcaactgccctttccagatgtccatggccttgctgaggaagcctaacttgcagctcattctagttgccagtatggccttggtagctggacttttagcctggtactacatgtgaagggcctgtcaagttgtttgcatcctatctcaacatcctaccacttgttccttccccacctccacctctgcctagaactaccacctcaggtgacatttttaatgttgggtttgagaaaatgagcaaccaataaaagacagaccctagaaaaaagtcatgacttaagtggcacggggacacctaaagtcacactttgtgcttcagacatactttctttctctatttcaacactgaattcgggaagtaacctactactattaataataaatgctacacaatgcataataaaaa

SEQ ID NO: 7645 - DNA, 619 bp, Rattus norvegicus; identical to SEQ ID NO: 3549

SEQ ID NO: 7646 - DNA, 600 bp, Rattus norvegicus
ccacttccgtctagcagccaagcagaggactgtatctaaatcgtgatcgtggcagatgggtcttcatagaaaccatgtctttattcaaacttcatagggcaatattttgaactgttacctaggcatttcaaaacaggaaataccgtcaacagactcttctccaagagcaggttttactgttgttttgatgtaattttaagacatttagcaaacatgcatttctttatatgatacatttctttcacaaaacaatttaaaagtaagccacgtgctgtctgctctgcccgggtaggaattgcatcagaatacatatatcttgctgtacaatgcctgtgatattgaagagggttcttttcatgtatgcttgagtatctaactctggagtcaatgaatgcactgactttttttttgttcgtaccccaaatgattgaattgttaagtacaaattaagcagattaactcattttttcactcataaacagattcttagtactagttttgttttatatttatgtgtatgtatgtaaatacatacatattaatttatattagagtgaaaaataaattgtttgtttctaacattaaaaaaaaaaaaaaaaa

SEQ ID NO: 7647 - DNA, 1400 bp, Rattus norvegicus
tacaagggagccccactggaccccaccttccacctacagtgcattacagccaacatcatctgctccattgtctttggagaacgttttgactacacagaccaccagtttctgcacctgctcgacctgttctatgagatcttgtcacttgttagctcattctccagccaggtgtttgagcttttcactggcttcctgaagtactttcctggcacccacagacacatctccaaaaacatagaggaaatcctcaacttcattggccattgtgtggagaagcacagggccacattagaccccagcactccacgagacttcatagatacctaccttctcagaatggagaaggagaaattaaaccaccacacagaattccatcaccagaacctcatgatgtctgtgctctctctcttctttgctggcactgagaccagcagcaccacacttcgctatggtttcctgctcatgctcaagtacccccatgttgcagagaaagttcaaaaggagattgatcaggtgattggctcacaccgggtcccaacccttgatgaccgcatcaaaatgccatacactgatgcagtcatccatgagattcagagattttcagatcttgtcccgattggtctgccacacagagtcaccaaagacacattgttccgagggtacctgctccccaagaacattgaggtgtaccccatcctgagttcagcactccatgatccacagtactttgaacacccggacaccttcaatcctgagcacttcctggatgccaatggggcactgaagaagaatgaagcttttctgcccttctccacaggaaagcgtgtttgtcttggtgaaggcattgcccgcaatgagttgttccttttcttcacaaccatcctccagaacttctcagtgtccagccctgtgtctcctaaggacattgatctcactcccaaggagagtggctttgccaaaatacctccaacataccagatctgcttcttatctcgccaattgggctgaggcaaacaagtatctcatctgttgagaatagctttatctttgtgcctcagagagagcagctggaatccaggcccagggtcactgctcacacccttactcctactgcagttctctaatccccagtgtgtgttcatctcctgtgaatggaatggagaaatcaatcaactgtctttcttggtgtatgaacagagacttctgaaggtcacttctcatcctgaatcacttccatcttcctcccaacagcccaagacctcacttatcatctctccacagttcatggtttatgctaattcactctgtataaggtttggattctatgtctacaatcttgcctagtatgtacggttcaaataaacagaatcaccgagtgtgtgaaaaaaaaaaaaaaaaaa

SEQ ID NO: 7648 - DNA, 600 bp, Rattus norvegicus
ttctacctttgggctgcacgtagcccctctttatgactttatgagtctacccatccactccctcagcatcagtctattcaagaatgatgactgggcattgtggatgctgcccagagtttggcagaggaagtaagaagtgacagttttgccctcagagttgggagcaaagaaaggtttaggaaggtgtcataaggtagcagagtttgaaggaagactacttaagaccaaggtagtagcctgtaaaatgtcctggcaggagcactgagggcagagagagggcagggcaggtaccagcaaggcaaagaatttctctgcagggcaaagggggcctttgaagggttttccagtgggagaggaaaaaaacaaaagttccaatttacatgtggaacattgaagttccattaaggaaacggcagccttgcaaactgtggacatcaccaggtgacaggagtggtgggggagggagttaggtgtggcttggaggaggtcacagataacaccaattggaagggaccagtcggaggtgggggtggctcctgaggggctggactctggttcctgaggctggtaaggatcagaggagggtagctacttgactca

SEQ ID NO: 7649 - DNA, 600 bp, Rattus norvegicus
gctaggagaaggtagctgatgttcatggtttctgctgcccaggatttgtcactggcgatcccacatcttacaggaaacatcaggcagaggtgtccctcatctgggccctggctagaaactgccctggaatgaggacgagtggccatggacctgggcactggaccctcgctctctttatctgaggtcagattgcctggccagtcagctttcccaggctaaaaataggcggaggtgtccaggacaacataactgaggagagaggtagtggctgagttttcggtgccactctgagagatttgggtgaccagataaggaggtgattgctttcagccagccaaccccatgtagcaggaaaacagttgcccatactcacctgtctctgaattggcattgcaagctactcatgtctcctccctaaacctcagctatagggaggccttgggctcagaggcttggttctggggagcaggatgctctgtagatcttctccagactccactattctggttctccgcagcctgaggagaggtgcacacacccccaaggacccaggcacccaacctctgccagatgtgggggggtggctacccagaggcatgc

SEQ ID NO: 7650 - DNA, 1214 bp, Rattus norvegicus; identical to SEQ ID NO: 3554

SEQ ID NO: 7651 - DNA, 1400 bp, Rattus norvegicus
gatgaggatgaccaggtggacattctggatgcccggacagatctgcatcagcatctctctgctgcctcccacgctaattacgcctccatccccaggtagctgtcgacctggacacacctggcctgggctttgggccccatgtgattagatcaactagaaagcccactcacactctccactgggaggtgaggagtagccgctttgctcctgtgtcctccgctcctcagggccctgacacagtcattttctcctcctatcttttctcccatttcttctcagactctgaccgtttgggctttctgactttgtgagagtggtggtttctatgcctttttgtttygttttgttcttgttcttctgtatctcactctcttgcatagtacatctggcacatccagttcttctgggctccaaccctgggctccatttcagccagtgaggtaaactgaccgactggtcccttgacagtgacaagctccagtgggcaccagaagaggcaagagtagccaggactgaggagtgaacctgatatgttcagggttatctttcctggggacaggaactaacccaagacctgctagtcaagagaaaaaatagtcccttctcctcaggtgtctatgggccatagtacctgtgggaagaggcctgcaatgggccagcatctccctcagtgacttaacaggcaaggaactgacccaggatatgagccgagatccaagtggcatgagacaagcagcttagcgtagttcctgtggtgataccatgtcttttactgggcattgatagccgtgggctctggagccagtcttcctgggcgtgccctgtgactgggccatgtttcaccaatgcatttggacggtcactctacctttcagactctgtctcctaaatggtgaccataataacgcttactctaaaaggcgaactcaaccagtagcacatgcctgtaacctgagctgaagcaggaggcttgagagttcaaaggcaggagccaggcaataaaacaatgtaagcaataaaataataataatgatgahgawrawggtggtggtgatgatgatgatgatatgttcaatggaatatagtgccaggcttaaagggacatgagagtaggctatagaaggatgtataaccctcagggctgggacttattttatttatacaatatatcacttaaagattttggcaggggaaaaaaaaaagattttggcgggctggagagatggctcagcggttaagagcacccgaacgctcttccagaggtcctgagttcaattcccagcaaccacatggtggctcacaaccatctgtaaagagatctgatgccctcttctggtgtatctgaagacagctacagtgtacttatatataataaataaataaatcttcaaaaaaaaaaa

SEQ ID NO: 7652 - DNA, 600 bp, Rattus norvegicus
tgcctcttccagactctggtcctgaaggataagcaggagttgggaggagactgcctgctgcggacatcctcgatccacagccccatgctgtctctgggtacctgcattttaccttcagcaaaggttgcattcccaacagacggaggttcaaggcgctgctggtggtaggggtaggtagcactggggaccgcagacacggtgaaaggaaaaccctctaacactttctacttttgcttttagcagattcagccaacagacaagacgtccgtccccattgcccagaggaactaacatggtggtgttcagtgagaagaccaatcagcctccctaataaagcagggcagtccactctgctataaaccctctcacatgcttctgcaggaggacattttgttttctctgttaaggtcaagtgaaggtcacagtgtctcattttattcttcccaagacaagttctgtgcatcaaaagctgctgcaaattctactctaatcgctatgtgggaggactcggggaagaagttgattcgtctgggctttgtgttttagaccgtatttcaacatacacttgggaaggaagaaccaaaaaaaaaaaaaaaaaaa

SEQ ID NO: 7653 - DNA, 599 bp, Rattus norvegicus
tgacaatacccattaacccaggggagcccaagtcctaggatgcaggcttagcctcaggttaatggaggatggtgtgctccaagggcctgcctcctgtacagggctccaaggagcccagctcccggacacgtactaagtgcctagggttgccggctgtggcctgctcccttggagagcaactgacaagaggctttcaggcagaggccagaagagctgaggaccagccaggatgggcacaattctaagcaagtgtgtggaagcaggtgctgccctggccctggccttactcttcaggggcactgattagagtcagtggcctctactgcactcttcccaccagagaagcacagatccaggggcactgcccctgagcctatctggccacaacaagctgcagcaatgtgcagctgcaagcttccccccaccaccctgccacctctccactgtgatgtatgtcccttgtctgttcccacaggcgtgtgaagtgaccggggttagctgggtgggtgcgactggagggaaggggccagtgcagctctcctcaggctttggccttgcaagtgaactcacatatctgctctgtatgtaataaatgtctt

SEQ ID NO: 7654 - DNA, 192 bp, Rattus norvegicus; identical to SEQ ID NO: 3558

SEQ ID NO: 7655 - DNA, 587 bp, Rattus norvegicus
ggcacgaggaagaaggtgcagggtggagccctggaggagtctcgactagtggctggtgttgcgttcaagaagacgttctcttatgctgggtttgaaatgcagcccaagaagtataagaaccccaagattgccctcttaaatgttgatcggggcatatgccaaggccctggagattattccacgacagctgtgtgacaacgctggctttgatgccacaaacatcctcaacaaactgcgggctcgacatgcacaggggggcatgtggtatggggtggacatcaacaacgaggacattgctgacaacttccaggcatttgtgtgggagccagccatggtgcgcatcaacgctctgacagcagcttctgaggctgcgtgcctgattgtgtctgtggatgagactatcaagaacccccgctccactgtggatgctccagctccagcagctggccggggcagaggccagggccgcttccattgagaggcagtccgcatacctccttgtgaggtgtattggggggtgagaaaaatggttagtcttaactgtgctctcactggaggttatttaaataaaaattaaggttacttgg

SEQ ID NO: 7656 - DNA, 597 bp, Rattus norvegicus
ggcacgaggatttggccctgcccttctttgggttttcggaacctcttgctgcgcctcgtcaccagtactataatcaagagtggacattgtgggatcgctttgaagtacaagggctacagcctaatggtgaggagatgactctcaagcagttccttgattactttaagacggagcacaaattagagatcaccatgctgtcccagggtgtgtccatgctctattctttcttcatgccagctgctaagctcaaggaacggttggatcagccgatgacagagattgtgagccgagtgtcaaagagaaagctgggccgccatgtgcgtgcactggtgcttgagctgtgctgcaacgatgaaagtggcgaggacgtcgaggtcccctatgtacgatatacaattcgctgatctccatgaattcccctaagccctagtccccctaccccccagatcctttccagtcctggtttccatttggcctcaggcagtggtccatctagccaagcctggacttcccttatcacccagcaacctcaagatcctctcaccactgctttgtaccttgtttggaacctaaatcccaataaaaaaaagataaccc

SEQ ID NO: 7657 - DNA, 600 bp, Rattus norvegicus
gctgttgctgaataggcgatcacaacgtgcattgtgcttctttgagaatatttgaatcttgtctcaatgctcataacggatcacaaatacagattctgatagcaaagcgactttagtcctgagctcttgtgaggaaaggcattggctttatcctctttagagttagactgttgggggtgggtataaaagatggggtctgtaaaatctttttttcttagaaattcatttactagttatgtagaaatggttgtattagatgttctctatcatttaataatatacttgtggactaaaagatataagtgctgtataaaatcagccaattatgttaaactagcatatctgcctttattgtgtttgtcattagcctgactagaaaggactttaaagtgatctttttttagagaaaatttgaatgcattttgtttattgtatttattcaataaagtatttaattagtgctaagtgtgaactggaccctgttgctaagcctcagcaagcaatcatcctaggtagggttaacaaccccccagtaaaattgccatattgcacatgtcttaatgaagtttgaatgttaaataaaaattgtatattcacttt

SEQ ID NO: 7658 - DNA, 683 bp, Rattus norvegicus
cggtgggctgtcagtgcgacagcgcgtttcttgcttcgcggcctcgtttcgcgctgcccgaagccgcgatgcctcagttccagacctgggaggagttcagccgcgcggctgagaagctctacttggcggaccccatgaaggtacgtgtggttctcaagtacaggcatgttgatgggaatttgtgtatcaaagtgacggacgatctagtctgtttggtgtacagaacagaccaagctcaagatgtaaagaagattgagaaattccacagtcagttaatgcgacttatggtggccaaggaatcccgcagtgtcgctatggaaacagaatgaatggtttgaaatgaagactgttatgttcttgggaagtaaacagcttttgaaactgagaaagtgttgggacggaaatatttatataacggagctgtggaaagctgggagaccagcctgtgtcctaaggtttgtttagagagtaggaatgtcagggttttcagttagaaaacctttatttttggaaactgaataagggatatcttaaaactttttgctgataatttgatgttggacaaatatatagttatttttttctggtaaattcatatcagtaacttgttgaagaattgacaagaaaagttctttttagattgtgtttaagaggaaataaaatgtaacttttgctgtgttggt

SEQ ID NO: 7659 - DNA, 758 bp, Rattus norvegicus
  misc_feature (15)..(15): n is a, c, g, or t
aaggttgccccacantgcagccagaagtctgatggaccgaggtgatatcttgactcatgatgttttaaaggtttaagcttgctgataatgtttttgtctgtcacccagaaaatgtattggcgtgcatgtctattatgtgtgaatgagtgttaatggaaacttggccagaaagtataagggggagaggaagaacagagagccacagatcttgtgacactgagggggaaatagaatctgtcccgagaaagcccctcaacaagaaagtagggtcattgctggttcccaggggccatctaagaggatgagacatcacgtaagggcagaggaaactttctgagacttctccccgtccaccccagaagtgtctggtgtcagctgaggatcacgctttgcccaatacttagatttcaccgtactttctggtggtgttttttttaaaaaggccaagtgttgcagaagtttgcacatgcaaccgtgtattaattgccagtgtttaaaactggtttagcagaatttatatttttctctctcctgccttttgaattttactttatgatagagaaagtattgagccatttttagtgactttttaaaaataatatatatttatactggtcaataatgaagggtgttttttttattattgaagaacttgattttatagttctgcaacagatgccaaatattatgtaatcacaaaccacataatttatgtacagtgcctatgacggatcaataaaccgaacctgttttctaat

SEQ ID NO: 7660 - DNA, 414 bp, Rattus norvegicus
gctcttttggcgcttcattgtcgacgtgtgcttctagcccagtggtcagtcatggcatgccccctggatcaggccatcggccttctcgtggctatcttccacaagtactctggcaaggagggtgacaagcacaccctgagcaagaaggagctgaaggagctgatccagaaggagctcaccattggtgctaagctgcaggatgctgaaattgcaaggctgatggatgatctggaccgtaacaaggatcaggaagtaaacttccaggagtatgttgccttcctgggggccttggctttgatctacaatgaagctctgaaataaaatgggaaggcagagatgccttctgggaggctatcccagtcaagtccagtgggggggtaattatacaataaatatttcgtttttgttatgtct

SEQ ID NO: 7661 - DNA, 562 bp, Rattus norvegicus
ggccccaccgtggccgcggcgcgggaaggacagcgaccggccgcgatggctgacgagattgccaaggctcaagtggcccagcccggtggcgacacgatcttcggcaagatcatccgcaaagaaatcccggccaagatcattttcgaggacgatcggtgtcttgcttttcatgacatttcccctcaagcaccaacacactttctggtgatacccaagaagcacatatcccagatttctgtggcagatgatgatgatgaaagtcttctaggacatttaatgattgttggcaagaaatgtgctgcggatctgggcctgaagcgcgggtatcggatggtggtgaatgaaggtgcagacggggggcagtctgtctatcatattcacctccacgtccttggaggtcggcagatgaactggcctcctggttaagcaggttggggataagtatccttctctaggtagttggcaagctccagtaatttcaatggcacacatagttttgcctgtgtatggagagattgaagagatcatttaaaattctgtgcctaataaaagatattgttgc

SEQ ID NO: 7662 - DNA, 185 bp, Rattus norvegicus
aacgggatttcatggcccccagggaattatgggctcaactttccaaattgtttgtttagtacgccaactaaaattccccttcacatcaaaacatcatttgggatttgaacccccagcatgatactgacacttggtaaatgtagtttgactattcctatacgtttctatctattgatgggggtcct

SEQ ID NO: 7663 - DNA, 600 bp, Rattus norvegicus
aacccgggcaggaaatggggcgctcccctgtggacagtctgagcagctctagcagctcctacgatggcagtgaccgggaggatccacggggcgacttccattctccaattgtgcttggccgacctccaaatgctgaggacagagaaagcccctctgtaaaacgcatgaggatggacacatgggtgacctaaggcttcctggttcatgtctgttctttgtgttactgcagtgaactgccctacatatcttaaattggtgaataaggacatgagttcaatatatttatatgtacatgcatacatatatatccctttacatatatatgtatgtcggtgtgagtgtgtgtatgtgtgggtgtgtgttgcatacacagaatcaggcacttactgcgactccttgtaggtatgcagatgtgtgcacacggcacacagagcaccttgtagagacagaccagcctggcacttccttggactacttgtctcctaagataaagtttttgcagagaaacgtgtacccatatataattcttccacattagcctgcagaaacctaggggcccctatttgttttatttacctgtgcggtgactgtagttacttc

SEQ ID NO: 7664 - DNA, 600 bp, Rattus norvegicus
aacagtgttttgactggatcctggtttccttttggcctcctgcagagtccctggaaggaaatttaccaattttctctgctttctattcttatttttatgatgacaatcaaagctggcccgaagaacccaatttgtgactttttttttttaaataatcagtgatgtccttaaaatgtggtctgccaacctgtacaaaatggtcctatatttttgaagagggacgtgagataaaatgatgttatacatcgatatgtatatatctgttgctatgtagacttggagaatactgccaaaacgtgtatgacaagctgtatcactgcctttgtttatatttttttaactgtgatattccccacaggcacgttaactgttgcacttttgaatgtccaaaatttatattttagaaggaataaagagaaaaatacttacatgttcccaacatggtggtgtggtaaatgtgtgagagcaactccatagagagggtcttccaatccaagatggcttccagatacccgtgttcatgttttgtttaaaaaaaaaaagaagtgtaaatggagatctttatatttcaataaatgatttatgatatatgattttaaa

SEQ ID NO: 7665 - DNA, 600 bp, Rattus norvegicus
agctgccttgttgccatatctaaaacttccataatctatattaaatgagggtttctgtacttcctttgtggttggctatcttttttatatttaaaaaaataaaaattatgttactagcttaaagcttaatttgatatttgtttaaatgccaaaacaatgtacttaagtgaatgatgtagcacgccgtaaaatgcatttcatgtgtgtggatccccttggtctgtacggagggagatacacgccccgctttctaagtgtcccacgcaatgctagctcgctatgcactcccttttgtagttttacttagagttttcaagataagtctaaatttaaaaattaccacgtttaaagctctatctttgtgcaatttaaatcagtcagaagtcatggttggcatactgtgtccttgtggactctaggcaccggtgtccctggatgggtgggtgaatttaggagatctgctgagaaagtggagctggccaaagggacagttgctgtttcctggacactagtctgatacactctgtgctaatctaatcgctgttcttttgttacacactgttccatggtaggtcccagaataaaaagatgaaatcattt

SEQ ID NO: 7666 - DNA, 699 bp, Rattus norvegicus
agagctttaataggaagtttgtcaatccaccaacaagtgtggatgttgcagaacacagtctcttctagcaaatgtgtttttgaagcgacttattttcagccagataggaccgtgattggaaaaccatcgaggggtcttttgttctgtaggtagggtacacagtcaggtcgggggtagggcaaaaatctatgctctctttcccatgaaagtgggctgggaacgccgtggaaaaaaccccaacccacttgctcctttgggctcgccagtgctaacccagtagctgttgttctgcgccctctagtggtgaattgacagaatgctggtccacttgtggggtttctagggttcaaaaatgacttcacttccgggtcatcatcagaaactggaatatggtgtcatgttactgtggcttgttttgtttgtgtcatttttcttttctttattcgagataaaagaccaaggaatatcattcctgtcattcctgaaagtgttgactcttgttcactactctgcgtaaagggaaggttttattcttttattgaacacttcagccatactcatgtattcaaataggaatgtgaatgcacaatactctttttatatcaagacctaaagcacttattttcaatctatgcagcgtttgtcttttatataaataaaaatgtctagaagatcaaataaatccaaagcctgcagacg

SEQ ID NO: 7667 - DNA, 381 bp, Rattus norvegicus
tccaggaggatctagtcaacgtcaattcccagggcttgaatgagaagcgcgcggcctcagattctctgctttgctaaaagtgttagatcacattcctgaggctagaccccaaggtctatccccttatttggccacttcatcctcctgaggccgcatacaaaggcccagctatccaagtattaaagtccagcaatcaaaagcccctttcagtttcacctaattaacatacccaatcaaaatacaacatagcccagcctaccagaccgcctttttctcttcataaaaattacacctgcaaggtcatcggatgctgtttttctgcctgagtcagaaagcagccacttaacttttcttccctgcttaataaagggtctctctgag

SEQ ID NO: 7668 - DNA, 663 bp, Rattus norvegicus
aacttacaaaaccagctttgaggaaatttagactgttcctgatgacagtgtttggagttgtaattgtactttcttactgtagcgtcagtctgtgtaaataaccagtacagtggccctttggtttgttagtggttttgtttctggtctctgtgtgacccaccaggacggggttccaggtccaccttttttttttttaattttgcatttgtccatcagtaggcttgtcagacaaaatacaagatgcccagttagatttgaatttcaggcaattttctagctcaagtatatttcatatttgacatatctgtgcaattttttaaatgttcattaacttatctgaaattcagattttgactgaatctcctagatttttgttttctatgtagtttttctaaacctggtagtcctaacagtttgatcacaaaaggaggctcacagcatgtaaattctctggtctttatagctttcaccaggaatgaaagacatttttttcccctcgccttctacttatttctaaaagagggcatcaaggaacttaaccggcctacatggtgggtttctgtttaaaacatctctgtgattatatttaacctgtaattgtgctttggcttgatgtctacagtacttgtaacggattaatattcaataaaatcattttaaagt

SEQ ID NO: 7669 - DNA, 600 bp, Rattus norvegicus
cccagcagagctgcacttggtacattggaatgcagtcaaatttgaaagttttgaggatgcagcactggaagaaaatggcttggctgtgataggtgtatttttaaagctaggtaaacatcataaagaactgcagaaattggtggacactttgccatcaattaagcacaaggataccctggtgaaatttggatcatttgacccttcctgtctgatgcctacttgcccagattactggacctattctggatctctcactacgcctcccctctcagagtctgttacctggatcattaagaagcagccagttgaggtcgaccatgatcagcttgaacagtttcggaccctgcttttcacatctgagggagagaaagagaaaagaatggtggacaacttccgcccacttcaacctctgatgaatcgcactgtccgttcatccttccgccatgactatgtgctcaatatacaagtgaagcccgagccgactgccagcgaagtctccccctaagacagcatatttaggcagcatcttgttttaatgcatattagcttaaaatttcaactagatgattttaaaacggcatttaataatacttatatgtc

SEQ ID NO: 7670 - DNA, 600 bp, Rattus norvegicus
ggaggaaagtcaagtctatttgttgggaactgggcttcggggaaaagaggacttcctgtctgtatcagatattattgactacttcaggaaaatgccactgttactcattgatggaaaaaaccgaggatctagataccagtgcacactaacacatgctgcaggctgtctgtagcaagttacccaagaaacgagccttcctgactctgtcatcggtgtggcaagagcttgacctgagcaaacggacaccaggactaaaacagactgtcaatatgggccctgagttctgccctgtcctgtaaagtatctgaaaattgttgaataccacatgatttatttattttctttgatgtttataaagtgtagaagtgatcatgttcacgtttgaagtctaagagtgcatggcagacatgagattttgaacatccacctcaaaatacagtactttatacagtagagaaataatgtgggacaagctggaaaaggactgaaatggatggttctggatatataacgaaacttttgtcaggccaaggcacaatctgttttttacacaacttaaaatgattaaaattcatttttggggcagccattacttaagag

SEQ ID NO: 7671 - DNA, 1400 bp, Rattus norvegicus
tttgagcggccgccgagaaccaccgccgccgctgctgccgctgctgccgccgccgccgccgccgccgccgccgctgccgccgcgcagacccaacacctggccagtgccagggtgaccaggcctcctcccctccgcccaaagacaggcgagccatggccctaggaggggggagaacagctggagaccgatgagactctttctgaagtccaaggaaggagggaccaaaaacaaatttttaagcataataaataccaagactgttttatatgcatatataacaaacaaaaccggaagaggaaaagggaggaacaaggacatctcgtttatactgtggtggtgttttgttcctgttttgaaagaagggtgaagatgcctaacgcaccaaaactacacacgaggtactgtccacaccgagatgtcctgctcggcgacagtggagaacacctgcctctgagataagagagaccccctccccgttcttccacttcttccaaaagggctgcctaaaagatccatggaaactttctttactgggagcgacctgaaaagaaagacgcaccaggtttcctgcaggtctgactctgctcctcgacagtgtttttcttggccatattcaagtctttggggaacaaataaatcaactaagaaatgggaaggaaggagaaacagagtctggggggggagggaagattcacagcttctgaagttaacagactgaacaggaaagccaaaagaaagcatccttgccgtaaacttgggaataaaagcatcgcgaaagagcctttgagaccgcccagaagggccaggtctcccccacgccactgaacccgggctttgccgactgccgctcggggtggaccatgcctaaagattccgccgctaatattttttttattaacattttttattttttatttctggactgactccgataaaagggtgtggaaaagacagcaccaaccgcgcacttcccttgacttctgccctcgatccgttgccaactttgattgaatgggtgctgcggatgtgattatgtaatactgccatttccaagcagtgtttttggtaggttttaataaacagacttttcaaatgacggcaatatagaatcgttagatccgttgttgatctaaaaatatttgctttatattttcattaaatgacttcttttaatattttattcaaaatacttatgaactgctgcaaaacggtaatttatttttccccagatcttgtattacgtgtttttttcagacgagcacaaatcaaaatgaaatgaaaatatggacagttgttaggtaataagggtatcttttgatgtgatcatttgattgtaatttaatttgagtagtgattccgtaagagctgattgagaaaataaattttgtcgaggcggccgc

SEQ ID NO: 7672 - DNA, 600 bp, Rattus norvegicus
ggggaagtctggatagagactggacaaaggagtgtggcaacagtgaccacagctgcggcgacggactcgttcataggaataaaatcttgctaacaacaaatgagcaaaaacaaaaaaggatagagaacaaactaaaaaaagaaaatgagaaagggggcttgtttcttattgctatttggctggaattagagagagaacgatgaagcaaaacaattcttaaaattattttgtacataaaaatacggaaaaataacctggatgaatcttgagagaaaggggggagggatttaccaactaaaatgtatgtttttttttaaatggtccaaggaaacaaaacagaaggaagaggtatactatttaagaattaagatgaaaaaaaaaagcgcagctgggaagttcacaggttttgaagctgacctttttctgcgaagttcactttaatacgagacatttgataagagaggcgggcctccttttacgttgaatctgatgctttgagttttaaaacaccatgtttggaagagcaagaagagggaagacagtgtggaaacgaggagggaaaaaaggacgttcatacaaaaaaaaaaaaaaaaactcgag

SEQ ID NO: 7673 - DNA, 600 bp, Rattus norvegicus
caccccggcaagctcattttcgctcccgacctcgttctggacaggtcctcagaagaccctcactggcacgttgcgcagatgaagagtgctgccccaagggatgaggggaagtgcgtagaagggattctggaaatctttgacatgctcctggcgacgacgtcaaggttccgtgagttaaaactccagcacaaggagtatctctgtgtgaaggccatgatcctcctcaactccagtatgtaccccttggcttctgcaaaccaggaggcagaaagtagccggaagctgacacacctactgaacgcggtgacagatgccctggtctgggtgattgcgaagagtggtatctcctcccagcagcagtcagtccgactggccaacctcctgatgcttctttctcacgtcaggcacatcagtaacaagggcatggaacatctgctcagcatgaagtgcaaaaatgtggtcccggtgtatgacctgctgctggagatgctgaatgctcacacgcttcgagggtacaagtcctcaatctcggggtctgagtgcagctcaacagaggacagtaagaacaaagagagctcccagaacctacagtctcagtga

SEQ ID NO: 7674 - DNA, 1400 bp, Rattus norvegicus
aaccccaaagagcactggcctgggagtcagacctggatttgagtcctcagtcccttcagactctctccgtgaccttgggcaagtcaccagtgtctctctgagcctcggtttcccctctgtaacagactggggttgaaataacacccatcctgcctacctcacagggtcactctgaggatggacacttgatctcattcatccaggagagctttgcactgggaagcagctctgacctgtgaggtattagtacgaccatgaccttcagccctcccaccagctggggagggtgcggtgcggcccagagaaacttcctgcaaggccctctacctagggacaggaacagcccagtcagaggcaggctcaggactcttctgacattccttaataggttcattctttgctaaaggcctgaatggcaccgtccaggggcgtctgcacaaacgagtggtttgctcactccctaaagaatcctaaaggcagcttcaacaggcaggcaataatctcttcccagaccactgcagtcaggaacacactgctgtcaaccaccaggctgtgacgaaagggcccacgggaatcaccatcgccaacatttcaaaacaccctagttcacgtagcatagctcttcctccccatccctcaaagagaggttacagaggttctgtagcttttaaggggggaaaaatgtcaacacatcacaggtcaagttgatgtccttctctgtttaggcaccaaaactccgtgttgtcactcactgtgtgtgttaaccagtatttccttgctttttcgacttcaccaaaaccaaatttcatttaaaagaccgcattagtttttttcaaagggaaagagataattaactgtacataatgtatacagacaaaacaaaacctgtagaaatattactccagcatagcaggaaaaaaaaaaaaaacaaaaaacaaaaaacaaaagtattggattgtcggaggtgagcgtgcgtctgtaatcccttgtgactccgaactgtgctccgtcttctaggttaacccacaagatacatctctgtctactgatcctgtaggttcacccatttttttttaatttctctgcaattaacaagccccacaaagtgattctggctatctactggttctgttcttttatatgcagcaaacacacggtccatttcctagaggcttccgcccaagggcatcttccagtgacgctagtgcgcacacacacacacacacacacacacacacacacacacacacgactgctttcaattagaccggaactggcagaatcaaatgtaaatgaggagtttctctcgccccactgcatggtatcgatttttaataaattgttgcaaatttgtttttatgaataaaaggggaaaatataaaaaaaaaaaaaaaaaaaaa

SEQ ID NO: 7675 - DNA, 600 bp, Rattus norvegicus
ttaaaactctgctaataaaggtgagcttggtttctatgcggcgtctcagtgatctcggcatgattcccataaccctagcctcagtttcccttgtcacctgagaagtggagcagagacgggcctccattaggctggcctgggtgattttattgactgacagctgatgtgagtgaccagccagggcctggtggtcctgccatgtttgagccgcaaggaggagcaggacagtcagcagttcattgctgcagcctctgcttcagcgcccttctaggttccctctggacattcctccaatccccatttcaagccaggcctaacatcccagaatcagggggcctctgcaatccagatagtccgacaacggctggctgggaatgaaaagtgtaagaagccagtggctgctcagtcaacaagactgggtgtctcggctgctcttcagtatgtgctggagtcttgaagggagctccagtgccagtgaaggaatggatgtgccagcaagcaaagcgcaaaagctcttcttccattgtccttatgtaggttcccagccgagggtgaggcccagattaaaggcgagtctgcccactttaacaattcaggatc

SEQ ID NO: 7676 - DNA, 1278 bp, Rattus norvegicus; identical to SEQ ID NO: 3580

SEQ ID NO: 7677 - DNA, 600 bp, Rattus norvegicus
aagagatcagaggaaaagaaaccactgaattcaaagagagagagcgcctttgatttcaaaggaatgcccccaagtgtctgccatcttccgctgaaagtattcccaacagttggaggacgcgtgcaccaacaaatgtttgactggatatgacattttaacattactataagcttgttattttttaagtttagcattgttaacattaaaatgactgaaaggatgtatatatatcgaaatgtcaaattaattttataaaagcagttgttagtactctcacgacagtgtttttaaaggctaggctttaaaataaagcatgttatccagaatcagttaggatttttcgcttgcagcaaaggaatgtatatactaaatgccacactgtatgtttctaacatattattattataaaaaatgtgtgaatataagttttagagtagtttctctggtggatgccttgtttctgaaactgctacgtacaacctatcctgtgtataacatttcgtacgatattgttttacttttcagcaaatatgaaaaaatgtgttttatttcttgggagtaaaatataccgcatacaaaaaaaaaaaaaaaaaactcgag

SEQ ID NO: 7678 - DNA, 600 bp, Rattus norvegicus
tacctctgygaccttgcccccgaggccccagccccatcgaagcctccacaggtagcacacatcactgtgagccctggtatctctggggtttcatcaccaggacccaaaaggaagtctctggttctggatgtggtgtttgtcctggaggcgtcagacgaagttggtgaagccaacttcaataagagcaaggagttcctggaggaggttatccagcgcatggatgtgagcccggctggaacgcacatcgcagttctgcagtactcatacacagtaaaygttgagtacaccttcaaggaggcccagtccaaggaggatgtgctgcgacatgtgcgagagatccgctaccaggggggcaacaggacaaacactgggcaggccttgcagtacctttctgagcacagcttctctcccagccagggagaccgggagcaggcacctaacctggtctacatggtcacggggaaccctgcctctgatgagatcaggaggttgcctggagacatccaggtggtacccattggggtgggttccagggccaacctgcaggaactggagaggatcagcagacccatcactcccatcttcatccaagactttgag

SEQ ID NO: 7679 - DNA, 600 bp, Rattus norvegicus
agttggtgaggcccatcaccagagggcctacctgcaaggtccttgcgtggagtggctccacacatacctacatctgggaaaggagacgctgctgcgctcagaccccccaaaggcacatgtgacccttcaccccagacctgaaggtgatgtcaccctgaggtgctgggccctgggcttctaccctgctgacatcaccttgacctggcaattgaatggggaggacctgacccaggacatggagcttgtggagaccaggcctgcaggggatggaaccttccagaagtgggcagctgtggtagtgccttctggggaggagctgaagtacacatgccatgtggagcatgagggactgcctgaacctctcgccctgagatgggagccttctccattcaccgactccagcatgccagtgattgttgtccttggagctgtggccatcattggagctgtggccatcattggagctgtggccatcattggagctgttgtgaggaggaggaagagaaacacaggtgaaaaaggcagctatgctcatgttctaggcagcaaggctttccagatctctgactggcctcagaaggcatgaaaagacagttgcct

SEQ ID NO: 7680 - DNA, 600 bp, Rattus norvegicus
ttcttatccgcgacagctcgggccagcgccacttcttcacactgagcgtcaagacccagtcggggaccaagaacctacgcatccagtgcgaggggggcagcttttcgctgcagagtgacccccggagcacgcagccagtgccccgctttgactgtgtactcaagttggtgcaccactacatgccgcccccaggggccccctccttctctttaccaccgacggaaccctcctctgaggttcaggagcagccacctgcccaggcactccccgggggtacccccaagagaggttactacatctattctgggggcgagaagatcccgctggtactgagccgacctctctcctccaacgtggctaccctccagcatctttgtcggaagactgtcaacggtcacctggactcctatgagaaagtgacccagctgcctggacccattcgggagttcctggaccagtatgatgctccactttaaagagcaaagaaagggcagagggggcctggacggcgcctctcctccgaggcacatggcacaagcacaaaaatccagccccaatggtcggtagctcccagttagcccagcagaagataggcttctt

SEQ ID NO: 7681 - DNA, 600 bp, Rattus norvegicus
tttaaaaagccatccacacttgtgtcaaggatgtgaacaatcaagttcacactcagattcttattctcaatgtggaaatgaggggcagaagctcagggtagcagggagtgacaggatgcagatgtccccacccccactcctaggctggaccagcaaggttggctgtggaagggaacacagacagtgcagggacagggtcctgaagtgcagggcaggctgggcttcacagttcttcacactgaagccatagatcacagggaacatcagacactggtgtctaaagagaactgaggactctggatgtcacaggagagacctgaacacatcgtctgtcactcagtccactccaggcagctgtcttcatgctagagaccgagagtcacaaaccatcactgtgaggacagcagcccaacaaccctccactcacataggattctgggagtccctgaaacccaatcatgtccacattgtccctccccagttggaccccatagtgtcacctttacaatctgggagagacacatcagagctctgggagctgtccgtgcctagggtaaaacaaaacgtatgtatatgtatatgtgtatacataatatgtgt

SEQ ID NO: 7682 - DNA, 600 bp, Rattus norvegicus
  misc_feature (93)..(93): n is a, c, g, or t
gacagtggaacaaatacattaagagtcttgaaatacaattaagtcagataaatatgcttcaatcgttactagttagacaaaatgtgacatctngaaaattaagtacaacttcctcaccacacaccagaaacaactttgtagttggtaggggctggagagatggtgctgtggttaagagctgctctttcagagggccctaatttgattcccagtatccaaatggcagttcacaactggttctttaattacagtttcaggagatctgatgtcctctctggcctctgcaggcactaggcacatatatggtgcatagaaattcatgcaggcaaaacattcatatacacgaaataaaaatttttacaagaaacataatcgaagatcattgttcagaaaccagaaagattctgggaagtattgtctgtaattctttcatttatttcaaagaatcatagttcctaggattaaagtttactgcagagagaccattaaccccttcaggaatttaaaatattaaatgggaagaaaggaagaaatcacttaagagctaattatactcaacacggaagaccacttaaccaacccaaagttactttttggaaa

SEQ ID NO: 7683 - DNA, 600 bp, Rattus norvegicus
  misc_feature (410)..(410): n is a, c, g, or t
  misc_feature (571)..(571): n is a, c, g, or t
gcatccaccccttcggactcactgctctatgacgatgggctctcggaagaggagacgcccctggtggactgtaacagtgctcccctcccgcgctccctcccttccacatggattgaaaacaaactctatggtagaatttcacatgcatttactagattctagcaacgcagtcccctctgcaccatcccaactgtctgtaacgctttttaagagtgtttccgatcccaccgaaaccaaagcctcctctgaacccttttctttgtaaatatccgactttgcacctagtttacacacattcaggcattttgcagctatgtctttctaaaaggatgtgaaaataaagtgtcactaccacacagcccggcaacttaagatgacactggagaagcagattagagcagaattctcangggctgttgggaagcaaatcataatacttctgacttcgttacttaaatttacctgatcttggggaaggaaggaattttgccaagggaatgctggcaccccccacttgttttgacagcataactagggtatccccaggctgcccccaggtggtgtgtgctcntggaaccccccatattacacttccactct

SEQ ID NO: 7684 - DNA, 518 bp, Rattus norvegicus; identical to SEQ ID NO: 3588

SEQ ID NO: 7685 - DNA, 442 bp, Rattus norvegicus; identical to SEQ ID NO: 3589

SEQ ID NO: 7686 - DNA, 600 bp, Rattus norvegicus
acgttttaggaaatgttggggtcactgtactgggatgtaagaagaggggctaacacaggtcatctgaaggggctcatccacttcctgctctgtattataacaatgtaactatccttagttttcctccgtgacctcgtgttggaacctcatgtcacctatgtatgaaatggtcaaaagttagaggaataccaagagtggagatttagctgatcagtgacttcaaatcccagaaagcataaataaaaccacaagatgctctgtaacacagaaccatctaaaaaaccacaactctatctttatagctcagaataactcatgtcaaacccgttacattttatttgttaaaaatgaacagcttcagaacaaatctaatgtaacttttccaaaaaaacaccaaaaagtacagtgtaaagcgcctcctcgttaaatacaaacgtcactgtgatgcactgcatcaatgttctgcatacaccttgatgcaaaggaaatcttaagttgcaccctgtttaaataaaaaaaaaaataaaataaaaggctccaagaaccaaacaaggattactacagtcacattccgagaaaggaaatttccctccaacaaaa

SEQ ID NO: 7687 - DNA, 574 bp, Rattus norvegicus
tcatcagatattcagcgggatgaactggcaccagctgggactggagtgtcccgagaggccttgtcaggtctgctgatcatgggagctggaggaggctccctcattgtcctatccttgctgcttctgcgcaagaagaaaccctatggcactatcagccatggagtggtggaggtggaccccatgctgaccctggaggagcagcagctccgggaacttcagaggcatggctatgagaaccccacctaccgcttcctggaagaacgaccttgaccccaactctagctgccttcagctgaaccctactgcccttcttccggtcccctaatcccaactcccagcttccggtgggggagggagatcttgacaaattcattccaaattccacccccttagaaattcccagttcctgccccaccagggacctcctcaccttaatttattttacgttaatttattgctccttaaggtgaccaccatctgggtcccagtgtatgtcaccccctggaattcaccgtcccacgtttcttcactaacatcccaataaagtcctcttccccaaaaaaaaaaaaaaaaa

SEQ ID NO: 7688 - DNA, 475 bp, Rattus norvegicus
cggcacgagggtggcgttcagccacacagcagcgcctgtcatccccaagtccccgaggaggctccgcgttgagaaactgttgagtgtacagattttatttatgcataatttaatgggatctgtaaatacttcttaagacattttgagaaatgggattcgattttaatattaacttttaatgggtgatgggtaacgtagcccctttagatttcacgcgaatgcacacagggtacagaggctgaagatgaagctgggcttttttctcttggctggtcaagtgttatttaactggagcttttcaggaagcaacacacatctcattcccgcaggctgaaccagaagagtagagaacagtttgtgtgggtgaagtgtggattgggattgaacctctatgcctgtccgtgctccttaaataattgtgtgtatgatacctgtgtaataaaaaatattctcgatagaaaaaaaaaaaaaaaaa

SEQ ID NO: 7689 - DNA, 343 bp, Rattus norvegicus
cggcacgagggagaagtttacctacgcaggaattgactgttctgctgaagaagcagcctagggcagaatccttcctgcatgattgccatttctcttcactggcacgagagcgccttgacacctgttctaagcaagcaacccactgccaagagatgtgatatagaagtgtatatattgtgctatgtgtttgggaccctcatcatatagctctcatggatctgtagtatgttctgactctaatatgactgtatatactgtttggagtaagaatgtgctaagatcagaatgcctgcttgtggtttcatataatatatttttctaaaaccaaaaaaaaaaaaaaaaa

SEQ ID NO: 7690 - DNA, 600 bp, Rattus norvegicus
tagtggatcccccgggctgcaggaattcggcacgaggagacacagtgtggtcgtcattcctattccctcacattgatttgttcttgaacttccaagctgtttcctctgaatctgattgtgggattgtggtgccaggcaggagaacaattcacttgctaagacagttctcactctgcctgtcaggcctcatcttagaagtgtcacctcagcagggcagcacgatgagcttctgctggacccttgttcacttctccggcacctactgccccagcagtaacagacgcgggagaaagcctggcctgctgggttttcaagatgtgactctgcataatctatggagccctagaccttgagggtgtgaaagaatcctcctcctcactgcacagtcctcacctgccgatgccagtgttagtgttgaaatgagcacagtatgaagtattgtgtaggagggtggtttggcaactgtagctggtaagaataagccaccaacttcatggtgtgcctgacagattttaaatattctttgtcgcttggaaatcctgtcagagggccctggagtgtctctgttctagagagagttggtaggatccttctgtgtag

SEQ ID NO: 7691 - DNA, 663 bp, Rattus norvegicus; identical to SEQ ID NO: 3595

SEQ ID NO: 7692 - DNA, 593 bp, Rattus norvegicus; identical to SEQ ID NO: 3596

SEQ ID NO: 7693 - DNA, 584 bp, Rattus norvegicus; identical to SEQ ID NO: 3597
  misc_feature (396)..(396): n is a, c, g, or t
  misc_feature (440)..(440): n is a, c, g, or t
  misc_feature (548)..(548): n is a, c, g, or t

SEQ ID NO: 7694 - DNA, 589 bp, Rattus norvegicus; identical to SEQ ID NO: 3598
  misc_feature (566)..(566): n is a, c, g, or t

SEQ ID NO: 7695 - DNA, 615 bp, Rattus norvegicus; identical to SEQ ID NO: 3599

SEQ ID NO: 7696 - DNA, 550 bp, Rattus norvegicus; identical to SEQ ID NO: 3600
  misc_feature (507)..(507): n is a, c, g, or t

SEQ ID NO: 7697 - DNA, 470 bp, Rattus norvegicus
tacaaggtggaacatctcatcaatgccatgtccatagagagctgaaaggaagacattctgttcctggaagaaagactcatacaagctatcacactggtgtctcaaaaggaagatgggatgagtgaagggtatcaggccccagagctggctgtcctctaaaaatctcaccgaggaaagaaggaaaggctcctctgtcaatggcagccatgtttcttcatagccggttccttccagaaggacagtgaacaccacccatcacagtgtgagctcagtacactacgggcaaggagaaggtggccctttaagctgagaggcttgagccaaatggttctgcctctgtgactgctgctttgcatgaaaactcatttgatgtatattgggaaataatgagaactttatttaattttttaagaaaaagggaaaaaacagaaataaaacaaaacataaatccccaaaaaaaaaaaaaaaaa

SEQ ID NO: 7698 - DNA, 662 bp, Rattus norvegicus
atgctctccccgatcttctgctgcagataggatccttccccttgtctccattcctttcctcccataggggagaggggcaaatggtttaggcacaggctttggctagtaatgtcaggcgtggtggtggcggcggggtcctattgttctaatttgttgaagggcctcaaccacactcaaagaagggtggtttatcttcgacatcttaaagagtcttgataatcctgacattgctaaataggggtaatccggcagtgggattcattcatatcttcctgcactcctgccagcagtacatggcacagcccaagccaccctaggccagcctggagtcttttccatgctctgatcacctaagctgcctcagaactcatttgcttctctccttcctggaaagcttccctttatgttttattttgaccccagatgtccagatgttttgcagtgtctggggcttgtgccccttgttgttcgttctgcttctttgcccctttcctctacatggagtgattatgttgacaataatgtgtaatgcgcgttcttttcactggtttatctacagaaatttctctgggccttttttctgtgtttgattcaacactgcactaagcggggaatgttccaattaataaaagagcagtgtggtttaaaaaaaaaaaaaaaaa

SEQ ID NO: 7699 - DNA, 625 bp, Rattus norvegicus
attcggcacgagggtgatttctacttggcaacctttttttggtaactcgttcccttatacctccttgattgaataccttacagcctagacctcagtacaaaaaggtattgaaacatttttgatacataacagacctcaatcttttttaaaaattaatatattttcaggcgtatttttgtacagtgaaaagggaacaatcttgctgtgttttttcagtaagactttcaggcacttcttcccttttgatttctttttcttttttcttttcttgtttttgtttttctttctttttgtttgttttttttagcatgcaaatatgttggtacgttatgtcctggtttaaaaggattaaaaatttaaaagtaatccttgcatctaaaggccttgtggtttaaaaaaaaaagcaaactttttttgtacagctatagtagagatttgttcaatatttgtaggtaaagatttattgaaaatggtgacctagacctcagagctgttcttagtttaagactgtatgtactgtatcatagtaggacctatgtatctcatcgctgtgatgtgtggacggggccccagacggaaggtttgaaactggatactcgatttttatcaaaaaaaaaaaaaaaaa

SEQ ID NO: 7700 - DNA, 600 bp, Rattus norvegicus
tgtgtactctcccccacagtataacaccctgaaactgaatctacttgctgggttgcaatattttgctgctggactttgacctacttgtattatgcagaaagttaattcagatacctatcgagatggtaactgtaaagacactgttatctccttaaatatgcttacttatatgttactccttaacatgtacgttgatgtagcatcattttgtggataggaaaaaattgtttgaccttcagatattttctacttaaaaaaaaaaaaaagttgtggatgaacaccctatctccctcccacaatgaagtccccattaccttgtctataacagttttttaaagtgttccgtggctggtttactaacagtaactgccatttcgtgtccgtggtaacaaagtgacttgtaagatggtggatgttttcccccctgtgttcttcctttaatgggttgtttccctgtgggtcatagtcataccttctgatgaagttgagccaacaccagcaaagtgtaatggtcgtgcagcctccgactatactgagactgcactctaggctgaaccatgctgaaagcccatgcttaaataaaaattatgtctaaaatcc

SEQ ID NO: 7701 - DNA, 586 bp, Rattus norvegicus
ttggtgtcctcctcctggtcatctggaaggctcttacccacctgactgacctcaatgaatacagacgctttgagaaggagaaactcaagtcccagtggaacaacgacaaccccctcttcaagagcgccacgacaacggtcatgaaccctaagtttgctgagagctagagaaggagtcagaggagacccctccagaccatgcctcctcccctctgcaaatacaatgtagcttacagctcgccccagtgctgccaaggatccaaaagcctactttgtttctttccgccattatatcaaggctgccagggtttccacggactcatcttccgacctatacaatcttgccacagagcctgcagattgttccggagtcccaagaggttccacacacattttcttgcataaagggaagacgggggtctcagtaaaggtggccccagcttatttatatttaaacttgttagcgtataaaactactattatattgttaacatcctgtccgttgtattatatgtgagtgtaaaactatatcccacatatatcagaatcatgtgtgtaaaaataataaagcttccattcagggctgc

SEQ ID NO: 7702 - DNA, 588 bp, Rattus norvegicus
agtgggcagcccccgcctcctccttgtggtcctcttcctccatggcagcagcagcagcagcagcctccaccaccccctccgcccagcagcagtatggcttccagcacccccttgccatggcagcaaagatccctccccgcagcagcgatggcccgagccatgagagtgaggactttccgcgcccattggtgacccttccaggcagacagcctcaacagcgcccctggtggacaggatggttcggcaaagcagcctgagttatttttgtggacggaatcggaacacgctggctccatatcgtgaaatttttattaatttttatctttttcctttgttatttccttatcttttcctttcttcagactccgtccaaggagatgctctccccgatcttctgctgcagataggatccttccccttgtctccattcctttcctctacatggagtgattatgttgacaataatgtgtaatgcgcgttcttttcactggtttatctacagaaatttctctgggccttttttctgtgtttgattcaacactgcactaagcggggaatgttccaattaataaaagagcagtgtggttt

SEQ ID NO: 7703 - DNA, 542 bp, Rattus norvegicus
cagggtaaggtggtacggtcatttcttctgccttccgtctttgcgactctcggagaacttccagcagcagcatgttgggccagagtatccggaggttcaccacctccgtggtgcgtcgcagcccctatgaggagggtccggggaaaaatttgccgttttcagtggaaaacaagtggcggttactgcttatgatgaccgtgtactttggatctggatttgctgctcctttctttatagtaaggccccagctacttaaaaaataaggatatttaattcatcccattaacagaatgaagaaagtttaagagatatgatctggaaattggattaaactcttgaactcttatactagaaaaaaatgtaaataaactaatgatataaataaaaaaaaaaaaaaaaaaaaaaaaaaataaaccttctgattaaaaggaaaaaaagtaggtttcagaaaaggaaccagcacagagctaacttacaggttttcttaagtagttttcatttgagtaaatgaaagctacagtacaataaagctggtaaaacgc

SEQ ID NO: 7704 - DNA, 445 bp, Rattus norvegicus
ttttagaaacaccccccccccttcccatttttgtttttgtaaaccgtcccatccacagttgtcagttgtgaagaggggaccagatgtcactctgcagcaggctgatgggagatggcgggcctgccagccctcaggctgggggatgtgccacgtggaccacttggttgacagactggcttcctgcttgcctgggccttctgccctatactttgggatagattgggtaaagggggatatagtcaactactttgtaataccccccaaactgttcttacgtcatgagtgtcaaatgtgtccccccacctccctagaagttatgaacactatacacagtcaataaagcgaatggaacttgctgagacccagccggcccagcccctgcacccaccccacaaggcagtccttgacattaaagagagaatttattgaaaaaaaaaaaaaaaaa

SEQ ID NO: 7705 - DNA, 551 bp, Rattus norvegicus
aagaattcggcacgaggggtgcgtgagctgaaccggcagctgcgcggggtcagcaaggaggaggtgatccgactgaagcagaagaggcaggaccctgaaaaaccgcggctatgcccagtcctgccgcttcaagagggtgcagcagagacacgtcctggagtcggagaagaaccagctgctgcagcaggtcgaccacctcaagcaggagatctccaggctggtgcgcgaaagggacgcctacaaggagaaatacgagaagttggtgagcagcgggttccgagaaaacggctcgagcagcgacaacccttcctctcccgaatttttcatgtacccaagggactcttctacatctgtgatgtgagaaaagcagttgcccgaagctgaacagaaaatatgatgccggcatgcttatcccgtgagagaactcggcccacaaagcacaaaaactaaactcaaactcagagaagaatcaagaagggtgtttttcctggcgtctacaagaagcgctttatttttcctctagatttcttttctaaaaaataaaaaaaaaa

SEQ ID NO: 7706 - DNA, 489 bp, Rattus norvegicus
acgcggtggagcttcgagaactttctccctgggttgcccgtccctcggggccgcgccgtcgagcgggtccccggcgtcggcgtgcgcggccaggctcgcgaccgtgcgggctgcgcgagctcgaggtgcgtgtgagcgagctgggtctgggctacacgtcggacgaaaccgtcctgttccgctactgcgcaggcgcgtgcgaggcggccatacgcatctacgacctgggcctgcggcgcctgcgccagcgacgacgcgtgcgcaaagagcgggtgcgagcgcacccgtgctgccgcccgacggcctacgaggacgaggtgtccttcctggacgtacacagccgctaccacacgctgcaagagctgtcggcgcgggagtgcgcgtgcgtgtgatgctacctcacgccccgacctgcaaaggggccctggcgactttcaggagaactgaattcacataaagtgtggggaactcaaaaaaaaaaaaaaaaaa

SEQ ID NO: 7707 - DNA, 509 bp, Rattus norvegicus; identical to SEQ ID NO: 3611

SEQ ID NO: 7708 - DNA, 581 bp, Rattus norvegicus
  misc_feature (182)..(182): n is a, c, g, or t
atggttacctctacgtccttcaatgggtgtgtctcttctcacccttgtcgagatgccagtcccccaagcaagagatttcggaaggaaaagaagcaactgggacctgggccgttagaaaacagctatgtaaaaaagcagacgatggcacagcaggacagtgggtggaagataagtgtcctgtntactccgtcctcccccttggcctctgtgggtcctgttgctgattcctccacgagggtggactctcccagccatgagctggtaaccagctccctgtgcaacccttctccatccctgatactccagactccccagtctcagtctccccggccttgtatttataagacgagtgtggccacccagtgcgatcccgaggagatcatcgtgctctcagactctgattagcagtccctgcatccagaagggtttctaatggctgttagaagatgacggagcaaatgatggacagagctcctcccgttttggtggtgtttcttttgacaaaaaatcagatgttttaagttttacacagacacattaataaacaatgaatttcttttcttaaaaaaaaaaaaaaaaaa

SEQ ID NO: 7709 - DNA, 704 bp, Rattus norvegicus
gagtcagaaacacctggtgtgagattgcgagaggggcagacacttcgtgactcaatgcttaagtacccagatagtcaccaacccaggatctttgagggggtcttggagagtcatgcaaaacctgaatcctccaaaccagctccagattgggggtcccagggaccttttcataggttggatgatacatggcctgtgagtccccattctagagccagagaggacaaggatcttgactcccaggtttcccaggaaggtctgggtccacttcttcaaccccagcctaaatcctatttcaaaagcatctctgtgaccaagatcactaagccagatgggacagtggaggaacaccgcactgtggtggacagtgagggccggagagagaccacagtgacccatcaagaagcccatgacagttccagaagtgatccagatcctccaagatcttcagctttggatgatcccttttccatcctggacctgcttctaggacgttggtttcggtcccgatagctttcttgaacttcagaggccttcaggtccttcccaccccctccctccctgttgcccattgccaataagcatagcttttgctgtcatcctggggtcttaaatgtgtggaacaattaatcgagcttatgccagtctgtcattcatccgaactgaacaataaagcctttatttatgttaaaaaaaaaaaaaaaaaa

SEQ ID NO: 7710 - DNA, 596 bp, Rattus norvegicus
aatatatttaatggttaagggacttgcagggcccggcagccagaatatccaagggctgggcccgccgtgcgctcttgtgcctctcctaggactggggccaagggtggctgagctgcaccacccactctctatagcttcaagtctgccttttacggatgctttgagagaaaaccaaggctttattttcccttcttgtagtaagcgctctagttgtgggtcctcacagccttgcccctggagccacgcttagaagagagtagcctgccctacaatggtctacactggtcgctgagtttccctgtgctcctcctcactgtgttataaatgctgtgattagagtccctatggcaagaaggctttttttttctccttttaaaggagaaacagtcaaatcatgaagctacatatgctagaaaagctctgaattcaggtcccagttgctgtcacaggagtgagtgggacccgcaccccttttttatataatacaagtgccttagcatgtgttgcagctgtcaccactacagtaagctggtttacagatgtttccactgagcgtcacaataaaagagtaccatgtcaaaaaaaaaaaaaaaaaa

SEQ ID NO: 7711 - DNA, 600 bp, Rattus norvegicus
gaaattcaaaccgagattggaaatctcatgtccgtaggccctgtgctctgcggagctcacctgcatgcgtcttcctgtgcttacagtttgtaaaccttagtgatgagcttcactcggtgtatgattttatatagctctgcgtcttaactgaatctgtgaatatacctatatatgggaaaaagttatagtttgggctacgaccaatccgtattggcttgttcaaaataggtccactgtatggttttgtaaacaaccaacctattgaaccttctaaagtcaggattcctcctcttccctccctaaaggtctttggaaagcttgacctctcaataatcgctctcttccaaaatatcccaatttctgaaaattttctatccagatagtcgaatctgaatatatttacctctatactttcatcatactgttttagccttaataactgtcccaatgggtccctagataatttcgatactcccatgctatttttaataactaaagcttctcaagcatatcaatagtagtcatacaactctctgcgcgcttgtggcctctctgaatctccaaattattgcctctactcgtctcagtcatcatatcact

SEQ ID NO: 7712 - DNA, 600 bp, Rattus norvegicus
ggagagaatcatgaaagctcaagccctcagagacaactcaacaatgggttacatggcagcaaagaaacacctggagataaaccctgatcactccattattgaaaccttaaggcaaaaggcagaggctgacaagaatgacaagtctgtgaaagatctggtcatcttgctgtacgaaacagcactcctgtcttccggcttcagtctggaagatccccagacccatgctaacaggatctacaggatgatcaagcttggtctaggtattgatgaggatgatcctactgtggatgataccagtgctgctgtaactgaagaaatgccacccctggaaggagatgatgacacatcacgcatggaagaagtagactaggcttcaccagaactatgtgtttgatgcttaccttcattccttctgataatatattttccatgatttccggtggatttctgtccacatttaaaacatctgtgtggcatgaaaactacgggcaggtaaaatttctactgtgatactgtgatctataggttgacccaaaggtgataaacgttgttgtagagtaagtacctatgtactgtaatatgtggcgagtgtactgtaca

SEQ ID NO: 7713 - DNA, 737 bp, Rattus norvegicus
actacattgcctatgaagatgtggtcgggggagaagactggagtcctatggaggagaaaatagagactcaaacccaggaagaggtgagagacagctaagagaacacagaaatatacgaaccaatccatgaagaatgaggataccccaaatagacagtacctggatgaagatatgctcctgaaagtgctagagtatctcaatcaagaacaggcagagcagggaagggaacatcttgccaaacgggccatggaaaacatgtaaacagctttaatgcccaatttcccttcttttccccaagtgaatcccctccctttctcttaagtgtgttaatctctatcctgttaacactgtaatatctttaagtgatgtacaagcagatgactccagatagttttggggatctgctttacttattctgagctgttatgttgtgtatggatgtgtataaatgttatgactctcagatttaaaaaatatgtcctttattcaagaaagatatctatgatagtgttgactaatgtatccaatggtcatggtattgacaatgctcacatatgatgaagagtatcctataattatcttggaagtttttaacatttattgaattattttgttactgtctgtagtgttttgtggagttctggagccaaatcaataaagcattataaatatatagttttacttataaggccttttctatcgtgtgttttattgttgattaataaatgttatttctg

SEQ ID NO: 7714 - DNA, 600 bp, Rattus norvegicus
cctgaccatgatggccagaaagatgaaggatacagacagcgaggaggagatacgagaggccttccgtgtctttgacaaggatgggaatggctacatcagtgctgctgagctgcgtcacgtcatgacgaacctgggggagaagctgactgatgaggaagtggatgagatgatccgagaggcggacattgatggagacggccaggtcaattatgaagagtttgtacagatgatgactgcgaagtgaaggcccgggcagctggccatgcccgttctcctgatctcttcttgcgctctcctctcttcaacactcccctgcgtacccggttctagcaaacgccaattgattgactgagaatctgataaagcaacagaagattagtcccaaaaacaaagaagcacaaacacaacaaagagaagaaacaaaagaaaaactcgaggggggccgggcccattcgccaatagtgagcgattcaatccggccgcgttacaagcgggaggaaaccgcggtccagtatcctgagaatcccttgcggggtaaggaagcggcatgctcaaagcggcgaggaggaaggagcatgggacgcatagagagcataccgg

SEQ ID NO: 7715 - DNA, 600 bp, Rattus norvegicus
  misc_feature (518)..(518): n is a, c, g, or t
ttgtcttgacccttaaaggaaaattcagtttacgtccccaaatctctacgcaggtgtctctggattctttttcagtatttacttttcttttttttttttttcacttttgggattggaaaggcaaatcccaaaatttgtagtctgtctctccaacaaggcaaaggttaaggagcagtaccagccgcctctgggtctccactgtgggttgtcacagatgagacacagactgtggatcatttgtgctgtacttatttctgtatttaggtttaccactgcttgttcaaagaacaattgcaagcccaattgcttttaatcttcttgtctctgtacagccctgtttatattggaaacctcagttttccctccaggagggaaacattcgaataggccacttctgctttttctccttaactcttttgtaccacaataatatattactcttcttcatcaaaaaaaaaaaaaaaaaactcgaggaggggccccgtacccatttcgccttatagtgagtcgaatacaantcactgggcgccgttttacaacggcgggactggggaaaccctgcggttacccaacttattcgccttggagcacattcccctt

SEQ ID NO: 7716 - DNA, 600 bp, Rattus norvegicus
  misc_feature (548)..(548): n is a, c, g, or t
aagtttcattccaatgttccttcccaagtcttgtatttctccttcactttttcccctcggctttccgggagcctagggactaactctactcctcacctgccccaagggctgtgtgtttggtgcctctccctcaggcaccgagaagaaaggaaccttgatagcctctgcccaactccaggccactgggccttcccatctcctcctccggttcccctggctccttcctgctgtctcctttcctaccttgtggtggcccagctccacactctgtcctcgggctcaaatccacatcatgcagatcagactctccatcagggtttatctaggttgctgagtattttttatttgttcatccatcctttgtttacctgagcccacggccccatgaccgaggaccaatgacgtcatgtggcttttgcagttccccactcctattaagtctttactggagagccagccaggcaagcagagcataattgaggccctctgactgaccactctggagcacagttctgagactccgagatttggggaaggagagagagaanaaatggatcttcacaggtcaggggtgcagtagggagcttcaagaaacgtctt

SEQ ID NO: 7717 - DNA, 665 bp, Rattus norvegicus
  misc_feature (618)..(618): n is a, c, g, or t
gaatcggccacgaagactcccttgccttcagaggatctaagacatgcaccccaagaagcccaagagaagggcagcagcagaagggagctccaatgttttctccatgtttgaccagactcagatccaggagttcaaggaggctttcactgtaattgatcagaacagggatggcattattgacaaggaggatcttcgggacacctttgcggccatgggccgtctcaatgtgaagaatgaggaactcgacgccatgatgaaggaagccagtgggcctatcaacttcactgtcttcctgaccatgtttggggagaagctgaagggtgcggaccccgaggatgtgatcactggagccttcaaggtcctggacccagaagggaagggcaccatcaaaaagcaattcttggaggagctgcttaccacgcagtgcgaccgattttcccaggaggagatcaagaatatgtgggcagccttccctccagatgtgggcggcaacgtggactacaagaacatctgctatgtcatcacacacggtgacgctaaggaccaggaataggggacccgaggtctcagaagacccagataggcttgtagccgcaccaactctcaccctgacccccncaataaaagtcaactggtctttgtttcttaaaaaaaaaaaaaaaaaa

SEQ ID NO: 7718 - DNA, 666 bp, Rattus norvegicus
aatccaacacctcggggctggacatatttgccaagtttctgcctacatcaagaactcaaacccggccctcaatgacaacctagagaagggactcctgaaagccctgaaggttctagacaattacttgacatcccccctcccggaagaagtggatgaaaccagcgccgaggatgagggcatctctcagaggaagtttctggatggcaatgagctcaccctggctgactgcaacctgctgccaaagcttcacatagtccaggtggtgtgcaaaaagtacagaggattcaccatcccggaggcgttccgtggagtgcatcggtacttgagcaacgcttacgctcgggaagaattcgcctccacctgtcctgacgatgaagagatagagctggcctatgagcaagtggccagggctctcaaatgagcacctttttaagggtccttcacccactctgtgctctccacagaggcttccacgttgctacataatggacacactccgatatagccaatgggcaggaaatccggggcacttgtgcagggccggggatgggactggggataagggaaagattagaggacaagggtaagatttttatttttgggtgggttgggtaagacaacgtatttcagtaataaaatacagaatggaaaaaaaaaaaaaaaaaa

SEQ ID NO: 7719 - DNA, 662 bp, Rattus norvegicus
  misc_feature (10)..(10): n is a, c, g, or t
aagctttcanagacacattctcctcagacatctgcaatgctcttcacagtagacaatgaggctgccaagatcacatgcttgtgtcaggttcctcagaatgcagccaaccgggggctaaaagccagcgagtgggtccagcaggtttcaggcctgatggatggtaaaggtggtgggaaggacatgtctgcccaggccacaggcaagaacgtgggctgccttcaggaagcactgcagctggctacttcctttgcccagctccgtctcggagatgtaaagaactgatgggagggaagccctctcaggaaagcatctccccgacaaccagtcatgttcaggtgcaggagtctagccaggagctctcctcctgccacgaagacatttgagtcttgggacctttcagcagccctccgtcctgatccagcagtaactggaacgcgcctggagctgtcctgtgattcattgcccctttccattctgctctgagccataatgtcagcgccatctgtctaaagtcactacccaggaatgctacctaacatcctgatcacgtctagatgaggtcactctgccaacctgaggcttctaggtctgcaagtgggaaggaagccttccactgcagaaaataaaggaccatgtgcaatactaaaaaaaaaaaaaaaaaa

SEQ ID NO: 7720 - DNA, 622 bp, Rattus norvegicus
agaattcggcacgagggagaaaatggttgggggcattgcccagattatcgcagcacaggaagagatgcttcggaaggaacgagagctggaagaggctcggaaaaagcttgcccagatccggcagcagcagtacaagttcttgccttcagagcttcgagacgagcactgaggaaacccctgtatttaatgcagacccagcccagagactgtgcctgccactaccaaagccttctgggctgctcagggcccaagctgccaaccccagcactccccaaagtgcctgccaaaccccgggcctggtcctgcccagtcccactgcaagccgtgtcctctccctgactccaagtgccttcgcaccctagggccccaagtgcctgtcccctccagagtattaacgctccaagagtattattaacgctgccatacctcagttttaccctgccagggctccagctgctccaacctgccagcagcttccagccaatccccacagccacagcagctcaactcatccctttttgatactctatccctgccccagctacctgtggagcctgagggttacaaacccaacaggtcaagctccaataaaggtgactctatgaaaaaaaaaaaaaaaaaa

SEQ ID NO: 7721 - DNA, 600 bp, Rattus norvegicus
tcccaaatattttgctttatcatctgatatcaacacttgtatctggtctctgtgtcccagcggtgccttgtgcaatgtcagtgtgcgcgtctatgctaaaccaccattttatttggtcttttgttttgttttggttttgctctgattcttgccaaaatgagactcttcacgaacggccaggggaaggggctgagtgaggctctcattctttttggtttagggatgtttggtttttttgttttgttttgttttgttttgttttctttcgcctcccagaggaccaatgaaatgaagtgggcttctccctctcccctagttttccaagggtgtatgtagttgtgggtcttagcttccttcctccggctgagacttatactggcttccccacccacccacccccatccccaaaggccctggctctgggtctggaaagaaggccacctccagccaatttgtacacaaccctgccactggaagcaggggtggactgcttccttctcttctttttttggggggaggggacacaaagtttcatgctagatgtcctatgtattatatctataatataaacatatcaaactcaaaaaaaaaaaaaaaaaa

SEQ ID NO: 7722 - DNA, 625 bp, Rattus norvegicus
agagcatgggtcactaggctctgcatgctcttgtttcatctgaaaggcttttattcttcccattaggctccaaacttgcagacccacggtgttatggccacacccagtttcatctgttacctgacatactgaatagggaacggctgataaaacaaaaccaagctgaccaggtagaagtggtctttagagctaatgccattgcaagtctttttgcttggactggagcacaagctatgtaccaagggttctggagcgaagcagatgttactcgaccttttgtctcccagggtgtgatcacagatggaaaatacttttcttttttctgctaccagttaaatactttggcactgactgtacaagctgatcaaaataacccacgtaaaaatatatgttgggggacacagagtaagcctctttatgagacagtagaagataatgaagtgaaaggctttgatgatgatgttctcctgcaaatagttcactttctactaaataaaccaaaagaagacagagcacagctgttgacaaaccaggagaaagaacttgatccaagaccttgatgatatttaaatttcgcctgaggaataataaagtcatttaaagattgaaaaaaaaaaaaaaaaaa

SEQ ID NO: 7723 - DNA, 534 bp, Rattus norvegicus
cggaggcggctcgatgggacttggcccagcgccgctccggagccttgcgctcccggtgcatgctgttcttggtggctgagcttgaggggaactaggttccagctgagtttgtgttaagcggcgtgttggcgtgcacaaactggcttcctgtcgctaaatgtcactggtccatttgtttctctgtcctcaggctaaacgcaccaagaaggtcgggatcgtcggaaaatacgggacccgctatggtgcctccctccggaaaatggtgaagaaaattgaaatcagccagcacgctaagtacacttgctccttctgtggcaagaccaagatgaagagacgagccgttggcatctggcattgtggttcctgcatgaaaacagtggccggtggggcctggacctacaataccacttctgcagtcacagtgaagtctgccatcagaagactgaaggaactgaaggaccagtagaagcacctcctgagacttgcctggtctgcaataaatgggctaatttacacaacaaaaaaaaaaaaaaa

SEQ ID NO: 7724 - DNA, 517 bp, Rattus norvegicus
aagagtgatattttgctagttaacaaagttaacagatcttctagcctcatggaatactgttgaacctagagcactgtcttgattcttttgtgtgtgtgtgtgtgtgtgtgtgtgtgtgtgtgtgtgtgtgtgtgtgtgtgatcttagaacacacaggtaatgtgatatgacctatgacaactggtaacagtggattcatttacattgtttacacttctatgaccaggccttaggggaaggtcagattttaaaacacccaagtagtgtcttcctgcctgtccccaaggacaagttacaacagaaggtgttggcttcggctctgttctctttttttgctcagtaatacagtcaagcaggagtttgtttgcaaatgaaagctgtgtaagcatttttgtttatttcaaataaaatatatttgtattatttgtcattcatattatccatccatgccacactgtctgtaccaggtagtccaatagaaatatacctgttttgttctaaaaaaaaaaaaaaaaaa

SEQ ID NO: 7725 - DNA, 600 bp, Rattus norvegicus
atttctgggataactcaaaggagcgatggggatatacatccaagtggacgaatgactactccatggtgttgacaggagctgctatctaccacaaatattatcactacctgtattcccattacctgccagccagcctgaagaacatggtagaccaactggccaactgtgaggacattctcatgaatttcctggtgtctgctgtgacgaaattgcctccaatcaaagtgacccagaagaaacagtataaggagacaatgatgggacagacttcccgagcatctcgctgggctgaccctgaccactttgcccagcgacagagctgcatgaatacgtttgccagctggtttggctacatgccgctgatccactctcagatgaggctcgacccggtcctctttaaagaccaagtctcaatcctgaggaagaaatacagagacattgaacgactttgaggaatcccactgagtgggggaggggaggcaagatgggactggagtccagttgctctctcctcccagtgcagatctgctcatgcccatcggtggagccagactgtgccaagtatcaaaaaatgaaaaaaaaataaatataaaaaaaaaa

SEQ ID NO: 7726 - DNA, 1400 bp, Rattus norvegicus
gggcaaagggaagttcgccatccgtgcagacaagaagtccaaccctgttgtcaggacggtgaagtctgtaggcatgattgcaggagggacaggcatcaccccaatgctgcaggtgatccgagccgtcttgaaggacccgaacgaccacactgtgtgctatctgctcttcgccaaccagtccgagaaagacatcctgctgcggcctgagctggaggaactgaggaacgaacattcttctcgcttcaagctctggtacacagtggacaaagcccccgatgcctgggactatagccaaggcttcgtgaatgaggagatgatcagggaccatcttccacctcctggggaggagacactgatactgatgtgtggacccccaccgatgatccagtttgcctgtttgccaaacctggagcgtgtgggccatcccaaggagcgatgcttcaccttctgatggctggatgctggccactcccatgcctgctgctcacgcactcaccacaaccaccttccaccccttccttccccactactgtcctttaccctgacatatgcccacatccatgctggggcctgggttcagcctggcctgcccagccctggtcatccagctgtactggcccctgaggggcccctttgggagcaggcctgtgtatcaggtggcttctgttgaccactttctgaataggcttctgtctggtactaactggccattaccagagatggtccatgaccacccctttatacacacacacatacacatacagagacagagagacagagagacagagatagacagagatagacagagagacagatacagacatagagacagacagagacagagagagaggagtcagagagctgttagtaccatgtctacccgttaccatggaccgcaatgtgtagtaaggaaatgaaaggtaaacagttatctacagtcctaggaaccatgcctgtcacctaaccacctactgccttaggctatggcctggtctgtgcccctaaacactacattagacagtgacacccagaggttctcttaggagggtgtctggcagtgacaggccagcccccacttgctggccaggagttccttgggtcagcacgtggacccttccaaaaccccacacactgcccctcccctccatgatgccttgagcaccctaagttgtcagcccaacagagtttggtagaccttggggtacctggcttgtttctccatcccatacctccctcccatctggttcccagcctggggggttctgagcagagcctcttttctcggagacagacccggtgcctggcgctgccttcagcagacagcagacagcctcctgcacactggctttttttagtcatttatgggcaaaatgagttaaaataaaactttgcaaatcctg

SEQ ID NO: 7727 - DNA, 1130 bp, Rattus norvegicus; identical to SEQ ID NO: 3631

SEQ ID NO: 7728 - DNA, 600 bp, Rattus norvegicus
tgttttatttcgtttgtttgtttgttttgtttttttagttccacccggagtagggatggagaaaatttcttcactctcctattctggttgataaagcgttacatttgtatgttgtaaaaaatgtttgcaaaatccaatcagatgactggaaaacgaataaaaattaaggcaactgaataaaatgctcacacaacactgcccatgatgtatctcccctggtcccccaggtcactcttctggcatgggtcagggaaagctgcttttattggaaagaccagcatttgtttaaagcacattctttccctccctcctcccattttggtccctttcttttttgttttgttttaagaaagaaaattaagttgcgcgctttgaaatattttatcactgctgtgaacagatgaacaatgtgtgtcatttcatgacactcgtggaaaacagtgattttttttttattttttgccctaaggagaaacaagtaagaataaccgaaaatgttctttttttttaaaggcataaacagtggataagttataatatggcctaacaatgtttgcagataaaagatattgcatacagccagatactagagcaggatcc

SEQ ID NO: 7729 - DNA, 600 bp, Rattus norvegicus
tatttattccaccaagtgtgtggtttttattttacattaatatttaacgatgtggatgcgtttcatcgatggtcgttcaattccaattgtgcagtttaaagatggtaggcgttaaatatctcgttaaattaatatttattgggagaccattaagtgtcaaccactgtgctagaaggtgttgagcgggaagaagggcggcagagatgagagtctgggatcgtgttttgtgttagggtgaggaaatgtgtgagaggctatgtttgtatgttttgaaaagaatgttatttattgaaagttgtctttcatattttatggtcaacattgatgtgttgaagcttcccttggacattttatgtctagtttgtagggcacaatgcccttttatattctttaaccaatgctccttctcgtctcaggacagagaagttccaaggactgttacaaatgaaataaaaataaaagttttattaaaaaaataacatgggtgctttttgttttattcttcttgacatcgttgtttatagctaatcatgtgcctgtgctggctgaaatttcttatgacttgcttacttggggaggaacatttggtattcctgaaaa

SEQ ID NO: 7730 - DNA, 600 bp, Rattus norvegicus
attgtgaaaggcagagaggcaggtacaagggaacccaggcaagtgtcagccagaggtggctcaaacaagggaagcaacatgcaaggatgttcctagcagaggaacagtaacaaggggcctctttctatcaaggataccttccatatctcccagtccgtgccagatactccaggaatgttaagatgtcttaccttcacggagaccacgcttttagagtgcaaataacttgtgtatcaactggcgcagaagatagggtatgtcataactgccaatgacaaggggtgagagaaaaggaagcaagtcctgctttcttccaggaactctgttcttccccatccagtggcaggaagacccagaccacccagttctgtagtgctcccacagtaatggcacaatgacagtcagtggacagctacatcattgtgtaattaaagtgcctgctgggatttagctcagtggtagagcgcttacctaggaagcacaaggccctgggttcggtccccagctccgggggaaaaaaaaaaaaaaaaagtgcctgtgaccatggatgggaaacgctctgatctccagggttttaatttatactggcttgctattttg

SEQ ID NO: 7731 - DNA, 600 bp, Rattus norvegicus
actccccgcggacgctccaggctccgagccatctagcgactcggcgagcggcctcaggtggacaatcatctggagagcccgccttgggccagggactttcacttcaagccgagtccccagttcaagaaggaggtacggccgcctccttacccccagctcaggcccaccatggggaagaacaatagcaagctggcccctgaggagctggaagatctggtccagaacacggagttcagcgagcaggagctaaagcagtggtataagggtttcctgaaggactgccccagcggcatcctcaacctggaggagtttcagcaactctacatcaagttctttccttacggagacgcctccaagtttgcacagcatgctttccgcaccttcgacaagaacggcgatggcaccatcgacttccgggagttcatctgcgccctttctgtcacctcccgtggcagctttgagcagaagctcaactgggcctttgagatgtacgacctggacggtgatggacgcatcacacggctggagatgctggagatcattgaggctatctataagatggtgggcaccgtgatcatgatgcgcatgaaccaggaattc

SEQ ID NO: 7732 - DNA, 600 bp, Rattus norvegicus
ccatcccgctgactgccgaaaagctgtgtatttacaccgacaattctgtgaaaccccaggagctgctggagtgggaactggtggtgctgggtaagctgaagtggaacctggctgcagtaacccctcacgacttcattgagcacatcctacgcaagctgccccagcagaaggagaagctgtccctgatccgcaagcatgcgcagaccttcatcgctctgtgtgctaccgacttcaagtttgccatgtacccgccatcgatgatcgcaactggaagcgtgggagcagccatctgcgggcttcagcaggacgaggaagtgaatgcactcacgtgcgatgccctgacggagctgctggccaagatcacccacaccgatgtggattgtctcaaagcctgccaggagcaaatcgaggctgtgctgcttaacagccttcagcagttccgtcaagagcagcacaacggctccaagtctgtggaagatccggaccaagccaccacccctacagacgtgcgggatgttgacctgtgaggaagccattcgggcggcaagagagaggcgtgttcgtcatctgctagccccttctctctctctctctagttat

SEQ ID NO: 7733 - DNA, 600 bp, Rattus norvegicus
ccaccgaacagagcagtgccgagtgaccctggctcccaggcaccttcaccaccagcagggtgaccttaagaattaatgaccattcaaaaacaaggcaaaaagcacacccacgaccttaccaacaccaaagaaacatctaagcaataaaacggaagactaacaagatttggacattagaatgtttactgctattctctacgaaactaacaactgcaaagggaaggagcccgcactgtccatcaagctgcgtcccgggaacctgcacaggcagagagcagcctccccatttcagcaacctagtgctttatatttttttcctggtttttactgttttggtaatatgaattaaaagaagaaatattaataccacatggggattgccccaaccaaagaaatctgaaatatatagtaaatgctctttttcctttgttgttcattttggatgctggtgctaaacttccaagtgtcatgatttaagaagaaattttatgcccttatttattcctaggatgaggggagaacatttttgctttcttacatagctctctctgaaatgtgcagtaacaagttcctcaaaaataaaatttttaccttcaaaga

SEQ ID NO: 7734 - DNA, 1328 bp, Rattus norvegicus; identical to SEQ ID NO: 3638

SEQ ID NO: 7735 - DNA, 1400 bp, Rattus norvegicus
agagcatgaggaaaaacaggctggtagtgaccaaccttgataagttgcacactgcactttcggagttatgcttctccataaattatgttccaaacatggcagtgtgggaacacaccttcacaccgcgggagtacttgacttctcatctggaaatccgattcactaaatcaattgttggaatgaccatgtataatcaggctacacaggagattgcaaagccatcagaacttctgacaagcgtaagagaatatatgactgtactccagtccatagagaactatgtgcagattgatatcaccagagtatttaataatgtccttcttcagcaaacacaacacttagacagccatggagaaccaaccatcacgagtctgtatacaaactggtacttggaaacgttattaagacaagtcagcaatggccatatagcttattttcctgcaatgaaagcatttgtgaatttacccacagaaaatgaattaacattcaatgcagaggaatactctgatatatcagaaatgaggtcgttgtcagagctcttaggcccatatgggatgaagttcctaagcgagagtcttatgtggcatatttcatcacaagttgctgaacttaagaaacttgtggtggagaatgttgatgttctaacacaaatgaggaccagctttgacaaaccagaccagatggctgcactctttaaaagattatcatctgttgacagtgtcttgaaaaggatgacgataattggtgttattttatccttccggtcactggcacaagaagcactgagagatgttttgtcctaccacattccttttctcgtgagctccattgaggatttcaaggaccacattccacgggaaaccgatatgaaggttgcaatgaatgtgtatgagctgtcatctgctgctggattaccatgcgagattgatcctgccttagtagtagctctttcctcacaaaaatcagagaacattagtccagaagaagaatataagatcgcttgcctcctgatggtctttgtagcagtttccctgcctacactggccagcaatgtgatgtcccagtacagccctgcaatagaaggacactgcaacaatattcattgtctggccaaagcaatcaaccaaattgctgctgctttgtttacaattcacaaaggaagcattgaagacagacttaaagaattcctggcgcttgcgtcctccagtctactgaaaatcggccaagagacagataaaactacaacgagaaatagagaatctgtttatttgctactggatatgattgtacaagaatcaccgttcctgacaatggatctcttggaatcttgttttccttatgtgttgctgagaaatgcataccacgctgtctacaaacaaagtgtcacatcctctgcatag

SEQ ID NO: 7736 - DNA, 600 bp, Rattus norvegicus
aagttgggttcatagacgccatctgcttgcagctgtatgaggccctgacccacgtctcagaagactgtttgcccctgctggatggctgcaggaagaacaggcagaaatggcaagccctcgcagaccagcaggagaagacgctccttaatggggagagcggccaggccaagcgggactgaccttctccccctcctcccctcccccacccccaccgggtgttcgaactgccctaggcctggtttcgccatacactatgcagactcgagtgcactttgccactgctgtattttatttttgcacaacttctgagagcatgaggtgtttcagagattgctacctactttccgtgcttttgttttatgccactgaagtggagccgtcagtcatgcccactctaacactttgataagagtggtgtaaactgcattcccacacgcagcttggttatgcttggggagtatgaataaccggcctttgtgtttctgagtcaccagtctttcaaacacgttaggaatcgttctcggaagtgggttaggggcgaactgaatgtgtcctgggacatttaaagccatcctgaaattaacgctgagtggatgttag

SEQ ID NO: 7737 - DNA, 600 bp, Rattus norvegicus
ttcctcatcagctcattagtactttatattatctcactaatactaacaacaaaactaacacatacaagcacaatagacgcccaagaagtggaaacaatttggacaatccttccagctgttattcttattcttatcgccctcccttccctacgaattttatacataatagacgaaatcaataacccagttctaacagtaaaaactataggtcaccaatgatactgaagctacgaatacaccgactatgaagacctatgttttgactcctacataatcccaaccaatgacttaaaaccaggtgagcttcgtctattagaagtggataatcgagtagttttaccaatagaacttccaattcgtatactaatctcatccgaagacgtcttacactcatgagccgtcccttcactaggattaaaaactgacgcaatcccaggccgtctaaatcaagctacagtgacatcaaatcgaccaggcctattctacgggcaatgctctgaaatctgcggctcaaatcacagtttcatgcctattgtactagaaatagtacccctaaaacacttcgaaaactgatcagcttccataatctaaattcattgc

SEQ ID NO: 7738 - DNA, 1400 bp, Rattus norvegicus
attatccaccccactaatcattctaacaacttgactcctcccactaataatgctcgctagccaaaatcacataaaaaaagaaaatataatgcatcaaaaactttacatctcaatacttattagcctccaaattttactcatcataacattctccgcaacagaactaattttattttatatcctgttcgaagccactctaatcccaacactaattatcattacacgatgaggcaaccaaacagaacgcttaaatgcaggaatttatttcctgttttatacactaattggctccatcccactcttaattgccctcatttcaatccaaaactcaataggaacactcaacttcctaatcctctccctcacaacacaccccctaccctcaacatgatccaacaccattctatgactagcatgtataatagcatttataatcaaaataccattatacggagtccatctatgattaccaaaagcccacgtagaagctccaattgcaggctctataattttagcagcaattctcctaaagctagggggttatgggataatacgagtttccatcattctagaccccctaacaaaatctttagcctacccattcatcatcctctcattatgaggcataattataactagctcggtctgcctacgccaaacagatctaaaatcattaattgcttactcatcagtaagccatatagccctagtcatcacagccattataatccagacaccatgaagcttcatgggagctacaatactaataatcgcccacggcttaacctcatcactcttattctgcctagcaaacaccaactacgaacgaattcacagccgaactataattatagctcgaggattacaaataatcttttcattgatagcaacatgatgattattagcaagcttagccaacctagcactaccacccctaattaacctcataggcgagttattcattgttatagcaacattttcctgatcgaacccctctatcatccttatagcaactaacattgtcactacaggaatatactcaatatatatgattatcacaacccaacgaggaaaactaaccagccacataaacaacctccaaccttcccacacacgagaattaacactcatagctctacacattattcccctcatactattaacaatcaaccctaaactcatcacaggcctaacaatatgtagatatagtttacaaaaaacattagactgtgaatctaacaacaggaaatcaaattccttatttaccaagaaagtatgcaagaactgctaattcatgcacccatacctaaaacatatggctttcttacttttataggatagaagtaatccattggtcttaggaaccaaaaaccttggtgcaactccaaataaaagtaata

SEQ ID NO: 7739 - DNA, 600 bp, Rattus norvegicus
ctgtccctagcctgtctccagctgtctctaagaggccctcaaagatatacaagtctgtgatgatggattgttccctgtaaagcacttcaataaagacataacttccaacagctgtgtgactccactctgctctcattactctgcccctctctgtgctcaacagagaactgatttgagctactatcttgctatgttaaccatcttgactactgacttccaggcacacgtgtaccactgtggattactaaatattatctaacatgcatggctgcatacagtaagatttcacacccaggataatgtgccctgttctgttcttctccactgtcctgtcttttcatcttctctcttcttgtctctcagctcttctgcccacaaaccccatgccctaagcactgcatctttccacacatcattgcagtttccatgtctaagtacagacatgggtgttgatccttgtgtcctacaccacctaccctgccatcatcatcctctcaattttgcacctgcaaactggaggacagcctgccctcaaaagtccttggaccatgaccgtgacttcagcagtcacaacaggagagcattagcactttttggatc

SEQ ID NO: 7740 - DNA, 1400 bp, Rattus norvegicus
aaaaggttgctaaaggacagggcattgcttttagccatggaaatgtatggaaagccacaaggcatttcacagtcaaaaccctgaggaatttgggcatgggaaaagggaccattgaagacaaagtgcaagaggaagcaaagtggctagtgaaagaactgaagaaaaccaatggctcaccctgtgatccccaattcatcatgggatgtgctcctggcaatgtcatctgctccattatcttgcagaatcgttttgattatgaagataaggattttcttaacttgatagaaaaagtgaatgaggccgttaaaattataagctctcctgggattcaggttttcaatatatttcctatacttcttgattattgtccgggaaatcataacatatatttcaaaaatcatacatggcttaagagttaccttttggagaaaataaaagaacatgaagaatcgttggatgtttcaaatcctcgggacttcattgattatttcctaattgaaagaaatcaggaaaatgccaatcagtggatgaactatacacttgaacacctggcaatcatggtgactgatttgttttttgctggaatagagacagtaagctcaacaatgagatttgctctcctgctcttgatgaagtacccacacgtcacagctaaagtccaggaagagattgaccatgtgattgggagacaccgcagcccctgtatgcaggacaggagccacatgccctacacaaatgccatggtccacgaggttcagagatacattgacattggtccaaatggtctgcttcatgaagtgacctgtgacactaaattcagaaactacttcataccgaagggaacagcagtactaacatcacttacatcagtgctgcatgacagcaaggagtttcccaacccagagatgtttgacccaggtcactttctagatgagaatggaaactttaagaaaagtgactacttcattcctttctcagcaggaaaacggatgtgtttgggagagagcctggcccgcatggagctgtttctattcctgacaaccattttacagaatttcaaactaaaatctctggttgacccaaaggacatcaatacaaccccaatatgttcttcactttcttcagttcctcccactttccagatgcgcttcatccctctctaatgaaaaccagaaaacagaaatgaagatgaggaaagatcctgctgttttgttttctgaaggtacccacagaagccttcatttactactgtcatagaaatgccactgtatccttccttcttctcacagcttcggttctctatttgtccaaggataatagttctgcattatatagttcctaaactcaatgtaaaagatcctgataaagaagccacttcaaataaaagagttctactgtga

SEQ ID NO: 7741 - DNA, 600 bp, Rattus norvegicus
tagttacatccctatataaactatgtttacattttagatgcttttctttctgttaattgcttaatctcactctgacttgaggtacaacttctgttttggaatgaattagataattccagattctggtttgataattgttgacattcccccatgctactttttctgagggcagaaacgtctaatgtgacgactcttcacattaccattacgaggatacacagcacagcgaaatcattccgatgacaggtgtgatagatggagagctaacatgcaactgccgagtgtttcactgttagccagaactaagtcacttgccccacacagcaattacaccatgaatctctaacatcacaaccttctttcaaatacccacggactcatccatccttccatccgtcatccatccatccgtccgtccgtccgtcctgactgcctagtgccactgtctggctaggcacacccactatcaacctggttcacctgtcatggcagcctgtacccacccccgccacacaccccgacgctggcctatagtgcaaaggttgtgcgggctggtccttcccacaatgcagtactgtaatccccgtccctcctggagcc

SEQ ID NO: 7742 - DNA, 600 bp, Rattus norvegicus
ctggtacagcgcgggcctcgcctccaattcaagctggttccgggagaagaaagagctactgtttatgtgccagacagtggtagctccctccacagaaggcggcctcaacctcacctctaccttcctaaggaaaaaccagtgtgagaccaaggtgatggtactgcagccggcaggggttcccggacagtacacctacaacagcccccactggggcagcttccactccctctcagtggtagaaaccgactacgatgagtacgcgttcctgttcagcaagggcaccaagggcccaggccaggacttccgcatggccaccctctacagcagagcccagcttctgaaggaggaactgaaggagaaattcatcacctttagcaaggaccagggcctcacagaggaggacattgttttcctgccccaaccggataagtgcattcaagagtaaacacaggtgagagaagtcagtcacaggtaacacatggtgatgtggcctcaggactcccgtgctctgtcactcttgagacccaagccctggctccccaaagaccttctccgccctccagctttgccttggtggagaaataaaatccaaagcaagtc

SEQ ID NO: 7743 - DNA, 600 bp, Rattus norvegicus
cttgtagctcttacctgcaagtttagcttgagttcacggcatttggggggaccatttaacttaattactgctagtttggaatgtctttgtaagagtagggttggcaccaatgcagtatggaaagactaggagatgggggtcacacttactgtgttcctatggaaactttgaatattttatatggatttttattcacttttcagacctgatactaatgagtgcccctcggctgctgagcaagcatttgtagcttgtacattggcagaatgggctaaaagcttatgttgtgacccattttgaaaataaagtatcttgaaatgattggacattggagaatgtgtgcaagtatcccttacagaaggcacaaacttctgcacaggctgtgtgttacagcagtgagtctagcccagcagagatgtggatgatacaaagctgtgccccctctgtacagcatcaatgtgcttagcccatctcaagtgtttactgtgaacttggtgcccaaagtctcttaagagtgtcatctgcctagtggcctcttgacttggccacttcctaaggagagggcatctgaggctctttgaaccttgcctgcagaaaccc

SEQ ID NO: 7744 - DNA, 1400 bp, Rattus norvegicus
ttgtctaggaaactctctacataaggtatacgggattttctggctggagacgaccagaagttatatcagggaattggggtcacagtctcttgcgactgtacgggtcccatgtggcatagttataaatagcaaaggggagacacttttcaagttcctgctggctgtgtggccttaagtaagtcccttgacctctctggcctctgccccctactctatagaatgtatgcattggtaataatacccatgttaccggctgctgaggaccaagagcaaatgtctaagaactattacagtcttcattgttctcagagcctgcccagatcacacagccccctcccccccacccggggccacacagcagggacctgagcctcctgacctggaggctacagctctgtcctccgtcttcccagtcatgcccagaaatacccctaatgtcttccattttctgtcccacccccaccccaagtctcccttctctgcatctagagagatattctgatgagagtaagatacaggtgagggactgaggctcgtattcctaagtacttgctctctctcaccaggtgttcattcattcattcattcattcattcattcatacattccatagccatctactaaaggccctagacctagtggacacagaggggctggttcaagcttcttttgcggggtgaggccaatacataagtctgctctggacatggatggggatagcgggaggatgggagggttgtaatttattaactgtgtattttctgagtgcttcttccgtgccttggttttgcccacacactcagccctcatgagagacttgctgtgtccaaccccagctaaactgagtcttgggggagcgaaacccaagttttgacccattggagtaggagacagtagcttgttcaaaatatggataaacaactatttttatttttgacaaagcaatatattttttaaaaaaaaaaaaaagttgaaagaaccagaacttgagagaagaaacagaagatctgagtgatcaggcagcagggggcttccagtggaagatgctgggggggggggatttgagagcccatgtttgcctcccaggactgcctcaccacagactcttgttccctcatcatagaaatagggacaaggatgcacctaccttgtagggagttggaaggattgaccgacaccgtataagaaaagcatttgcagagcacacagccttccttgtggggagttgctgatgtgaccacgccgctgggcacacccctatcctctcctgcctttcctactccttgaacattaccaaagagagtggggatcctgctgcccactctccagcgcccttccccaccgccgtgcttgggaataggttttgccaataaatgtgtctgtgttaaaaaaaaaaaaaa

SEQ ID NO: 7745 - DNA, 600 bp, Rattus norvegicus
cggctcagttggatgaagttgcccagcattcgggaagctctacaattaatccttggcacttccagccgtcgggagatagaggcaaaagagttggaaattcaagaccatctggggccaacacgaactacacatgaccttgactccaggaaaacagcaggagggagaagaagagagagagattggggcaggaggtaggctgggtttgagggtactcaaccttaatcccagcacttgagaaacagaggcagatggagatctgtgagttcaaagctagcctggtttatacagcgtgtttcaggccagctagagagacagatagatcctggcaagaaaaaagagagagagagagagagagagagagagagagagagagagagagagagagagatggtgggtcgtggggagagagaaagggaaggaagagagtatggaatatgcctgtgcctagggagttttataccagaataaccttcgcaggagagccaggtttggtgctgtatacctaaaagcccagtgtttgtaggtagaggcaaaaagatcaagagttcaaactcattctgtgctacgtagtgagttcaaggtgagcctgggatatgtaaa

SEQ ID NO: 7746 - DNA, 600 bp, Rattus norvegicus
tagagtttgcaggaggcgggcagtcctgtgtcacaaatactcccctcacttccagcccaccacctgccccacagactttggacacagctcactgaggagaagagaagctgccggttaccttgcttctcctgtgaaccaaaccattaaagtctttattcctgtgacactgacacgtttcttcttgggaagagagggttgctgggaaacagtagtgttctttctctaccttctgcttccaaaagagttacctttggggctggggatttagctcagtggtagagcgcttacctaggaagcgcaaggccctgggttcggtccccagctccaaaaaaaaaaaagaaaaaaaaaagagttaccttcaactttgtttctttttcattgttgttgatgttgtaactaattttaagctttcttttttttttttttttttccccttcttctctgagccaggtgtagacctggctgtcttggaactcactctgtagaccaggctggcctggaactcacagagatccacctacctactgctgggattaaaggcatgtgtggcccccgaccctggctaattttacacttttaatcgacgagaccacagaattc

SEQ ID NO: 7747 - DNA, 600 bp, Rattus norvegicus
tagctggacagcagccgttggaaaccgccaagccagctgactccgcatccgaagatatgaagtgcggcgtgtgtctgtgcgtggtgatggcagtcctggcagcaggcgccctggcgcagccggtagtccctgtagaagctgtggaccctatggagcagcgggcggaggaggcgccccgaaggcagctgagggctgtgctccgaccggacagcgagccccgagcgcgcctgggcgcactgctagcccgatacatccagcaggtccgcaaagctccctctggccgcatgtccgttcttaagaacctgcagggcctggaccctagccacaggataagtgaccgggactacatgggctggatggatttcggccggcgcagtgctgaggactacgaatacccatcgtagtgggccagcctctcggcgctgcttggaggaggcggaatgagaaaacaaccacgcacacgacccctcgcctctaatgtttgacattttgagtttatttattaagtccccaatgtgaaatctgtctgttcagagtgtgcaatgcagccacacacctcagcccagctgagcggtgggaaggcaatgtttccctctggtg

SEQ ID NO: 7748 - DNA, 600 bp, Rattus norvegicus
agaaagtgcttgtcactgagaaagtcatgcctatctgcctgccttccaaagactacgtagcgccaggccgcatgggctatgtgtccggttgggggcggaatgtcaactttagatttactgaacgtctcaagtatgtcatgctgcctgtggctgaccaggagaagtgtgagctgcactatgagaaaagcacagtgcctgagaagaaaggcgctgtaactcctgttggggtacagcccatcttgaataagcataccttctgtgctggccttaccaagtatgaggaagacacttgctatggtgacgctggcagtgcctttgccgtccatgacacggaggaggacacctggtatgcagctgggatcctgagctttgacaagagttgtgccgtagctgagtatggtgtgtacgtgagggcaactgatctgaaggactgggtccaggaaacaatggccaagaactagttcagggctgactagagggctgcacacagtggggcagggcaattcaccctggaagaggaagtagaagggttggggacataatctgagggctgctagccctgcattgctcagtcaataataaaaaacgagctttggaccc

SEQ ID NO: 7749 - DNA, 912 bp, Rattus norvegicus; identical to SEQ ID NO: 3653

SEQ ID NO: 7750 - DNA, 600 bp, Rattus norvegicus
attggtctcttgtggctatgttatcatgctgaaacagtctgttacctcatcccttctgacaaaacgtcaataaatgcttatttgtatataaaaataataaacccgtgaacccaactgcacaacgatcttgtaagaactggctgtcatttgtgggtcaatgctagatggagagacaaagctatcacctgctatgacagaataattgcttgccttttcctttcctgacccaggctgcagaacatttttctttagctctattagtatgtgaactcttaaataagtaaacgcaatagaacaaaattatatgcaaagacaatttaaccacattttatccatgcagaatgtgacagccagaatggcggagtacttagtctaaatttgctcagaagttgaaacatgaatgggattaaggccctaatcttcttattcccagtcagtgtacctttatgctccattttctccccctccatccaggagtctggcaagaacaggaaaaaaacatgtcactatatcttgttcagcattgcacaccctccaccatggccacagtagattctctaataactaatgagtgagtgaaggaagtgtatcggtgaattc

SEQ ID NO: 7751 - DNA, 600 bp, Rattus norvegicus
gcagtttgcaagaccaggacggtcatttacgagatacctcggagccaggtggaccccacatcggccaacttcttgatctggcccccatgtgtggaggtgaagcgctgcactggctgctgtaacaccagcagcgtcaagtgccagccctcaagggtccaccaccgcagtgtcaaggtggccaaagtggagtatgtcaggaagaagccaaaattgaaagaggtccaggtgaggttagaggagcacctggagtgcgcatgcgcgacctccaacctgaacccagaccatcgggaggaggagacggatgtgaggtgagatgagctggctgccctctcccgggacacggatgtacgtggcgtgtgacattcctgaacatactatgtatggtgcttcattgccaatgtgcgtgcagtctttgttctcctccgtgaaaaactgtgtccgaggacaaagagacagtgtccgtttgttcagtgtgacatcaaagcaagtactgtagcactcggagagacagtgagaaagcttccttgtcacagagagcgaaaacaaaaccacaaaaaagaaaaaaaaaaaaaacaaaaaattaaaaaaaaaccgaattcg

SEQ ID NO: 7752 - DNA, 722 bp, Rattus norvegicus; identical to SEQ ID NO: 3656

SEQ ID NO: 7753 - DNA, 1384 bp, Rattus norvegicus; identical to SEQ ID NO: 3657

SEQ ID NO: 7754 - DNA, 600 bp, Rattus norvegicus
tcctgaactttgcacaaagaagaggtgacacgtcaagagtgatatttattatggttttgctctactcagagacacttgaggttggttattatgtaaactatgtttgtatatagcagttttgaggttttattcccacaaatggtagctgctaagattgccagcattttagccgaatttggggagaactcgccattcaaggtcccaggaaactggtgcaaatggatgatgtttaagcatgatgtcagtgcagccatcttgcctgctgtcaggaggatgtacttggcaagccacatgctatttcctttacctgggaatttttcttcaacttggtagggcagttacttttctctccaatgctgatcgcttgtgaaactcaggtccatgggtcgtttgatgctgtttacccaggaagaacaggaagaaaggtttatttttatttttattttttaatggctgcttgcattttccttttaaagaaaaacaaaacaaaacaacacaggtaactggccaaggatgggaaaatgaaatcacagttcttcaaagtgtgagtccttactgtttgatttcaaaggaaaacacaatgcacttttattacagcat

SEQ ID NO: 7755 - DNA, 600 bp, Rattus norvegicus
tcatcactcacggaggcagacactgagtaattgttcttcagcctctcctcgttttgtccctactgggctcactccagctctgcgcaccccacatgaagacccccttccatagaatagtgctgttcacctaggaggagggggtatcaccttggagacacctgcacggctgcatcccatgaggtctgactggacagagcagctctggacatcatcactgctggctccacagagggacaactcaatgtgggagtccagattcaactccacaggacctcccttgcctccagaacagccttaccaggctgggtgcagacttcccaagcctcacagtcctgaccctgttggcctctggtggtaacttgtgttggtgtatgccatgacaacactgtttaaatagtcctttgcagagtgaaaaaaaaaaaaaaaaaaaaaaaaaaaaaaaaaaaaaaaaaaaaattccaaagaaataatatttgaagcagcaaaagaaggatcattaaacagagcattattaatggtaaatgttccaagggagattctgcttcaaacccaccatagaatgctgatcagtaagcacagcaatacatatgagtgtaaaaa

SEQ ID NO: 7756 - DNA, 600 bp, Rattus norvegicus
cttgctggatttcctcaagagtgacgaaggcagcaaggttctgctcccgaaactcattgacttttcagctcagattgcagaaggcatggcgtacatcgagcggaagaactacatccaccgcgatctgcgagctgccaacgtgctggtctctgagtctctcatgtgcaagattgcagactttggcctcgcgagagtaatcgaagataatgaatacacagcgagggaaggtgccaagttccccatcaagtggacggctccagaggccatcaacttcggctacttcactatcaagtctgacgtgtggtccttcggaattctcctgtacgagatcgtcacctatgggaagattccctacccagggagaactaacgcagatgtgatgaccgcactgtcacaggggtaccgaatgccacgcatggagaactgtccagatgagctctatgacatcatgaaaatgtgctggaaggaatcagcagaggagaggccaacctttgactacttacagagtgtactggatgacttctacactgccacggaagggcagtatcagcagcaaccgtagtgggctctagagtcgacctcaggcatgaagcttgtctc

SEQ ID NO: 7757 - DNA, 600 bp, Rattus norvegicus
atctggagcatggggctgtcgctggtggagctggccatcgggaggtaccccatccccccacctgatgccaaggaactagaggccagctttggccggcctgtggtggacggggcagatggagagccccatagtgtctcaccgcggccccggccccctggacgccccatcagtggtcatgggatggacagccgaccagccatggccatctttgagctgctggactacatagtgaatgagccacctcccaagctgcccagtggtgtgttcagctcagacttccaggagtttgtgaataaatgtctcattaagaacccagcagagcgtgcagacctcaagctgctgacgaaccatgccttcatcaaacgctctgagggggaggacgtggacttcgctggctggctatgcagaaccctgcggctgaagcagcccagcacacccacgcgtactgcagtgtgacagccatcgctcagcagtctgtgtccttgtcctgtggcacagcggccgcctttggggacagcagtggtgtgtgttgtggcaggggacctgtgcctgtgcatttggaaaagcaaacaaagtggagaaagagagaaaaaaaaaaaa

SEQ ID NO: 7758 - DNA, 1400 bp, Rattus norvegicus
tgcaccctgatccaggcacctgggacagcttcttggagaacttcatggatggggaaggtgggtatgagtttgctgcaagtaaggctggacctgaggggcacagctgtggctcacaaggcctgtgcctacgccctgtcctctcccagtgtcctatgggtcgtggtaccagcacgtgaaggagtggtgggagctgagacacactcaccctgttctctatctcttctatgaagacataaaggaggtgagcctgcctgctcccacttgcttctgtgtcatacctgctgggtaggaaccttacctggccctatactggccctctgagccccatgctatccaagccccactgcagaccagcacttgcagtcctacttcctgctgagggaccacagcacaagctcagcaggagagctgcacagcccttaccttgcttgcagtaggtgttagtcatatgtgccatcactgattgggtggcttgctgctcttgcttctccctgctccagaggtgcaagtctgggcgccagtgatcaaagtctgtccctgtcctctcccagaaggaacccagtgatcatgccaagatggcagggtgggaagcctctattttgccccagggtaagaggcacagagtcaaggaatcagttctgagaattccttagtagaagtgacctgctccttgcaggtgaccctccaaccttattccatcaagcatccaaactgagatcttcttcctgttccagaaccccaaaagggagatcaagaagattctagagtttttggggcgctctctacccgaggagactgtggattccattgttcaccacacatctttcaagaaaatgaaagagaactgcatgactaactacacaaccatccccactgagattatggaccacaatgtttctcccttcatgaggaaaggtgggtagtagcctagataggaagggagattggatgtaaccttgtaacctatagtcagtcagtctctctctctttctcttttcctctctctctctctctccaggtactactggggactggaaaaataccttcactgtagcccagaatgagcgctttgatgcccactatgctaagacaatgacagattgtgacttcaagtttcgttgtgaactatgagtggattatggctatactgggaaccaaggcaaactgacacagcccatcatgatctcaagtaaaatgtgatgtgttcaatctacttgttgtatgcctagaggaaatctgagctcagagaataggattggggatgtggctgaggcagagggttttatcaacgcatgtcaggaaagcaatcagtcccaacacctaaaaagaacctaaagtacaaacatgcaaaaaatagtaacataaactatattttacctgaaagaataaatgccactggg

SEQ ID NO: 7759 - DNA, 600 bp, Rattus norvegicus
tccacccaatgccattgtgttttcatatggccacctgaaagtcattgacatggttaaagctggactcggagtaaacattttgggtgttgctgtggtgatgctgggcatgttcacctggatcgaacctatgtttaacctccacgaatatccctcctgggctcctgacattgttaatcagaccatgccatgacacacacacaagagctaccagtttgcggtggcttcaggactcgctaagaatgactgtacggtacagccggattggactggcacacgcgaatcttcgatgcagctattccaattgcagagcgtgccccacacatgcccctgtcaacctcataagacagagttcatatcttttgaaatacaatcaacgtgcatctacccgccttcgtccaaaaatcaggttgagacgcatcgcagaccagctacatgctctttgtccattataatgacacttaaggaccttcaaaaaagttaggccatccgtccgtcgcatcttaaattcggagttcattgggacatttcaaacatcaattcactatttgaaattttttttatgaaactaaaggcagaaaataaagtgtgaaagtaaacgag

SEQ ID NO: 7760 - DNA, 600 bp, Rattus norvegicus
acattaaccgagttcccgaggagcagatgaccttcaaggacttggtgtcctgcacctaccagctggcgagaggcatggagtacttggcttcccaaaaatgtatccatcgagacttggcagccagaaatgtgctggtaacagaaaacaacgtgatgaagatagcagactttggactcgccagagatatcaacaacatagactattacaaaaagaccacgaatgggcgacttccagtcaagtggatggctcctgaagccctttttgatagagtttacactcatcagagtgatgtctggtccttcggggtgttaatgtgggagatcttcactttagggggttcaccctacccagggattcccgtggaggaactttttaagctgctcaaagagggccacaggatggacaagcccaccaactgcaccaatgaactgaatacttggacctcacccagcctctcgaacagtattctcctagttaccccgacacaaggagctcttgttcttcaggggacgattctgtgttttctccagaccccatgccttatgacccctgcctgcctcagtatccacacataaacggcagtgttaaaacatgaattcc

SEQ ID NO: 7761 - DNA, 600 bp, Rattus norvegicus
tacgagtatcgcgcgtgcaaatgcaagcgtacttaagggcaaccctttcgcggcttttcatctttttcttcctaccatggcccgtactaagcagaccgctcgcaagtccaccggcggcaaggctccgcgcaagcagctggccaccaaggctgcccgtaaaagtgccccggccaccggtggcgtgaagaagccccatcgctaccgtccgggtaccgtagcgttgcgtgagatccggcgctaccagaagtcgaccgaactgctgatccgcaagctgccgttccagcgcctggtgcgcgagatcgctcaggacttcaagaccgacctgcgcttccagagctcggccgtcatggcgctgcaggaggcctgtgaggcctaccttgtgggtctgtttgaggacaccaacctatgcgccatccacgccaagcgtgtgaccatcatgcccaaggacatccagctggcccgccgcattcgtggcgagagggcttgaggagttctgtgatccacgcaaccactttaaaaggctctttttagagccactaatcttccaaagaaagagctgaagctggctttcgtaactagtgggttttaatatgtcagcta

SEQ ID NO: 7762 - DNA, 1400 bp, Rattus norvegicus
agttatgccagggaaagattctcctggggtctcgttcccactgacctagttcccacaccattgctgagtcctgctttgtggtgctggatagctgatctgggcttcttgggaagtcatcacatgacttgttctccagaggtttggggagttttatatagtgagtgaatggtgatgtggaaagagttgtaggggcatagagtattgagactttggggttccgaatcccataaggagtggccaatgagagacatagtgccatgtttccatggagacttcactcaagtgttaattgctcccttcccaaattgtcaccctctgcctttatccgatgatgtactcatgtaaactttgcggaatggcccgtccttggtgcttcatattaccctggaaagagagctccagagcctgcatttaaacttctgggcttctcttcttccattgcctttctaagcagtggctcttttttatgtgctgaaacaaaccaatgcacatcccacatactgccaagaagtgaaagggcttcaggaagacgagctccagagaggaccctgggcctcctccatcagacatgagcttgcaatctgatcatagactctcaaggtttcttctgtgactcactcactagtaagcattttcatttcctgcagagatgagctctctggcattggggtgacttcagtagataggtgagctgacaagagggcttgagctcgttctcattttctgtttcctattggtgaagcactcacagagacaagttatttcgaaaggccggaacacttggcttttaccaaagaggtaatttaattttgttttagttgcgcaagggcagagccagaatgcattcatccagttgacttccagaagcttaaccacattcatgtgagggaaatgatagaagtctttaaggtaatcctttgggatcctgggaaattctctcaggtaaagaaagattacagcagatgagtaatatatgtcttgagagctatttataaaaactgtaagaggatcattttgtttccatttattaaagatttaaacttttttactttgtaaagaaaaactacatttttatagtcataactgttaattttttaagaaagatttttttggaaacaattagctgtagccaaattttgtggttacagttttgctatagtggagtttgaatgcaatttctgtggtaagtctactgtttgtttataaaggtctccgacctggttagattttgctaccttttaaaatagttattttttccccattagccacaaggccaattatggatttgtatttgtttttccaatgctaatttttctatgaagcacctgaaattaactggccttttcctatgtagaaaactcaaacttgttaactgtgtatttaataaaatgtaaacttga

SEQ ID NO: 7763 - DNA, 600 bp, Rattus norvegicus
ctggaggacctgaacaaagagatcaagaaaactgctaacaggatccggggcaagctgaaggctattgagcagagttgtgatcaggacgagaatgggaaccgaacttcagtggatctgcggatacgaaggacccagcactcagtgctgtcacggaagtttgtggacgtcatgacagaatacaatgaagcacagatcctgtttcgggagcgaagcaaaggccgaatccagcgccagctagagatcactgggaggaccaccactgacgaggagctggaggagatgctggagagcgggaagccgtccatcttcatctcggacattatatcagattcacagattactaggcaagctctcaatgagatcgagtcacgccacaaagacatcatgaagctggagaccagcatccgagagctgcacgagatgttcatggatatggccatgtttgtcgagactcagggtgaaatggtcaacaacattgagagaaacgtggtgaactccgtagattacgtggagcacgccaaggaagagactaagaaagccatcaaataccagagcaaggccagacggggtgtgctctgtgctctcggccgacagtgctga

SEQ ID NO: 7764 - DNA, 1400 bp, Rattus norvegicus
tggaaggtccctgagactctcctgtgcagcctcaggattcactttcagtgactatgacatggcctgggtccgccaggctccaacgaagggtctggagtggatcgcatccattactactggtggtggttacactttctatcgcgactccgtgaagggccgattcactatctccagagataatgcaaaaaactcccaatacctgcaaatggacagtctgaggtctgaggacacggccacttattactgtgcaagaatctacggagggtcccactactttgattactggggccaagcagtcatggtcacagtctcctcagctgaaacaacagccccatctgtctatccactggctcctggaactgctctcaaaagtaactccatggtgaccctgggatgcctggtcaagggctatttccctgagccagtcaccgtgacctggaactctggagccctgtccagcggtgtgcacaccttcccagctgtcctgcagtctggactctacactctcaccagctcagtgactgtaccctccagcacctggtccagccaggccgtcacctgcaacgtagcccacccggccagcagcaccaaggtggacaagaaaattgtgccaagggaatgcaatccttgtggatgtacaggctcagaagtatcatctgtcttcatcttccccccaaagaccaaagatgtgctcaccatcactctgactcctaaggtcacgtgtgttgtggtagacattagccagaatgatcccgaggtccggttcagctggtttatagatgacgtggaagtccacacagctcagactcatgccccggagaagcagtccaacagcactttacgctcagtcagtgaactccccatcgtgcaccgggactggctcaatggcaagacgttcaaatgcaaagtcaacagtggagcattccctgcccccatcgagaaaagcatctccaaacccgaaggcacaccacgaggtccacaggtatacaccatggcgcctcccaaggaagagatgacccagagtcaagtcagtatcacctgcatggtaaaaggcttctatcccccagacatttatacggagtggaagatgaacgggcagccacaggaaaactacaagaacactccacctacgatggacacagatgggagttacttcctctacagcaagctcaatgtaaagaaagaaacatggcagcagggaaacactttcacgtgttctgtgctgcatgagggcctgcacaaccaccatactgagaagagtctctcccactctcctggtaaatgatcccagagtccagtggcccctcttggcctaaaggatgccaacacctacctctaccacctttctctgtgtaaataaagcacccagctctgccttgggaccctgcaaaaaaaaaaaa

SEQ ID NO: 7765 - DNA, 600 bp, Rattus norvegicus
tcttagcctaatggatactgtctctccatggaggagaaacacaggaatgggcctgccttactgagagccagcagagcccaggcagactccactgtgggagacctcagtgctctgtaccaagtcttagccaaacaacagggttctaggaagttagccaaaaacgaaaaccattccggtctgtgaaggttttcagctttgatatctttgaacaactttacacttatttttagttttgactttttccgtccgatgtgaccaaataggagagtgagacatctgagacgcccccgcctcccagggccttgtgcatgttaggccagcgtgctaccgttacccccagccctgagcccgaacttgtctcagctctacccctttcccaactgctcagaaatggatcatgctgccccttagtgttgtggtgacctcttagtgttcacctgcccccaagggagacggaaaaggaaattatgtttgtgccactgatttagccacatgaaagtcatctcattgctctttcctgaagctgctgtctctaaagtgtgccatctctttgtgctttgtatctgtcagtgctggcgaaatcttcaatagcttatcttt

SEQ ID NO: 7766 - DNA, 600 bp, Rattus norvegicus
aagaatgtcaccaacaacctcaaatctcttgaggctcaggcggagaagtactctcaaaaagaagacaagtatgaagaagaaataaagattcttactgataaactcaaggaggcggagacccgggctgagtttgctgaaagatcggtagccaagctggaaaagaccattgatgacttggaagatgagctctatgcccagaaactgaagtacaaggccattagcgacgagctggaccacgccctcaatgacatgacctctatataaactgacaccgtttctgctctgtcctggatctacccccctttcaggggtaattgatatgatataaggggcctaggaatacaattgatgttagggcgtttattagaataatgttggtgtactcggctatgaagaatagggcgaatggtcctgcggcgtattcgacgttaaagcctgagactaattctgattctccttctgttaagtcgaagggagctcgatttgtttctgctagggttgaaatgtatcatattatggctattggtcaggcggggattaatagtcagatatgttcttgtgcacttataagtatttctagggagaaggagccgcttatta

SEQ ID NO: 7767 - DNA, 1400 bp, Rattus norvegicus
attcggcacgagccaggccccagccgagcgccaacgctgaataggcaaactgaccaggagccctggctgtggctggggggcagtgggccatgccaggggcagtggaaggccccaggtggaagcaggcagaagacattagggatatttatgacttcagggatgttctgggcacgggtgccttctcagaagtgatcctggcagaggacaagaggactcagaaactggtggccatcaaatgcattgccaagaaggccctggagggcaaagaaggcagcatggagaatgagatcgccgtcttacacaagatcaagcaccccaacattgtagccctggatgacatctatgagagtgggggccacctctacctcatcatgcagctggtttcaggtggagagctgtttgaccgaattgtggagaaaggaggctacacagaacgggatcggagccgcctcatcttccaggtgctggatgctgtcaagtacctgcacgacctgggcattgtgcaccgggatctcaagccagagaacctgctatactacagtctggatgaagactccaaaatcatgatctctgactttggcctctccaagatggaggacccaggcagtgtgctctccacagcctgtgggactccaggatatgtggcccctgaggtcctggcccagaagccctacagcaaggccgtggactgctggtccataggagtcattgcctatatactgctctgtggctacccgccgttctatgatgaaaatgatgccaaactttttgaacagattttgaaggctgagtatgagtttgactctccttattgggacgacatctctgactctgccaaagatttcatacgtcatttgatggagaaagacccagagaagaggttcacctgtgagcaggccttgcagcacccctggattgcaggagacacagctctggataagaatatccaccagtcagtgagtgagcagatcaagaagaactttgccaagagcaagtggaagcaagctttcaatcgtaccgctgtggttcggcacatgaggaagctgcagctggggcaccagccaggagggacagggacagacagctagccacggagagctgctgacacccacagctggggggccagcagctggctgctgctgtcgagactgctgtgtggagccaggctcagaactccccctgcaccacccccaagctctagggccatggactgaacatcaaggagtcagggtttcgtccgtgaggggttggaggcagcctgcttcctcctcaccccagaactggggagtttctgaccccatacttcttccctcccctctcactcttcactgcattttccatacaaatgtttctattttattgttccttcttgtaataaagggaagctctgtgccgaattc

SEQ ID NO: 7768 - DNA, 1400 bp, Rattus norvegicus
gagctctcaaggcttcagaaggtagagctgggtaattgtggagctccagtttgggacagaagtacagaacctcaagttagggttcctgggaggaaggtagtgttcccggggggtacatttgcacccctgggtagtccctgatccatgatccatcactaatcccatcttgagagtactgactctcacttcaccagtggccagggagatggaggtacccctgagccttgcacagagccaggccagggggtagataaagggtaggtgtgaacgggaggctcagtcagggctgaacagtgagagctgaatgtccagctatcagcaagggcaccatcagcttgttaggcaacagtcagagtcccaatccccatcgactctacaaactactctgaaactcagggcagtagaagccccaccagccctccatatttactgtatgtaggcttagtctagtctctacctggtaccaaccacgactcagcctcctccttagctgggcggtggacttggaccgctgagctctgggcgcttctcccagagataagaaccactcttcatcaattgtgcctcaaggcatcagggaagcggcctgggcatggcttcatccttgttaggtgctcaagcttagattctgtggttcctggatgggagtcccctcttctgatttcccctgtgaagttgtggctgcagtccagtctgctggcaaaggtcagggtgttcacatgcggctggccagggtgaacctcctggtgtctgtgtgggttagatctccaaaaggctgggtgggaagggttgggttacaaggctgagactatgaatgtcagtcctcaactttgagaagcgttaaaatatgtgcagactccttggatgctaatttgcatctctctgtgctttatttgagagagagagagagagagtgttttgaagcagggctttctcaccctggaaaccaaattgacctcaccagttttattaggaccggcaatcacaccacatccggctttatctgcacttcagaagtttcctgtgcccaccccggctccagctagccctcgcaggtgcaagaggctaggttgggcgctgcgatcttcgaggggaggacccaacgtctctattcaggacctgaggctagccctgccctaggcagggggcggggcctgggtctgcaggagcacccggactccttagagggtccccggaagactcagcactcctgcatggcacttggccagtttatcttgccggaggcgagcatggaccagatgaccattcttggccggtcggcctagatcagagttcccaggggtccaagtcccgaactgagggggtggggcgggggcggggccttaaagggcagggccacggggtccctgaaaagcgcggaccaggcgggcgccacccag

SEQ ID NO: 7769 - DNA, 1400 bp, Rattus norvegicus
tgtcaggggtgggtagggctgcctgggccctggggaactctgacaggagaaccacccccaccttgggggagaggggaacaacacatctgcatattgagcaggtcttccaccagagataggatagccttccggatggtttcagggccagtgggttccccattagaacctattccaggggccttgggtgagctcagtgtcagtggagacagttgccccagcaacgccatagactcgggtgacagacaccatactcatagtccagaatcttccatgggagtttatttttccacgtgtccgcatcctgtgataaacttaacgacaggggccacttaagggaaagagaagggttactttgtctctcagtgtcaaaaaaaaaggctatggtccagtgtagccggggtctgtatggtaaacagagcagtaaatggagacccggctggaaccagggcggcatatgaccttcaaatgtctgcccctagtgacctttcacctactaggtcctacatcttaaagcttccatcgcctttcaaaataggaccagcagtcaggaatgaagggaggtgcctttcagactcaactataacaatttcactgccaattggctggcttctgaggctaacacactgtcaagcccctggggacatctgagggacatatcaaacaacctccaacaccaagccacgcaggagctgaccgctcgatagccgggggctacggagactcaggaaatgggcagagttcactggtgtttctggccaggctggagccaagggagagcctacatggcaaaaggcccgtgaatccccaccaatctgactctgaatttcctaagagagaagaccccaggaaattcttttttccaccccatcctccacttgtagccaaaagaaggaaacagatggcatacgctgagaatggactcagccacacccatactgtgaaggcgaagcagggccccaccctcagaggagaagttggtgggctacgggcgtgagggacgcggcctgggtccctcagggtggctgaagggtctgaaactgggtcactgcagggtctgcaactaggtctgcaggagggaagcccccttgtgcctttcgtcgacaccctgatgagaaaccatgtccattgaaggacggagaaagctctgtaccgtgcagaggaagtggccgacaagggaggagcactctgtgtaagaacacacctcctctgtgcgctggaataaacagatgaattttgcatggtgtttccctgtgtcaaacttcccgaacctctgagctctgactcggggcactgcctttggtagtcaaaagccttgggagatgagggatgcattccgttcccatggaaataaacattggtctccaagcatttttaattgagtggcagggtggtgggctggg

SEQ ID NO: 7770 - DNA, 600 bp, Rattus norvegicus
atatgtaaaacagattttttgtagagcttacttttattattaaatgtattgaggtattatatttaaaaacaaaaacaaagcaaaactctgttcagaacttcatctgccactggttatttttttctaagaagtaacttgcaagttttcagtacggatcagtactacactggataaatctcatttatgaatttgacttccaccttagagttcatagcaattaactgatttgtagtgattcattgttttatataccgatgacttccatactttaaaacagagaaacaaatttatgttgccagaaaccctttttgtaagtgtccattgactccttttgtttcactcctccgcccgccagaagagttgctgtcccacattgctgccctcactgtgtgcaaagtgagtatttattctgtaatatgttgatgtgcattatgtccagtgtgtcttaaacctcataggagttcagtcatcacttgctgttgtctgaagcaaatgggaaatatataaatacccagtagctaaaacagcctgtcttttctaggcattttcctacccactgccttctgatgacttcctttttttccccctgtgtcggaattc

SEQ ID NO: 7771 - DNA, 600 bp, Rattus norvegicus
cggcccaggagatcacctccctcgcggacagcttacagctggagaaggaggtggtgagagtttggttttgtaacaggagacagaaagagaaaaggatgacccctcccggagggactctgccgggcgccgaggatgtgtatggggggagtagggacacgccaccacaccacggggtgcagacgcccgtccagtgaactcaagcaggggaggggcagagcttggggctcccctcccctttggtccacagtctcaactgggacctctgttccccctgtaacttctgattgttttttttttttaattattattttcccggtcccttaaaaagagaaaaaaatagagaaattaaggagaaaggaaagtaaaagtaaaacactggactaacctataacaggtagcaggtgtattcatgggttttgacctttgcaagcgagtacccaggcaatgaagtagaatgtctcctagtaagagtgaagtgtgtgtgtgtgtgtgtgtgtgtgtgtgtgtgtctgtgtgtgaaagagagagagagagagagagagagagagagagagagagagagagagagggaggagtcctggtaaaactaaataaattacc

SEQ ID NO: 7772 - DNA, 1400 bp, Rattus norvegicus
ctggctgcggatgaagatgacgaccgggacgtggctctgcagatccatttcaccctcattcgtgctttctgttgcgagaacgacatcaacatcctgcgggtcagcaacccgggtcggctggcagagctgttgctactggagaacgacaagagccccgctgagagcgggggcctggcgcagaccccggacttacactgtgtgctggtgacggtaagagaccaggggctgcagctcagaatctgctggggtggaccttgtcgagctggacgctgatctcgcgggggttctgatactgtgaggagcgtgtctaagctcatgggtggcctccagcggcggatgatatcagtgagtcagcaggctacccagctacccctgcctacctctgcactagctcgtgtgactaattctttgagcagaacagattagataaagccacattaagttcccggttcacccttcgttaagaagtcagcttcattcttcatttgctgtcaaagctaaagatagaagtcgtgtaggagacagaccttattaactccctggatatagatacatctcgtgaatgtgacggagtggaattcttttctttgctgctcttgagtttgtttaaacgagccctctccaccctcctccccaccgcttaaaaatgtgtggtgggtggatagtgttttcagaaagaaatgtgctgctgtctcggtcttctggttttttgtttttgtactcttttgacttgtgtagggaagtggtagcctgattatttgtgctgccagtgaaaagtgctattcattgtcaggaaagataaaagagttcagctgccctccctgcagctctcacgtgcacacagcctgagaatgtttttcagaagtattttacttatgactccaccaggtagcgtgcttggaagggcagtcttgagaatgataacttcatgaagagtggggtagttaatatgcaaaactgtgtggctcagtgtgcattacaggtgtttagacttgcgaaacgctgtttggcagaatgtttggggtttggccctttcaaaagtagtacagctagtacgatacgctgatcatattatggggaagtaatttttctaaatctgttctcagaacccacattcatcacaatggaaggatcctgccttaagtcaacttatttgtttttgccgggaaagtcgctacatggatcagtgggtgccagtgattaatctccccgaacggtgattccccgaacggtgatggcatctgaatggaaataactgaaccaaattgcactgaagttttgaaatacctttgtagttactcaagcagtcactccccacgctgatgcaaggattacagaaactgatgtcaaggggctgagttcaactacaggagggctaggagatgactttgcagaagcat

SEQ ID NO: 7773 - DNA, 1400 bp, Rattus norvegicus
tgggagcatcgtaagaaaagactgcccatctgaaatgcccaaaatgagcgtgcacaccccacctgcccaaggacctggtaacttcctagaagatcagaagttgtcattcttggaaaaataacaatgcctcatgggaaagtggttcatagatcagtctttagaaacccctctacatgtgtacctcggggtactcagctggaacattccaggatctggttctgcccgaagcccatgtcctggtcagtattcaacagtcaataaagcttgctttaaatatggcccaaaatagtggaattaatttcctatctggtaaatctcaagattaacacagcctcacctccttctcaaaagtttctcgataccatggatacctcaggccccagttagttggtcttcacaactggagcttcctgtgagctgtgctttgcatagtctccaggcttccaagagcccagtgcacctcagaaagtttttccccctctggagataagtaagtctttcaaggattcatggtgccccaccaccaacaccaataccaacaccaacaggacacgtacgttccagatatgggcacaaaacaaggtgtcagaggaagaaagtcgtggccacatcctctcctgaagacagcaacaccgcatccccccatcctgtcccatggccctctagcctttgccacttagaggaggaaaacaaaggcaaaacagtctctttctcttgacaacagatggtgactcactgggcatagggaaggcacctttactcaggaaacagcctgaagcctcagagaccgagcttgaagcaggaactgaagggaaaagtagacctgctttgttgcaggtcatgggtgggtctcagaagcactatgaggaaagtatgcgcagaaggggaagagtcaaccctgggctgggtatgagtgccaccaggcagtcacagaggtcaggaaacttgagcaaggtaggagatccggggcataaggttatgggctcttataaccacaactgtggttctgctggttaatcttttatttgcccacagccacattttgtccacaaactctgtcctgaaaggggactgactgaagaaaacatccagcaagctctgggcaaggaaggacagcagcagagagcgagggccgtgttcgctgtgccagaggatggaggtgcacaacgtatcagcccctttcaatttctccctgccgcctggctttggccaccgggccacagacaaggcgcttagcatcatcctggtgttaatgttgctgcttatcatgctctcactgggctgcaccatggaattcagcaagatcaaggctcacttgtggaagcccaaaggggtgatcgttgccttggtggcccagtttggcatcatgcccctcgctgcttttcttctcggcaagatct

SEQ ID NO: 7774 - DNA, 1400 bp, Rattus norvegicus
agattggggagatcctgggagctgacctggatgtcatcatgtctctaaacaatctcgatgaggagtcaaacaagaagcatccgttcccctgccccaccacctaccgcacggccctcacctactacctggacatcactaacccgccacgcaccaatgtgctctacgaactggcacagtacgcctcagagccctcggagcaggagcacctgcacaagatggcgtcatcctcaggcgagggcaaggagctgtacctgagctgggtggtggaagcccggaggcacatcctagccatcctccaagactacccatcactgcggccacccatcgaccacctgtgtgagctgctgccacgcctgcaggcccgatactactccattgcctcatcctccaaggtccaccccaactccgtgcacatctgtgccgtggccgtggagtacgaagcgaagtctggccgagtgaacaagggggtggccactagctggcttcgggccaaggaaccagcaggcgagaatggcggccgcgccctggtacccatgttcgtgcgcaaatctcagttccgcttgcctttcaagtccaccacacctgtcatcatggtgggccccggcactgggattgcccctttcatgggcttcatccaggaacgagcttggcttcgagagcaaggcaaggaggtgggagagacgctgctatactatggctgccggcgctcggatgaggactatctgtaccgtgaagagctagcccgcttccacaaggacggtgccctcacgcagcttaatgtggccttttcccgggagcaggcccacaaggtctatgtccagcaccttctgaagagagacagggaacacctgtggaagctgatccacgagggcggtgcccacatctatgtgtgcggggatgctcgaaatatggccaaagatgtgcaaaacacattctatgacattgtggctgagttcgggcccatggagcacacccaggctgtggactatgttaagaagctgatgaccaagggccgctactcactagatgtgtggagctaggagctaccaccctcccacccctcgctccctgtaatcacctaacttctgccgacctccacctctggtggttcctgcctggcctggacacagggaggcccagggactgactcctcctggcctgagtggtgccctcctgggcccctaggcagagcccggtccattgtatcaggcagcccagccccagggcacatggcaagagggactggacccacctttgggtgatgggtgccttaggtcctctgcagctgtacagaaggggctcttctctccacagagctggggtgcagcccccacacgtgattttgaatgagtgtaaataattttaaataacctggcccttggaataaagttgttttcagt

SEQ ID NO: 7775 - DNA, 600 bp, Rattus norvegicus
aaaaatcacatttatccaaattacttggaacatgtgagtccttaataggtctgtgtagtttcctgcttctctggtacaataaataaagttatgcagatggcttgctgtgtttgcgtggatatattcgagtcgtctccagagaaagtgcatggcattatatataagcagatatgatatgtatatacttacataagcacacatacacacgtatagctgtattggaggattgaacctggtgcctcatgtgcgattggcaaacattctacctccaagctccagcccctatagtcctattaggaaaaactgtggaataacagaaagcaagagactgagtgtccacagatttatatatgtaaattaagtctgtgtgactttgggcaagtcactgacctctctggaccttcttatgtctataaaataaagatgaatagggcagtgtgtgtagtgtggctgacaggacagatgaagtcaaacatgaaaagttcccagcacttagtaggttcaataaatgagagtttccatgcctatgtggtcttaaggaacagtggcaaagttgggcatttggcaacaaaacagggaggacagagagaggtactgcag

SEQ ID NO: 7776 - DNA, 518 bp, Rattus norvegicus; identical to SEQ ID NO: 3680

SEQ ID NO: 7777 - DNA, 859 bp, Rattus norvegicus; identical to SEQ ID NO: 3681

SEQ ID NO: 7778 - DNA, 1400 bp, Rattus norvegicus
ctgtgatattgcatggatatgaagcagtaaaagaagccttgattgatcatggggaggagtttgctgaaagaggaagcttcccagtagctgaaaaaattaataaagaccttggaattgtttttagccatggaaatagatggaaagaaataagacgctttaccctcacgactctgcggaatttgggcatggggaaaaggaacattgaggatcgtgttcaagaggaagcacggtgccttgtggaggaactgaggaaaaccaatggctcaccctgtgaccccacgtttatcctgggctgtgctccttgcaatgtcatctgctccattattttccagaatcgttttgattataaagatcaggattttcttaacttgatggaaaaactcaatgagaacatgaagattttgagcagtccctggacacagttttgcagttttttccctgttttaattgattattgtccgggaagtcatacgacattagctaaaaatgtgtatcatattagaaactaccttctgaagaaaataaaagagcatcaagaatcactggatgttacaaatccccgggactttattgattattacctaattaagtggaagcaggaaaatcacaatccacattcggaatttacacttgaaaacttatcaatcactgtgactgatttgtttggtgctgggacagagacaacaagcacaacactgagatatgctctgttgctcctgctgaagtgtccagaggtcacagctaaagtccaggaagagattgatcgtgtggttggcaaacatcgcagcccttgcatgcaggacaggagccgcatgccctacacagatgcccatgatcatgaggtccagaggttcattgacctcattcctaccaacctgccacatgcggtgacctgtgacattaagttcaggaactacctaatacccaagggaacaacaataataacatcactctcatcagtgctgcatgacagcaaagaattccccgacccagagatatttgaccctggccactttttagatgggaatggaaagtttaagaaaagtgactatttcatgcctttctcagcaggaaaacggatgtgtgcaggagagggcctagcccgcatggagttatttttattcctgaccacgattttacaaaactttaagctgaaatctgtacttcacccaaaggatatcgatacaactccagttttcaatggatttgcctctctgccaccattttatgagctgtgcttcattcctctctaaagagatcaaattggctggggatttagctcagtggtagagcgcttacctaggaagcgcaaggccctgggttcggtccccagctccgaaaaaaagaaccaaaaaaaaaaaaataaataaataaataaagagatcaaattgcctggcaaa

SEQ ID NO: 7779 - DNA, 571 bp, Rattus norvegicus; identical to SEQ ID NO: 3683

SEQ ID NO: 7780 - DNA, 600 bp, Rattus norvegicus
ctatctccacactgtagtcttcaccttgattggcctagtgcctgagggtggagaccacgccctgtccagacacatgccttctttgccaagctaatctgtagggctggacctttggccaaggacacacgaatactgaacaatggctaggaggctttaccgcaggaggcggtagctgccacccacttctgcaggcctggatctcgacaccataggggtccaggctccatttaggattcgcccattcctgtctcttccaactcaaccaaccactcgattaatctttccttgcctgagaccagttgaaagcactggagtgcagggaggagagggaagggccaggctgggctgccaggttcaggtctcctgtgcactgagggccagacaaacaccatgagaaggacctcggaggctgagaacttactgctgaagacacggacactcctgccctgctgtgtatagatggaagatatttatatattttttggttgtctattaaatacagacactaagttatagtatatatctggacaaacccacttgtaaatacaccaacaaactcctgtaactttacctaagcagatataaatggctggtttttag

SEQ ID NO: 7781 - DNA, 600 bp, Rattus norvegicus
ggatgagcccaatgaccatggctctggggaagactgtgtcactatagtagacaacggtctgtggaatgacatctcctgccaagcttcccacacggctgtctgcgagttcccagcctgaggaaaccagtgcctccatcgtctccttggctctcagtcgcttccaaagaaaattcagttactggtttctcaagtttagtgttaagtgattcttttgatgggagagaatgtatttgcttgtggcatgaggacacgaatagaagctgaccgggaggcaccaggatctggttgagcacggagcaaaggtcacatccattttgctaggaacacagcaagaagtcaactatggaaaacctacaataaatatcccctgcccttttcaccagaggaccaaaggtggtccttatctgtgccagagtggcagctgatctcagccataaaagcacccaattccctttctccatgaattgtcactaagtggtgtcaaacgtgcctgtttgaagtcatcctcagtctacaaggtgttcttgcctcttgtgtgttcctttacaaggaatctctatctggtggaggggggaagagagctaacacttctggatactt

SEQ ID NO: 7782 - DNA, 1400 bp, Rattus norvegicus
agtctgcgttcctgctccgtcggaatcccgcctgccgccgccgccgccgccatgcccttctccaacagccacaacacgcagaagctgcgcttcccggccgaggatgaattccctgatctgagcagccacaacaaccatatggccaaggtgctgacccccgagctgtacgcggagctccgtgccaagtgcacgccgagcggctttacgttggacgacgccatccagactggcgtagacaatccgggccacccgtacatcatgacagtgggtgcagtggcgggcgacgaggagagttacgacgtattcaaggaccttttcgaccccatcatcgaggaccggcacggcggctaccagcccagtgatgagcacaagactgacctcaacccagacaacctgcagggcggcgatgacctggaccccaactacgtgctgagctcgcgggtgcgcacaggccgaagcatccgcggcttctgcctcccccctcactgcagccgtggggagcgccgcgccatcgagaagctggcagtagaagccctgtccagcctagatggcgacctgtctggcaggtactatgcgctcaagagcatgaccgaggcggacgagcagcagctcattgacgaccacttcctcttcgacaagcctgtgtcgcctctgctgctggcctccggcatggcccgcgactggccggatgctcgcggcatttggcacaatgacaataagacgttcctggtgtggatcaacgaggaggaccacctccgggttatctccatgcagaaagggggcaacatgaaggaagttttcacgcgattctgcactggcctcactcagattgaaactctcttcaagtctaagaactatgagttcatgtggaaccctcacctgggctacatcctcacatgcccatccaacctgggcactgggcttcgggcaggcgtgcacatcaagctgccccacctgggaaagcacgagaagttctcggaggtgctcaagcgactgcggcttcagaagcgaggcacaggtggtgtggacaccgctgctgtgggtggagtttttgatgtctccaacgctgaccgcctgggcttctcggaggtggagctggtgcagatggtggtggacggagtgaagctactcattgagatggagcagcggcttgagcagggtcagcccattgacgacctcatgcctgcccagaagtgaagccgtggccctagccaccaccaggctgccgcttcctaacttattacccgggcagtgcccgccatgcatccttgatgtttgccgcctgccgggtgagccccttagcctcgctgtagagacttctgtcgccctgggtagagcctttattttttctgatggctaagctgttgcagacactgaaataaattagggtttggcctgcc

SEQ ID NO: 7783 - DNA, 286 bp, Rattus norvegicus; identical to SEQ ID NO: 3687

SEQ ID NO: 7784 - DNA, 600 bp, Rattus norvegicus
ccagtcaggaaggtaggccctttccagctgtgcagttctgccccactgtctgaacaggtttgtctcagggttggaaggatggcactcctttaccccctccccagtcacataccaccaaagctcgagaaacccagcttacgcatattcctatatatgtcacaagccccttgatgtgagcgtagcagggaaggcttgcaattagactcgtttaataaagactctctttgttcttgcattggactcacaattcctggcagtctcctggggttcccgtgaactgggcataacatgttgactgcctcagactgtaaggcctgtgtatccctgctccgaattcctgtctgccagcctgccactctgtggttcagagtctctgtggtgccagtgaaaccaccagctcagctcttgtgatctcgagtccccaggtcttgtctgtagctctgcctctgggtaattccagaggctccatctgtgtacggcagcaccccagcacctcaggcttcctatctccactctgtagtacaaccagtttaagagtattcctgttatagtaaaataataaaaaaataaaaacagtacattgtcttttattccactagg

SEQ ID NO: 7785 - DNA, 600 bp, Rattus norvegicus
gtaaaggtgtaacctaatctagagtaaacaaccacccccaaagaaaaccaaggagacagtccagctgtcagagagtggatagaccttccagcctgcccagggcaaagggagtggcagcatttagggaaataaataaataaataaataaataaatgagagagagagagagagagagagagagagagagagagagagagagagagagagagaacgaaccatgggtttcttctgaactatctcagccctacacttgaaaattgctagatggtcttaaaaagctgacttctctcattttatagcaattgcgttctgaaaagaaagcgtcccatgaagaagaaacaaaacaaagcaaagcctttccgctaaggactctggtggatacagacagctccactggctggggcctgagagacagacggggatctgtatttttaatgtccagaaagtggaagagaggtgccttgcctttcctctcagcattaaaatcaaacagaaaaaaatcaaatccaagctattttacaaacaatatgggacttagtttgcaaagtcagtgcattttagttctaaatcatttaacaacacatttcaattaccgagaac

SEQ ID NO: 7786 - DNA, 1400 bp, Rattus norvegicus
tatagcttatacaagcttcgaagccgctatggtgacgtgttcagcctacagatagcctggaagcctgtagttgtgatcaacgggctgaaggccgtgcgggaactgctggtgacctatggagaggacactgctgaccgccccctactgcccatctataatcacctgggctatgggaacaaatcaaaaggtgtggtccttgcaccttacggacctgagtggcgagagcagagacgattctctgtgtccaccctgcgcgacttcggcgtgggcaagaaatcgctggagcagtgggtgacagaggaggccggccacctctgtgacaccttcgccaaggaggctgaacatcccttcaatcccagcatcctcctgagtaaggctgtgagcaacgtgattgcctcccttgtttatgctcgtcgatttgagtatgaggaccctttcttcaacaggatgctcaaaacattgaaggagagctttggagaggacaccggcttcatggcagaggtgctgaacgcaatcccaattctccttcagattcctgggctgcctggcaaagtcttccccaagctcaattcatttatagccttagtggataagatgttaattgagcacaagaaaagctgggatcctgcccagccgccccgagacatgactgatgccttcctagcagagatgcaaaaggccaaggggaatcctgagagcagcttcaatgatgaaaatctgcgcttggtggtgattgacctgttcatggcggggatggtgaccacctcaaccacactgtcctgggcccttctgctcatgatcctgcatccagatgtgcagcgccgagtccacgaggagattgatgaggtcatagggcaggtgcttcgtccagagatggcagaccaggcacgaatgccgttgaccaatgctgtcatccatgaggtgcagcgctttgcagacatcgtcccgacaaatataccacatatgacatcccgagacattaaattccaaggcttcctcatccccaaggggacaaccctcatccccaacctgtcctccgtgctggaggatgagaccgtctgggagaagcccctccgcttccatccagaacacttcctggatgcccagggcaactttgtgaagcatgaggccttcatgccattctcagcaggccgcagagcatgcctgggggagcccctggcccgcatggagctcttcctcttcttcacctgcctcctgcagcgcttcagcttctcggtgctggccggccggccccggcccagcacccatggcgtctacgcattgccagttactccacagccttaccaactctgtgcagtggctcgctagcaggggcaggggctccattcttctccccggtttggtctgattgatgtccaataaacaacttctgtatcttc

SEQ ID NO: 7787 - DNA, 600 bp, Rattus norvegicus
cctgtgtgctatgccctgtgcaacaaaacattcagaaccaccttcaagatgctcctcttgtgccagtgtgacaaaaggaagaggcgcaaacagcagtaccagcagagacagtcggtcatttttcacaagcgagtgccggagcaggccttgtagaaaaggggtatgttgagagcagtgaccacgcaagcgcgtcagcccacacagcctagcaggagtctggcgcaggtggggggagccatccctgatggtgataaaatgggtttttatcgacctcacgggagagaagctacctgtttactgatccattgaataactgattttggtccaatgccaattcagcaggaaagaaggagaggcataccgctaaacatgaagagatgtgttctgaaacagacttttaagtggattttgtttcctctaagagaaaaagaaattattgtctcagagcaagtatcctcagaaattggtctgcctgggtctcttaattcctatcagctctggaatcactggtgagcctcaaggcactagatgccatgtgctctccctaagggtcccaaagtgtccatccagatcccatgtgaagcacggctagcttgaaaa

SEQ ID NO: 7788 - DNA, 600 bp, Rattus norvegicus
attttttctgatggctaagctgttgcagacactgaaataaattagggtttggcctgccctatgtctgagtgttgcttctcctttcttagagacagtcgtgtgtgtgtgtgtgtgtgtgtgtgtgtgtgtgtgtgtgtgtgtgtgtgtgtccatccgtccttcctggcctgtcacttcacctagcagatgaaacatgagtcttaagatacagggcagagggagggagacttgagtgcagcctgaacatctaaggacatttgtacttgcagggtggagcctagtatttccttagctccagccagctaaagggagtcagcaacttgacatcttccccagtttctttctgccgcattcctggcagcctgaatatctaaagttctatctcttcacttccttcccctccaggcttcaacacttactccagttcttaaataattctctccctacttcctccagcttccaaccccaggttgagtgcctcctcctgatccctcagcccagctctccagccccatccagacaagagcttttcagaaccacccgtccctctctcttgcagcttcctctctggggccctcctccttgggaggagacaagctt

SEQ ID NO: 7789 - DNA, 600 bp, Rattus norvegicus
aaacaaaaggctaccctcgtgtgcttggccaggggcaacaaccctgaccatgtggagctgagctggtgggtgaatggaggagatccgcatggggtcagcacagaccctcaggcctacaaggaaagcaacaatatcacctactgcctgagcagccgcctgagggtttctgctaccttctggcacaatcctcgcaaccacttccgctgccaagtgcagttctatgggcttacagaggaagacaactggtcagaggactcacccaaacctgtcacacagaacatcagtgcggaggcctggggccgagcagattgtgggattacctcagcatcctatcaacaaggggtcctgtctgccaccatcctctatgagatcctactggggaaggccaccctgtatgctgtgctagtcagtgccctggtgctgatggccatggtcaagaaaaaaaattcctgagacaaactttatgcatcctgagctgttctttaccctggccatggattttcccgcaccttctccaatccctgttcctaaggacttgtctcctctccctccatggaaatctaccattcctcattaaccccttgactatgaaacagactg

SEQ ID NO: 7790 - DNA, 600 bp, Rattus norvegicus
ttgttccgagggtacctgctccccaagaacactgaggtgtacttcatcctgagttcagctctccatgacccacagtactttgaacaaccagacaccttcaatcctgagcacttcctggatgccaatggggcactgaagaaatgtgaagctttcatgcccttctccataggaaagcgtatgtgtcttggagaaggcattgcccgaagtgaattgttccttttcttcactaccatcctccagaactactcagtgtccagccctgtggatcctaacaccattgatatgactcccaaggagagtggattagccaaagtagccccagtgtacaagatttgctttgtagcccgctgattgtgctgaggcagtcagccgactcacttctgttcaaaatggccccatttttctgattctgggagacctgctggagaccaggcccaaggttgctgagtcattcctcacttcttcccaacagcctcagtccccatttatcaggtctccatgctctgtgatctatgctattggactatgtataaggtctgaattctatgtctacaggtttgcctagtatgtatggttcatgtaaacaggatcatatagtgc

SEQ ID NO: 7791 - DNA, 1400 bp, Rattus norvegicus
ggtgtggatccatggaggtggactaataataggcggagcatcaccctatagtggactagctctctctgcccacgaaaacgtggtggtggtaaccattcaataccgcctgggatttgggggattgtttagcaccggtgatgaacacagccgggggaactgggctcacttggaccagctggctgcactacgctgggtccaggataacattgcaaactttggagggaacccggattcagtgaccatctttggagagtcagcaggaggtgtcagtgtctctgctcttgtcttatctcctctggccaagaacctcttccacagagccatttctgagagtggtgtggtcctcactacaaacctggacaagaagaatactcaggctgtggctcaaatgattgctactctttctgggtgtaataacacctcatcagccgccatggttcagtgcttgcgccagaagacagaggctgagctcttggagcttacagtgaaactggacaatacctccatgtccactgtgattgatggagtggtactgccaaagacaccggaagagatcctgactgagaagagtttcaacacggtcccctacatagtgggcttcaacaagcaagagtttggctggatcattccaacgatgatgggaaatctactctctgaaggcagaatgaatgagaaaatggccagttctttcttgaagaggttcagccctaaccttaacatctctgagagtgtgattccagcaatcattgagaagtacttaagaggaacagatgaccctgccaaaaagaaggaacttctcctggacatgttttcagatgtctttttcggtatcccagctgtactcatgtcccgtagcctcagagatgccggagcgcccacctacatgtatgagtttcagtatcgcccaagcttcgtgtctgaccagagaccccagacagttcagggagaccatggtgatgaaatcttctctgtatttgggactccatttttaaaagagggcgcctcagaagaggagaccaatcttagcaagttggtgatgaagttctgggccaactttgctcgaaatgggaacccaaatggagaggggctgcctcactggccaaaatatgatcagaaggaagggtatttgcagattggtgccaccacccagcaagcccagaaactgaaaggagaagaagtggctttctggactgagctcttggctaagaatccacctcagacagaacacactgaacacacataaatgggtctctgccagcctcagtaccagaggagcaaagatggggctattccacaaaggatggctatttgccaaagatgaatcttacagaggaaactgcacaattgtacagttggggtatttgtatctcaactttgaaataaatttccttttagaaagc

SEQ ID NO: 7792 - DNA, 600 bp, Rattus norvegicus
aggcctggatctcgacaccataggggtccaggctccatttaggattcgcccattcctgtctcttccaactcaaccaaccactcgattaatctttccttgcctgagaccagttgaaagcactggagtgcagggaggagagggaagggccaggctgggctgccaggttcaggtctcctgtgcactgagggccagacaaacaccatgagaaggacctcggaggctgagaacttactgctgaagacacggacactcctgccctgctgtgtatagatggaagatatttatatattttttggttgtctattaaatacagacactaagttatagtatatatctggacaaacccacttgtaaatacaccaacaaactcctgtaactttacctaagcagatataaatggctggtttttagaaacttggtttcaaaatgcttgtggattggggccaggcaggtttggatggaagtgagaagggcagcatggctatgaccatgcagtggctggggatctcaaatctgtatgacctctgtcccagaggaaaactcaagtcagtatttcatcacactgctttcagactgatagctaaccaggacatcaagctt

SEQ ID NO: 7793 - DNA, 600 bp, Rattus norvegicus
tctccagcaccgggaggcgatgaattgggacgcaggcgcgaccacagggaccactccccctacacagacatgagaccataggggagctgtctgggtggcctcaaggataggcgctcccccgaggtaaccgggctatctgggtttgccataagtcaggtgcaaaggagctgggggtcggggggaggacgccagaagagtgggctaatcagcagaacaagttaggcctggggaagaaagggactcaagaggaatgaatgctggatgtatgtgaagaaaggggatggggctcagagagaggtcaagtcaagcaaaggaagaaaggctggcgccaagagggaaacgcaatggccatccttgcttgctctagtcagcagctcttagaggagatgggggcagggggaggcagcattaccatgcctagcttcctgccctaacctgacagcttgcttcctgcctcttgtttcccaggtgtgaatgaggcaggatgaactggacaggtctatacaccttgctcagtggcgtgaatcggcattctacagccattggccgagtatggctgtccgtcatctttatcttcagaatcatggtgctggtggtggc

SEQ ID NO: 7794 - DNA, 600 bp, Rattus norvegicus
gggtggggagtcacaccccttcagcactggccaagatggttctttcacaccttctaagggacctcctcagaaaggaagggtagaattgaaatgttttggtgttaaaacttctgtaatctgccccatgtggtaagactgacctggtatagcttcagcgcatcctccaaggttggggtccctgagcagtttgggagatgtttagatatgtccttggggtggggggtcgcatcttgtatataaccctgctttgttaatctcaatgacaataaaatatatccaggtcacctgttgctctgctcttctgtgtagattgaggtttttctttgggggtttattggggtgactcccagccacaagctcttcccaaaggacattaaaagagctccctcttacatgaggaaatcgggaccctcttaccattcccattctcagaaacaatgttactgtggctaagggtctgactctgtagtctttgattggctgggtgtagtgggtggagattaagaaactaaagaatacagctatggagccttgaatctaccaagatttgggggtggggagggaaatgcaggaagggtggtcctgtaatagtaccaagaa

SEQ ID NO: 7795 - DNA, 408 bp, Rattus norvegicus; identical to SEQ ID NO: 3699

SEQ ID NO: 7796 - DNA, 412 bp, Rattus norvegicus; identical to SEQ ID NO: 3700

SEQ ID NO: 7797 - DNA, 787 bp, Rattus norvegicus; identical to SEQ ID NO: 3701

SEQ ID NO: 7798 - DNA, 600 bp, Rattus norvegicus
tctgatctggaccaagttggaacagcagccatctcagccgcacaagatcctaccatggagagctaacacccccaccaaccagcagaatggacattctgacatcaccagctgaaaccctgaatctcggtggcagaagagaaagtgtcaactgcgtgcagcactgggggagtggagggtgtgggtggtggaggaagagggttaagaaaactagtggggccctcttgctgtccctgtcctatggcacgcatattcctgccttgctccctcactccccctctcccctgccttccaaagccccaccccccaaaaatgtgtcacttgattcggacctattcaaccagtaattggatcccacctttaccaaaacaccgtctctgacccccggcccttcactgatcttgcttatccctggtctcacgcagcagttgtggttgctattgtggtagtcgctaattgtactagtttacgtgtgcattagttgtgtctccccggctagattgtaagctcctggagacagggaccacctccacaaaaaataaaaaaacggacctctcctgtcttgtagtgtcctaggaccctgcagggcagtgggggtgcacc

SEQ ID NO: 7799 - DNA, 783 bp, Rattus norvegicus; identical to SEQ ID NO: 3703

SEQ ID NO: 7800 - DNA, 600 bp, Rattus norvegicus
tttggagaacaacatgataacattgcccacatggtggccaaaggagcagctgttacactgaatatcaggacaatgtcaaagtcagatttgttcaatgcactaaaggaaataataaacaatccattctataaaaaaaatgctgtgtggttgtcaaccattcaccatgaccaacctatgaagcccctggacaaggctgtcttctggattgagtttgtcatgcgccacaaaggggccaagcacctgaggccacttggacatgaccttccctggtaccagtaccactctctggatgtgattggattcctgctcacctgttcggcagtcattgcagtccttactgtaaaatgcttcttgtttatttaccgactctttgtgaagaaggaaaagaaaatgaagaatgagtagagctcatttacaatgcactacaggaatgaaatttcagcctcattctaatttatgaatcaccttcttaacacttcctgattatttttttgtcaaggcagatcatctttgtaagaagacatataactccgtaaatactgatatgttatcaaaaattccatcattcataaattttaatagcacttaatataaaaatat

SEQ ID NO: 7801 - DNA, 600 bp, Rattus norvegicus
ctggaccctggctttactgctgtacctccaccatgccaagtggtcccaggctgcacccacgacagaaggggagcagaaagcccatgaagtggtgaagttcatggacgtctaccagcgcagctattgccgtccgattgagaccctggtggacatcttccaggagtaccccgatgagatagagtatatcttcaagccgtcctgtgtgcccctaatgcggtgtgcgggctgctgcaatgatgaagccctggagtgcgtgcccacgtcggagagcaacgtcactatgcagatcatgcggatcaaacctcaccaaagccagcacataggagagatgagcttcctgcagcatagcagatgtgaatgcagaccaaagaaagatagaacaaagccagaaaatcactgtgagccttgttcagagcggagaaagcatttgtttgtccaagatccgcagacgtgtaaatgttcctgcaaaaacacagactcgcgttgcaaggcgaggcagcttgagttaaacgaacgtacttgcagatgtgacaagccaaggcggtgagccaggctgcaggaaggagcctcctcagggtttcgggaactagacctctcacc

SEQ ID NO: 7802 - DNA, 542 bp, Rattus norvegicus; identical to SEQ ID NO: 3706

SEQ ID NO: 7803 - DNA, 1144 bp, Rattus norvegicus; identical to SEQ ID NO: 3707

SEQ ID NO: 7804 - DNA, 1400 bp, Rattus norvegicus
aaaactacaggaatccaagtttgatgttcttttgtcagatcctgtggctgcctgtggggagctgatagccgaagtgctccacattccttttctgtacagtcttcgtgcctctccaggccataaaattgaaaagtccagtggaagatttatactacctccctcttatgtgcctgtaattttgtcaggattgggtggccaaatgacattcatagacagggttaaaaatatgatatgtatgctttattttgacttttggttccatatgtttaatgccaagaattgggatccattttatactgagattttgggaaggcccaccaccttagctgagacaatgggcaaagcagaaatgtggctcattagatcctactgggatttggagtttccccacccaacattaccaaatgttgactacattggaggactccaatgcaaacctgctaaacccttgcccaaggatatagaagactttgtccagagctctggagagcatggtgtggtggtgttttctctggggtcaatggtcagcagcatgacagaagaaaaggccaacgcaattgcatgggcccttgcccagattccacaaaaggttctttggaaatttgatggcaaaatcccagcaactttaggacccaataccagagtctacaagtggcttccccagaatgacctccttggtcatccaaaaaccaaagcctttgtaactcatggtggagccaatggtgtctatgaggccatctatcatggaatccctatgattggcattcctatgtttggagaacaacatgataacattgcccacatggtggccaaaggagcagctgttacactgaatatcaggacaatgtcaaagtcagatttgttcaatgcacttaaggaagtaataaacaatcctttctataaaaaaaatgctatgtggctgtcaaccattcaccatgaccaacctatgaaacccctggacaaggctatcttctggattgagtatgtcatgcgccacaaaagagccaagcacctgagaccacttggacataaccttccctggtaccagtaccactctctggatgtgattggattcctgctagcctgtttggcagtcattgcagcccttgctgtaaaatgcttcttgttcatttaccgattctttgcaaagaagcaaaagaaaatgaagaatgagtagagctcgttgacaatgcactacaggaatgaaatttaagcctcattctaatttatgaatcactttcttaacacttcctgatttttttttgtggaggcagatcatcattgtaagaagacatatagctctgtgaatattgatatgttatcaaaattttaaaatcacttaatgtaaaaaagttgcattgtagaaaaattgaggaaaataaagtttacttgatagtctt

SEQ ID NO: 7805 - DNA, 1400 bp, Rattus norvegicus
ctctgatggccgtttgtcccgccgggcctgccagattgctcatgagcacacagatggagtgatcaaaatgaggaaggctcagctgcagaatgaggaagagcttcagaaggccaggaagaagaggcacttggatttcctggacatcctgttgtttgccaaaatggaggatgggaagagcttgtctgatgaggacctgcgtgcagaggtggacacattcatgtttgagggtcatgacaccacagccagtggaatctcctgggttttctatgctctggccacccaccctgagcaccaagagagatgcagagaggaggtgcagagcattctgggtgatggaacctctgtcacatgggaccacctggaccagataccttacaccaccatgtgcatcaaggaggccctgaggctctacccaccagtaccttctgtgagtcgagagctcagctcccctgtcaccttcccagatggacgttccatacccaaaggtatcacaaccacaattttaatttatggccttcatcataacccaagttactggccaaacccaaaggtgtttgacccctctagattctcaccagattctcctcgccatagccatgcttatctgccattctcaggaggagcaaggaactgcattgggaaacagtttgccatgaatgagctgaaggtggctgtggccctgaccctgcttcgctttgagttgctgccagatcccaccaggatcccggtccctatggcaagacttgtgttgaagtccaagaatgggatccacctgcgtctcaagaagctaagataaatctggtggagataggacagctccagaggtctgctgcctgcaatacctgcatttgttactggctaatttatactcattttgctttctctttgattcccatcctctgctgagtgtcccgtcatctcatttttttgccctcatttctgtagcttttcctccagactccatcccagtttgtgcgtggacccatttcccatctgttttcacctctgaccagccactgaacttgccgccagcagcctgtcctccagcctgcttacccctcattatcattggactaacagagaaagatgtattttagagggaaactcttgcactttatctctcttcagttctcagagtcttgggacaatggacatcatgaattaaaatgttcttaaaaatcacatgctgggagaaaattaatcctaaaaattctggcaccagccagaggaaggatgttggctgaaaagaaaagatttctagatatttatgtttgtctcatggtgaaattaatgtatgcctcatcttttctatgaaataataattctgatacagaacagtagagagaaatgaatagtttttgctactttgggccaaactgtaaataaatccatttcacttc

SEQ ID NO: 7806 - DNA, 600 bp, Rattus norvegicus
tctacctgccctccgactgtggggagaagatgacgctctgcatctctgtgctgctggcactcacgttcttcctgctgctcatctccaagatcgtgcctcccacctcccttgacataccgctcattggcaagtacctcttgttcaccatggtgctggtcaccttttccatcgtcaccactgtgtgtgtcctcaatgtgcaccaccgctcacccagcactcacaccatggcatcctgggtcaaggagtgcttcctgcacaaactgcccaccttcctcttcatgaagcgtcccggtcttgaagtcagcctggtcagggtccctcatcccagccagctgcacttggccacagctgatactgcagccacctctgccttaggccccaccagcccatccaacctctatgggagttccatgtactttgtgaaccctgtccctgccgctcctaagtctgcagtcagctcccacacagcaggcctccccagggatgcccgtctgaggtcctccgggaggttccgggaagatctacaggaagcattagagggtgtcagcttcatcgcccagcatctggagagcgatgaccgagatcaaagtgtagtcactg

SEQ ID NO: 7807 - DNA, 600 bp, Rattus norvegicus
actctgtacgtcatgttgcttctcatcgcagagtatccggaggtggaaacagctatactgaaggaaatccacactgttgttggtgacagagacataaggattggtgatgtgcaaaatttgaaagtggtggaaaacttcattaacgagagcctgcggtatcagcctgtcgtggacttggtcatgcgcagagccctggaggatgacgtgattgacggctacccggttaaaaagggaactaacatcattctgaacatcggaagaatgcacaggctcgagtatttccccaagcccaatgaatttacccttgaaaactttgagaagaacgttccctacaggtattttcagccatttggctttgggccccgcagctgtgctgggaagtacatcgccatggtgatgatgaaagttgtcctggttacacttttgaaacgattccatgtgaagacattgcaaaaaaggtgtattgaaaatatgccgaaaaataatgacttgtccttgcatctagatgaggacagccccattgtggaaataatttttcggcatattttcaatacaccttttttgcaatgcctgtacatctcattgtgaatgcacgtgtat

SEQ ID NO: 7808 - DNA, 600 bp, Rattus norvegicus
aattctgtggcttatgaaagaagcgcaatgcagaactacgaaagaaggcgtaaataaaccctgtaacgcactatctattcatctccatctgtgtccgcgagcagtgagcggtaaaataaaaatgtgcgctatgaggaatgattatttatttaatatcaaatgttgttatgagtgaaaaactcaaaaaagtgtttattttttcatattgtgccaataagcattgtaattctaatgtggtgacctcctcagacagaagtagaaattagttgtaacttcagcaaagcacagtgttgatggagttgtacaagtttgccagcgatgcaagtctccaaagacagaaaggctgctgtgaggcagtgcaggcggctgctgctggaggcagagaaactcctgtgtgtcttgcgcttcccttggttgcttttatcctaatgatgtactgagagtttggtatctgactctatttgtatcctagcagcatgtttcctgtgttgtgactatatagagatgtttttaaaagtttcaatgtacttctctggtcttcagtcattgtatgatgtgttgtgatagctaccattttaaataaaagaatgtatcttcagg

SEQ ID NO: 7809 - DNA, 1400 bp, Rattus norvegicus
tttaagatgtccttcaagagggagacgaaagttctaaagacgctgtctgtgatcatgggggtgtttgtgtgctgctggctccctttcttcatctcgaactgtatggtgcccttctgtggctctgaggagacccagccattctgcatcgattccatcaccttcgatgtgtttgtgtggtttgggtgggcgaattcttccctgaaccccattatttatgcttttaatgctgacttccagaaggcgttctcaaccctcttaggatgctacagactctgccctactacgaataatgccatagagacggtgagcattaacaacaatggggctgtggtgttttccagccaccatgagccccgaggctccatctccaaggactgtaatctggtttacctgatccctcatgccgtgggctcctctgaggacctgaagaaggaagaggctggtggaatagctaagccactggagaagctgtccccagccttatcggtcatattggactatgacaccgatgtctctctagaaaagatccaacctgtcacacacagtggacagcattccacttgaatattgggtcctcatctctgaggccacgagttcccttgggcttgctgttaaggaattaacaggagatccctctgctgcttttggacaattacgaagcttctcaaactcactgattccagtgtattctctagcttcaagggaaatgacttcggctctgaaatcagtttgggagtattatcttaggacattataaaacaacaacaaacaaacaaacaaacaaacaaataggccaagagtcaactgtaaacagcttcacttaaaaatcgaactttccagaaaggaagggtaggagttgagtttgctgtccaaacaggtgctaaaactgtccgagcagttttcagattggaaaggtaggtgcatgcctttgttaattaacttctccaataataattgagccttacagcaggagtgggattcctttttctcagaattgacagatgcattgttgatgacggttttatttatttatttattgtactatatgaatattttaaatttatcatagtgaatctatatttaacatatttaacagagcaaaccaatgtgttatctgagactgacctctccatttgtactagcactttatgagccaatgaaacatacgcgtagactctgagattctgaattgtgagttacttctgggaacacagcaaagactgatgtggtggctccttaactcgacaaggacacaaagaaacgcaagaggagaagtgactaatgccaccaatgctccccctaaaaagattttgaaaagattagtttttttttttttttaaaagaagctactattgtgttctgaatgttttaaatggcagaggctttccccggggcgaatt

SEQ ID NO: 7810 - DNA, 600 bp, Rattus norvegicus
ttctgtaccatactgcagctctgatatcatttgtttatttttatatagcttgaagcatagaagatgtacagggagagagcctatataccccttaattagcatgcacaaagtgtgtttctttgtagtaacaaaacagcgttatttgtattgttcacgcttagtttctatgtgcaaataagtgtctttatagcgatatcttaaagaaaatgtggatccaaggaggaaacctttaaaaaagcagatggaagtcacccagttgtttttatttggagacacagtgtaagagaattcattcttgaggggtggctaggacaaaatgtgtaagctctttgaatcaactttttcttgtaaatgtttcaataataaaacatctttctgatccttggtcaatttggttgtgtcagagaacgttgactatatttttaataaaatctgaaaggttgttgtggctttatttttcctcttcagaaatggacccagcacaagaaaataaaaacaatacaacaatcccctccccaaaaaacaaaccctacattttattttctcctaaaaatatgaacattgtcacatagcttacactagccctgcaatttgtcctgg

SEQ ID NO: 7811 - DNA, 600 bp, Rattus norvegicus
gagtcagtttgattcaaagtttactcgtcagacacctgttgacagccccgatgactcaactctcagtgaaagtgccaaccaggtctttctgggttttacatatgtggctccatctgtacttgaaagtgtgaaagaaaagttttcttttgaaccaaaaatccgatcgcctcgaagatttattggtagcccacgaacgcctgtcagcccagtcaaattctctcctggggatttctggggacgaggtgcttcagccagcacagcaaatcctcagacacctgtggaatacccaatggaaacaagtggaatagagcagatggatgtgacaacgagcggggaagcttcagcgccacttccaatccgacagcccaactctgggccatacaaaaaacaagcttttcctatgatctccaaacggccagagcacctgcgtatgaatctatgatgaaacaatgcttttattaatgcaaatgcaaaaaggaaacaaatcctggaaggggatgtgtgaggatcctgcaagataaaaatgagaaaatggcagtctcaaagagtcagtgtcattacctggaatgctttcgatggaggaaaaaataaacatggatt

SEQ ID NO: 7812 - DNA, 600 bp, Rattus norvegicus
ttcacgcgattctgcactggcctcactcagattgaaactctcttcaagtctaagaactatgagttcatgtggaaccctcacctgggctacatcctcacgtgcccatccaacctgggcactgggcttcgggcaggcgtgcacatcaagctgccccacctgggaaagcacgagaagttctcggaggtgctcaagcgactgcggcttcagaagcgaggcacaggtggtgtggacaccgctgctgtgggtggagtttttgatgtctccaacgctgaccgcctgggcttctcggaggtggagctggtgcagatggtggtggacggagtgaagctactcattgagatggagcagcggcttgagcagggtcagcccattgacgacctcatgcctgcccagaagtgaagcctggccctagccaccaccaggctgccgcttcctaacttattacccgggcagtgcccgccatgcatccttgatgtttgccgccgcctggcggctgagcccttagcctcgctgtagagacttctgtcgccctgggtagagtttatttttctgatggctaagctgttgcagacactgaaataaattagggtttggcctgcc

SEQ ID NO: 7813 - DNA, 600 bp, Rattus norvegicus
tagcttttactccagacaccttcccagcttgtgcgtggacccatttcgcatctggtttcacctctgaccagccactgaacctgccgccagcagcccgtcctccagcctgcttacccatcatcatcattggactaacagagaaagatgtattttagagggaaactcttgcactttatctcccttcagttctcagagtcttgggacaatcggcatcatgaattaaaatgttcttagaaatcacatgctgggagaaaattaatcctaaagattctggcaccagccagaggaaggaaggtgactcaaaagaagagatttctagatatttctgattgtctcatggtgaaattaatgtatgcctcatcttttctatgaaataatagtactgatgcagaacagtagatagaaatgaatagtttttactactttgggccaaactgtaaataaatccatttcacttcattaatttctgtttcatatttttatttaagatacagaaatctactcagcatgaacctatgctccctgaagcacttttggcaagtcagccatcagagaagcctgttgccatctgctccccactgttagaatggggtagaattc

SEQ ID NO: 7814 - DNA, 1400 bp, Rattus norvegicus
ctgctcctgcttttccttaatctgtcgccgctgggaggtcactcccatcccctgggaagtcctagccagtctccagaacaatccacgatgcaggtgagcaccgagggtctgcatagggagatggagcctgcctgaagggttttgggcagcagcaatgaaaagacctcatgtcctttgggaattaaccacgcgagagtcaggaaacggaaagattgggcagcagatcccttaaccacaggcactgtggaagggtgggggagcagtgtgatgtgtgtgtgtgtctgaggtctgggcttcccaattcgtcacagaagctgctggagctgataagagaaaagtcagaggaaatggctcagagacagctctcaaaggaccaaggccctacaaaagaacttctaaaaagagtccttaggtctcaagacagcgccttccggatccaggagagacttcgaaattccaagatggcacatagttcaagctgctttgggcagaagatagaccggatcggcgcagtcagtcgcttgggctgtgacggtgagcacctaccttgccgcttccctgcaaagctgcacgcatcccgttccccgcatgccgccctcagaggccccttggtttgctctcagacatacttgcacagcctgcctctaccttaccgacagtcttcaagaccaaggcagtctgtcaggaagtctcacatgggtacttcattacaccgtcccaggtgagcacctacctccttcagaggtgtcacaggcttcccagggaacagactgcctgatgtctgatgtctgatcactctgagcatctcccctccgtcttcaccaaactgaattatccgaggcaaagggcaggcccagtgagatagcttttcccagagccgttaaacttcgacatcatctgggaaccaaagatgggggtgcggtgtggcaggggaagctcagctcctgcctcagtttcactccccagtctgacactggtttctcctcccacagggctgaggttgttttaggaagacctcctggctgcagactccggcttctgactctgcctgcggctcttctttccccagctctgggaccacctctcaagtgatcctgtttatttatttgtttatttatttatttttatgttgctgattttctacaagactgtttcttatcttccagcacaaacttgccacagtgtaataaacatagcctatttcttgcttttggaaaaggatttgtgtcatgagtttcaatccaatcctcatctcttttactttgcttttgtttactttggcttcaggcagggtctctctatatcatagacctggctctcggggtaactcactctgtagaccaggctggacctcagactcacagagatccactgcctctccaacagagtgcaggattagg

SEQ ID NO: 7815 - DNA, 1400 bp, Rattus norvegicus
gtggcatcccaggtgttgggggccctggtatcggaggtccaggcattgtgggtggaccaggggctgtgtcaccagctgcagctgccaaagctgctgccaaagctgccaagtatggagccagaggtggagttggcatcccgacatacggggttggtgctggtggctttcctggctatggtgttggagctggagctggacttggaggtgcaagccaagctgctgctgccgctgccgctgccaaagctgccaagtacggtgccggaggagctggaaccctgggaggcctggtgccaggtgcagtaccaggtgcactgccaggtgcagtaccaggtgcactgccaggtgcagtaccaggtgcactgccaggtgcagtgccaggtgtgccgggcactggtggagtgccaggagcaggtacccctgcggctgcagctgctgccgccgctgccaaggcagccgccaaggcaggccagtatggtttgggccctggtgttggtggcgttcccggtggagttggtgttggtgggcttcccggtggagttggccctggtggtgttactggtattggaactggtcctggcaccggccttgtacctggtgatcttggaggagcagggacaccagctgctgccaaatctgctgctaaggcggctgccaaagcccagtacagagctgctgctgggcttggggccggtgtccctggacttggggttggtgctggtgtccccggatttggggctggtgctggtggatttggggctggtgctggtgtccctggatttggagctggagcagttcctggatccctggctgcatccaaagctgctaaatacggagcagcaggtggccttggagggcctggaggacttggtgggcctggaggacttggtgggcctggaggattcggtgggcctggaggtctcggtggtgttcctggtggagtagcaggaggtgcacctgctgctgctgctgctgccaaagctgccgctaaggctgcccagtacggtcttggtggagctggaggactcggggccggtggactgggagccggaggactgggggccggtggactgggagccggaggactgggagctggtggactgggggctgggggagtgatccctggtgctgtaggccttggaggtgtgtcccctgctgcagctgctaaggctgccaaatatggtgctgctggccttggaggtgtcctaggagccaggccattcccaggcggaggagtggcagcaagacctgggtttggactttctcctatctacccaggtggtggtgctgggggcctgggagttggtggaaaacccccgaagccctatggaggagcccttggagccctgggatatcaaggtgggggctgctttgggaaatcttgtggccggaagagaaagtga

SEQ ID NO: 7816 - DNA, 1400 bp, Rattus norvegicus
gtactcttatctttcccagacacatttttctagtaagagcgatccccttccactgcactacatgatttattgcttactctgtcctgtatgccttgtcccacaagacgtgggctgcactcctccgcccaggttccccctagcacaaaggatatgaagaggtggtgccaggctctcacctgaggggtgggctagggtgcccaagacttggggcgcagccctgggcccctccaccgcggcggtcgctctctcaagtgagggcttttatatttttatcaccgcggtggggttgcggacctggcgccatggcaacgggggcggggctcatttgaatacccaaatattcgtgagccgcgggcatccggggctcgggcaagatgaaccccgccccctagcaacggttgccgggacacgcggcagatccggtggaagggctccctagagtaataagagagaaggcggaaggctgaacacagtgaagacactcacagtggttcagagagccgcccatgagaggcttctggccagctctcggttatcagcctgctagctgaatagaccaagccgagcttgcaccccgggcggcgaccgaggtgagcgtgcaacctcaggcctgcaccacctgagtaaaaaccctgtcggttttctgaggatgtgcttactcgtttctttgaaatttcaaaaagtgttgaaaacatgtcatttgcgtctgacacagatgtaccctacttgcttgagtgggtggaacatttcatttcgccccaataccaacttttctgactttcggggtcgttcttcaagtggacgcagtatgagctgctgcagtgttgggacctcgagtttgggagaggtagggggtcttctccaaagcacgaggagcgcggtgtaatgggccgacgctgccccaggatggagccttcgctccacctcggcctacggcagctaggggttccggcgaactctgtcttcctctggtattccgcgtccgcggtgcagactgtcctcgactccaggacccggtcggaatgacctttccgctcctgggcctttgggcctttggtgaggcttcagggtggaggctctttggcaggctctctcaacgcgactcgagcgtacaccagtttctctccggaggaatcccaggctcgtaaccactgtctgggtctctcttttctgcacctaagaactaggaatcactgttgactgcagcacccaagttccgacaccgccctcccacctaggctcctcctagcagcggcttctgacggatgggttgctcagccaatcataacaggtggcggtggggcggagttcgaccaatcatcggcggcctcgagttgacggacgggcgcggggcggagcggggcggggcgagcgcgggcccggccaagtccccgccgtcc

SEQ ID NO: 7817 - DNA, 600 bp, Rattus norvegicus
aaattctacaaacatggagtttggggctgcccaaaggaacctgtttataagcacctactcactctcctttcctattaacagcatcctatcatcaaggggttctgtctgccaccatcctctatgagatcctactggggaaggccacgttgtatgctgtgctagtcagtgccctggtgctgatggccatggtaagaatggtaggatgggacaaacggttggaggtatagactgcagtgtatggaatgtatggtgatcttagaggaggacccaaccctgatatccagtcatgtcaaaaataccataaggaacacagtacaaagtaaaactggaggaatgcttatgtttgtactcctggaggatgaggagaaccaaggagctctcttcaagatcatacttgagaatctatttcctgtataacccctccctctgctccatggattctggaggtttaacaatgtcttttctttctcaggtcaagaaaaaaaattcctgagacaaactttatgcatcctgagctgttctttaccctggccatggattttcccgcaccttctccaatccctgttcctaaggacttgtctcctctccctccatggaaat

SEQ ID NO: 7818 - DNA, 600 bp, Rattus norvegicus
gaggttggaggaagcttctcagaccgacagtttggccatccctaccagtacttgcctctgagattaaatgggattgcattcgttttgtttctgagacagggcctctctatgtagccctggctgccctggaactcactgtgtaaaccaggctggccttgaactcccagagatccattgtctctgtccccccagggctgggattgctggtgtgtaccaccacactcagcagggatacatttttattttcaaacagtgttttgactgtatcctggtttctttttggcctctgcagagtcctggaagaaatttaccaattttctctgctttctattcttatttttatgatgacaatcaaagctggcccgaagaacacaatttgtgacttttttttttttaaataatcagtgatgtccttaaaatgtggtctgccaacctgtacaaaatggtcctatatttttgaagagggacgtgagataaaatgatgttatacatcgatatgtatatatctgttgctatgtagacttggagaatactgccaaaacgtgtatgacaagctgtatcactgcctttgtttatatttttttaactgtgatattccgg

SEQ ID NO: 7819 - DNA, 1318 bp, Rattus norvegicus; identical to SEQ ID NO: 3723

SEQ ID NO: 7820 - DNA, 1400 bp, Rattus norvegicus
accctcatagaaaaaaccaacgcagagcgcaagtccctgctcaacagtttagaggaagccaagaagaagaaagagggtgctctagatgacaccagggattctgaaatgaagctgaaggctttcccggaagtgtgtaacgagaccatgatggccctctgggaagagtgtaagccctgcctgaagcacacctgcatgaagttctacgcacgcgtctgcaggagcggctcggggctggttggtcgccagctagaggagtttctgaaccagagctcacccttctacttctggatgaacggggaccgcatcgactccctgctggagagtgaccggcagcagagccaagtcctagatgctatgcaggacagcttcactcgggcgtctggcatcatagatacgcttttccaggaccggttcttcacccatgagccccaggacatccaccatttctcccccatgggcttcccacacaagcggcctcatttcttgtaccccaagtcccgcttggtccgcagcctcatgcctctctcccactacgggcctctgagcttccacaacatgttccagcctttctttgatatgatacaccaggctcaacaggccatggacgtccagctccatagcccagctttacagttcccggatgtggatttcttaaaagaaggtgaagatgacccgacagtgtgcaaggagatccgccataactccacaggatgcctgaagatgaagggccagtgtgagaagtgccaagagatcttgtctgtggactgttcgaccaacaatcctgcccaggctaacctgcgccaggagctaaacgactcgctccaggtggctgagaggctgacccagcagtacaacgagctgcttcattccctccagtccaagatgctcaacacctcatccctgctggaacagctgaacgaccagttcacgtgggtgtcccagctggctaacctcacacagggcgatgaccagtaccttcgggtctccacagtgacaacccattcttctgactcagaagtcccctctcgtgtcactgaggtggtggtgaagctgtttgactctgaccccatcacagtggtgttaccagaagaagtctccaaggataaccctaagtttatggacacagtggcagagaaagcgctacaggaataccgcaggaaaagccgcatggaatgagacagaagcatcagttttctatatgtaggagtctcaaggagggaatctcccagctttccgaggttgctgcagacccctagagaactccacatgtctccagcgcctaggcctccaccccagcagcctctccttcctctgggttctgtactctaatgcctgcacttgatgctctcgggaagaactgcttcccccacgcaactaatccaataaagccaccttgcgat

SEQ ID NO: 7821 - DNA, 600 bp, Rattus norvegicus
ttttaatgacacttttagattaatgtatttatattatttgtaaaaacgggttagcttggttccataagcgatatgttggactggatctgatgagtggagcagttctagcataacaaggatataagattttgcattaaaatgacaacttaattggttgttatgaaaaaagtatgaatagattcattttgagaatcaaccagttcgatttctttcttaactgattcagaaaagggcctgtatcaactctcgagaattttttcatttttttttctcatatttgccaagccaacaaggaaatgggaaaatatcagttgactcaaagattgcacccaatgcatagaataacacagcaaattggattcaatccataaataccaagatttaaaacaatattcttgttccttccctcaaaaactacatttactctgacaaatcccaattaaaaagcaaataccagttaccgtaatgttttgcagaaatggctactacagaccaacaaagaccagctgaagttaatccaccaggacactgtgagcacattactgttgaaacagaccatagatacagggtaaaatgctgaaacattcttcctaatacaaa

SEQ ID NO: 7822 - DNA, 600 bp, Rattus norvegicus
gcaataggaatggatgagtcgtttctgaggagcgacatgtctcatacttcataagtatagacgagagcagagcactctgtggagtctcctgttagcagccttaccacttcactcctcccacctatcttcctataaatgccagcctaagcaggtgggcactgtgtctcagaggggaaacccagtgacatagatgctctcagagagggagagaacatgttcagaacaggggctccctccctgcatcaacaacaccaccatcagtcccaagaacatctccaagctcctctcctaagatttacccagcttgagatttttcccagcccctctcagccagacaaacctctctgccacctggtctccctgcccctgcccaggcactggggtagggcacaagaaacttttttgtatcttggtgtaacattgtggggactggggggggccacaatgattcaactggaagaggtgcttttacaaaaagctctaacccccaaaacaccaactctctgcccaagaaatgcatttaacatgtgaggaggagtctgtgtgagtggacctacaaggtcttctaatagctaagcattttcttgtcctagaaagctt

SEQ ID NO: 7823 - DNA, 600 bp, Rattus norvegicus
  misc_feature (541)..(541): n is a, c, g, or t
cccggcccgtctccctcaccgtgcccagccaggctggagctccaggcagacagttccacggcagcgccagcagcctggtggaagcggtcttgatttcagaaggactgggacagtttgctcaagatcccaacttcatcgaggtcaccacacaggagctggctgacgcctgcgatatgacaatagaggagatggagaacgccgcagacaacatcctcagcgggggcgcccagcagagccccaacggcaccctcttaccttttgtgaactgcagggacccagggcaggacagggctgtggtcccagaggacgagagctgtgtatatgccctggggcgaggccggagcgaggaagcgctcccggacagcaggtcctatgtcagcaacctgtagtccgcagggctggcgagacgcgggtgttttttattcgtttcaatgttcctaatgggttcgtttcagaagtgcctcactgttctcgtgacctggaggtaaccggaacagcgtcttcattcactgctgtcgggataagcctcagagctgggcgntgtacgaagtcggcttttcaggggagaaggccaaggccgtggtgcgggggctccagcac

SEQ ID NO: 7824 - DNA, 350 bp, Rattus norvegicus; identical to SEQ ID NO: 3728

SEQ ID NO: 7825 - DNA, 600 bp, Rattus norvegicus
gaaaatgagaggcagattgctgctaacctacatggccagcatcttcttcaagtctgtcttcgaggtggccttccttctgatccagtggtacctttatggattcactctgagtgccgtttacatctgtgaacagtctccttgcccacatcgggtggactgcttcctctctcgccccacagaaaaaaccatcttcatcctcttcatgttggtggtgtcaatggtgtcttttgtcttgaatgtcatcgagctgttctatgtcttatttaaggctattaagaatcatctggggaatgagaaggaggaagtttactgtaatccagttgagctacaaaaaccttcctgtgtctcttcgtcagctgttctcaccaccatatgttctagtgatcaggtagtcccggtgggactttcttccttctatatgtaaagagaacagaaccatgtcagttacagtgcatagtcaaagggggaagggcaggcaggaagtatcctttctggcttgtctgagccttttttccccctctgtgatgataaacagaattcttagagggttttaggtagacagaaaagcaaagcaagggtactggacattaacattctaga

SEQ ID NO: 7826 - DNA, 600 bp, Rattus norvegicus
agagcctccagaatttcctgcaggaggcttcagaaggtttccatcgtgaggatgaaagtcagaagccattgcctagccattcacttcaatgttttaatggcagaaaataaatttccagtcacgcatctctaaccacatggcagtcaaactcacagcaaatcaacaggaaagcacggcagggtgtttggggtcgggcaaccggaagtcgggaaggcaacaaattggtactgaaggtgcatgttctgtaaaccgcatggggatagcagaaaattctctgccacatacagcataccttctgcgaaaattccaactgtttctacctctgtagactgttcacataaattcacattggggacgtggatcctgctgacagctgctgacagctggcctcagctgcttcttttttttttttttttttttttttttcctgttctatgttgctttaatcttggctggccagatctcaagtactgttccacaagtgtcattgcttctgtggatcacttcctcatcccctatcccgggtttccggactgggctggcagtgaagataaaacgtgtctagaaagtcacaggagccactgtctggcacttagagcc

SEQ ID NO: 7827 - DNA, 600 bp, Rattus norvegicus
gttgactttaagatgaaaaccatcgaagtagacggcatcaaagtgaggatacagatttgggacacagcagggcaggagaggtaccagactatcacaaaacagtactaccggcgagcccagggaatatttttagtctacgacattagcagcgagcgctcttatcagcacatcatgaagtgggtcagtgacgtggatgagtacgccccagaaggcgtccagaagatcctcatcgggaataaggctgacgaagaacagaaacggcaggtggggagagagcaagggcagcagctggctaaggagtatggcatggacttctacgaaacaagtgcctgcaccaaccttaacattaaagagtccttcactcgtctgaccgagctggtgctgcaggctcacaggaaagagctggatggtctccgaacatgtgccagcaatgagctcgcactggccgagctggaggaagacgaaggcaaaactgaaggcccagcaaactcttcaaagacctgctggtgctgagggtcctgtgtggaatcctccctcccccagtccccttccctcaggagccccgtggaggcagggagtctggcctttgtcatcactgtc

SEQ ID NO: 7828 - DNA, 600 bp, Rattus norvegicus
ttcagcattactgtattgtctccggccacatgtggcaagatcatcattagaaatggaaatgacatttgagagccattagacttctaggtgatgcatctaagaaagattaatcacacaatagaggcatatgcgctgtcatttttcctttttttaattgttaaattgaattttataccaatgtttaaacttaaattgggtgttagcttgaggtgttttgggggagtttgcggtaatggttttgctgtaacgtgtgtttggaactctgctgaagggctgctgaaaagcacggtgctggtaacagtccaacagtccgcggctgctcattcttgccgactcctccctctgacgcaggttagcattgaaggtggtatggaagcctgcatgcgtgttcaactcttcctcttccctcctcctcggcctccctcatcccttcctccttcgctcgctcaacctcttttgttcagtatgtgtaacttgaagctaatttgtactactggatatctgactggagccacagatacagatctgtattgttcttactgaaacacagcatggaattaacattaaacttaaataaaacaaacctaaattaaaaatgcc

SEQ ID NO: 7829 - DNA, 600 bp, Rattus norvegicus
atgaagagactccaacctctgatgagttggaacagttcgccaaacaattcaaacaaagaagaatcaagttgggtttcacgcaagccgacgtggggctggcattgggcacactgtatggcaacgtgttctcgcagactaccatctgcaggttcgaggccttgcaactgagcttcaagaacatgtgcaagctgaaaccactgctaaataagtggctggaggaggctgattcatccacaggaagcccgaccagcattgacaagatcgccgctcagggccgtaaacgcaagaagcgaacctccattgaggtgagtgtcaagggcgtactggaaacgcatttcctcaagtgtcccaagcctgcagcacaggagatctcctcgctggcagacagtctccagttggagaaagaagtggtacgtgtctggttctgtaatagaagacaaaaagaaaaaagaatgactccgccaggggatcagcagccacacgaggtttattcgcacacggtgaaaacagatgcgtcctgccacgatctctgactggaggaagcaaggaggtggcccgctgcactgggagcagtgcttgatacaattctctctttacctt

SEQ ID NO: 7830 - DNA, 600 bp, Rattus norvegicus
gtgttccagactgtttccaagtgtagctctaacgtagccagggatagccagttttcttgaactagactggcccccagcagactggaatatcttcaagtgctcttttgtttgagtttattttccaaacagaaagaagaaagagaagtgcaatctgtctcttgcagaggagtggacatccttgaaagggagggggggggtgctgcttcaatagatggaagggttaaatgattggtagcaaaagacaacaacaacacacatgaaacctcttaactggaccaaatagcaaagccccagagacagccggaagccccaggagctctactccatgaagattttacaacgtgtgccgcctctgtttttcctgtaacctcagggggaaaaaacgaccaccaagaaacacagtgggaaggaaggcagagcaaagcacgctggttctgctaaactgtgccttccatctacctttctgagatgggtactttcacttcaccccttacctactgttacttaccgacttgtctactgttcccagtaactccactgccactcttttagctcacatataaaagtcaaacggaaccaagcgtttgccagccgggatcc

SEQ ID NO: 7831 - DNA, 1400 bp, Rattus norvegicus
tggtggctgctacaaacaggaccatcacatgtgtcccagccacttagtggggttcccagagccactgacttggaggcaccctggtctgtgaagagtcagtggaggccagcaagagccaaactgagccttttctgccaagtgacatttgtcacactggttgtttctccattaaattctcatatttattgcattgctgggaaagaccgcccaccccagggttaactcattccagaacccctaaagtgggaaaagccatgtggggaaggctgctggctggagcccctttttgtcttagccctgtacccgctcactgcagggcagggtatggagagggctggttcccggggaacgaggaccccagcagacactgtagcccatggcccttggtccccagcactcccggctgcacccatgatgcagggcctaccagactctgcggaccgcaccgggcactcactgtatttgttttccaagattcaaattgctgcttgggttttgaatttactgcagctgtcagtgtaaagaaacatgtctgaactgtgtcctttttacaccaacctggtaaaaatgctcttgatgctgtcccgttgccacaattaaactgcacgtgagctctggcttccgttcagtctctttccagtcccagacctgagtccccagagcctccacagctcttacagtgagaatcaaattggcccactccttggaaggcgtggcattctgtcagagtaaaaggaaagtagagtgtgctgattcacgttcagcgtgtggggctggctagagaccttggcactgtagtgaacagaatgtgtccacctttaagtcaccctgaaggcatcaccatagctacagcctcacccaggggtagagaatagtactgtctacttgttgactacctggcagttggtgccagcccctatagaggaaaacagcagtgtgtggccactgtgagaagcatatccctggaaacaggtgaccagagcagagggctaatgcctacctgagtcacacaaaactgaccaggcttgagtgtccagaagagtctatcagaaggccacagcattcagtcctatccacagagagcagcagactaagttgtctccttgccagcttagaaaactgcagtgctggggtacaggtagggtgttcaggaggtccgggccccagtgattagtctaagactgaagcatctggttggctgtggtcccacctagaaaattcttaaagctcttgtcatgtacttcctgggaaggacctaccctgtctcaataatgtctctagctcgttggagtctactgactcaaacatttataaagtgtcctagaaaggcctgactcccctacaaggctgtgtgatccttcaaactcacatatgtgagccaataaaaccttgagactcta

SEQ ID NO: 7832 - DNA, 600 bp, Rattus norvegicus
acagatacatgtgcttcaccaggtatgtcagacttactaatcccccagtcctgcccagccaccaactggggatcaagttttcatactcactatacatacatacatatgtaaattatggtgttagagccataatgtatatacaattctgtatataggcttgtccctcagtgtcattgcagagtacttagtataccattcaatgtatttcctcaaacattccagtactgttaaaaaacacaagcacacctgataacattagggaatcaccaaattggagcatttaccattcttctaaaaatactttgggcactagaagtcaccctgagctgatcaagcacacaaatctgataaactccaagaagaagcagaactgagaatatggttataaacgtttttcgtattcccaatatgtaagagcacgttttccagaaagtataacacaacttatatacgctaccagctatgtttagctgtagctcatggcaagctcagtggagaggagttcacttcctctaagaacccaggtgctgtaggctagaacaggaaacaaactagaccagaatattgccatggggcggctgcctagtcaccagaaagctt

SEQ ID NO: 7833 - DNA, 600 bp, Rattus norvegicus
tgaagagcgacctcaccgcggtgctggctgactttggcctggctgttcggtttgagccggggaagcctccaggggatacccatgggcaggttggcaccagacggtacatggcccccgaggtgctggagggggccatcaacttccagagagacgccttcctgcgtatcgacatgtacgccatgggcctggtgctgtgggagctcgtttctcgttgcaaggccgcagatgggcctgtcgatgagtacatgctgcctttcgaggaagagattggccaacacccttcactggaggagcttcaggaggtggttgtccacaagaagatgaggcccaccattaaggatcactggctgaaacatccgggcctggcccagctctgcgtgaccatcgaggagtgctgggaccatgatgcagaggctcgtctgtctgcaggctgtgtggaagagcgggtatccctgatcaggaggtcggtcaacggctctacctcggactgtctcgtctctctggtgacctcctcgaccaatgtggacctgctccctaaagagtccagcatctaagcccaggacactaggctttctccagactcagtggatctgaagaaga

SEQ ID NO: 7834 - DNA, 600 bp, Rattus norvegicus
tatgtaggacttagatgagaaactgtcttattctctagaaggctcggagggaaggccttctggtctacctgggattttacagagggctttggaaaatgggtgtgattattgacttgaattaaagtgaatttggagttaaacagagggggttgtcatctcccatagcccactgattagaaaacaacacccaggaattgtttctactgggtcctggttgtccatatggaaagtgaggttggtgacccagggtagatagagagaaattcagaaggtggcagcaggaagagaggtatacgtgggaccagatcaactactctacatccttcattcttccctttgtctctattatataatgttctgaagttaaaacccgtcatcctgctgctcaagaagactgaccagtgtcggatgcaccaagctttgaacggatacctcattctgcccattccgatgtttttattttgaattactatttttttacaacccttgtcgggctggagagatggcttagcagttaagagcactgactgctcttccagaggtcctgagttcaaatcccagcaactgcatggtggctcaccacccttgtcatcagaattc

SEQ ID NO: 7835 - DNA, 786 bp, Rattus norvegicus; identical to SEQ ID NO: 3739

SEQ ID NO: 7836 - DNA, 600 bp, Rattus norvegicus
cctaagccctccctcagtagccaccccatatcgccaacagcggcactagagccaggaccccacccgcagggcagtggttccgttaatgggagccccttgatgtcaacatctggtgctagcacgccgggccgaggtgggcggaggcagctcccccagactcccctgaccccacgccccagcatcacctacaagacggccaattcctcgcctgtccactttgctgagggtcagagtggccttccagccttctcccctggccgtctcagccgcggcctttctgaacacaatgccctgctccagaaagagcccctgagccagcctctagcttctggctcccgcattggctctgacccttacctagggcagcgtctggacagtgaggcctctgcccacaacctgcctgaggatacactcacctttgaagaggccgtggccaccaactctggccgctcctccaggacttcctatgtgtcctccctcacttcccaatcccaccctctccgccgtgtacccaatggctaccactgcactttgggactcagcaccggcgtccgggcgcggcacagctaccaccacccagaccaggatcactggtgctag

SEQ ID NO: 7837 - DNA, 600 bp, Rattus norvegicus
tttgtgtttaagctgttgccggaggtcttggagggacagtttggatacaaactgttcatttgtggaagggatgactatgttggggaagataccatcgaggttactaatgaaaacgtaaagagaagcagaaggctgatcatcattttagtgagagatatgggaagcttcagctgtctgggccagtcatctgaagagcagatagcaatatacgatgccctcatccgggaaggaattaaaatcatcctgctcgagttggagaaaatccaagactatgagaaaatgccagaatctattcaattcattaagcagaagcatggggccatttgctggtcaggagactttaaagaaagaccgcagtctgccaagaccaggttctggaaaaacttaagataccagatgccagcccaacggcgatcaccactgtctaaacatcacttattaaccctggatcctgtgctggacactaaggagaaactgcaggcggagacacacttaccacttggctagtgtgggaaaggcgggcgggccaagactggtggagtgcctcctgtcgtcagatgctgcagctggctctgcctcccagtaaaacagtcatgaaac

SEQ ID NO: 7838 - DNA, 600 bp, Rattus norvegicus
aagaagatcactaggctcgtgctaatggtggtgactgtctttgtgctatgctggatgccattctatgtagtgcagcttctgaatctgtttgtcaccagcctcgatgccactgtcaaccatgtgtccctcatcctcagctatgccaacagctgtgccaacccgattctctatggtttcctctcagacaacttccgacgctctttccagcgggttctgtgcctgcgctgctgtctcctggaaacaactggaggtgctgaggaagagcccctggactactatgctactgctctcaaaagcagaggtggcccaggatgcatatgccctccattgccctgccagcaggagcccatgcaagcagaacctgcctgcaagcgagtccctttcaccaagaccactactttctgaaaaccatttcaccctccctcagcccacctgcaagcaggtctgcaccacactctcaagccagcaacttcaagaaaactcctgttgtcactaagccaggccctttcagcagcctgtgttctgtccctaggagcctcaggactcctgctagcccctgcctctcctaggactgactggctccaaggacaactccgtggg

SEQ ID NO: 7839 - DNA, 600 bp, Rattus norvegicus
caaggaaattgcagccaagtacaataaaactacagcccaggtgctgatccggttccccatccaaaggaacctggtcgtgatccccaagtctgtgacaccagcacgtattgctgagaactttaaggtctttgactttgagctgagcaatgaggacatggccactctactcagctacaacaggaactggagggtgtgcgccttgatgagctgtgccaaacacaaggattaccccttccacgcagaagtctgaagctgtggtggacgaatcctgctcctccccaagcgacttaacacatgttctttctgcctcatctgcccttgcaagtgtccctctgcactgggtggcaccttgcagaccagatggtgagagtttgttagtttgacgtagaatgtggagggcagtaccagtagctgaggagtttcttcggcctttcttggtcttcttcccacctggaggactttaacacgagtaccttttccaaccaaagagaaagcaagatttatagcccaagtcatgccactaacacttaaatttgagtgcttagaactccagtcctatgggggtcagactttttgcctcaaataaaaactgcttttgtg

SEQ ID NO: 7840 - DNA, 600 bp, Rattus norvegicus
cttgggggggtgagcagggtgccttggacttcaacaaatgtccttcaacccattagttttgttcttctgcagctttgtttttgttggtttttttttgttgttgtttttttgtcgtccccccccccccccccccccggctggggagcgaacccaggatcttgcgcttcctaggtagaagcgctctaccactgagccaaatccccaaccccgtttttgttgtttttgagacagagtctcactctgtgtcccaggctagcctggaactatgaagtccaggctggcctcaaactcccagcagtgttacttccttagcttaccaaatgttggaatggcaggtctggtaagccagcgcacttggattttgtttcttgaaactacacagaatgtcacaacttagatatctagtgaaagagaattataagcaactagtagcttgaaagcctttggaggacaggaaatctgttggctactgtaaggtccccagcaatgcgcacaggtcctaccccataagtgcttaacatttgttgaagagggaaaaaaatccggaaggaaatacaaaataatactgcctacaattgcatgtattgaaattaaaatgta

SEQ ID NO: 7841 - DNA, 600 bp, Rattus norvegicus
atcagcgaggactgggtggtcactgctgcccactgcggggtcaagacctccgacgtggtggtagctggagagtttgaccagggctccgacgaagagaacatccaggtcctgaagatcgcacaggtctttaagaaccccaagttcaatatgttcactgtgcgcaatgacatcactctgctgaagctggccactcctgcccagttctctgagactgtgtctgccgtgtgtctacccaacgtcgatgatgacttccctcctggcactgtgtgcgccaccactggctggggcaagaccaaatacaatgccctcaagacccctgagaagctgcagcaggccgccctgcccatcgtgtccgaggctgactgcaagaagtcctggggttccaagatcaccgatgtgatgacctgcgcaggcgctagcggcgtctcttcctgcatgggtgactccggtggccccctcgtctgccagaaagatggagtctggaccctggcaggcattgtgtcctggggcagtggcgtctgttccacttccactcctgctgtgtattcccgagtcacagccctcatgccctgggttcagcagatcttggaagccaactga

SEQ ID NO: 7842 - DNA, 600 bp, Rattus norvegicus
acagctgcacttgctaaggactgggtggttgtggtatcagagatgcaggcaggaggacctgctggaacccagatagtgtgtgaagtccccacagggacggtggtcttccatgaggtcaaggtgttttcctgacttctgccagtgcatgctgcttgggcaaaggtaattctcttgacttgtgaaagtggcccaaagcataagaattttttcaggtatcctttcagctgcaagtcggtagggcgaaaagttttggccaagaacaaccacttcacaggatctcctgtgctcagcaccaaagcacaaatctactggagatgtgtgtgccaaattccaaggtcttaggcctttgagtgtgaggcagtatagagtcagggcctttaatgatataattcgtgtgaaatgagattactgggttgtgcctactccaatgcccagagagcacccaagaagagagtgaggtgccaggtcacagagacagaccccatgtggaagacaggaagtcagacttctgtaagccgaggaaagcagttggaactcctgtagtcttggctccatcactcaatcacttccctggctgtgaaaaataaacttgtgttgttg

SEQ ID NO: 7843 - DNA, 1400 bp, Rattus norvegicus
aggaatgctgtgctgagggagcagatcccaactgctatgacaccaggacttcagagctgtctattaagtcctgtgaaagtgacgccccctttcctgttcaccccgggacttccgagtgttgcacgaaggaggggctagagcggaaactctgcatggctgccctcagtcaccagccacaggaatttcccgcctatgtggagccgacgaatgatgagatctgtgaggcgttcaggaaggatccaaagggatttgccgatcagtttctattcgaatattccagcaattacggacaagctcctctgccacttttagttggttacaccaagagttatctctctatggtcggctcctgctgtacttctgcaaaaccaactgtgtgctttttgaaggagagactccagatgaaacagttactacttctcaccactatgtcaaacagagtctgctcacaatatgctgcatatggaaaggaaaaatcaaggatgagccatctcataaaactagcccaaaaagtaccaactgctaacctggaggatgttctgccactcgctgaagaccttactgaaatcctgtccagatgttgtaagtctacctcagaggactgcatggccagagagctgcctgaacacacattaaaaatctgtggaaacttatccaaaaagaattcaaagtttgaagagtgctgttacgaaacaacacccatgggcatttttatgtgtagctacttcatgccaactgctgaaccacttcaattgccagccatcaagctgccaaccagcaaagacctctgtggtcagagtgccacacaagccatggaccagtatacatttgaactaagcagaaggacccaggttccagaagtgttcctcagcaaagttctggatacgaccctgaaaacccttagggaatgctgcgacactcaggactctgtctcctgtttcagcactcagagtcccctgatgaagaggcaactaacttctttcattgaaaaggggcaagaaatgtgtgcagattattccgagaacacatttactgagtacaagaaaaaattggcggaacgactgaggacaaaaatgcccaatgcctccccggaagagctggcagacatggtggccaagcactcagactttgcctccaagtgctgctccataaactctcctccacgctactgtagctcacagattgatgcagaaatgagagacatcctgcagtcctgatgcagggtatatgcaatgccttggacctagaactggaccactctggaaaattgccagataacaaaatcaagcaaataccacagagatggccttccaagaagaccaccaagataattccatttttcccatctacaatgttttttgatgaattataaaaataaattgaaatatagtgcaaactct

SEQ ID NO: 7844 - DNA, 600 bp, Rattus norvegicus
aaatggcggaaaatactcaggacttgcactttcacgattcttgcttcccaagcgtgggtctggcctcccaagggaatgcttcctggaccttgcaatggcctggcttccctgggggggacacaccttcatggggaggtaacttcagcagttcggccagaccagaccccaggagagtaagggctgctagtcacccagacctggctgttttcttgtctgtggctgaagaggccggggagccatgagagactgactatccggctacatggagaggactttccaggcatgaacatgccagagactgttgccttcatatacctccacccgagtggcttacagttctgggatgaaccctcccaggagatgccagaggttagagccccagagtccttgctctaaggggaccagaaaggggaggcctcactctgcactattcaagcaggaatcatctccaacactcaggtccctgacccaggaggaagaagccaccctcagtgtccctccaagagaccacccaggtccttctctccctcgttcccaaatgccagcctctctacctgggactgtgggggagtttttaattaaatatttaaaactacttca

SEQ ID NO: 7845 - DNA, 600 bp, Rattus norvegicus
ttccgaatccgcaagactgtcaggaaggtggaaaagaagggagcaggcaccagcttaggaacttcgtcggcaccgccccccaagaagagcctgaacggacagccaggtagtggggactggaggcgctgtgctgagaacagggcggtggggactccgtgcactaatggggcagtgaggcagggtgacgacgaggccaccctggaggtgatcgaggtgcaccgagtgggcaactccaaagagcaccttcctctgcccagcgagtcaggatctaactcctatgcccccgcctgcttggagagaaaaaatgagcgcaatgctgaagcaaagcgcaagatggccttggcccgtgaaaggaagacggtgaagactctgggcatcatcatgggcaccttcatcctctgctggctgccgtttttcattgtggctctggtcctgcctttctgtgaaagcagctgccacatgcctgcgttgttgggtgccataattaactggctaggctactccaactccctgctcaatccggttatttatgcttatttcaacaaagactttcaaaacgcttttaagaagataatcaagtgcaagttctgccgccgatga

SEQ ID NO: 7846 - DNA, 1400 bp, Rattus norvegicus
atcctgacgatgagaccttcatcaagaacatcatcatccaggactgtatgtggagcggcttctcggccgctgccaaactggtctccgagaagctggcctcttaccaggctgcgcgcaaagacagcaccagcctgagccccgcccgcgggcacagcgtctgctccacctccagcctgtacctgcaggacctcaccgccgcagcgtccgagtgcatcgacccctcagtggtcttcccctacccgctcaacgacagcagctcgcccaaatcctgtacctcgtccgattccacggccttctcttcttcctcggactcgctgctgtcctccgagtcctccccacgggccacccctgagcccctagtgctgcatgaagagacaccgcccaccaccagcagcgactctgaagaagaacaagatgatgaggaagaaattgatgtggtgtctgtggaaaagaggcaaccccctgccaagaggtccgagtcagggtcatccccatcaagaggccacagcaaacctccacacagcccactggtcctcaagaggtgccatgtctctactcaccagcacaattatgcagcacccccctccacaaggaaggactatccagctgccaagagggccaagttggacagtggcagggtcctgaaacagatcagcaacaaccgcaaatgctccagccccaggtcctcagacaccgaggaaaacgacaagaggcggacacacaacgtcttggaacgtcagaggagaaacgagctgaagcgtagcttttttgccctgcgcgaccagatccctgagttggaaaacaacgaaaaggcccccaaggtagttatcctcaaaaaagccaccgcctacatcctgtccgttcaagcagatgagcacaaactcatctcagaaaaggacttactgaggaaacggcgagaacagttgaaacacaaactcgaacagcttcgaaactctggtgcataaactgaccggaagtgaggaggagctggaatctcgagtgtaaggagaacggttccttctgacagaacttggacttcaaaaaatgcatgctcaaagcctaacctcacaaccttggctggggctttgggacttcagccataatgttaactgcctcaaagttaaggcataaaagaacttttttttatgcttcccatcttctttctttttcctttaacagatttgtatttaattgttttttttaaaaaaatcttccggtgtacatagggcctttaaatgtaaataactttaataaaacgtttataacagttatacaagattttaagacatgtatgataaaccataattttttttatttaaagaccttttcatttttaaagttgatttttttctattgtttttagaaaaaataaaataattggaaaaaatataattgagcca

SEQ ID NO: 7847 - DNA, 1400 bp, Rattus norvegicus
caaattgctgagaacggtaaaagcatccacgagctagagaaatccagaaagcagatggagctggagaaggctgatatccagatggcgctggaggaagcagaggcagctctggagcacgaagaagccaagatcctcaggatccagcttgaactgacgcaggtgaaatcagagatcgatagaaagatcgcagagaaggatgaagagatcgagcagctgaagaggaactaccagaggacagtggagaccatgcagggcgccctggatgctgaggtgcgcagcaggaatgaggcgatccggctgaagaagaagatggagggcgacctcaatgagattgagatccagctgagccatgccaaccgccaggccgcagagaccatcaagcacctccggagtgtccagggacagctgaaggacacccagctgcacctggatgacgctctccgaggccaggaggacctgaaggagcagctggcgatcgtggagcgcagagccaacctgctgcaggctgaggtggaggagctgcgggccactctggagcagacggagagggcccggaagctggcagagcaggagctgctggactccaacgagagggttcagctgctgcacacccagaacaccagcctcatccacaccaagaagaagttggagactgacctcacacagctccagagtgaggtggaggatgccagcagggacgcaaggaacgccgaggagaaggccaaaaaggccatcactgatgccgccatgatggcggaggagctaaagaaggagcaggacaccagcgcccatctggagcggatgaagaagaacctggagcagacggtgaaggacctgcagcaccgtctggacgaggctgagcagctggcactgaagggcggcaagaagcagatccagaaactggagacgaggatcagagagctagagtttgagctggaaggggaacagaagaggaacacagagtctgtgaagggcctgaggaagtatgagcggcgtgtcaaggagctcacctaccagagtgaggaggacaggaagaatgtgctgagattgcaggatctggtggataaacttcaagtgaaagtcaagtcctacaagaggcaggctgaggaggctgatgaacaagccaatgttcatctcaccaagttccggaaagcccagcatgagctagaggaggccgaggaacgtgcggatattgcagaatcgcaagtcaataaactgcgggctaaaacccgggacttcacctctagccggatggtggtccatgaaagtgaggagtgagcatgtcctcctggtgaggggcagaagatatgcagaatgtatgttttcgtggctcctgaccatcctgcttaatttccacgtaacccctttccacatgcaataaaatttgccttgtttcaagt

SEQ ID NO: 7848 - DNA, 1400 bp, Rattus norvegicus
ccttcgtgcaggcagtgtcagatgcccggtgtgtctttgacatgggaacagaagttggtttcagcatgtatctgcttgacattggtggtggctttcctgggtctgaagacacgaagcttaaatttgaggagatcaccagtgtaatcaacccagctctggacaagtacttcccatcggactctggagtgagaatcatagctgagccaggcagatactacgtcgcatcagctttcacacttgcagtgaatatcattgccaaaaaaaccgtgtggaaggagcagaccggctcggacgatgaagatgagtcaaacgagcaaactttgatgtattacgtgaatgatggagtgtatgggtcatttaactgcattctttatgaccatgcacatgtgaaggccctgctgcagaagagacccaagccagatgagaagtattactcatccagcatctggggaccaacatgtgatggccttgatcggatcgtcgagcgctgtagcctgcctgaaatgcatgtgggtgattggatgctgtttgagaacatgggtgcatacactgttgctgctgcttctactttcaatgggttccagaggccaaacatctactacgtaatgtcacggtcaatgtggcaactcatgaagcaaatccagagccatggcttcccgccagaagtggaggagcaggatgttggcactctgcccatgtcttgtgcccaggagagcgggatggaccgtcaccctgcagcctgtgcttctgctagtatcaatgtatagatgccattcttgtagctcttacctgcaagtttagcttgagttcacggcatttggggggaccatttaacttaattactgctagtttggaatgtctttgtaagagtagggttggcaccaatgcagtatggaaagactaggagatgggggtcacacttactgtgttcctatggaaactttgaatattttatatggatttttattcacttttcagacctgatactaatgagtgcccctcggctgctgagcaagcatttgtagcttgtacattggcagaatgggctaaaagcttatgttgtgacccattttgaaaataaagtatcttgaaatgattggacattggagaatgtgtgcaagtatcccttacagaaggcacaaacttctgcacaggctgtgtgttacagcagtgagtctagcccagcagagatgtggatgatacaaagctgtgccccctctgtacagcatcaatgtgcttagcccatctcaagtgtttactgtgaacttggtgcccaaagtctcttaagagtgtcatctgcctagtggcctcttgacttggccacttcctaaggagagggcatctgaggctctttgaaccttgcctgcagaaaccctgactgctccctcaacccttggccg

SEQ ID NO: 7849 - DNA, 600 bp, Rattus norvegicus
gggcaaagtggtttcaaatttttccaatacattcagaagccgagtgggaaagggggctgtgtgacctaacaggacagaactttctccaattactgggtgactcagctgcactggtgactcacttcaatgtgtcatttccggctgctgtaagtgagcagtggacacgtgggggggggggggtgaggatgaaagaaacagccagctcctggtcaaccaccttagttagataatcttttttgaaagcttcctagctgggggtatgatcagaaaaccaatttactgaaaaactgcacaggaaggtaacgtgaatctaatttcatagcgggccgctctgcatccgttacatctccactggaaaaaaataatcattttctttttgtgtgtgtgtgtgtgttttagcttttctccctctccctctttctctctcatttcattatgcactggataaccatacaccgtgtaccacaggggcccaaatgtggggtcacatggtcttgaattttgtggggtacatatgcctttgtttgtttgttttcacttttgatatataaacaggtaaatgtgtttttaaaaaataataaaaatagagaatatgcagac

SEQ ID NO: 7850 - DNA, 1400 bp, Rattus norvegicus
ccggttcatttctgtcggctacgtggacgacacgcagttcgtgcgctacgacagcgacgcggagaatccgagatacgagccgcgggcgcggtggatggagcgggaggggccggagtattgggaggagcagacactggtcgccaagggacaggagctggattaccgagtgagcctgaggaacctgctaagctactacaaccagagcgagggcggctctcacaccatccagaggatgtatggctgtgacgtggggtccgacgggagcctcctccgcgggtatgagcagcacgcctacgacggccgcgattacatcgccctgaacgaagacctgaaaacatgggctgtggcagactttgcagcatggatcacccggagcaagtggcagcggaatggtgctgcagagagaagcagggcctatctggagggcacgtgtgtggagtggctcctcagatacctggagcgcgggaaggagacgctgctgcgctcagatcccccagaggcacatgtgacccttcaccccagacctgaaggtgatgtgaccctgaggtgctgggccctgggcttctaccctgctgacatcaccctgacctggcagttgaatggggaggacctgacccaggacatggagcttgtggagaccaggcctgcaggggatggaaccttccagaagtgggcatctgtggtggtgcctcttgggaaggagcagaattacacatgccgtgtggagcatgaggggctgcctgagcccctttcccagagatgggagccttctccatccaccgactccaacttacttctgttgttcttggagctgtggcagtttttgtagttttggccatcattggagctatggtggttgttgtgaggaggaggaggagaaacacaggcaggtacagctcccagagctccgttgtgtctctcccagattgtgaagcatgaagacagctgcctggagtggactgagtgacagacgatgtgttcaggtctctcctgtgacatccagagccctcagttctctttagacaccagtgtctgaagttccctgtgattctatggcttcagtgtgaagaactgtggagtccagcctgccctacacaccaggaccctgtccctgcactgcctgtgttgcctaccacattcagccttgctggtccagcctgggggtggagggtggggacatctgcatcctgtccccctgtgccaccctgagcttcagcccctcactccacactgagaataagaatctgagtgtgaacttgattgttcacatccttgacacagtgtggatagctttttaaattactggatggaatacttagaggttttttgttttggggttttgctttgtttccttttgtttttgaaaaaataaatggcagatggagaagcttccagaaaaa

SEQ ID NO: 7851 - DNA, 600 bp, Rattus norvegicus
ctgggatttaagctggtggatggagcaggacgactccttactcttgggacagggacaaattcttcttggctcacccttcacctccaagaccaaacggtggttctgtcttctgaagcagaacctaaactagctttacccttggcggtgggactccctcttcaactgaagctggatgtattcaaagtagccttgagccaaggaccaaagatggaggtcctttctacatctcttttaagacttgcctccctctggagactctggtcccaccctcagggccatctctcccttggggctttaccaggagaggactcttctgcttccttttgcctgagtgacctttgggtacaaggacagagactggacatagacaaagccctgagcagaagccaggacatctggactcatagttgccctcagagccctagcaatgatacccacacctcccactaaacccctttgagaagcaggcacggctgtgcacatccttaaatcccggagaggtgaattgggacctcaaggttatccttggctatatgacatgtttgaggccagcctgggctacatgaaaccctgccttcaaaaataaaaaagaactttgga

SEQ ID NO: 7852 - DNA, 600 bp, Rattus norvegicus
gggatcattcatgaaaataaactatttactcgactggtcggattcagccagggaccgccagctccaggatgtcattcttgttgacgacatcaaactttgaagaaacagaagtcccattactcagctctggatctttgcctcgtccagtgggaggcagatgcttcctccctctgcagagtacaagcagtgcgttcatttgcattcacgcaccatctgcttttgcctctgtttccctttttgtgtaagtggaaaaataccatctgacgataagtgctttgcacagagccagagacctattagagggatgcttgggtgtttagttcccttgaggtccaggtaaggaggaggtgtcaagaaggggagcgttggtggacagtgacaagctagacattgcagagctcctcacaactcctattcctgaccctctggaccctttgaccctcagtgatggtagccggagtagcccaggcagaccttaggagaggccccgtccttcccttccttagacagttttctcagaatgccaggaaacacagcgcattcatttcagatgggtggtggagaaaatgtgctaaggtttgcaccctatgttcggaattc

SEQ ID NO: 7853 - DNA, 1400 bp, Rattus norvegicus
ctgacctatttgtctggagcgtctgtctttcttcagcgaagtcagtctcagccatgcgtggactagctcacaccactccagccttccacaggacagtgtgagcgaaagaaggtgccacctaaactgtaatgaaagctgtaccccaacctaagcacacatgaagagaggacacctgccattgtgacacgccgatgtttcagtccattcaaacatcacgggcttgacaatactggattcttctgcattgtgtccgcagtgcaaccaacacggactgaatacgtctacacaggccagctgatgttctaaccaagagtcaggagatccctgccaggctatctgagcttcttttccttctttcgcaaaacatcagaactgaaccaaatactcttaagtgttcctttgaatctcagtgttccctggtttaatggtgtatatagttcattttccgtctccctctccctctccctctccctctccctctccctctccctctccctctccctctccctctccctctctctctctctctctctctctctctctctctctctctctctctctctcacacacacacacacacacacacacttaaaaaaaagccaatggcagcctcaaaaataccaggggtgtcaatacttagagatgggtgtgtataaatatccccccattgatccaaaatccctgcttcaaaaattccttctccaggaagtttctcctctttgacagagcagagaacttcacaggaaaacttgatgtctccagcaggctgcatcccggctctgagagcagcactgaggaggacaagtgtgtggacttcctgctctggctgttcgcgtctttgtgcatgttcttcactttttgctacacacagtggagagtagggaggctgtcctcctggaaagaggagccttgtgtcttctcttcagactctgaaccttgccctcctgctccgctttgccgatctccgtctataagaagttaaaggatccaccaatccgaaaggacatttagtctaacaagagccaagaactgaaactttgcatcctgagatggcttcaggacccctggcaggtgagaatgctgttcctttccgtctcagatgtgactggaagcgaaagcttcatgtgacatccgtgaacatcctcatggttcagataattggatgcacaaaagctctattcatcgtgtcagaaaaaacaaggccacccaccaccaggatttataacttctgccagccttgttgaatcaaacattttgaggacatcggcatacctggagaaggcaagatttatacagaagtaatataaaccagaaaaaaagaaaaggaaaagaaacaagaaccatatctgcagagaattatgggaaagtttaataaactaagtaagggctgctgaatgaca

SEQ ID NO: 7854 - DNA, 600 bp, Rattus norvegicus
agcctggaaagagccagcgccccctgcagcctacggccggtcatgggcaagcctagatgtttatttaacttttagtaaagccagtaagaagtgtgtagtagcttcctgattacctaggcatctgtggccaggagggacggtggagggaaggcagagggaagcagggtgaaggcaggggcctgagctgtcggcaggctcatgggatatgtgtttacacatctttttgttcaactggaaatgaggtgaggtgactgcctggatttctgtgtcctcctcggtactgcaagaaacccacccagtccaggtgtggtgccattcccagagtcttaagctggggtgacaaagcgtatccggggtgtgggtggaaggatcccactgtggttttatgagacgtccccctaacattgagcacagaggatgtgcctcggtggcacaatgcctgcctggtaagtgtaaagccacgggtttgatccccggcactcaaacaacaacgcactgacagctccttgtaactacgcaggaggcaaaccaggagactggccaggttgagctacagagacacagacaaacaataaacaaaaagggttggtactgaccagg

SEQ ID NO: 7855 - DNA, 600 bp, Rattus norvegicus
aggtgatagagaaccgagccatgaaagacgaggagaagatggagatccaggagatgcagctcaaagaagccaagcacatcgctgaggaggctgaccggaagtatgaggaggttgctcgtaagttggtcatcctggagggtgagctggagagagcagaggagcgggcggaggtgtctgaactaaagagtagcgacctggaagaggagctcaagaacgtaactaacaatctgaaatcactggaggctgcttctgaaaagtactctgaaaaggaggataaatatgaagaagaaatcaagcttctgtctgacaaactgaaagaggctgagacccgagctgagtttgcggaaaggacagtttctaaactggagaagacaatcgatgacctggaagaaaaacttgcccaggccaaagaagagaacgtgggcttgcatcagacactggaccagacactaaacgaacttaactgtatataaaccaaaccagaagagtcctgtcttgataccaactccactccagagagtgcaccctgtcttcctctcttataagaagttccgcttactaccatgtctccaccttgctggaaaggccaagcagaaaaat

SEQ ID NO: 7856 - DNA, 1194 bp, Rattus norvegicus; identical to SEQ ID NO: 3760

SEQ ID NO: 7857 - DNA, 1400 bp, Rattus norvegicus
tggtggaccaagctgaggagttcagtggacgaggcgaacaggctacctacaatacactcttcaaaggctatggcgtggcattcagcagtggggagcgggcaaaacaactcaggcgcctctctatagccacattgagagattttggtgtgggcaagcgtggtgtagaggagcgtatcctggaggaggcaggctatttgatcaagatgttgcagggcacttgtggagcccccattgaccccaccatctacctgagcaaaacagtctccaatgttattagctccattgtcttcggggaacgcttcgactatgaggacacggagttcctgtcactgctgcagatgatgggtcaaatgaacagatttgcagcttcacccacagggcagctctatgacatgttccattcagtgatgaagtacctgcctggaccacagcaacagatcatcaaggttactcagaaactggaagacttcatgatagagaaagtgaggcagaaccatagtaccctggaccccaattccccaaggaacttcattgactcctttctcatccgcatgcaagaggagaaaaatggcaattcagagttccacatgaagaacctagtgatgacaacactaagcctcttctttgctgggtctgagacagtcagctccacactacgctacggcttccttctactcatgaagcatccagatgtggaggccaaggtccatgaggaaattgagcaggtgatcggcaggaaccgacagcctcagtatgaggaccacatgaagatgccctacacccaggctgtgatcaatgagatccaaagattttctaacttggctcccttgggcattcctcgaaggattatcaagaacacaaccttccgtggcttcttcctccccaaggccaccgatgtgttccctatattaggttctctgatgacagacccaaagttcttccctagccccaaagacttcgacccccagaacttcctggatgacaagggacagttgaagaaaaatgctgctttcctccctttctccactgggaagcgattctgcttgggagatggcctggctaagatggagctcttcctgctgctcaccactattttacagaacttccgtttcaagttcccaatgaaactagaagacatcaacgagtcccccaaacccttggggtttaccaggatcataccaaagtacaccatgagcttcatgcccatctgattctgagttgaatcaaggtggggcaagagggagagagagcctgaagtggggccagggtgcaggtggagagaacaggggaggtgaagatgagggttaagaagggaccacacccatggaagaaacacaaaagacttctcactttggtaaaattgtaacagtcctaataaaaagaaagaaatactcagtcgg

SEQ ID NO: 7858 - DNA, 1400 bp, Rattus norvegicus
tccacatgaacaacctagtgatgtcatcattaggcctcctctttgctgggactgggtcagtcagctccacgctataccatggtttcctgctactcatgaagcatccagatgtggaagccaaggtccatgaggaaattgagcgagtgatcggcaggaaccgacagcctcagtatgaggaccacatgaagatgccctacacccaggctgtgatcaatgagatccaaagattttctaacttggctcccttgggcattcctcgaaggattatcaagaacacaaccttccgtggcttcttcctccccaagggcaccgatgtattccctataataggttctctgatgacagaaccaaagttcttccctaaccacaaagacttcaacccccagcacttcctggatgacaagggacagttgaagaagaatgctgcatttctccctttttccattggaaagcgattctgcttgggagatagcctggctaaaatggagctcttcctgctgctcaccaccatcttgcagaacttccgttttaagttcccaatgaatctagaagacatcaacgagtaccccagtcccatagggtttaccaggatcataccaaattacaccatgagcttcatgcccatctgattctgagttgaatcaaggtggggcaagagggagggagagcctgaagtggggccagggtgcaggtggagagaacagagaagatgaagatgagggttaagaagggaccacacccatggaagaaacacaaaagacttctcagtttggtaaaattgtaacagtcctaataaaaagaaagaaacacccagtaggcagcagtaacaacaactgagactcatggggcaaaggtggctcacctctgcagaagctgtcctgcccttctctcactcagtcctctacacaagagcagcatgtccccaagcccaacgtacaggttcaaaagatagaacttaaaaaatttgaacctaaactgaggtggaaaagacacagttagctaggattgacacattggactctatcaccagcattcaggagggagggaacatggctccctaggaggcctgccagaattacaaagtgaaactcatctcaaaaaaggaacaacagaaaataaaatttcaaattgatttctcttagaccataagagtccagatctgtatccaaagctatttggttatattttttgttattgttgttttgtttacacattgtgtttttctttcggtttgtaagtctgtttgggatatttaatttacatttactgattagtgtgggtggtagggcataccatggctcaaatgtggaaaccaaagaaaagcttttggaagtgtcatctcccttacaatacgtgtgtccaagaactcaaattcagacaataaagcttgatagcaagca

SEQ ID NO: 7859 - DNA, 600 bp, Rattus norvegicus
cctacctggtcttcaaggaaagacacccactgtagggtttgatttcctactggctcctgtcacatcaatggacattatccatgttataaatgactttttaaaaccatatttatgtgtgaatcgaacttactctcaaaatgcaaggttagtttgttcaaatccatttgctgaagagtaattagtgtaagaggaaggtatgccaagaatcaccttcttcccggagcactggctttagttcctggagtgaaaagtggatgtcatgattttccttgagctaataaatgcaaactttggcctggcctgtgtcctatataagtggcaccatgtgtctccctgagagagagtcaaccttagtattctctgcaagtatacattggcacgagggtgttaaatgtgctaccagggtgttaaatgcaggcctgttggctttgagactgtagtatggcagagaaggctccggtttaccatctctcagaggagtggctccatgtagacatccaggtgttgtaagcatctgttttttgtgtctatagccagtaccttgtgtgggttcttacaaacaataaaagaaatatatgttggaaaaaaaaaaaggaattc

SEQ ID NO: 7860 - DNA, 600 bp, Rattus norvegicus
actaatttgtttattggtggaacagagacatcaagcttaacgctgagatttgcacttttgctcttgatgaagtacccacacatcacagataaagtccaggaagagattggccaagtgattgggagacaccgcagcccctgtatgttggacaggatccacatgccctacacaaatgccatgattcatgaggttcagagatatattgaccttgccccaaacggtttgttgcatgaagtgacctgtgacactaaattcagagactacttcatacccaagggaacagcagtactaacatcacttacatcagtgctgcatgacagtaaggaattccccaacccagagatgtttgacccaggtcactttctagatgagaatggaaactttaagaaaagtgactacttcatgcctttctcagcaggaaaacggaaatgtgtgggagagggccttgccagtatggagctgtttttgttcctgaccaccattttacagaatttcaaactgaaatctctgtctgatccaaaggacatcgatataaactcaatacgttctgagttttcatcaattcctccaactttccagctgtgcttcattcctgtctaa

SEQ ID NO: 7861 - DNA, 600 bp, Rattus norvegicus
acccagaagagattcttccctgaatcctcccactttgcacacatatagactttatccttcttcactctgtgtctattcaaacgtataattctggtttctctcaccccacggaagaactagatcacagcaactgttatgtttgagggagtgggggagaaggtgattgatttgaccccctctcccccaccggtgttgataagtagcgtctgtcccacctccagactccacccacacataatgagcagcacatagaccaggatggggggggtggtatatcatgcttgccctcctccaaccactatgagaaggctagcagaagacaccactgcacagacccaagtccaaggactgcctcccagggaattaggcagtgacttcctagaggccaagaaagactccaagagctggagaagaatcctagtcgatctggatctcttttgaggttggggttggggtggctttcaatggattctctcatgaggcttatctctccctcatcccgtggagagtgggggaccctccctagtgctcacactagacactgtgccccttggagaggcataaggcatgtatgggagataataatgggctataaaacat

SEQ ID NO: 7862 - DNA, 600 bp, Rattus norvegicus
tcgcctggacccctaatccctgccctgccactctgcatgattcaagttcgacctggccatgcattgcccatgagtgaacgtagcggcaccccggtgcgtctactgcagatgtccagctaggaaagagtcccctctcttggacagtcttctgggcccttccaagcccatccgtggagtcggcctctcctcccctctcccccgtgtgaagtgtgttatcaccagcagacactgccggactcctgcccacaggggcgtggcctgaaggcggagtgtggacatggcactgctgttccgttcccttcccctcccagcacccgccgcagcctgccatcccgtctggatgtatcgatgccacagaattgtgaattgtgtgtccgtccgtggagccagtcctagccacattattgacagtcttgcattttgttttgtctcctggtggtgggggtggaggtggtaggggtgcgctaaggtgggcagtcctgtgggagaacatcttgctagaaggaaccaacccacgaaacaacaccatcactggaatttccatcgcccgaattctttagtgagccattgttgtacgtctagtaaactttgtactgattc

SEQ ID NO: 7863 - DNA, 1400 bp, Rattus norvegicus
cagagctcacgacaaacatcagtccagggagtaaaaaggtgatcaaacttaactcaggctccagcagagccagactgtcggctgccttgactgccctcccactcctgatgctgaccttggccttgtaggcctttggaacccagcacaaaagttcttcaagcaacccagatatgaactcccgcctgacaaaatggaaacacacgcatacacacatgcacacacacacacacacacacacacacacacacacacacacacacacacacacaccccttgcaaaaacactttttttcctacattgtctctgaacctttctcctcccaagtttcttctctggagaagtttttctaaaccaaacagacaagcaggcgggcagtcagaagcctgcccagaggtcccctgcaagggacacccagcaccaacgagggctcaaggctcttgagagactcttttctcttcactggtgttttctctctggacaagatgagaccctgatgtggaaggtactttgctgtgcctggtgtggactggggaaaggacagttgcagctgcctactctggggacctgcccaagggttcacagagagtctcagtcagcaaggaagcagggctggccacaaggactttgtcacctcttcctcttggcttcagagatggaaatggtttgctgccatccccagccattatgtggcctagtgggtttaagtctggagtaggaagcctcatggcagcttcaggccatggtgcctgtagtatagctggggttgggagctgttacaggaggaagcttctttggggcatgagcaagccttggttgggcaccagctccaagatgtaccttcctcctttatgccaggaatcttgaagtcaaagagaaatgatcctctgttggctcttttttgtttgtttttgaatttttttgtgggtccatttggcaggtctctcttggggagaagggctgttgagtggggctggggagaccctagctgggcgtgtgtatggagcactctggtgggttcccaagcttgccccttctctcttcttgtttctgctttctctctcatttctgagacattcatgcactgtctgtacatactgggtctcctttctcaacatatgtgtatatccatatccatatatcctatgattttactctttctttcattttttttaaagaaacaaaactatggaaataataccctacagatgagcgaaaatgtattattgtaaagtttattttttttaataatgttgtctatgatgggaagaaaggtaccaggacccctgagccctggtccagttgggctggtggggctgtggccggggactcccgattgcattcactcttaaccaagctccaataaacgtactaggaagcgagtcgccctgtgcttcaaaaa

SEQ ID NO: 7864 - DNA, 1400 bp, Rattus norvegicus
agatggtgactcaaagcctcttgtcggaccaagggaaaggcgtggcctttgcagatgctggtagctcctggcacctgcaccggaagttggtgttcagcaccttttccctgttcaaggatggccagaaactggagaagctaatctgtcaggaagccaagtcactgtgtgatatgatgctggcacacgacaaggagtccatagacctgtccacgcctatcttcatgtcagtaaccaacatcatctgtgctatctgcttcaacatctcttatgagaaaaatgatccaaaactgaccgccataaagacctttactgagggtatcgtggatgccacgggcgacagaaatctggtggacatattcccatggttgacgatttttcccaacaaaggcttggaggtgataaagggttatgccaaagttcgaaatgaagtactgactggaatatttgaaaagtgcagggagaagttcgacagtcagtctatctccagcctgacggacattctgattcaagccaagatgaattcagacaacaacaacagctgtgaaggccgggacccagatgtgttttcagataggcacatccttgccacggtgggagacatctttggggcgggcatagagacaactaccactgtgctcaagtggatcctggctttcctggtgcacaatcctgaggtgaagaagaagatccaaaaggagattgaccagtacgtaggcttcagccgaacaccaactttcaatgaccggtctcacctcctcatgctggaggccactatccgagaagtgctgcgtatcaggccggtggctcccatgctcatcccccacaaggctaacgttgactccagcattggagagtttactgtccccaaggacacacatgtggtcgtcaatctctgggcactgcatcacgatgagaatgaatgggaccagccagatcagttcatgcctgaacgcttcttagatccaacgggaagccatctcattacacccacgcagagttacttgcccttcggagctggtccccgatcctgcatcggagaggctctggcccgtcaggagctctttgtcttcacggccttgctactgcagaggtttgacttggatgtgtcagatgataaacaactgccccgcctggagggtgatcccaaggtagtctttctgatcgaccctttcaaagtaaagatcacggtgcgccaggcatggatggatgcacaggctgaggttagcacctagaggccacaactaacatccccgatccatacctcaacacccacagtacaatcttagaggtgctagtcccagtgcctcctacggtcctccttcctcctaccccattttctagttggcagcaatggggggtgatacacataaattaaagttttttcaaaaaaaaaaaaaccg

SEQ ID NO: 7865 - DNA, 1400 bp, Rattus norvegicus
agggggaatgcgggctacagcttcctcgcaggcaggagtctcaggttctcctcattcctgcacccagtaacagccccagtgtgaccagctctgtggtggggacacctggactccttcttacagttctggtgctaagggaccacttccaaagctggggaaccccagggaggggtcagtggccagatacccatgttgagcatccaccccctgaaacctgaggccctgcatctgcctcttgggacctcagagttcctaggctgccagcggcgccacacactccctgccagtgagttccgctgcctcacgccggaggatgccaccagtgcgtttgagattgagcgcgaagcctttatctcagtctcgggtacctgccccctccacttggatgagatccggcacttcctcaccctgtgtccagagctgtcactgggctggttcgaggaggggtgtcttgtggccttcatcatcggttcactttgggacaaggagagacttactcaggagtcgctgacactacacaggcctggaggccgcacggcccacctgcacgtactggccgtgcaccgaaccttccggcagcagggcaagggctccgtcctgctgtggcgataccttcaccacctggggagtcagccggcggtgcgccgggctgtgctcatgtgcgagaacgccctggtgcccttctatgagaaatttggtttccaggccatgggcccgtgcgccatcaccatgggatctctcaccttcactgagctgcaatgttccttacggtgccacaccttcctgaggaggaacagtggctgctgacccaagctgcgcacttggccatggcgagggtgggagtgacaagcttgggggctcctgtccacttcccaggtcacatccttctctgcccaactagagctggctagcatgaagggagacagcagttcccaagtggagtagagaggtaagggtcaataaagaggacaggagatggcttcccttcagcacaggctgctgtctgtccccagtggaccgcttgccttctgaacagtgcacaaaggcaagaccaggacgtggaaacgggagcagcgggaggtttgtccccacacttcctcctctccctgctctgtttctgggctccagtgcggtgccctggttcttgggagcctcactctaggccaggctgacatcccttcctggctcctaagtctgggaatgaggggcagccaggagccggggacttgtgaatggtggcatcattggggtacagacatgacacagggccacaccaaagtacactcaggcaccaatgtgctggctcacctgcctccctagttccccttctatcctggtccccctaccagccccagtactgacacaataaagcagctatgttcccaaaaaaaaaaaaaaaa

SEQ ID NO: 7866 - DNA, 600 bp, Rattus norvegicus
cttcttgcttcaagcagtcccgttgaagacgatcaaaagagaagtggagaaaaatcatcagaaaccgaagtcaagacggttcacgtgtgtaagctgtgtccttcctacccctggactgttgggctcttttccttgttgtctcagaagaaatgggttaaagcaggcgatcacatgctttgttgattgcacagtagatgatatgatctacatagatcttagctcactctcacggaaaggctggaacattatagatgctgcaagatacactgcaagtgtggcccctgctcataattttgccttctgaattgtgattagtgaaaataattgtaacttagagtccgatttattcagaatcagagcattatttttatactatgaaaatctttgaatgaagatatttaactttaaaaacatttcctaagagacaacagtgtttcttaatcattgtcttttcttcttgcagtctttcccagtgaaaacggtaaattctgctgtttgcatagaatctttaacttatttttaagatatgagattgtaaacaaattgcttgatttatttcaatcaatttattctaattatttaaataaaatcacccctaag

SEQ ID NO: 7867 - DNA, 1400 bp, Rattus norvegicus
cttttcacatggactccacggtagtgctcattaccggttgctcttctggaattggcctgcacttggctgttcgtctggcttccgaccgttcccagagcttcaaagtttatgccacattgcgggatctgaagtcacagggaccattgttggaggcagccagggctcaaggatgccctcctggctccctggagatactggaattggatgtcagagactcggaatctgtggctgctgcccgggcatgcgtgacggagggtcgagtggatgtactggtctgtaatgctggacgcggcttgttcgggccgctggaagcgcatgagttgaacgctgtgggtgctgtactggatgtgaatgttcttgggaccatccggatgcttcaggcctttctgccagacatgaaaaggcgccactccgggcgtgtgctggtgactgcgagtgtgggaggtttgatggggctgccattccacgaagtgtactgtgccagcaagtttgcgctcgaaggtctgtgcgagagtctggcgatcctgctgccgctctttggagtccacgtgagcctcatcgagtgcggggcagtgcacacagccttccatgaaaagctggagggcggcccgggcggggctctggagcgagcagatgcccagacccgccacctctttgcccactatcagcgtggttatgagcaagccctgagcgaggcgcaggacccagaggaggtgacggagctcttcttgactgcgatgcgagccccgcagcctgcgctgcgctacttctccacaaaccgcttcctgccgctggcccgaatgcgcacagaggaccccagtggcagcagctacgtcgaagccatgcaccgcgaggccttctctgatctgcaggtccaggagggtgccaaggctggggcccaagtttcaggggatccagacacgccccccagagccctcatttgtctccccgagtgtgcaatccctagggtgacagctgaattgggatggtctgcatcagataaaccgggtcagaacaaatcatgttaccagcaaaagatctaagctagaatctctttttattattttagaatgtgttttgttttaagacaaggtttcactatgtagccctgtctgaactgtaactcataaagatccacctgcttctccttctgtgtgcaaccgcacacttctcagaatcatttgaaatagtgcaaacatcttcatgggtcaagataagagggctgtagtcggggttggggatttagctcagtggtagagcgcttgcctaggaagtgcaaggccctgggttcggtccccagctccagggggaaaaaaaacctaaaaaaaaaaagagggctgtagtcaaggttaagggtttttccttccaataaatgtacttattaattattaaaaaaaaaa

SEQ ID NO: 7868 - DNA, 600 bp, Rattus norvegicus
ggcacacttgtggcaaactgttttcaaatctgctttatcaaatgtgaagctcatcttgcaacatttactatgcacaaaggaataactattgaaatgacggtgttaattttgctaactgggttaaatattttgctaactggttaaatgttaatatgttaccaaagtagagctctaaagaggacaagaaggctccacgcatttgacttttaagacttggtgtttggttcttcattcttttactcagatttacgccttacaaagggaatctctggtccagacacttgggcctggcaagggtggctgatggtggttaggctgcacacttgagaagcaaacaggagcagggacgtcctgccacacaggcacgcacagggtcagcctctggacacttggcttgggctgcctggcctggggggctagactctggcatctggctgggcacacccaccagtgtttctgtgctctgccgcctgtgagctaccactttcctaaatagaaaatggcattatggggttggggatttagctcagtggtagagcccttgcctaggaagcgcaaggccctgggttcggtccccagctccggaaaaaaaaaaaagac

SEQ ID NO: 7869 - DNA, 600 bp, Rattus norvegicus
tcaggtgcacgagccttatcccatttgtaggtttctaggcaagttgaccgttagctatttttccctctgaagatttgattcgagttgcagacttggctagacaagcaggggtaggttatggtagtttatttaacagactgccaccaggagtccagtgtttcttgttcctctgtagttgtacctaagctgactccaagtacatttagtatgaaaaataatcaacaaattttattccttctatcaacattggctagctttgtttcagggcactaaaagaaactactatatggagaaagaattgatattgcccccaacgttcaacaacccaatagtttatccagctgtcatgcctggttcagtgtctactgactatgcgccctcttattactgcatgcagtaattcaactggaaatagtaataataataatagaaataaaatctagactccattggatctctctgaatatgggaatatctaacttaagaagctttgagatttcagttgtgttaaaggcttttattaaaaagctgatgctcttctgtaaaagttactaatatatctgtaagactattacagtattgctatttatatccatccag

SEQ ID NO: 7870 - DNA, 600 bp, Rattus norvegicus
aggacacttttttgtaacctaggaatccttcacacctatgcactccacagaccaactccttcgtgctctaggtccacctcgaactactttatgccccaagacaatcccataagcccctagcatcccctttgaaacagtctttgagtttgctcccagagaattccccgcttacccccagaggtcgaatgtgcgcagataactctccttttactctgaggacatcccagtggaccttctagagaactcccttggggtgttctgaaatatcaccaccccacttccttctgcccccttttgttttctttctgtcccctagcacccgagacttctctcttccctagagacctcgtttgtcttccccttgttcctcctagggctctgggaccaccctgacacacacacacacacacacacacacacacacacacacacacacacacacacatccctaagattccatgttcctgatcacctcctgccgggcccctggttctgttttcatctgtttcccatatggtgcctgcaccccaaggagagcagctcctccgagagtatttgacaacctttatgctgctcattaaaaccacagcaattcaaaaa

SEQ ID NO: 7871 - DNA, 1309 bp, Rattus norvegicus; identical to SEQ ID NO: 3775

SEQ ID NO: 7872 - DNA, 600 bp, Rattus norvegicus
gactgcaagctgcagcttggcagagaatgaagctttgacacagctttcatactgtactgttttttaagtgtgtggttctgaaagccagtttgattttaatgttttattaactcggtgatttttgtcagacctaatggcatttgaaacagttataatagttctgataggatttcagggaagccaagtttatgttagaaatcgtttaggggagcctcggtattcagagatgatacagaatatagcatccaggtaactaacttcagaagcacacgttgccgtagggagattccggcttggaactagtttgggaagttttaagcctggtcagatgctacagaggcaatgggtcattggtgtggttgggccacttctgtgcgtaaagatgtgagagggtgaaggataagttttctgcgaagctctagatggtgtgagtgccctttgtagtgttaactgagagcaccactccagcgagatggcagcaatcttggaccttatcttgataaccttatttcctaaaaataataaatactaaagagtacttatgttattggttccagaaaaatccaaaatcaaatccttgtggaatttttaattttaatt

SEQ ID NO: 7873 - DNA, 600 bp, Rattus norvegicus
ctgcagcgagctttatccacgggactccttaaacttttaaaatcttatcactattatcatgcatttattacctaagtaggatatttccctttcctttttcatttcagccgagtcccttagcaacccaggctgactgggaccctccatgtagcttaagctgtgaactcactgtacttcctgttttcacttattttaggaagtaattttccctatcagaaattttaattgtttagatgatgtataagagtaacacaattctgttatatactaatctgtagtaaactaaatttgttcttagaacaagtttgatgactctcaaattgaatgtatccatacatctttccatggcttcttgaatgcccatttctcatacacagaatgatgggtttcacggtgatgtcttcctttcatgtctttattcttgtgcggtgatggttggcaaatgatacccatggagcaaggttactcttcctatttctgtgcagcctaagtgttaagaataatttttaaatacttggagggaaggcacattttgtgtcatatgtgaagtgacatgtgacacacagactagcaaatccttgagtaaaattttattgggat

SEQ ID NO: 7874 - DNA, 600 bp, Rattus norvegicus
gggaccgaacccaggaccttgtgcttgctcggcaagtgctctaccactgagctaaatccccaaccccggtaaacaacttttttaagaagcaagcaaacacactgaagtccagttttaagaaatatataggtcagtttggttaaaaataataataatgaaaggaaatttcattgattgaaattgattgcaatgtaggaaaattagcctgtatttctctcaagagttactgaagttgtttttaaagtcttttaatgccacagtgactaacaagcatataaaaatcttcatgcctttgacaaattaatttagaagttaatttaaaacatatccttttcctggttaaaaaaatatgttggcattttaagcagataagactagaaagtatttaagaaaacaaagtatttcccaatactgtagaatagcttccatgaaactcccctagttgtctggttaactcggttcctgtgttgatttatctaaatcattgactccctgtcctgtgctctgtgacttaacgtaactgttaccactgcacttgtgaactttcgtgtcattgttttgtgttcaccctctttttttaaaaaatatattaataaacta

SEQ ID NO: 7875 - DNA, 1400 bp, Rattus norvegicus
ggctggcagcgcgtacggtcgccccgcgcagccccagcaagcgcagacacagacagtccagcagcagaagttccaccttgtgccaagcatcaacgctgtcagtggcagccaggaattgcagtggatggtgcagcctcatttcctgggacccagcggctatccccgacctctgacctatccccagtacagtccccctcagccccgaccaggagtcatacgagccctagggccacctccaggggtgcgacgcaggccctgtgagcagatcagcccggaggaggaagagcgccgcagggtgagacgcgagcggaacaagctagcagctgctaagtgcagaaaccgaagaaaggaattgacagacttcctgcaggcggagaccgacaagttggaggatgagaaatcggggctgcagcgtgagatcgaagagctgcagaagcagaaggaacgccttgagctggtgctggaagcccatcgccccatctgcaaaatcccagaagaagacaagaaggacacaggtggtaccagcagcacgagtggggcgggtagcccaccgggcccctgccgcccagtgccttgtatctccctttctccaggacccgtacttgaaccggaagcactgcatacccccacgctcatgaccacaccctctctgactccttttactccgagtctggttttcacctatcctagcacaccagagccttgttcctcagcccatcgaaagagtagcagcagcagtggtgacccctcctccgaccccctaggttctcccacactcctggctttgtgaggcacccagccacaccccttgcaggtgctacccgttgtcatctcctttccctgttcatccagcaggcctggaccatacccatgccccaaaccagcaggtcttttatctctttcaagtagaacaaacatgttatgctttgatatagagccagcttgggggtccccaaagctgctcactgtttctctagagctggcctatcataatttgcatacagagaaaatatgtccctctgccagagtaagcctggcagctctgactttgtagatccccagtggtcctttgatgccttgcagaccactttcccacaccatgtcactttcttcatgttatccagcctactctaagcctagatagaaggtgccctttaactagcctagaacactaactcacacagcaccaacagccagcagcaccaggacaccctgtaggctcctcctgatcaggaggcaccaacagcttctgtgatgagctgagctgtactccctagctctgagaagcttttagctctggggtatccaagcctccacagcaagggcagctgctatttattttcctaaagagactatttttatacaaaccttccaaaatggaataaaaggcttgaagctct

SEQ ID NO: 7876 - DNA, 680 bp, Rattus norvegicus; identical to SEQ ID NO: 3780

SEQ ID NO: 7877 - DNA, 600 bp, Rattus norvegicus
attagctgaggcggtgaccttgaccccagcccagaccctgcaaatgaagggcctgcttctaaacagtgtggaacagtttgacccaagagacctggctgtgaccagtcatgcagtcaccctcttagactgggccccaccatggcagtggacaaggcataaaaaggtcggtctgggctggagaaaccatcaccgacggtggatctcggactgaacaccaacgccatggcctgccccagtctcgcttgctgcctgcttggcctactggctctgacctccgcctgctacatccagaactgccccctgggcggcaagagggctgcgctagacctggatatgcgcaagtgtcttccctgcggacccggcggcaaagggcgctgcttcgggccgagcatctgctgcgcggacgagctgggctgcttcgtgggcaccgccgaggcgctgcgctgccaggaggagaactacctgccctcgccctgccagtctggccagaagccttgcggaagcggaggccgctgcgccaccgcgggcatctgctgtagcccggatggctgccgcaccgaccccgcctgcgaccctgagtctgccttctccgagcgctga

SEQ ID NO: 7878 - DNA, 1372 bp, Rattus norvegicus; identical to SEQ ID NO: 3782

SEQ ID NO: 7879 - DNA, 600 bp, Rattus norvegicus
ctttgcagctgtgggtggaggcttggcatatccacaggaagccagtctgagtgctagccagtgttgtctccagagcatgacactgcattccctgacctgtgtccacagtgctgtaacaagttaagtcctccagactaaatgagcatgcctagcagacttgggtcctccagagttaggtatgaccagcccagtccttcccgagccttctcgtgagcatagccgggatagaggtcaaaggtcaggagtgaactggaagatgtgagtttggcactctggtcaaagctaggcctgaggagggggccctgctgctcagtcagagtgtcctcagtttaagatacttcatcaatctttgtgtagtgtacattcatgtgtcattgtggttgtatgaaaacaatcattttttctttgtattaaagtcatcactgtataaaacatagctagctataaagcagaaattccagaagcagatgctggaaggatggtctccatcctcaggacgcagcagctccctgagcatgcgactcaccctgctgctgtagtcatgaaacatacagtggaagtcacaaaaatgtccccagcccagcccctgcccctcctccg

SEQ ID NO: 7880 - DNA, 564 bp, Rattus norvegicus; identical to SEQ ID NO: 3784

SEQ ID NO: 7881 - DNA, 600 bp, Rattus norvegicus
gtcctatctgtcctatgttcaagctgtgcctatccacaaagtccaggatgacaccaaaaccctcatcaagaccattgtcaccaggatcaatgacatttcacacacgcagtcggtatccgccaggcagagggtcaccggtttggacttcattcccgggcttcaccccattctgagtttgtccaagatggaccagaccctggcagtctatcaacagatcctcaccagcttgccttcccaaaacgtgctgcagatagctcatgacctggagaacctgcgagacctcctccatctgctggccttctccaagagctgctccctgccgcagacccgtggcctgcagaagccagagagcctggatggcgtcctggaagcctcgctctactccacagaggtggtggctctgagcaggctgcagggctctctgcaggacattcttcaacagttggaccttagccctgaatgctgaagtttccaagaccaccgggctcccgaggatcatgttgagggaagaaaccttggctcccaggtatcctcaggagaagagagccatgtgttcacacccctcatccaggaccctgtccgtttctcctactcctctag

SEQ ID NO: 7882 - DNA, 600 bp, Rattus norvegicus
gtcacaccgtgtgcttgtattcctgaatggtaatggtgactgtcactcaggaaccaccaccttctctgtgacaccacagctttgcctcctcggcccaggtctgcgtgccataggactcatcactgcttccctgaccacgctgctggaccctgcattgctgaaccccatgctgctggaccctgtggtgtacggtgggcaattgtttgctggtgcttttgtagggttaagttaaactctgagatcttgggcaaaacggcaaggggagagtcaggattcctctctccaaaggtcactccgaagttacttttgattcctggagcagaaatgactccttcctctagcccaagccagccaagaactcattcttagaggcaaagcagcccaagcccgactgtgcctgtcctccagcctgggctggttttgcagagtgtgtcttcaagaagaaaaaatggtaaagctatttattcaaaatgcttgttttttgctatgaatgatgcctgtgtttccacccacgccaagcacttgttcctattgtcttgataagaaactacatgtgtgcagtattttattaaaacgacattttatttaaaaaaaaaaaaa

SEQ ID NO: 7883 - DNA, 1400 bp, Rattus norvegicus
ccggcggcaaaaggtgaccaggagcctccgggatgtctgagctggagaaggccatggttgccctcattgatgtcttccatcagtattcagggagagagggtgacaagcacaagctgaagaagtcagaactgaaggagctcatcaacaacgagctctctcacttcctggaggaaatcaaagagcaggaagtggtggacaaagtgatggagacgctggacgaagatggggatggggagtgtgacttccaggagtttatggccttcgtctccatggtgaccacagcctgtcatgagttctttgaacatgagtgagacaaaaaaaaaaaaaaaaaagtggctgagccgtttccccgtggcagacatgagggccacgagaggaggcacggcagaaggctcgtgggctggaaggagctgcgctctctagacgcatataactaattaggaagcttgatttgcttcagggatgaaactctgaccccgttcccaagggctgctttaagttagcacttcgtttctgctacactaggtattcctgtgagctgaatggtcccgggaactattgataagagtcactgagggacgaaatcaacactctgtgggtatagcactggttgtagaccaccatgctcctgtggaagggtcacctgtaagaatcaaggcagactaccaatagcacctccgttggacagctttcttaggtgtaatgtatgctgtccatgcatctacagacccacagctggatccactgccacccgaagaggttggctcgcccttacaactgcttgtcctctgtgcaaacgatgccccggaaagttagacctatcacccacaccctcccaccacccccaggccaaaaggacagcccacccaagtcccctcccccacagcgaatcgcggtttgttaccaagtacgtatttgacatcaacagttccaactggtggaacgattagatctcgcacactaagtattagcaccctaactcacgaccgagaatcaaaattctgctcagtagacgtctcctttcaggatgacaccattgtccccataggacacggacagaggagggcactggagagagtgtcaggtctttttctagctgtatcttcctctctccctctgctgcccataatgtgagtgaccctctagggtgagacttgcagggtgagctgctgaggaatgaagggccactgagatgtgtcctttagctgctgggtgtcatgtctgacctgctggtgcctagggcctgcttaacactcggcaaggctgcgagccgaggactgtgggaagccggacttgatgctttctaacctgcatatttgaatgccgaaggtcaaacaatccaagttacagataaataaaaaccgcattgcaagtattaaaaagccattctaggaaaattc

SEQ ID NO: 7884 - DNA, 600 bp, Rattus norvegicus
agtttacaacattgaattcaaccctcccaagactgtgggcatcgatgacctaacgggagaacctctgattcagcgtgaggacgacaaaccagagacggtgatcaagagattgaaagcgtatgaagcccagacagagccggtcctgcagtattaccagaaaaaaggggtgttggaaacattctccggaacagaaaccaacaagatcaggccccacgtatactccttcctgcaaatgaaagttccagaaaccatccaaaaagcctctgttactccctgaggaaggcacttggcgggatgaagcagggcctcctccactcctcccctcgcctctgtatttcgaagctgttttcctaagacttctctgaaaattatgatttaagtcctaatggccttgcctaatgagtcagaaactaaggctgaccgtgtgtttatgtasgttgtccttccatggatgtgcaattgaaaacgtcagacatgttgaaacaaacaaactcagagcacaattaagagagcaactggtggggttggggatttagctcagtggtagagcgcttgcctaggaagtacaaggccctgggttcggtccccagctccgaaaaa

SEQ ID NO: 7885 - DNA, 602 bp, Rattus norvegicus; identical to SEQ ID NO: 3789

SEQ ID NO: 7886 - DNA, 600 bp, Rattus norvegicus
ctgcacctgacgcccttcaccgcgaggggacgctttgccacggtggtggaggaactcttcagggatggggtgaactgggggaggattgtggccttctttgagttcggtggggtcatgtgtgtggggagcgtcaacagggagatgtcacccctggtggacaacatcgctctgtggatgactgagtacctgaaccggcatctgcacacctggatccaggataacggaggctgggatgcctttgtggaactatatggccccagcatgcgacctctgtttgatttctcctggctgtctctgaagacgctgctcagcctggccctggtgggggcctgcatcactctgggtgcatacctgggccacaagtgaggtcagcagacctgccccaaacaaatatgaaaaggttcactaaagcagtagaaattaatatgcattatcaaggatggaccatgaaacaaagttgtgatttttttttaaagcagaacacacacacacacacacacacacacacacacacacacacacacacacacacattcaggcaaatggtcaaatcagctatttactgccaaagggaaatattatttattttttacattattt

SEQ ID NO: 7887 - DNA, 830 bp, Rattus norvegicus; identical to SEQ ID NO: 3791

SEQ ID NO: 7888 - DNA, 1055 bp, Rattus norvegicus; identical to SEQ ID NO: 3792

SEQ ID NO: 7889 - DNA, 600 bp, Rattus norvegicus
gctgctggtggccctgcttgtgggactctccatggtcattggggacctactgcggcagatccccctggctgtgctctttggcattttcttatacatgggagttacttcccttaatgggatccaattctacgagcggttgcacctgctactcatgccgcccaaacaccacccagatgttacctatgtcaagaaggttcggaccatgcggatgcacctgttcactgccttgcagctgctctgtctggccctgctttgggcggtcatgtccacagctgcttccctggccttccccttcatcctcatcctcacagtgcctttgcgcatggtggtacttacccggatcttcactgagcgagaaatgaaatgtctggatgctaatgaggcagagccagtgtttgatgagtgtgaaggtgtggacgagtacaacgagatgcccatgcctgtgtagctgctgtccagaggcatagcagagggactaaggggcaggggctggggggctggggagctggggctcccctcctcctgtccctcctcatttttatttaagtgaataatttaaagcccccttgtccccaccctgcagtaaagtgcttcaacccc

SEQ ID NO: 7890 - DNA, 650 bp, Rattus norvegicus; identical to SEQ ID NO: 3794

SEQ ID NO: 7891 - DNA, 600 bp, Rattus norvegicus
ttaggcactgtttgagaacagtacatacttggtgtgagctgctcttgattgaacattttcattagaggcttgaattgcttggacgctgtcactgtcatcataaggccatcaaagatattccatctctgtgttggggcctgtggggaggctgtaatcctgttctactgcagttaggaaaaaaatgagttaccccccccccccagaattgttgaataataaaatagagaactgaatagttctcttttgtgttaaaaattgctatttttcataagtaatcctttgtttagcggatatcacctagtggtctttatttatggccacagtttcacagaaacatcattttttcacttgaaacgtgtaactaggctaaggatggatggagtggtagacctttgcctgtcttatgtgaggccctgggctctacctcactactgaacaaatcaacagacccaagctaggctcctgactgacaactgttaattcggagaggagtgacattgtgcctctgggtttttttataggctgagatgcaaaaactgttaccttgtctattaaaaccgactgtgtattgtatgaaagtgctcaagatggacaaagtat

SEQ ID NO: 7892 - DNA, 600 bp, Rattus norvegicus
tatttctgtttctgtctctctgtctttatatctgcctctctctctctctctctctctctctctctctctctctctctctcacacacacacacacacacacacaaacacacaaacacaaacacacacacacacacacacacacacacacacacacacacacacacacacacaccgtcttctccaggctgctttctgtttcacaggtctctggccagtccctgcacaaacaaatatagggaaactattttcctgactgccctacctggcacttgatctcccatccctggaggaagctggaagctggaggcccagaatcctatccatattgtccaggaaagggtccatactctgttatcaagatgaggatcaggaagcttcctagcccctggagaggctcagcaggccaccagaggcccccaccccgaaccagtttgcattggcccctgccctctccccaagatggctaggtcccctccctcacccctgggtccctgctgtggcaggaggtggtggtcagttgtacccagcaggagggagtgctgcttatgaggtcagttgtctctcaattaaagaaacactgtgcaataaaaaaaaaaaaaa

SEQ ID NO: 7893 - DNA, 600 bp, Rattus norvegicus
agccttcagactcagcctcctgaaaagagccggagcaaaaagaaacagaggaaagggcctcatcaaaagggacagacactgcagtttgatgagcagacactgaagaaggcgaggcgaaagcagtggatcgagcctcggaactgtgcccgcaggtaccttaaagtggactttgccgatattggctggagcgaatggattatctcccccaagtcatttgatgcctactattgctccggagcctgccagttccccatgccaaagtctttgaagccatcaaatcacgccaccatccagagcatagtgagagccgtgggggtcgtctctgggattcctgagccctgctgtgttccggagaagatgtcctcgctcagcatcttgttctttgacgagaacaagaatgtggtcctcaaagtctatcctaacatgacagtagactcttgtgcttgtagataacctagcagagaacacactcaaacgctccattcaatcattaattgggttttatggacttttatttttgtcttttgcactgccaatgcattttgtcccaaaagatgttttatagcagaaagaaaatgaacaaagagatcgaagatttcc

SEQ ID NO: 7894 - DNA, 1400 bp, Rattus norvegicus
cttccggatccacaagttccgggtcacctttctgaagatttggaatgaccacttccgatgccagcctaagcctcccatcgatgaagacctcccagaggagaaagctgaggactagactctgccttgctccgtctagcccatgcccagcggctctctgttcaactcccacgtcctccctgtcccaccctgtcccactgtccctcctcagttttcccagctggggtgtaggctgtggacaccagggaggctctgaagagataccatggaatagggcccccctataaggagctagctgccctgtacttggggacccggaggaggcttggaggtggggcgggctatgatagggaactgggtgccctgagatgtgaggagagtcttgtgtgccccatccctggctgttctctgagctgttcagagagccagggttagaatattctggctcctacagtcaggcagggaggggagcctgctattatgtgttggtggcccgagggaccaacttcaagtgagaaagacagtcccttagaggtaaatggatagagagaggatatgtcctggctttgctgtctctcctcttctgtaggagaagacagtaaatcacagggaaggagactcagcccctcctccaaggattgtgtgcttggccatgcaggcgctgtggtacctgctttcctcacctgggcttatacttgggagaggcagaaagaatgggtccagggatcctctcacatttactttattcacatcctggcactcaaagtgggccacaaagtccttgggaataaaaatagtgcagaaggtgctggcttcagctagccagcagggagcagcactgagcccttcttgccctgaacttcctgggagtccccagtgtaatttactgtctggggcaccaagcttcaccaactctcagagcaggcctggactctccttccaaggcccaggagaagggatccctgggaaggacaacccttgggagcatgctgcctgagggggtaggaagggaaagcgtccaaggagatcccaggcgaacgtgggcacccttggtgtgaagtgtgacaggtcagaccagaccaaaggagactgctgtcttcagtgtgaggaagtgccttgctggcatttaaatatccaaaaaaatgctcctggaggtggatttagctcagaagctgtgttacaaatagagtgtaggcttttgggagggtctcagataggaccaatccctactctgctgagcctggatgtcttccttgtatggacggcaggcagaggagggtgacaggttctgagtgtgaatatcgactccaagtcttgattctgggctcttccctcagttggaagcaaggtgtccctggttctcaaggaggtccctatgtctaataaaagattgtgaaccccac

SEQ ID NO: 7895 - DNA, 600 bp, Rattus norvegicus
attcatataacgaagctgacaaaatcttttaattttgtattctggccagaggctcatgtagttcacactgacctcaaaatcctatatacatccaaagatgtcttgaaatctcgatctcctgaccagtgctggcatcacagccacatggacgtatacccagattttaaagtgactatatcataatgtttatattttaatctcctttaatttatttgcaatattacaacttcactatctaattccaggtattttgtcacacttaaccaacaccaccaaaagccccaacctattcaaagatcaatccctcatcccctctctccataacctcccctgcactcaacacccaccgtgccacttttgtcacacttaaccaacaccaccaaaagccccaacctattcaaagatcaatccctcatcccctctctccataacctcccctgcactcaacacccaccgtgccacttttgtctgacttttgtgtcattggactgtcctgaattgtgtgtctcatagaaaaacaacgacatgatctttaatgctggctgacttttttgccacacccaacttctcaggcccctgactgtggcctgcacagtacag

SEQ ID NO: 7896 - DNA, 1400 bp, Rattus norvegicus
cggcaagctgccagaggtcaccaaggatgtggagcgcacggatggggcactgctcgttaatgccatgttctttaagccgcactgggatgagaagttccaccataagatggtagacaaccgtggcttcatggtgacccgctcctacactgtgggtgttacgatgatgcaccggacaggcctctacaactactatgacgacgagaaggagaagctgcagctggtggagatgcccttggcccataagctctccagcctcatcatcctcatgccccaccacgtagaaccgctcgagcgcctggagaagttgctgaccaaggagcaactaaagacctggatggggaagatgcagaagaaggctgttgccatctccctgcccaagggagtggtggaggtgacccatgacctgcagaaacatctggccggactgggcctgactgaggccatcgacaagaacaaggcagacttatcgcgcatgtctggcaagaaggatctgtacctggccagtgtgttccacgccactgccttcgagtgggacacagagggcaacccctttgaccaggacatctacgggcgtgaggagctgcgcagccccaagctgttctatgccgaccaccccttcatcttcctggtgcgagataatcagagcggctccttgctgttcattggccgcctggtccggcccaagggagacaagatgcgagacgagttgtagagtccaagagtggtcgtggcgtggcatggcgggaagtagccagaggttcctgagacacatgggtgctattgtggggggagggggaggcaccaaccctggatagtccacgggtgggggggggttggcagtgcagatcggaattcccataggtctgagtaggtatttttagacaagagtccactccgttagacatggagcccagacactatgagaccaaattcaggggtgtcacagccattctagccctgccccacaagttttatatccaatctagcctcaacagtcaatcagtgttcatattcgtggccaagcattctgtctgtgagacaatcgagttgggtgggggtagggcggcctagcctctctgtcaccatgccctgagccctcggttttcctgttcacctctgattccctttaaccacaaaactaggagcctgtggtcccagaactgcccacccttaaaatcgattctttgccgcagcagtgggagttggggagaccatgcataggagggctccttggcatatccggccctagagccattacattacattgacaactcaactttgcttctgttttctccctttttgagtttttcaaggaatgggggtttggggaaggggaagcctttattgctttcaaaacaagaacagtttgtcaattttttttgaataaaccttttccaatg

SEQ ID NO: 7897 - DNA, 1400 bp, Rattus norvegicus
caagaagaaataaaggaaataataaagttctggctctcaaagggtgttgatgggtttagtttcgatgcagttaaatttcttctggaagcaaaggacctgagaaatgaaatccaagtaaatacatcccaaattccggacacagtgacccgctactcagaactgtaccacgacttcaccactacccaggtgggaatgcatgaccttgtccgggacttccggcagaccatgaaccagttcagccgggagcctggcagataccggttcatggggacggaggtgtcagctgagagcaccgagaggaccatggtgtactatggcctgtcatttatccaggaagctgacttccctttcaacaagtacttagccacactagacactctttccgggcatactgtgtacgaagctatcacatcctggatggaaaacatgccggaaggaaaatggcccaactggatgattggcggaccagagacttctcggctgacttctcgagtagggagcgagtatgtcaatgccatgaacatgcttctgttcacactcccaggaacccccataacttactatggggaagaaatagggatgggagatatttccattacaaacctcaacgagcgctatgacactaacgcccttctctccaagtcaccgatgcagtgggacaatagttcaaatgcggggtttactgaggccaaccacacctggctccccacaaactctgactaccacacagtgaatgtggatgtccaaaaaacccagccgagctcagcactgaggctatatcaggatctgagtctactccatgccagagagctgcttctcagcagaggctggttttgccttttgagggacgacaatcactctgttgtgtacaccagggagctggatggcatagataaagtcttccttgtggttctgaattttggagaatcatcaactgtgctaaatctacaggaaactatttcagatgttcctacaaaactgagaataagattaagtaccaatccagcctccaaaggcagtgatgttgatacccatgccgtttctctggagaagggagaggggctcatcttggaacacagcatgaagactctcctccatcaccagaaagctttcagagacaaatgttttatttccaaccgtgcatgctactccagcgtgctggaccttctgtatagctcgtgctaggcagctctgtaagaggtggccaccctgcgtctggtatgcttgccatcacacatgcaagggcctcaggaatggcatcagttcttagatatttctgtagcacgaatgcattgttttaggtaagattctcaaatgtttggaaggacaataaaatgtttaaaagattacccccaaaaaaaaaaaaaaaaaaaaaaaaaaaaaaaaaaaaaaaaaaaaaa

SEQ ID NO: 7898 - DNA, 600 bp, Rattus norvegicus
ccgtgtctccatgttgtgttctggtgtgcctgagcgttaaagggattgtgaggtctgtatgtaaatgcattaagaagcaaattcgaagtgcatcctgagtgtattcttggtgagaaagcaggggagaactgaggattgaagcccgggcctcacacatgtgaaacatatactctgctccgacatgcatcccagtccgccaaggccgtttagaggatctttacctagagatagagattgttttatcttcagctggagagacagctcagtggttaggagcactgactgcttctccagaggtcctgagttcaaatccaccagacggtggtggctcacaaccatctgtaatgggatccgatgctctcttctggtgtgtaggtgtacatacagacaaagcattcctacatttaagaaaatacataaataagtttcaaaaattatttcatctggggctggggatttagctcagtggtagagcgcttacctaggaagcgcaaggccctgggttcggtccccagctccgaaaaaaagaaccaaaaaaaaaaaaattatttcatctgagcaaaatgttttgatgtggaattatgtaaaggtaaaataaac

SEQ ID NO: 7899 - DNA, 600 bp, Rattus norvegicus
tcagagttaaatactttggtatgtaaaaatatagcatattactactgtaaaatgattttttcttgagtgcttatgattgtaagaagattgatgtgaatgaattttaattatgaattttaaatttttgcaacatatttacttgtgattttggactatactctggcaaatgtctatatttatattttagaaaagtagcttcaaatgacattctagaagtagaaatgagagaaagcattactaattaattcaataacaaattagaattggattaacttatctttttttttatccattcgcatacctctaggatccattgatactcattttatctttccagaaatagggctaattcaatacagtttaaatttgacaataatttttggaactctggagaggtttattcaaatatgacctgtatgaagcaggtccaaatgggccaatatgatagctattcagctcataggaggtgccataccagccaccacgagcaggaagatgtcagaagttacaaaggaaaaaaggtatcagtctagaaaatgacaatggagagacaaataatacaatgacaaataatacaatggagagacaaagaagcataaa

SEQ ID NO: 7900 - DNA, 600 bp, Rattus norvegicus
aggccacaaagtcagtaaaagtgcttagaaagtgttctagtacactctattttgggaattcaatggtagaaaactctaaatttttcacaaaacatggaattcgaaatgggatcaaccctgccatgtaccagagcccagtaaggctccgaagttcaaccattcagtcttcatccatcattctcctcaatacatttctcactgaaaacgatggtgacaaagtagaagaccaagtcagctacatatagtggaatggggcagccctcatctgactgagggaggggatgaggaggacgcaagcaaaccaaggaaaaggcaagagtgaagcactaaggttgtccagtttccttatctaaacaaactcaacgcacgggtatagtagttccgtatggctacaaacaaaagcattccctactctggtattcaaatggaacaaaattaaataagtggatatacttcagtctttaaaaagaaaagaaggggttggggatttagctcagtggtagagagtttgcctagtaagtgcaaggccctgggttcggttctcagctccagaaaaaaaaaaaataaaaaaaaaaaataaataaaaaaaaaaaaaaaaaa

SEQ ID NO: 7901 - DNA, 600 bp, Rattus norvegicus
agagactggtccgctttgcccgagatgccaagcccgccacagagcctacacccagcccacaggctcgtcgcaagctggggctgcacaggcctaacagaactgacactgtgaggaaagatttgtcgatcagcagtgatgactcaagaaggacagagtccacaccagctggaagtgagactaaggacattcgtctatagcagctcagtcaggtgtcagttcatgtaggggagagctgtaggggaccaaagcttgttcaaaggggctgatatcctctgatatgatatcaacggctctcatttggcagggactcaggatactcatcctgtggtcccaagagtgacaggaccccaaagtccccaatcatttgtatgtgtgagttggggaatcgtatctaaggcaacgccacctgactcccatgcaaacagctgccattcctgccaaggtacctaggccgagcttcagcctcttaaatccaagggagaagcaggcccagggagaacacagcagagtccagactagctacctggattagaagtagaatcgcggggttggggatttagctcagcggtagagcgccctgggttcagtccccagctccgg

SEQ ID NO: 7902 - DNA, 600 bp, Rattus norvegicus
caggcgctgcgagcttcaggggccggggcgcccccgcgtggcctgggcactccggccgaggccaccagcccgcctcggccgcggcctggacccactggaccccgcgagctgactgagcatgaatgaccgtggacggggccgggcgtgcgccccgactgactgcagggacgcgatgcgccccaggcggacaggacgccgcgattttgccttcagtttctggtgaagtccaagcccggctccggagcaggcctgcgcctcctagtggactccagcgagggtgtcgcggacgcccgcattccatcccgcgccgcgggcgggaggagcgcagagaccgaggactcttaagggccgtggactgtgagggccgctcctggcgttggaaagcggtccgcggggaggaccccaacctgggactgcccagatgtcccaagacttgacacggctctccacacttctggaggtcgagagggcctctggacatgtgggtgtcccctggtgcccctctcttctttctctcttttttggggggagaaacctcagaatttctatgagacgcccccaggagagggtctcttgggcccctatatctccccctgccac

SEQ ID NO: 7903 - DNA, 600 bp, Rattus norvegicus
taaagatggagacagcagaatataatggccagatcaccggagccagtctatagtgcacagccaacagctgccaacagtgggatgcctcctaggactgtgcaggtgcgagggaagggagtgtagcagtgtcttggtgtgcacaggtgttcagtgtgttagcactctctgtcatctcagacaatagcaactgaagatgagtagaactctttcctgccctaagaaacgttttcacaccttttggtgaagcagattttggaacaatcttttaattcaatttgtatttagaaattctcaaaggcaaaaaacaatactgaagttttataatgtcagagactagtattaaaagaacctaagaacagtatgtgtaaatacatttaaaaaaaaagtccttggaattaatagctactaattaccagggtaatgttagcacttgctaagcacttatcaaaccttaacatcttacctgtggacagggcaaatggaaactgcgctctttgtcaaatgctatgattctgtgacacaggagacaatcgtccacttatagcggccgcttctagctgtgtgcatgtagtgctgcctaatctgtgtggtctgcatgtg

SEQ ID NO: 7904 - DNA, 600 bp, Rattus norvegicus
gaacagaatgtgtccacctttaagtcaccctgaaggcatcaccatagctacagcctcacccaggggtagagaatagtactgtctacttgttgactacctggcagttggtgccagcccctatagaggaaaacagcagtgtgtggccactgtgagaagcatatccctggaaacaggtgaccagagcagagggctaatgcctacctgagtcacacaaaactgaccaggcttgagtgtccagaagagtctatcagaaggccacagcattcagtcctatccacagagagcagcagactaagttgtctccttgccagcttagaaaactgcagtgctggggtacaggtagggtgttcaggaggtccgggccccagtgattagtctaagactgaagcatctggttggctgtggtcccacctagaaaattcttaaagctcttgtcatgtacttcctgggaaggacctaccctgtctcaataatgtctctagctcgttggagtctactgactcaaacatttataaagtgtcctagaaaggcctgactcccctacaaggctgtgtgatccttcaaactcacatatgtgagccaataaaaccttgagactct

SEQ ID NO: 7905 - DNA, 436 bp, Rattus norvegicus; identical to SEQ ID NO: 3809

SEQ ID NO: 7906 - DNA, 600 bp, Rattus norvegicus
ggctgcagctgacattcctgttgagtttccttattcacttcatgtctcagacacagcccccataggacctactgtgtgccactttgtgtccctcagacaccccctcccataggcctactgtgtgccgcttagtccctcagacaccccctcccataggcctactgtgtgccacttagtccctcagacaccccctcccataggcctactgtgtgccatttgtccctcagacaccccctcccataggacctactgtgtaccacttggtttctcagacagccccacccccaaacccccctaaggacctactgcgggccacttagtttcacagcctttcctttttttaatgtatttattccagaccctttctgccacttagcatgtgtataatcagactggaatggggacaatgttgtaattgtactgaaaatgagatgcaaataaaaaaatcaaccaatgtgaaagcccaggaaaatatatcggcatttctggttttgctggatttttttacatttttatataataaaaatgttattttgaaataaagattatgctgactcaaggtggagtataaaacaaaaaaaaaaaaaaaaaaaaaaaaaa

SEQ ID NO: 7907 - DNA, 333 bp, Rattus norvegicus; identical to SEQ ID NO: 3811

SEQ ID NO: 7908 - DNA, 333 bp, Rattus norvegicus; identical to SEQ ID NO: 3812

SEQ ID NO: 7909 - DNA, 600 bp, Rattus norvegicus
tctgccttcccgctgcccgccggtaagaggcttctcgaagcgcccgccgaagaccactccctcggccaccgccgcgtgcccttcgcgctgaccagtgactccaatatgcccgaagattatcctgaccagtttgatgacgtcatggattttattcaagccaccatcaaaagactgaaaaggtcaccagataaacaagcggcggcacttcctcgaagagagaggaaccggcaagctgcagctgccagcccagagaattccagagggaaaggtcgcagaggccagaggggcaaaaatcgggggtgcgtcttaactgcaatacacttaaatgtcactgacttgggtttgggctacgaaaccaaggaggaactgatctttcgatattgtagcggttcctgtgaagcggccgagacaatgtacgacaaaatactaaaaaatctgtctcgaagtagaaggctaacaagtgacaaggtaggccaggcatgttgcaggccggtcgccttcgacgacgacctgtcgtttttagacgacagcctggtttaccatatcctaagaaagcattccgctaaacggtgtggatgtatctgaccctggctccagaga

SEQ ID NO: 7910 - DNA, 600 bp, Rattus norvegicus
acctcctctccctggagacaggcactgccttctgaagggcacattcctcattcccttctgactccaaaacgaggttccagggtggggggtagggtggagagtagaggagccactgctcccatagctggggtcacaagggacagaactctgctcccacacttccctgcctgcggaattccgaaaacaattctatttccaaagctacagaagagcacacagtctgacttgtaggtgggtgactgatgagaatgctgttatggtatcagacgtgtagtgtattgctaggaataagcctgtgaggatttgtactatgaggcatactcctagtagagaaccgaagtttcatcatgatgagatgtttgatgtggggtggggtgttgagggggttttttttgttcaagccaaaggtaactttattgattcatgaatctggaaagttcaagtacaggttttattccagaaaagaactgattctgagcacagtgtagtcagtgctccatcactctgggttgcccaaaaaaaagacttgcacaatgattccagttgacatgcaacatggacagaaacatttcacaaagccacacccatatatgaaggagg

SEQ ID NO: 7911 - DNA, 600 bp, Rattus norvegicus
ccaggatgcccggctgcgactccagaatggctcttcctcagggtggcccatcatgactcgagaggaaggggacctctgtttgcctcgaagcgaactcctctttaggcaaaggcagcgcaatggattggtgcaggcagtactggagaagttagagaatggtccagaaatgaggcagagccaggagttctgtggcagcctgaagcaagcctccccggccatccaggcctgtgtggatgcctgtaacctcatggcgcgtgcccgacaccagcaaagtcactttgacagtgggaatgaggagtggttgctggtgggccgagtgctggaccgagtctgtttcctagccatgctctccctcttcatctgcggcactgctggcatcttcctcatggcccactacaaccaggtgcctgacctgccattccctggagacccccgcccctacttgcctttgccagactgagccaaccaatcactcctgcgccctggagtcagccatgtgggtcatgctgtttatggagctgtattctctgttgatcctgatgggctcctggggagcaatcattcttgggagaagatagaggaataaaggaataggaataa

SEQ ID NO: 7912 - DNA, 600 bp, Rattus norvegicus
aggagtcttgaggaacagttgacttctttcttactggtgcatgggggctgggaaacacaagttgtcagagtgcagctgtgggactcagagatgggaagtgggcaaggccacgccctgcagggctctaccattgtttacaatgtacttggctgcattcgggggtggggggaacttgacagtggctattaggcaaaatgccggttttgtggttcaggtaacagtctttgaccactccctgacgtcattcgtactgtcctcctccttgttgcttccacacttagtcccacctgagctctggtacctctgctgtgccttttttgagtggggtctagccttgtcttccagcctcataatttaacctaagtgcaatgcctgccaccgacaaaggcccgtgaagtattcctcatgtcctgtgctaacgttttctgtataggaacaggcagaaatgtctttagcaccgcggatataactaacttatatttcccttcacgaaggatagaagtaacgggtgtgtcatttccaacggtcatgtataatttttgtaaactgttctctgcaaacaaaaaaaatgtaaatatgcttctaataaaataataaggt

SEQ ID NO: 7913 - DNA, 600 bp, Rattus norvegicus
tggacatcttgccggaagtaagacacaaggacacacaggtgaccatggggccctttgacccttcttgcctgctgcctgcctgccgggattactggacctaccctggctccctcaccaccccaccactggctgagtcagtcacctggattgtgcacaagatgcccattgaggtgtccccgagccagctgtccacattccgtacactcttgttctccgggcgaggtgaggacgaggaggtgatggtgaacaacttccgcccgctccaaccactcaggggccgcaacgttcgctcctccttccaggtccccagggtgggaacaaagtcttgatctcaggatgaggtctgtaaggataggcagagcggatggaaaagggggtgcgcatttccagggtgcgacgcctggattaaaaaaaaaatggctgcagagatggctcaggggttaagagcactgactgctcttccagaggtcctgagttcagttcccagtaaccacatggtggctcacaaccatctgtaatgggatccgatgccctcttctggtgtgtctgaagagagcgacactgcactcatatgcattaaattaataaatctttaaaaaa

SEQ ID NO: 7914 - DNA, 600 bp, Rattus norvegicus
tgagtgggcttgccagtttgcagggccacgctcgccaccacctcgccccctcccctggcgagtttgctccccttggccctgcacgcacacacacacacacacacacacacacacacacacacacacacacacacacacacacatacacacacacacacacacagcaagcttgtggtggtggtggtggctcttttgagttggggagggaaagggtatctggctcatggattgccaacctgaattcccctgtaacttgctagcttggttgttttggtcttttttattattattattactctttttacaccgcctaccccacacataccctggacttgcacaagggtcaaagatctgagcaggatacttcatgtaggacataactcacctttgaacccggccatcaagcgcctgtatattttttttcttcttcttctttagttcatgagctggtgttcattctctgtgtgtgtgtttttttattttgtttggattttcttttttcttctttgtttttgtttattattactaatttttttggagcttgctgtgtttcccagcctctgccctccctccctctgcaccatgttcttgagataaaag

SEQ ID NO: 7915 - DNA, 600 bp, Rattus norvegicus
ccccgcctcctggcagtgcgagccccattcacccgcttcctgcctcccctacccatcacacccggcttttctagagcagagcggatttgagtctggcttgtccgaaagtatacccctctggtcacatctacccctaaagtgaacgttttcgtgcaggcagacaattcaaagactggagaagaggacacgatggcctgggtgtgacccggtggaaagcagctacccggcagaaaccggaaaaaccaaaactaaaatcaaagttccgcgcgtgtacgtgtgcttgcccgctatgtaatctcgtgatctgatatttccgtttgtacatcacctccccacccccaccccggtctctgcggagccagtatacacgtgtcctgtgtttgtaaacccaagtagctagttcatgtgcgtctagtataggtggacatttaccacagcgctgaacctgacgacaaggactcaccatgtcagagtcaatctaatctaagcttccagcatccctcttgcatgggcctttcccagacccaggaggagcatgagcagtatgttcatataataatacatttttgtaaaaagaaaaaaaaaaaaaaaaaaaaaaaa

SEQ ID NO: 7916 - DNA, 1400 bp, Rattus norvegicus
tcccattgaggaactgccgacctcaggaacctccgaccacgatcacaaagaacatgagagtacgaccactgtcaaagcggtgaccagccactccacggacaagaaaacaactcaccccaatagagataacgcaggcggtgaaacgcagaccacagataagaaagatggcttggctgtagtgaccctggtcggaatcataattggcgtcttgttagccattggcttcattggagggatcatcattgtggttatgaggaagatttctggaaggttctcgccctaaagagccaaacagaactggttgttctcccaacacatctgaaaataagagagcttccaccttgccctgttccccatccctcttcctgtggaggaagatgacccatggaatgcccacccacccctctcacagccatggtgacccctccacttgccagcagtaccaaaggaaagatacgggacaagccactggcccctcgaaccatctgcgtttggaaatcaaattttttaatataaatgttatgattgaggaccacatgcatagaaaaatggtgcaaaaaccgagacagtatcatcagctttatcaactgtaaccatgggttggttcttccgggccagtcccagtctgttaagaggcaaaagaatttggaaaatgttacctcacagaggcacgggtctttttgcagttgccaacctgcaaatgcagttgatgcatacatattccagcctagtggggtctgaatcagtgcattgaaagtataaacccaaaatcaggcgtgataggcagcccctcagggagcttcattataccttttcagaagcatccactgccttcagttcccggaagataccttgctttttacaagcctccaaaccctctctaagcctcagatgactcaatgacccagaggtctgtctactccactccccctggtgatggaaagcccaagttgaggaaccatgtcctcacctccctaggcctcaagccttcagatcaaccgcttctttctggacgatggagacctcatcccagatgctcagaaagtttgttggatgtcacaaaatgccagagcctcagccgctgtcgaaccaagaacgaaactcagtccttaagtggaagtgactcctgtgcctgctttaggctaggaaatgagaccaaccagtttctagcacctgccttctgcttcccaggaaagacggagaaaaaaataatcttgtatgttcttaactgcttctaggtggtggatggaaaggtttgatgttaatttccggtcttcgtgacataccacatcttcccatgaggactcggtgttgctggcacaagagctgtagtgtcttggttacctgtgttggtactcaatacagtgtagacatcttttcaaataaaatatgattgtgtg

SEQ ID NO: 7917 - DNA, 1400 bp, Rattus norvegicus
cagttcccgtctggacatgtttgagcacgtcagcctcatgactctggacagtctgcagaaatgtgtcttcagctttgacagcaactgccaggagaagtccagtgaatatattgctgccatcctggagctcagtgccctagtggccaaaaggcaccagcagcctttgctgttcatggacctgctgtacaatctcacccctgatgggatgcgcttccataaggcctgcaacctggtgcatgaattcactgatgccgtcatccgggagcggcgccgcaccctcccagatcagggtttggatgagtttctcaagtctaaggccaagtccaagactttggatttcattgatgtgctgctcctgaccaaggatgaagatggaaaggagctgtcggatgaggacatcagagcagaggccgacaccttcatgtttgagggccatgacaccacagccagtgggctctcctggattctatacaacctggcgaacgacccagagtaccaggagcgctgccggcaggaagttcaggagcttctgagggaccgagatcctgaggagattgaatgggacgacctggcccagctgcccttcctgaccatgtgcatcaaggagagtctgcggctgcaccccccagtcacggtcatctcccgatgctgcacccaggacattctgctcccagatggcaggaccattcccaaaggtatcatctgccttatcagtatctttggaattcatcacaacccgtctgtgtggccggaccctgaggtctacaaccccttccgctttgaccctgaaaacatcaaagacagctcacctctggcatttattcccttctcggcggggcccaggaactgcataggtcagactttcgccatgagcgagatgaaggtggcgctggcactaacactgctgcgcttccgactcctaccggacgacaaggaaccgcgcaggcagccagagctgatcctgcgtgccgagggcggactgtggctgcgggtggagccgctgacggcgggcgcgcagtgacctcacagttggtctggagcacccccaccatcctacctctgaggatcccagaatgaacagaactgtcacccataccagaatcttacggagggccagcagggggcgctgtgaatccagtgagtgggtgagagaggccagttagtgtctgagccaaagacctttgacttcgtctaactgatcgccagcctttatcataaggtgcattcttctccaaccaacctggactattctctggacaataggaagccaaagaaacgtctgagcaagagaccagaatgaaacgcaaatttgagctcttattctcgcagcaaatcccttattcagctccatttccattattttgacctacattcaaatcatctaataaatacattctctc

SEQ ID NO: 7918 - DNA, 1400 bp, Rattus norvegicus
accccattaaggaatcctcgtggccacaaggatttggccaactcaccaagtggggcatgggacagcactacgaactcggaagttatataaggagaagatacgggagattcttgaacaactcctataaacatgaccaggtttatatccgaagcacagatgttgacaggactctgatgagcgctatgacaaacctcgcagccctgtttccccctgaggggatcagcatctggaatcccagactgctctggcagcccatcccagtgcacaccgtgtctctctctgaggatcggttgctatacctgcctttcagggactgtcctcgctttcaagaactcaagagtgagactttaaaatctgaggagttcctgaagaggcttcaaccatataaaagcttcatagacaccttgccatcgctgtcgggattcgaggaccaggatctttttgaaatctggagtaggctttacgaccctttatattgcgagagtgttcacaatttcaccttccgcacctgggccacagaggacgccatgactaagttgaaggagttgtcagaattatctctgttatctctttatggaattcacaagcagaaagagaaatctagactccaggggggcgtcctggtcaatgaaattctcaagaacatgaagcttgcaactcaaccacagaaggccaggaagttgatcatgtattctgcatatgacactactgtgagtggcctgcagatggcgctagagctttataatggacttctacctccctacgcttcctgccacataatggaattgtaccaggataatggggggaccttcgtggagatgtactaccggaatgagacccagaacgagccctacccactcacgctgccgggctgtacccacagctgccctctggagaagtttgcagagctactggaccccgtgatcccccaggactgggccacagagtgtatgggcacaagcaaccaccaagcgtcgctgtaaaagaacaaccagttgccagtgtaatcaggaaaagagttaggtcaaacttgtgggtctgccggggatccatgattagcacaaagaactctattgctgaaggattcgaagattttgcttgagcgggtgagtaaagctgccctgggaatgtctgatgtaaaaacaggtttcagacgaagcctaccaagttagcgtgcaagcatgaaaaagaagacacttatcccaggctaatgggcaaaggacctgattcacctgacaacaacgctcacctgttcccctgccttctctcacgaggcaaaaagatgagacaggaggacacctggaggagttttccatacccagcctagaacgatcagattttatatgtatgtcaaaagacgctgggtagcagaactgaataataaaagcctcttggtgtcc

SEQ ID NO: 7919 - DNA, 600 bp, Rattus norvegicus
ctcctggaatacacagattcaaactatgaggagaagagatacgtcatgggggatgcccccaactttgacagaagccagtggctgagtgagaaattcaatcttggcctggacattcccaatttgccctacttaattgatgggtcacacaaggtcacccagagcaatgccatcctgcgctaccttggccggaagcacaacctgtgtggggagacagaggaggagaggattcgtgtggacactttggagaaccaggtcatggacacccgcatacatctcatgatagtttgctgcagtcctgactttgagaagcagaagccagagttcttgaagtccatcccggagaagatgaaaatctattcagagttcctgggcaagcgaccatggtttgcaggggacaaggtcacctatgtggatttccttgcttatgacattcttgaccagtaccgtatgtttgagcccgagtgcctggacgccttcccaaacctgaaggacttcctggcccgcttcgagggcctgaagaagatctctgcttacatgaagagtagcagctttctcccaagacctgtgtttactaagataccgcagtggggcactgattag

SEQ ID NO: 7920 - DNA, 600 bp, Rattus norvegicus
gttcgtggccaccatgtatcactacctgcagtttgcctactacaaattgaacgatgtgcaccaggctgcccgcagcgctgctagctacatgctctttgaccccaaggacagtgtcatgcagcagaacctggtatattaccgcttccaccgggctcgctggggccttgaagaggaggacttccagccccgggaggaagctgtgctctaccacaaccagacctctgaacttcgggagttgctagacttcacacacatgtaccttcagtcagatgatgagatggaactggaggagacggaatcacttccggagcctgaaaaacctctgtctgatgccgagttcgaaggcgagggcgactatgaggagggcctctatgcggactggtgcaggagccggatgccaagggtgatgaggatgaggctgagccagagcctgaactggcctaagacagtgacatggtgcactcttcaagctcaggacacctggctgggggcaggaactatttattaaaacttaaaatcggggttggggatttagctcagtggtagagcacttgcctagcaaccacaaggccctgggttcggtccctagctccggaattc

SEQ ID NO: 7921 - DNA, 1182 bp, Rattus norvegicus; identical to SEQ ID NO: 3825

SEQ ID NO: 7922 - DNA, 1400 bp, Rattus norvegicus
ccgcagcccaattggtccagcgcttttctatgcgcgggggcggaagacgtggagttctacggcggcggtcgcagcctggagtaccttctaaagcgtgtggacacggaagcaaatctggggcagtacactgatattatcaggtctctgcccttgaagaggcttactgtgcggtccgcgcgggttcctactcagattctattcggaaccctgcgtgtgctcggatattctggcctccgggaactgactcttgaaaacctcgaggtaaccggcaccgcgctttcgccgcttctggatgccaccggacccgatctcaacaccttgagcctccgcaacgtgtcgtgggcaacaacggatacctggctcgcagaactgcagcagtggctaaagcctggactcaaggtactaagtattgcccaagcacactcactcaacttttcttgcaaacaggtcggcgtcttccctgcccttgccaccttagatctgtctgacaaccctgagttgggcgagaaaggactgatctcggccctctgtccgcacaaattcccgaccctccaagttttagcgctgcgcaacgcggggatggagacgaccagcggcgtgtgctctgcgctggccgcagcaagagtgccactgcaggcactggatctcagtcacaattcactgcgggatactgctggcactccgagctgtgactggcccagtcagctaaactcgctcaatctatctttcactgggctggagcacgtacctaaagggctgccagccaagcttagcgtgcttgatctcagttacaacaggctggataggaaacctaggccagaggagctgcctgaagtggggagcctgtcacttacaggaaatccctttttgcactctgaatcccagtcggaggcgtataactctggcgtagtcatagccacagctctttcacccggatcagcgggcttgtcaggaactttggctttgctcctaggacatcgcctctttgtttaaggaacgtttgcatcttcctggtttctgagggtcctggtcaacaaatcctctgctttaaatttattaaaatcttaatccacaatgtaaggaaggacaatcaagatggctcaatgggtaaaagccaccaagcttgactcctgattttgatcctcgggatccacaccaaaggaaagaactctctcctgaaagttgtccatcggtgctcacaaataaatatatttttttttccggagctgaggaccgaacccagggccttgcgctcactaggcaagcgctctaccactgagctaaatccccaaccccacaaataaatatttttaaaaaaaaaaaaaaaaaaaaaaaaaaaaaaaaaaaaaaaaaaaaaaaaaaaaaaaaaaaaaaaaaaaaaaaaaaaaaaaaaaaaaaaa

SEQ ID NO: 7923 - DNA, 1400 bp, Rattus norvegicus
tgatggatatgtacatgcgtcggaagtgccaggattgccggctaaggaagtgcagagagatgggaatgttggctgaatgtttgttaactgaaattcagtgtaaatctaaacggctaaggaaaaatgtgaagcagcatgcggatcagacagtgaatgaggacagcgaagggcgtgacttgcggcaagtgacctccacgaccaagctatgcagggagaaaactgaactcactgtagaccagcagaccctcctggattatattatggactcatacagcaaacagagaatgccacaggagatcacaaataaaatcttaaaagaagaatttagtgcagaagaaaattttctcatattaacagaaatggctaccagtcacgtacagattctcgtagaattcacaaaaagacttccagggtttcagacactggaccacgaagaccagattgctttgctcaaagggtccgcagtcgaggccatgttccttcgttcagcggagattttcaataagaaacttcctgccggacacgcagacctgttggaagaaagaattcgaaagagcggcatctccgatgagtacataaccccgatgtttagtttctataaaagtgtcggggagctgaaaatgacccaggaagagtacgctctgctcacagcaattgtcatcctctctccagacagacaatacataaaggatagagaggcagtggagaagcttcaggagcctctgctcgatgtcctacaaaaactctgcaagatctaccagcccgagaaccctcagcatttcgcctgcctcctgggtcgcctgacagaactccggacattcaaccatcaccacgctgagatgctgatgtcttggagggtgaatgaccacaagttcaccccgctcctctgtgagatctgggatgtgcagtgaaggacacggggagaggctagctccttgtcctcctcagagcagcaacctggtattggacttcccttcttttcatttgtaccaggtctcactcaagaatctcaatgaatatttatgtggcaattatacaattcccacaactgtaaatacaggctccatagaattgcttcccctacactgtattttacaaggcttcgggaaaccccactgacacgccctttttgcctcattaaatcaattgttacttcaattttgtcaactgagctagggaccgcctcgttttatcctccatgcggcaacattatatatatatatattttatcaaatagctgttttctcttccttttttttttttttttttttcggagctggggactgaacccagggccttgcgcttgctaggcaagcgctctaccactgagctaaatccccaacccctattaaatagctgttttcaactgagacaataaactgaacgtaatgccaagagaa

SEQ ID NO: 7924 - DNA, 1400 bp, Rattus norvegicus
acctgcagcccgttggctctggtgcctatggtgcagtgtgctctgcagtagacagccgcactggcaacaaggtggccatcaagaagttgtaccggcccttccagtcggagctgtttgccaagcgcgcctacagagagttgcgcctcctcaaacacatgcgccacgagaacgtcattgggctgctggatgtgttcactcccgatgagactctggatgacttcacagacttctacctggtgatgccattcatgggcactgacctgggcaagctcatgaagcacgagactctgagtgaagacagaatccagtttcttgtgtatcagatgctgaaggggctgaagtatatccacgctgccggcgtcatccacagggacttgaaacctggaaacctggctgtgaacgaggactgtgagctgaagatcctagattttggccttgccaggcaggcggacagtgagatgacaggatatgtggtaacccggtggtatcgggcaccagaggtcatcttgaattggatgcgttacacacagacagtggacatttggtctgttggctgcatcatggcagagatgattactggaaagatcctgttcaaaggcaatgaccacctggaccagctgaaggagatcatgaaagtcacagggacaccccctcctgagtttgtacagaagctacagagtgctgaggccaagaactacatggaaggcctccctgagttggaaaagaaggattttgcttctgtcctgaccaatgcaagccctcaggccgtgaatctcctggaaaagatgctggtgttggatgcggaacagcgggtgacagcagctgaggcattagcccacccatactttgagtcccttcgggacactgaggatgagcccaaggcccagaaatatgatgactcctttgatgacgtagaccgcacccttgaggaatggaagcgtgttacgtataaggaagtgctcagcttcaagcctcccaggcagctaggagccagagttccaaaggagacagctctgtgaagacctccgggtggtttggggggtatcctaaggaggctgtctgggagcttcgcagacaccttggcttcccttctccggaagaggaatcctggttggcaccagtgcctggtgcttttatcccaagtcatccacctggaaaggctgtgtagaccccttgaatcacgaaccctccatctccaagccagttcttcagattttgagcgcccgagatgaccctggcagaacatctaagctttttttttttcttttttctttttttcggagctggggaccgaacccagggccttgcgcttgctaggcaagcgctctactactgagctaaatccccaaccccacatctaagctttctgtccaagacccctacccaacatgggactagcc

SEQ ID NO: 7925 - DNA, 600 bp, Rattus norvegicus
gaccctgagtaccgtgtgaggaaattcttggccctcatgagagaagaaggcgctagtcccctggactttgactgaaaactggactgtttacaacagtgaccaagggaaacgaccaaggtgatgatggcctgggatcgtcactcctcatactcaagacactggactaagtgaagtgtccacctccctctccacactcactctgcatgactagtgcagtaaactgcctcgtgcttccgagatgtcctatgttcctggactgctgtgcttccctaccatgctggctaagatgattcccgcttacgtgggaggcacgccacgcctgtgcaccctgcccacacctcgctccccgccacgcccacccttggaaaacacttgacctacccgaaggtaggcttctacacgtgaccaagagcaaagatagaggaggttccaagggattcgcttagcactccccgtgttaacaaccatgtggcccacagaatgggttattatctttgcctaaagaagcaggatttttaatatctacgatgctattctcaatcattttcagagatatttccaagttgcaatcaggagaacttttctaatcggaagtcagat

SEQ ID NO: 7926 - DNA, 195 bp, Rattus norvegicus; identical to SEQ ID NO: 3830

SEQ ID NO: 7927 - DNA, 600 bp, Rattus norvegicus
gttgtaagaactgctttactggatgctgctggggtggcccccctgctaactacagccgaagctgtagtgacagaaattcctaaagaagagaaggaccctggaatgggtgcaatgggtggaatgggagggggtatgggaggtggcatgttctaactcctagaatagtgctttgcccttatcaatgaactgtggcaggaagctcaaggcaggttcctcaccaataacttcagagaagtcacctgaagaaaatgactgaagagaaggctggctgatcactgtaaccatcagttactggtttcctttgacaatacataatggtttactgctgtcattgtccatgcctacagataatttattttgtatttttgaataaagacatttgtacattcctgatgctgggtgcaagagccagtgtcctgctttcaacttaaatcactgaggcatctctactgttctgttagcatcaggactgtagcgctgtgtcaccacatgagaagttcagaagcagcctttctgtggagggtgagaatgattgtgtacagagtagagaagtatccaattatgtgacaacctttgtgtaataaaattttgtttaaagtt

SEQ ID NO: 7928 - DNA, 1400 bp, Rattus norvegicus
ccttcttcagtgagacaggagctggcaagcacgtgccccgggcggtgttcgtagacctggaacccacagttattgatgaagttcgcactggcacctaccgccagctcttccacccagagcagctcatcacaggcaaggaagatgctgccaataactatgcccgtggccactacaccattggcaaggagatcattgaccttgtcttggacagaattcgcaagctggctgaccagtgcacgggtctccagggcttcttggttttccacagctttggtgggggaactggctctgggttcacctccctgctgatggagaggctctctgtcgactacggaaagaagtccaagctggagttctccatttacccagccccccaggtttccactgctgtggttgagccctacaattccatcctcaccacccacaccaccctggagcactctgattgtgccttcatggtagacaatgaggccatctatgacatctgtcgtagaaacctcgacattgagcgcccaacctacactaacttaaacaggttgataggtcaaattgtgtcttccatcactgcttccctcagatttgatggggccctgaatgttgatctgacagaattccagaccaacctggtgccctaccctcgcatccacttccctctggccacttatgcccctgtcatctctgctgagaaagcctaccatgaacagctttctgtagcagagatcaccaatgcctgctttgagccagccaaccagatggtgaaatgtgaccctcgccatggtaaatacatggcttgctgcctgctgtaccgtggtgatgtggtccccaaagatgtcaatgctgccattgccaccatcaagaccaagcgtaccatccagtttgtggactggtgccccactggcttcaaggttggcattaattaccagcctcccactgtggtccctggtggcgacctggccaaggtccagagagctgtgtgtatgctgagcaacaccacagccattgctgaggcctgggctcgcctggatcacaagtttgatctgatgtatgccaagcgtgcctttgtgcactggtacgtgggtgagggcatggaggagggagagttctctgaggcccgtgaggacatggctgccctagagaaggattatgaggaggttggtgtggattctgtggagggtgagggtgaggaagaaggagaggaatactaaattaaatgtcacaaggtgctgctttcacagggatgtttattctggtccaacatagaaagttgtgggctgatcagttaatttgtatgtggcaatgtgtgctttcatacagttactgactttaagtgtgaatgatttgtcagagacccgagccgtccacttcactgatgggttttaaataaaatactccctgtctta

SEQ ID NO: 7929 - DNA, 1400 bp, Rattus norvegicus
aggacggccgaagtaccccacacaggtcaaaggagccctggaacacggaatcacaagtgatgacatcttctggctgaaggagtcccctgggaaaacgttggtggttggagccagttatgtggccctggagtgtgccggcttcctcactggtattggcctggataccacggtcatgatgcgcagcgtgcccctccgaggctttgaccagcaaatggcgtctttggtcacagagcacatggagtctcatggcacccggttcctgaaaggctgtgtcccctccctcatcagaaaactcccgactaaccaactgcaggtcacttgggaggatctcgcttctggcaaggaggacgtgggcacctttgacactgtcctgtgggccatagggcgagttccagagaccagaaatttgaatctggagaaggctggcgttaataccaaccctaagaatcagaagatcattgtggatgcccaggaggccacctctgtcccccacatctatgccattggagatgttgctgaggggcggcctgagctgacacccacagctatcaaggcaggaaagcttctggctcagcggctctttgggaaatcctcaaccttaatgaattacagcaacgtccccacaactgtctttacaccactggagtatggctgtgtgggactgtctgaggaggaggctgtggctctccacggccaggagcatatagaggtttaccatgcatattacaagcccctagagttcacagtggcagatcgggatgcatcacagtgctacataaagatggtatgcatgagggagcccccacaactggtactgggcctgcacttccttggccccaacgctggagaagtcacacaaggatttgctcttgggatccagtgtggggcttcatacgcacaggtgatgcagacagtagggatccaccccacctgctctgaggaggtggttaagctgcacatctccaagcgctctggcctggatcctactgtgaccggctgctgaggttaagttaccatccctgctgagctaaggatacacactgtgcctgccatgtgcccagtacaaggctctcagacacctggacctagctattgtcatgggagccactgtgccagcatgattccaggcacatggtgaagctacctagaacaggactggaaggccttgctgcctcgcagagatctgagaagatgtggatggagcattgtgtatctgaatagatggtgtgtgtcctgcagggatgactgccccctctaacctctggccagccttcacacactgccagtgtcagatgatgacggcctgtgcagaaacccccacgtgggctgccaggtttgaacccctggcatttctggagtgctaataaagagcgtgttttagtaaaaaaaaaaaaaaaaaa

SEQ ID NO: 7930 - DNA, 600 bp, Rattus norvegicus
ggttgtaagttctacaaatggagagctaaacacggatgaccccacggcgggacggtcaaatgcacccattacagcccctacggaagtagaagtgatggatgaaaccaagtgctgctgctttttcaaacgaaggaaaaggaaaaccatacaacgtcacaagtgactggacacagacagagcctggggagttacttacatgtttatatgctgtctcgtgattaaaatcatctctagagtgaccacatatattttcaaggactcactcttgaaacaaaaaagtcatactttcatatttcattttgtggttgtcttatattcattcccccaccccggaattccttagacccttctgcccctgctagcgcttccaccagctctcctccgctccccgctcctgcagcccagcctccttgtgtgcaagaactgtcagggagatctgctggcagttccagtccggaagccggagaagactctgatcatgaggatggaaactattgccctcctgtcaagcgcgagcggacatcatctctaacgcattcagaggagaagagcagcggcttccggctgaagcccccaacgcttatccacgctgctgttccg

SEQ ID NO: 7931 - DNA, 600 bp, Rattus norvegicus
ctacagctctcggcggcatgggctgctggtgggcattgttcgctgtgctcacctggctgcaatggatgttaacggctactctgacccttatgtgaagacgtacttgagaccagacgtggataagaaatccaagcataagacgtgtgtaaagaagaagacgctgaacccggaatttaatgaggaattcttttatgagatggaactctccactctggctaccaagaccctggaagtcacagtctgggactacgacattggcaaatccaatgacttcataggtggtgtgtctctggggccaggagcccggggagaggcccagaaacactggagagactgtctacatcagccggacacagcagtggagcgctggcataccctgaccagcgagctgcccccagcagcaggggcgttgccgttggcctgaacagactgcagctgcccagcacaggccctctgcggccgggtccagtacccaaccttcgcacgagtgtgttgcacgtttacatgggtgggacgccctgccccacactacctgtcttatttttgtgagtttctgtgaccgtgggtctatcttcttgtgagggattgtggagagctata

SEQ ID NO: 7932 - DNA, 600 bp, Rattus norvegicus
aactataccgtcagtgtgtcaggggaaggatgtgtgtatgctcagaccacgctgagatacaacatgcccttggagaagcagcagcctgcatttgctctaaaggtgcagacagtacccctgacttgtaacaaccccaaaggccagaacagcttccagatctcactagaaatcagttacacggggagccgtccagcctccaacatggtgattgctgatgtgaagatgctctctggcttcatcccattgaaaccaacagtgaagaagcttgaaagattagagcacgtaagcagaacagaagtgaccaccaacaacgtcctgttatatttggaccaggtaaccaatcagacactgtccttctccttcatcattcaacaagacatcccagtaaagaacctgcagcctgccattgtgaaagtgtatgactactatgagacagatgaagtggcttttgctgaatacagcagcccctgcagctcagacaaacaaaatgtttgaaactcatatctgtggacaaggcattgctggaatccccaaaccagagaactttcaaggtggtgatttgtgtttgtctctgaaatacaaatactgaacaatcttggt

SEQ ID NO: 7933 - DNA, 600 bp, Rattus norvegicus
ttgtttaatcactgtcccctgaaatattactaagggcaacagagataaattagtagtagatgtagtttttatataaataaaaaaatcaaatatcttcattttgcaataggaattaatgtgtcttagcaatagtagtcgataggaagctgtttgtgtggtcgtgcatattgccagctgtggtgtgggcagagggaaggaagcacaagtgtgttttagagtttacttctctatggtgctgaagattgaaaccagggccttgcacacactagacaagccctctaccacccggctgcactcctggcccttaggtggatttcagattagatattcccagggcgttttcaggagctgtaaatagagtgaacaaaatcttgtatagagttcaggaagtttgttcttttctaaccttttttgttaggttgaggaaccactttacctacttactgtgatataagccaatgtgattagtggaaatcttaattttataaaataaatattagaagaagtatgtcggggttggggatttagctcagtggtagagcgcttgcctaggaagcgcaaggccctgggttcggtccccagctccgaaaaaaaagaacc

SEQ ID NO: 7934 - DNA, 600 bp, Rattus norvegicus
tgtcaggctgtctaggcactcttggacaagaagattcagaaatagagtaactgtcagtgaaatattatttaaatgtagaaatccgaaaatcctgtccccttaaatatcagaaaccaaaagtcttttttaatactttctgcaaatactgcctagtattagccatacagactgtgtttctgataataggagcccagtctcctagcttcctgacatttgtgcaaggcccctagttaaatcccactaccacaaagcaatataaaaccatgcaaagttagtgcatagttaaaggaaacaggcagataccaacagtctcttaaaaggaaatctattctttgatctcatttgtgtttatgagactgggtagctgggggcttgggggcgggctgggagtcacagcccttgggcatctttgctaatccacttgaactttgttattgatgccgagtcctctctcttcctcagtagccactgtctttgctcattgcttttcccttttttaactcctttagatcaaaaccttgctttggccatagggtctttaaatactttcaaagcttgatctgctgtgaccttcactgttgaacctgattggacagggaa

SEQ ID NO: 7935 - DNA, 600 bp, Rattus norvegicus
ttctaatgctgggtttgagaaaacaagcaaccaataaaagccagacactagcacctctgcctgccagcatcttctctgccaaccaggtacataccagacagcggctgtcgctctgttaacagccagtgcccgactgcagttcagtcatggacttctcatctggcagtgctccaggacgtttgccatttgggaggcctgggtacactgttttcttagcagtacttggaatagtcattgccatgctgggagtgagctgcccacacccaggttttgtggaaaacggtcatgccagctgatgggtcagttttccaggccttttggagtagaagctgtgtattcctgcctcaaagcctacagagcttatcctgcataaccaggatctccccaagaagtcttgttagcctggtctgtctccactgactacacctgccacagcactctaaaaacaaactccacacactcccctccttcctgggacagtacagagtcctcagaaacagtggcatgttgcataccaatggacatcctctttgatgacactccttgcccacttcctagcaccttctatttccttgtattcatgctaaacaccataaaaga

SEQ ID NO: 7936 - DNA, 1400 bp, Rattus norvegicus
tggactacaccggtcacatcacctggacccctccagccatctttaaaagctactgtgagatcattgtcacccactttcccttcgatgagcagaactgcagcatgaagctgggcacttggacctatgacggctctgtggtggccatcaatccggaaagtgaccagcccgacctgagtaacttcatggagagcggagagtgggtgatcaaggaagcccggggctggaagcactgggtgttttactcctgctgccccaacaccccttatctggacatcacctaccacttcgtcatgcagcgtctgcctctctacttcattgtcaacgtcatcattccctgcctgctcttctccttcttaaccagtctggtgttctacctgcccacagactcaggggagaagatgacgctgagcatctctgtcttactgtccctgactgtgttccttctcgtcattgtggagctgatcccttccacctctagcgctgtacccctgatcgggaagtacatgttgtttaccatggtctttgtcattgcgtccataataatcaccgtcattgtcatcaacacacaccaccgttcgcccagcacccacatcatgcccgagtgggtgcggaaggtttttatcgacactatcccaaacatcatgtttttctccacaatgaaaagaccatccagagataaacaagaaaaaaggattttcacagaagacatagatatctctgacatctctgggaagccggggcctccacctatgggctttcattctccactgatcaagcaccctgaggtgaaaagcgccattgagggtgtgaagtacattgcagagaccatgaagtcagaccaggagtctaacaatgcgtctgaggagtggaagtatgtcgccatggtgatggaccacatcctcctcggagtctttatgctggtgtgtctcatcgggacgctggctgtgtttgcaggtcggctcattgagctacatcaacaaggatgagcagaagctgaactaagcctccctctgccccagctgcagccaccaccaggaaagatagaagagaggaaggcctgtctacttgaatcctttcgcgcttaccaagcacacagtgtgctacatgtcctgttaatgatagtggtctctgctcacactgctatgtccttaaagtatctcccctttgcttctgcttttaacaccatgggtctccttaaagagggaaccctttgtagtaaataaaagtgagtcctcgggctggagagatggctcagcggttaagagcacccgactgctcttccagaggtcatgagttcaattcccagcaacacatggtggctcacaaccatctataaagagatctgatgccctcttctggtgtatctgaagacagctacagtgtacttatatataataaaa

SEQ ID NO: 7937 - DNA, 600 bp, Rattus norvegicus
accaagaatattctgggcttcttgttccctttccttatcattctcaccagctatacccttatttggaaagctctaaagaaggcttatgaaattcaaaagaacaaaccaagaaacgatgacatctttaggataattatggcgattgtgcttttcttcttcttttcctgggtcccccaccaaatattcactttcctggatgtgctgattcagctgggcgtcatccatgactgtaaaatttctgacatcgtggacactgccatgcccatcaccatctgcatagcgtattttaacaactgcctgaaccctctgttctacggctttctggggaagaaatttaaaaagtatttcctccagctcctgaaatatattcccccaaaggccaagtcccactcaagcctgtctacgaaaatgagcacgctttcttaccggccttcggataacatgagctcatcggccaaaaagcctgcgtcttgttttgaggtggagtgacaggttcaaagcacactggcaatgtaatgccctgacagaagccagggagcctctgactaaatggcttacgaccaaaggaccattcaccctgcctcaggatctaagcagaaa

SEQ ID NO: 7938 - DNA, 600 bp, Rattus norvegicus
acacacaacagcaacaataacaaagcaacaactacgcatgctcagtattgggacactgtcaagattaagtcataccagcaaaacctgcagctgtgtcaccttcttctgtcaacatacagactgatcataatcatcccttctttacacacacacacacacacacacacacacacacacacacaaatggatttaacacaccattaatcatttctagcaaaatatatgtttggctgaaactatgtgaaatgggtgtaatatagggtttgtcgaatgcttttgaaagctctgttttggagacaatactcttgtggaaaacgtgaagatcttctaagtctggctcttgttgatcaccatctccctgtggtttgtcatcagtacaactctttgttgcttaatctagagctatgcacaaccaaattgctgagatgtttagatgctgataaagaaacctttaaaaaattatataaatgaatgaaatatagataaactgtgagataaatatcattacagcatgtatattaaatccctcctgtctcctctgttggtttgtgaagtgatttgacattttgtagctagtttaaaattattaaaaattataga

SEQ ID NO: 7939 - DNA, 1400 bp, Rattus norvegicus
cctttccttatcattctcaccagctatactcttatttggaaagccctaaagaaggcttataaaattcagaagaacacgccaagaaatgatgacatctttaggataattatggcgattgtgcttttcttcttcttttcctgggttccccaccaaatattcacttttctggatgtgctcattcagctgggcattatccgtgactgtgaaattgctgacattgtggacaccgctatgcccatcaccatctgcatagcttattttaacaattgcctgaatcctctgttttatggctttctggggaaaaaatttaaaaaatatttcctccagcttctgaaatacattcccccaacggccaagtcacatgcaggcttgtcaacaaaaatgagcactctttcctaccgcccttcagataacatgagttcatctgccaaaaagtctgcatctttttttgaagtggagtgagagggttcaaagcctgcaagtgaagtgatttcctgacagcagaagccagaggaccatttgggctaagcagctcactcactaccgaaggagtgttcaacctccagcaatcctttcagggttgaagcagagaaagcactcagtgtacacattttcaaaagtgggaaacaaaagcttttttcccctttaaaacaaattggagcaaagccactgttaaaagcctttttttgttgactgaataactgctttaaggacaatgtcagaaattgagtggctgtatggatttgggagttagggaggaggtgtactagcagaaacgtaatgtctccagtcccctctcaattctgttacttttgatttccacttgaaggtatttagaagctattaaatctgtagacaatcaaaaggagatgggaggtcaagagtttctaagggtccaggaagctacccatctgtttagttactagtgactatgacaccattgttcctgacacaacacagttaagacttgctagacagtagtcatcaagtttcaaaatgctttgtgaagttcagccagtgtcttaagaattcagagccatgtgccaaaacagtaccacagaacagcttgtctgaataatgtcttactgtagttgcaaagccaaactgcttgtcaagctgtgattctgtcccagatagttgtgtcttcctagttggatcagtttaatttcatatctaagaaatgtataatttcatatctaagaaatgtatatgaaatgtatatgaaatgtataatttcatatctaagaaatgttaagcagatttatcataaagtatgttttatggttctaaaaatgtatattttatatatgttatgtatatctatatctctaagctgttgtttgattgaagttgtagcaaagttgtatttatcttgaaataaaaatttatcataatataaa

SEQ ID NO: 7940 - DNA, 600 bp, Rattus norvegicus
gagtttcagtcccgtcagcccgaggagagggaggggggttctgcagacttcagcccacctgaggcaaaagagcagtcactggcagtagttagggggaggccattgtgagacattggttgcccacagtgttactgtgtccgggctgtagttagggaccgtgcagtgctgggtgggggcgggaaatggcctttccacttgtctgatgcaatcttcatttattccttttttttttttttttaaatcactgattttctccatctattctctcggtgccattacgttctgtgggcttcctttgttctcccctgattcacattttaatttcctttctcactcgtacatctcgtttcatcgtctccccccccctccctccttccattccacatcgccctcctcccacactcccgattgtgtttcttcctccagaaagaggagcgcgtctctgaactgcgccatcagctccagtctcggcagcaactccgctcacggcgccaccccccaacacccccagatccctctggaggccttcccaggggaccctctgagccccctgaccggcttagctgtgatgggagtcgagtacatttgctttacaagtga

SEQ ID NO: 7941 - DNA, 600 bp, Rattus norvegicus
agcagctgatgttatctatcccagcctagagcacagacagaagagaatcactgtccatgggtcaaattttaactgcaatgactgaaagacttaattttctattttactttaaaagcctttctgattcttattcagcaacaaatccaccagcccaccaggattatttacatgatacaaattaatcccatttacatgctacattgcgacacatccctacatagtgggggtatttaaaagggataggttttttttcatgggctgttagaatatttcacagactatacaacatgtggggtttatgtcaactgactgccatgaatagtgttttaatataattcagaaaatgcctataataattatcttgcaagcataatatacaatccactttaacaatatggtggaacgtttgtctatcttatcttgccgagtcatgccccacagataaatgaggaaagtcaataaaaacagtaagcaaatatataaacaaaaagaggggctttgatgtattaaaggagctcaaggcaggaagccatacaatttcccctatatagaccaacagcacagaatattagggaggagaataataaaactggcggccgc

SEQ ID NO: 7942 - DNA, 600 bp, Rattus norvegicus
actgtaccctcctgggtgctgcttctccttcctgcccaccctaggggatgcttggatatgtgcaatgcagccctactctgggctgccctggtgctccactcttctggttcttcaacatctatgaccttttattggcttcagcactctcagagttaatagagactggcttaggagggcactggtggccctgttaacagcctggcatggggcagtggggtacaggtgtgccaaggtggaaatcagagacacctggtttcaccctttctgatgcccagatacctgcaccaccttaactgttgctttgtatgccccttcgctcgtttccttcaaccttttcagttttccactccactgcatttcctgcccaaaggactcgggttgtctgacatcgctgcatgatgcatctcagcccgcctagtgatggttcccctcctcactctgtgcagtcatgcccagtcacttcctccactggatggaggagaaccaagtcagtggcgtggaaaactgaaaaggttgaaggaaacgagcgaagggcatacaaaagcaacagttaaggtggtgcaggtatctgggcagcagaaagggtgaaaccaggtggca

SEQ ID NO: 7943 - DNA, 710 bp, Rattus norvegicus; identical to SEQ ID NO: 3847

SEQ ID NO: 7944 - DNA, 600 bp, Rattus norvegicus
gaatatgattatttattcaagttactcctgattggcgactctggggttggaaagtcttgccttctccttaggtttgcggatgacacgtatacggaaagctacatcagcacgattggtgtggatttcaagatacggactatagagctagacgggaaaacaatcaagcttcagatatgggacacagcaggccaggaacggtttcgaacaatcacctccagttattacagaggagcccatggaatcatagttgtgtatgatgtgacagaccaggagtccttcaataacgtgaaacagtggctgcaggagatcgatcgctacgccagcgaaaatgtcaacaagttgttggtagggaacaaatgtgacctgaccacaaagaaagtagtagactacacaacagccaaggaatttgcagattcccttggaattccatttttggaaaccagtgctaagaacgaaaagaatgtagaacagtctttcatgaccatggcagcggagattaaaaagcggatgggtcctggagcaacagctggaggtgcggagaagtccaatgttaaaatccagagcactccagtcaagcagtcaggtggaggctgctgctaa

SEQ ID NO: 7945 - DNA, 366 bp, Rattus norvegicus; identical to SEQ ID NO: 3849

SEQ ID NO: 7946 - DNA, 1400 bp, Rattus norvegicus
taccttcctttgtatgttgcacgtcttcatcaattagatgctgaaaaggagcggatgaaaagacttaatgaaattgttgatgctgccaatgctgttatttctcacatcgatcagaccgctctcgctgtttacattgccatgaagactgaccccaggcctgatgcagctactataaaaaatgatatggacaagcagaaatctaccctggtagatgccctctgcaggaaaggatgtgctctggcagaccaccttcttcatgcacagccccacgatggggcagcagctggagatgcagaagcaaaagaagaggaaggagaaagtaccttggaatctctatcagaaacctattgggaaactacaaagtggacagatctttttgacactaaggttttgacatttgcatacaagcatgcattagtaaataagatgtacgggagaggccttaagtttgcaaccaaactcgtagaagaaaaaccaacaaaagaaaactggaaaaattgtattcaactgatgaaattactcggatggacccattgtgcgtcttttactgaaaactggctccccatcatgtatcctcctgattattgtgtattctaaaatgggaaccaaaacgttaaatttcgaaagcagaaaattttatagtgaacaaatatatgaacaaatgtgtggcatttctagtctaactaatgcatgtcttcatccactatcgaatactgatcattaaaactctatgtatttatcagagaactcaatggtgtgtggcttcatacatgtaatgtagacagacctctgacatcatgctgctttcctgctgcctcccacacttggctagggagggcagagcctgcctgccagccccaacctgggtggatgcagctgctcactgcaggagaggttttcatctcttaatttttaactgtaaaacgtcatccagtttttattttataaatcaaaaaggttaaaacatgctaaatttttccaattatatagaggccttaaaaatgctacattgggtgtagctaaattatttatttgactaaaaattacgagaacataatttccagacttctaaaaataaattcaattaatgggtatggtggggaggtataaatacatggcaactgggaaaagaaacgtgttaatgtaatcttcactccggagtcacaacaagcaagttgtttttacagcatcctcaagtacacagcatcagaataagttaaaatttcatgtgttggtgccagacagttgaatctatctggttttgtaaagatatacacagtatgtttataacattgaaatcatgtaaaatacatgaataaatgtgcaaaacaacaggcacagcacaccatatgcactctgatacctgttttttataaataaaagtaaatattgaagctaaa

SEQ ID NO: 7947 - DNA, 1208 bp, Rattus norvegicus; identical to SEQ ID NO: 3851

SEQ ID NO: 7948 - DNA, 1400 bp, Rattus norvegicus
gcaccaccaccaggacctggagatcattgtcatcttggaaggtgtggtagaaaccacaggcattaccacccaggcccgcacctcctatctggctgacgagattctgtgggggcagcgttttgtccccatcgtggccgaggaggatggccgctattctgtggactactccaaattcgggaacaccgttaaagtgcccacaccactctgcacagcccgccagcttgatgaggaccgcagcctgctggatgccctgaccctcgcctcgtcgcgagggcccctgcgcaagcgcagtgtggctgtggcaaaggccaagcccaagtttagcatctctccggattccttgtcctgagttgcggtccctcaggcccccactcacttaggtgggcacatggaaagtgaagtacggtatgtagagtgccggggtgcgagcccctcggccagatgagggtctggcgtgggacaagaccctccttggctcagcctccccgccgctgtgtgcctggggtgttacaagatacttgtcactatgctatttctggccccagcaggagcctgtaccgggttatttttgttcctgctcctcccgggctcagctcaggactggcttaccctatgtccctgcccaacgatggggaggctatagaaggttcaggggtcctaaagctaaggtctggaaggaagccagtcttggtcctccacgattcatcctgccacaagcaggcaggtaattgggcaaaagcagcccccaagttgggagcctattgctgtttctgtagccactaagaaatgcctggccaggccccagccctgttcgtgccacgctaaagaatcctgccagccagggaggaggtgggtgtcagagcgtgggagctgaggggcccacacagccacgacaggataagtttacctaggctctcctccatatggccggcttatgagagaaagggggacaagaaggaggcaaatgattggagaccttgatggtcccgttcagacgcgtgtctctgtcctctacccttgactccagccttctgcagagagagtggggactgctgccctgttttgtcccccggagaggctgggaagtggggcattgggcaaacactgagatacctggctgagaggccgaaaagggtcctgtgagtgccatacaagatctacttcaggcaaaactctgctcttggctccccatgggcagctgtcactttgtctgggggacactggtgggtagcaatgccttgtctaggttgtcagaaaaagaaatattggaaagttcaccctggtgagggaaagggaggtctccaaggcaaaaggcccttgggcttgacctgagcccggactctcagagcagtgtagtgtcctcgcccagaaccccactggcccgtcgtcaataaagcctc

SEQ ID NO: 7949 - DNA, 1178 bp, Rattus norvegicus; identical to SEQ ID NO: 3853

SEQ ID NO: 7950 - DNA, 1400 bp, Rattus norvegicus
gcgatcaagtaatgaatgcatcaagccatcaataccagcgagagccagtaacaccggctagagccatcaacaccggcttccaccatgtcctgctcccaaccatttatcaaccttttttttttttttatctgtctctatcgcttggcctgagttgggagtggagtctctgtggggtgctggccacgcacccacagagaaataaaaggaattgagaaggccgctacctggcctgacttctggggacagtggctggtccccagaagttctgaggagtggagggggcgtggggcagtgtcccctcaggtgttaggaaggtgctcggaggccacaaagatggggccccagctggccctgccagttgggggggaaggggatgtagatgtaagactagagaggttccatcaggcgggagcaagtggctgccttctgagcacttgggggaggtcctccccgtgcccctcagtgtcatcttgcccactcctcagcaccccatcttaccctcaggaggtctggagctctacagacctcctgggggcaaggtggggtgaggcctggagctggggaagcgaggaggctttaaagccttcagagccaggagaactgtgtacatggggttgtctgggccctggggcccgagggtctggtgagccgtagcagccactccacggtgcctaggactgcggcggggaacagggcggctggaggtttacctcacccccacttctgcttccagtgcagtccccctgcccaacagtcctactagtaatctagaggcctgaggcttctgggcccaggtgacaggactggcaccaccctgggggcggtgtgtgtcagccagccatggcacagagggttctcagcaagtgcctaaagaatgggccatttggaacattggacagaaactcaaagagtaaattgttataattggagaatatgaattggcctggtacccaaaatatctcgaggcaccctaaattacctgcccatttgactggacatccacccagtgttaatatgcctcgtgggatgggtgttttcaggggcatttgctgaccatcctctgtgtccccagatttgcagttctccccatcataggtcaccctgatgcaggcacctccctggcctcccatgcctagtgtggccctccatcttgttttgtctcttccctactgtcttcggtgggatcccctcttgggtcccccaatttgtcatcctgtgaagacttcccacgcgtcgaatgccatatgtcacctgtgccactgcccatgtcatccagcagtggccccgggtatttgccccaactcagtccttttaacatgcattttctggcaaaatccaaagcttgggttttgtttttaacctgttaacgcttgcaaacctaataaagcattcaaaatact

SEQ ID NO: 7951 - DNA, 600 bp, Rattus norvegicus
attccacaaaaggttctttggaaatttgatggcaaaaccccagcaacattaggacccaataccagagtctacaagtggctcccgcagaatgacctcctgggtcacccaaaaaccaaagcctttgtaactcatggtggagccaatggcctctatgaggcaatctatcatggaatccctatgattggcattcctctgtttggagatcaacctgataatattgcccacatggtggccaaaggagcagctgtttcattgaatatcaggacaatgtcaaagttagattttctcagtgcactggaggaagtcatagacaatccgttctataaaaaaaatgttatgttgttgtcaaccattcaccatgaccagcctatgaagcccctggacagagctgtcttctggattgagtttatcatgcgccacaaaggggccaagcacctgagaccacttggacataaccttccctggtaccagtaccactctctggatgtgattggattcctgctcacctgttttgcagtcattgcagctcttactgtaaaatgtctcttgttcatgtaccgattctttgtaaagaaggaaaagaaaatgaagaatgagtag

SEQ ID NO: 7952 - DNA, 1400 bp, Rattus norvegicus
ggctactaaaggactgggcattagttttagccgtggaaatgtatggagagccacaagacatttcacagtcaataccctgaggagtttgggcatggggaaacggaccattgagatcaaagtgcaagaggaagcagagtggctagtgatggaactgaagaaaaccaaaggctcaccctgtgatcccaaattcatcataggatgtgctccctgcaatgtcatctgctccattatcttccagaatcgtttcgattataaagataaggattttcttagcttgatagaaaacgtgaatgagtacattaaaattgtgagcactcctgcatttcaggttttcaacgcattccctattcttctggattattgtccaggaaatcataagacacattcaaaacattttgctgctattaagagttaccttttgaagaaaataaaagaacatgaagaatcgttggatgtttcaaatcctcgggacttcattgattacttcctaattcaaagatgtcaggaaaatggcaatcagcagatgaactatacacaagaacatctggcaatcctggtgactaatttgtttattggtggaacagagacatcaagcttaacgctgagatttgcacttttgctcttgatgaagtacccacacatcacagataaagtccaggaagagattggccaagtgattgggagacaccgcagcccctgtatgttggacaggatccacatgccctacacaaatgccatgattcatgaggttcagagatatattgaccttgccccaaatggtttgttgcatgaagtgacctgtgacactaaattcagagactacttcatacccaagggaacagcagtactaacatcacttacatcagtgctgcatgcacgtaaggaattccccaacccagagatgtttgacccaggtcactttctagatgagaatggaaactttaagaaaagtgactacttcatgcctttctcagcaggaaaacggaaatgtgtgggagagggccttgccagtatggagctgtttttgttcctgaccaccattttacagaatttcaaactgaaatctctgtctgatccaaaggacatcgatataaactcaatacgttctgagttttcatcaattcctccaactttccagctgtgcttcattcctgtctaatgaagacctaaaagcagaaatgaagatgaggaaacattctattgtgatgtcttctgacatcacccacagaaatttctatttacaactgtcctagaaataccactatgtactttcttcttcccacagcttatgtcttctaattgcccaaagataacaattctacattatacagtttctgaagttaatgtaaaagattctgagaaaaaaaagtcaattcaaataaaaaaaagttctaatgtga

SEQ ID NO: 7953 - DNA, 1400 bp, Rattus norvegicus
cagcgtccccaacaccttcccgcagtccacagagtccctggtgcactgtgactcctgcatgccggcccagtccatgtgggagattgtgaccttggagtgccccggccacgaggaggtgcccagggtggacaagctggttgagaagattgtacactgcagctgccaagcctgcggcaaggaacccagtcatgagggcctgaacgtctacatgcagggtgaagatgggccaggctcccagccaggatcgcactcccactcccatccccaccctgggtgccagacccctgaacctgaagaacctcctggagcccctcaagttgaggaagagggggctgaggactgagggcccccaactcttcctcccctcttgtcccctgtggaatgtctggtcccaccctccagggaagagggaggggagaggcagaggcccccctccccctctggcactagatggacttggaatgttgcctggttgccatggagatctgaagggaggggctggagccaagctgcacgatttaatatatgcaagatgaggggaggaagcagacatctttgggacttttcttttggaaggtgaagtgtggtctttcctttcagccttctggagaggagccctctggatagagaggaagcaggttgagctgctgaggatgactgagatcctcagatagggcaggcccaggtcaggacccagacaacggatggggcaggatccccagtgacgggcagagggtgggtatcatgtcagcatcccctttgcaggaggatctaggtaggaagacagctggcagaagtcggaaactccagccccataggtttccctaaaggcctcccctcatgtaaccccttcaatggagtggcttaggagtcaggctggggcaggaccctgctgactcaggtgccagagtgtcactgaagaagaaagaagatccctctcccccacaccctgtccctccctccagagatcttagctctttgctctccccaagttctggactcttctgaaaacagctgcaaccggtcctgccgtccttggggctggtctttctgaaagaggtgacagtttatccccatcacctgggaccgtagtggacaggaggcccctgcctagggcccctgctgacctcagctttctctagctccttattctatccactccttcttcccagctgcactttaaccttagggcagggcaggtggcgaggaagggccctctgtctccttatctgctggcaccattgtgtccagggggttgccagctcaccccctccctgggggtgccccagcccatggctgtttgacgagagccttagagcttgtaactagtagccatctcccctgaacctgagtgtttccatgaataaaatgccttcaacgcctctacaaaaaaaaaaaaa

SEQ ID NO: 7954 - DNA, 1400 bp, Rattus norvegicus
ggtttccattcactgattattcgagcactaggagggattctagctccaatctattatggggcattcattgacagaacgtgtattaagtggtctgtcaccagctgtggaaaacgtggtgcatgtaggctatataactccagattatttggattctcctacttgggtttgaacttagctttaaaaactccaccactttttttatatgttgtattaatttatttcacaaagagaaaatataaaagaaatgataacaagacattggaaaatggaagacagttcacagatgaaggaaacccagattctgtaaataaaaatggatactattgtgtaccttatgatgaacaaagcaatgaaacacctctttaaggaaagagaaagatacatctgttgctgtgttttcaaatacccccggggttctttcactgaaatttttcatactttatatgtaatagagaatttataaccctatgcatttataattaaacaaattgcaaatcaaaagaaataagagaacccttgttagggtatagctgtgcatttgtagctaaagatttggagatatataaacaggtattcgcttaagcatttataactcaataaaatagagaatggggcaaggatggacaaaggggaaagggactgtgaaaaattgttgtctttaaaaatcaaaatttgaatcgtactattcatgccagaagcttctgtgataggtgacttcatgatgtggcatattctggtatccccggtaagtcaaatatatatatatatatatatatatatatatatatatatatatatatatatttttttttttttttggagctggggaccgaacccagagccttgcgcttgctaggcaagtgctctaccactgagttaaatccccaaccctaagtcatatatttttaattattaattttaaattgtgtttaatgacatatccatcttctttgtacatactgtacagaatattgagaataaaacagagacgtttaggatgtgagatatctctgtctatctctatctctacccctagcttcacctccttctctgtctccatctccctatctatctatctatctatctatctatctatctatctatcatctatctatccatctatgtatctgtctatctattatctatctatctatctatctatctatctatctatctatctatctatctatctacaatctccccaaatatctaaaattaagatagagtgaatgagacagatatctgtagacactgtattttcttgtgtgatcagatctagtgtggtggatgatagaagttgaacttgctttattgctatgtgttaaaatattttgtttgcattaaaatggcctattgaaatgcttttctgttcctataataaaataacctgatgaaaaagt

SEQ ID NO: 7955 - DNA, 600 bp, Rattus norvegicus
tgtgaggcatatgtgtaactcaatatatacatatacctatatgtatatacagaaattatttttaatattttcctactgctgtgaaatttaaaattggaaaattttgtgagtgttttccatgtccaatagagcctaactgtttcttttttagtaacttaacaatctcttgagggctgcacctataaagtcccagcttgtcagtagacatgtacagtgtttgggataaggtggacacagtgcacatatgagtaagaccttcctgactattttaaacatcactcacatgaggagagcctctatgctataggttgtgtgcctactgtagcttttccatcgctgtattatatagacatttgcatattaaaatttgattttcccagagataaatattatatagtgtatctatatttagatcaaactgtggtaacatgttgatgagatcatagcgttggggaatgtagcctgaacgtgtggactcgcagagaccccgagggagagcaggggtcaatcccatctgtgtataagttattataactatgaaatcttgtacaaaagcaaaaactggaaaaaaaaacaaaaatacagtttttattttgaaat

SEQ ID NO: 7956 - DNA, 1400 bp, Rattus norvegicus
acatggagatggaggaaatccggaaggaggatgaggctgagaaggcggcaggcttcatctctgtgtggaagctgttccgcatgcagtccctccgctggcaactcatctccacgatcgtcctcatgaccggccagcagctgtcaggagtgaacgcgatttactactacgctgaccagatctacctcagcgcaggggtgaaaagcaacgacgtccaatatgtgacggctgggactggggccgtcaacgtgttcatgaccatggtcacggtttttgtggtagagctttggggacgtcggaatcttctcctcatcggcttctccacctgcctcacagcttgcatagtgctgacggtcgcactggcactgcagaacaccatctcctggatgccctatgtcagcatcgtctgtgtcattgtctacgtcataggacacgccgtggggcccagtcccatccctgccctgttcatcaccgagatcttcctgcaatcctctcgaccatccgcctacatgatcggaggcagcgtccactggctctctaacttcatcgtgggcctcatcttcccgttcattcaagtgggccttggtccttacagcttcatcatctttgcgattatatgtctcctcacctccatctacatcttcatggtcgtcccagagaccaagggcaggacgtttgtcgagatcaaccagatttttgccaagaagaacaaggtatcggacgtatatccggagaaggaggaaaaggagcttaatgacctcccacctgctacccgggagcagtagcagagccaggccaccaggcagtatggccagtctgcatgggcctcctgtctagactttggttctgggttcttagtgtctgtgacactgggagggacacgagcctggcggggaatggcagccctccactcagtggggacacctgacgggctttcgtgcttccgtgctgtccctaaccatagaggccagtcacgggctcttggtcacacacaaagccatacctggcctttgctgggttgactgtggcgagggtcttgtaacattgcttttctaacaaaaacagttgccgagagacaagacgtgacggtcctattttttttttaactttttttttctattcttttttttttttttttttcggagctggggattgaacccagggccttgcgcttgctaggcaagcgctctaccactgagccaaatcccttgtgtggctcctcccatgggcgtggagagaccactggcatctgctggtgattgatgtggtcctctttttctgacccagccatgtcacaaagctgaggaacaggccacttggggagacacacggagcgtgaattatcaactgtcaacgacagtattctgtttagccaataaaacagatctgatcacttcttaaaa

SEQ ID NO: 7957 - DNA, 600 bp, Rattus norvegicus
tatatgcatatatttatataaatatatatatataagtgactggttagctggcatcctgctttagcctgagacttgccctaagaaactgctgagcccttggtaaacgtctacacagtaagtttttctgtctgttggggggagctgttgaacaaggcagacatcttgatagttcagatgggctttaatgtactgttgccagggaaggctttttctggttttttgacaaatttttagcacacttcaattggtgtctcgagcaactttaacacattgaagatgaggtattgtacatatttttatattctctttataagtgcatgtctccaacttgtaaccaatattgtacggaatggctgtccagtaggcctagtgtttctgtcacacgagagggatagcatgtaccattcacccctcagcatcctgggagcttcttcttgaatgaagactgtaaatttggtcaagtcaactcttagttcggtttccttaccatttgaatgattgactgtgtgtcctgcgtgtatttctcttttggcagcgaccagagttacactgatgtgtctcaaccgacccactcggctggcaaccacctatttattttct

SEQ ID NO: 7958 - DNA, 600 bp, Rattus norvegicus
gcaagatcagcgaggctgacaagaagaaggtgctggacaagtgccaggaggtcatctcctggctggactctaacacgctggctgagaaagaggagttcgtgcacaagcgggaggagctggagcgggtgtgcaacccgatcatcagcgggctgtatcagggtgcgggtgctcccggggctgggggcttcggggcccaggcgcccaagggaggctctgggtcggggcccaccatcgaggaggtggattagaggcttttctggctctcagggtgttggctagagacagactcttgatggctgctggtgcacgattcttatcaagttactccttctctccggagttcagtttaaagttacagccttttatacggtaattgatttgagtttgttacattttgtatgctcgtgggttttttatatattcaaattaaggttgcatgttctttgcgtttaatctaagtagctgtgtaaaaatggtgtttccttcctgcgaacacctcagcactgccaccctgtgtacagttttttccttgcatccctacaaactgagaaaaaaagttatcttttgtaacttaaacattcaaaataaaatgttacaagt

SEQ ID NO: 7959 - DNA, 1400 bp, Rattus norvegicus
cgttttctcagatgccattggtccctgtggagagctgatagctgaactgctccagattccttttctgtacagtcttcgcttctctcctggctacacaattgaaaagtacattggaggagttctattccctccttcctatgtacccatgattttttcaggattagctggccaaatgacattcatagagagggtacacaatatgatatgtatgctttattttgacttttggttccaaacatttagagagaagaaatgggatccattttacagcaaaactttaggaaggcccaccacattagctgagataatgggcaaagcagaaatgtggctcattagatcctactgggatttggagtttccccacccaatatcgccaaatgttgactacattggaggactccactgcaaacctgctaaacccttgcccaaggatattgaagacttcgtccagagctctggagagcatggtgtggtggtgttttctctggggtcaatggtcaggaacatgacagaagaaaaggccaacatcattgcatgggcccttgcccagattccacaaaaggttctttggagatttgacggcaaaaaacccaccaccttaggacccaataccagactctacaagtggcttccccaaaatgatcttcttggtcatccaaaaaccaaagcctttgtaacgcatggtggagccaatggcatctatgaggcgatccatcatggaatccctatgattggcattcccttatttggagagcaacatgataacattgcccacatggtggccaaaggagcagccgccacagtaaatttcaggacaatgtcaaagtcagatttgctcaatgcactggaggaagacatagacaatcctttttataaaaagaatgctatgtggttgtcaaccattcaccatgaccagcctacgaagccactggacagagctgtcttctggattgagtttgtcatgcgccacaaaggggccttgcacctgagatcacttggacataaccttccctggtacctgtaccactctctggatgtgattggattcctactttcctgtgtggcagtcactgtagtccttgctctaaagtgctttttatttgtttatcgattctttgtaaagaaggaaaagaaaacaaagaatgagtagagctcaatgataatgcatcacatgaatgaaatttgttcatcattttaagttatgaaccaccttctaaaaattcattaataactttacagaagcatattgtaattttgtatcatgtaaaaagacatataattctgaggcttctgatatgtgatcaaagaatcccatcatttattttaattttcaaactattcaatgtaaaacaatttgcctgtgtagaaaaatatataaataaagatttaattgaaaaaaa

SEQ ID NO: 7960 - DNA, 1400 bp, Rattus norvegicus
gttgtccgagaggatcgagagcttcgtggaaactctgaagcgaggtggcgggcggcgcacgtcggaggacatggctcgggagaccctggggctgctgcgccggctcatcacggaccaccactggaacaacgccggggacctaatggatttgatccgcagagagggtaggaggatgacagccgctcaccctcctgagaccaccgtgggaaacatggtgcggagagtcctcaaaatcatacgggaggagtatggcagactgcatgggcgcagtgatgagagcgatcagcaggagtccctgcacaaactcttgacatccggaggcctgagcgaggatttcagcttccattatgccccacttaagtccaacatcattgaggcgattaatgagctgctagtggaactggaaggcacaacggagaacattgcagcccaagctctggagcacatccactccaacgaggtgatcatgaccattggcttctctaggacagtcgaggctttccttagagaggcagcccagaagaggaagttccatgtcattgctgcagagtgtgctcctttctgccagggacatgaaatggccgtcaatttgtccgaagcaggtatcgagacaactgtcatgaccgatgctgccatttttgctgttatgtcaagagtcaacaaggtgatcattggtacgaagactatcctggccaatggttccctgagggctgtggcaggaactcacactctggcactggcagccaaacaccactccacgcctctcatcgtctgcgcacccatgttcaagctctctcctcagttccccagtgaagaagattcatttcacaagtttgtggctcctgaagaagtccttcctttcacagaaggagacattctggagaaggtcagtgtccactgtcctgtgtttgactacgtgccccctgacctcattaccctctttatctccaacattggtgggaatgcaccgtcctacgtctaccgcctgatgagcgagctctaccatcctgacgaccatgtcctctgacacggcctgtcctatgcggaaccagcttagacccggagtggagtggagacacagtgttgctgctgcagtggggactggagagtcagcctgaaccctcagtgcctgtcacctgccttcctactcatgcccagtgaggagtggtccaggactgctcctgccttctgggcttatctgagcagcaggccttgcttccctggcattttggggccactttgtgactaggctgtgtttgtttcaggaacttcaacctcctggctctgtggtgtgttacacatacataccataactacttttgctgggtcggtgtttgctcagaaatgccttccagaccttttcctaatctgtgtcaataaaagctactggaagctcaaaa

SEQ ID NO: 7961 - DNA, 777 bp, Rattus norvegicus; identical to SEQ ID NO: 3865

SEQ ID NO: 7962 - DNA, 600 bp, Rattus norvegicus
ccctgtatgcaggcccggtggttgtccagctcctccctaatcttggcccctattggcagtcgcagtctcagcctgcagcggactgcgccaagtccacacccagtcctctctggaggaagaaaagggagcttctctgtctaccctcctagtcctcggacaccgaagccagagaggactccggcggcaaaaggtgaccaggaggtgagaaagaatcactggcaggacccaagaaaaaccgcttctttctctctttgcagggtgagggggttaaggggataggatgggaatcgagccttgaaaccttttagaaaacccttgggaacgtttggccgcattccaaggcttccgatgaggctgcctttcttgtttccttgtgacggttgttgacatctgtgctgccatggaattgtgtctgtccctgttttcgtgaagccagagatcccttgggtcattttttcaagattcagaatgactactgatgttttcagagatggcatctagggcttcttctctacgtcctaagggaaggattttctttcttggaatagagtcaccccaaatccccaaccacagcgctccctttctcctggtagcttttcc

SEQ ID NO: 7963 - DNA, 1400 bp, Rattus norvegicus
cctgtaccgggatcgtttctgacgcaaatcaaaccagcctagcacttttaatagcactctgacggctccggtttaatcgtctcctctctctctctctctcttaggaaatcaaagagcaggaagtggtggacaaagtgatggagacgctggacgaagatggggatggggagtgtgacttccaggagtttatggccttcgtctccatggtgaccacagcctgtcatgagttctttgaacatgagtgagacaaaaaaaaaaaaaaaaagtggctgagccgtttccccgtggcagacatgagggccacgagaggaggcacggcagaaggctcgtgggctggaaggagctgcgctctctagacgcatataactaattaggaagcttgatttgcttcagggatgaaactctgaccccgttcccaagggctgctttaagttagcacttcgtttctgctacactaggtattcctgtgagctgaatggtcccgggaactattgataagagtcactgagggacgaaatcaacactctgtgggtatagcactggttgtagaccaccatgctcctgtggaagggtcacctgtaagaatcaaggcagactaccaatagcacctccgttggacagctttcttaggtgtaatgtatgctgtccatgcatctacagacccacagctggatccactgccacccgaagaggttggctcgcccttacaactgcttgtcctctgtgcaaacgatgccccggaaagttagacctatcacccacaccctcccaccacccccaggccaaaaggacagcccacccaagtcccctcccccacagcgaatcgcggtttgttaccaagtacgtatttgacatcaacgattccaactggtggaacgattagatctcgcacactaagtattagcaccctaactcacgaccgagaatcaaaattctgctcagtagacgtctcctttcaggatgacaccattgtccccataggacacggacagaggagggcactggagagagtgtcaggtctttttctagctgtatcttcctctctccctctgctgcccataatgtgagtgaccctctagggtgagacttgcagggtgagctgctgaggaatgaagggccactgagatgtgtcctttagctgctgggtgtcatgtctgacctgctggtgcctagggcctgcttaacactcggcaaggctgcgagccgaggactgtgggaagccggacttgatgctttctaacctgcatatttgaatgccgaaggtcaaacaatccaagttacagataaataaaaaccgcattgcaagtattaaaaagccattctaggaaaattccaattgcccccacccacccccttttttagtacgttatttattattattatttttcctcggcgtcgag

SEQ ID NO: 7964 - DNA, 1399 bp, Rattus norvegicus; identical to SEQ ID NO: 3868

SEQ ID NO: 7965 - DNA, 600 bp, Rattus norvegicus
ggtccgtgaacttgaaggagaagttgaaaacgaacagaagcgcaatgttgaagctatcaagggtctgcgcaaacatgagagaagagtgaaagaactcacttaccaaactgaggaagaccgcaagaacgttctcaggctccaggaccttgtggacaaactgcaatcaaaggtcaaagcatacaagagacaagccgaggaagcggaggaacaatccaacgtcaacctggccaagttccgcaagatccagcacgagctggaggaagccgaggagcgggctgacatcgccgagtcccaggtcaacaagctgcgggtgaagagccgcgaggttcacaccaaaatcataagcgaagagtgatcgatccaaagcaggaaagtgaccaaagagatgagcaaaatgtgaagatctttgtcactccattttgtacttacgactttgggagataaaaaatttatctgccaaaaaaaaaaaaaaaaaaaaaaaaaaaaaaaaaaaaaaaaaaaaaaaaaaaaaaaaaaaaaaaaaaaaaaaaaaaaaaaaaaaaaaaaaaaaaaaaaaaaaaaaaaaaaaaaaaaaaaaaaaaactcgagggggggcccggt

SEQ ID NO: 7966 - DNA, 600 bp, Rattus norvegicus
ggtagataacctcccctattggcaatctttttcgagtgagattaggaatttactccactcacacggaacgtacactgtagtggacagaaatttatcctggagtgatacatcgtaaccgaccggacgtcaagtggtatatgcggtccaaccggaacttgagggtcgtctggggacgcagacagaggactcacaactctactgggtagacgtgggagtgtgggtcggaactggtagtggaaattgccaaaatacttatggtttataacgatgaaagaaagtgtacgattcaggtcttagtctggcgcaacaaccacaataacaaggaacaaacaaactcgttcataatttgagtcctgcggtggacacgatccacagtctttgtacctagaactgaagtaccattctcacaacctccgcgtctcatcgtcactgcgtcaaacaaaacgttggagcgtttgggtccgcagtatctctgtcactaactcgtgtctcttgacaaaaaggctgagtctgagtcgggggtgggagggaaaaagtaaccgactcgcgagaactcgtggtggacccaaaaaagaaagggaggcgataatgtaagtggag

SEQ ID NO: 7967 - DNA, 987 bp, Rattus norvegicus; identical to SEQ ID NO: 3871

SEQ ID NO: 7968 - DNA, 600 bp, Rattus norvegicus
tggcaacaagctgagcagggctgatgtttccctggttgaacttctctaccatgtggaagagatggacccaggcattgtggacaacttccctctgctaaaggccctgagaaccagagtcagcaacctccccacagtgaagaagtttcttcagcctggcagccagaggaagccttttgatgatgagaaatgtgtagaatcagcgaagaagatcttcagttaattcagtcagctatggatacactgtacccacaaagccagcctcagaaagctctgcaacaatgaagtattttgactaaatgttgaccgtacttattgggagggtaacatgttttctaaggcttctgtgttaattcatatagacatgactcatgaggaattgctgggatgccatctagttgagttaaaacctcaatctcgatcacttcctcggatattttcttaatgttcaataaaacaaaacaagcttcttagacgctggagtatccaaacattgtcatgaaatagctgtcatatccttgtcaaacagcgtcacgtagaaaccctcgtgtcaaactctcttacgcaaaagtaatctttccttatggagagtgtcctttctct

SEQ ID NO: 7969 - DNA, 600 bp, Rattus norvegicus
tctgattttacctcagcgtcctgtcaggttaggtatgtgtaagtaaatctagcttatggggtaattgttttttctttatttgtgtgagtatgtgtgtgtggaggtcagagaacaactcatttctacagtgttgatcctagcgatcaaaatcaggttgtcaggctggaccacaggtgccttttactactgaggtatcttgccagccccactggttttaagtgacgtataattacatatgtttatgtagtacaatataatgtgttgtgatacgtgtatactatgaaatgatctgatagttcacctcaaatattttattactttgttgaacttttctagctgtttctaaaatacacagtatattatcattggacctgtcttgttaatgtagcccaggctggccttaagccataatcttccttctcagccttctgtgagctaagataaaaaaaaaaaatcatgtaatgttatacccagtctcaagtcttatatctggcaaaccttgacagtccagaagaactagagtaaattgtttgacagtcctctcaactttcctaattctgtgacctttcaatatagttcctcctgttgtgaccccaaaaa

SEQ ID NO: 7970 - DNA, 600 bp, Rattus norvegicus
ggcataggaaaaggttatgtcagaatggaagtttgatgccttcttgggagcaaacagacccagagaaacggcaagtttggtgtccaacaaggaacttgtcagaacaaaggcccctggggagtattttgaatctgcatttctgggcacagttccagaatatataagagtctgtggaggtgatttaaatcaagcccaggtccacagagctcattctcaacacgagtacatctcttacattagaggaatataatcccggaaactgagtcacctaaagttcactcaaacttcacaataagtattaattcaaacgttcaaaatgccattctcttactgccccatattataccaggtcgcctgagacctttctggactgataatgacctctgaggtagatttaaagttttgggaacttaacatttctgtcagatttcaggcttttttggttgaagaatcctctcataccccttccttggaaaaccctgatttcatgtattcatattatgtgttactaagatcaagtagctaaatatataatcagttatgattttgtgttttaagtaattttacacaacatctcataaaaataaaatcattattggg

SEQ ID NO: 7971 - DNA, 282 bp, Rattus norvegicus; identical to SEQ ID NO: 3875

SEQ ID NO: 7972 - DNA, 600 bp, Rattus norvegicus
gatgccatccatgccaactcaatggaacttattgctggaagtgttgacacgacagcaatctccttggtaatgaccctttttgagctggctcggaacccagatgttcagcaggccctgcggcaggagagcctggcagctgaggccagcatcgctgctaatccccagaaggccatgtcagacttgcccttgctgcgggctgcccttaaagagaccttgaggctctaccccattggtagctctttggagagaatcgtagactcagacctggtgcttcagaactatcatgtccctgctgggacgttggtcataatttatctgtactccatgggccgaaaccctgcagtgttcccaagacctgagcgctacatgcctcagcgctggctggagaggaaaaggagtttccagcatctggccttcggctttggggtgcgccagtgcctggggcggcgcctggcagaggtggaggtgttgctcctgcttcaccatatgctgaaaatcttccaagtcgagacactgaggcaagaggatgtgcagatggcctatcgctttgttttgatgcccaaccctagactcgtcctcactatccggcctgtgagctag

SEQ ID NO: 7973 - DNA, 600 bp, Rattus norvegicus
gccctggtttcggtccccagctccgaaaaaaagaaaaaaaaaaaaaagagtttaggtctagcctaagctacatgattaccttccccccgacccccaacaacaaattctcttacttgattctcaaagttgccttgggagctcgaagctgaaagtatgttcgtcttcgaggatggtgtaggaatgagtgagcccctgccattttaggctcaaatctcagtttctacttattagctgtgggtctatgggcaactgttctcctgtctgaaaaggaggatatggcagctgtctgagtcactgtttgttcagtagttggaacagtattgaacagtccatacttgatttacaaaaaaagaacaaaactatctctgatggggaaacaggtagagagacatcttgtgaccggccctaagtcacacagctcctgaacaagtaagtgtctgattgacaaattgtggttccttgtggtctcccagaaccagtatccatactgatgttaagggagacagaagtccagcttctgtaccctggaagcccctcaattcacacagaccttatcattccctccttgtttctcagaagttccaccttgtgccaagcatc

SEQ ID NO: 7974 - DNA, 1400 bp, Rattus norvegicus
tgtctccaactttgatttatattgagacaggaatctccaccctccccacatactggttactgttcctggtagagaagtctagggctggcaaaggcacaattgaagtcagggctggctcaatcgggccatcttctctgccccataccctccctacctctggctaagggggtcggagtgtgctcagcacaagaacccatcgaccttccccgctactgtccatggttgacaaggtctagaaaggagctctccaaactcaagtccgcaacccacaaagtgtttggcctggacaccagggccacgggggtccaggaacggaagaaacatgcctactcatccccctcatttatgtccatccgtcatttatgtcccacataatcctgcaaggaccgttgcttgctttcctaaagtcacttcctgactaatctctgcctgagcccgcttggaaggagggacccgggagctgataaagaaaagaaggtctccaggctctctgcagagtcagaaagtgtaactcaccggggcaagaagatgggacgcagctaaccgatctggagcccttgaggctgaagtttttaagcaccagggaaaggagaaagccactcccaagtccaaagtgtcaagtttcctcctccgctgattcgagagagggagccgcccctgctgtactagccaccccaccacaggcctgcgactggacacagcttgatgaggagggatcataggtccttatctctcccaattatgagtgctactcgggagtctgtgttagaagggactgctgctgctgctgctgctgctgctgctgctgctgctgctgctgctgctgctgctgctgcttgaaaaaattaaaaacaaaacaaaaccaaatgtacttggggaaatcagcactgggaagccccttctgagaaattcgaggtccaaaggcacttggagagccccaaactaaagccccgtagtgggacccctattgaaattctccactgagttctaagacagaagcccctcttggagacgcacaggctaagcactcctgggcagaatccttccctttccctgctcagccggtaccgcagcacccagcaccacagcacccttcccacgacctccttctctttcacctccttcacgcaagattcggggaggtggtgcaagcaggagtggaaagaaacagcagacatccattccctcctgggagacagagggcgcctctgtccactcctggccctagcccttcgggtgtcgtttgtgaaggggtggagccgtcgggaggagggtcggcagtaaagacaggtctccccacactgctccggggccacatttgcagcgcgcccttctgtcaagaacctgctccgacgtcagccgaggccaaccgtgagtatcctaccctgcttagataatcg

SEQ ID NO: 7975 - DNA, 600 bp, Rattus norvegicus
tgtggggcctggcttggtcattgggctgctctatgtccgtctggccagggcctactggctatctcagcaagcttctttcaagcagacacggcggctgcccaaccccagggtgctctacctcatccttggtatcgtccttctcttctgggcctgctttctacccttctggctgtggcagctgctggcccagtaccacgaggccatgccactgactcccgagactgcacgcattgtcaactacctgaccacctgcctcacttatggcaacagttgcatcaatcccttgctctacactctgctcaccaagaactatcgagagtacctacgtggccgccagcggtcactgggtagtagttgccacagcccagggagtcctggcagcttcctgcccagccgagtccacctccagcaggactcgggccgctcgctgtcctccagcagccaacaggccacagagaccctcatgctgtctccagtcccccgtaacggggcccttctctgagagtgcactgtgcaatcctggcataggaaaggacccaaaggcgtgcggctccggagcgcatttcccagaatcccctgctcaaacctaactggctcgtc

SEQ ID NO: 7976 - DNA, 600 bp, Rattus norvegicus
ccttctccgctgggcccaggaactgcataggacagacttttgccatgaacgagatgaaggtggcactggcgctgacgctgctgcgcttccgcgtcctgccggatgacaaggagccgcgccggaagccagagctgatcctgcgtgcggagggcggactgtggctgcgggtggagccactgagcacacagtgactacgtacatctggacgggtcccacccacccacatacctttgtagatgtcacctgtgcctgaggctccttgaataccagtagggggctctggaggacaacagggaaccagcagttgtggcagggagggagatggggttggtgcccaaattcctgacttcatctggccgttcgtgggcctctacactgtcctttagcctagttggacttactctcttgggcgacagagagctaaggtaagtgtctaagcaggctcgagctcacagaatcttttaaattgaggtacatttcctgccttgacctccattctaatctcaaaactctcatcctgggattctgaagtgtttctgtgaaaactaaaattttaggtttattaaacctaacaagtctgccaaaaaaaaaaaaaaaaaa

SEQ ID NO: 7977 - DNA, 1400 bp, Rattus norvegicus
aggctgacaccttcatgtttggaggccatgacaccacagccagcgcactgtcctggatcctgtacaacctggcaaggcacccagaataccaggagcgctgccgtcaggaggtgtgggagctgctgagggaccgagagcctgaggagattgaatgggacgacctagcccagctgcccttcctgaccatgtgcatcaaggagagtctccggctgcaccccccagctatagacctcctgcgccgctgcacccaggacattgtgctacctgatggccgggtcatccctaaagggaacatctgtgtcatcagcatctttggtattcatcacaatccttcagtgtggccagaccctgaggtcttcgaccccttccgctttgactcagaaaatcgtcagaagaggtcacctctgtcttttattcccttctccgcagggcccaggaactgcataggacagactttcgctatgaacgagatgaaagtggtggtggcgctgacgctgctgcgcttccgtgtcctgccggatgacaaggagccgcgccggaagccagagataatcctgcgcgcggagggcgggctgtggctgcggatggagcccctgagcacagacactcagtaaccctgtgtaaactccccgtcactctcctctgcacaatgcagaaaaagcggagcctcaccaagagccagcagggggcgcggaaggacaacagaccctgggagcctgggcagggccgctgtctgagtccaagagcctttctaggtgacccacagggcccgcagactgatgagtgttgcacccaagctgaaggaaggcctttattcttttggccatagggaggcaccatagatgcttaggtttattggcagatttgaggcagttttcttcttttcttgtttttgagatagggtctcaaattttagtggatacagcaggctggcctttaacttgcagcaaatctctggcctgaccacccgagtggcaattagaaagtgcaccactgtgcctgtcgtattcgaaggtattttttattagaatgatgggaagtttcccaggagagaagtctgggagcccttcaaaatgatgttaaatgatgtccaaggcttgtgatgtctaagaccattgaggcagcttaaatttaaaatgacatcacattgcaggctccctgtgtggtgatgtcctttcaggttcccacttgttcttccttgggctggggaggtggcttagtggggagacaggaggatcccagggcctcagtggccaaccagtcctgctgaatcagagctccaggttgtaagagacactgtctcaggaaataaggtggatagtgatgactgaagacacctgaataaacctctggcctcctcaaaaaaaaaaaaaaaaaaaaaaaaaaaaaaaaaaaaaaaa

SEQ ID NO: 7978 - DNA, 600 bp, Rattus norvegicus
gccggcaggaggtgcgggagctgctgagggaccgagagcctgaggagattgaatgggacgacctggcccagctgcccttcctaaccatgtgcatcaaggagagtctgcggctgcaccctccagtcttattaatctcccgctgctgttcccaggacattgtgctgccagatggccgggtcatccccaaagggaacatctgtgtcatcagcatctttggggttcaccacaatccttcagtgtggccagaccctgaggtctacaaccccttccgctttgacccagaaaacccacagaagaggtcacctctggcttttattcccttctcagcgggacccaggaactgcataggacagactttcgccatgagcgagataaaggtggcgctggcgctgacgctgctgcgcttctgcgtcctgccagatgacaaggagccgcgccggaagccggagctgatcctgcgtgcggagggcggactgtggctgcgggtggaaccgctgagcacagtgacctcacagctgccttgggacctcctcgcccaccctcctacctcttgagatctctgaataaagaattaaataagaaaaaaaaaaaaaaaaaaaa

SEQ ID NO: 7979 - DNA, 600 bp, Rattus norvegicus
  misc_feature (91)..(91): n is a, c, g, or t
  misc_feature (515)..(515): n is a, c, g, or t
acccccccctcccagccatgtttctatacaccttctcctactttgtttttatacatacctacatgactcattggaaacaacagcaaagctntccgtcagagtataaaaagtaccattttgattgtatgttgcacatagccaacattggaaaaactttctgaaaccttcatgaaacttagaatttatagccatggaacatcaaaaacttactaagtatcagcataggatgttgtttgacatgtgaaatagatcagtaacaagggagaaatattttgtgccagtttgaattatctaggaaggttagggaaagctgatctgatcaatatcataagagatgtgcagtatacaacacaatgtcaggacttgactgttctcagggaggcagaatatcagaaagcctaggttctagtattaagtttcatttacccccaatgtgaccttactttacccctgagccttgttctcactagtagtaggggaataacatctaccctgcctacctcacagagatgtgngggtttaactggtgtgtgtggaagatccagattgtaaaagccaaataattattaatgtatttgttccccccactattaaaaaaaa

SEQ ID NO: 7980 - DNA, 600 bp, Rattus norvegicus
gactccatttactgccaaatgagtaaactcgggagggttagcctggacctgattcttcacaactcaggctctttactcaagaatggtctgaatcccactgacctgagcaggcttgtgtgaaaaataccatcccccccaccaacagtattccactcccaaagtagcccaagctgtatttctagagatcttagattcaggcccctaaatcagaccctcttccactccctttttccccctcaggggccatttgggagcccaagtgggcaacacttctacaccatggaaacgactagacttaagagtatcaagcaagtgaaggtggctggctgtccatccacacacagagagaagtcttggagctcacagtcttgaaggggggacctgagagaaaactggagtagacagaagccacacgcatcattgtaactgctctttaattgtctggccttcctctgaactgggagctccgtgtggggtgtggggtctaaccagtcacagacatacacaaggagctctgtacattatctactaagcaaatgaataaaaacttcccagctgtgtttccaagctttcacagatggaaaaattaaataaaaagcc

SEQ ID NO: 7981 - DNA, 1400 bp, Rattus norvegicus
gcagggcttccttatccctaaggggacgaccctcatcatcaacctgtcctcagtgctgaaggatgagactgtctgggagaagcccctccgcttccaccctgaacacttcctggatgcccagggcaactttgtgaagcatgaggccttcatgccattctcagcaggccgcagagcatgcctgggggagcccctggcccgcatggagctcttcctcttcttcacctgcctcctgcagcgcttcagcttctccgtgcccgctgggcagccccggcccagcaactatggcgtctttggtgctctgaccaccccgcgcccctaccagctctgtgcttcaccccgctaaggggaggcacagcatctcactcactgtgcttgctggggtcctagtgtgcaataaatggttttactctgaaccgaatcatccctgtgagctctccaggctgtaaggggcctgagcagccttcccgtggacatccgcacccctacttaatcttccttgaccatgtgccccaatggaagggctgctctactgacctccgaaatggcagccattcttgctttcacccctgccccctcttttcacccaaattgatgatgtttattcatagatgccaacatctggaaggagggccagaaaggactgctgtgaagggtcagtgtaagtcacacagatgagggaaggggcggtggaggtaatggtgggcagaattgtcccctttccacttgagatgtttctcccagacgcccccatttcagacccactacacaaccaaggctaactcctcagccagcatcatcacaacttcttatatgacgtcgcagagatgtagagaagtcggggaggctggaaatgacatgcaggttaagtgcccaaggttacctgttgggtaccacatgcttccctaaacggttttgtgggggtccagaagcaggttgcctcctaagcttctttgtcaccattaattccatgacccagcagggatactggtgtccaggcccatgcacagtaagaaagtgactctaaccagggatggaaggacccgcaagcttagtgttgacacagactcccagaccttagcacaactgactccatggtagaagtaccatttgggccataaaacttagcacgtagacagcagctcctctcataatgaaaacaaagacctaacccatcaaattctatcctgggaaggtctcttgaagcactcctcttggcttcttggcttctgtagttctcctagctaactgctcttgctaactgaagtatgtcaacccaggatatggttgttggtaaaagctcgccctgagaacagctcaggacgacattgaggtgacccagtgtagtcaccagccagctaataaagacctccttttggtttaaaaaaaaaaaaaaaaaaaaa

SEQ ID NO: 7982 - DNA, 600 bp, Rattus norvegicus
taggaagtcaaacctcatccgccaccagaaaactcacacgggagaaaaaccctatgaatgtcatgagtgtggaaaattctttagttgtaaatcgaacctcgtcgcccaccagaaaactcacaaggcagagacggtgagatttcaaagaaaaatggaactcaagagagctattaatgaagttgaaggaacaggaagataggtattcgagatcatctgtacgcattaaccacagacaagacatttaccctagtgaacagtcctgttaattccaaagatctaccccctaaacacgacactcatggaaatgttgtagaaaatgtctcagaattaatcaactgtaatctaaaccccgcaagaaagagattcggtgagtatgacgactatgggaagtcacacccgaattccatgcaagacgtgggacatcctgacgtcaaaccccacactcagatagcgagtgctgcagtcaccacgatgcacttgtgcagcctaaggagcctgtgactgcagcacaggcatctgagcataaggtctgcgagaagtagacagggaagctcagtgacactcagtagactgtacagagaagaaaagccatcgggaatt

SEQ ID NO: 7983 - DNA, 57 bp, Rattus norvegicus; identical to SEQ ID NO: 3887

SEQ ID NO: 7984 - DNA, 1400 bp, Rattus norvegicus
actggtactggacccacgcctacactgggacctgtcactcccgagatctgcaagcaagacattgtctttgatggcattgctcagatccgtggtgagatcttcttcttcaaggatcggtttatttggcggacagtgacaccacgtgacaagcccacaggtcccttgctggtggccacattctggcctgagctcccggaaaagattgatgccgtgtacgaggccccacaggaagagaaggctgtgttcttcgcagggaatgagtactgggtctattctgccagcactttggaaagaggataccccaagccactgaccagcctgggtttaccccctgatgtccagcaagtagacgctgcctttaactggagtaagaacaagaagacatacatcttttctggggacaagttctggagatacaatgaagtaaagaagaaaatggaccccggtttcccgaagctcatcgcagactcctggaatgccatccctgataacctggatgcagtcgtggacctgcagggtggtggtcacagctatttcttcaagggtgcttattacctgaagttggagaaccaaagtctgaagagtgtgaagtttggaagcatcaaatcggactggctgggctgctgagctggccctgttctgacgggccgtacaatcttcactgcacaccgggcccaggaccctggggaaggacgtgaagaggcctggttaccctgtctcctgctctgtagttaatcagccttctccttcacctggtgatttcagatttaagagggtggcttcttttttgtgcccaaagaaaggtgctgaccgtatccctcccaggtgctactttctcccgcccacccaaggggatgcttggatattcacaatgcagccctcctttgggctgccctggtgctccacacttcaggttctccagcatgaatgatcttttgtgggttacagcacactcagagtcaacagagactgtcttaggagggcactggtggctcaacagcctggcacagggcagtgggatacaggtgtgccaaggtggaaaccagagacatctggtgtctcccttacggctgccctggcacttttactactttagctgtttgctttgtttgccctttgctgtttggttcaaccttttcagttttccaccacactgcatttttctcaccgaaggactccggttgtcggacatcactgcacgatgcatctggcctggcctatggatggctcccctcctcactttgtgtagaagcaactccagtcacttcctccactggttggaggagaaccaagtcatcggcttcctgctcagccttcttgcttctccctttaacagttccccatgggaaatggcaaaaagtataaataaaggcaccctttgagtggcaaaaaaaaaaaaa

SEQ ID NO: 7985 - DNA, 1400 bp, Rattus norvegicus
gttggtataacccacctgccttaccctctcaagtgctggggtcgttactatgacactatacccagctcaggtctgccatccaggtggcttcaagtaatcattgactgggaagggtcggtactacctggaattttttatttaatctttaggttggagggacaagtgatgttgaagtgaatgagaagaaagacagagttacagatgctctcaatgctacaagagcagctgttgaagaaggcattgttctaggagggggctgtgctctacttcggtgcatcccagccttggattcattaaagcctgctaatgaagatcagaagataggtaaagattctttcaaatgagtttgtggccagagaggtaattagcaatgcaccacactttacaggggattgtttcacctatggtaggattggatgtctgattgcttactaaacttttatctttataattattttatgtgtgtgtgggagtgcattttgctctcatgtctcgtgtgctgtgtgtttgcagtattctgaggggctggaaagatggctcagtggttaagagcactgactgctcttccagaggtcctgagttcaattcccagcaaccacatggtggttcacagccatctgtgatgagatctgatgccctcttgtgtgtgtctgaagacagctgtagtgttgttatatataataagtaaatttgaaaaaaaaagaaatgcagtattctgagggccagatggggtcatcagatagcttggaactggagttacattggtgctaaggattaaaccaggtcctctgaaaaagaaaccattaaccattgagccatctttggttccccaaaaagggaaaacaaaagtaagttcatgaaaatgtgtttgctttgtaggtatagaaattattaaaagagcacttaaaattcctgcaatgacgattgctaagaatgcaggtgttgaaggatctttgatagttgaaaaaattctgcagagttcctcagaggttggctatgatgccatgcttggagattttgtgaacatggtggaaaagggaatcattgatccaacaaaggtaaataaatcagcatttctaaacaatgaatgacttgctctctggtgtatggttttctttaatttttttctttttttcggagctggggaccgaacccggggccttgcctagcaagcgctctaccactgagctaaatccccaacccctttctttaatttttaattgttttactaaatttttttctaggttgtaagaactgctttactggatgctgctggggtggcctccctgctaactacagccgaagctgtagtgacagaaattcctaaagaagagaaggaccctggaatgggtgcaatgggtggaatgggagggggtatgggaggtggcatgttctaactc

SEQ ID NO: 7986 - DNA, 1400 bp, Rattus norvegicus
ttcagaagctgctgtcacaatttcattctgaggccatcttgcccccccaccccccatccactctgagtcggcccccgctctgcatgggagggagggtccacgtttgactgccgaggaggggccggcggggctggggccagggccggccagctgtgcccattgcctgggagaaggccagctcaccacctgagctctggactggggaccaccactgaccaggagggagggccggggcagggactgtaccttcccgtctcagccactctgtgccacatttgtcctgtacctaggaccagaggaaataagtgactgttctcaccagacctctgactaccagtggcttttacaaaaacctaaaaagtgtgcagcaaaaaacctaacacaggctgaggagtggcactgtttatttcaaactaggccagctgggtttccagctcttcttctactggtctgatgttttataaatggaaacctggtttttcttctctggcacccttctttttttttttttttaatttttattttcggccaaatattatgtctcacggagggggaaaaaatacagacaatttcagatgtgatcggatattcttttttaaatgcgggttttcggaacacatttcatttcgggcgtccccttctgtgtctggtttgctgagtatagaagttgtcacctggacgattctgctcctcggctccaaagaatcctggggcaagtgtcccacaccagcctcatgggacatattatgtatataagcctctgcaatgttctcttgttcttggtgcccttttctgctttaaataaaatgtgatgtatttaaagaaggttctttacctaggagcgaatgaacaatagctaaatgtcctggtatttaaagtgtaaattatctatggctttgccaaaatgaaggaagggggggaggcgggcaagagatggcactcctcggtccccacacactccacgcctgacacgggctgggagctgctcagactcctgtgaaggcacagctagacttgtggcctgaaggaggccctgctgggactgtgcactccggcccttctagccccagggcccacagacgctggtcttgaaagagccttggctgtgtataaatgcaaagcccagctaccgagggaatggcaaccactggatccctggccaaatctctctcgaccctttgtttgctacccgtgtgtccgaggtcaatgtgcagacccgcagccaaggagctgggatgtttaacagagggagaagagctggggaaccgtataaaacatgaagattgtctactttaagaaataaaataccctgaacggagccaaactctgtccccgtgtgctgtgtgtggctcgtgtatggctgagctcagtgatgtctagagggccgctagagacgcctt

SEQ ID NO: 7987 - DNA, 600 bp, Rattus norvegicus
tttccttccgttctctctcttctgtactctctctttaggttcttcgctatgttcctccctccctgactccctctcttgctccttcctcccttcctcccctcaccaagtttcccaattctgagattcttcacccttcagaccctgggtgcccaggcctctctcccatgggattgtgggaaccagggacgtcgggaaggtggcaagtgaggcttgggatgggttgcctagcaacactgcatcctctccagccagtttctgttgcctagtaacagctgcctgcccagagacagggcgggactggggtggtggtagcacttttcagtttcctgttggggtggggctggtccccaggatcactcctacttgaaatttctagtaatgcctgtcctttctgtggcctctgacctttccttgttccagagctcaggactaaatgagcttggtgtcccagtgaactgggcctttcagaactgtggcttcctccccagtgatgtctgggaggactgtgcttgccaccctacccagcggctttcctaagggatgctgccccctcacatcagccatctcccgtggggctggggggtctctccgcagggatcc

SEQ ID NO: 7988 - DNA, 600 bp, Rattus norvegicus
ctaaacaaagaattcacagctgaggaatgccgaatggctgagaaacacctaaagaaatgttcaacatctttagtcataagggaaatgcaaatcaaaacaaccctgagatttcacctcacaccagtgagaatggctaagatcaaaaactcaggggacaacagatgctggcgaggatgtggagaaagaggaacactcctccattgttggtgggattgcaaactggtacaaccattctggaaatcagtctggaggatcctcagaaaattggacattgaactgcctgaggatccagctatacctctcttgggcatatacccaaaagatgccccaacatataaaaaagacacgtgctccactatgttcattgcagccttatttataatagccagaagctggaaagaacccagatgcccttcaacagaggaatggatacagaaaatgtggtacatctacacaatggaatattactcagctatcaaaaacaacgactttatgaaattcgtaggcaaatggctggaactggaaaatatcatcctgagtgagctaacccaaacacagaaagacatacatggtatgtactcactgatatgtggctattag

SEQ ID NO: 7989 - DNA, 74 bp, Rattus norvegicus; identical to SEQ ID NO: 3893

SEQ ID NO: 7990 - DNA, 216 bp, Rattus norvegicus; identical to SEQ ID NO: 3894

SEQ ID NO: 7991 - DNA, 600 bp, Rattus norvegicus
gactaacttgtatgtttgtgtggggaaacgttttcctctctcattcaaggtaactgtttgctgcctgttgttacttgtgtagcattctagaaaatggctaggttttttataagatttaagacaatagaagtagttttatattattatagttctgttggaatgtgatcctgaaattattactgaaaattagaatttttatttcgctaatgacaaccttgactctcagagatgcagtgtaaattgatacctcatctttccgagagttcagagcacagggcggcagtatgtgaagctgcttttgcactgacgcattttgataagtttggctactgtaatggtaaaaggctcctcaggcactgactgcatttgggttcttccgatgggggatgatccgttctcgtggtgctgctggacttatgcattttggaggtactgcatgtatcttccacactgcttgacattttctctgatctgtgtgtttgcaccaactcattaaaagaaatatgcagaaatatcttctaattcgttgatcttcgctgtatgacagttataatattaaacacttgggttgatcaaaaaaaaaaaaaaaaaaaaaaaaaa

SEQ ID NO: 7992 - DNA, 600 bp, Rattus norvegicus
gcagggggcaggaaggaggggctggcccctccttaaagagttggtgtaagaaagacctgggtgtactactgggcaacccctccctccatccacagattttgctgtacatatggattttatggttggcttggggcagctgggtttgtcctggatgtatgatactgttataataataattattattattcagccacgaggtgtcttttttttgtctttttttttcggagctgggaaccgaacccagggccttgcgcttgttaggcaagcgctctaccactgagctaaatccccaaccccatgaggtgtctttcttgtatgccactctgccctgtgtagtctcactaccccactgcctctgtgccaggccaggaagttttggggaaccttagtgtatacctcctcacttcttgttttcagaatctctctccccaaggcataggatatagaaggcaggggggggggagcagaatggagagggagagagcgccaccccccaccccctactgttcttggccatcacccagctgctccacaatgtccatgggagatgaatgtatcctttttgtttctgttctgtttctgttggtgatacaatgtatc

SEQ ID NO: 7993 - DNA, 1400 bp, Rattus norvegicus
tccgggactgaagctagagaaaaggacaataggattaattgacggtgggaaagggagtgactagtcccaaccgcagtccaagcagtaactatgttctttactttcacaggccctaaagagccaaacagaactggttgttctcccaacacatctgaaaataagagagcttccaccttgccctgttccccatccctcttcctgtggaggaagatgacccatggaatgcccacccacccctctcacagccatggtgacccctccacttgccagcagtaccaaaggaaagatacgggacaagccactggcccctcgaaccatctgcctttggaaatcaaattttttaatataaatgttatgattgaggaccacatgcatagaaaaatggtgcaaaaaccgagacagtatcatcagctttatcaactgtaaccatgggttggttcttccgggccagtcccagtctgttaagaggcaaaagaatttggaaatgttacctcacagaggcacgggtctttttgcagttgccaacctgcaaatgcagttgatgcatacatattccagcctagtggggtctgaatcagtgcattgaaagtataaacccaaaatcaggcgtgataggcagcccctcagggagcttcattataccttttcagaagcatccactgccttcagttcccggaagataccttgctttttacaagcctccaaaccctctctaagcctcagatgactcaatgacccagaggtctgtctactccactccccctggtgatggaaagcccaagttgaggaaccatgtcctcacctccctaggcctcaagccttcagatcaaccgcttctttctggacgatggagacctcatcccagatgctcagaaagtttgttggatgtcacaaaatgccagagcctcagccgctgtcgaaccaagaacgaaactcagtccttaagtggaagtgactcctgtgcctgctttagcgtaggaaatgagaccaaccagtttctagcacctgccttctgcttcccaggaaagacggagaaaaaaataatcttgtatgttcttaactgcttctaggtggtggatggaaaggtttgatgttaatttccggtcttcgtgacataccacatcttcccatgaggactcggtgttgctggcacaagagctgtagtgtcttggttacctgtgttggtactcaatacagtgtagacatcttttcaaataaaatatgattgtgtacaatcatgagtccaacatttgacacgtctgtcaactttagatgtcacttctggtgatatatattattataatgtcatatattatatcatatatatatatatatatatatatatatatatatatatattagttttgtagactaagctagccagcctcaaacgagaacct

SEQ ID NO: 7994 - DNA, 600 bp, Rattus norvegicus
atgtaaacatggtagctgccaagaaggagtgagaatccttccttaagtctcctaggtggtgacgggtggctaggccccaggataggtacctatttggggaccccatagagcactgcactgactgagggatggtaacaggatgtgtaggttttggaggcccatatgtccattcatgaccagtgacttgtctcacagccatgcaacccttgcctcctgtgctgacttagcaggggataaagtgagagaaagcttgggctaatcagggggtcgctcagctcctcctaactggattgtcctatgtgtctttgcttctgtgctgctgatgctctgccctgtgctgacatgacctccctggcagtggcacaactggagctgggtggaggcccgggggccggtgaccttcagaccttggcactggaggtggcccggcagaagcgcggcatcgtggatcagtgctgcaccagcatctgctctctctaccaactggagaactactgcaactaggcccaccactaccctgtccacccctctgcaatgaataaaacctttgaaagagcactacaagttgtgtgtacatgcgtgcatgtgcatatgtggtgc

SEQ ID NO: 7995 - DNA, 1136 bp, Rattus norvegicus; identical to SEQ ID NO: 3899

SEQ ID NO: 7996 - DNA, 499 bp, Rattus norvegicus; identical to SEQ ID NO: 3900

SEQ ID NO: 7997 - DNA, 455 bp, Rattus norvegicus; identical to SEQ ID NO: 3901
  misc_feature (387)..(388): n is a, c, g, or t

SEQ ID NO: 7998 - DNA, 448 bp, Rattus norvegicus; identical to SEQ ID NO: 3902

SEQ ID NO: 7999 - DNA, 489 bp, Rattus norvegicus
gaaaaaaaaaactttgttgccaaaaggttgtgctatcccaattttttatatgtctgcatgtttgaaacacaaaaaaaaaaaaaaaaaacaaaagaaaatgcactctaacttatgtgaactgagagaaaaaaaatcaggttttaaaaaggaaaaacccatggggaatgatattttttgaaagacttttgtatacagttgagtacttagaaaaagacgaaccagatgtaatatattttgtggatgtttttatttcttggatttatagtaccttatactaaggttaaaaaaatgcttgatattgtgaaaggtgagattcttcaccaacatttcatttacttcttgtcacattgttatgccaatataatatagttaatgaaaacagcatttttaaaagcaattattgaaacggtgtaatgttgtaccatttgccctgtgagcaaatgcgaatacagtaaatatattgtgtttgctgacaaaaaaaaaaaaaaa

SEQ ID NO: 8000 - DNA, 600 bp, Rattus norvegicus
  misc_feature (583)..(583): n is a, c, g, or t
gttgagtgcagggctcagttctttcccaacacaccactgcaagagctgggacaggatgtgacctgtagccgagaagtgggtttgatctgtttgaacaagaaccagctgccacccatttgctacaactatgagatccggatagaatgctgcaccatagtaaacatctgttccacaacttcagctaccacacagcccacctcacatggagtcagcataaaaacaaagacgaactggatcacaaacacatattccttttccaccgagaataccagtggtcactcaacagtcataaacaccaagacctgggtcacaggtagtacacacacaacccctcaaccaggaacaaggccgacacccagcatagtgtccacccaggacaccagcaccagctctgtgcagacagacagcaccacctcctcatcccacaccagctcaccaaatacaggaagagtcagcaccacccacacaacccacaccagctcaccacctacaggaggaaccagccccacctccacaacccacaccagctcaccaaatacaggaggaaccagccccacctccacaacccacaccagctcaccanctacaggaggaaccagc

SEQ ID NO: 8001 - DNA, 600 bp, Rattus norvegicus
tgctggagtctcagtgtccccgctgttccctgtgcagcctgcgatcgccactttagaggaaaagtacccgcttatccccgcggcaaggctgggaagccgggcttactcagcgctaacgggaacgaaggcacagatttgagtcctttcgtagcagtatttattatgcccttactgtttgtagagacagttttaggggtttagaataacagaacaaattagaaaaattgtctggagaacttattttgtcaagcaattttagcagacaatggattggaagtgagaacaggtttttttcccttcttctgctggttattgaacaaagcagttggttgagacaacagagtttcttttgtctcgttctgtttttgtttttaaaagaaaagaggaaatccccacatgtgcaaagatgtggttgcaaattgggtgcacatgaagttgggtgcacttaggatttaggattagtgaacacgtgtgttcttgatgtatactgtagtttttgatttatcactttttcctttctttcctttaggaaaagcctaaagattaggttataagaaaaaccgaagccatgtttcgaagacctgtgttacaggtagtcac

SEQ ID NO: 8002 - DNA, 600 bp, Rattus norvegicus
cacggacatacagattttcctcaagaaaatagtttactgtagtcataattataaaactagaatccctatgaagaacactatgacttttctttgctgtggcaaaagtacggtgctttgcaaataggagtagttttatgaagtaacagatgttttatgtgtagacataaagccgaggctgattctagtaagaggtgggtatgaatagtaacctgtcagagctggacactcttggagatgtgtgtactcggttctcttatgtttgtaaagggtggactattcctagccacaggcttcactggctcaatgcatcacccaggtcgtgtctcagaagccaagagagatttccattagatagtgaattatgaaatgtctcacactggaaaaacgagtcatctgctgatgtcatgctgattctaaccaatcctaaacaaagccccagccctcctctttgagaggtaccaatgtgtgagtgtacaactaagtactacagtataaaacttcacagtgccaataccatgaagaggaactcagacagctctgacctcatgagacaagagccggctggcaaaacagaagggacccgaaaggtaatgcttttaa

SEQ ID NO: 8003 - DNA, 600 bp, Rattus norvegicus
cttgctaatgtactgttatcaatgacacaagtgtgttctatgttcctgatattgtgtgctcatgacaaatactcttccatggggaaaacaggaagaccaaaatcaagtctgggctagaacttgagaagttgccaaaggaagaccaatggcttgaccttaacctaactgacccctacttgccttaaggcaacagctccctgctacctggggagggcctgcttgggatagcggatctgaggatgaagggaaggacaagattctaccccccattactatgtttggccaaagagggagtggataagtcatcctggactggagggtagttagaggcagagtcatatttccaaagtgatttcagttttcttttcctttttttttaatatgtgtgtgtgtgtgtgtgtgtgtgtgtgtgtgtgttttcattttctgacagcagccagggtttgatctcttttgtggaaactcccccagtcctaggaagggggggcacttcctctgctgccctggctccctataaaaggtctgcctgagcagtcgagcacccctgcagatgattctgagacaacgcatgcatcttccacagtctctgcttcaggtacc

SEQ ID NO: 8004 - DNA, 447 bp, Rattus norvegicus
tctgtaaacgagtgcggatttgtaaccaggcgagttcgttgttacccagagcctttaatataatatttaaagttgtgtccactggataaggtttcatcttgcccaactgttactgccaaattgaattcaagaaacctgtgtgggtctattctccccacagtaccataataaaataggtttttcccccacaaatgaaggtcttttacaaaacacgaaaataatttatttatttttttgttgttgttggataacgaaattacgtattggatactttttatttcggaagcgcatggctttgtacagtagacgccatctggagtattcctaaaacacacaaagagactttaaaatttcaacttcatctgtgtttgtcttctgtgatctcagtgttgtatttaccttaaaataaacccacgttgttcttctgcccaaaaaaaaaaaaaaaaa

SEQ ID NO: 8005 - DNA, 283 bp, Rattus norvegicus
tatatgccgctgtcgcagatgtgcctgccctcattgcgaaaaccatgcccacaatcaacgccatcaactatgcgttgcgcagcgagatggtctgtagaggaacctggcagtgccgatctgcacaaaagagcaagcaggaccgaacccagtgaaattcttcaaggggctgatcacagtcaagcctacctcttcaagcctgggctaaggatgccccaggtcaggaagatgctacaataaaaggagaaagccctgggatttgtttttggaaaaaaaaaaaaaaaaa

SEQ ID NO: 8006 - DNA, 326 bp, Rattus norvegicus
caagtatgccattgtgttccggacaccgccctatcacaagatgaagattgagaggcctgtaacagtgttcctgcagctgaaacgcaagcgtgggggcgatgtctccgactccaaacagttcacgtattaccctctggtggaagacaaggaggaagtacagaggaagcggagaaaggccttgcctaccttctcccagcccttcgggggcggatccctggatccctctgtacagcatccctgcctaattgaaatcttatttaaacttcaagcccacacctcagtgggccaaataaagggaaagaccccttcccagtttacggtacggc

SEQ ID NO: 8007 - DNA, 500 bp, Rattus norvegicus; identical to SEQ ID NO: 3911

SEQ ID NO: 8008 - DNA, 407 bp, Rattus norvegicus; identical to SEQ ID NO: 3912

SEQ ID NO: 8009 - DNA, 319 bp, Rattus norvegicus
tctccagggcaatggtttcagctcccgcaggtgtgaagtgaaaaggacaggaaatgcttctttgtctttgtgcaaacagaggaagcttggggctttgctcacaccacctggggatattgctctccacctctaccaatgtttacaagaacataccacactgcgatgccttcctcccagaccctgtcccagcattcagacctgcttcctggcagtcactgacatgtctaaatgatgtgactttgggattcttcgttgctttgatttattttgccactgagcaataaaatcattagaaccatctcaaaaaaaaaaaaaaaaa

SEQ ID NO: 8010 - DNA, 383 bp, Rattus norvegicus
aattcggcacggggtttaagcagaaatattgctagtttaatattgcgtcaggtcgtcgtgttaaccaggaacaggtgacagtaaaatccaagccaacagcactctgacacccgaaacctaaaaaaaaaaaaaaaaaaaaaaaaaggcgaccgaagcgaaatgtgtaaacgtgtaccgggttatcctgtgctctggaatagactgttgttgaaataattagaagatatattaaggtgttcctggtaatgaaggcatgtaagttatcataattgtagttttctgcataagtgtcaaactctatctttccgtgtgctgtatgctgagttacaagttaggtcatttatgaatggaatgtaaaacaatactaaaaaaaaaaaaaaaaa

SEQ ID NO: 8011 - DNA, 600 bp, Rattus norvegicus
gctggccagcctggagaaggactgagaaaatctgtgcccccatctgtgccaaagcctcagtcagctactaagccaccggggacccccaccagcccgggctccaccccctccacagcgccagcaccttcacccctggctggggaccagcagccatcttctgctgccttcatccccctcatatcaacccgtgtgtctcttcgaaagacccgacagccgccagagcgcatcgccagtggcaccatcaccaagggtgtggttctggacagtactgaggccctgtgccttgccatctcccggaactcggagcagatggccagccacagtgctgtgctggaggcgggcaagaacctgtacacattctgtgtgagctacgtggactctatccagcagatgaggaacaagtttgccttccgcgaggctatcaacaagctggagagcaacctccgagagctgcagatctgccctgcgacagcctccagtgggccagcggccacacaagacttcagcaagctgcttagctctgtgaaggagatcagcgacattgtccggaggtagcagcaacctgtgtgtgtcagcgagagatactgcagtcctcggggc

SEQ ID NO: 8012 - DNA, 600 bp, Rattus norvegicus
ccatagagctaggccagcagggcttcgtacaggtgagcatgtctccattgacctctgaggtcacagtccagctagacagctgccatctggatttggggccagaaggtgacatggtggaactcatccagagtcgagcagccaagggcagctgtgtgagcttgctgtccccaagccctgagggcgacccacgtttcagctttctcctccgtgtctacatggtgcccacacccgcagctggcaccctcagttgcaacttagccctgcaccctagcaccttgtcccaggaagtctacaagactgtctccatgcgcctgaacatcgtcagtcctgacctgtctggcaaaggcctcgtcctgccctctgtactgggcatcacctttggtgccttcctcattggggccctgctcacagctgcactctggtacatctattctcacacacgtgcccctagcaagcgggagcccgtggtggcagtggctgccccggcctcctctgagagcagcagtaccaaccacagcatcgggagcagccacaagctgggaaccatcggccatgaacttgtcccctcagccaaggatggagcgtcctcctgtacctgct

SEQ ID NO: 8013 - DNA, 550 bp, Rattus norvegicus; identical to SEQ ID NO: 3917

SEQ ID NO: 8014 - DNA, 256 bp, Rattus norvegicus
caacatcccgggaagcttccagtgcagctgtccctcatccggctacaggctagctcccaatggtcgcaactgccaagacattgacgagtgtgtgaccggtatccacaactgttccattaacgagacctgcttaaacatccagggcagcttccgctgtctatccttcgagtgccctgagaaccatcgccgctttgcagacacccgctgtgagcgcttgccttgccaagaaaaaaaaaaagaaaaaaaaaaaaaggaa

SEQ ID NO: 8015 - DNA, 600 bp, Rattus norvegicus
  misc_feature (58)..(58): n is a, c, g, or t
gactgttcaaaacttaaaaggaaagttgagagttagaaggaacttgccaagctctggngaaagtgtggaaggcacactgtgaggatgtgtgggaaagccaggcatgaagaaacatagctatggccaactggtgcaggctgtgcggaggtggcagacataggtgtaggtcccaacgtagtctagcaccaggtcttacactgacgcaccaggtagtttattccattcagccaagcatctggactcttctagaccacactgtctgccatcttctgaagaactatggtgacacggtcatctttagtcacctctcaggtttgggaaattgcttctcctgctcccatccttgaggttcatcacagctgagcgcatcgagctcctcttcttccgaaagaccatagggaacactccaatggagaagctgctgtgtgacatgttcaaaaactagtgggagtgccaagggtacaggctcctgggcaacacatcttcgaagctaaatattttcctgcctttctcatccagtaattccacatgcaggtatttgtaccttgcagaaatttctcccaaaatatattattggaaagtcaaaaaaaaaaaaaaaaa

SEQ ID NO: 8016 - DNA, 355 bp, Rattus norvegicus
cccccatcctgaagccagctggtacctccagtttgcacagggacttgttgggggctgagggccctgcctacccttggtgctgtcataaaagggcaggcgggagcaggctgagaagcagcctgtgcctcccagagactgactcagagagccagagacgtgtgtgtgtgtgtgtgtgtgtgtgtgtgtgtgtgtgtgtgtgtgaaagacgggggtggggtatgtatgcgtgtgttgtgcacatgcttgcctgcacagagagcatgagtgtgtacaagcttagccctgtgccctgtagtggggccagctgggcagacagcgaaataaaaggcaataagttgaaaaaaaaaaaaaaaaa

SEQ ID NO: 8017 - DNA, 600 bp, Rattus norvegicus
tcatgcaagctacctgcgtaccacaggtggtaactaaaacacgcttctgttggcataacaaaccctcaaggctttctatatcaagttggcctttcttctacctttactggtttaatacacacttacaatcttattttgtattaggaaatatggcctcatattgcgttactactgactaatgaaaatgccaagtgagtaatggggacgctcgtgtttacagtatactatttgctgaagatattgtgaagacctacacttggcttaacccactccacttaattcaaagatgtcttaagaaatcggctttcattttcaaatattctttcccactttccctttgcgttggaacccgggtctcccaaaggcgcttattttcccccctttctaaagggagtggggataattacgttgtgtgggctcttcggtgttcaacgtggggcccgcccccgatttttataaacaaaactcgttacccggggcaactcctgtggaaaaaccacccccctgtgggcagcttttcgccctccaaactctttataatattggggtcttttgtgccggaacaacggatatctcccccattcttttttccctcgcgct

SEQ ID NO: 8018 - DNA, 600 bp, Rattus norvegicus
  misc_feature (214)..(214): n is a, c, g, or t
tcacccttttgaagatccatttaaccttaaagcttaagtgtgcccggcctgtaagggaaagagctacagtgaatcaagctttaaagggccccgttgtaacaaaccaaactgttttcgtttaagaagctttactaatattcctgagcatgggcgaagttgtttaacatctgtggtttaaaatagatgattaaccagggggaggaactttttctcnggaagaatgttacatatggtccagataagtgagtgccgtttcataccgtgtagaaaaagagacgttctataagtgttagcaagtatatgggctttaagagcctgctgtaattataagatgtttttaatgaaatatttttggcaaacattaggggggggttttcctaaacctatgggaatatttcttttggaaatttattttagagctccatggcagagctcttaaaatctatcaggatgttttctggttggccaagatgcttaatttgtgttgttgttatccccagtttccaggatctgagggtgagaagtaacaactggcaggatctggtttgcataattgcatgatatgttcaatcacaaaataaagccgttatgagccctttc

SEQ ID NO: 8019 - DNA, 582 bp, Rattus norvegicus; identical to SEQ ID NO: 3923

SEQ ID NO: 8020 - DNA, 424 bp, Rattus norvegicus
agatttcggcacgagccctgtgcaggtggacacacaggcctggcctgtcgctctcacttgtcttccagcggggagcttcacgttgccgagtggaagaaccatgacctccacttgcttccaaggtgctagggaagtttcagggtacgctggttcccctctccagctggaggccgagtttctggggactgcagatttttctactctgtgatcgattcaatgcccgatgcttctgtttcattcccgaccctttatactatgcattttccttttatcaggtgtataaagttaaatactgtgtatttatcactaaaaagtacatgaacttaagagacaactaagcctttcgtgtttttccacaggtgtttaagcttctctgtacagttgaaataaacagacagcaaaatggtaaaaaaaaaaaaaaaaa

SEQ ID NO: 8021 - DNA, 496 bp, Rattus norvegicus
ctggaaggacccgaggctactgcgctggcctgcagtgccagaggccgcccctctccacgcgtgcgctgttccagggaaggtgcagccaggctggagaggctacaggtgtcccgagaggatgcggggacctacctgtgtgtggctaccaacgcgcatggcacggattcacggaccgtcactgtgggtgtggaataccggcctgtggtggctgagctggcagcctcgcccccaagcgtgcggcctggcggaaacttcactctgacctgccgtgcagaggcctggcctccagcccagatcagctggcgcgcgcccccgggagctctcaacctcggtctctccagcaacaacagcacgctgagcgtggcgggtgccatgggcagccatggtggcgagtatgagtgcgcagccaccaatgcgcatgggcgccacgcacggcgcatcacggtgcgcgtggccggtgagtgacgggctcctggagtaaaaaaaaaaaaaaaaa

SEQ ID NO: 8022 - DNA, 303 bp, Rattus norvegicus; identical to SEQ ID NO: 3926
  misc_feature (74)..(75): n is a, c, g, or t
  misc_feature (77)..(77): n is a, c, g, or t

SEQ ID NO: 8023 - DNA, 300 bp, Rattus norvegicus
tgcagggtgacctgcttccccaaaggccaacagcattggcctggccagaccaggtgaccttagatttggtgaacaacgtactatggaagccacatcactattgggcccccaggtctgatctgggttttgcctctgcccttggggaaatgctatcagaaattcgccccattttctttacagtcttttgtgtctgtcatttctctttcaaaaaggcggtgttttttgttgttgttggtttttttttttttttaaagaaaagttcttaaaacactaacggaaacccaaaaaaaaaaaaaaaaa

SEQ ID NO: 8024 - DNA, 493 bp, Rattus norvegicus
  misc_feature (282)..(282): n is a, c, g, or t
ctctcatgtccagtacccagcccaaccagccgccatgtctctatgtgccccacggcaaacgagtggtggtggctgcccaccgcctggtatttgttggggacaccctaggccggctggcagcctctgcacctctccgagcacaggtgggggctgcaggtacagtgctggcccaaaccttgcgggccactgtgcttgctgtcaagggggccgccttaggttacccatctgacactgcggtccaagagatggcgcgatgtgtggcagagcttgcagggcaggccntacgcttcaccaccctactcgctggcctgctcccctgagggcctgtttgtccagccttaccctccctgcctgccagagccctgcgctccggctagaggttcatctcttggtcattttagccacccaccgaggcatctcttcccccatacctactgctttttgtatgagccattttgtataaattatttatatttaaaaaaaaaaaaaaaaa

SEQ ID NO: 8025 - DNA, 429 bp, Rattus norvegicus
ccaacttttctgcttatttgggagttgttgggcgcggacagtctagatgtcagagaaaaagcagccggtagacttaggtctgttagaggaagacgacgagtttgaagagttccctgccgaagactgggctggcttagatgaagatgaagatgcacatgtctgggaggataattgggatgatgacaatgtagaggatgacttctctaatcagttacgagctgaactagagaaacatggttataagatggagacttcatagcatccagaagaagtgttgaagtaacctaaacttgacctgcttaatacattctagggcagagaacccaggatgggacactaaaaaaatgtgtttatttcattatctgcttggatttatttgtgtttttgtaacacaaaaaataaatgttttgatataaaaaaaaaaaaaaa

SEQ ID NO: 8026 - DNA, 488 bp, Rattus norvegicus
cgaggattataggtatgttataaggatgggtattttacttggctttagaatgtttttcaagaaaactaattcttaactgatgaagttgtcgctactaaaatgcttgttttcatcatgacatcgtgcgcttctaaattaatcatcattttcgttgtagaaaaatggagtgaatttatattagtcttggaaactaataatagcattgtaaatttatgagatgattttaacagaaaaaattatagaagaatatagttattttaattgtaatattactaactgtagggtgaggcgggggtcctgttgtggtgaactgttatagcttgttactcagtttctttttgatcattttctcggtctctgaggtgaagcgagttattaattgaccctgtaaactcacatatgcatattgtatatgtgtagcgatgtgatcacactgtcttggaattacattaaactgtttggaatcactggaaaaaaaaaaaaaaaaa

SEQ ID NO: 8027 - DNA, 391 bp, Rattus norvegicus
ttcatgaaatggacactagcaatggggtgctgctccctttatacgccccggacgccagcatcatttacattatgtgggaagggtgacagcagtatccgctactttgaaatcacggatgagtccccatacgtgcaatacgtcaacaccttcagcagcaaggagcctcagagagggatgggttacatgcccaagcgggggcttgacgtcaacaagtgtgagatcgccagatccttcaagcttcacgagagaaagtgtgaacttcttctcatgacagtccccaggacagtgtaatgcccctacgcccactcttatagagtgtccatagtgtcctgtcaaacactcgcttccgttttcagagataaaagacattgattacaaaaaaaaaaaaaaa

SEQ ID NO: 8028 - DNA, 351 bp, Rattus norvegicus; identical to SEQ ID NO: 3932

SEQ ID NO: 8029 - DNA, 327 bp, Rattus norvegicus; identical to SEQ ID NO: 3933

SEQ ID NO: 8030 - DNA, 377 bp, Rattus norvegicus; identical to SEQ ID NO: 3934

SEQ ID NO: 8031 - DNA, 440 bp, Rattus norvegicus
aaggtgtgtctcagttgttcaatctcagtgcttcctcggtaccgcctcccggcgccaggccttcccgctccactgaaaagcagctcctcaaactccctgtactcacagtaggacacccaacgccttggctttcaggcctggccacggctacagggagcttggcacctggacggcttctcaggctggagtgatggcgtaggtaggtgtggtgagctcagccgtttgcccttgaattgatgccctttgatgtgtgccacgtagtgaaagtgcaagtcttcagtctcccaccacttcggtttcctgtttctggacttaacaaccttgtgaatagcacagtcaagagaaatggatacctgcatagcccataggaagtaacactgtagagctccatattctggtattgtgattatattgttttatattaaaaaaaaaaaaaaaaa

SEQ ID NO: 8032 - DNA, 542 bp, Rattus norvegicus
tgcacccagcgccgtcagcgccctgatccccggacctgccgttgccgctgcagacgccgccgcttcctccattgccaagggcggggcttagagctcaacccagatacctgcaggtgccggaagctgcgaaggtgacaagctgcttttcggactccacaggcctgtgtgcctcacaggcctttttcatagggagaagagtggagcataggataaccacctcagtctgggaggacattgccccaggacttggagcttttagagagctctcaccatcttttatctcccagagctgccttctaacaattgtcaagagaacctcatgcctcaccttaggggccagggtactatctcagttagccactctggtcaagtgaacatcttgctggctgtctcccctcactatgaagaccccaaacttctaccaatactaggacttgggttgttatgataactgtgacacacacacacacacacacacacacacacacacacacacacactttgataaaagaaatggaagacactaaaaaaaaaaaaaaaaa

SEQ ID NO: 8033 - DNA, 523 bp, Rattus norvegicus
gctgttccggcgcccactacccaagaaaccaaagaaatgaagctggcaagctacttttcagcctcaagctttacacagctgtccttacttcctaacatctttctgataacattattatgttgccttcttgtttctcactttgatatttaaaagatgttcaatacactgtttgaatgtgctggtaactgctttgcttcttgagtagagccaccaccaccatagcccagccagatgagtgctctgtggacccacagcctaagctgagtgtgaccccagaagccacgatgtgctctgtatccagaacacacttggcagatggaggaagcatctgagtttgagaccatggctgttacagggatcatgtaaacttgctgtttttgttttttcctgccgggtgttgtatgtgtggtgacttgcggatttatgtttcagtgtactggaaactttccattttattcaagaaatctgttcatgttaaaagccttgattaaagaggaagtttttttaaaaaaaaaaaaaaaaa

SEQ ID NO: 8034 - DNA, 395 bp, Rattus norvegicus
tgcattgtgtggtgggccccctagagggggaagatggccctttgtctgctccgtggggtgcactggagtgaggggggtggccgggctgcctctggcatatctgtcttcccctgcaggcgctgtgtgagctggccctgcccctcctcattacagtatgaagggagccgtgacacgcagcattttcctgccgttctctcagggactctcagggcagctcctgccactccgccagggccagcatgccagtccaggcagagcaggtggctggctggctggccgtctcgccccgcccctccacaggaccctggaccagggcggtgcagggcgcagccctgaggagcgccaaggaactgcagcaaataaactccaactctgcccaaaaaaaaaaaaaaaaa

SEQ ID NO: 8035 - DNA, 441 bp, Rattus norvegicus
tggacacggtgtcggtgctgcaccgggccggggcgcggctggacgtgcgcgatgtcctgggaccgtatgcccgtggacctggttgaggagatgggccatcgtgatgttgtgacggtacctgcgagggtctgcaggggggccccagaggcgggagccatgcccgcatagatgccgcggaaggtccctcagacatccccgattgaaagatccagagcggctttgagaaacctccggaaacttagatcttcagtctccgaaggtcttacagggtctgaagtgcgcccgccacaacccacgctgctgttagtagttttcatttagaaaatagagtttttaaaaatgtcgtgccttttaaagtcgatctatcccttcccccagtaccgtaaattccagtatagcattgcatattattctttaaaaatgtaaaaaagaaaaaaaaaa

SEQ ID NO: 8036 - DNA, 589 bp, Rattus norvegicus
agaattcggcacgagggtgatgatgcctcaagcaatacgtggtcccctaaattgttgcacaagttcaacgatgtggtgtggcatgtgagctggtccatcacagccaacatcctggctgtctctggtggagacaataaggtgaccctgtggaaggagtcagttgatgggcagtgggtgtgcatcagtgatgtcaacaagggccagggctccgtatcagcatcagtgacagagggccagcagaacgagcagtgacaagacaggtggggcctggctccccacccgccagctccaggactgccccttcctgggccaactaaccaaacaactgggaagagcccccaactccaacaggattattttcccaggaggagttacagatgcagccacagattgatcatctgccttaacgtgatcggagatgctttgtaatctactgtccagctgaaagcactcatgttacgaggaagaaactacaagtgatgttcaaatctattttgggtcatttttatgtacctttgggttcaggcattatttggggggttttgtttccaaaggaactaaataaagtcatattgcttataaaaaaaaa

SEQ ID NO: 8037 - DNA, 555 bp, Rattus norvegicus
tcttgctctggcagggtgtggtgaaagagtccagccgcagcaaagacttcattagccttggactacaggatggccatcttgtcttcaactaccaactgggcagtggggaagcccgccttgtctctgaagaccccatcaatgacggcgagtggcatcgagtgacggcactgcgagagggccagagaggctccatccaagtagacggtgaggagctggtcatcggccggtccccgggtcgtaatgtggccgtcaacaccaaggacatcatctatattggtggtgccccagatgtggccacactgaccaggggcaagttctcctctgggatcacaggctgtctcaagaatctggtgctgcactcagcccggcctggagccccacccccacagcccctggacctgcagcatcgtgcccaggcaggggccaacacacgtccttgcccctcataggcagctgcctgcctcccacggactcctgggcagcacccagcctgacagtgccgagtatattattattaatattattatgactttttataagaaaaaaaaaaaaaaa

SEQ ID NO: 8038 - DNA, 459 bp, Rattus norvegicus
ccttacctgtgctcccagtgcgggcgtgcttttggttttaagtcacttctcaccagacaccagaggacacactccaagtagaagaggctttttgtaaacagcttatgtgggtagggagtggatgggattccacacctcacgtctgactagaggactcagtccagttggtagagaagcctttggctttaactctgccctcatcagacatcagcagacctactctggcaagaagcccttaagtgcagggatcgtgggcgtggcttcagctggacgtttcacctccacagacataggaagacccaagtgtgggccatcagctcctagcctgagaggtgtttgcctgacctgttgtttcctttccccaggatcagggagctggcagaaatcactagtgaatgttcccggaaatagagtaggggaaaagtccttgcttgttcctggaaaaaaaaaaaaaaaaaa

SEQ ID NO: 8039 - DNA, 236 bp, Rattus norvegicus; identical to SEQ ID NO: 3943

SEQ ID NO: 8040 - DNA, 460 bp, Rattus norvegicus; identical to SEQ ID NO: 3944

SEQ ID NO: 8041 - DNA, 438 bp, Rattus norvegicus; identical to SEQ ID NO: 3945

SEQ ID NO: 8042 - DNA, 362 bp, Rattus norvegicus; identical to SEQ ID NO: 3946

SEQ ID NO: 8043 - DNA, 376 bp, Rattus norvegicus; identical to SEQ ID NO: 3947

SEQ ID NO: 8044 - DNA, 313 bp, Rattus norvegicus; identical to SEQ ID NO: 3948

SEQ ID NO: 8045 - DNA, 429 bp, Rattus norvegicus; identical to SEQ ID NO: 3949

SEQ ID NO: 8046 - DNA, 360 bp, Rattus norvegicus; identical to SEQ ID NO: 3950

SEQ ID NO: 8047 - DNA, 577 bp, Rattus norvegicus; identical to SEQ ID NO: 3951

SEQ ID NO: 8048 - DNA, 458 bp, Rattus norvegicus; identical to SEQ ID NO: 3952

SEQ ID NO: 8049 - DNA, 393 bp, Rattus norvegicus; identical to SEQ ID NO: 3953

SEQ ID NO: 8050 - DNA, 430 bp, Rattus norvegicus; identical to SEQ ID NO: 3954

SEQ ID NO: 8051 - DNA, 406 bp, Rattus norvegicus
  misc_feature (20)..(20): n is a, c, g, or t
gagtttgcaagccgagcttnccgctgtgcagacggaagccagagccttgagcacccaggtggaagagctgaaagatgagttagtaacacagaggcgcaagcacgcctctaacgtcaaggacctcagcaaacagcttcagcaagctcggagaaagttagaccagactgagaatggaaactacgacaaagatgtgagcagcatgggaagtcgttccagttcatcagggtcacttaatgctcgaagcagtgctgaagaccgatctccagagaacaccagctcctcggtggctgtggacaacttcccagaagtggacaaggccatgctgattgacaggatagtgaggctgcagaaagcgcatgcccggaagaatgagaagatagagttcatggaggaccacatcctcgtg

SEQ ID NO: 8052 - DNA, 436 bp, Rattus norvegicus; identical to SEQ ID NO: 3956

SEQ ID NO: 8053 - DNA, 419 bp, Rattus norvegicus; identical to SEQ ID NO: 3957

SEQ ID NO: 8054 - DNA, 527 bp, Rattus norvegicus; identical to SEQ ID NO: 3958

SEQ ID NO: 8055 - DNA, 611 bp, Rattus norvegicus; identical to SEQ ID NO: 3959

SEQ ID NO: 8056 - DNA, 488 bp, Rattus norvegicus; identical to SEQ ID NO: 3960

SEQ ID NO: 8057 - DNA, 479 bp, Rattus norvegicus; identical to SEQ ID NO: 3961
  misc_feature (358)..(358): n is a, c, g, or t

SEQ ID NO: 8058 - DNA, 440 bp, Rattus norvegicus; identical to SEQ ID NO: 3962

SEQ ID NO: 8059 - DNA, 582 bp, Rattus norvegicus; identical to SEQ ID NO: 3963

SEQ ID NO: 8060 - DNA, 460 bp, Rattus norvegicus; identical to SEQ ID NO: 3964

SEQ ID NO: 8061 - DNA, 144 bp, Rattus norvegicus
ttccagcgcagcggcctgtgccagagcccctgctcctcctgtgcatatcagtatcatggagggacattactatgatccactgcagtccagggaccaatctatacccatggtgacagccctgccccactaccccacagggcatga

SEQ ID NO: 8062 - DNA, 600 bp, Rattus norvegicus
  misc_feature (94)..(94): n is a, c, g, or t
  misc_feature (539)..(539): n is a, c, g, or t
  misc_feature (553)..(554): n is a, c, g, or t
ctcctgtgctgctgtggggccattgaatgcagaggaagacttctttagagggaagacttctccactttgagaacgcttgaactatccttttccncaggaatgggtcttcctgactgttgaactctgaccccaagtctctgatctagcttcttcccagctcctagtagatagagatggggattctcaatcaggactttcccagcgtggtgctagcaggcactagggtgggtagacatgaccactctagcatcagcctgaggtccttctcatcttgtatgcattcatgattcacatgggctgtgtatctgccatccctgatttgtatggtttcttgaaagtcttctaacaagatggtaaagtagagattgtggtttgtcttatctcctgccttgatcttccatgtcatttcccagtgggcaactatcattagtttatacctcgattttatttgccctgtgtaatttttaactaaaaatgttacataaccacaagggaggcctaagaaaaaaactaaccctttctcaagtcttaatagtctngacacagtcatgtnntttatttaacctttaatatactttaattaaaaaaaattaacagtaa

SEQ ID NO: 8063 - DNA, 566 bp, Rattus norvegicus
  misc_feature (516)..(516): n is a, c, g, or t
ggactcacacttcttgatgtcggagtgcgagagcgagtcatcacctagcacttcaggatgggtgtcagctcataccccgtgtctgtccaccagggtcgagagggcaaaccgtcagaagtcctgcagtatgagcacatcctctcgttcggggccccggggcccacacgcacaagatcgtagttgacgagcgggagctgctctttgagacgagtgaggtggtggatgtggccaagctcatgaaagcgtatatcagcatgattgtgaagaagcgctatagcaccacacgctctgtgagcagccagggcagctccaggtgaagacgagccaagcccacgtgtcttgccgatgtgaacgtgccactctttgcctgggccagcgcctggtcctgacccagctttggaaactcagctgtccaggcttctgataaccggtcgtcagagggaggagtcccgggggctcccttcacccgatcagcctcagagatcacgtattaagctgtcaacctttaacagtctngcacaatctcttaagctttagttaaaaatcctagatgagaacttgcctta

SEQ ID NO: 8064 - DNA, 732 bp, Rattus norvegicus; identical to SEQ ID NO: 3968

SEQ ID NO: 8065 - DNA, 540 bp, Rattus norvegicus; identical to SEQ ID NO: 3969
  misc_feature (514)..(514): n is a, c, g, or t

SEQ ID NO: 8066 - DNA, 523 bp, Rattus norvegicus; identical to SEQ ID NO: 3970

SEQ ID NO: 8067 - DNA, 531 bp, Rattus norvegicus; identical to SEQ ID NO: 3971
  misc_feature (356)..(356): n is a, c, g, or t

SEQ ID NO: 8068 - DNA, 491 bp, Rattus norvegicus; identical to SEQ ID NO: 3972
  misc_feature (393)..(393): n is a, c, g, or t

SEQ ID NO: 8069 - DNA, 625 bp, Rattus norvegicus; identical to SEQ ID NO: 3973

SEQ ID NO: 8070 - DNA, 600 bp, Rattus norvegicus
tgatcccagtttaacaactgtttaaataggatcgatattctaagcagttttctcatcattttcgactgagtgctcccagctgccaaaatggcaaatgactgtcagtttaaaaattttaccgacagggttgaacatacaataatgctttgaaactgaaatgttttaattttattttcgcagactttcaaaagtattccataataccttgaggatgggatccaaatctaaacgcaaggtccgcttgtatttctcgtggctgaagatcaactttatgtattttgagcgcacctgtattttgtctgcaccccatcacgaagtgggctgtgggctttaccactcatggcatcgcgtctgagcacaggtgttagattgcacagtgcttctgagctccagatttttcgcactaggtatgcgccacctgtatgatcaatgctaacttgaatgcttgtcagtacataccatcaaacttttatttacaagcatgaaagttatggtagcatggaggccagagacatgactcttctacacggtcagattcagttcactaaataatactatcaagacccaactggaagcttggtgagagtccttgcaaagctg

SEQ ID NO: 8071 - DNA, 471 bp, Rattus norvegicus; identical to SEQ ID NO: 3975
  misc_feature (466)..(466): n is a, c, g, or t
  misc_feature (471)..(471): n is a, c, g, or t

SEQ ID NO: 8072 - DNA, 459 bp, Rattus norvegicus
  misc_feature (63)..(63): n is a, c, g, or t
  misc_feature (68)..(68): n is a, c, g, or t
  misc_feature (90)..(90): n is a, c, g, or t
  misc_feature (138)..(138): n is a, c, g, or t
  misc_feature (164)..(164): n is a, c, g, or t
  misc_feature (198)..(198): n is a, c, g, or t
  misc_feature (216)..(216): n is a, c, g, or t
  misc_feature (307)..(307): n is a, c, g, or t
  misc_feature (324)..(324): n is a, c, g, or t
  misc_feature (371)..(371): n is a, c, g, or t
  misc_feature (412)..(412): n is a, c, g, or t
  misc_feature (435)..(435): n is a, c, g, or t
  misc_feature (447)..(447): n is a, c, g, or t
acccgggtgagaacgccccatcttaggggaggcagggcccaaagagccccggcccagaggaanagggnggccccttcccctgcccatccntgcccacagccagcacagcacccggggtgacaccagcattgagccccntcccttttgcaataatcgggggtttnagccccacccaggtgccgcggccagctcctgcgnttttatatattatagtantatgtagccgagctgcccttccttcctatggaagtgggaaacatggtcaggacacgaggggtggggacaccttgttttccaccacccccantcacccagtgtttgggnttaggatcctcaggcgaggcccctggggtgggtcccccttggggctnctggggcctttttgtggttcccatcctgagtttggaattanttgcgatgagaataaattgtttnatttttgcctgngaaaaaaaaaaa

SEQ ID NO: 8073 - DNA, 329 bp, Rattus norvegicus; identical to SEQ ID NO: 3977
  misc_feature (16)..(16): n is a, c, g, or t
  misc_feature (20)..(20): n is a, c, g, or t
  misc_feature (23)..(23): n is a, c, g, or t
  misc_feature (268)..(268): n is a, c, g, or t
  misc_feature (291)..(291): n is a, c, g, or t
  misc_feature (299)..(299): n is a, c, g, or t

SEQ ID NO: 8074 - DNA, 420 bp, Rattus norvegicus
  misc_feature (36)..(36): n is a, c, g, or t
  misc_feature (62)..(62): n is a, c, g, or t
  misc_feature (76)..(76): n is a, c, g, or t
  misc_feature (139)..(139): n is a, c, g, or t
  misc_feature (220)..(220): n is a, c, g, or t
  misc_feature (238)..(238): n is a, c, g, or t
  misc_feature (241)..(241): n is a, c, g, or t
  misc_feature (333)..(333): n is a, c, g, or t
  misc_feature (352)..(352): n is a, c, g, or t
agaaagaggccggcaaccgaggacccggccaaaagntggccccacctggctatccggagagnagagggcaggacgnagcggccacggaaagtctccgggtaccccgcgcgcgtcttgcccaagtctctgcgagcgccgncgggtcggcggttgcaactacccactagaatcgcacgtgcaatgtcatttgaatttgttaatacataagagaaagaaaaanttatatatatgttcactntcncccgacggcggctcttggaggctcgactcaagaagggactgcagaagcccaagcccccaaagacacacccttccaacccatctgagtggaantcaatcccaaaggccatangccctgcgctctctggctcgctctcttgtccccctcttggctctgcgtcagtacgtggacgccttctt

SEQ ID NO: 8075 - DNA, 1400 bp, Rattus norvegicus
agagacagagacagagagacagagagacagacagatagacagagagatagacagatagatggacagagagaggcagagagagagacagagaggaagagacacagagaaagagagagagagagagaaagagacagagacagacagacagacagacacagggaaacagacagagatagacagacagagagacagagagagaggagaagagagagagagagagagagagagagagagagggagagggagagggagagagagagagagagggagggagagagggagagaggggggggatatggatgaggaaaggtgggaaagtcaggtcaattaattccagtttccctctggccgtcatggttctgtcttttaccatcgcctctcacatttcctctgctgcaaactggccccgtaaggactctgtgggtgccagtaaccacagccgccagtcacagtgaagctacactaactttggtatctccctcattatttttggatcagatgccagaggggattcctagaaagaaacaagatgaagacatgtgagtagaatttataggaaacccaaggctataacaaacacactccctctcccaatcagggtctctatgtgtagccaaggctgtcctgcaactcccatgccatccaatgagcctccaactcagccctcctgtcccagcctccccagtgtgagcattacagatgtgtcaccccatccggctgcgtgtctcatcctaaaatacactgagttaataacaacagaaagcatgtggccaccatctaccaagaactttttttgtatgccaaacatttatcgtgctatttcgtttaatcccctcaacaaaacagaatgcctgtgctattatctctatttggtcaagtcagaaaccaaacaatagaaaactaagacacagaaaagtcacagtgcagacccctccggccctcattcagatagaaaaccaatgcctccacagtctgtggctacagagcccacagcactagttctctgcagcgcaaactgctctgcaccctcccccctccccactttggcttccccacaacacagcatggctcagcttctctaagataccctacaggttgctcctctcacctgtccccatcccatttctgccacattcatcagcccttaaaatggttctgcctctggcttgtaacttatgagacctcctattgttctcaagccacaggtcaaggtatattgattgaattaccatcaatacgcagccttggttaagaaggtcagaattcacctccgcttgctcctcctcctacaatgtataaccaggcagagctgaggacagctactcatccacattcggaacaggacctggattgagacaacaactccgcacgcaacatgtcagaagacaaggtacagcaac

SEQ ID NO: 8076 - DNA, 864 bp, Rattus norvegicus; identical to SEQ ID NO: 3980
  misc_feature (45)..(45): n is a, c, g, or t
  misc_feature (88)..(88): n is a, c, g, or t
  misc_feature (177)..(177): n is a, c, g, or t

SEQ ID NO: 8077 - DNA, 600 bp, Rattus norvegicus
ggcttctacstggtctttgacagagctcagaggaggstgggctttgcagtgagtccctgtgcagagattgmaggtaccacagtrtctgaaatttctgggcccttttccacggaagacwtagccagcaactstgttccagcacaggctctgaatgagcccatcttgtggattstgtcctatrccctgatgagtgtgtstggasccattctcytggttctgatcctcctsctgctgytcccgstgcaytgccgwcaygccccccgagaccstgaggtrgttaacgatgartcctcactagtcagacatcgytggaaatgaagagcctcaymtgaactccascagccttgaactcagctcttyyaagagsgayrymwccarytggcttytctsyctrttagtckkgaacytcarcygkgcawytgaakgccttccagastgtatcttgattaststtgatttccaagytttmagrtcttttytacttcagagagaaatgatamtaaaaacacctcattgtgamccaaaaaaaaaaaarmramgccccgtttcagcggtctctgcgccagcccaaccccatttctgcaaggtcggctgcggccg

SEQ ID NO: 8078 - DNA, 1400 bp, Rattus norvegicus
caccacttgtgatggacacagagcctgtagcacctaccgaaccatctaccggactgcctaccggattgcctatcgccatagcccggggctgactcccagcaggcctcgctatgcctgctgccctggttggaagaggaccaacgggctccctggagcttgtggagcagggcaacccttccctggatgccgcagggttctgggaactcccctgaatgggtgacagacaggcctctcctacccacagcaatatgccagccaccgtgtgggaatgaagggagttgcatccgcccaggccgctgccgctgccctgtgggatggcagggagatacttgccagatagatgttgatgaatgcagtacaggagaggccaggtgtccccagcgctgtgtcaatactgtgggaagttactggtgccagtgttgggaggggcagagcccatctgcagatggggtgctctgcctgcctaaggaggggccctccccggtggcaccaagtcccacgccaggagtggacagcgtggtgagagagraggtgtacaagctgcaggcccgggttgatgtattagaacagaaactgcagctggtgctggccccactgcacagcctggcctctcggtccccggagcatgggctgcaagatcctggcagcctgctggcccactccttccagcagctggaccggattgactcactgagcgagcaggtctccttcctggaggaacagctggggtcctgctcttgcaaaaaagacctgtgatggcttctcagtgcccatgttggattgagctgttacccctacgtcccttctagcctgagttcaagtgctgtccggtggtgcctgtgagcagaaggccctgcttgtttatccctctctcttaggaggttcctaggccctgggcatggggaggggggtcttgtgtggctcttaagtgaggcttccgggaaaggaataagatctccctgcmtaagaagtgaggtggggggctgtctccacctttgtcatattaaagctgggacttgagctgctgtcactgggtgagtcggactgtgtacacactgtactactgccatgtaggagctgcagtgggcagtcctgaggctctcttcagcctatgctgatgctgccaagcccgtggtctgcacacccttcagttctgtggaccctgcattcactgagcaaagcaatgctggctgatcacagctcacctgcaggcagttagggaggagggagctcagacaccgcagccccagggatcgattcacacaccatctttcccacccttcatccctggatggggacttgggaagaactcttaccaccctctggtctctaggcacttctgagttcatttataaaaaaaagamccaamaaaaaaaaaaaaaaaaaaaaaaaaaaaaaaa

SEQ ID NO: 8079 - DNA, 600 bp, Rattus norvegicus
accaccgggtgctcaggctgggctttcgaactgcccttggctaccagggatagtccaggagttttgatacatcctctgctgagggctcagcgtatatcgaaagcagagtgaaagtaaggctcccttgactttcaacttaggtccctccaacagcgcaactcctttctccccagcaaaccacctagggtggtcacccagggaacagcccgggagcctgggtctccgcagtacctggatccgcctgcgccgaaggggtgctcggcggtggtgttgaatcacggttgagtcacccctttcggggtctcggagtttcctacgggaggggagtgggcggagcaggggtgtggactgaccgggagccgcccaccgcgaaagcgagtgaccggggccccggggggcggggagtcgcgagcctcgacggaggcggcgcggggtggagaggagccggtgtccgcgcggccctttataacgcgccccgcgcggaccccggcagcctgggtacaaccggtacccatcactcgctccgtctgatcgctcgtgtagcgtagcctccgcgcctctgctgaagccccgcgacctcgccagcagcccttggacatg

SEQ ID NO: 8080 - DNA, 729 bp, Rattus norvegicus; identical to SEQ ID NO: 3984
  misc_feature (49)..(93): n is a, c, g, or t
  misc_feature (336)..(351): n is a, c, g, or t
  misc_feature (456)..(489): n is a, c, g, or t
  misc_feature (675)..(699): n is a, c, g, or t

SEQ ID NO: 8081 - DNA, 600 bp, Rattus norvegicus
gagcaaccttctcaggggcccaggaaccccaagcacagactgtagaaaccgagactgggttcagaacaaacagtcctggccacagtgactgacgagagctgacgagccccctcccctacagacgatgagaagatcctggtggagcccgcgtgtggcgctgccctggctgcagtgtacagcggtgtggtgtgcaggctgcaggctgagggccgactgcaaaccccactggcctcgctggttgtcattgtgtgtggtggcagcaacatcagcctggcacagctgcaggcactcaaggcacagctgggcctgaatgagctactcaagtgatatctgctgctgccctggccaccctgaggggtcaccagcacccctgagtaggctgggtgggcgtccgcctgacagtggcccaccctcctttatccatgtttataatatgcactttttcattgtaaataaaaattaatatatatatgtttataaagcaaagatcttttgagctttgttattgacatggggtctatgtgcagcccaggctggcttcaaactggagatccaagcttgggtgaggtcgactctagaggatcgatccccgggcgagct

SEQ ID NO: 8082 - DNA, 367 bp, Rattus norvegicus; identical to SEQ ID NO: 3986

SEQ ID NO: 8083 - DNA, 600 bp, Rattus norvegicus
gactctcatctagaatggagtttgcttgtgtccctgtctccccctccctaaatgcagatgaatcagcatgaaaataacatcaacgagggtggaagaaaagagggcaaaggaattgttttcaggcgaggctgattttggaaatgttcagaaccatgcatctagagtggcctggctggtgttgtccttgggttcccttgaccactgaacaaattcccagaagtccgctcttccattgttccttcacaatttaccaaaatcagagcttcaacagacatacaaaataagtcttcttttaaacttacagctgtacagagtttcaattaataaagcatatctttaatctgacagttccactgagcgggcctattcctagacaaataggtgatattaacatctgatctaaaggcaaggtgacgtcacttctcttaaacgccaagaaagattaaccaacaatgcaactaatacatcaatcttaatataagacattgagagggaactagaaataatatataagtatcactccactgagttggcataaaacccacagactattgacacgagtttctacctgtcaatcaatgctgtatttacgccgaattc

SEQ ID NO: 8084 - DNA, 1400 bp, Rattus norvegicus
atggacaaagccaaggccagccctctgcgtttgtcctttgacaggggccagttggaccccagcaggatggagggctccagcacgtgcttctgggccgagagctgcctcaccctggtgccctataccctggtgtggccccatcgacccgcccggccccggcctgtgctcctcgtgcccagggcggttgggaagatcctgagcgagaaactgtgcctcctccaagggtttaagaagtgcctggcagagtacttgagccaggaggagtatgaggcctggagccagagaggggacatcatccaggagggagaggtgtccgggggccgctgctgggtgacccgccatgctgtggagtccctcatggaaaagaacacccatgccctcctggacgtccagctggacagtgtctgcaccctgcacaggatggacatcttccccatcgtcatccacgtctctgtcaacgagaagatggcaaagaagctcaagaagggcctacagcggttgggcacctcagaggagcagctcctggaggctgcgaggcaggaggagggagacctggaccgggcgccctgtctatacagcagcctggctcctgacggctggagcgacctggacggcctgctcagctgtgtccgccaggccatcgccgacgagcagaagaaggtggtgtggacggagcagagcccccgatgatgcaccgtgccccttcccgggactgtgggggcttctgtgtgcctgttaatgcagtcctgttcctcagcccaggccctcttggcacagctgtgggctccttggcacatgaggccggctctccccactggctggggtctaaccttgaaccctcaccacgtgcaggtcacacacagtgaagccacttgtaactgcacacttttctgtggaaacatcttcaccctttaccaggcttggcatggtctgaactggaaaccctgagaatgtttctgcagtaggacaggagggacatcttcccatgccttccctagaaccggaggccccggacttctctggaaaaccgcctgtctgcaggcccgattcaaatctatgggggctgcacttcccttttacattttgatgtgtcaaaggcttttggagtgaccaaaagcacagaggcagcgggtggggcgcctgggtggtccccaaggtcgctgccacccttgcccggggcagaggcataagcccacatatgctgtgacgctggccaccttttctcagcttctgaggctgcgatgcctcaggaactccagtttacagagaccagtgtgtttacttgtaaataaagcctctgggtggtggagacggtactttcagtgggtctgtgccccgtggcccctgtgcctgttcggtgggggtgtcccagagaagcctggcaccagtacccccgtcaa

SEQ ID NO: 8085 - DNA, 167 bp, Rattus norvegicus; identical to SEQ ID NO: 3989

SEQ ID NO: 8086 - DNA, 1400 bp, Rattus norvegicus
tcgtgagcatctttgggctctgctgggcgccgtacacgctcctaatgatcatccgagctgcttgccatggccgctgcatccccgattactggtacgagacgtccttctggcttctgtgggccaactcggccgtcaaccccgtcctctacccactgtgccactacagcttccgcagagccttcaccaagctcctctgcccccagaagctcaaggtccagccccacggctccctggagcagtgctggaagtgagcagctgccccacccttctgaggccaggcccttgtacttgtttgagtgggcagccggagcgtgggcggggccctggtccatgctccgctccaaatgccatggcggcctcttagatcatcaaccccgcagtggggtagcatggcaggtgggccaagagccctagttggtggagctagagtgtgctggttagctctgccgccacattctccttcaccacacagaagagacaatccaggagtcccaggcatgccttccacctacacacacacacacacacacacacacacacacaccacagtgcagtgccagtgatgtccccttttgcatatttagtggttggtgtcctccctaatgcaaacctcggtgtgtgctcccggctccggccctggcaatgcgtgcgtgcgccctgcatgtgctcacacccgccacacacccgcccgccacacacttgcaacacctcctctctcccagaagagctggggacgatgccctttgctgccactgtctcttgcttaatcccagagcctggctccttatcccccactctcccttcaactctgccccacaaagtgtcgagcgcctcgggaaacttgaagcttctctgctccttccactctggatgttttcaggaagatggaggagaagaaaacacgtctgtgaacttgatgttccttggatgtttaatcaagagagacaaaattgccgaggagctcggggctggattggcaggtgtgggctcccacgccctcctccctcagtgctgcagcttccggctgagccgcgccagctgcttctgcctgccccgcccccaggcttgggacgatggccctgccctgcttgccccgtctgtacaatcagaatttgggggtgggtggttatggggtagagcggctcttcactgtgccctaaaggtcctgaggctcacaggacagtcagcaggagagcaggcaggcccgcgacacctgggaggaatgctttgcctcgtcctgtgtactcacctcaggcttctgcatgctctgctgcccttgtgccctggtgtgctgcctctgccaatgtgaaaacacaataaagtgtatttttttaaaaaaaaaaaaaaaaaaaaaaaaaaaaaaaaaaaaagggcggccgcatacatatgtagtctggtct

SEQ ID NO: 8087 - DNA, 1400 bp, Rattus norvegicus
tgatttttaattcatgtattgtgtctcttgtgcattgttagtttgaggaaggggttgtctctcttgtggatcttctccagaagaagaagaagaagaagaagaagaagaagaagaagaaaaagaagaagaagaagaagaagaagaagaagaagaagaagaagtagaaaagacagctcttgctttccttgactttgtatttttctctttgtttctgaaggcttgatttcaaccctgagttcatttcctttcatcagatcctaccagactctctatgggatgaggctttgcctcactttgggcaggctggatgatgacattcagttgacaatgtggacatctcaagacagtcactggacaatggctgacacacttgtctgaagactggaaatgtttctctatcttggagaggaaagaaggaccctccaactacactgaactctaaggaaggttattcagatctcaagactggttaaccccccaaaactgaccctgctaccagttgactgtgattataaagaagccaacagccaacagctgcacagcagagagatgggggagatgctgggagagaaacatcatcccctgaaactgccctaagcgagaagcaggctaagaaggaaaaagagaggctgatagaagagctgcagctcattaccgaggagagaaatgacctgagagatcgcctgaggtttctgacagagagatccatgaacaacaggccacacttcaggccaaatccatattatgaagacctggagagaatggaggaggcagtcatgtcaattctgcacaacttagagatggagaacactgagatccatgagaacaaccataagctgaagaaggagatgaccttctctagaaacctgctcagccagctcctgatggagaacacttttaggaagaagttggtcccactgaagcaggagagcaaggaggtacatcttgattgggtaccgatccagaaatatttggttgaattcaacaagatcgataaagaccagcaacctccagaccccgcatcatctggtctcaaaaagtacaagagagctgaaattggacacacactagtaagagagcttcctgaagaataagttgctttctcaggagtccctgatgaccaacatcctgaatgaaaacaccacttgagagacaacttgggggactgcctttcattatgtgtgctagaggagaaatagcaatacatctgtgcttctaaatattcctaaatgttcttgttactatttttcacttttcaaatactttaaaacatttatatttattcattttcatcctctgtctttgtaaaacgtatttcttatgaataaaaattgaattctatctcctgaaaaaaaaaaaaaaaaaaaaaaaaaaaaaaaaaaaaaaaaaaaaaaaaaaaa

SEQ ID NO: 8088 - DNA, 1400 bp, Rattus norvegicus
ggggcgcgagcccgggcacctctgcttgcgagtctcctcgaggcttggtgccgccagggcaggaccacctcctcctactccgctttctcggagccgtcgcgtgtgcgggcgctggtctatggcaaccacggggatccagccaaggtcatccactataaaagcagaacaatagtctgcaagctattgaaatgggatggaagctggccggcctataaagcacttggcagggagcctggctgaacactcactgactgaagaacctggagctcactgctgtggaaggatctgacgtccatgtgaagatgctggcagcccctatcaatccatctgacataaatatgatccaagggaactatggcctccttcccaagctgcctgctgttggagggaatgaaggtgttggacaggtgatagcagtgggcagcagtgtgtctggattgaagccaggagattgggtgatcccagcaaatgctggtttgggaacctggcggactgaggcggtgttcagtgaggaagcgctgattggagtccctaaggacatccctctccagagtgctgccaccctaggtgtcaacccctgcacagcctacaggatgttggtggactttgaacagctacaaccaggggactctgtcatccagaatgcgtccaacagtggagtagggcaagcagtcattcagatcgcctcagcccttggcctaaagaccatcaacgtgatccgagacagacctgacatcaagaagctaactgacagactgaaggatctaggagctgattatgtcctcacagaggaggagataaggatgcccgagaccaaaaacatcttcaaggacctgccgctgccccgactggctctcaactgtgtcggtgggaagagttccacagagctgctccggcacctagcgcccggaggaaccatggtgacctatggaggaatggccaagcagcctgtaacagcctctgtgagtatgctcatttttaaggacctcaaacttcgtggcttttggttgtcccagtggaagaagaaccatagtccagatgagttcaaggagctgattctcattctctgcaacctcatccgccaaggccagctcacagcccctgcctggtccgggattccactgcaggactaccagcaggctttggaagcctccatgaagccttttgtgtcttcgaagcagattctcactatgtgattactccagaggaccaggaggaaagcaggagaggcaggccagcaagattggctggctgctggccctccatgaggactccagactgcctcaccctcactgcctcttcctaccaggagggtgggaggccaaccccagggtccctaataaaccctggacttcccaagtaaaaaaaaaaaaaaaaaaaaaaaaaaaaaaaaaaaaaaa

SEQ ID NO: 8089 - DNA, 1400 bp, Rattus norvegicus
gccccaggcccccgcggagaatgcgcccaagcccaaaaatgactttatcgagagcttgcccaatcccgtcaagtgccgggttctggcgctcaaaaagctgcagaagcgctgcgataagatcgaggcgaaatttgacaaggaattccaggctctggagaagaagtacaatgatatctacaagcccctactcgccaagatccaggaactcaccggagagatggagggctgcgcgtggaccctggagggagaggatgatgaagacgacgaggaagaagatgaggaggaggaagaagaggaggctgcagctggcgcaactgggggtcccgactctgccgagaagtgagcacagcagctgacagacttgagactgatgaaaggttgtcagttagatgggaattaaagtgcgtcacacgttgaaatccattcatcacactacaccttaacacccaagctaagacagaactcttctcaatgcttaattcttcagtttctttacatttcccagcgcagaggaagaggaacccaagaacgacgtcatctttaagacttttgcttttgcaaacccagacatcagctttacactccagaggagacaaggcatggaggaaggctggactgacagcatttactgtttatgtggctagaaaaactgccatttcaagttgtgaaaaatgttttgaatatttgaatttacagaaagaacacggttccaaaaataagggtgtattccatgtataatattgtcaacacgtgttcatctgtaatggtctcatgttatctgttttcttggtagtgtttgtttacaaaatcgtaaaaattaccccaaatgttttaagtattaaattcccttatagcattttagaaatataatttacttgaagagatgtagaatgtagcaattctgtaaagcatgtgtatccagtgttgcctagtttgactttgtgaagtctttttgtcttgtagcttttagcaagtagctgtgaaaaccatcagaactcctcaatgaagctaatgtttggaaaaaagtatatacttgaagaaccaacccaagtgtgtatccccaaccccagctcagaaataggaaggatttaagtttgcttgtattagctgtgccttcattattttgctatgtaaatgtgacttattaaatggtgcataatcaaattttattgcttgaggacaaaaatggcataaagggaagacttttgggaaaaagacatttaatgtaaaggcctttagcttctttgtgggttttgaactatctgtgaatcaatgttctgtaaagaaacacaaacgtaaagttgtttaccactgtggtgttaacaaaacagtattttcaaaaataaaaaaaacttgttattctgaaaaaaaaaaaaaaaaaaaaaaaaaagggcggccgc

SEQ ID NO: 8090 - DNA, 1400 bp, Rattus norvegicus
aagcaccttcctctgcctacagccagtcagagatggtccaaaggagagcagaggctgcacaccctgggcaaagcactgcccagttttccagttaagtgctgcgtgcgctcagtgttcctttcccaggctaagaacacaccgatgactggaagcttttgctaatctgcttggcaatggcttctgggaaaggtaggacccataacttaagacatgcacagtctctcccaccgtcccacaggagttcccctggctgagtatacgatccaaagcaagccatgccctcccaggtcagtctggggcacaagctgagccgatgactagcaatgcctatggcctttcccttgcctgccctcctccagcatctccgcctgtggagaccgagtacccccgtgctcatacgtaaagtgacaatcagaaccaggtacaagccaggaaagtggcagctgactgccactcagaccacgtggcgcttttcccatcccacggtctcagagctggacgaggctaaatagaacacagtagcccccccttccaggtactgcaccgtccctggagatccctctgacccttccctgctacagatctgctctgctctaggctggactgtggaattagcatgtacatggaaatcccagtccttgaccatggcttcccactccacctgcaagtgatagatgccatctgtcctgggtgtctgatcagacccgccaccatcacagatgagtgaccaagaggggggctgtcaacacctcggtacatggtgatcttaaaaccacccaactgcaccatcgcaccagactgtacctctggggcacccagaacaagccccaccctaacagtgggggccacagccaggcttccagcactgagtctcaaccagctaagttgaatggcaaactcgatgcctccgcccccacccctcagctgcccaggccccagcatgcagatggcctgcacagcaggctcagcacctctgaggtgtgcattagccacttaacagcagcagtctgtactcaagtacaaaagcttttacttcacgacttgccgtagcctgtccccactgtctgatccagtgcttaacttcaaccctagagtctgccttgaccctgaggaggcatctcactggtttcgtacttgtgtgtgccctatgcctcactgctggggccgcgcacccagacccagccaggagggaggatgggtgcctcggtcgctctgggggcagtttagatgctgtgaaattaaacccgttctaagtgtacttgtttgaattaactgtattgtaatattatttgttgaatgtagtaattaggtatttatgaatatattgctgtaatttctgacatcccaaaaataaaatcttcctaaatcatgttaaaaaaaaaaaaaaaaagggcggccgc

SEQ ID NO: 8091 - DNA, 1400 bp, Rattus norvegicus
cataccctgccctccgggaggaggccccaagagaacacgtggagagcttcttccagaagatggacaggaacaaggacggcgtggtgaccatcgaggaattcatcgagtcttgtcaacaggacgagaacatcatgaggtccatgcagctctttgataatgtcatctagctccccagggagaggggttagtgtgtcctagggtgaccaggctgtagtcctagtccagacgaacctaaccctctctctccaggcctgtcctcatcttacctgtaccctgggggctgtagggattcaatatcctggggcttcagtagtccagatccctgagctaagtcacaaaagtaggcaagagtaggcaagctaaatctgggggcttcccaacccccgacagctctcaccccttctcaactgatacctagtgctgaggacacccctggtgtagggaccaagtggttctccaccttctagtcccactctagaaaccacattagacagaaggtctcctgctatggtgctttccccatccctaatctcttagattttcctcaagactcccttctcagagaacacgctctgtccatgtccccagctggcttctcagcctagcctttgagggccctgtggggaggcggggacaagaaagcagaaaagtcttggccccgagctagtggttaggtcctaggaattggctggagtggaggccagaaagcctgggcagatgatgagagcccagctgggctgtcactgcaggttccagggcctacagccctgggtcagcagagtatgagttcccagactttccagaaggtccttagcaatgtcccagaaattcaccatacacttctcagtgtcccggatgatgcctgtcaaggtcccacctcccctccggctgttctcatgacagctgtttggttctccatgacccctatctagatgtagaggcatggagtgagtcagggatttcccgaacttgagttttaccactcctcctagtggctgccttaggggaatgggaagaacccagtgtgggggcacccattagaatctttgcccggttcctcacaatgccctagggtcccctagggtacccgctccctctgtttagtctacccagagatgctcctgagctcacctagagggtagggacggtaggctccaggtccaacctctccaggtcagcaccctgccatgctgctgctcctcattaacaaacctgcttgtctcctcctgcgccccttctcagtcagccagggtctgaggggaagggcctcccgtttccccatccgtcagacatggttgactgctttgcattttgggctcttctatctattttgtaaaataagacatcagatccaataaaacacacggctatgcacaaaaaaaaaaaaaaaaaactcgagt

SEQ ID NO: 8092 - DNA, 1400 bp, Rattus norvegicus
gcttcaggagtggtacaagggcttcctgaaggactgcccgactggcatcctcaacgtggatgagttcaagaagatctacgccaacttcttcccctacggcgatgcctccaagttcgccgagcatgtcttccgcacttttgacaccaacagcgacggcaccatcgacttccgggagttcatcatcgctctgagcgtgacctcgcgtggccgcctggagcagaagctcatgtgggccttcagcatgtacgacctggacggcaatggctacatcagccgggaggagatgctagaaattgtgcaggccatttacaagatggtttcgtccgtgatgaagatgcctgaggatgagtctaccccggaaaagaggactgagaaaatcttccgccaaatggacacaaacaatgacggcaagctgtcactggaggagttcatccgcggggccaaaagcgacccatcgatcgtgcgcctgctgcaatgcgatcccagcagcgcttcccagttctgagctgagaggagccagctcgcctccctgccttcaccggccctccggctctcagcttcctctccctcgtgtctatccaggctggggaatccccttctggggtctgcactgtgggggggcctctggagaagcgaaccctgcaaggaaggggctaagcaaggcagccgttagtccccacggcctaagaggcagaatctcccttagtgggaccgagattacccccgggtcaggttctgtattctttccccagacagctggatcaccttccacccacccacaacccggaggctcttccacaacacggggaagagggtccttcttgggtggtcctcagcctggagggaggtggggatttgtgccaaggtgaagagtctttttgtttgtttggtggggagacccggaggattactgggctgtgggactttgaagaagttccctgatctacttccctgcagaagaacacttcctgtcccagctcttgctggctggaggccatggtaaaaagaagatctcccaggattccaactgggggtccccaaacccagcctgcctctttgcacttggataaccacagatttacccgtctgtcctctgtatttctctctccttcccccacctcacacacgcacgggcgcgcgcgcacatgcgcgcgcaacacacacacacacacacacacgcacgcatatgcacgcacacatgcacacgcacccgcgcacacagaggccggcagacagatgagcagagcccctccacagcgttctgtgtgggaaagaagtgcaggcccctggccaagccccatgtccctctgcatgcgccacacggagcgtctttgttctttttaataacttcaaaataaagtcttgtttcagtgaaaaaaaaaaaaaaaaagggcggccgc

SEQ ID NO: 8093 - DNA, 1334 bp, Rattus norvegicus; identical to SEQ ID NO: 3997

SEQ ID NO: 8094 - DNA, 1400 bp, Rattus norvegicus
gacccacgcgtccgagcggttcttgggggcgcagggggcgcgtcgccctctgcccccgccggcaccctggccatgacaggcaagtcggtgaaggacgtggatcggtaccaggcggtcctggccaacctgctgctggaggaagataacaagttctgtgctgactgccagtccaaagggccgagatgggcctcctggaacatcggcgtgtttatctgcattcggtgtgctggaatccacaggaatctgggggtgcatatatccagggtaaaatcagtgaacctcgaccagtggactcaagaacagattcagtgcatgcaagagatggggaatggaaaagcaaaccgactctatgaagcctaccttcctgagacctttcggcgacctcagatagacccagctgttgaaggatttattcgagataaatatgagaagaagaaatatatggaccgaagtctggacatcaatgtccttaggaaagagaaggatgataagtggaaacgaggaagtgagcctgctccagagaaaaagatggaacccgttgtctttgagaaagtaaaaatgccacagaaaaaagaagacgcacagctacctcggaaaagctccccgaaatccgcagcccctgtcatggacttgttgggccttgatgctcctgtggcctgctctattgcaaacagtaagaccagcaatgccctagaaaaggatctagatcttttggcctctgttccatccccttcttcagtttccagaaaggctgtaggttccatgccaactgccgggagtgctggttctgtccctgaaaacctgaacctatttccagagccggggagcaagtcagaagaaacaggcaagaaacagctctccaaggactccatcctgtcactgtatggatcccagacgcctcaaatgcctgcccaagcaatgttcatggctcctgctcagatggcatatcccacagcgtaccccagcttccctggggttacaccacctaacagcatcatggggagcatgatgcccccaccagtcggcatggtagctcacccaggagcctctggaatggtcacccccatggccatgcccgcaggctatatggggggcatgcaggcttccatggcgggcatgccgagcgggatgatgaccactcagcaggccggctacatggcgagcatggcagccatgccccagactgtgtacggcgttcagccagctcagcaactgcagtggaacctcactcagatgacccagcagatggctgggatgaacttctacggagccaacggcatgatgagctatggacagtcaatgggcggtggaaatggccaggcagccaatcagactctcagtcctcagatgtggaaataaaagcaaagcacctgtaaaaaaaaaaaaaaaagggcggccgc

SEQ ID NO: 8095 - DNA, 1400 bp, Rattus norvegicus
caactggaaaactgataagaacatcccatattggaaagcctcaccctcagtcctttcaaccagcagcagccacacaaaaactaagacctgcttctcagcaaggagtccagatgaagacacaaggtggggcttcaaatccagctctccaaatagggtcccatcccatgtgcaagagctctcagttcaaatccgatcagtccaacccatccacagtcaaacactcccagcctaaacccttccattctgtgccctctcaacctaaatcctctcagacaaaatcctgtcagtcccagccctcccaaactaaaccttctccatgcaaatctactcagcctaagccaagccagccctggcctccccagtctaagccttctcagcccagaccccctcaacctaagtcatcctcaaccaatccttcacaagctaaggcacaccactcaaaagcagggcagaagaggggagggaagcattaaagagctaactccagagatctataaagcatatcctttacccaggccattcctatcatatagtaagcagaagagttgccatgaaagtaaaagactactgtcattagcatgtaaaacaaagaaagatatacatgaccgaattggatatctttgtttgtttgtttgagacagagtttcactcttgttgcccaggctggagtgcaatggcacgatctcggctcaccgcaacctctgcttcctggcttaaagtgattctcctgcctcagcctctcgagtagctgggattacaggcatgcaccaccacacccagctaattttgtatttttagtagaggcagggtttctccatgttggtcaggctggtcttgaactcccgacctcaggtgatccgcccacctaggcctctcaaagtgttgggattacgtgtgtaagccacagtgcccagcccgaattggatatctttaagatatctgtaagtgttatatccctaaccaagaagaaaaatatgaaaataattaagactagaatcaagcagtagataattgaatccaatcttgggtattattagataatgtataacttgcacccagggaatgggggtctatgagacaaccccacttggagaagaatggggttagggtctctaattgcaaagtgactgtacaataggacgaaagttgcctctgtgtctgagaaagtatcttagttgttggctgctccagaggtatctttgtcaaaagcttctggttcaatatcagccactgagcagataaccctgcttatttggtgtggttaaatcaactagcttctgctaatagccccaatttgcttgaatgggaaaactctctcatttgacccttataggtagaaataatgaattaacaaccaataaaattaatcatttggcattaaaaaaaaaaaaaaaaaaaaa

SEQ ID NO: 8096 - DNA, 1400 bp, Rattus norvegicus
tgttccaagtggcccactttaaagaggaggggatgctcctggagaagccagccagggtggagctgcatcacatagttctggaaaaccccagcttttcccccttgggagtcctcctgaaaatgatccataatgccctgcgcttcattcccgtcacctctgtggtgttgctttaccaccgcctccatcctgaggaagtcaccttccacctctacctgatcccaagtgactgctccattcggaaggaactggagctctgctatcgaagccctggagaagaccagctgttctcggagttctacgttggccacttgggatcagggatcaggctgcaagtgaaagacaagaaagatgagactctggtgtgggaggccttggtgaaaccaggagatctcatgcctgcaactactctgatccctccagcctgcatagccgtaccttcacctctggatgccccgcagttgctgcactttgtggaccagtatcgagagcagctgatagcccgagtgacatcggtggaggttgtcttggacaaactgcatggacaggtgctgagccaggagcagtacgagagggtgctggctgagaacacgaggcccagccagatgcggaagctgttcagcttgagccagtcctgggaccggaagtgcaaagatggactctaccaagccctgaaggagacccatcctcacctcattatggaactctgggagaagggcagcaaaaagggactcctgccactcagcagctgaagtatgaacaccagcccttgacccttgagtcctggctttggctgacccttccttgggtctcagtttctttctctgcaaacaagttgccatctggtttgccttccagcactaaagtaatggaactttgatgatgcctttgctgggcattatgtgtccatgccagggatgccacagggggccccagtccaggtggcctaacagcatctcagggaatgtccatctggagctggcaagacccctgcagacctcatagagcctcatctggtggccacagcagccaagcctagagccctccggatcccatccaggcgcaaagaggaataggagggacatggaaccatttgcctctggctgtgtcacagggtgagccccaaaattggggttcagcgtgggaggccacgtggattcttggctttgtacaggaagatctacaagagcaagccaacagagtaaagtggaaggaagtttattcagaaaataaaggagtatcactgctcttttagaatttgtctagcagactttccagtttttaccagaaaacccctataaattaaaaattttttacttaaatttaagaattaaaaaaatacaaaaaagaaaaaatgaaaataaaggaataagaagttaaaaaaaaaaaaaaaaaaaaaaaaa

SEQ ID NO: 8097 - DNA, 1400 bp, Rattus norvegicus
gaaaacatgatcaagctttataacctttttctgaagtatgacgcaactatggtagaaataaacccaatggtagaagatgctgatggaaaggtgttgtgcatggatgcaaagatcaattttgattcaaattcagcctatcgccagaagaagatctttgctcttcaggactggagccaggaggacgagagggacaaagacgcagctgatgcagatattaactatattggcctcgacgggaacataggatgtctagtaaatggtgctggcttggctatggccacaatggatataataaagctacacggagggactccagccaacttccttgatgttggtggaggcgccacagtccatcaagtaacagaagcatttaaactgatcacttcagataaaagggtgcaggctattctggtcaacatctttggaggaatcatgagatgtgatattattgcacaaggaatagtcatggcagtaaaagatctagaaattagaatacctgttgtggtacggttacaaggtacacgagttgatgatgctaaggcactaattgcagacagtggtcttaaaattcttgcttgcgatgatttggatgaagctgctaaaatggttgtaaagctctctgaaatcgtgaccttagccaaagaagcccacgtggatgtgaagtttcagttgccaatatgagcaaaaccttggtgaatggcttcgggtattaatgtgctgtaattctttattatactgtggtctctcctagtgtccctttcttttaaatgtgtggagaatgtaatcaccacataggcacacatacctttgaaagcattcgctctgcatttgattctgctgctcagactggactgtttatataaagaatgtctgatgtaaacttacagtggtctcgtttcttgcagccatctttcttgcttcctctgcagaatgtcacttggagtatgcctgttttctggtgttggatacgaagttcttcattgataagagtcctataaataaaattactacaaagagaaagctttattctttagtatgaaaatatatctaataacagcctcattaggataatggcgtgttatagcaatgttttatataagaaatatttatcttcagcatcaaatggctcttaaatgtatcaatcattattcttagaacttggaagcactcctcagaatatcttttaagtattttagagaagtaccttgctgattatttgaccattgttttaatcattacaggacaatgataactgcaagtcgtcatgattctgtggtggtaaaaacacctgcagattgatttaaaaaaagacacttattaagaacttgggcaaaattaagaatgccagtttaagttaataaaagtttcccaatgtaaaaaaaaaaaaaaaaaaactcgag

SEQ ID NO: 8098 - DNA, 1400 bp, Rattus norvegicus
gaggatgatctggagatgaccatggtttgccatcggcctgagggactggagcagcttgaggcacagacgaacttcaccaagagagaactgcaggtcctttaccggggattcaaaaacgagtgccccagtggtgtggttaacgaagagacattcaagcagatctacgctcagtttttccctcatggagatgccagcacatacgcacattacctcttcaatgccttcgacaccacccagacaggctctgtaaagttcgaggactttgtgactgctctgtcgattttactgagaggaacggtccatgaaaaactgaggtggacgtttaatttgtacgacatcaataaagacggctacataaacaaagaggagatgatggacatagtgaaagccatctatgacatgatggggaaatacacctatcctgtgctcaaagaggacactcccaggcagcacgtggacgtcttcttccagaaaatggataaaaataaagatggcattgtaacgttagacgaatttctcgagtcctgtcaggaggatgacaacatcatgaggtctctacagctgttccaaaatgtcatgtaactgaggacactggccatcctgctctcagagacactgacaaacacctcaatgccctgatctgcccttgttccagttttacacatcaactctcgggacagaaataccttttacactttggaagaattctctgctgaagactttctacaaaacctggcaccgcgtggctcagtctctgattgccaactcttcctccctcctcctcttgagagggacgagctgaaatccgaagtttgttttggaagcatgcccatctctccatgctgctgctgccctgtggaaggcccctctgcttgagcttaaacagtagtgcacagttttctgcgtatacagatccccaactcactgcctctaagtcaggcagaccctgatcaatctgaaccaaatgtgcaccatcctccgatggcctcccaagccaatgtgcctgcttctcttcctctggtgggaagaaagaacgctctacagagcacttagagcttaccatgaaaatactgggagaggcagcacctaacacatgtagaataggactgaattattaagcatggtggtatcagatgatgcaaacagcccatgtcattttttttccagaggtagggactaataattctcccacactagcacctacgatcatagaacaagtcttttaacacatccaggagggaaaccgctgcccagtggtctatcccttctctccatcccctgctcaagcccagcactgcatgtctctcccggaaggtccagaatgcctgtgaaatgctgtaacttttataccctgttataatcaataaacagaactatttcgtacacaaaaaaaaaaaaaa

SEQ ID NO: 8099 - DNA, 1400 bp, Rattus norvegicus
tccaaatcagccctgagccaagaatttgaagctttctttcaaggtaaaagcttatatatcaactcagggaacatccccgattacttatttgacttctttgaacatttgcccaattgtgcaagtgctctggacttcattaaactggacttttatgggggagctatggcttcatgggaaaaggctgcagaagacacaggtggaatccacatggaagaggccccagaaacctacattcccagcagggctgtatctttgttcttcaactggaagcaggaattcaggactctggaggtcacactccgggatttcagcaagttgaataagcaagatatcacatatctggggaaaatattcagctctgccacaagcctcaggctgcaaataaagagatgtgctggtgtggctggaagcctcagtttggtcctcagcacctgtaagaacatttattctctcatggtggaagccagtcccctcaccatagaagatgagaggcacatcacatctgtaacaaacctgaaaaccttgagtattcatgacctacagaatcaacggctgccgggtggtctgactgacagcttgggtaacttgaagaaccttacaaagctcataatggataacataaagatgaatgaagaagatgctataaaactagctgaaggcctgaaaaacctgaagaagatgtgtttatttcatttgacccacttgtctgacattggagagggaatggattacatagtcaagtctctgtcaagtgaaccctgtgaccttgaagaaattcaattagtctcctgctgcttgtctgcaaatgcagtgaaaatcctagctcagaatcttcacaatttggtcaaactgagcattcttgatttatcagaaaattacctggaaaaagatggaaatgaagctcttcatgaactgatcgacaggatgaacgtgctagaacagctcaccgcactgatgctgccctggggctgtgacgtgcaaggcagcctgagcagcctgttgaaacatttggaggaggtcccacaactcgtcaagcttgggttgaaaaactggagactcacagatacagagattagaattttaggtgcattttttggaaagaaccctctgaaaaacttccagcagttgaatttggcgggaaatcgtgtgagcagtgatggatggcttgccttcatgggtgtatttgagaatcttaagcaattagtgttttttgactttagtactaaagaatttctacctgatccagcattagtcagaaaacttagccaagtgttatccaagttaacttttctgcaagaagctaggcttgttgggtggcaatttgatgatgatgatctcagtgttattacaggtgcttttaaactagtaactgcttaaataaagtgtactcgaagccagta

SEQ ID NO: 8100 - DNA, 1400 bp, Rattus norvegicus
gccatgcgcctggcgcaccagagtgaggagaagggcgccgcgctcatgcggaaccgtgacctgcagctggagattgaccagctcaagcacagcctcatgaaggccgaggacgactgcaaggtggagcgcaagcacacgctgaagctcaggcacgccatggagcagcggcccagccaggagctgctgtgggagctgcagcaggagaaggccctgctccaggcccgggtgcaggagctggaggcctccgtccaggaggggaagctggacaggagcagcccctacatccaggtactggaggaggactggcggcaggcgctgcgggaccaccaggagcaggccaacaccatcttctccctgcgcaaggacctccgccagggcgaggcccgacgcctccggtgcatggaggagaaggagatgttcgagctgcagtgcctggcactacgtaaggactccaagatgtacaaggaccgcatcgaggccatcctgctgcagatggaggaggtcgccattgagcgggaccaggccatagccacgcgggaggagctgcacgcacagcacgcccggggcctgcaggagaaggacgcgctgcgcaagcaggtgcgggagctgggcgagaaggcggatgagctgcagctgcaggtgttccagtgtgaggcgcagctactggccgtggagggcaggctcaggcggcagcagctggagacgctcgtcctgagctccgacctggaagatggctcacccaggaggtcccaggagctctcactcccccaggacctggaggacacccagctctcagacaaaggctgccttgccggcggggggagcccgaaacagccctttgcagctctgcaccaggagcaggttttgcggaacccccatgacgcaggcctgagcagcggggagccgcccgagaaggagcggcggcgcctcaaagagagttttgagaactaccgcaggaagcgcgccctcaggaagatgcagaaaggatggcggcagggggaggaggaccgggagaacaccacgggcagcgacaacaccgacactgagggctcctagccgcagcagcgcaggccccgaccagggcacacccaccggcccggcctgccacccgggggtgccgacgccctggggcgcagacttccccgagccgtcgctgacttggcctggaacgaggaatctggtgccctgaaaggcccagccggactgccgggcattggggccgtttgttaagcggcactcattttgcggaggccatgcgggtgctcaccacccccatgcacacgccatctgtgtaacttcaggatctgttctgtttcaccatgtaacacacaatacatgcatgcactgtattagtgttaagaaaacacagctgcgtaaataaacagcacgggtgacccgca

SEQ ID NO: 8101 - DNA, 1400 bp, Rattus norvegicus
ccaatgatcctgaaaacagaaggaaactgaaggaatttggagtaaatggtctaatatatgataggtatttgttttttgtaaaaaatctccatggaattgttcaaacagtgtagttttatctattttaactattttaaaattagatagtttagcctaaagttttatcttgacactgtgacctttcccaggtgttgagatatgtcaaaagccacttaagaagccctaacccaaatgtatttgccttgaagtgagggtacttgcctgtctcactcctgtctgtcaaaactttttctgcagttgtcttagttacattctattgctgtgaagaagtactgtgatcaaggtgaattgtttgcagttttggagggtgagcccatggctgtcatggtggggagtgtggcagaaggcaggcatggcactggagtagttagtagctgtcagcttacttctgatccacaagcaggagtcagagacacaggcagaaacagattgtccctggtgtggacttttgtaacctcaaagtttactgcctcataacaaacacacgaggccatacatacctcctaatctttcccaaatagtccaactggggaccatacttcctcattcaagggtctacagtgatctcttcctgtgtgggggtccttatcttcactcatatccaactcaggacacttccctgactttaaaacttttacgtcccttctcttgatttcagcctaaatggccactctgcttattttgctttctcaggccgaatccttgaagtcttccatggcagtgttcttgaacctcttcttcattcctattttcccctgggatcttaactcacacaacattcctcaatgggctctttctttctgcttcagagagtgactcccgtacactgaaatgtcacttgcacaaggactacactatttaaaatggtagcttctgttcatagggtgcttcttaactttgcttgagataatttatcacggacaaacacagatatatgtaacattgtattgtgtgtcttttccttcctggcctccccgtttcctaatgcatacacagagtgtgggctgcacaagaaccaggacactttcctttttttgtttactatcgtcaaaggctaagacaataatatgtagactgtgggatcagatatttgttgactggatacagcttcctaggaattggtatgtaagatgtaagtttaatagctgctgatgttcagaaagttgctttagtgtaaagaagctttaggttgtaaaaaaacgactcgatggaggaagtacaaagttttgaccagaccttgagaaaaaaaaccaaaataagctttccttagatttaattcctactactctttatcctactgagttgtaccattctttttaataaagactttactcccaaaa

SEQ ID NO: 8102 - DNA, 1400 bp, Rattus norvegicus
gaggaaagagccttgcgagggccctgcagcagaacacgtctctagaaatactgtggctgacccaaaatgaactcaacgatgaagtggcagagagtttggcagaaatgttgaaagtcaaccagacgttaaagcatttatggcttatccagaatcagatcacagctaaggggactgcccagctggcagatgcgttacagagcaacactggcataacagagatttgcctaaatggaaacctgataaaaccagaggaggccaaagtctatgaagatgagaagcggattatctgtttctgagaggatgctttcctgttcatggggtttttgccctggagcctcagcagcaaatgccactctgggcagtcttttgtgtcagtgtcttaaaggggcctgcgcaggcgggactatcaggagtccactgcctccatgatgcaagccagcttcctgtgcagaaggtctggtcggcaaactccctaagtacccgctacaattctgcagaaaaagaatgtgtcttgcgagctgttgtagttacagtaaatacactgtgaagagactttattgcctattataattatttttatctgaagctagaggaataaagctgtgagcaaacagaggaggccagcctcacctcattccaacacctgccatagggaccaacgggagcgagttggtcaccgctcttttcattgaagagttgaggatgtggcacaaagttggtgccaagcttcttgaataaaacgtgtttgatggattagtattatacctgaaatattttcttccttctcagcactttcccatgtattgatactggtcccacttcacagctggagacaccggagtatgtgcagtgtgggatttgactcctccaaggttttgtggaaagttaatgtcaaggaaaggatgcaccacgggcttttaattttaatcctggagtctcactgtctgctggcaaagatagagaatgccctcagctcttagctggtctaagaatgacgatgccttcaaaatgctgcttccactcagggcttctcctctgctaggctaccctcctctagaaggctgagtaccatgggctacagtgtctggccttgggaagaagtgattctgtccctccaaagaaatagggcatggcttgcccctgtggccctggcatccaaatggctgcttttgtctcccttacctcgtgaagaggggaagtctcttcctgcctcccaagcagctgaagggtgactaaacgggcgccaagactcaggggatcggctgggaactgggccagcagagcatgttggacaccccccaccatggtgggcttgtggtggctgctccatgagggtgggggtgatactactagatcacttgtcctcttgcccgctcatttgttaataaaatactgaaaac

SEQ ID NO: 8103 - DNA, 1009 bp, Rattus norvegicus; identical to SEQ ID NO: 4007

SEQ ID NO: 8104 - DNA, 1400 bp, Rattus norvegicus
ttagttacattcttccaattttgggaatttgcaatgagcctgaatttttgggaatagttactgaatacatgccaaatggatcattaaatgaactcctacataggaaaactgaatatcctgatgttgcttggccattgagatttcgcatcctgcatgaaattgcccttggtgtaaattacctgcacaatatgactcctcctttacttcatcatgacttgaagactcagaatatcttattggacaatgaatttcatgttaagattgcagattttggtttatcaaagtggcgcatgatgtccctctcacagtcacgaagtagcaaatctgcaccagaaggagggacaattatctatatgccacctgaaaactatgaacctggacaaaaatcaagggccagtatcaagcacgatatatatagctatgcagttatcacatgggaagtgttatccagaaaacagccttttgaagatgtcaccaatcctttgcagataatgtatagtgtgtcacaaggacatcgacctgttattaatgaagaaagtttgccatatgatatacctcaccgagcacgtatgatctctctaatagaaagtggatgggcacaaaatccagatgaaagaccatctttcttaaaatgtttaatagaacttgaaccagttttgagaacatttgaagagataacttttcttgaagctgttattcagctaaagaaaacaaagttacagagtgtttcaagtgccattcacctatgtgacaagaagaaaatggaattatctctgaacatacctgtaaatcatggtccacaagaggaatcatgtggatcctctcagctccatgaaaatagtggttctcctgaaacttcaaggtccctgccagctcctcaagacaatgattttttatctagaaaagctcaagactgttattttatgaagctgcatcactgtcctggaaatcacagttgggatagcaccatttctggatctcaaagggctgcattctgtgatcacaagaccactccatgctcttcagcaataataaatccactctcaactgcaggaaactcagaacgtctgcagcctggtatagcccagcagtggatccagagcaaaagggaagacattgtgaaccaaatgacagaagcctgccttaaccagtcgctagatgcccttctgtccagggacttgatcatgaaagaggactatgaacttgttagtaccaagcctacaaggacctcaaaagtcagacaattactagacactactgacatccaaggagaagaatttgccaaagttatagtacaaaaattgaaagataacaaacaaatgggtcttcagccttacccggaaatacttgtggtttctagatcaccatctttaaatttacttcaaaataaaagcatgtaa

SEQ ID NO: 8105 - DNA, 600 bp, Rattus norvegicus
ctctgggcctccccacctttcctggggtctccacattcccactagtgggtcttatgtgtgtctgtgtcttctccttaaacactcgccctggagtctgttctcacacctgtgcgcaggtttgcacactcaagttctcatgggcaggctcaggtctgtcccgctgccctgggcacgaggtctcctgaggacctgggcctgttctgctcctaggagacctgagcccgttaccgcgtgactcccaccatccagctcgcgctcctcgtggattcagccatgcatggactggggtgttccctggcccatggtcacctgtgcccctcgtgtctcctcacatgggtgtctgtggttctctcctgtgtaaatgtcacgccccacccctgtttcatgtgggcactaacacgtgtgcgttcctggcgggcacacacaggaccgtgcctcacagggcccactccctgcctatgcctccctcttggggggccgaggagggcggctgctctgtcatgagaatgtacggcccgtggatgattaacgggcctttttcacttagaagctgcacattatggagcattaaacacttttgtcataaaaaaaaaaaaaaaa

SEQ ID NO: 8106 - DNA, 600 bp, Rattus norvegicus
tgtggggcagcgtagaggagctgctccgcgttgtcaaggacaagatcggcgaggagcagcgcaagaccatctgggtggacgaggaccagctgtgaggcgggcgccctgggcagagagactctgtggcgcggggcatcctatgaggcaggcaccctgggcagagagatgcagtgggtgcggggggatcctgtggcccacagagctgccccagcagacgctccgccccacccggtgatggagccccggggggacagtcgtgcctggggaggagcagggtacagcccattcccccagccctggctgacctggcctagcagtttggccctgctggccttagcagggagacaggggagcaaagaacgccaagccggaggcccgaggccagccggcctctcgagagccagagcagcagttgaatgtaatgctggggacaggcatgctgccgccagtagggcggggacccggacagccaggtgactaccagtcctggggacacactcaccataaacacatccccaggcaggacagatcggggaaggggtgtgtaccaggctatgatttctcttgcattaaaatgtattattaaaaaaaaaaaaaaaa

SEQ ID NO: 8107 - DNA, 600 bp, Rattus norvegicus
cgcgagggctacgggcgcatcccgcggggcgcgctgctgtccatggacgccttggacctcaccgacaagctggtcagcttctacctggagacctacggcgccgagctcaccgctaacgtgctgcgcgacatgggcctgcaggagatggccgggcagctgcaggcggccacgcaccagggctctggagccgcgccagctgggatccaggcccctcctcagtcggcagccaagccaggcctgcactttatagaccagcaccgggctgcgcttatcgcgagggtcacaaacgttgagtggctgctggatgctctgtacgggaaggtcctgacggatgagcagtaccaggcagtgcgggccgagcccaccaacccaagcaagatgcggaagctcttcagtttcacaccagcctggaactggacctgcaaggacttgctcctccaggccctaagggagtcccagtcctacctggtggaggacctggagcggagctgaggctccttcccagcaacactccggtcagcccctggcaatcccaccaaatcatcctgaatctgatctttttatacacaatatacgaaaagccagcttgaaaaaaaaaaa

SEQ ID NO: 8108 - DNA, 600 bp, Rattus norvegicus
gcatgccaacacgcccggctaatttttttaaaaaatatttttagtagagacagggtttcaccattttggccaggatggtctcgatctcctgacctcatgatccacccgcctcggccttccaaagtgctgggattacaggcatgagccaccgtgcctggcctcatttgagtatttttataatgtctcttttaaagtctttgtcagataattccactgtacatgttattcagtgtttggtgtccactgagttgtcatttgccagacaagtggagatttttgcagctcatccttgtattctcagtagttccgatatgtaccctcgacatgtgaatgttatcttatgagactctgttttatttgtatccaacagaagatgtttattatttatttggctttctgtgaactgaggtcttaatatcagctcattttaaaagtctttgcagtggtattcggatctatcctgtgtgtgcctatgagattgggtgcagtgtatcctgttagctccattctcagggcgtttgaatgtgaattaggaccagcgcaatgaatgctcaagttggggttgggcgttagaattcataaaagtctttatatgctcag

SEQ ID NO: 8109 - DNA, 600 bp, Rattus norvegicus
ccgcctggccctcatcatctgcaacaaaaagtttgactatctttttgatagagatgatgctgagactgacattttgaacatgaaagaactacttcaaaatcttggatactcagtggtgataaaggaaaaccttacagctcaggaaatggagacagaattaatgaagtttgctggccgtccagagcaccagtcctccgacagcacattcctggtctttatgtcccacggcatcctggaaggaatctgtggggtgaagcacagaaacaaaaagccagatgttcttcatgatgacactatcttcaccattttcaacaattctaactgtccgagtctgagaaacaaacccaagattctcatcatgcaagcctgcagaggcagacatactggtactatttgggtatccacaagcaaagggatagccactgctgatacagatgaggaatgtgtgttgagccatagatggaataatagtataacaaaggcccatgtggagacagatttcattgctttcaaatcttctaccccacataacatttcttggaaggtaggcaagagtggctctctcttcatttccaaactcattgactgcttcaaaaagta

SEQ ID NO: 8110 - DNA, 600 bp, Rattus norvegicus
tttggttcttctaagtctccggtagtttcaaggttgtggcttccaagtctttgctcttctttctcttggccatcacgatgtcctgcatagtgttaatggtgttccaagtgcatggcctccaaactgcttctatgccaagctcacgtgctgtagtttgtactgcttttctttgcatggcttggttcctgtctgtgatcttctaggttttttgttttcttttttaaaagtggttctctatcaaaagaaagcttgacatatccttaccaagaactagccagatttcatactgtgttcccgatatctatgtactgtgaagaactgtgagtttcgccactgcaagatgggactgtatcccaatccagccatcagcccaacaggacattccaagctgtcaccaactgatcctagctgtcttcctgggcctttgccatttaccctgctttttatctatagaatgagcaggtggctggtaggtgactactaggtaagagtgaagtattaggtgaggagtgttttctgtcaccacattgttcttgtaccaatgcatcatgatcagcttggatcagctactgactgtctgatatttctaacccccaacac

SEQ ID NO: 8111 - DNA, 600 bp, Rattus norvegicus
gaggtatgacttcagagatgttacctgagcaaaatggagaaatgtgtgaggaatttgtcaagaatttatctggatgtttaaaatttcgtaaaagatgccaaaaatgtcacaattacctatctgaagaatgccctgatgtacctgaacttcacatagaattccttgaggccctgaaattagtcaatgtatccaatcagcaatatgatcagattgtccagatgacccagtatcatttggaagataccatatacctgatggagaaaatgcaagagcagtttggatgggtgtctcaactggcaagccataacccagtgactgaggacatctttaattcaacaaaggcagttccaaagattcatggaggagattcttccaagcaggatgaaattatggtagactcaagcagcattctgccttcctctaacttcaccgtccagaatcctcctgaagaaggtgctgagagctcaaatgttatttactacatggcagctaaagttctgcagcatctaaagggatgttttgaaacttggtaagaatagctgattaggaaagctttgttgagagggtaggggtcatagctgtttcctgaagggcgaattc

SEQ ID NO: 8112 - DNA, 600 bp, Rattus norvegicus
gcgcagcgttgagtagaggaggccagcggactccaagggacgcgggacagcggctgtgacccgatttctggagctacaacaacaggtcgtctttttgagacgcctttggcgggaaggaccacttcatcagaaggtgaaaaggttctttcttgtaagagactaccactggttgactttccctgtttcctctcacctgctctatataccgaccctgtatcaaccagactgtatcaggggagaagtgaagacacctgtttgaagcaaggctgtctctaaagtcaccctgtgcgtttagatgtgccaggaggtgccctggtccaactgttggcagagctttgtttaggctctatggagagagatttttaggtcactgtattttttttttctctctcttagtattccaaatacttgtctgtgagagaaatctggctttttgggtactgtgacttcaggtgcgccaccttggaataaccgtgttcctgtgagccgtgttccccagtgttttgtctgaggtgaagaagtggggcattttgcttactttcattgtgttactttgggtgacccctgatcactcttgtgacctctacttcagacaacatg

SEQ ID NO: 8113 - DNA, 600 bp, Rattus norvegicus
gaaattgagtcggtgccataagacgaacagaacttcaagaatgctgttttatgcctttcagcctccaaaaacatacctgcagccctactactcttgagagccagagccatggccccctgagatagcctttgtggaggcttcgggagggaaaggggagactggagagattagattagtgtccatggctgtttgctgttggattacgtcggcaggtccaggcaagatgaggcagggatgcttgaggatgtcagataacctgtcaatccactgtgaaggatggcttcccagaatcttctggctggccgggagtattacctcttctgtatctaagtgcctcctgagtcccaagcaccctgcttatcgatccgatgagtctccatggtaccctctgcccaacgcttcaacagcagtgactaactctccatggtccagagacggcctgagggaaggtctgcgcagaaacttagctctgactggctgctgctttgcggttagctcttgttctttggtagttttcattaaagccaatacttggttgcaaaaaaaaaaaaaaaaaaaaaaaaaaaaaaaacccacgcgtccgcggacgcgtgggtcgac

SEQ ID NO: 8114 - DNA, 600 bp, Rattus norvegicus
ccacagtagttaacccccatgcagaaaaataaatgtcctgaattctcaaattgctattctttattgtttaatatatatcatgtatgtaatttatttaggaatgtagaaattactgtatataaatgcatgcttttaggattatactaagatttcattagaagcagattgtattgataaaactgtaacttcagaatgaatgttaaataaaatgacagatttattttttcctcatcttaaaatgaaatttgaagaaggtattttgtagaattgttttataatcgtatctgtctgacaatagtcatttattcattttgtatggctggctcaccgcacgctctgtgttcctgctggggtagtttgttcatgtattgacattttgacagaagctaaaatcctaagacttgagatgacaagttgtaccttttatttttttaattttttgggacaacctgtgtagccttggctgtccaggaactcactgtgtaaaccagctggctttgaactcccagatcatctgcctctgcttcctaagtggtattaaagtcatgcgccaccaaaaaaaaaaaaaaaaaaaaaaaaaaaaaaaaaaagggcggccgc

SEQ ID NO: 8115 - DNA, 441 bp, Rattus norvegicus; identical to SEQ ID NO: 4019

SEQ ID NO: 8116 - DNA, 600 bp, Rattus norvegicus
atcagaaggactgcccatatatgtgtgcatacaaactggttactgtcaagttcaagtggtggggcttgcagaacaaagtggaaaactttatacataagcaagagaagcgtctgtttacaaactttcacaggcagctgttctgttggcttgataaatgggttgatctgactatggatgacattcggaggatggaagaagagacgaagagacagctggatgagatgagacaaaaggaccccgtgaaaggaatgacagcagatgactagcgctaccgccctttctgcactttttgcaagacagtggtccacaggaaggcccagcagctccaccctcctgagtggcaggccatctttggacgcagcctttctgtgctcattcttcaggcaactttcagtcccttactatagctatttctagatgccctttaacattgtgaacaaatagaccgtctggtattataaagcctgtgtgtgcgggagcctgatcctctaagatatatggtgtatgctgctgtatttacagctcatcctctctccattgtgccctgacccatttctgtatgccctccccctttatttccaagtgacgttctcattcttt

SEQ ID NO: 8117 - DNA, 442 bp, Rattus norvegicus; identical to SEQ ID NO: 4021

SEQ ID NO: 8118 - DNA, 600 bp, Rattus norvegicus
aggccagtagcaggtggatggatgccatggcgactggaagaccattccaaccttgaagcgttactgcgatagcatatcctatccaaccatactaacgtggacacccacacctcccctcagaacttcaaaagggcaagatcttttttccttcacttattgctgaaaccaagagcacaactcccattaagagaaggatctctgtgctgtaaactaaaacaaattgtgcatttttctggggccattgtctttggtttattttgttttgttttttgtttttgttttgttttgtcttggtcaaatttttaaaggaaatactacaataaaaatgttaaccagaaggtaaccctgagtatgattgtgagagagacacaccttcttactagttcatttgcatttaaatcagtgatcctgatctgtggcattcatgaaaaacaagttgaagactttgtttatctggaattgtttctaaatataagtcatttgtagcaagactttggaagcattcacgtttcttccttaaacatattcctttatgttcagtagttaagagaaccagagcccatgggggtgtctgactgtcactgatgcatttttgtccct

SEQ ID NO: 8119 - DNA, 456 bp, Rattus norvegicus; identical to SEQ ID NO: 4023

SEQ ID NO: 8120 - DNA, 600 bp, Rattus norvegicus
tgaatgtccctgactgcttcacgattaggagggctgataggtgaggtgattctgagggacccagtggctgttcacgcattctttggcacactaggaagttaagtagatgctcattttcagtcctttgaggggacaggtgatatgaaggccagggggtaaaaaaattcactttgacatagggtacacactgaagaaatgtcattacagtttattacattagaaaccagtagacactggcatgcaatttttggtattttaagaggttcagccatttgaaccatcggaccttgctgttaattttgcattctgaagcgaagtttgtagaaagtactagtatttgagaagtctgacaaaaacctgacttgtccctgcatttgaagactcttgcctggtgttctctgtaacaggacgaaacagtgtctcacctttgacgtttttgagaaatgtaaactcatccattcaactggcacaaatatatgattgatgtgtcacacacacatacatatatatatatatgtatatacacacacatatacacatgtacgatgactttatgaattctgtgtgatgtaaaaatttatgtaatgtaaaagcaggtat

SEQ ID NO: 8121 - DNA, 565 bp, Rattus norvegicus; identical to SEQ ID NO: 4025

SEQ ID NO: 8122 - DNA, 109 bp, Rattus norvegicus; identical to SEQ ID NO: 4026

SEQ ID NO: 8123 - DNA, 175 bp, Rattus norvegicus; identical to SEQ ID NO: 4027

SEQ ID NO: 8124 - DNA, 600 bp, Rattus norvegicus
cccacagaggcagagacctcacagccagcacccacggaggcagagacctcacagccagcgtccacagagacagagaccacccagcttcccaggagtcaggttgtagaaagtctatttacaacatctgcggtcacagaagccccttctacggaacccaccgccatggagaccctgtccacagaggctaatgagtctgccatcttccttgggccttccattggccacttacctgacaccgggctgaagaaagggctgattgtcacccctgggagttctctggccccaaccccgccagggacctcggacctcatcccggtgaagcaatgtttgctggccattctcatcttagcctccctggccaccatcttccttgtgtgcacggtggtgctggccgtccgcctctcccgtaagacgcacatgtacccagtgcggaactactcccccacagagatgatctgcatctcatccttgcttcccgaggggggtgacggggcccctgtcacagccaacgggggcctgcccaaggtccaggaccagaagacagaacgcagtggggacccggatggggatgacctcaccctgcacagcttcctcccttag

SEQ ID NO: 8125 - DNA, 600 bp, Rattus norvegicus
ctcgtccccctcttctcgctccgggcccattcgtcctgggggtgactatactgaaactttaccaggcatctggttcttacttcagggccatcaattggttcatcgtccatacgttccccttaaataagacatctcgatggtaacgggtctaatcagcccatgatcaacataactgtggtgatatacatttggtattttttaattttcggatgccttcctcaacatagccgtcaaggcatgaaggtcagcacaaagtcctgtggaaccttttagttaagggtcatttatcctcatagacaaagctcgaaagactattttattcatgtttgtaagacataaatatttataaatactgaaaaatctgtcaacaaacccccccaccccctacacctgaaacttcaatgccaaaccccaaaaacattaaagcaagaattaaataaaacaaaaagctacttaattcttaaaaggcttctccattctagtagaccacaaaattttaacttaaatcttagcattggtaaaatttcccgacacaaaatctttcctcctaactaaaccctctttacttgcctaccctcagaaaattccacatacaccaaa

SEQ ID NO: 8126 - DNA, 1400 bp, Rattus norvegicus
agaaaaagggaaatgggatgaaggcggaaaccttcagccatgcttccaaacttccctgggtgttcctggtcatttctctctagcgtctcttgtgactgtcccatctgagggtgtaatgccttcgcctctcatcctgtgtcgctacctccctcgcgagctgtcgccaacggtggactcgaggtcctgcagcagccccttggtggcctcgagggcggggaagttcctgggggccactcctcctcgggccccgcggctgtcacgccggctggcctggtgcttcatagactggggacaggtatgcctgctgcataggctgggttctggagggtttggctcggtgtacaaagccacttaccacggtgttcctgtggccatcaagcaagtgaacaagtgcaccagaaccctacgtgcatcccaacggaatttctgggctgaactgaacattgcaaggctgcaccacgacaacataatccgggttgtggctgccagcacgcgcacgccggaaggttccaacagccttggtaccataatcatggagtttgggggcaatgtgactctacaccaagtcatctacggtgccacccgctccccagagcctctcagctgcagagagcaactgagtttgggaaagtgcctcaagtattccctagatattgttaacggcctgctttttctccactcacaaagcattttgcacttggacctgaagccagcgaacattttgatcagtgagaaggacgtttgtaagataagtgacttcggctgctcccagaagcttcaggatctgcggtgccggccgtcccttcaccacatcgggggcacgtacacgcaccaagctccggagctcctgaaaggagagatcgccacgcccaaagccgacatctactcttttggcatcaccctgtggcagatgaccaccagggaggtgccttactccggcgagcctcagtacgtgcagtacgcagtggtagcctacaatctgcgccctcactggcaggcggtgttcaccgcctccctgactgggaagacgctgcagaacaatgtccagagctgctgggaggcccgcgccctgcagaggccgggtgcagaactgctccagaaggacctgaaggctttccgaggggcactgggctgactccatcgagccgatgtgcagataagcttttcgtttctgtttatttttaaataagtaaggatgggcttttagggcatatttttagaaaataaagttactacaaacttcagcctgaagtgcctttcctaagactaacgagggtacagatatcatgggcaccactcacggttgttaaacaacctgagccctttgtgtgtcacctttctgggtctactgtatcatttccgtagtaaggtttgttcctgaatgaaaagagaaagggggt

SEQ ID NO: 8127 - DNA, 600 bp, Rattus norvegicus
ggaggtgctcttgccatctgctgaggctcaactgtcttccaacatgggtttatgacactacatgtgggggtgtagcaccttcatttaccctacatagaaataaacaaggtctccttgtccttgcaaagcccatgttcctgtttaggaagggctgagagttgtgtgtagaaagacctaagaacatagggacagactttctgggcagtaagaccaggtttagagtaaaggaatgccttttgagacagtattgtgtagtccaagttgcctctgaacttgctaccaagggtggccttgaactccttaattcttttttctgcttttaccaccctaccaagtgctagggtacagtcatgaaccgctacaccagctcttggtctcttgtctttactgtataaaacgtttctttctttcttttttttttaaagaaaatgtttgtgcataagagttttttattgtggcctgtattttgcttatgcatttgtattagtcgtacttcaatagatttagataattcgcttagtgtaatagagaaaaatctaactcaagtatccagaaatatataggaaaaacgtacctgagctaaataaaaatattacctgg

SEQ ID NO: 8128 - DNA, 600 bp, Rattus norvegicus
cccggacacggacaggattgacagattgatagctctttctcgattccgtgggtggtggtgcatggccgttcttagttggtggagcgatttgtctggttaattccgataacgaacgagactctcggcatgctaactagttacgcgacccccgagcggtcggcgtcccccaacttcttagagggacaagtggcgttcagccaccgagattgagcaataacaggtctgtgatgcccttagatgtccggggctgcacgcgcgctacactgaactggctcagcgtgtgcctaccctacgccggcaggcgcgggtaacccgttgaaccccattcgtgatggggatcggggattgcaattattccccatgaacgaggaattcccagtaagtgcgggtcataagcttgcgttgattaagtccctgccctttgtacacaccgcccgtcgctactaccgattggatggtttagtgaggccctcggatcggccccgccggggtcggcccacggccttggcggaggcctgagaagacggtcgaacttgactatctagaggaagtaaaagtcgtaacaaggtttccgtaggtgaacctgcggaaggatcatta

SEQ ID NO: 8129 - DNA, 600 bp, Rattus norvegicus
gaactgactcccactgacaaactcttcatcatgaacttggaccaaaatgaatttgctggcttctcgtatactaacccagagtttgtcattaatgtgtaggtgaatgcagattccatcgctgagcctgtgtgtaaggctgcaggctgaatgtctattatcaattccagtcttccaggattcatggtgcctctgttggcatccgtcatgtggagagcttgtcttagagggcttttctttgtatgtatagcttgctagtttgttttctacatttcaaaatgtttagtttagaataagtgcattgcccactgatagaggtacaattttccagacttccagaaactcatccaatgaaccaacagtgtcaaaacttaactgtgtccgataccaaaatgcttcagtatttgtaatttttaaagtcagatgctgatgttcctggtcaaagtttttacagttactctcgaatatctcctttgaatgctacctaagcatgaccggtatttttaaaagttgtgagtaagctttgcagttactgtgaactcttgtctcttggaggaaactttttgtttaagaattggtatgattaaatgaattcatatatgc

SEQ ID NO: 8130 - DNA, 600 bp, Rattus norvegicus
ggctatggccaacagggtgcgcccacctccttctccaatcagatgtaatctggtcagtgaagtccatgaagatcccacgggtgggcaagagctcaagagaaggcctgccccccttttcccatccccatatccctaggtctccacccctcaacccaggagaccctaactgtctttgctgtttatatatatatatattatatataaatatctatttatctgtctgagccctacattcacccacttctccatgcactagaggcccagtcctgaatgggctcctccccaaccctgaccttgcattcctcagcccctatctgttccccagccctgtcccttgaggtaaggggctctagaaaggggacaggaagggaaccagaccttggctgcatggagtgggttggtgtgactttctctccttcctcctctccctctgcccctcctaactctggccttggtcctccagcatcacctgaacttcagaagctctcgaatggaaatctgaccccaagagtagagcagtagactgagtggaggaggcttgggtgaaacgggcagagaggagataacctctgtagagagaggactagtcagccaagagtt

SEQ ID NO: 8131 - DNA, 1400 bp, Rattus norvegicus
gatcacagacttcggcatgtgtaaagagaatgtcttccctgggtccacaacccgcaccttctgtgggaccccagactacatagcacctgagatcattgcctatcagccctatgggaagtctgtcgactggtggtcctttggagtcctgctgtatgagatgttggcaggacagccaccctttgatggggaagatgaggaggagctgtttcaagccatcatggaacaaactgtcacctatcccaagtcactttcccgggaagctgtggccatctgcaaggggttcctgaccaagcacccaggaaagcgcctgggctcagggccagatggggaacccaccatccgggctcatggctttttccgttggatcgattgggagaggttggagagactggaaattgcgcctccttttagaccacgtccgtgtggccgcagcggcgaaaactttgacaagttcttcacgcgggcagcgccagccttgaccccgccagaccgcttggtcctagccagcatcgaccaagctgatttccagggctttacttatgtgaacccggacttcgtgcacccagatgcccgcagccccacaagccctgtgcctgtgcccgtcatgtaatctcatctgctgccgctaggtgttcccagtgctccctccgccaagttggctgtaactcccatccacccccatccccgcctctagtccgaattttaggtctcttaaaccacccaaccttctggcctctttcacgcgccccaagtgggttctagacgctgttccccagcattgctggcattttaaacttcaaacagtctctagagcctttctgtgttctagattcgttgtgctgagccctggtttttccccacccccaacatctggatgctgttccaactcttcccagaaaccccactccgtgtggggttctagactctatcttggtagttttatgccttctctctccctagaccacgttgggagaaatagtctcatgagattgcctgctccagactaagattccagatcagctctctgcatccttcaaggcccctcctacctccacttcagttgtagaattaagtgggaggctgggctccgtgttccaggccacctcccttccatgttctggggattcctggcatgcacggaggattctctccccgacttttctcagtcagcttttgttctagatttgttccagaacccttcactgctcacctgccccgtgcatggctccagccttggtcggaatcacacacacacacacacacacacacacacacacacacacacacacacacacaccccttgtcctccgcagtgcctgccactttctgggactttctcatcccccacgcccttcctttatcctctcccacccagacacagctgctggagaataaatttg

SEQ ID NO: 8132 - DNA, 600 bp, Rattus norvegicus
  misc_feature (257)..(257): n is a, c, g, or t
tgcaaccgaaggcagagagaaaaacgggtgaaaacgagtctcaatcaaagtctgttctctatttcaaaggagcatcttgagtgcagataagacttgcctgtggtagccatgtgtggtagcctttccattcctttctgatttgaagaaaaatcagaagttacttagcttcataaactagattaaatcagcaacccctgcagtttttgtttcactttcttctttctttcctttttagatccaatgatttaaaacaagangaattcatagcatggccctttactcctaaatcatcaccaagaatgctcacaatacctcttccaattctgcctttatacctaatacacagagatgtggtgataactgggagagaggccactatatatgtgaatattttgagtttaaaaattaccttttgtaagtcaatgtattgttctttaaattttaatcagtaaggacaaatatttaccgactataacagggatggctcaagttgataagctattacttgtccagagagatgtctcagtggttaagagcatctgttgctcttccagaggatgtgggttccatcacctatacagctcacaactgtctgtctct

SEQ ID NO: 8133 - DNA, 600 bp, Rattus norvegicus
gtctttgaggatcaggaagtctaaagcctcaggcggccagagggtgtgcggagctggtggggaggagcttggagagaagggacaaagctgggggctgagggagaacccccatctcttctctccttcctcccgtccttggatagatacagctcccatacacccctgcaccgcccagccccctcagaacctccagcccttggacagggcgacaaatgaacttgctatgaaaggccgtgtgggaggctgggacccaagttcttagtctctgggaccccaacctctaagaaagtaggggaagggaagaaagactgagagggacaagccatcttgactgtagggtcaggaggaatgaggaataggggcaggtgcccttactcacccctacacacacacaggagagccctgccaagttccttggcctagatttcccttcaggccacaggtctctacttccccaaatacctgggtcctgggtgcaaaggacagcttggcttggcttagctcctcccctggagctaaaaatggtagtcatcctaactgcactttggaaaccaagagagaggggagactataaatgaagaaaaactagacagaaaaaaa

SEQ ID NO: 8134 - DNA, 600 bp, Rattus norvegicus
ccaacgagctacacccacagccccaacattaattgcatcctatctcatgatctaaattaatagtgacttgtgaagatccaactttggccgttaactggctttcccgttactgtggtgattgtgtaggaaagggcagtgtgggtgtcacattgattttgtcctttgtcactgactcacggtttttttgtgttttttttttccagagtttgtacaaatgatgacagcgaagtgaagaccctgtacagaaggtgttaaatttcttgtacagaactgttaatttgccttttctctgtttgtaacttatctgtaaaaggttcccccactgtcagaacatgcatgtatagtaattaggactccattcctccatgtttcttccctatcttctgtcattgtccttcaaccttattttagaaaactgatcaagtaccatgttgcatgtggcttcctctggatatatctaagcccttctgcacatctacacttagatggagttggtcaaagggaacatctgggttatgccttttttacagtagctttaggaaccgtcggcatgttgctgttgaagtgtggagttgtgagcgtggactgtggacagtcgac

SEQ ID NO: 8135 - DNA, 363 bp, Rattus norvegicus; identical to SEQ ID NO: 4039

SEQ ID NO: 8136 - DNA, 1028 bp, Rattus norvegicus; identical to SEQ ID NO: 4040

SEQ ID NO: 8137 - DNA, 600 bp, Rattus norvegicus
tgaagggcaaaggcaaggttcggacctattggctcctgggggagcggggatgtagcactcgaggctgacctactgccctgctgttccttgtcacccctcctccctgtgccagaggtgacagaggtgtccagcttccacctctcccacagcagcccagccactgtggaaggattagggacctgaccagcacagtcaccagatgtgacctctgagagaggatggagatggtggggactgcaggggacacctaagtttgtaggactgactgaaacacagtccctcccatggcacccttgtggcacacatgcccagtcccacccttactctgctgcctagattgggacagcgattccttctctgccctcaacttagctccactgtgacttatagggagggaattgccacctgaaggaaacagaaagaggttagagtttgcaggaggcaggcagtcctgtgtcacaaatactcccctcacttccagcccaccacctgccccacagactttggacacagctcactgaggagaagagaagctgccggttaccttgcttctcctgtgaaccaaaccattaaagtctttattcctgtgaaaaaaaaaaa

SEQ ID NO: 8138 - DNA, 600 bp, Rattus norvegicus
cagacagcctcttgtaaggagtcaacaactcattctctagaaacagagacgaagaagcactctctacagacatagagaaaagtttgctttagtttgataagcagccttgtcatctctaagagatcgaaagcaggcctactccagctgcacgaccttgttaatccagtccacaaacacagacacacgtgtgaagatagctggccagcgaggcccgtgcacacactctgttcgggatgataagtccctgtaggacccagcagtcatgggtatagcaggcaagtgggcccccgtagtcaccctagcaggtagaagaactggtgaaggcttgaccttggcaatgactgaccacctcccctgacatcctgcccccttggtaagcaagtagtatagttccagttcccaaaccttcccaggccggcccagcggctctcccactgacctcacaagcgcccgtaggggccagcaacccctcggtgcatatctcactctcttgtactcgtctccggtacttcacattacattcctgactggagatgaccttcattttggccacatgaaggactgtgctattgcttgtacctggagtgcagacaggagagg

SEQ ID NO: 8139 - DNA, 554 bp, Rattus norvegicus; identical to SEQ ID NO: 4043

SEQ ID NO: 8140 - DNA, 600 bp, Rattus norvegicus
aggtccccaagaagcttgtgttttagagctgccgggaagcttagctctgtcctatactcaacctcctcaagatctcaactccctggtctcagagagccctccctgcttcccaccctatgcaaagccagcttcctccgattttccccctacccggcaatctgcaaacatcttaatagtggcaaggcaggtggtttctggtgctaggtcatcaggtctccttgcaaggatagtcagtgttccctccctgtctctcagatgacaacaatgttaattttgtgtaaaagttgctcctgtcatcccctcccgtagtctgaagctaaccaggccatctcttcctccgtcctggacatgtgcccagatgaatgttttgtcccatatctctggcttcccctttacattggcagccagaggtcctgagccggggcttcctcagggtccctctgagactgggcatctgctccctaggatatggtcagtgtcccctgaacatctgcattctgtgagggactgagctgtgtgttcttcatcccaacacaataaggtggtatcgtcattatccacagtgacagatggggaaactgaggctcagagagcgagctc

SEQ ID NO: 8141 - DNA, 600 bp, Rattus norvegicus
gaagcctctttatacacatatgctaggatgtcaggatagctcttctcctccatctctcctttcttctcttcttgattcagacaacagatccgaaaactcactaggcttccggtgtctactaaatgctgagagtcaggccacagcctttctataaacatcactggaagagacaccacctcgtcccagattctgtcttttccctaagctatcaatcattaccggggattccctttgcctctgcacctcataggcaacaaaagaaacataagtcctgcagtctaaggcatacccaagccataagggcaccacgagactcagatgagaagagatttttctccagagtactcagtgagatagactagtgtcaagccagatggggcaactcctggctcttggcctgggacttgtcttcaagatctctgctcttattagagaaagaactttagcatgaggaaaagtaagagaaaacaagttacatgggcatggtggtgtgctcctgcaatcccaatattaagaggttaaaaaataggaccagaagtttaaagtaatccttggctacctagtgagtgtaaggccagcctggaatcaataagagttggt

SEQ ID NO: 8142 - DNA, 600 bp, Rattus norvegicus
tctgatgccgtccagtaagtccctgaaggaggaggatgaggctgctgaataccagcctggcctccttccttccacgtgccaggcaccggagtcagacagccgtgtatcatgccgtcacaccccagcccgccttcccacccatctccctctgattcgcagctacccactagattcccccaccatctttcatttccatacacttctagattctcccaagtcagaacctttatatcttctactgctaccgtccaaacctcactgtaaactcccaagcttttcacgtggatgcaccagtcgagctctgctccaattgccaattcttgtataagccttcccatgatcctctgctccagtgtcatttccttgtataagccttccctagtcatgcattgcaaagcagtgtctcccataaccacatcaaatctccagcttccttgagtgttccccgtcagtagctgcagcctttagttggtggcacactagtcaccagcaccttgcccataaaagtgtatgctccataagggctgggtgtgtggattcacattcaccccagcccctgaagggagaatattttaaagtgttttgtttttagaattaatg

SEQ ID NO: 8143 - DNA, 600 bp, Rattus norvegicus
tgacaccatgaaagtgggaggtaacttggattccaaaggctatggcattgcgacacccaaggggtccgccctgagaaatccagtaaacctggcagtgttaaaactgaacgagcaggggcttttggacaaattgaaaaacaaatggtggtacgacaagggcgagtgcggcagcgggggaggtgactccaaggacaagaccagcgctttgagcctcagcaatgtggcaggcgtgttctacatcctgattggagggctgggactggccatgctggttgccttaatcgagttctgctacaaatcccgtagcgagtcgaagcggatgaagggtttctgtttgatcccacagcaatccatcaatgaagccatacggacatcgaccctcccccggaacagtggggcaggagccagcggaggaggcggcagtggagagaatggccgggtggtcagccaggacttccccaagtccatgcaatccattccctgcatgagtcacagttcagggatgcccttgggagccacaggattgtaactggagcagacaggaaacccttggggagcaggctcaggcttccacagccccatcccaagcccttcagtgcc

SEQ ID NO: 8144 - DNA, 600 bp, Rattus norvegicus
tgaatcgtgtctcagatacagctgaggttatcaacaggtttgtattcaacgagggaatcatttttgcctgctcccttctcatccccatgagctgctgtgattatcaagcagcaacagcaattgatatccagaaacactttcagaaaccactaattgaagcctggctgttaactcattagcactgctccaatgttcaacgggtctgggagtgcctgtggtagtaaatccaaacacacaattcctcaggagtacacctaggtctgcagggcctctcagaggcctttcagacatcccatagaaggcagtcacttggcctggcctctttaaggcccactctggctacaggaaggcaaatgttgataggtcatcatcttactctcaaggaactcactctggagagagggcacaggaaaggaaagagagactattctatgaggcgcatggtataagcaagtgatgccaagtggagaggagaagccattataaagatttcaccgaagtgacatttgaaccaacccaggcacagacatgtagatttgaagcaggaaagcaccatgtgatgggggtaggggttgggatctttttgaagaggccgaattc

SEQ ID NO: 8145 - DNA, 600 bp, Rattus norvegicus
atggtgtctcgaagtcacagagatgctggagcccccaccttcatgtatgaatttgagtatcgcccaagctttgtatcagccatgaggcccaagacagtgatcggagaccatggtgatgaactcttctcagtatttggatctccatttttaaaagatggtgcctcagaagaggagaccaatctcagcaaaatggtgatgaaatactgggccaactttgctcggaatgggagccctaatgggggagggctgccccattggccagaatatgaccagaaggaagggtacctgaagattggtgcctcaactcaggcagcccagaggctgaaggacaaagaagtggctttttggtctgagctcagggccaaggaggcagcagaggaaccatcccactggaaacatgttgagctctgatcaggagggtcagccatgtttgagaacctgaagctaaaggggaattattccacagaagattttgtaaagacataacacttcttgtctttgagactataacatcacatggtattttgtacaaatgcattaaagggaaaatacttaaccttattgcttcaacttgtaaaataaaacattgtttagaaattc

SEQ ID NO: 8146 - DNA, 600 bp, Rattus norvegicus
ctgatttataaaataaatatcatgctgtgtgcatacttttaaagcctatagaggctggggagatggctcagaggttaaacacttttactgctctaccagaggacccaagttccatctcctatatctacactgggactcaggcaaatgcaactctacctttaggggacccaatatccttttctggtctcagggggcactaggcacccatacaagtgtagtgagtgcacacacacacacacacacacacacacacacacacacaaattaaactctaataaattttttttaaaaaaaacctttttattatgatttatttctggggtcacagcatgaaggtcatattttattttctctttttcttttcttcttctttttttaatccactcatctgtcagtggattcttgtgtttcctctttcaaccaatatgaatgatgctcctgtggtcatgggtttataattatctccttggcatccttaaacttctgtgtgtgtgtgtgtgtgtgtgtgtgtgtgtgtgtgtgtgtgtgtgtgtgtatgtatggtcatgtgtgtttgcgtgttttgtgtccatatctgtttgtgtttatttaggggaattc

SEQ ID NO: 8147 - DNA, 600 bp, Rattus norvegicus
  misc_feature (427)..(428): n is a, c, g, or t
  misc_feature (431)..(431): n is a, c, g, or t
  misc_feature (454)..(455): n is a, c, g, or t
atgggcactcgcccagaggtctggggcgcagctcacacactggactctggcctgcccgcctgcgcccagtccttccacctcgaggtttacatggcccccttccagcgtattttgtatgttttttttttctggaaagagactgaattcatattgaatataatatatttgtgtatttaacagggaggggagaagggggttgtcgcggcggagtggccccgccgcctggtactcagcctgtggggatactagggaggaacctccgccccctgccctccccctctgcacagtactgtggagaagaaacacgcacttcgtgtctaaagtctattttaagatgtgtttgtgtgtgtgtttgactttttattgaatctatttaagtaaaaaaaaagtctttattaatttctgtggtctctttcttccaagctgnncgnatggagggagaagattgggctgnnccaagcccggggcagtttgtagttctctcctttcgggtatcttaaggtccagtacaagcgctcaaacctcccatcccctgaggtcctggcaccagagctgcgcaggcaggcagtggccgagttacaagctatccaggccgaattc

SEQ ID NO: 8148 - DNA, 600 bp, Rattus norvegicus
tccatcttctgaggccagcaaagtcctcagtagaacgcccatcttaccatcaacgccggtcactcccccattgctcttaccagccattggcggcaccagcaaaatagatcaatattctcgaattctcttcccagtagcatttgcaggattcaaccttgtgtactggatagtttacctttccaaagatacaatggaagtgagcagtactgtcgagtagtttgcagccaggaaaagctggacactgtaattggttattttccattttcctcgcttacagaacacaaattattgtgttagtataaatggtctcatttcagaaactaaatgtctatattttcataatatggaataagcatgtttgggctaaaaacaataatattactcttcaaaattaaatttagaaagctactgaaaatatgaattttctgtatagtaaaattaataataataataacaataatatcagcatttatgtggataaggtagattcaaaatgagtttgccaacctttgtcttcattgttcaatatttttaattgtcactgtgaataacattttccacaaagcagatatattcagatatgctgacccttctaagctt

SEQ ID NO: 8149 - DNA, 600 bp, Rattus norvegicus
gacagtactctcccatggctattgaagaacaggtggctgtcatctatgcaggcgtccggggttatcttgataaactggagcccagtaagatcacaaagttcgagagtgctttcttgtctcatgttgtgagccagcaccagagcctcttgggcaatatcaggtctgatgggaaaatctcagaacagtcggatgcaaagctgaaggaaatcgtaacaaacttcttggctgggtttgaaccttaaagccctgccactgtcaccagacactgctttggttttgtcatttattgtggtaaaatcagcaccatttgtaaaggtttactcttgtactccctgatgtacagaaatcacatgaataaaagttccatattgagtgctagtttgtgtgggacgggctcagatgtatcctgggacttgtggaggtcagagagcagcctgtaggagtcagtgccctcctttccctgggaatttaactcaggttattatttaaagctcgacttcaggggttggggatttagctcagtggtagagcgcttgcctaggaagcgcaaggccctgggttcggtccccagctccggaaaaaaaagaaccaacccgaatt

SEQ ID NO: 8150 - DNA, 600 bp, Rattus norvegicus
caggtttgttagttgtggtgtaggataagaggaagcatcgataccaggtgagctttcagaaggaaattcccacgcgcagcctcatgggctagcggccacagtcatggagtcaagactgaacatagagccaaaggcctgccctgtcccaggtgtggctggcgtcttggggcaacttggtgagaccctgtctcgatattaaaagaataaaaaggacagttgtgacacatgcttttaaccccagccattggaaagcagaggcaggagaatttctgtgagtttcaggccttctagggtagagagctagggtaggatatagttcagaaacagtcctaggtgagcccacagtactgcagaggaaaagctatggggagaccccatgccctgaggctggtactatctcagatctaaggcaggagtggaagtggatgttgttaggagaggaaatgggaggagccccagacagacagacacagtctgagaaagcaagtgtagttcctgactttagacggtaagtcatttggttgtttctaaggcagtcgtttagtccaggctgaccttgaccttactacatagcagaaagctggcattgaactcttgatc

SEQ ID NO: 8151 - DNA, 600 bp, Rattus norvegicus
ctggcggccgtactggagtacctgacggccgaaatcctggagcttgcggctaatgcggcgagggacaacaagaagacgcggatcatcccgcgccacctgcagctggccatccgcaacgatgaggagctcaacaagctgctgggccgcgtgaccatcgcgcagggcggcgttctgcccaacatccaggctgtgctgctgcccaagaagaccgagagccaccacaagcctaagggaaagtaaaccagtgagcgaacgttttatcttttgaaagaccaaaggctcttttcagagccatcacttgttcatgtaagagttggtaaccaaaccctggttttacctactttgttgcaagcccatatcaatcttaaaagcatcaaactaattatatttgctggttgggctaaatctttaatctttaacaggtttgtggttcccgcagagagattattgggatcgtagaaacaggctggtttttatttttatagtcagctcttgcagtactttacctagtattatttctcagtagcagcagacttaacgctgggattgggagaagtacatagcgtttacaggatagctggtagcttacatgcacagcgt

SEQ ID NO: 8152 - DNA, 600 bp, Rattus norvegicus
ggtggtgagtgtaatttgccattagactataaataggcgtggacgcactacctccgctacggctttatggcttttgaagaatcatgtctggccgtgcaaagcagggtggcaaggctcgtgccaaggccaagtcccgctctttcagagcaggtttgcagtttcctgtgggacgtgtgcaccggctccttcgccaagggaactacgcagagcgaattggggctggcacaccagtgtacttggcggccgtgctggagtacctgacggctgagatcctggagctggcgggcaatgcggcgagggataacaagaagacgcgcattatcccgcgccacctgcagctggccatccgcaacgacgaggagctcaataagctgctgggccgcgtgaccatcgcgcagggcggcgtcctgcccaacatccaggccgtgctgctgcccaagaagaccgagagccaccacaagtcccagaccaagtgactcccgcacttgtgacagcagctaacagattaaaacaaaatggctcttttcagagccacctttcgttttcacgaaaagttgtgcatgacaatttttctcctgaacaggtataatcaatgactca

SEQ ID NO: 8153 - DNA, 600 bp, Rattus norvegicus
acccggggaagctcctgtttgctcctaacttgctcttggacaggaatcaaggtaaatgtgtagaaggcatggtggagatctttgacatgttgctggctacgtcaagtcgattccgcatgatgaacctgcagggagaagagtttgtgtgcctcaaatcaatcattttgcttaattctggagtgtacacatttctatccagcaccttgaagtctctggaagagaaggaccacatccaccgagtcctggacaagatcacagacactttgatccacttgatggccaaagctggcctgactctgcagcaacagcatcgccgtctggcccagctcctcctcatcctttcccatatccggcacatgagtaacaaaggcatggagcatctctacaacatgaaatgcaagaatgtcgtgcctctctatgacctgctgctggagatgctggatgctcatcgtcttcatgcccccgccagtcgcatgggagtgcccccggaggagcctagccagagccagctgaccaccaccagctccacttcagcacattccttacaaacctactacatccccccggaagcagagggcttccccaacaccatctgagaac

SEQ ID NO: 8154 - DNA, 1144 bp, Rattus norvegicus; identical to SEQ ID NO: 4058

SEQ ID NO: 8155 - DNA, 1400 bp, Rattus norvegicus
acctatcgtgcaaagatttgctaatctgtagttatcaagtttcaggactcctttgtaaaattcagccagtgttttagaaacatgtactgtccccagacaatgctagccagtggtgtacttatgtagcagtgttacccaagtccacacatcaaagtcacactgctttaataacgtgacatactaggtacatctgcgttatttcgcatctgagaaatgtacacagtcagaggtgaatacactatattccatacagtctgccttgctctctaaaaatatatattctccacatacgtgaacatctttatctctaaactgtcatttgatgaaattttggcaatgtatgtttacctctaaataaagtaattttattgtaatgtaaaaaaaaaaaaaaaaagaggcatctaggtctcagccacctaacttcctgcctgcactcttctcaacagtctagggactctgggcagtgctggccgcctgggttctcaccagcaccacggacgtgctgtcgaagatggtctgtaggtacacgaggatgggagtgatgcctgtcagctgctgcagaaaacgcatcagcactgtaatgagaataggccggtacacacggggctcccaggcctccgcccacgacactcggctactctggaacacaaagcgtctgttgagggctatgcaggctctccagccctggccaccctgtcttggcacctgcgggtcgaggagagacctccttccctcatccaagagaggcccaaccaccagaggctgcatgggctctgcatgctagcaggaacctctcctttgaggaaaggcagccaaagcacagagaggcctggtggatgtccaaggctacccagagcttcctgggttggggcccgaccaggcgggtaccacacatgcttcaccgtctccgcacgttgtcctggatctgctcaaactcccagtggacctcagagtccgctcgcagccagatcagcgcctgcagtgcttcctcatcccggctcttagacagtaggaagcgaggcgagttgggcatgaagctaagcagcaggatcatgaccagaacaggcccctccccggccacgcaagccatgcccaaggcagcagaagacctggtgagagaggcttcggtgagcagatgggccctctgttgctctcccagcctagcttcccgactgcccaagtccctgtaggaggggcaatgtgggactttaagaattgcctggggctggagagatggctcagcgattaagagcacccgactactcttccagaggtcctgagttcaattcccagcaaccacatggtggctcacaaccatctgtaaagagatccgataccctcttctggtgtgtctgaagacagctacagtgtacttatatgtaataaatgaataaatcttt

SEQ ID NO: 8156 - DNA, 600 bp, Rattus norvegicus
tggtccccaccatgacacctataccagccacactgatgctgatcccagctgatgtcagtcacaaccccacacagatgcaggctcgccctccccactgtggctcatagagaagttttgggctagcctctgccagccaagtctgaaggaagaagggagctagggtctcccaggaccaaggagctgtgtgggttgtccctggtctctatgtatttcctttctgctctgagccaggagctgtctctgcctcccaggacacgtgtctccaaagtgcctgcgagggcgggctccgcccaggccctctgtgtcccctgccctgccctggcctggtgagaccgacctcaggcctacctactctgggtcctctctgtggacacaactgaccaggcaacttggcagttctggctacaactggatggactcatactccagcaggctcatcccaatgctgtaggccccaagagtcattgatggggacaagggtgtcacaggcctcaagtctaccaccctgtctctgttattcttagaagtggggctattccagaggtattttaagtgtgggatcaccattctctttgtgagaggggtgtgccgagggaattc

SEQ ID NO: 8157 - DNA, 600 bp, Rattus norvegicus
gtctaacaaagaacattctgggcttcgtgttccctttccttatcattctcaccagctatactcttatttggaaagccctaaagaaggcttataaaattcagaagaacacgccaagaaatgatgacatctttaggataattatggcgattgtgcttttcttcttcttttcctgggttccccaccaaatattcacttttctggatgtgctcattcagctgggcattatccgtgactgtgaaattgctgacattgtggacaccgctatgcccatcaccatctgcatagcttattttaacaattgcctgaatcctctgttttatggctttctggggaaaaaatttaaaaaatatttcctccagcttctgaaatacattcccccaacggccaagtcacacgcaggcttgtcaacaaaaatgagcactctttcctaccgcccttcagataacatgagttcatctgccaaaaagtctgcatctttttttgaagtggagtgagagggttcaaagcctgcaagtgaagtgatttcctgacagcagaagccagaggaccatttgggctaagcagctcactcactaccgaagagtgttcaacctccagcaa

SEQ ID NO: 8158 - DNA, 600 bp, Rattus norvegicus
actaccgtggagatcccaactggtttatgaagaaagcccaggagcataagagggagttcacagacagtcaactgcaggaggggaagcacgtcattggccttcaaatgggcagcaacagaggggcctcacaggctggcatgacaggctatgggcgaccccggcagatcatcagttagaaagggaaggccagctctgagctgcagcatcctgcttagcctgcctcacccacgcctatataggttcttagcccggacagctttgaggtgtcactgggcaaagatgactgcacatgggcagctcccacctatcctcagcctcagccccgcttcttaccccagagccaccactgtcctggcccctgttcccagctgtccccccacctctaccgtttcccccatcctggagtaagcacggagaagtgggctgaggtagcctgactgtaggccagcccactgtccttggaagccaatgtcctttgaaagagaccctgcctctacatctttttctggaatattttttgggttgaaattcaaaaaggaaaaaaatatatacatatacatatatctccaaaaaaaaaaaaaaaaaaaaaaaaaaaaaaaa

SEQ ID NO: 8159 - DNA, 600 bp, Rattus norvegicus
tccagactgataagcccgtgtacaagccaggacagtcaggtatgaagctccacggtgggcaaaggaattaatacaccaccctaaacatggtgtgaagaaggcctgggtctttggaactcactagaaaattctctttttccagttaaatttcgggttgtctctatggataaaaatctacaccccctgaatgagttggtgagttttttacctatgggtattggtgggttcttcaagacaaaatgtcacagcaacattctaatttccagctccttctgagacatgggttagcccttttttctattctgttcctttgccactttatagcctcagctcttctaccattggccatcctatggcttccttatatgtgactgtccttatttggactccatttgactggataagtatctctgggttttcttcatactctgtggagccttatactgtatagaaccttttaggtttttcagtcatttcttttctagattctgttaccatccctcagaaatccatttctagtgtgacagggatatttttcacacagtctctattatttttatagcctcatatttaacacttgggttcttccctagttgaatt

SEQ ID NO: 8160 - DNA, 600 bp, Rattus norvegicus
cgatgatcttctctccgagttcccctgacaagtttggatcctgtgtccctcatacgacacgtcctaagcgggaatatgagatagacggccgggattaccactttgtctcctcccgggagaaaatggagaaggacatccaggcacacaagttcattgaggctggccagtacaacagccacctctatgggaccagcgtccagtctgtgcgagaggtagcagagcaggggaagcactgcatcctcgatgtctcggccaatgccgtgcggcggctgcaggcggcccacctgcaccccatcgccatcttcatccgtccccgctccctggagaatgtgctagagatcaataagcggatcacagaggagcaagcccggaaagccttcgacagagccacgaagctggagcaggagttcacagagtgcttctcagccatcgtagagggcgacagctttgaagagatctatcacaaagtgaaacgtgtcattgaagacctctcaggcccctacatctgggtcccagcccgagagagactctgattcctgccctggcttcggcctggacctcaccctgcctccaccacatgggcccccggtacccaattcc

SEQ ID NO: 8161 - DNA, 600 bp, Rattus norvegicus
ttgtgactgatgagcatgcccagggcaccctgcgctccaccaagctcttttttgacctgttcttcagctccttccagggtctgctggtggctgttctctactgtttcctcaacaaggaggtgcaggcagagctactgcggcgttggaggcgatggcaagaaggcaaagctcttcaggaggaaaggatggccagcagccatggcagccacatggccccagcagggacttgtcatggtgatccctgtgagaaacttcagcttatgagtgcaggcagcagcagtgggactggctgtgagccctctgcgaagacctcattggccagtagtctcccaaggctggctgacagccccacctgaatctccactggactccagccaagttggattcagaagggcctcacaagacaacccagaaacagatgcctggccaaggctgaagaggcaaagcagcaagacagcagcttgtactatccacactcccctaacctgtcctcgccgggtaccggccacattgatggagtaggggctggatatgatggagtagccatgctatgaactatgggtgttcccatgagtgttgccatgttccatgcacacagat

SEQ ID NO: 8162 - DNA, 1400 bp, Rattus norvegicus
acggagttgcaaagctcaacatcttcttcaaggagctgaactataaaactaattcggagtctccttctgtcacgatggtcagcctcctgtccaacctgggcagccagtggagcctgtggtttggctcgtccgtgctctctgtggtggagatggcggacgtcatcttcgacctcctggtcatcacacttctcatgctgctacgccggttccggagccggtactggtctccaggacgaggggccaggggtgccagggaggtggcctccactccagcttcctccttcccgtcccgtttctgtcctcaccctacatccccaccaccttctttgccccagcagggcatgacccctcccctggccctgacagcccctccacctgcctatgctactctaggccccagtgcccctccactggactctgcggcgcctgactgttctgcctgtgccctggcggcgctctgagagaggagaaggatcctctcacccagccctgagctcccttgtaaactgatggatatctcacttcagcacatcttccccagcggccccgccgagccctctgtggtgtgcctgcctgagggaacaggctgagtaaggggcccaggaagccgtccagaggacaggggctaacgatctgctcagagctgccctgcccctgcttctgaacactgccttccacaagcacagacaagttccctcttccctcggatcagcccagccagacttggagctctgacaaggaactttcctgggagaggaccaaggaacaaatagaacagccatcgcactcctacccccgtgaccagaggctggcctggcctcactgccttcagggacactgatgtctgctcctctccttgaacttgggtggggaaccccacccaaaagcccccttgttagttctttggcaattcccctcccctcactcctcagggtggggactagagtaagacagaccagggtaggcctggtgttctctctcattctcaagactctctcatttgatacaccataccccagtgcctctgtggtgttgtctccttctttctgtttcctcagcctggaagcttctttcactgtccctcagaacacacagtctatgcatcccttagaaacctgcccaaaggcaccatttcttttgtgaactcagttaccctgttatgtctcccccagaattgtcgccctctcccctcacccccacagtgtactgtattatatgttcacattcttttgtgtctgcctccctgggtaaactgagctccttgtgtggtcagggatgagatttgctctgttttgtatccttccggtctagcccagtctcccacttgggacgggtaggcaggtactcaataaaggcttgttccatcaaaaaaaaaaaaaaaaaaaaaaaaaaaaaaaaaa

SEQ ID NO: 8163 - DNA, 600 bp, Rattus norvegicus
tcagggtgattcggtccgggggtcccttctggagaaggaagcaggtgttctggagacctagggagttaggtgtctccggtggaggagaagggggagaccgccacatgaaccagcaggctaggagcctacaggacgagagggagggcctcggctttccaagacaggcaaggggtcgggggtggagtggagcacggggcgggcccgcgggagccccggggcggtggcgcgggccgagggggtggggagcgcagccgccttgtacttccccttcgccgcttagctctacaacagcctgatttccccgaaatgatgaggcgaagtgggccaatgggcgcgcgcgagcggcccggcgggggcgtggccgagttcgggccggggaatcccgctaagtgtttagatttcttcgccgccgccgactcgccagtgcgcactactccttcgtcgaggtaggaagagctctcactgtctgagccaaaccgaaccgggccgagctgagccgaggtcagcggtggccagaggaacccagcatctcgggcatcattcgctccgtgcacgcatcgtgtacctacaccgcaactccgtgcctcattcccgggtacc

SEQ ID NO: 8164 - DNA, 1089 bp, Rattus norvegicus; identical to SEQ ID NO: 4068

SEQ ID NO: 8165 - DNA, 600 bp, Rattus norvegicus
atcatcatggaaaatggcaaggtggtgggtgtaaaatctgagggagaggtggcccgctgcaagcagctgatctgtgatcccagctacatcccagaccgtgtgcgaaaggctggccaggttattcgcatcatctgcatcctcagccaccccatcaagaataccaatgatgccaattcctgccaaattatcatccctcagaatcaggtcaacaggaagtcagacatctatgtgtgcatgatctcctatgcacacaacgtggccgcacaaggcaaatacatcgccattgccagcaccaccgtagagactgcagaaccagaaaaggaggttgagcctgcattggagctgttggaacctattgaccaaaagtttgtggctatcagtgatttatatgagcccattgatgacggttcagagagtcaggtgttctgttcctgctcctatgatgctaccacacactttgagacaacctgcaatgacatcaaagatatctacaaacgcatggctggttctgcctttgattttgagaacatgaagcgcaaacagaatgatgtctttggagaagccgatcagtgattgctgactcccctcctccagcccctg

SEQ ID NO: 8166 - DNA, 600 bp, Rattus norvegicus
atgtatgcacaaagctgtgcccacatgatactctttagagtctcgactggccgtgtggcagaacagacctgtgtttctaaacggtggatgaagatgaatggctcctggcaagtggcctccactggaagccagacctagaccatttcatgactaacccaagacatggcttgagaagctcctttgtgttatttttccccatgtaaagaactgtcttctagcagtaaggcagtgaaaggcggtggataaaagcatcataattaggaagtcgaaagggagatgcttaaataatgaactttgaaaagcttctgtttatttcgttagaataaaatttctgcaatcagacttgagggctctcctttttaccttgggggtgggggacagaagttgtgtgatagaagtgactgttaatataatataaaattactcagctgggtttttaagttaatattttacattaaaatatagtttgaacttcttctgataaaaaattagcagtagatagctcgaccacagctactcaagatagaatttggcaagaaaacatccttaggaagtttacagtgtgttacagaagtgatatgtcttacttggaacgagaac

SEQ ID NO: 8167 - DNA, 562 bp, Rattus norvegicus; identical to SEQ ID NO: 4071

SEQ ID NO: 8168 - DNA, 600 bp, Rattus norvegicus
ttatacaagaagactttgtgctgactgctgctcactgtttggggagcaaaataactgtcacgttgggggcccacaacatcaaagaacaggagaagatgcagcaagtcatccctgtggtgaaaatcattccccacccagcctataattctaagaaatactccaacgacatcatgctattaaagctgaagagtaaggccaagaggactagagctgtgaagacgctcagtctgcccagaagcaacttcaaagtgaagccaggagatgtgtgcaatgtggctggttggggaaagctgggcccaatgggcaaattcccagacaaactgcaagaggttgagctaacagtacaggaggatcaggagtgtgagacttactttaaaaaagcttacaacaaagccaatcagatatgtgcgggggacccaaagatcaaacgtgcttcctttgggggggactctggagggcctcttgtgtgtaaaaaagtggccgcgggcatcgtcgcctatggatctaaaaatggttcagctccagaggccttcaccaaagtctcaactttcctatcctggataaaggaaactatgaaaaagagctaactacaagaagcaa

SEQ ID NO: 8169 - DNA, 600 bp, Rattus norvegicus
caatgccgaggtctaccctgaccaacagactctgcccattccgggcactccacctcccaactatgactccctgaggctgcagccgctggacaccatggagtctgacagcgaggtggaggccatctagatccgcatccccacccgggaactagtgaactcaaaactgaggagtcacaaccattgtcagtgcctcatttcattagcccttgtccaaagagccagggcacagagcccatgtccctctggtcagccccaggctgaggggttcatagggtcaagatgctggtaccagaatattgaacttgtatccttttctagctcttgcccaccctagcccagtctttgctctctgttgacctagcagacaggctccagagacccatagagtccctctcctggtgataggccacttctctgtcttgttacaacctcagtctcccagaatcagtgaccttgccctagttggcattggctgaaccctgttaatagacttgggggtgtgcagaccatagggagggagcatcaggtaagaaggcttgacaggggagcacatgctttgttagaaaataaagagagaaaacaccgaaaaaaaaaaaaaaa

SEQ ID NO: 8170 - DNA, 1267 bp, Rattus norvegicus; identical to SEQ ID NO: 4074

SEQ ID NO: 8171 - DNA, 600 bp, Rattus norvegicus
agttactattgtgcaagatcggacagtagctcctcttggtttgcttactggggccaaggcactctggtcactgtctcttcagagagtcagtcctccccaactgtcttccccctcgtctcctgcgagagccccctgtctgatgagaatttggtggccatgggctgcctggcccgggacttcctgcccagctccatttccttctcctggaactaccagaacaacactgaagtcatgcagggtgtcagaaccttcccaacactgaggacaggggacaaatacacagctacctcgcaggtgttactgtccgccaaaaatgtccttgaaggttcagatgaatacttggtatgcaaaatccaccatggcaacaaaaacaaagatctgcatgtgccgattccagctgtcgttgagatgaaccccaatgtgagtgtgttcattccaccacgtgatgccttctctggccctgcaccccgcaagtccagactcatctgcgaggccaccaacttcagtcccaaacagatcacagtatcctggctacaggatgggaagcctgtgaaatctggcttcaccacagagccagtgactgtcgaggccaaaggatcc

SEQ ID NO: 8172 - DNA, 1400 bp, Rattus norvegicus
acaagtggtggccactgaagtaggtgggtcctctctgagttctacagcatatttccacctggtcctcatggatgtgaatgacaacccccctcgcctagctaaggactacacaggcttgttcttctgccatcccctaagtgcccctgggagcctcatctttgaagccactgatgatgaccagcagtcagttcggaggcccaagtttacgtttgcccttggcagagaaagcttacaaagtgactgggaagtgtccaaaatcaatggcacacatgctagactctccaccaagcacacacgctttgaggaacaagtttatgacatcccaatcctcatcaatgatggggggcagccacccatggaaggcattgtctccttatcagttactttctgccagtgtgtggacggaagttgtttccggccagcaggcaaccaggttgggatacccaccgtgggcatggcagttggtatacttctgaccacatttctggtcattggtataattttagcggttgtattcatccgtatgaggaaagataaagttgaagatccacagtcccctgagaataagcctctgaggagctgaatttgaacagaaatgttcaaggttgtacaccaagcactgtatcaatgcctcagctgtttaatttcatccaaaatgtgaactataattggtagagtttatgcatcatgtgctatatctggtccccagctgtttaatctcataatttcatccaaaatgtgaactataatttctttgatggcatgccttcttgtcctgcaacacttaacgctacttagatattttatctctgtagacattagagttactctccattcccccataacattttgctcctttacaaaagcctacataacatgaactttcccttctggaaagaagatgaactaggtataaaccctgtgtgctgttgtttcagagacaagtctgttttctcccaactgacttttctaggctccacttatccctttctgtttccacctgcgccccctgatctcagcattacattaaatttaaaatgtgtcacacaaaagaacaaagtgaagtccttggggggggtgttgctaagtggacagccttattctttagcacaaacaacagcttctctgtgttgtcatctttaatagaggtcctccagcttggctatggtgtagaccctggggaggtatcaaatacaactgccgtgtttcaagaaagacctacttcatgaggcacaggaactgacgagctgtctgggtttactcactactccgtgcttacatacatgctgtacatgttttatttgtatattgaagttttgttatatatttatcatgtggaggaaagacgaaagcatgtacgtggtgaagaaatccaaaataaatgttggtttcaggaattc

SEQ ID NO: 8173 - DNA, 600 bp, Rattus norvegicus
gaaaatgacagcgagacccaaagccgggcccgaaaccaagggggcctgccgggtggggcagcaccagggcctgtccaccagaacgggggctgccggcctgtaaccagcgtagctggggaagacagtgatggctgctgtgtgcaacttccgcgttcccgactggagatgacaacgctaaccacacccactcctgggccagtccctggccctcggcccaaccaggccaagctgctggctaagaagcgggtggtgcgaatgctgctagtgattgttttgcttttcttcctgtgttggctgccagtgtacagcgtcaacacgtggcgcgccttcgatggcccaggcgcacaacgagcactctcaggggcccctatctctttcatccacttgctgagctacgtctctgcttgtgtcaaccccctggtctactgtttcatgcaccgccgcttccgccaggcctgcctggacacatgtgcccgctgttgcccacgccctccacgagctcgcccacagcctcttccagatgaggatcctcctaccccctccatcgcttcgctgtccaggctaagctataccaccatcagcacactggggcctggctga

SEQ ID NO: 8174 - DNA, 347 bp, Rattus norvegicus; identical to SEQ ID NO: 4078

SEQ ID NO: 8175 - DNA, 1400 bp, Rattus norvegicus
tctctaccggaagcgctgtcggagacggatgggcaaaaagagtcaggcccaagcccaagtccatcttcaggaagtgaaggagctgggccggagttacatagataaggttcagcctgaaatagaggaactggacccctcaccatccatgccaggacagcaggtattggacaagcaccagttaggccgactgcagtattcactggattatgacttccagactggccagctcctggtaggcatcttgcaagctgagggactggcagcgttggacctaggaggttcctcagacccctatgttagtgtctatctgctgccagacaagcggaggcgacatgagaccaaggtgcatcggcagaccctgaatccacactttggagagacctttgccttcaaggtcccatacgtggaactaggaggtagagtgctggtcatggcggtgtatgacttcgatcgcttctcccgcaacgatgccatcggagaggtgcgggtgcctatgagttcagtgaacctggggcggccagtgcaggcctggcgagagctgcaggtggctcccaaagaggagcaggagaaactgggggatatctgcttctctctccggtatgtccccacggccgggaagctcaccgtcattgtcctggaagctaaaaacctgaagaaaatggatgtaggaggactctcagacccttatgtcaaggtgcacctgctccagggaggtaaaaaggttcggaagaagaaaaccaccattaagaagaacaccctgaacccctattacaacgaggccttcagctttgaggtgccctgtgaccaggtgcagaaagtccaggtggagctgaccgttttggactatgacaaactggggaagaatgaggccatcgggagagtggcggtgggcacagcagttggtggggctggcctacggcactgggctgacatgttggccaaccctaggcggcccattgcccagtggcactctctgcggccccctgacagagccaggccaatacctgcaccctgattcccgtcaagcaagcacctgaccccagatcctttgctccctgtcccttacctctctccccacatgactctccctactccccaaacattgcattcattcctacctccacattggaaatgtttccgacttccagtaccactcctatacccagaaaccacagtggtcctgcggggaggtggaaaagttgggaaagtctggcatcccctgccccagagtcctaccctctgctttgacaatcagctgtgaagcctctgatctcctttctcccagtctctgagctcttcccacacagcttgacccctgtgctgctcctggggccaaataaatactcaacagcttggaaaaaaaaaaaaaaaaaaaaaaaaaaaaaaaaaaaaaaaaaaaa

SEQ ID NO: 8176 - DNA, 1400 bp, Rattus norvegicus
tgtgtctatttctgtaattcccaaatgcataacagtgcagtcatttctcaataaatatattttaaataaatgaacgaattcttctgaaactcaattctgagtctgtttaaccgaattcattcaaatcgtgtgctactgtaatacccaacccgctaactttaaaagttagtttatgtctccaattgatatttagaatcaagtttaaaaatttgttctattagtattgattgatgaatgcttagtaactgcctttaactatcatttgatgttagccactgcaagtaagctttcaaatccatttgaaggaagtttgctaaagcatgagtgtccttacctgctaaatattacatctcgatgtaggttcgacctttcctgtgggaggagggaagggaggagggaaggcagacagacaggcagtatctaaactgggcaatgcctgtctttgtaattaatgagagtaacttcttccaaccagcttaattttttttttagactgcgatgatgtccttcaaacacatccttcaggtgcccaaaatggcattttcagtatcaagctacctggatccagtaagatattttctgtttattgcgatcaagagaccagtttgggaggatggcttttgatccagcaaagaatggatggatcactgaattttaaccggacctggcaagactacaagagaggtttcggcagcctgaatgacaagggggaaggagagttctggctaggcaatgactacctccacttactcactctgagaggctctgtcctcagggttgaattagaggactgggctggaaaagaggcttatgcggagtaccacttccgggtaggctctgaggcagagggctatgcactgcaggtctcctcctaccagggtaccgctggagatgctctgatggagggctctgtggaggaggggacagaatacacttcacacagcaacatgcagttcagtacctttgacagagatgcagaccaatgggaagagaactgtgccgaggtctacgggggaggctggtggtacaatagctgtcaagccgccaatctcaatggcatttactaccctgggggcacctatgaccccaggaacaacagtccctatgagatagagaacggagtgctctgggttcccttcagaggagcggattattctctgtgggccgttcggatgaaaatcagaccgctggtgggacagtagctgaaggaatggaaagtgggggctctgctttctttgcttggttagccgagaagaatgatcagaagaggaaggtgtcacggatcttgtgaactttttagaaattccctggtgctattccattgttctttgtactgtagctgaacacagctgagatgcgttactgctttgaaaaaaaataaagttttacattttttcccc

SEQ ID NO: 8177 - DNA, 1400 bp, Rattus norvegicus
tcaccttccgaatccggcacaatgagcagaacttgtctttggcagatgtgacccagcaagctgggctggtgaagtctgaactggaagcgcagacagggctccagattttgcagacaggggtgggacagagggaggaatccgccgcagtccttccccgacaagcccatggcatatctcccatgcgctcattgctgcttactctggtggccctggcaggtgtcgctgggctactagtagctttggcggtggccctgtgtatgcgccatcattcgaaacaacgggataaggagcgcctggccgcgctggggccggagggggcccacggtgacactacttttgaataccaggacctgtgtcgccagcacatggccacaaagtcgctgtttaaccgggcagagggtcagccagagccttctcgggtgagcagtgtgtcctcccagttcagtgacgcggcccaggccagccccagttcccacagcagcacaccgtcctggtgcgaggagcctgcccaggccaacatggacatctccacaggacacatgattctggcatacatggaggatcacctccggaaccgggaccggttggccaagaagtggcaggccctgtgcgcctaccaagcggagccaaacacctgtgccaccgcacaaggtgaaggcaacatcaagaagaaccgccatcctgacttcttaccctatgaccatgcccgaatcaagctgaaagtggagagcagcccctctcggagtgattacatcaacgccagtcccatcatcgagcatgaccctcggatgccggcctacatagccacacagggacccctgtcccacaccatcgcagacttctggcagatggtgtgggagagtggctgcactgtcatcgttatgctgacccctttggtggaggatggtgtcaaacagtgtgaccgctactggccggatgaagggtcctccctctaccacgtctatgaggtgaacctggtgtctgagcacatctggtgcgaggacttcctggtgcggagcttctacctgaagaacgtgcagacccaggagacgcgcacgctcactcagttccacttcctcagctggccggcagagggcactccggcctccacccggccgctgctggacttccgcaggaaagtgaacaagtgctacagaggccgctcctgtcccatcatagtgcactgcagtgatggtgcagggaggacaggcacctacatccttattgacatggtactgaatcgcatggcgaaaggagtgaaggagattgatatcgctgccaccctggagcatgtccgtgaccagcgacctggccttgtccgttctaaggaccagtttgagtttgcgctgacagccgtggcggaggaggtgaatgccatcctcaaggccctgccccagtga

SEQ ID NO: 8178 - DNA, 600 bp, Rattus norvegicus
caaatgctaatgattcacaccacgcgtgtgccacaccctagttgtacgtactcctattccattttacagataaataaaggggcggtgggggcagagggaggaaacaacggctcccttggcactgttatctagtaagtggcagcactgggagccatcctatctgtctgcatctggagctcaaatcgtgatgcctccttcggtggaggaaggctagcttgggatatggaggctactgtgactccggaagacagagaaaagtccaatctcaacaacgtcaccactatccccaatctcagctgactggcatcctctctcctgccagtctgtggacgggaacgcgggcctcacgtgccatctagggtcaaaactcgtctgaggacacacactgggcccaacgcagaggctgatctgttcagcctgtcggctgcaagccaggactctcagcttgtgcagcacccccggaaggaaggtgagccttcctaagcctctactgacagcaaagctgcagaggccctgccgcgtgagacccagaagcttccaagccacttgtgagcccactcagggtttggaggcggacggggtgggggtggggtggggaaa

SEQ ID NO: 8179 - DNA, 600 bp, Rattus norvegicus
tgaggcagagccaggagttctgtggcagcctgaagcaagcctccccggccatccaggcctgtgtggatgcctgtaacctcatggcgcgtgcccgacaccagcaaagtcactttgacagtgtaagctaggacacgggtgggtcaagtacgccaagtgtatgtgtggggaccagatgggatgggggttttcagtttaggttcagtgatagaaaaagcagaggtcttgagaaaaagcagaggtgggaagtgggaggaggaagggtcaacaggtcacagaccataaaagaacacaggttggtacctagacagaggtaagaaggctgaatggagaatggaggccagctggagatttaacaatgaaagagggagccaggctggctgctgcccctggtcacacccctaccacacaatgtgttgttgccctcaggggaatgaggagtggttgctggtgggccgagtgctggaccgagtctgtttcctagccatgctctccctcttcatctgcggcactgctggcatcttcctcatggcccactacaaccaggtgcctgacctgccattccctggagacccccgcccctacttgcctttgccagactga

SEQ ID NO: 8180 - DNA, 600 bp, Rattus norvegicus
ggctgtaaaactcgatttaacccaatagctgtaagtacacggtgtttcctaacaagatagcaactggaatgaatggtgccgttttcttgtgatgtctctccactaatgcatagctcttctgactctacgtgcaaagtggcaaagatgttgacatcttctgtggaagctgttttaaatgagctttcgacatttggtcacactgagatgttagactatttacctactgaaatttatacatacatttctttttttatctccctttctcctccccctccccattcctaatctttcatttcgaacagaagtcaagcagcaaatgcacggcagcaactggccttgttccgaccggtttctacaaggatatacccatcaactgtgctcctgaagaaggaatcctcttattggcatcagaagctaaaagataaggttaacagtttggaaagagcgaggaccttttctcaaatcaatctccagttcacagacaggaggaggcccatgacctaggagtagcgatcaactcaaggtccagttctcattatgttattcatggacacccggggcactgctctataatgcgcaaatggatactgacacggatcc

SEQ ID NO: 8181 - DNA, 1400 bp, Rattus norvegicus
atgttgattccctcaacaacccgaaggatccttttgtggagaaagccaagaagctcttaagaattgatttttttgatccgttgttcttgtcagtagtactctttccattcctcacgccagtatatgagatgttaaacatctgcatgttcccaaaagattcaatagaatttttcaaaaaatttgtgtacagaatgaaggaaacccgcctggattctgtgcagaagcatcgagtggattttcttcagctgatgatgaatgctcataatgattctaaagacaaagaatctcatacagccctatccgatatggagatcacagcccagtcaatcatttttatttttgctggatatgaacccaccagcagcacactttcctttgtcctgcattccctggccactcacccagatacacagaagaaactgcaggaggagatcgacagggctctgcccaataaggcacctcccacctatgatactgtgatggaaatggaatacctggatatggtgttgaatgaaaccctcagattgtatccaattggtaatagacttgagagagtctgtaaaaaagatgttgaaatcaatggtgtgtttatgcccaaagggtcagtggtcatgattccatcttatgctcttcaccgtgatccacagcactggccagagcctgaggaatttcgcccagaaaggttcagcaaggagaacaagggcagcattgatccttatgtatatctgccctttggaaatggacccaggaactgcattggcatgaggtttgctctcatgaatatgaaactcgctctcactaaagttctgcaaaacttctccttccagccttgtaaggaaacacagatacctctgaaattaagcagacaaggacttcttcaaccaacaaaacccattattctaaaggttgtgccacgggatgaaatcataactggatcatgattttccctcaaggagttctgctgaattcttcagaaatgtggtgtctaagaacaccagaccctttaatttatgtcatgaataaaattcagatgaaattagggcttaatcgactttgttttgattcggtacatctttgatctttctcagtgtctacaatgtacccatctaatataaaggaaatgacaagtcagtgacagaacaggaacttaacctttggtgattctcatgggactacctccatccacatctggttgtctctgttaatttcttttgatagtaaccttgtctctgtaatttgatcaagaatttttcatgaaaatgtgaactattgtgacaactttaattgtagatttggtatcagatgttttagatgcattattctacactaaatgttacatggaaaaaatgtgaataaacacttctttaaaaatccccattttaaaaaaaaaaaaaaaaaaa

SEQ ID NO: 8182 - DNA, 600 bp, Rattus norvegicus
tgtttgtgtttgctttttgagacaaggtttctctgtagcctggctgtcctggaactgaaactgtagaccaggccagcctcaaactgtgcctgcttctgcctcttagttgctgaatcaaggtatgcaccaccagcacccggctatgacacttgcttttttttttttttttaagatttattttatttatatgagtacactgtagctgtcttcagacacaccagaagagggcatcagaacccattacagatggttgtgagccaccatgtgttgctgggaattgaactcaggacctgtggaagagcagtcagcgctcctaaccactgagccatctctccagcccatgacacttgcttttaactggttcactttccctggactatgaccgtattgggttgtcaggtctttgctattttcctgagctacccaacttaaacaagtatcccttccactccagcatgatctttccatctgttttaatcttctttattgactgatcaccaccaaacgtattctggatttattatttattcaagcccttcactaatctacttcagtgaatttgttctctgttcgtcttctacctagaacagtgcctaatag

SEQ ID NO: 8183 - DNA, 600 bp, Rattus norvegicus
cccgaaggaacttgacattaataatagccaatgtttactatctactgtgtatcagacctatgtgtgactctgctaaccattttaacatcagaggaccctgacttaccctggcaagagagacgaggaaagactacgtgaaaaatcaatgtatgagctggggctaggctcgatcagtaggctgtttctggttgcctagcttgcacacagtcctgggctctatcctgagcaccgtatcataaaccatgcacggtggtactcatctgcagtgccagttcttggaggaaaagacaggtggatgaggagtttgtggccatcctcagctacatagggagctttgaagccagtccttgtcctatattgagggtcctatccttaataaacctaaaaaagacctgggacctgggtgttattgacatgtacctgtagtcctaataccttgagaggctgcagacagagagtgcctggaggtccagggcagcttgggttacatacttttaaactgacctgtctggggcaagggcaaatgggtcatatgggaaaacaaaagaagcgactagccctggaacagtgaggatgtgatcagggaaaggcagtgaattc

SEQ ID NO: 8184 - DNA, 1400 bp, Rattus norvegicus
ccatcacatctcgggtgactgaggacacctccaacgtgtgcgagtccattagtgacaagctgaacctgttcctgtggtacctggggcgaggcctgtgtctcctggcgttcatgatttgggggtcattctacctcactgtggtcaccctgctcagcctgcctctgcttttccttctgcccaggaggctggggaaagtgtaccagtcactggcagtgaaggtgcaggagtctctagcaaagtccacgcaggtggccctcgaggccctgtcggcgatgcctaccgtacggagctttgccaacgaggagggagaggcccagaagtttaggcagaagttggaagaaatgaagccgctaaacaagaaagaggccctggcttacgtcaccgaagtctggaccatgagtgtctcgggaatgctgctgaaggtgggaattctgtacctcggtgggcagctggtggtcagaggggctgtcagcagcggcaacctcgtctcctttgttctctaccagcttcagttcaccagggccgtggaggtcctgctctccatctatccctccatgcagaagtccgtgggcgcctcggagaaaatattcgaatacctggaccggactccctgctctccgctcagtggctcactggcacctttaaacatgaaaggcctcgtcaagttccaagatgtctcctttgcctacccaaaccatcccaacgtccaggtgcttcaggggctgacttttacgctgtatcccgggaaggtgactgccttggtgggacccaatgggtcagggaagagcaccgtggccgccctgctgcagaacctgtaccagcccaccgggggcaaggtgctcctggatggcgagctcctggtccagtatgatcaccactacctgcacacgcaggtggccgcagtgggacaagagccactgctatttggaagaagttttcgggaaaatattgcctatggcctgacgcggactccaaccatggaggaaatcacagctgtggccatggagtccggagcccacgatttcatctctggattccctcagggctatgacacagaggtaggtgaaactgggaaccagctgtcaggaggtcagcgacaggcggtggccttggctcgagccttgatccggaagccacgcctgcttatcttggacgatgccaccagtgccctggatgctggcaaccagctacgggtccagcggctcctgtatgagagccccgagtgggcctctcggacggttcttctgatcacccagcagctcagcctggcagagcgggcccaccacatcctcttcctcaaagaaggctctgtctgcgagcagggcacccacctgcagctcatggagagaggagggtgttaccggtccatggtggaggctcttgcggctccttcagactga

SEQ ID NO: 8185 - DNA, 600 bp, Rattus norvegicus
cggggctctccagggtcctgaccgccaagtggccggctcccgggagtcgcgcgtcgaccgtcccgggcgccccctccaggaggtacctcgaacccagtgcggaaggatggaggcgggggctcagggccggcgccggggaggtttggaggggatgctagggcgggtttctcagatcgagctgtgagattcctcctattttgggcactgggggtctttgaggagaaaacacatttcttccagctgggaaaggaatgccgagggtggccgagaggaaggggcacctagaggagcgctcctgctcagcgcatcactctgcccccgccccgctgacccagttccttggaccttgaggaggggagtaagggacacgctcccttgttcagccctgcgcatttcctcagtcccttcccacacacttgttccgtgcttctcagcctggggcagaagaggctgatccagaaaggagggagcaccaacttacaggaacatgcatgacacacactactgaggacagacacaggtcccctcacattcctggggaacgttcctctctgtgacaggtgcatgcccgctcaacacgcatatagaattcacatgcag

SEQ ID NO: 8186 - DNA, 600 bp, Rattus norvegicus
  misc_feature (529)..(529): n is a, c, g, or t
  misc_feature (578)..(578): n is a, c, g, or t
  misc_feature (582)..(582): n is a, c, g, or t
catgtgctgtcaccctcggtacctttcttctggccatgttttgcataacgaagggagggatttacgtcctcactctgctggacaccttcgcggcaggcacgtccattctctttgccgtgctcatggaggccattggagtttcctggttttatggcgtggacaggttcagcaatgacatccagcagatgatggggtttaagccaggcctgtactggagactgtgttggaagttcgtgagccccgccttcctcctgtttgtggtagtggtcagcatcatcaacttcaagccactcacctatgatgactacgtctatcctccttgggccaactgggtcgggtggggcattgccctctcatccatgatcctggtacctgcctacgtcatctacaaattcttcagcatacggggctccctttgggagagagtggcctacggaatcaccccggagaatgagcaccacctggtggcccagagagacgtgagacagttccagttgcggcactggctggctatttgaacctggccctnaggaggaggaacccacgtgccaatgtccaggacaaggacctcttttcgncccngtgggacactgccttggg

SEQ ID NO: 8187 - DNA, 600 bp, Rattus norvegicus
tttatagtccaaagaaaccaaagactaaaaagctcacctgcattctgactttgttcagagacacatacttcagcggggcaagactcggcaagaaagatgatggagaaaacgtcggatctcgcgccttcaacccctgcacctcactgtgctcggctgctcagtggctctaagcacagtaatgtttgagccatcgagtggacatcttttaagatcagacgttcttatctgttccaccacactgcaagggtgtgtagtgtctcaatatcacgtgtgagtatgtgtgtgcatgcgtgcacacgtaaacacacagcaacaccagtgtttagggactcaggcacggctggtcttcaggaagggttgcaccatatgacatgaccaagctggtgtgggatttctaagttcattggatctgagatgtgagttttctcatctaagcctagcgtttgaacctgccaggcccacaacctaaatgcagattcaaacccagcaaagaaaatttgaatggcacctaaaccagtacgctctctttgtttgttaagaaatgttcagatatttttaaaaaaaaatgaaacaagagtccatccattaaaaaaaaaaaaa

SEQ ID NO: 8188 - DNA, 600 bp, Rattus norvegicus
ccggcctctgccctgtgctgaggattaaaggtgtcaccaccacatctggccatttttttttcttttctaaacacccttccaccaccactgctgccaatatgctggaattcaaaattacaagtttcttcagagaacaaaaatatttttaattacatatttatcttgttgcccaagtttttaaccaaccaaccaagcacaacatccaactcaatggagacaattaggtgccacctaatctcaattccattagactgaaggttaatcccggggtcatctttgggtcctctggatggggcaggccaaataaaatgagtcactaccaatatttcaatgttgggttgcccactggttatagttaattattacttatctctagactttcactcaggactcagaatcaggttctgctagccttgttccttcaaaagttggtgattttttttctacgaacccgatcaggcaaccaatcagcagaagtggcttcatttgcatataaaaatgaaactttgtgtatgcacatggatgtgtaagagagagaaatgtttcaattcatctaaataaacgagtaagaaatgtaaaaaaaaaaaaaaaaaaaaaaaa

SEQ ID NO: 8189 - DNA, 600 bp, Rattus norvegicus
  misc_feature (241)..(279): n is a, c, g, or t
ggactgtggttgtgagtgggggtgggggtgatgagctgaaggttgactgtaaggagttggaacctctcagcttcagtagctaggcaggggacttgtactgagaagggacagacacccttcatggtagaggtgagtggaatgaaaatctaggtttcccccagagcttggcaaagtgtgtgtgtgtgtgtgtgatgtctcccagggtagtcccccaattggggactagcagagctgaggaggnnnnnnnnnnnnnnnnnnnnnnnnnnnnnnnnnnnnnnnacggcggtttgcccttcccaggtgggagggtggggaccagccttggcctgagcctcctgtgaactcgttgcttgagggctcggagtaaacccagtggaaactagaattccacttttcagctcttctgtctacggccaatgggggcctctgagctgacaatctcaggtagtttttgtagtttcctgggctgtgctctaggatgtctgatgttgggggaactggcttagggggagctccttcaggcctctctacattccttcagggatcatgggctgtgtctgcagctcaaaccccgaagatgactggatggagaacattgac

SEQ ID NO: 8190 - DNA, 600 bp, Rattus norvegicus
ggagccctggacatcaagagtctggcaggcgtgttctgcatcctggccgcggggattgtactctcctgcctcatagccgtcctcgagacatggtggagtcggcggaagggctcccgagtcccatcgaaagaggatgacaaggaaattgacctggagcacctccatagacgtgtaaatagcttgtgcacagatgacgacagcccccataaacagttttccacctcgtcaattgacttgacccctctggacattgacactttgccaacacgacaagccctggagcagatcagtgatttcagaaacactcacatcaccaccaccaccttcatcccagagcagatccagactcttagccgcacactctcagcaaaagctgcctctggcttcactttcggcagtgtgcccgagcaccgaactggcccttttaggcacagggcccctaatgggggctttttcaggagtcctatcaaaacaatgtcatctattccttatcagcctactcccactctggggctcaatctgggcaatgaccccgaccgaggcacgtccatatgagcagcagacagctcggcctatatcctaggactgccccaaaggagc

SEQ ID NO: 8191 - DNA, 1400 bp, Rattus norvegicus
cggcgtggccagtaggcggcaaccgcgaggcggcaagccacccagcggggacggcctggagtcgggcccctctccacgcccccttctccacgcgcgcggggaggcagggctccaccgccagtctggaagggttccacatacaggaacggcctacttcgcagatgagcccaccgaggctcaggctccgggcggattctgcgtgtcaccctcgctccttggggtccgctggccggcctgtgccacccggacgcccggttcactgcctctgtctcccccatcagcgcagccccggacgctatggcccacccctccagctggcccctcgagtaggatggtagcacgtaaccaggtggaagccgacaatgcgatctccccggcatcagagccccgacggcggccagagccatcctcgtcctcgtcttcgtcctcgccggcggccccggcgcgtccccggccctgcccggtggtcccggccccggctccgggcgacactcacttccgcaccttccgctcccactctgattaccggcgcatcacgcggaccagcgctctcctggacgcctgcggcttctactggggacccctgagcgtgcatggggcgcacgaacggctgcgttccgaacccgtgggcaccttcttggtgcgcgacagtcgccagcggaactgcttcttcgcgctcagcgtgaagatggcttcgggccccacgagcattcgtgtgcacttccaggccggccgcttccacctggacggcaaccgcgagaccttcgactgcctcttcgagctgctggagcactacgtggcggcgccgcgccgcatgttgggggccccactgcgccagcgccgcgtgcggccgctgcaggagctgtgtcgccagcgcatcgtggccgccgtgggtcgcgagaacctggcacgcatccctcttaacccggtactccgtgactacctgagttccttccccttccagatctgaccggctgccgccgtgcccgcagaattaagtgggagcgccttattatttcttattattaattattattatttttctggaaccacgtgggagccctccccgcctaggtcggagggagtgggtgtggagggtgagatccctcccacttctggctggagaccttatcccgcctctcggggggcctcccctcctggtgctccctcccggtccccctggttgtagcagcttgtgtctggggccaggacctgaactccacgcctacctctccatgtttacatgttcccagtatctttgcacaaaccaggggtgggggagggtctctggcttcatttttctgctgtgcagaatattctattttatatttttacatccagtttagataataaactttattatgaaagtttttttttttaaagaaacaaagatttctaga

SEQ ID NO: 8192 - DNA, 600 bp, Rattus norvegicus
atagcccaggccaccatagccgggttcatcgtgtttgccatgattaaaatcggccagctgtttcgaacattgatcagagaggagctcttgtttgaggcaatgggaaaatcgtctaactaatcaaactgtgaccagagcattgtggacggggccccaagaagaatccagtcaggatgctgtgtgccattcctccatttcccctctcccagttcttcctctcagtgtcccttctcccctctccccagaaggaccttttgtaaaatcgctactgctttctagcctggcctggttttcctcctctgttgttaggttcgggagctggggggtgggggtggggtgacaggacttagcttgtgtttggctcatcccgtcccattgtgcagcgttgggtgcctggtggagagaggagctctttcttggtttctgagtctgaggccacatcctgccaggtgggcaagacctctcctgcaccgagcaaggattgagtaacatttgtggaaggaacaccggcctaaagcgaaccctagatcccagagatgaaggctcttcccaggaacaagctggagtgttcttgtccctttctacctgaaaggagaattc

SEQ ID NO: 8193 - DNA, 25 bp, Artificial
  Probe
gtacagaatcattgcttatgccatg

SEQ ID NO: 8194 - DNA, 25 bp, Artificial
  Probe
acacattaggcattgaggatttgaa

SEQ ID NO: 8195 - DNA, 25 bp, Artificial
  Probe
cacacattaggcattgaggatttga

SEQ ID NO: 8196 - DNA, 25 bp, Artificial
  Probe
tacagaatcattgcttatgccatga

SEQ ID NO: 8197 - DNA, 25 bp, Artificial
  Probe
attgtacagaatcattgcttatgcc

SEQ ID NO: 8198 - DNA, 25 bp, Artificial
  Probe
gcacacattaggcattgaggatttg

SEQ ID NO: 8199 - DNA, 25 bp, Artificial
  Probe
tgtacagaatcattgcttatgccat

SEQ ID NO: 8200 - DNA, 25 bp, Artificial
  Probe
ttgtacagaatcattgcttatgcca

SEQ ID NO: 8201 - DNA, 25 bp, Artificial
  Probe
gattgtacagaatcattgcttatgc

SEQ ID NO: 8202 - DNA, 25 bp, Artificial
  Probe
tcattgcttatgccatgatagcttt

SEQ ID NO: 8203 - DNA, 25 bp, Artificial
  Probe
cagaatcattgcttatgccatgata

SEQ ID NO: 8204 - DNA, 25 bp, Artificial
  Probe
gaatcattgcttatgccatgatagc

SEQ ID NO: 8205 - DNA, 25 bp, Artificial
  Probe
agaatcattgcttatgccatgatag

SEQ ID NO: 8206 - DNA, 25 bp, Artificial
  Probe
acagaatcattgcttatgccatgat

SEQ ID NO: 8207 - DNA, 25 bp, Artificial
  Probe
atcattgcttatgccatgatagctt

SEQ ID NO: 8208 - DNA, 25 bp, Artificial
  Probe
aatcattgcttatgccatgatagct

SEQ ID NO: 8209 - DNA, 25 bp, Artificial
  Probe
tgcacacattaggcattgaggattt

SEQ ID NO: 8210 - DNA, 25 bp, Artificial
  Probe
tgattgtacagaatcattgcttatg

SEQ ID NO: 8211 - DNA, 25 bp, Artificial
  Probe
ctatgcacagaagatgaagtacaag

SEQ ID NO: 8212 - DNA, 25 bp, Artificial
  Probe
tatgcacagaagatgaagtacaagg

SEQ ID NO: 8213 - DNA, 25 bp, Artificial
  Probe
atgaagtctatgcacagaagatgaa

SEQ ID NO: 8214 - DNA, 25 bp, Artificial
  Probe
agtctatgcacagaagatgaagtac

SEQ ID NO: 8215 - DNA, 25 bp, Artificial
  Probe
tctatgcacagaagatgaagtacaa

SEQ ID NO: 8216 - DNA, 25 bp, Artificial
  Probe
gtctatgcacagaagatgaagtaca

SEQ ID NO: 8217 - DNA, 25 bp, Artificial
  Probe
gatgaagtctatgcacagaagatga

SEQ ID NO: 8218 - DNA, 25 bp, Artificial
  Probe
agatgaagtctatgcacagaagatg

SEQ ID NO: 8219 - DNA, 25 bp, Artificial
  Probe
cagatgaagtctatgcacagaagat

SEQ ID NO: 8220 - DNA, 25 bp, Artificial
  Probe
aagtctatgcacagaagatgaagta

SEQ ID NO: 8221 - DNA, 25 bp, Artificial
  Probe
gaagtctatgcacagaagatgaagt

SEQ ID NO: 8222 - DNA, 25 bp, Artificial
  Probe
tgaagtctatgcacagaagatgaag

SEQ ID NO: 8223 - DNA, 25 bp, Artificial
  Probe
ccagatgaagtctatgcacagaaga

SEQ ID NO: 8224 - DNA, 25 bp, Artificial
  Probe
cactggctttctcctgtcatctatc

SEQ ID NO: 8225 - DNA, 25 bp, Artificial
  Probe
atgcacagaagatgaagtacaaggc

SEQ ID NO: 8226 - DNA, 25 bp, Artificial
  Probe
actggctttctcctgtcatctatcc

SEQ ID NO: 8227 - DNA, 25 bp, Artificial
  Probe
tttctcctgtcatctatccaccgtc

SEQ ID NO: 8228 - DNA, 25 bp, Artificial
  Probe
ctttctcctgtcatctatccaccgt

SEQ ID NO: 8229 - DNA, 25 bp, Artificial
  Probe
cacagaagatgaagtacaaggccat

SEQ ID NO: 8230 - DNA, 25 bp, Artificial
  Probe
catctatccaccgtccactgacttc

SEQ ID NO: 8231 - DNA, 25 bp, Artificial
  Probe
cccagatgaagtctatgcacagaag

SEQ ID NO: 8232 - DNA, 25 bp, Artificial
  Probe
tcatctatccaccgtccactgactt

SEQ ID NO: 8233 - DNA, 25 bp, Artificial
  Probe
gcactggctttctcctgtcatctat

SEQ ID NO: 8234 - DNA, 25 bp, Artificial
  Probe
ctggctttctcctgtcatctatcca

SEQ ID NO: 8235 - DNA, 25 bp, Artificial
  Probe
ggctttctcctgtcatctatccacc

SEQ ID NO: 8236 - DNA, 25 bp, Artificial
  Probe
tggctttctcctgtcatctatccac

SEQ ID NO: 8237 - DNA, 25 bp, Artificial
  Probe
agaagatgaagtacaaggccatcag

SEQ ID NO: 8238 - DNA, 25 bp, Artificial
  Probe
gctttctcctgtcatctatccaccg

SEQ ID NO: 8239 - DNA, 25 bp, Artificial
  Probe
cagaagatgaagtacaaggccatca

SEQ ID NO: 8240 - DNA, 25 bp, Artificial
  Probe
acagaagatgaagtacaaggccatc

SEQ ID NO: 8241 - DNA, 25 bp, Artificial
  Probe
gaagatgaagtacaaggccatcagc

SEQ ID NO: 8242 - DNA, 25 bp, Artificial
  Probe
gcacagaagatgaagtacaaggcca

SEQ ID NO: 8243 - DNA, 25 bp, Artificial
  Probe
tgcacagaagatgaagtacaaggcc

SEQ ID NO: 8244 - DNA, 25 bp, Artificial
  Probe
ccccagatgaagtctatgcacagaa

SEQ ID NO: 8245 - DNA, 25 bp, Artificial
  Probe
ctccccagatgaagtctatgcacag

SEQ ID NO: 8246 - DNA, 25 bp, Artificial
  Probe
tccccagatgaagtctatgcacaga

SEQ ID NO: 8247 - DNA, 25 bp, Artificial
  Probe
actccccagatgaagtctatgcaca

SEQ ID NO: 8248 - DNA, 25 bp, Artificial
  Probe
ttcggactccccagatgaagtctat

SEQ ID NO: 8249 - DNA, 25 bp, Artificial
  Probe
tcggactccccagatgaagtctatg

SEQ ID NO: 8250 - DNA, 25 bp, Artificial
  Probe
cttcggactccccagatgaagtcta

SEQ ID NO: 8251 - DNA, 25 bp, Artificial
  Probe
gactccccagatgaagtctatgcac

SEQ ID NO: 8252 - DNA, 25 bp, Artificial
  Probe
tctcggtatcagcagttcaaggatt

SEQ ID NO: 8253 - DNA, 25 bp, Artificial
  Probe
ctctcggtatcagcagttcaaggat

SEQ ID NO: 8254 - DNA, 25 bp, Artificial
  Probe
ctcggtatcagcagttcaaggattt

SEQ ID NO: 8255 - DNA, 25 bp, Artificial
  Probe
ctctctcggtatcagcagttcaagg

SEQ ID NO: 8256 - DNA, 25 bp, Artificial
  Probe
tctctcggtatcagcagttcaagga

SEQ ID NO: 8257 - DNA, 25 bp, Artificial
  Probe
cggtatcagcagttcaaggattttc

SEQ ID NO: 8258 - DNA, 25 bp, Artificial
  Probe
tcggtatcagcagttcaaggatttt

SEQ ID NO: 8259 - DNA, 25 bp, Artificial
  Probe
gctctctcggtatcagcagttcaag

SEQ ID NO: 8260 - DNA, 25 bp, Artificial
  Probe
cagactatacttggtttgaaggaat

SEQ ID NO: 8261 - DNA, 25 bp, Artificial
  Probe
gactatacttggtttgaaggaatac

SEQ ID NO: 8262 - DNA, 25 bp, Artificial
  Probe
agactatacttggtttgaaggaata

SEQ ID NO: 8263 - DNA, 25 bp, Artificial
  Probe
actatacttggtttgaaggaatacc

SEQ ID NO: 8264 - DNA, 25 bp, Artificial
  Probe
ctatacttggtttgaaggaatacct

SEQ ID NO: 8265 - DNA, 25 bp, Artificial
  Probe
atacttggtttgaaggaataccttt

SEQ ID NO: 8266 - DNA, 25 bp, Artificial
  Probe
tatggatcatggtttgagcacatcc

SEQ ID NO: 8267 - DNA, 25 bp, Artificial
  Probe
tatacttggtttgaaggaatacctt

SEQ ID NO: 8268 - DNA, 25 bp, Artificial
  Probe
acttggtttgaaggaataccttttc

SEQ ID NO: 8269 - DNA, 25 bp, Artificial
  Probe
tacttggtttgaaggaatacctttt

SEQ ID NO: 8270 - DNA, 25 bp, Artificial
  Probe
tgcttgattcagaccaagggagatc

SEQ ID NO: 8271 - DNA, 25 bp, Artificial
  Probe
ctgcttgattcagaccaagggagat

SEQ ID NO: 8272 - DNA, 25 bp, Artificial
  Probe
gattcagaccaagggagatcccaag

SEQ ID NO: 8273 - DNA, 25 bp, Artificial
  Probe
cttgattcagaccaagggagatccc

SEQ ID NO: 8274 - DNA, 25 bp, Artificial
  Probe
gcttgattcagaccaagggagatcc

SEQ ID NO: 8275 - DNA, 25 bp, Artificial
  Probe
attcagaccaagggagatcccaagt

SEQ ID NO: 8276 - DNA, 25 bp, Artificial
  Probe
tgattcagaccaagggagatcccaa

SEQ ID NO: 8277 - DNA, 25 bp, Artificial
  Probe
ttgattcagaccaagggagatccca

SEQ ID NO: 8278 - DNA, 25 bp, Artificial
  Probe
cccatcttcccatgcatcttttctc

SEQ ID NO: 8279 - DNA, 25 bp, Artificial
  Probe
ctcccatcttcccatgcatcttttc

SEQ ID NO: 8280 - DNA, 25 bp, Artificial
  Probe
tcccatcttcccatgcatcttttct

SEQ ID NO: 8281 - DNA, 25 bp, Artificial
  Probe
cctcccatcttcccatgcatctttt

SEQ ID NO: 8282 - DNA, 25 bp, Artificial
  Probe
gtcaagatgaagctgaatatctcct

SEQ ID NO: 8283 - DNA, 25 bp, Artificial
  Probe
tcaagatgaagctgaatatctcctt

SEQ ID NO: 8284 - DNA, 25 bp, Artificial
  Probe
aagatgaagctgaatatctccttcc

SEQ ID NO: 8285 - DNA, 25 bp, Artificial
  Probe
caagatgaagctgaatatctccttc

SEQ ID NO: 8286 - DNA, 25 bp, Artificial
  Probe
gatgaagctgaatatctccttccct

SEQ ID NO: 8287 - DNA, 25 bp, Artificial
  Probe
agatgaagctgaatatctccttccc

SEQ ID NO: 8288 - DNA, 25 bp, Artificial
  Probe
ctgaatatctccttccctgccactg

SEQ ID NO: 8289 - DNA, 25 bp, Artificial
  Probe
atgaagctgaatatctccttccctg

SEQ ID NO: 8290 - DNA, 25 bp, Artificial
  Probe
atctctaagtgagtaaagaatcaat

SEQ ID NO: 8291 - DNA, 25 bp, Artificial
  Probe
tctctaagtgagtaaagaatcaata

SEQ ID NO: 8292 - DNA, 25 bp, Artificial
  Probe
gtgagtaaagaatcaatattgtccc

SEQ ID NO: 8293 - DNA, 25 bp, Artificial
  Probe
tgaagctgaatatctccttccctgc

SEQ ID NO: 8294 - DNA, 25 bp, Artificial
  Probe
agtgagtaaagaatcaatattgtcc

SEQ ID NO: 8295 - DNA, 25 bp, Artificial
  Probe
gaagctgaatatctccttccctgcc

SEQ ID NO: 8296 - DNA, 25 bp, Artificial
  Probe
tgagtaaagaatcaatattgtcccc

SEQ ID NO: 8297 - DNA, 25 bp, Artificial
  Probe
aagtgagtaaagaatcaatattgtc

SEQ ID NO: 8298 - DNA, 25 bp, Artificial
  Probe
acaacaagaatgaatggaagaagtg

SEQ ID NO: 8299 - DNA, 25 bp, Artificial
  Probe
ctcacaccttattctcttctccaac

SEQ ID NO: 8300 - DNA, 25 bp, Artificial
  Probe
cctcacaccttattctcttctccaa

SEQ ID NO: 8301 - DNA, 25 bp, Artificial
  Probe
tcacaccttattctcttctccaacc

SEQ ID NO: 8302 - DNA, 25 bp, Artificial
  Probe
acaccttattctcttctccaaccac

SEQ ID NO: 8303 - DNA, 25 bp, Artificial
  Probe
cacaccttattctcttctccaacca

SEQ ID NO: 8304 - DNA, 25 bp, Artificial
  Probe
caccttattctcttctccaaccacc

SEQ ID NO: 8305 - DNA, 25 bp, Artificial
  Probe
gaccctcacaccttattctcttctc

SEQ ID NO: 8306 - DNA, 25 bp, Artificial
  Probe
cttattctcttctccaaccaccctc

SEQ ID NO: 8307 - DNA, 25 bp, Artificial
  Probe
ccctcacaccttattctcttctcca

SEQ ID NO: 8308 - DNA, 25 bp, Artificial
  Probe
accctcacaccttattctcttctcc

SEQ ID NO: 8309 - DNA, 25 bp, Artificial
  Probe
ccttattctcttctccaaccaccct

SEQ ID NO: 8310 - DNA, 25 bp, Artificial
  Probe
cgaccctcacaccttattctcttct

SEQ ID NO: 8311 - DNA, 25 bp, Artificial
  Probe
accttattctcttctccaaccaccc

SEQ ID NO: 8312 - DNA, 25 bp, Artificial
  Probe
ttattctcttctccaaccaccctcg

SEQ ID NO: 8313 - DNA, 25 bp, Artificial
  Probe
acgaccctcacaccttattctcttc

SEQ ID NO: 8314 - DNA, 25 bp, Artificial
  Probe
taactcaaactgtgaagacaacggg

SEQ ID NO: 8315 - DNA, 25 bp, Artificial
  Probe
ttgactttcttcactcaaaaccagt

SEQ ID NO: 8316 - DNA, 25 bp, Artificial
  Probe
tgactttcttcactcaaaaccagtg

SEQ ID NO: 8317 - DNA, 25 bp, Artificial
  Probe
caaactgtgaagacaacggggtttt

SEQ ID NO: 8318 - DNA, 25 bp, Artificial
  Probe
gactttcttcactcaaaaccagtgc

SEQ ID NO: 8319 - DNA, 25 bp, Artificial
  Probe
tttgactttcttcactcaaaaccag

SEQ ID NO: 8320 - DNA, 25 bp, Artificial
  Probe
ctttcttcactcaaaaccagtgcag

SEQ ID NO: 8321 - DNA, 25 bp, Artificial
  Probe
tcaaactgtgaagacaacggggttt

SEQ ID NO: 8322 - DNA, 25 bp, Artificial
  Probe
actttcttcactcaaaaccagtgca

SEQ ID NO: 8323 - DNA, 25 bp, Artificial
  Probe
agtggcggctacaaataacttatat

SEQ ID NO: 8324 - DNA, 25 bp, Artificial
  Probe
cagtggcggctacaaataacttata

SEQ ID NO: 8325 - DNA, 25 bp, Artificial
  Probe
gtggcggctacaaataacttatata

SEQ ID NO: 8326 - DNA, 25 bp, Artificial
  Probe
tggcggctacaaataacttatatat

SEQ ID NO: 8327 - DNA, 25 bp, Artificial
  Probe
tacttagtctcacatactgaatact

SEQ ID NO: 8328 - DNA, 25 bp, Artificial
  Probe
ctacttagtctcacatactgaatac

SEQ ID NO: 8329 - DNA, 25 bp, Artificial
  Probe
actacttagtctcacatactgaata

SEQ ID NO: 8330 - DNA, 25 bp, Artificial
  Probe
tactacttagtctcacatactgaat

SEQ ID NO: 8331 - DNA, 25 bp, Artificial
  Probe
agtctcacatactgaatactagtca

SEQ ID NO: 8332 - DNA, 25 bp, Artificial
  Probe
gaatgtctgatgcgttcgttcattg

SEQ ID NO: 8333 - DNA, 25 bp, Artificial
  Probe
attaagcaattccatttgtttgaaa

SEQ ID NO: 8334 - DNA, 25 bp, Artificial
  Probe
gtctcacatactgaatactagtcaa

SEQ ID NO: 8335 - DNA, 25 bp, Artificial
  Probe
gcgataaaatgagattgtctgtagt

SEQ ID NO: 8336 - DNA, 25 bp, Artificial
  Probe
tgcgataaaatgagattgtctgtag

SEQ ID NO: 8337 - DNA, 25 bp, Artificial
  Probe
ctgcgataaaatgagattgtctgta

SEQ ID NO: 8338 - DNA, 25 bp, Artificial
  Probe
aattaagcaattccatttgtttgaa

SEQ ID NO: 8339 - DNA, 25 bp, Artificial
  Probe
acttagtctcacatactgaatacta

SEQ ID NO: 8340 - DNA, 25 bp, Artificial
  Probe
tttctttgggtcttcattttgatgc

SEQ ID NO: 8341 - DNA, 25 bp, Artificial
  Probe
gtttctttgggtcttcattttgatg

SEQ ID NO: 8342 - DNA, 25 bp, Artificial
  Probe
gcagtggcggctacaaataacttat

SEQ ID NO: 8343 - DNA, 25 bp, Artificial
  Probe
gcttggcatccttcagaaaatatta

SEQ ID NO: 8344 - DNA, 25 bp, Artificial
  Probe
ttcagaaaatattatagcagtggcg

SEQ ID NO: 8345 - DNA, 25 bp, Artificial
  Probe
cttagtctcacatactgaatactag

SEQ ID NO: 8346 - DNA, 25 bp, Artificial
  Probe
gctgcgataaaatgagattgtctgt

SEQ ID NO: 8347 - DNA, 25 bp, Artificial
  Probe
tgctgcgataaaatgagattgtctg

SEQ ID NO: 8348 - DNA, 25 bp, Artificial
  Probe
tcagaaaatattatagcagtggcgg

SEQ ID NO: 8349 - DNA, 25 bp, Artificial
  Probe
catacagcttggcatccttcagaaa

SEQ ID NO: 8350 - DNA, 25 bp, Artificial
  Probe
tgaatgtctgatgcgttcgttcatt

SEQ ID NO: 8351 - DNA, 25 bp, Artificial
  Probe
aatattatagcagtggcggctacaa

SEQ ID NO: 8352 - DNA, 25 bp, Artificial
  Probe
agcttggcatccttcagaaaatatt

SEQ ID NO: 8353 - DNA, 25 bp, Artificial
  Probe
cttcagaaaatattatagcagtggc

SEQ ID NO: 8354 - DNA, 25 bp, Artificial
  Probe
cagcttggcatccttcagaaaatat

SEQ ID NO: 8355 - DNA, 25 bp, Artificial
  Probe
ctgaatgtctgatgcgttcgttcat

SEQ ID NO: 8356 - DNA, 25 bp, Artificial
  Probe
ggcatccttcagaaaatattatagc

SEQ ID NO: 8357 - DNA, 25 bp, Artificial
  Probe
tcacatactgaatactagtcaaaca

SEQ ID NO: 8358 - DNA, 25 bp, Artificial
  Probe
ggcggctacaaataacttatatata

SEQ ID NO: 8359 - DNA, 25 bp, Artificial
  Probe
taattaagcaattccatttgtttga

SEQ ID NO: 8360 - DNA, 25 bp, Artificial
  Probe
aacttatatatattccaggacaagg

SEQ ID NO: 8361 - DNA, 25 bp, Artificial
  Probe
ttaagcaattccatttgtttgaaaa

SEQ ID NO: 8362 - DNA, 25 bp, Artificial
  Probe
tagtctcacatactgaatactagtc

SEQ ID NO: 8363 - DNA, 25 bp, Artificial
  Probe
cagaaaatattatagcagtggcggc

SEQ ID NO: 8364 - DNA, 25 bp, Artificial
  Probe
ccttcagaaaatattatagcagtgg

SEQ ID NO: 8365 - DNA, 25 bp, Artificial
  Probe
cttggcatccttcagaaaatattat

SEQ ID NO: 8366 - DNA, 25 bp, Artificial
  Probe
ttctttgggtcttcattttgatgca

SEQ ID NO: 8367 - DNA, 25 bp, Artificial
  Probe
ctcacatactgaatactagtcaaac

SEQ ID NO: 8368 - DNA, 25 bp, Artificial
  Probe
ctaaagtgatataaagtcgcgggcc

SEQ ID NO: 8369 - DNA, 25 bp, Artificial
  Probe
aaagtgatataaagtcgcgggccta

SEQ ID NO: 8370 - DNA, 25 bp, Artificial
  Probe
taaagtgatataaagtcgcgggcct

SEQ ID NO: 8371 - DNA, 25 bp, Artificial
  Probe
aagtgatataaagtcgcgggcctac

SEQ ID NO: 8372 - DNA, 25 bp, Artificial
  Probe
caagaagagaaagggtcaagtgatc

SEQ ID NO: 8373 - DNA, 25 bp, Artificial
  Probe
aagaagagaaagggtcaagtgatcc

SEQ ID NO: 8374 - DNA, 25 bp, Artificial
  Probe
gaagagaaagggtcaagtgatccag

SEQ ID NO: 8375 - DNA, 25 bp, Artificial
  Probe
agaagagaaagggtcaagtgatcca

SEQ ID NO: 8376 - DNA, 25 bp, Artificial
  Probe
agagaaagggtcaagtgatccagtt

SEQ ID NO: 8377 - DNA, 25 bp, Artificial
  Probe
aagagaaagggtcaagtgatccagt

SEQ ID NO: 8378 - DNA, 25 bp, Artificial
  Probe
agttgtatttcagagctgtttgtcc

SEQ ID NO: 8379 - DNA, 25 bp, Artificial
  Probe
attaatccagttgtatttcagagct

SEQ ID NO: 8380 - DNA, 25 bp, Artificial
  Probe
taatccagttgtatttcagagctgt

SEQ ID NO: 8381 - DNA, 25 bp, Artificial
  Probe
cagttgtatttcagagctgtttgtc

SEQ ID NO: 8382 - DNA, 25 bp, Artificial
  Probe
atccagttgtatttcagagctgttt

SEQ ID NO: 8383 - DNA, 25 bp, Artificial
  Probe
aatccagttgtatttcagagctgtt

SEQ ID NO: 8384 - DNA, 25 bp, Artificial
  Probe
ttaatccagttgtatttcagagctg

SEQ ID NO: 8385 - DNA, 25 bp, Artificial
  Probe
tccagttgtatttcagagctgtttg

SEQ ID NO: 8386 - DNA, 25 bp, Artificial
  Probe
ccagttgtatttcagagctgtttgt

SEQ ID NO: 8387 - DNA, 25 bp, Artificial
  Probe
cgaaggcaaattctttaatcaaata

SEQ ID NO: 8388 - DNA, 25 bp, Artificial
  Probe
tattaatccagttgtatttcagagc

SEQ ID NO: 8389 - DNA, 25 bp, Artificial
  Probe
aagagttttctatccatgaagcaga

SEQ ID NO: 8390 - DNA, 25 bp, Artificial
  Probe
caagagttttctatccatgaagcag

SEQ ID NO: 8391 - DNA, 25 bp, Artificial
  Probe
agagttttctatccatgaagcagag

SEQ ID NO: 8392 - DNA, 25 bp, Artificial
  Probe
gcaagagttttctatccatgaagca

SEQ ID NO: 8393 - DNA, 25 bp, Artificial
  Probe
gagttttctatccatgaagcagagc

SEQ ID NO: 8394 - DNA, 25 bp, Artificial
  Probe
agttttctatccatgaagcagagca

SEQ ID NO: 8395 - DNA, 25 bp, Artificial
  Probe
ggcaagagttttctatccatgaagc

SEQ ID NO: 8396 - DNA, 25 bp, Artificial
  Probe
tggcaagagttttctatccatgaag

SEQ ID NO: 8397 - DNA, 25 bp, Artificial
  Probe
gaagagaggaggaaagagaagagag

SEQ ID NO: 8398 - DNA, 25 bp, Artificial
  Probe
gaagaggaggaagagtgagagacag

SEQ ID NO: 8399 - DNA, 25 bp, Artificial
  Probe
gaggaagagtgagagacagagaaag

SEQ ID NO: 8400 - DNA, 25 bp, Artificial
  Probe
aggaggaagagtgagagacagagaa

SEQ ID NO: 8401 - DNA, 25 bp, Artificial
  Probe
aagaggaggaagagtgagagacaga

SEQ ID NO: 8402 - DNA, 25 bp, Artificial
  Probe
aagagaggaggaaagagaagagagg

SEQ ID NO: 8403 - DNA, 25 bp, Artificial
  Probe
ggaagagaggaggaaagagaagaga

SEQ ID NO: 8404 - DNA, 25 bp, Artificial
  Probe
aaagggaagagaggaggaaagagaa

SEQ ID NO: 8405 - DNA, 25 bp, Artificial
  Probe
aagagtgagagacagagaaagggaa

SEQ ID NO: 8406 - DNA, 25 bp, Artificial
  Probe
tgagagacagagaaagggaagagag

SEQ ID NO: 8407 - DNA, 25 bp, Artificial
  Probe
agaggaggaagagtgagagacagag

SEQ ID NO: 8408 - DNA, 25 bp, Artificial
  Probe
gaggaagaggaggaagagtgagaga

SEQ ID NO: 8409 - DNA, 25 bp, Artificial
  Probe
caaatactgtgagtagggactgaac

SEQ ID NO: 8410 - DNA, 25 bp, Artificial
  Probe
gaggaggaagagtgagagacagaga

SEQ ID NO: 8411 - DNA, 25 bp, Artificial
  Probe
aagggaagagaggaggaaagagaag

SEQ ID NO: 8412 - DNA, 25 bp, Artificial
  Probe
gaaagggaagagaggaggaaagaga

SEQ ID NO: 8413 - DNA, 25 bp, Artificial
  Probe
agaaagggaagagaggaggaaagag

SEQ ID NO: 8414 - DNA, 25 bp, Artificial
  Probe
gagaaagggaagagaggaggaaaga

SEQ ID NO: 8415 - DNA, 25 bp, Artificial
  Probe
agagaaagggaagagaggaggaaag

SEQ ID NO: 8416 - DNA, 25 bp, Artificial
  Probe
gtgagagacagagaaagggaagaga

SEQ ID NO: 8417 - DNA, 25 bp, Artificial
  Probe
agtgagagacagagaaagggaagag

SEQ ID NO: 8418 - DNA, 25 bp, Artificial
  Probe
gagtgagagacagagaaagggaaga

SEQ ID NO: 8419 - DNA, 25 bp, Artificial
  Probe
agagtgagagacagagaaagggaag

SEQ ID NO: 8420 - DNA, 25 bp, Artificial
  Probe
gaagagtgagagacagagaaaggga

SEQ ID NO: 8421 - DNA, 25 bp, Artificial
  Probe
aggaagagtgagagacagagaaagg

SEQ ID NO: 8422 - DNA, 25 bp, Artificial
  Probe
ggaggaagagtgagagacagagaaa

SEQ ID NO: 8423 - DNA, 25 bp, Artificial
  Probe
cagagaaagggaagagaggaggaaa

SEQ ID NO: 8424 - DNA, 25 bp, Artificial
  Probe
ccaaatactgtgagtagggactgaa

SEQ ID NO: 8425 - DNA, 25 bp, Artificial
  Probe
aggaagaggaggaagagtgagagac

SEQ ID NO: 8426 - DNA, 25 bp, Artificial
  Probe
aaatactgtgagtagggactgaacg

SEQ ID NO: 8427 - DNA, 25 bp, Artificial
  Probe
gggaagagaggaggaaagagaagag

SEQ ID NO: 8428 - DNA, 25 bp, Artificial
  Probe
gagacagagaaagggaagagaggag

SEQ ID NO: 8429 - DNA, 25 bp, Artificial
  Probe
gagagacagagaaagggaagagagg

SEQ ID NO: 8430 - DNA, 25 bp, Artificial
  Probe
ggaagaggaggaagagtgagagaca

SEQ ID NO: 8431 - DNA, 25 bp, Artificial
  Probe
gaggaaagagaagagagggagaacc

SEQ ID NO: 8432 - DNA, 25 bp, Artificial
  Probe
ggaggaaagagaagagagggagaac

SEQ ID NO: 8433 - DNA, 25 bp, Artificial
  Probe
aggaggaaagagaagagagggagaa

SEQ ID NO: 8434 - DNA, 25 bp, Artificial
  Probe
agggaagagaggaggaaagagaaga

SEQ ID NO: 8435 - DNA, 25 bp, Artificial
  Probe
agagacagagaaagggaagagagga

SEQ ID NO: 8436 - DNA, 25 bp, Artificial
  Probe
ggaagagtgagagacagagaaaggg

SEQ ID NO: 8437 - DNA, 25 bp, Artificial
  Probe
atactgtgagtagggactgaacgaa

SEQ ID NO: 8438 - DNA, 25 bp, Artificial
  Probe
aatactgtgagtagggactgaacga

SEQ ID NO: 8439 - DNA, 25 bp, Artificial
  Probe
gaggaggaaagagaagagagggaga

SEQ ID NO: 8440 - DNA, 25 bp, Artificial
  Probe
agaggaggaaagagaagagagggag

SEQ ID NO: 8441 - DNA, 25 bp, Artificial
  Probe
gagaggaggaaagagaagagaggga

SEQ ID NO: 8442 - DNA, 25 bp, Artificial
  Probe
gggaggataattgggatgatgacaa

SEQ ID NO: 8443 - DNA, 25 bp, Artificial
  Probe
ctgggaggataattgggatgatgac

SEQ ID NO: 8444 - DNA, 25 bp, Artificial
  Probe
tctgggaggataattgggatgatga

SEQ ID NO: 8445 - DNA, 25 bp, Artificial
  Probe
ggaggataattgggatgatgacaat

SEQ ID NO: 8446 - DNA, 25 bp, Artificial
  Probe
tgggaggataattgggatgatgaca

SEQ ID NO: 8447 - DNA, 25 bp, Artificial
  Probe
tgtttatttcattatctctgggatt

SEQ ID NO: 8448 - DNA, 25 bp, Artificial
  Probe
atgtttatttcattatctctgggat

SEQ ID NO: 8449 - DNA, 25 bp, Artificial
  Probe
tatgtttatttcattatctctggga

SEQ ID NO: 8450 - DNA, 25 bp, Artificial
  Probe
gtttatttcattatctctgggattt

SEQ ID NO: 8451 - DNA, 25 bp, Artificial
  Probe
cttcacaagccaggttaccttcctt

SEQ ID NO: 8452 - DNA, 25 bp, Artificial
  Probe
attctgtttgaagactaccatccac

SEQ ID NO: 8453 - DNA, 25 bp, Artificial
  Probe
aattctgtttgaagactaccatcca

SEQ ID NO: 8454 - DNA, 25 bp, Artificial
  Probe
aaattctgtttgaagactaccatcc

SEQ ID NO: 8455 - DNA, 25 bp, Artificial
  Probe
ttctgtttgaagactaccatccaca

SEQ ID NO: 8456 - DNA, 25 bp, Artificial
  Probe
gcagagaaatcaggaatcagggaaa

SEQ ID NO: 8457 - DNA, 25 bp, Artificial
  Probe
atctctctacagccctcattcactt

SEQ ID NO: 8458 - DNA, 25 bp, Artificial
  Probe
tctctctacagccctcattcacttc

SEQ ID NO: 8459 - DNA, 25 bp, Artificial
  Probe
agagaaatcaggaatcagggaaaat

SEQ ID NO: 8460 - DNA, 25 bp, Artificial
  Probe
cagagaaatcaggaatcagggaaaa

SEQ ID NO: 8461 - DNA, 25 bp, Artificial
  Probe
gatctctctacagccctcattcact

SEQ ID NO: 8462 - DNA, 25 bp, Artificial
  Probe
ctctctacagccctcattcacttca

SEQ ID NO: 8463 - DNA, 25 bp, Artificial
  Probe
gagaaatcaggaatcagggaaaatt

SEQ ID NO: 8464 - DNA, 25 bp, Artificial
  Probe
gggaaaattctgtttgaagactacc

SEQ ID NO: 8465 - DNA, 25 bp, Artificial
  Probe
ggaaaattctgtttgaagactacca

SEQ ID NO: 8466 - DNA, 25 bp, Artificial
  Probe
agggaaaattctgtttgaagactac

SEQ ID NO: 8467 - DNA, 25 bp, Artificial
  Probe
atcagggaaaattctgtttgaagac

SEQ ID NO: 8468 - DNA, 25 bp, Artificial
  Probe
tcagggaaaattctgtttgaagact

SEQ ID NO: 8469 - DNA, 25 bp, Artificial
  Probe
cagggaaaattctgtttgaagacta

SEQ ID NO: 8470 - DNA, 25 bp, Artificial
  Probe
aatcagggaaaattctgtttgaaga

SEQ ID NO: 8471 - DNA, 25 bp, Artificial
  Probe
atctataaaagagtgctcacacctg

SEQ ID NO: 8472 - DNA, 25 bp, Artificial
  Probe
aaaattctgtttgaagactaccatc

SEQ ID NO: 8473 - DNA, 25 bp, Artificial
  Probe
gaaaattctgtttgaagactaccat

SEQ ID NO: 8474 - DNA, 25 bp, Artificial
  Probe
ggaatcagggaaaattctgtttgaa

SEQ ID NO: 8475 - DNA, 25 bp, Artificial
  Probe
ggatctctctacagccctcattcac

SEQ ID NO: 8476 - DNA, 25 bp, Artificial
  Probe
tctataaaagagtgctcacacctgt

SEQ ID NO: 8477 - DNA, 25 bp, Artificial
  Probe
atcaggaatcagggaaaattctgtt

SEQ ID NO: 8478 - DNA, 25 bp, Artificial
  Probe
aatcaggaatcagggaaaattctgt

SEQ ID NO: 8479 - DNA, 25 bp, Artificial
  Probe
aggaatcagggaaaattctgtttga

SEQ ID NO: 8480 - DNA, 25 bp, Artificial
  Probe
caggaatcagggaaaattctgtttg

SEQ ID NO: 8481 - DNA, 25 bp, Artificial
  Probe
tcaggaatcagggaaaattctgttt

SEQ ID NO: 8482 - DNA, 25 bp, Artificial
  Probe
aaatcaggaatcagggaaaattctg

SEQ ID NO: 8483 - DNA, 25 bp, Artificial
  Probe
gaaatcaggaatcagggaaaattct

SEQ ID NO: 8484 - DNA, 25 bp, Artificial
  Probe
agaaatcaggaatcagggaaaattc

SEQ ID NO: 8485 - DNA, 25 bp, Artificial
  Probe
gaatcagggaaaattctgtttgaag

SEQ ID NO: 8486 - DNA, 25 bp, Artificial
  Probe
gtttgaagactaccatccacaggct

SEQ ID NO: 8487 - DNA, 25 bp, Artificial
  Probe
ctataaaagagtgctcacacctgtg

SEQ ID NO: 8488 - DNA, 25 bp, Artificial
  Probe
tataaaagagtgctcacacctgtgt

SEQ ID NO: 8489 - DNA, 25 bp, Artificial
  Probe
tgtttgaagactaccatccacaggc

SEQ ID NO: 8490 - DNA, 25 bp, Artificial
  Probe
tctgtttgaagactaccatccacag

SEQ ID NO: 8491 - DNA, 25 bp, Artificial
  Probe
ctgtttgaagactaccatccacagg

SEQ ID NO: 8492 - DNA, 25 bp, Artificial
  Probe
ataaaagagtgctcacacctgtgtg

SEQ ID NO: 8493 - DNA, 25 bp, Artificial
  Probe
gaaagtctttattcatggtgccaaa

SEQ ID NO: 8494 - DNA, 25 bp, Artificial
  Probe
agaaagtctttattcatggtgccaa

SEQ ID NO: 8495 - DNA, 25 bp, Artificial
  Probe
gaagaaagtctttattcatggtgcc

SEQ ID NO: 8496 - DNA, 25 bp, Artificial
  Probe
aagaaagtctttattcatggtgcca

SEQ ID NO: 8497 - DNA, 25 bp, Artificial
  Probe
ggggcatttcttttcctcatcataa

SEQ ID NO: 8498 - DNA, 25 bp, Artificial
  Probe
tgaagaaagtctttattcatggtgc

SEQ ID NO: 8499 - DNA, 25 bp, Artificial
  Probe
aaagtctttattcatggtgccaaaa

SEQ ID NO: 8500 - DNA, 25 bp, Artificial
  Probe
aagtctttattcatggtgccaaaat

SEQ ID NO: 8501 - DNA, 25 bp, Artificial
  Probe
agtctttattcatggtgccaaaatg

SEQ ID NO: 8502 - DNA, 25 bp, Artificial
  Probe
cagtttcattgagattagtagtaca

SEQ ID NO: 8503 - DNA, 25 bp, Artificial
  Probe
gtctttattcatggtgccaaaatgc

SEQ ID NO: 8504 - DNA, 25 bp, Artificial
  Probe
ttgaagaaagtctttattcatggtg

SEQ ID NO: 8505 - DNA, 25 bp, Artificial
  Probe
tcagtttcattgagattagtagtac

SEQ ID NO: 8506 - DNA, 25 bp, Artificial
  Probe
aggggcatttcttttcctcatcata

SEQ ID NO: 8507 - DNA, 25 bp, Artificial
  Probe
cttgaagaaagtctttattcatggt

SEQ ID NO: 8508 - DNA, 25 bp, Artificial
  Probe
acttgaagaaagtctttattcatgg

SEQ ID NO: 8509 - DNA, 25 bp, Artificial
  Probe
aaggttaaacttgaagaaagtcttt

SEQ ID NO: 8510 - DNA, 25 bp, Artificial
  Probe
aaaggttaaacttgaagaaagtctt

SEQ ID NO: 8511 - DNA, 25 bp, Artificial
  Probe
agtttcattgagattagtagtacat

SEQ ID NO: 8512 - DNA, 25 bp, Artificial
  Probe
atcagtttcattgagattagtagta

SEQ ID NO: 8513 - DNA, 25 bp, Artificial
  Probe
tatcagtttcattgagattagtagt

SEQ ID NO: 8514 - DNA, 25 bp, Artificial
  Probe
aggttaaacttgaagaaagtcttta

SEQ ID NO: 8515 - DNA, 25 bp, Artificial
  Probe
taaaggttaaacttgaagaaagtct

SEQ ID NO: 8516 - DNA, 25 bp, Artificial
  Probe
aacttgaagaaagtctttattcatg

SEQ ID NO: 8517 - DNA, 25 bp, Artificial
  Probe
ttaaaggttaaacttgaagaaagtc

SEQ ID NO: 8518 - DNA, 25 bp, Artificial
  Probe
ggttaaacttgaagaaagtctttat

SEQ ID NO: 8519 - DNA, 25 bp, Artificial
  Probe
tctttattcatggtgccaaaatgca

SEQ ID NO: 8520 - DNA, 25 bp, Artificial
  Probe
aaacttgaagaaagtctttattcat

SEQ ID NO: 8521 - DNA, 25 bp, Artificial
  Probe
tttaaaggttaaacttgaagaaagt

SEQ ID NO: 8522 - DNA, 25 bp, Artificial
  Probe
taactctgtgtgttagaaaataatg

SEQ ID NO: 8523 - DNA, 25 bp, Artificial
  Probe
ctttattcatggtgccaaaatgcat

SEQ ID NO: 8524 - DNA, 25 bp, Artificial
  Probe
gaggggcatttcttttcctcatcat

SEQ ID NO: 8525 - DNA, 25 bp, Artificial
  Probe
aggaggggcatttcttttcctcatc

SEQ ID NO: 8526 - DNA, 25 bp, Artificial
  Probe
ggaggggcatttcttttcctcatca

SEQ ID NO: 8527 - DNA, 25 bp, Artificial
  Probe
ctaactctgtgtgttagaaaataat

SEQ ID NO: 8528 - DNA, 25 bp, Artificial
  Probe
ccagtgttgtagtgctagtttaaag

SEQ ID NO: 8529 - DNA, 25 bp, Artificial
  Probe
tgtattaagatagctgcatgattac

SEQ ID NO: 8530 - DNA, 25 bp, Artificial
  Probe
gtattaagatagctgcatgattact

SEQ ID NO: 8531 - DNA, 25 bp, Artificial
  Probe
taagatagctgcatgattactttct

SEQ ID NO: 8532 - DNA, 25 bp, Artificial
  Probe
cagtgttgtagtgctagtttaaagc

SEQ ID NO: 8533 - DNA, 25 bp, Artificial
  Probe
ttaagatagctgcatgattactttc

SEQ ID NO: 8534 - DNA, 25 bp, Artificial
  Probe
tattaagatagctgcatgattactt

SEQ ID NO: 8535 - DNA, 25 bp, Artificial
  Probe
gctagtttaaagcagttctgtgtgg

SEQ ID NO: 8536 - DNA, 25 bp, Artificial
  Probe
attaagatagctgcatgattacttt

SEQ ID NO: 8537 - DNA, 25 bp, Artificial
  Probe
aacctatgtgaaaatgtaaatcttt

SEQ ID NO: 8538 - DNA, 25 bp, Artificial
  Probe
aaacctatgtgaaaatgtaaatctt

SEQ ID NO: 8539 - DNA, 25 bp, Artificial
  Probe
ttaacctttaccctacctttgacac

SEQ ID NO: 8540 - DNA, 25 bp, Artificial
  Probe
taacctttaccctacctttgacact

SEQ ID NO: 8541 - DNA, 25 bp, Artificial
  Probe
tggttctttggcataatggtgtaaa

SEQ ID NO: 8542 - DNA, 25 bp, Artificial
  Probe
ctggttctttggcataatggtgtaa

SEQ ID NO: 8543 - DNA, 25 bp, Artificial
  Probe
tacacaggtttggcatcttatatgt

SEQ ID NO: 8544 - DNA, 25 bp, Artificial
  Probe
cacaggtttggcatcttatatgttt

SEQ ID NO: 8545 - DNA, 25 bp, Artificial
  Probe
ctttaccctacctttgacactgact

SEQ ID NO: 8546 - DNA, 25 bp, Artificial
  Probe
acacaggtttggcatcttatatgtt

SEQ ID NO: 8547 - DNA, 25 bp, Artificial
  Probe
tttaccctacctttgacactgactg

SEQ ID NO: 8548 - DNA, 25 bp, Artificial
  Probe
tctggttctttggcataatggtgta

SEQ ID NO: 8549 - DNA, 25 bp, Artificial
  Probe
aacctttaccctacctttgacactg

SEQ ID NO: 8550 - DNA, 25 bp, Artificial
  Probe
gaagtctggttctttggcataatgg

SEQ ID NO: 8551 - DNA, 25 bp, Artificial
  Probe
cctttaccctacctttgacactgac

SEQ ID NO: 8552 - DNA, 25 bp, Artificial
  Probe
aagtctggttctttggcataatggt

SEQ ID NO: 8553 - DNA, 25 bp, Artificial
  Probe
gttctttggcataatggtgtaaagt

SEQ ID NO: 8554 - DNA, 25 bp, Artificial
  Probe
acctttaccctacctttgacactga

SEQ ID NO: 8555 - DNA, 25 bp, Artificial
  Probe
ttctttggcataatggtgtaaagtt

SEQ ID NO: 8556 - DNA, 25 bp, Artificial
  Probe
ggttctttggcataatggtgtaaag

SEQ ID NO: 8557 - DNA, 25 bp, Artificial
  Probe
tagaagtctggttctttggcataat

SEQ ID NO: 8558 - DNA, 25 bp, Artificial
  Probe
atagaagtctggttctttggcataa

SEQ ID NO: 8559 - DNA, 25 bp, Artificial
  Probe
aatagaagtctggttctttggcata

SEQ ID NO: 8560 - DNA, 25 bp, Artificial
  Probe
agtctggttctttggcataatggtg

SEQ ID NO: 8561 - DNA, 25 bp, Artificial
  Probe
tctttggcataatggtgtaaagtta

SEQ ID NO: 8562 - DNA, 25 bp, Artificial
  Probe
agttaacctttaccctacctttgac

SEQ ID NO: 8563 - DNA, 25 bp, Artificial
  Probe
gagttaacctttaccctacctttga

SEQ ID NO: 8564 - DNA, 25 bp, Artificial
  Probe
gtctggttctttggcataatggtgt

SEQ ID NO: 8565 - DNA, 25 bp, Artificial
  Probe
agaagtctggttctttggcataatg

SEQ ID NO: 8566 - DNA, 25 bp, Artificial
  Probe
caatagaagtctggttctttggcat

SEQ ID NO: 8567 - DNA, 25 bp, Artificial
  Probe
gttaacctttaccctacctttgaca

SEQ ID NO: 8568 - DNA, 25 bp, Artificial
  Probe
ggagttaacctttaccctacctttg

SEQ ID NO: 8569 - DNA, 25 bp, Artificial
  Probe
ttaccctacctttgacactgactgt

SEQ ID NO: 8570 - DNA, 25 bp, Artificial
  Probe
ctttggcataatggtgtaaagttaa

SEQ ID NO: 8571 - DNA, 25 bp, Artificial
  Probe
acaggtttggcatcttatatgtttt

SEQ ID NO: 8572 - DNA, 25 bp, Artificial
  Probe
caggtttggcatcttatatgtttta

SEQ ID NO: 8573 - DNA, 25 bp, Artificial
  Probe
ctgcaatagaagtctggttctttgg

SEQ ID NO: 8574 - DNA, 25 bp, Artificial
  Probe
cctgcaatagaagtctggttctttg

SEQ ID NO: 8575 - DNA, 25 bp, Artificial
  Probe
gcaatagaagtctggttctttggca

SEQ ID NO: 8576 - DNA, 25 bp, Artificial
  Probe
ccctgcaatagaagtctggttcttt

SEQ ID NO: 8577 - DNA, 25 bp, Artificial
  Probe
gggagttaacctttaccctaccttt

SEQ ID NO: 8578 - DNA, 25 bp, Artificial
  Probe
tgcaatagaagtctggttctttggc

SEQ ID NO: 8579 - DNA, 25 bp, Artificial
  Probe
tgggagttaacctttaccctacctt

SEQ ID NO: 8580 - DNA, 25 bp, Artificial
  Probe
taccctacctttgacactgactgtc

SEQ ID NO: 8581 - DNA, 25 bp, Artificial
  Probe
tttcccctgcaatagaagtctggtt

SEQ ID NO: 8582 - DNA, 25 bp, Artificial
  Probe
ttttcccctgcaatagaagtctggt

SEQ ID NO: 8583 - DNA, 25 bp, Artificial
  Probe
ttcccctgcaatagaagtctggttc

SEQ ID NO: 8584 - DNA, 25 bp, Artificial
  Probe
tctcttgcattagtcaacacatagt

SEQ ID NO: 8585 - DNA, 25 bp, Artificial
  Probe
gtctcttgcattagtcaacacatag

SEQ ID NO: 8586 - DNA, 25 bp, Artificial
  Probe
tgtctcttgcattagtcaacacata

SEQ ID NO: 8587 - DNA, 25 bp, Artificial
  Probe
ctcttgcattagtcaacacatagtg

SEQ ID NO: 8588 - DNA, 25 bp, Artificial
  Probe
tcttgcattagtcaacacatagtgg

SEQ ID NO: 8589 - DNA, 25 bp, Artificial
  Probe
gcattagtcaacacatagtggctgt

SEQ ID NO: 8590 - DNA, 25 bp, Artificial
  Probe
cattagtcaacacatagtggctgtt

SEQ ID NO: 8591 - DNA, 25 bp, Artificial
  Probe
cttgcattagtcaacacatagtggc

SEQ ID NO: 8592 - DNA, 25 bp, Artificial
  Probe
gtaaactgataattgcctttgaagg

SEQ ID NO: 8593 - DNA, 25 bp, Artificial
  Probe
ttgcattagtcaacacatagtggct

SEQ ID NO: 8594 - DNA, 25 bp, Artificial
  Probe
tgcattagtcaacacatagtggctg

SEQ ID NO: 8595 - DNA, 25 bp, Artificial
  Probe
tgaatgcagatatgcgtaaatgtgc

SEQ ID NO: 8596 - DNA, 25 bp, Artificial
  Probe
tgacaagtactgtttcagattcagt

SEQ ID NO: 8597 - DNA, 25 bp, Artificial
  Probe
gacaagtactgtttcagattcagtc

SEQ ID NO: 8598 - DNA, 25 bp, Artificial
  Probe
tgtgataactgccaaaaccgtattt

SEQ ID NO: 8599 - DNA, 25 bp, Artificial
  Probe
accgtattttctaagactaagcaaa

SEQ ID NO: 8600 - DNA, 25 bp, Artificial
  Probe
aaccgtattttctaagactaagcaa

SEQ ID NO: 8601 - DNA, 25 bp, Artificial
  Probe
aaaccgtattttctaagactaagca

SEQ ID NO: 8602 - DNA, 25 bp, Artificial
  Probe
ttaggacattttgtgtgataactgc

SEQ ID NO: 8603 - DNA, 25 bp, Artificial
  Probe
gtgtgataactgccaaaaccgtatt

SEQ ID NO: 8604 - DNA, 25 bp, Artificial
  Probe
aaagacattaggacattttgtgtga

SEQ ID NO: 8605 - DNA, 25 bp, Artificial
  Probe
aagacattaggacattttgtgtgat

SEQ ID NO: 8606 - DNA, 25 bp, Artificial
  Probe
gataactgccaaaaccgtattttct

SEQ ID NO: 8607 - DNA, 25 bp, Artificial
  Probe
aactgccaaaaccgtattttctaag

SEQ ID NO: 8608 - DNA, 25 bp, Artificial
  Probe
tgataactgccaaaaccgtattttc

SEQ ID NO: 8609 - DNA, 25 bp, Artificial
  Probe
taggacattttgtgtgataactgcc

SEQ ID NO: 8610 - DNA, 25 bp, Artificial
  Probe
gccaaaaccgtattttctaagacta

SEQ ID NO: 8611 - DNA, 25 bp, Artificial
  Probe
gtgataactgccaaaaccgtatttt

SEQ ID NO: 8612 - DNA, 25 bp, Artificial
  Probe
ctgccaaaaccgtattttctaagac

SEQ ID NO: 8613 - DNA, 25 bp, Artificial
  Probe
taactgccaaaaccgtattttctaa

SEQ ID NO: 8614 - DNA, 25 bp, Artificial
  Probe
tgccaaaaccgtattttctaagact

SEQ ID NO: 8615 - DNA, 25 bp, Artificial
  Probe
actgccaaaaccgtattttctaaga

SEQ ID NO: 8616 - DNA, 25 bp, Artificial
  Probe
ataactgccaaaaccgtattttcta

SEQ ID NO: 8617 - DNA, 25 bp, Artificial
  Probe
agacattaggacattttgtgtgata

SEQ ID NO: 8618 - DNA, 25 bp, Artificial
  Probe
tgtgtgataactgccaaaaccgtat

SEQ ID NO: 8619 - DNA, 25 bp, Artificial
  Probe
ggacattttgtgtgataactgccaa

SEQ ID NO: 8620 - DNA, 25 bp, Artificial
  Probe
acattaggacattttgtgtgataac

SEQ ID NO: 8621 - DNA, 25 bp, Artificial
  Probe
taaagacattaggacattttgtgtg

SEQ ID NO: 8622 - DNA, 25 bp, Artificial
  Probe
attaggacattttgtgtgataactg

SEQ ID NO: 8623 - DNA, 25 bp, Artificial
  Probe
cattaggacattttgtgtgataact

SEQ ID NO: 8624 - DNA, 25 bp, Artificial
  Probe
gacattaggacattttgtgtgataa

SEQ ID NO: 8625 - DNA, 25 bp, Artificial
  Probe
ccgtattttctaagactaagcaaaa

SEQ ID NO: 8626 - DNA, 25 bp, Artificial
  Probe
aaaaccgtattttctaagactaagc

SEQ ID NO: 8627 - DNA, 25 bp, Artificial
  Probe
ttgtgtgataactgccaaaaccgta

SEQ ID NO: 8628 - DNA, 25 bp, Artificial
  Probe
gacattttgtgtgataactgccaaa

SEQ ID NO: 8629 - DNA, 25 bp, Artificial
  Probe
aggacattttgtgtgataactgcca

SEQ ID NO: 8630 - DNA, 25 bp, Artificial
  Probe
ttaaagacattaggacattttgtgt

SEQ ID NO: 8631 - DNA, 25 bp, Artificial
  Probe
ccaaaaccgtattttctaagactaa

SEQ ID NO: 8632 - DNA, 25 bp, Artificial
  Probe
caaaaccgtattttctaagactaag

SEQ ID NO: 8633 - DNA, 25 bp, Artificial
  Probe
tttaaagacattaggacattttgtg

SEQ ID NO: 8634 - DNA, 25 bp, Artificial
  Probe
tttgtgtgataactgccaaaaccgt

SEQ ID NO: 8635 - DNA, 25 bp, Artificial
  Probe
tctaagactaagcaaaataaatgca

SEQ ID NO: 8636 - DNA, 25 bp, Artificial
  Probe
ttctaagactaagcaaaataaatgc

SEQ ID NO: 8637 - DNA, 25 bp, Artificial
  Probe
ttttaaagacattaggacattttgt

SEQ ID NO: 8638 - DNA, 25 bp, Artificial
  Probe
cattttgtgtgataactgccaaaac

SEQ ID NO: 8639 - DNA, 25 bp, Artificial
  Probe
acattttgtgtgataactgccaaaa

SEQ ID NO: 8640 - DNA, 25 bp, Artificial
  Probe
attttgtgtgataactgccaaaacc

SEQ ID NO: 8641 - DNA, 25 bp, Artificial
  Probe
cgtattttctaagactaagcaaaat

SEQ ID NO: 8642 - DNA, 25 bp, Artificial
  Probe
ttttgtgtgataactgccaaaaccg

SEQ ID NO: 8643 - DNA, 25 bp, Artificial
  Probe
ctaagactaagcaaaataaatgcat

SEQ ID NO: 8644 - DNA, 25 bp, Artificial
  Probe
acccaagtgtatcccatattaagtg

SEQ ID NO: 8645 - DNA, 25 bp, Artificial
  Probe
ccaagtgtatcccatattaagtgcc

SEQ ID NO: 8646 - DNA, 25 bp, Artificial
  Probe
cccaagtgtatcccatattaagtgc

SEQ ID NO: 8647 - DNA, 25 bp, Artificial
  Probe
tacccaagtgtatcccatattaagt

SEQ ID NO: 8648 - DNA, 25 bp, Artificial
  Probe
caagtgtatcccatattaagtgccg

SEQ ID NO: 8649 - DNA, 25 bp, Artificial
  Probe
aagtgtatcccatattaagtgccgt

SEQ ID NO: 8650 - DNA, 25 bp, Artificial
  Probe
ccctatacccaagtgtatcccatat

SEQ ID NO: 8651 - DNA, 25 bp, Artificial
  Probe
cctatacccaagtgtatcccatatt

SEQ ID NO: 8652 - DNA, 25 bp, Artificial
  Probe
atacccaagtgtatcccatattaag

SEQ ID NO: 8653 - DNA, 25 bp, Artificial
  Probe
gccctatacccaagtgtatcccata

SEQ ID NO: 8654 - DNA, 25 bp, Artificial
  Probe
ctatacccaagtgtatcccatatta

SEQ ID NO: 8655 - DNA, 25 bp, Artificial
  Probe
tatacccaagtgtatcccatattaa

SEQ ID NO: 8656 - DNA, 25 bp, Artificial
  Probe
gttcgccctatacccaagtgtatcc

SEQ ID NO: 8657 - DNA, 25 bp, Artificial
  Probe
ggttcgccctatacccaagtgtatc

SEQ ID NO: 8658 - DNA, 25 bp, Artificial
  Probe
ggaaagatagggtcaagtaaagagt

SEQ ID NO: 8659 - DNA, 25 bp, Artificial
  Probe
gggaaagatagggtcaagtaaagag

SEQ ID NO: 8660 - DNA, 25 bp, Artificial
  Probe
ctaaagtgggaaagatagggtcaag

SEQ ID NO: 8661 - DNA, 25 bp, Artificial
  Probe
tgggaaagatagggtcaagtaaaga

SEQ ID NO: 8662 - DNA, 25 bp, Artificial
  Probe
gtgggaaagatagggtcaagtaaag

SEQ ID NO: 8663 - DNA, 25 bp, Artificial
  Probe
agtgggaaagatagggtcaagtaaa

SEQ ID NO: 8664 - DNA, 25 bp, Artificial
  Probe
aagtgggaaagatagggtcaagtaa

SEQ ID NO: 8665 - DNA, 25 bp, Artificial
  Probe
aaagtgggaaagatagggtcaagta

SEQ ID NO: 8666 - DNA, 25 bp, Artificial
  Probe
taaagtgggaaagatagggtcaagt

SEQ ID NO: 8667 - DNA, 25 bp, Artificial
  Probe
gaaagatagggtcaagtaaagagta

SEQ ID NO: 8668 - DNA, 25 bp, Artificial
  Probe
aaagatagggtcaagtaaagagtaa

SEQ ID NO: 8669 - DNA, 25 bp, Artificial
  Probe
aagatagggtcaagtaaagagtaat

SEQ ID NO: 8670 - DNA, 25 bp, Artificial
  Probe
ccctggtgttagctatttatggtta

SEQ ID NO: 8671 - DNA, 25 bp, Artificial
  Probe
cctggtgttagctatttatggttac

SEQ ID NO: 8672 - DNA, 25 bp, Artificial
  Probe
cctaaagtgggaaagatagggtcaa

SEQ ID NO: 8673 - DNA, 25 bp, Artificial
  Probe
atgttgaatgatgcctggtggtctc

SEQ ID NO: 8674 - DNA, 25 bp, Artificial
  Probe
cacatgcagtttgtacatttactca

SEQ ID NO: 8675 - DNA, 25 bp, Artificial
  Probe
tcacatgcagtttgtacatttactc

SEQ ID NO: 8676 - DNA, 25 bp, Artificial
  Probe
acctaaagtgggaaagatagggtca

SEQ ID NO: 8677 - DNA, 25 bp, Artificial
  Probe
ttccttgatgagctggaagatgaag

SEQ ID NO: 8678 - DNA, 25 bp, Artificial
  Probe
gccctggtgttagctatttatggtt

SEQ ID NO: 8679 - DNA, 25 bp, Artificial
  Probe
ttgatgagctggaagatgaagccaa

SEQ ID NO: 8680 - DNA, 25 bp, Artificial
  Probe
tccttgatgagctggaagatgaagc

SEQ ID NO: 8681 - DNA, 25 bp, Artificial
  Probe
gtacatgttgaatgatgcctggtgg

SEQ ID NO: 8682 - DNA, 25 bp, Artificial
  Probe
gatgagctggaagatgaagccaaag

SEQ ID NO: 8683 - DNA, 25 bp, Artificial
  Probe
cttgatgagctggaagatgaagcca

SEQ ID NO: 8684 - DNA, 25 bp, Artificial
  Probe
tacatgttgaatgatgcctggtggt

SEQ ID NO: 8685 - DNA, 25 bp, Artificial
  Probe
cgtacatgttgaatgatgcctggtg

SEQ ID NO: 8686 - DNA, 25 bp, Artificial
  Probe
tgatgagctggaagatgaagccaaa

SEQ ID NO: 8687 - DNA, 25 bp, Artificial
  Probe
tacaactagcccagtggcagaaaac

SEQ ID NO: 8688 - DNA, 25 bp, Artificial
  Probe
gtacaactagcccagtggcagaaaa

SEQ ID NO: 8689 - DNA, 25 bp, Artificial
  Probe
tttagtctatgcaaatagcgagtca

SEQ ID NO: 8690 - DNA, 25 bp, Artificial
  Probe
ctttagtctatgcaaatagcgagtc

SEQ ID NO: 8691 - DNA, 25 bp, Artificial
  Probe
tctttagtctatgcaaatagcgagt

SEQ ID NO: 8692 - DNA, 25 bp, Artificial
  Probe
gtctttagtctatgcaaatagcgag

SEQ ID NO: 8693 - DNA, 25 bp, Artificial
  Probe
tgtctttagtctatgcaaatagcga

SEQ ID NO: 8694 - DNA, 25 bp, Artificial
  Probe
ctgtctttagtctatgcaaatagcg

SEQ ID NO: 8695 - DNA, 25 bp, Artificial
  Probe
ttagtctatgcaaatagcgagtcac

SEQ ID NO: 8696 - DNA, 25 bp, Artificial
  Probe
actgtctttagtctatgcaaatagc

SEQ ID NO: 8697 - DNA, 25 bp, Artificial
  Probe
tagtctatgcaaatagcgagtcact

SEQ ID NO: 8698 - DNA, 25 bp, Artificial
  Probe
gtgtagcaaaactgtctttagtcta

SEQ ID NO: 8699 - DNA, 25 bp, Artificial
  Probe
cgtgtagcaaaactgtctttagtct

SEQ ID NO: 8700 - DNA, 25 bp, Artificial
  Probe
tctatgcaaatagcgagtcactgag

SEQ ID NO: 8701 - DNA, 25 bp, Artificial
  Probe
ctatgcaaatagcgagtcactgagt

SEQ ID NO: 8702 - DNA, 25 bp, Artificial
  Probe
gtctatgcaaatagcgagtcactga

SEQ ID NO: 8703 - DNA, 25 bp, Artificial
  Probe
agtctatgcaaatagcgagtcactg

SEQ ID NO: 8704 - DNA, 25 bp, Artificial
  Probe
tgtagcaaaactgtctttagtctat

SEQ ID NO: 8705 - DNA, 25 bp, Artificial
  Probe
gtagcaaaactgtctttagtctatg

SEQ ID NO: 8706 - DNA, 25 bp, Artificial
  Probe
tatgcaaatagcgagtcactgagtg

SEQ ID NO: 8707 - DNA, 25 bp, Artificial
  Probe
aactgtctttagtctatgcaaatag

SEQ ID NO: 8708 - DNA, 25 bp, Artificial
  Probe
aaactgtctttagtctatgcaaata

SEQ ID NO: 8709 - DNA, 25 bp, Artificial
  Probe
caaaactgtctttagtctatgcaaa

SEQ ID NO: 8710 - DNA, 25 bp, Artificial
  Probe
tagcaaaactgtctttagtctatgc

SEQ ID NO: 8711 - DNA, 25 bp, Artificial
  Probe
aaaactgtctttagtctatgcaaat

SEQ ID NO: 8712 - DNA, 25 bp, Artificial
  Probe
gcaaaactgtctttagtctatgcaa

SEQ ID NO: 8713 - DNA, 25 bp, Artificial
  Probe
agcaaaactgtctttagtctatgca

SEQ ID NO: 8714 - DNA, 25 bp, Artificial
  Probe
atgcaaatagcgagtcactgagtgt

SEQ ID NO: 8715 - DNA, 25 bp, Artificial
  Probe
gcaaatagcgagtcactgagtgtga

SEQ ID NO: 8716 - DNA, 25 bp, Artificial
  Probe
ttcaggtatcaaggttacattggtg

SEQ ID NO: 8717 - DNA, 25 bp, Artificial
  Probe
tcaggtatcaaggttacattggtgc

SEQ ID NO: 8718 - DNA, 25 bp, Artificial
  Probe
aggtatcaaggttacattggtgcag

SEQ ID NO: 8719 - DNA, 25 bp, Artificial
  Probe
caggtatcaaggttacattggtgca

SEQ ID NO: 8720 - DNA, 25 bp, Artificial
  Probe
gtatcaaggttacattggtgcagcc

SEQ ID NO: 8721 - DNA, 25 bp, Artificial
  Probe
ggtatcaaggttacattggtgcagc

SEQ ID NO: 8722 - DNA, 25 bp, Artificial
  Probe
ggaccaaactcccagatgactcttg

SEQ ID NO: 8723 - DNA, 25 bp, Artificial
  Probe
tggaccaaactcccagatgactctt

SEQ ID NO: 8724 - DNA, 25 bp, Artificial
  Probe
acatcactaagattggtttaccctt

SEQ ID NO: 8725 - DNA, 25 bp, Artificial
  Probe
aacatcactaagattggtttaccct

SEQ ID NO: 8726 - DNA, 25 bp, Artificial
  Probe
gaacatcactaagattggtttaccc

SEQ ID NO: 8727 - DNA, 25 bp, Artificial
  Probe
agaacatcactaagattggtttacc

SEQ ID NO: 8728 - DNA, 25 bp, Artificial
  Probe
tgtagaacatcactaagattggttt

SEQ ID NO: 8729 - DNA, 25 bp, Artificial
  Probe
gaagctcagagttaaaggatttgac

SEQ ID NO: 8730 - DNA, 25 bp, Artificial
  Probe
atgtagaacatcactaagattggtt

SEQ ID NO: 8731 - DNA, 25 bp, Artificial
  Probe
aatgtagaacatcactaagattggt

SEQ ID NO: 8732 - DNA, 25 bp, Artificial
  Probe
aagctcagagttaaaggatttgacg

SEQ ID NO: 8733 - DNA, 25 bp, Artificial
  Probe
aagtaaaacatcggcaaaatgagag

SEQ ID NO: 8734 - DNA, 25 bp, Artificial
  Probe
gaagtaaaacatcggcaaaatgaga

SEQ ID NO: 8735 - DNA, 25 bp, Artificial
  Probe
tagaacatcactaagattggtttac

SEQ ID NO: 8736 - DNA, 25 bp, Artificial
  Probe
gtagaacatcactaagattggttta

SEQ ID NO: 8737 - DNA, 25 bp, Artificial
  Probe
ggaagtaaaacatcggcaaaatgag

SEQ ID NO: 8738 - DNA, 25 bp, Artificial
  Probe
ttggaagtaaaacatcggcaaaatg

SEQ ID NO: 8739 - DNA, 25 bp, Artificial
  Probe
aaatgagagctacttggcattattt

SEQ ID NO: 8740 - DNA, 25 bp, Artificial
  Probe
tggaagtaaaacatcggcaaaatga

SEQ ID NO: 8741 - DNA, 25 bp, Artificial
  Probe
agtaaaacatcggcaaaatgagagc

SEQ ID NO: 8742 - DNA, 25 bp, Artificial
  Probe
atgagagctacttggcattattttg

SEQ ID NO: 8743 - DNA, 25 bp, Artificial
  Probe
gagagctacttggcattattttggt

SEQ ID NO: 8744 - DNA, 25 bp, Artificial
  Probe
tgagagctacttggcattattttgg

SEQ ID NO: 8745 - DNA, 25 bp, Artificial
  Probe
taaaacatcggcaaaatgagagcta

SEQ ID NO: 8746 - DNA, 25 bp, Artificial
  Probe
aacgggctactcacaaaggttactc

SEQ ID NO: 8747 - DNA, 25 bp, Artificial
  Probe
gaacgggctactcacaaaggttact

SEQ ID NO: 8748 - DNA, 25 bp, Artificial
  Probe
aaatgtagaacatcactaagattgg

SEQ ID NO: 8749 - DNA, 25 bp, Artificial
  Probe
ctgaacgggctactcacaaaggtta

SEQ ID NO: 8750 - DNA, 25 bp, Artificial
  Probe
atcaactgaacgggctactcacaaa

SEQ ID NO: 8751 - DNA, 25 bp, Artificial
  Probe
aatcaactgaacgggctactcacaa

SEQ ID NO: 8752 - DNA, 25 bp, Artificial
  Probe
aaatcaactgaacgggctactcaca

SEQ ID NO: 8753 - DNA, 25 bp, Artificial
  Probe
aaaacatcggcaaaatgagagctac

SEQ ID NO: 8754 - DNA, 25 bp, Artificial
  Probe
gtaaaacatcggcaaaatgagagct

SEQ ID NO: 8755 - DNA, 25 bp, Artificial
  Probe
caaaatgagagctacttggcattat

SEQ ID NO: 8756 - DNA, 25 bp, Artificial
  Probe
tgaacgggctactcacaaaggttac

SEQ ID NO: 8757 - DNA, 25 bp, Artificial
  Probe
aatgagagctacttggcattatttt

SEQ ID NO: 8758 - DNA, 25 bp, Artificial
  Probe
aaaatgagagctacttggcattatt

SEQ ID NO: 8759 - DNA, 25 bp, Artificial
  Probe
cgggctactcacaaaggttactcac

SEQ ID NO: 8760 - DNA, 25 bp, Artificial
  Probe
tcaactgaacgggctactcacaaag

SEQ ID NO: 8761 - DNA, 25 bp, Artificial
  Probe
aacatcggcaaaatgagagctactt

SEQ ID NO: 8762 - DNA, 25 bp, Artificial
  Probe
aaacatcggcaaaatgagagctact

SEQ ID NO: 8763 - DNA, 25 bp, Artificial
  Probe
gcaaaatgagagctacttggcatta

SEQ ID NO: 8764 - DNA, 25 bp, Artificial
  Probe
gatacctctgtggtcaagagcactg

SEQ ID NO: 8765 - DNA, 25 bp, Artificial
  Probe
agatacctctgtggtcaagagcact

SEQ ID NO: 8766 - DNA, 25 bp, Artificial
  Probe
acatcggcaaaatgagagctacttg

SEQ ID NO: 8767 - DNA, 25 bp, Artificial
  Probe
catcggcaaaatgagagctacttgg

SEQ ID NO: 8768 - DNA, 25 bp, Artificial
  Probe
ggcaaaatgagagctacttggcatt

SEQ ID NO: 8769 - DNA, 25 bp, Artificial
  Probe
aaaatgtagaacatcactaagattg

SEQ ID NO: 8770 - DNA, 25 bp, Artificial
  Probe
ttcataacaattaggctggagcaag

SEQ ID NO: 8771 - DNA, 25 bp, Artificial
  Probe
ataacaattaggctggagcaaggaa

SEQ ID NO: 8772 - DNA, 25 bp, Artificial
  Probe
taacaattaggctggagcaaggaag

SEQ ID NO: 8773 - DNA, 25 bp, Artificial
  Probe
cataacaattaggctggagcaagga

SEQ ID NO: 8774 - DNA, 25 bp, Artificial
  Probe
tcataacaattaggctggagcaagg

SEQ ID NO: 8775 - DNA, 25 bp, Artificial
  Probe
tttcataacaattaggctggagcaa

SEQ ID NO: 8776 - DNA, 25 bp, Artificial
  Probe
attttcataacaattaggctggagc

SEQ ID NO: 8777 - DNA, 25 bp, Artificial
  Probe
ttttcataacaattaggctggagca

SEQ ID NO: 8778 - DNA, 25 bp, Artificial
  Probe
aacaattaggctggagcaaggaagg

SEQ ID NO: 8779 - DNA, 25 bp, Artificial
  Probe
tattttcataacaattaggctggag

SEQ ID NO: 8780 - DNA, 25 bp, Artificial
  Probe
cactgtatggtacgaggcgtttatt

SEQ ID NO: 8781 - DNA, 25 bp, Artificial
  Probe
atattttcataacaattaggctgga

SEQ ID NO: 8782 - DNA, 25 bp, Artificial
  Probe
acactgtatggtacgaggcgtttat

SEQ ID NO: 8783 - DNA, 25 bp, Artificial
  Probe
gatcctgtctcttttgactaatatt

SEQ ID NO: 8784 - DNA, 25 bp, Artificial
  Probe
aatattttcataacaattaggctgg

SEQ ID NO: 8785 - DNA, 25 bp, Artificial
  Probe
cacactgtatggtacgaggcgttta

SEQ ID NO: 8786 - DNA, 25 bp, Artificial
  Probe
gaattcatgagcactttaaaatctg

SEQ ID NO: 8787 - DNA, 25 bp, Artificial
  Probe
tcctgtctcttttgactaatatttt

SEQ ID NO: 8788 - DNA, 25 bp, Artificial
  Probe
aattcatgagcactttaaaatctga

SEQ ID NO: 8789 - DNA, 25 bp, Artificial
  Probe
tgagaattcatgagcactttaaaat

SEQ ID NO: 8790 - DNA, 25 bp, Artificial
  Probe
tttcttcatgcatcatggtaaagca

SEQ ID NO: 8791 - DNA, 25 bp, Artificial
  Probe
gagaattcatgagcactttaaaatc

SEQ ID NO: 8792 - DNA, 25 bp, Artificial
  Probe
cctgtctcttttgactaatattttc

SEQ ID NO: 8793 - DNA, 25 bp, Artificial
  Probe
agaattcatgagcactttaaaatct

SEQ ID NO: 8794 - DNA, 25 bp, Artificial
  Probe
atcctgtctcttttgactaatattt

SEQ ID NO: 8795 - DNA, 25 bp, Artificial
  Probe
ctggatcctgtctcttttgactaat

SEQ ID NO: 8796 - DNA, 25 bp, Artificial
  Probe
tggatcctgtctcttttgactaata

SEQ ID NO: 8797 - DNA, 25 bp, Artificial
  Probe
agctgtattaaaatgaatttgtact

SEQ ID NO: 8798 - DNA, 25 bp, Artificial
  Probe
ctgtctcttttgactaatattttca

SEQ ID NO: 8799 - DNA, 25 bp, Artificial
  Probe
ggatcctgtctcttttgactaatat

SEQ ID NO: 8800 - DNA, 25 bp, Artificial
  Probe
gctggatcctgtctcttttgactaa

SEQ ID NO: 8801 - DNA, 25 bp, Artificial
  Probe
cttcatgcatcatggtaaagcattg

SEQ ID NO: 8802 - DNA, 25 bp, Artificial
  Probe
tcttcatgcatcatggtaaagcatt

SEQ ID NO: 8803 - DNA, 25 bp, Artificial
  Probe
ttcttcatgcatcatggtaaagcat

SEQ ID NO: 8804 - DNA, 25 bp, Artificial
  Probe
ttcatgagcactttaaaatctgaat

SEQ ID NO: 8805 - DNA, 25 bp, Artificial
  Probe
attcatgagcactttaaaatctgaa

SEQ ID NO: 8806 - DNA, 25 bp, Artificial
  Probe
ttttcttcatgcatcatggtaaagc

SEQ ID NO: 8807 - DNA, 25 bp, Artificial
  Probe
tgctggatcctgtctcttttgacta

SEQ ID NO: 8808 - DNA, 25 bp, Artificial
  Probe
gtgctggatcctgtctcttttgact

SEQ ID NO: 8809 - DNA, 25 bp, Artificial
  Probe
tgtgctggatcctgtctcttttgac

SEQ ID NO: 8810 - DNA, 25 bp, Artificial
  Probe
agggtcaggaaaatgttgagattct

SEQ ID NO: 8811 - DNA, 25 bp, Artificial
  Probe
gggtcaggaaaatgttgagattctc

SEQ ID NO: 8812 - DNA, 25 bp, Artificial
  Probe
caggaaaatgttgagattctcccat

SEQ ID NO: 8813 - DNA, 25 bp, Artificial
  Probe
aatttcgatggcgatgactttgatg

SEQ ID NO: 8814 - DNA, 25 bp, Artificial
  Probe
caatttcgatggcgatgactttgat

SEQ ID NO: 8815 - DNA, 25 bp, Artificial
  Probe
gtcaggaaaatgttgagattctccc

SEQ ID NO: 8816 - DNA, 25 bp, Artificial
  Probe
ggtcaggaaaatgttgagattctcc

SEQ ID NO: 8817 - DNA, 25 bp, Artificial
  Probe
tcaggaaaatgttgagattctccca

SEQ ID NO: 8818 - DNA, 25 bp, Artificial
  Probe
atttcgatggcgatgactttgatga

SEQ ID NO: 8819 - DNA, 25 bp, Artificial
  Probe
cttgacgacttggaaaatgctgagg

SEQ ID NO: 8820 - DNA, 25 bp, Artificial
  Probe
tttcgatggcgatgactttgatgac

SEQ ID NO: 8821 - DNA, 25 bp, Artificial
  Probe
gatgactttgatgacgtggaggagg

SEQ ID NO: 8822 - DNA, 25 bp, Artificial
  Probe
gaagggcttgacgacttggaaaatg

SEQ ID NO: 8823 - DNA, 25 bp, Artificial
  Probe
ttgacgacttggaaaatgctgagga

SEQ ID NO: 8824 - DNA, 25 bp, Artificial
  Probe
gcttgacgacttggaaaatgctgag

SEQ ID NO: 8825 - DNA, 25 bp, Artificial
  Probe
tgacgacttggaaaatgctgaggag

SEQ ID NO: 8826 - DNA, 25 bp, Artificial
  Probe
ccctcttcacatatttagttcctgt

SEQ ID NO: 8827 - DNA, 25 bp, Artificial
  Probe
aaacatttcccatcctcagaaccta

SEQ ID NO: 8828 - DNA, 25 bp, Artificial
  Probe
aacatttcccatcctcagaacctac

SEQ ID NO: 8829 - DNA, 25 bp, Artificial
  Probe
tttgtagggagagggatagtgtcaa

SEQ ID NO: 8830 - DNA, 25 bp, Artificial
  Probe
cctcttcacatatttagttcctgta

SEQ ID NO: 8831 - DNA, 25 bp, Artificial
  Probe
ctacccaaacatttcccatcctcag

SEQ ID NO: 8832 - DNA, 25 bp, Artificial
  Probe
acatttcccatcctcagaacctact

SEQ ID NO: 8833 - DNA, 25 bp, Artificial
  Probe
caaacatttcccatcctcagaacct

SEQ ID NO: 8834 - DNA, 25 bp, Artificial
  Probe
tacccaaacatttcccatcctcaga

SEQ ID NO: 8835 - DNA, 25 bp, Artificial
  Probe
catttcccatcctcagaacctactg

SEQ ID NO: 8836 - DNA, 25 bp, Artificial
  Probe
ccatcctcagaacctactgtcttct

SEQ ID NO: 8837 - DNA, 25 bp, Artificial
  Probe
cccctcttcacatatttagttcctg

SEQ ID NO: 8838 - DNA, 25 bp, Artificial
  Probe
atttcccatcctcagaacctactgt

SEQ ID NO: 8839 - DNA, 25 bp, Artificial
  Probe
gagaggttggataatgtgcctgttt

SEQ ID NO: 8840 - DNA, 25 bp, Artificial
  Probe
ccaaacatttcccatcctcagaacc

SEQ ID NO: 8841 - DNA, 25 bp, Artificial
  Probe
cccaaacatttcccatcctcagaac

SEQ ID NO: 8842 - DNA, 25 bp, Artificial
  Probe
tttcccatcctcagaacctactgtc

SEQ ID NO: 8843 - DNA, 25 bp, Artificial
  Probe
ttttgtagggagagggatagtgtca

SEQ ID NO: 8844 - DNA, 25 bp, Artificial
  Probe
acccaaacatttcccatcctcagaa

SEQ ID NO: 8845 - DNA, 25 bp, Artificial
  Probe
ggagaggttggataatgtgcctgtt

SEQ ID NO: 8846 - DNA, 25 bp, Artificial
  Probe
cccatcctcagaacctactgtcttc

SEQ ID NO: 8847 - DNA, 25 bp, Artificial
  Probe
tcccatcctcagaacctactgtctt

SEQ ID NO: 8848 - DNA, 25 bp, Artificial
  Probe
ttcccatcctcagaacctactgtct

SEQ ID NO: 8849 - DNA, 25 bp, Artificial
  Probe
gctacccaaacatttcccatcctca

SEQ ID NO: 8850 - DNA, 25 bp, Artificial
  Probe
tacctccaaaatccccttttcgttc

SEQ ID NO: 8851 - DNA, 25 bp, Artificial
  Probe
tctggctacccaaacatttcccatc

SEQ ID NO: 8852 - DNA, 25 bp, Artificial
  Probe
ctctggctacccaaacatttcccat

SEQ ID NO: 8853 - DNA, 25 bp, Artificial
  Probe
tgctctctggctacccaaacatttc

SEQ ID NO: 8854 - DNA, 25 bp, Artificial
  Probe
ctctctggctacccaaacatttccc

SEQ ID NO: 8855 - DNA, 25 bp, Artificial
  Probe
aagttatatttgaagtagtcctggc

SEQ ID NO: 8856 - DNA, 25 bp, Artificial
  Probe
atatgtcttccctgctgtgttagaa

SEQ ID NO: 8857 - DNA, 25 bp, Artificial
  Probe
tatgtcttccctgctgtgttagaaa

SEQ ID NO: 8858 - DNA, 25 bp, Artificial
  Probe
catcataaatgctaatcaacctgtt

SEQ ID NO: 8859 - DNA, 25 bp, Artificial
  Probe
aaatgctaatcaacctgttaagttt

SEQ ID NO: 8860 - DNA, 25 bp, Artificial
  Probe
attgtgagtgtttaattagcgattt

SEQ ID NO: 8861 - DNA, 25 bp, Artificial
  Probe
gaagttatatttgaagtagtcctgg

SEQ ID NO: 8862 - DNA, 25 bp, Artificial
  Probe
taaatgctaatcaacctgttaagtt

SEQ ID NO: 8863 - DNA, 25 bp, Artificial
  Probe
ataaatgctaatcaacctgttaagt

SEQ ID NO: 8864 - DNA, 25 bp, Artificial
  Probe
tcataaatgctaatcaacctgttaa

SEQ ID NO: 8865 - DNA, 25 bp, Artificial
  Probe
tttattgtgagtgtttaattagcga

SEQ ID NO: 8866 - DNA, 25 bp, Artificial
  Probe
cataaatgctaatcaacctgttaag

SEQ ID NO: 8867 - DNA, 25 bp, Artificial
  Probe
tggaatagatttattgtgagtgttt

SEQ ID NO: 8868 - DNA, 25 bp, Artificial
  Probe
ttggaatagatttattgtgagtgtt

SEQ ID NO: 8869 - DNA, 25 bp, Artificial
  Probe
tttggaatagatttattgtgagtgt

SEQ ID NO: 8870 - DNA, 25 bp, Artificial
  Probe
tattgtgagtgtttaattagcgatt

SEQ ID NO: 8871 - DNA, 25 bp, Artificial
  Probe
ttattgtgagtgtttaattagcgat

SEQ ID NO: 8872 - DNA, 25 bp, Artificial
  Probe
atcataaatgctaatcaacctgtta

SEQ ID NO: 8873 - DNA, 25 bp, Artificial
  Probe
agttatatttgaagtagtcctggcc

SEQ ID NO: 8874 - DNA, 25 bp, Artificial
  Probe
aaatatcatccaaaaggctttctgc

SEQ ID NO: 8875 - DNA, 25 bp, Artificial
  Probe
tatatttgaagtagtcctggcccta

SEQ ID NO: 8876 - DNA, 25 bp, Artificial
  Probe
ttatatttgaagtagtcctggccct

SEQ ID NO: 8877 - DNA, 25 bp, Artificial
  Probe
gttatatttgaagtagtcctggccc

SEQ ID NO: 8878 - DNA, 25 bp, Artificial
  Probe
acagaagttatatttgaagtagtcc

SEQ ID NO: 8879 - DNA, 25 bp, Artificial
  Probe
ttcttactgcatgttacattgaaat

SEQ ID NO: 8880 - DNA, 25 bp, Artificial
  Probe
atatttgaagtagtcctggccctag

SEQ ID NO: 8881 - DNA, 25 bp, Artificial
  Probe
agaagttatatttgaagtagtcctg

SEQ ID NO: 8882 - DNA, 25 bp, Artificial
  Probe
cagaagttatatttgaagtagtcct

SEQ ID NO: 8883 - DNA, 25 bp, Artificial
  Probe
atttattgtgagtgtttaattagcg

SEQ ID NO: 8884 - DNA, 25 bp, Artificial
  Probe
gtgagtgtttaattagcgattttcc

SEQ ID NO: 8885 - DNA, 25 bp, Artificial
  Probe
tgagtgtttaattagcgattttcct

SEQ ID NO: 8886 - DNA, 25 bp, Artificial
  Probe
tgtgagtgtttaattagcgattttc

SEQ ID NO: 8887 - DNA, 25 bp, Artificial
  Probe
atgtcttccctgctgtgttagaaaa

SEQ ID NO: 8888 - DNA, 25 bp, Artificial
  Probe
aatgctaatcaacctgttaagtttt

SEQ ID NO: 8889 - DNA, 25 bp, Artificial
  Probe
gagtgtttaattagcgattttcctt

SEQ ID NO: 8890 - DNA, 25 bp, Artificial
  Probe
tcttactgcatgttacattgaaata

SEQ ID NO: 8891 - DNA, 25 bp, Artificial
  Probe
taaatatcatccaaaaggctttctg

SEQ ID NO: 8892 - DNA, 25 bp, Artificial
  Probe
tatttgaagtagtcctggccctagt

SEQ ID NO: 8893 - DNA, 25 bp, Artificial
  Probe
ttgtgagtgtttaattagcgatttt

SEQ ID NO: 8894 - DNA, 25 bp, Artificial
  Probe
tttcttactgcatgttacattgaaa

SEQ ID NO: 8895 - DNA, 25 bp, Artificial
  Probe
atttgaagtagtcctggccctagtt

SEQ ID NO: 8896 - DNA, 25 bp, Artificial
  Probe
cttactgcatgttacattgaaataa

SEQ ID NO: 8897 - DNA, 25 bp, Artificial
  Probe
ataaatatcatccaaaaggctttct

SEQ ID NO: 8898 - DNA, 25 bp, Artificial
  Probe
agtgtttaattagcgattttcctta

SEQ ID NO: 8899 - DNA, 25 bp, Artificial
  Probe
ttttcttactgcatgttacattgaa

SEQ ID NO: 8900 - DNA, 25 bp, Artificial
  Probe
atgtcattgaactacttgagagtct

SEQ ID NO: 8901 - DNA, 25 bp, Artificial
  Probe
tgtcattgaactacttgagagtcta

SEQ ID NO: 8902 - DNA, 25 bp, Artificial
  Probe
gtcattgaactacttgagagtctaa

SEQ ID NO: 8903 - DNA, 25 bp, Artificial
  Probe
tcattgaactacttgagagtctaat

SEQ ID NO: 8904 - DNA, 25 bp, Artificial
  Probe
ctacttgagagtctaatttgcttgt

SEQ ID NO: 8905 - DNA, 25 bp, Artificial
  Probe
actacttgagagtctaatttgcttg

SEQ ID NO: 8906 - DNA, 25 bp, Artificial
  Probe
tgaactacttgagagtctaatttgc

SEQ ID NO: 8907 - DNA, 25 bp, Artificial
  Probe
gaactacttgagagtctaatttgct

SEQ ID NO: 8908 - DNA, 25 bp, Artificial
  Probe
tacttgagagtctaatttgcttgtt

SEQ ID NO: 8909 - DNA, 25 bp, Artificial
  Probe
aactacttgagagtctaatttgctt

SEQ ID NO: 8910 - DNA, 25 bp, Artificial
  Probe
cattgaactacttgagagtctaatt

SEQ ID NO: 8911 - DNA, 25 bp, Artificial
  Probe
ttgaactacttgagagtctaatttg

SEQ ID NO: 8912 - DNA, 25 bp, Artificial
  Probe
attgaactacttgagagtctaattt

SEQ ID NO: 8913 - DNA, 25 bp, Artificial
  Probe
gaaggagtcatcgagtgctcttttg

SEQ ID NO: 8914 - DNA, 25 bp, Artificial
  Probe
aaggagtcatcgagtgctcttttgt

SEQ ID NO: 8915 - DNA, 25 bp, Artificial
  Probe
ggaaggagtcatcgagtgctctttt

SEQ ID NO: 8916 - DNA, 25 bp, Artificial
  Probe
ttagattgacgagcaacttggatgt

SEQ ID NO: 8917 - DNA, 25 bp, Artificial
  Probe
tttagattgacgagcaacttggatg

SEQ ID NO: 8918 - DNA, 25 bp, Artificial
  Probe
tgcctagagtggactatcaagtgag

SEQ ID NO: 8919 - DNA, 25 bp, Artificial
  Probe
atgtaatgtagacctagcccatcca

SEQ ID NO: 8920 - DNA, 25 bp, Artificial
  Probe
catgtaatgtagacctagcccatcc

SEQ ID NO: 8921 - DNA, 25 bp, Artificial
  Probe
gtagcatgtaatgtagacctagccc

SEQ ID NO: 8922 - DNA, 25 bp, Artificial
  Probe
tagcatgtaatgtagacctagccca

SEQ ID NO: 8923 - DNA, 25 bp, Artificial
  Probe
ttttctctctctctctctctctctc

SEQ ID NO: 8924 - DNA, 25 bp, Artificial
  Probe
gcatgtaatgtagacctagcccatc

SEQ ID NO: 8925 - DNA, 25 bp, Artificial
  Probe
gcctagagtggactatcaagtgagc

SEQ ID NO: 8926 - DNA, 25 bp, Artificial
  Probe
caatgagaaactaatgtgtttgaca

SEQ ID NO: 8927 - DNA, 25 bp, Artificial
  Probe
acaatgagaaactaatgtgtttgac

SEQ ID NO: 8928 - DNA, 25 bp, Artificial
  Probe
agcatgtaatgtagacctagcccat

SEQ ID NO: 8929 - DNA, 25 bp, Artificial
  Probe
ttttagattgacgagcaacttggat

SEQ ID NO: 8930 - DNA, 25 bp, Artificial
  Probe
cttttagattgacgagcaacttgga

SEQ ID NO: 8931 - DNA, 25 bp, Artificial
  Probe
tcttttagattgacgagcaacttgg

SEQ ID NO: 8932 - DNA, 25 bp, Artificial
  Probe
taacagtcttttagattgacgagca

SEQ ID NO: 8933 - DNA, 25 bp, Artificial
  Probe
ttaacagtcttttagattgacgagc

SEQ ID NO: 8934 - DNA, 25 bp, Artificial
  Probe
gtcttttagattgacgagcaacttg

SEQ ID NO: 8935 - DNA, 25 bp, Artificial
  Probe
agtcttttagattgacgagcaactt

SEQ ID NO: 8936 - DNA, 25 bp, Artificial
  Probe
aacagtcttttagattgacgagcaa

SEQ ID NO: 8937 - DNA, 25 bp, Artificial
  Probe
cagtcttttagattgacgagcaact

SEQ ID NO: 8938 - DNA, 25 bp, Artificial
  Probe
acagtcttttagattgacgagcaac

SEQ ID NO: 8939 - DNA, 25 bp, Artificial
  Probe
aatgagaaactaatgtgtttgacat

SEQ ID NO: 8940 - DNA, 25 bp, Artificial
  Probe
gtacaatgagaaactaatgtgtttg

SEQ ID NO: 8941 - DNA, 25 bp, Artificial
  Probe
tacaatgagaaactaatgtgtttga

SEQ ID NO: 8942 - DNA, 25 bp, Artificial
  Probe
gtttaacagtcttttagattgacga

SEQ ID NO: 8943 - DNA, 25 bp, Artificial
  Probe
agtttaacagtcttttagattgacg

SEQ ID NO: 8944 - DNA, 25 bp, Artificial
  Probe
caggtattccattatggatactggt

SEQ ID NO: 8945 - DNA, 25 bp, Artificial
  Probe
tccaggtattccattatggatactg

SEQ ID NO: 8946 - DNA, 25 bp, Artificial
  Probe
tttaacagtcttttagattgacgag

SEQ ID NO: 8947 - DNA, 25 bp, Artificial
  Probe
aggtattccattatggatactggtt

SEQ ID NO: 8948 - DNA, 25 bp, Artificial
  Probe
ttccaggtattccattatggatact

SEQ ID NO: 8949 - DNA, 25 bp, Artificial
  Probe
ccaggtattccattatggatactgg

SEQ ID NO: 8950 - DNA, 25 bp, Artificial
  Probe
tgagtttaacagtcttttagattga

SEQ ID NO: 8951 - DNA, 25 bp, Artificial
  Probe
ccattatggatactggttttgttaa

SEQ ID NO: 8952 - DNA, 25 bp, Artificial
  Probe
gagtttaacagtcttttagattgac

SEQ ID NO: 8953 - DNA, 25 bp, Artificial
  Probe
tgtacaatgagaaactaatgtgttt

SEQ ID NO: 8954 - DNA, 25 bp, Artificial
  Probe
cattatggatactggttttgttaat

SEQ ID NO: 8955 - DNA, 25 bp, Artificial
  Probe
ggtattccattatggatactggttt

SEQ ID NO: 8956 - DNA, 25 bp, Artificial
  Probe
tttccaggtattccattatggatac

SEQ ID NO: 8957 - DNA, 25 bp, Artificial
  Probe
ttccattatggatactggttttgtt

SEQ ID NO: 8958 - DNA, 25 bp, Artificial
  Probe
attccattatggatactggttttgt

SEQ ID NO: 8959 - DNA, 25 bp, Artificial
  Probe
tccattatggatactggttttgtta

SEQ ID NO: 8960 - DNA, 25 bp, Artificial
  Probe
ttttccaggtattccattatggata

SEQ ID NO: 8961 - DNA, 25 bp, Artificial
  Probe
ttcacggaatgttgttgtgttagcc

SEQ ID NO: 8962 - DNA, 25 bp, Artificial
  Probe
aaaataaaatctgacaatgccgtct

SEQ ID NO: 8963 - DNA, 25 bp, Artificial
  Probe
ccataagtacccaatgtattttagc

SEQ ID NO: 8964 - DNA, 25 bp, Artificial
  Probe
tttatataacgtctttagctcttcc

SEQ ID NO: 8965 - DNA, 25 bp, Artificial
  Probe
gaatgttgttgtgttagccggactg

SEQ ID NO: 8966 - DNA, 25 bp, Artificial
  Probe
ctgaaaacgcaggcttttgtaacat

SEQ ID NO: 8967 - DNA, 25 bp, Artificial
  Probe
cataagtacccaatgtattttagct

SEQ ID NO: 8968 - DNA, 25 bp, Artificial
  Probe
atgttgttgtgttagccggactgaa

SEQ ID NO: 8969 - DNA, 25 bp, Artificial
  Probe
aatgttgttgtgttagccggactga

SEQ ID NO: 8970 - DNA, 25 bp, Artificial
  Probe
gttagggtagatatatcagctatgt

SEQ ID NO: 8971 - DNA, 25 bp, Artificial
  Probe
tgttagggtagatatatcagctatg

SEQ ID NO: 8972 - DNA, 25 bp, Artificial
  Probe
tgaaaacgcaggcttttgtaacatg

SEQ ID NO: 8973 - DNA, 25 bp, Artificial
  Probe
gttgttgtgttagccggactgaaag

SEQ ID NO: 8974 - DNA, 25 bp, Artificial
  Probe
agggtagatatatcagctatgtaaa

SEQ ID NO: 8975 - DNA, 25 bp, Artificial
  Probe
tgttgttgtgttagccggactgaaa

SEQ ID NO: 8976 - DNA, 25 bp, Artificial
  Probe
agtacccaatgtattttagctattt

SEQ ID NO: 8977 - DNA, 25 bp, Artificial
  Probe
aagtacccaatgtattttagctatt

SEQ ID NO: 8978 - DNA, 25 bp, Artificial
  Probe
tagggtagatatatcagctatgtaa

SEQ ID NO: 8979 - DNA, 25 bp, Artificial
  Probe
ttagggtagatatatcagctatgta

SEQ ID NO: 8980 - DNA, 25 bp, Artificial
  Probe
gggtagatatatcagctatgtaaat

SEQ ID NO: 8981 - DNA, 25 bp, Artificial
  Probe
gaaaacgcaggcttttgtaacatgt

SEQ ID NO: 8982 - DNA, 25 bp, Artificial
  Probe
gtacccaatgtattttagctatttt

SEQ ID NO: 8983 - DNA, 25 bp, Artificial
  Probe
aaaacgcaggcttttgtaacatgtg

SEQ ID NO: 8984 - DNA, 25 bp, Artificial
  Probe
taagtacccaatgtattttagctat

SEQ ID NO: 8985 - DNA, 25 bp, Artificial
  Probe
ataagtacccaatgtattttagcta

SEQ ID NO: 8986 - DNA, 25 bp, Artificial
  Probe
cccaatgtattttagctattttagt

SEQ ID NO: 8987 - DNA, 25 bp, Artificial
  Probe
acccaatgtattttagctattttag

SEQ ID NO: 8988 - DNA, 25 bp, Artificial
  Probe
ttttatataacgtctttagctcttc

SEQ ID NO: 8989 - DNA, 25 bp, Artificial
  Probe
aaacgcaggcttttgtaacatgtgg

SEQ ID NO: 8990 - DNA, 25 bp, Artificial
  Probe
taaagcctttcacaacacagtaatc

SEQ ID NO: 8991 - DNA, 25 bp, Artificial
  Probe
aaagcctttcacaacacagtaatct

SEQ ID NO: 8992 - DNA, 25 bp, Artificial
  Probe
atggtaacattcggaggcatactga

SEQ ID NO: 8993 - DNA, 25 bp, Artificial
  Probe
catggtaacattcggaggcatactg

SEQ ID NO: 8994 - DNA, 25 bp, Artificial
  Probe
acccttttcacaacaaaatagtctc

SEQ ID NO: 8995 - DNA, 25 bp, Artificial
  Probe
cccttttcacaacaaaatagtctct

SEQ ID NO: 8996 - DNA, 25 bp, Artificial
  Probe
aacccttttcacaacaaaatagtct

SEQ ID NO: 8997 - DNA, 25 bp, Artificial
  Probe
aaacccttttcacaacaaaatagtc

SEQ ID NO: 8998 - DNA, 25 bp, Artificial
  Probe
taaacccttttcacaacaaaatagt

SEQ ID NO: 8999 - DNA, 25 bp, Artificial
  Probe
gaagaattcatacaggagcaaaacc

SEQ ID NO: 9000 - DNA, 25 bp, Artificial
  Probe
agaagaattcatacaggagcaaaac

SEQ ID NO: 9001 - DNA, 25 bp, Artificial
  Probe
ccttttcacaacaaaatagtctcta

SEQ ID NO: 9002 - DNA, 25 bp, Artificial
  Probe
aattcatacaggagcaaaacccgtc

SEQ ID NO: 9003 - DNA, 25 bp, Artificial
  Probe
aagaattcatacaggagcaaaaccc

SEQ ID NO: 9004 - DNA, 25 bp, Artificial
  Probe
gttaaacccttttcacaacaaaata

SEQ ID NO: 9005 - DNA, 25 bp, Artificial
  Probe
gtgttaaacccttttcacaacaaaa

SEQ ID NO: 9006 - DNA, 25 bp, Artificial
  Probe
ttaaacccttttcacaacaaaatag

SEQ ID NO: 9007 - DNA, 25 bp, Artificial
  Probe
cacaacaaaatagtctctagacaca

SEQ ID NO: 9008 - DNA, 25 bp, Artificial
  Probe
tcacaacaaaatagtctctagacac

SEQ ID NO: 9009 - DNA, 25 bp, Artificial
  Probe
tgttaaacccttttcacaacaaaat

SEQ ID NO: 9010 - DNA, 25 bp, Artificial
  Probe
attcatacaggagcaaaacccgtca

SEQ ID NO: 9011 - DNA, 25 bp, Artificial
  Probe
acaacaaaatagtctctagacacat

SEQ ID NO: 9012 - DNA, 25 bp, Artificial
  Probe
ttcacaacaaaatagtctctagaca

SEQ ID NO: 9013 - DNA, 25 bp, Artificial
  Probe
cttttcacaacaaaatagtctctag

SEQ ID NO: 9014 - DNA, 25 bp, Artificial
  Probe
tcatacaggagcaaaacccgtcaaa

SEQ ID NO: 9015 - DNA, 25 bp, Artificial
  Probe
ttcatacaggagcaaaacccgtcaa

SEQ ID NO: 9016 - DNA, 25 bp, Artificial
  Probe
agaattcatacaggagcaaaacccg

SEQ ID NO: 9017 - DNA, 25 bp, Artificial
  Probe
tttcacaacaaaatagtctctagac

SEQ ID NO: 9018 - DNA, 25 bp, Artificial
  Probe
gaattcatacaggagcaaaacccgt

SEQ ID NO: 9019 - DNA, 25 bp, Artificial
  Probe
aatagtctctagacacatagagttc

SEQ ID NO: 9020 - DNA, 25 bp, Artificial
  Probe
tgtgttaaacccttttcacaacaaa

SEQ ID NO: 9021 - DNA, 25 bp, Artificial
  Probe
atgtgttaaacccttttcacaacaa

SEQ ID NO: 9022 - DNA, 25 bp, Artificial
  Probe
aatgtgttaaacccttttcacaaca

SEQ ID NO: 9023 - DNA, 25 bp, Artificial
  Probe
tgaatgtgttaaacccttttcacaa

SEQ ID NO: 9024 - DNA, 25 bp, Artificial
  Probe
gaatgtgttaaacccttttcacaac

SEQ ID NO: 9025 - DNA, 25 bp, Artificial
  Probe
ccatggtaacattcggaggcatact

SEQ ID NO: 9026 - DNA, 25 bp, Artificial
  Probe
acaaaatagtctctagacacataga

SEQ ID NO: 9027 - DNA, 25 bp, Artificial
  Probe
caacaaaatagtctctagacacata

SEQ ID NO: 9028 - DNA, 25 bp, Artificial
  Probe
ttttcacaacaaaatagtctctaga

SEQ ID NO: 9029 - DNA, 25 bp, Artificial
  Probe
aacaaaatagtctctagacacatag

SEQ ID NO: 9030 - DNA, 25 bp, Artificial
  Probe
aaatagtctctagacacatagagtt

SEQ ID NO: 9031 - DNA, 25 bp, Artificial
  Probe
aaaatagtctctagacacatagagt

SEQ ID NO: 9032 - DNA, 25 bp, Artificial
  Probe
caaaatagtctctagacacatagag

SEQ ID NO: 9033 - DNA, 25 bp, Artificial
  Probe
cttgtgaagagattaacagttggct

SEQ ID NO: 9034 - DNA, 25 bp, Artificial
  Probe
tacttgtgaagagattaacagttgg

SEQ ID NO: 9035 - DNA, 25 bp, Artificial
  Probe
acttgtgaagagattaacagttggc

SEQ ID NO: 9036 - DNA, 25 bp, Artificial
  Probe
ctatggtagtttaagtctgtcggtt

SEQ ID NO: 9037 - DNA, 25 bp, Artificial
  Probe
tatggtagtttaagtctgtcggttt

SEQ ID NO: 9038 - DNA, 25 bp, Artificial
  Probe
ttctatggtagtttaagtctgtcgg

SEQ ID NO: 9039 - DNA, 25 bp, Artificial
  Probe
tctatggtagtttaagtctgtcggt

SEQ ID NO: 9040 - DNA, 25 bp, Artificial
  Probe
atggtagtttaagtctgtcggtttc

SEQ ID NO: 9041 - DNA, 25 bp, Artificial
  Probe
ggtagtttaagtctgtcggtttctt

SEQ ID NO: 9042 - DNA, 25 bp, Artificial
  Probe
tggtagtttaagtctgtcggtttct

SEQ ID NO: 9043 - DNA, 25 bp, Artificial
  Probe
tttctatggtagtttaagtctgtcg

SEQ ID NO: 9044 - DNA, 25 bp, Artificial
  Probe
ttacttgtgaagagattaacagttg

SEQ ID NO: 9045 - DNA, 25 bp, Artificial
  Probe
gtctgtcggtttcttacttgtgaag

SEQ ID NO: 9046 - DNA, 25 bp, Artificial
  Probe
agtttaagtctgtcggtttcttact

SEQ ID NO: 9047 - DNA, 25 bp, Artificial
  Probe
cttacttgtgaagagattaacagtt

SEQ ID NO: 9048 - DNA, 25 bp, Artificial
  Probe
tagtttaagtctgtcggtttcttac

SEQ ID NO: 9049 - DNA, 25 bp, Artificial
  Probe
gtagtttaagtctgtcggtttctta

SEQ ID NO: 9050 - DNA, 25 bp, Artificial
  Probe
agtctgtcggtttcttacttgtgaa

SEQ ID NO: 9051 - DNA, 25 bp, Artificial
  Probe
tcttacttgtgaagagattaacagt

SEQ ID NO: 9052 - DNA, 25 bp, Artificial
  Probe
tcggtttcttacttgtgaagagatt

SEQ ID NO: 9053 - DNA, 25 bp, Artificial
  Probe
gtcggtttcttacttgtgaagagat

SEQ ID NO: 9054 - DNA, 25 bp, Artificial
  Probe
cggtttcttacttgtgaagagatta

SEQ ID NO: 9055 - DNA, 25 bp, Artificial
  Probe
ttcttacttgtgaagagattaacag

SEQ ID NO: 9056 - DNA, 25 bp, Artificial
  Probe
ttaagtctgtcggtttcttacttgt

SEQ ID NO: 9057 - DNA, 25 bp, Artificial
  Probe
ctgtcggtttcttacttgtgaagag

SEQ ID NO: 9058 - DNA, 25 bp, Artificial
  Probe
taagtctgtcggtttcttacttgtg

SEQ ID NO: 9059 - DNA, 25 bp, Artificial
  Probe
tttaagtctgtcggtttcttacttg

SEQ ID NO: 9060 - DNA, 25 bp, Artificial
  Probe
gtttaagtctgtcggtttcttactt

SEQ ID NO: 9061 - DNA, 25 bp, Artificial
  Probe
tgtcggtttcttacttgtgaagaga

SEQ ID NO: 9062 - DNA, 25 bp, Artificial
  Probe
tctgtcggtttcttacttgtgaaga

SEQ ID NO: 9063 - DNA, 25 bp, Artificial
  Probe
aagtctgtcggtttcttacttgtga

SEQ ID NO: 9064 - DNA, 25 bp, Artificial
  Probe
ggtttcttacttgtgaagagattaa

SEQ ID NO: 9065 - DNA, 25 bp, Artificial
  Probe
tttcttacttgtgaagagattaaca

SEQ ID NO: 9066 - DNA, 25 bp, Artificial
  Probe
ttttctatggtagtttaagtctgtc

SEQ ID NO: 9067 - DNA, 25 bp, Artificial
  Probe
gtttcttacttgtgaagagattaac

SEQ ID NO: 9068 - DNA, 25 bp, Artificial
  Probe
gagtttccatgtaacattttctatg

SEQ ID NO: 9069 - DNA, 25 bp, Artificial
  Probe
attttctatggtagtttaagtctgt

SEQ ID NO: 9070 - DNA, 25 bp, Artificial
  Probe
agagtttccatgtaacattttctat

SEQ ID NO: 9071 - DNA, 25 bp, Artificial
  Probe
atagagtttccatgtaacattttct

SEQ ID NO: 9072 - DNA, 25 bp, Artificial
  Probe
acattttctatggtagtttaagtct

SEQ ID NO: 9073 - DNA, 25 bp, Artificial
  Probe
gttatagagtttccatgtaacattt

SEQ ID NO: 9074 - DNA, 25 bp, Artificial
  Probe
cattttctatggtagtttaagtctg

SEQ ID NO: 9075 - DNA, 25 bp, Artificial
  Probe
agtaggttttgaaatatagaagtga

SEQ ID NO: 9076 - DNA, 25 bp, Artificial
  Probe
gtcatttgacattcaggctcgcatg

SEQ ID NO: 9077 - DNA, 25 bp, Artificial
  Probe
atttgacattcaggctcgcatgaac

SEQ ID NO: 9078 - DNA, 25 bp, Artificial
  Probe
cattagggaagattatgaagtagct

SEQ ID NO: 9079 - DNA, 25 bp, Artificial
  Probe
taaaatcttaagcctggcgtgtgga

SEQ ID NO: 9080 - DNA, 25 bp, Artificial
  Probe
ctaggcaggggtgcagatttcttag

SEQ ID NO: 9081 - DNA, 25 bp, Artificial
  Probe
taggcaggggtgcagatttcttaga

SEQ ID NO: 9082 - DNA, 25 bp, Artificial
  Probe
gaactcagacagaacaaagcaatat

SEQ ID NO: 9083 - DNA, 25 bp, Artificial
  Probe
tgaactcagacagaacaaagcaata

SEQ ID NO: 9084 - DNA, 25 bp, Artificial
  Probe
atgaactcagacagaacaaagcaat

SEQ ID NO: 9085 - DNA, 25 bp, Artificial
  Probe
gatgaactcagacagaacaaagcaa

SEQ ID NO: 9086 - DNA, 25 bp, Artificial
  Probe
actcagacagaacaaagcaatattt

SEQ ID NO: 9087 - DNA, 25 bp, Artificial
  Probe
aactcagacagaacaaagcaatatt

SEQ ID NO: 9088 - DNA, 25 bp, Artificial
  Probe
tgttctcttcctcatcctgtcaagc

SEQ ID NO: 9089 - DNA, 25 bp, Artificial
  Probe
gttctcttcctcatcctgtcaagcc

SEQ ID NO: 9090 - DNA, 25 bp, Artificial
  Probe
ggggaaaagctgttaacctaaagta

SEQ ID NO: 9091 - DNA, 25 bp, Artificial
  Probe
gggaaaagctgttaacctaaagtat

SEQ ID NO: 9092 - DNA, 25 bp, Artificial
  Probe
ggaaaagctgttaacctaaagtatt

SEQ ID NO: 9093 - DNA, 25 bp, Artificial
  Probe
caggggaaaagctgttaacctaaag

SEQ ID NO: 9094 - DNA, 25 bp, Artificial
  Probe
aggggaaaagctgttaacctaaagt

SEQ ID NO: 9095 - DNA, 25 bp, Artificial
  Probe
tcaggggaaaagctgttaacctaaa

SEQ ID NO: 9096 - DNA, 25 bp, Artificial
  Probe
gaaaagctgttaacctaaagtattt

SEQ ID NO: 9097 - DNA, 25 bp, Artificial
  Probe
aaaagctgttaacctaaagtatttt

SEQ ID NO: 9098 - DNA, 25 bp, Artificial
  Probe
agaacagcaatcagagtttccattc

SEQ ID NO: 9099 - DNA, 25 bp, Artificial
  Probe
gagaacagcaatcagagtttccatt

SEQ ID NO: 9100 - DNA, 25 bp, Artificial
  Probe
aatgatgagaacagcaatcagagtt

SEQ ID NO: 9101 - DNA, 25 bp, Artificial
  Probe
tcaatgatgagaacagcaatcagag

SEQ ID NO: 9102 - DNA, 25 bp, Artificial
  Probe
caatgatgagaacagcaatcagagt

SEQ ID NO: 9103 - DNA, 25 bp, Artificial
  Probe
gatgagaacagcaatcagagtttcc

SEQ ID NO: 9104 - DNA, 25 bp, Artificial
  Probe
gaacagcaatcagagtttccattcc

SEQ ID NO: 9105 - DNA, 25 bp, Artificial
  Probe
aatcagagtttccattccgaaggtt

SEQ ID NO: 9106 - DNA, 25 bp, Artificial
  Probe
tgagaacagcaatcagagtttccat

SEQ ID NO: 9107 - DNA, 25 bp, Artificial
  Probe
atgagaacagcaatcagagtttcca

SEQ ID NO: 9108 - DNA, 25 bp, Artificial
  Probe
atcagagtttccattccgaaggttc

SEQ ID NO: 9109 - DNA, 25 bp, Artificial
  Probe
caatcagagtttccattccgaaggt

SEQ ID NO: 9110 - DNA, 25 bp, Artificial
  Probe
atgatgagaacagcaatcagagttt

SEQ ID NO: 9111 - DNA, 25 bp, Artificial
  Probe
agcaatcagagtttccattccgaag

SEQ ID NO: 9112 - DNA, 25 bp, Artificial
  Probe
ctcaatgatgagaacagcaatcaga

SEQ ID NO: 9113 - DNA, 25 bp, Artificial
  Probe
tgatgagaacagcaatcagagtttc

SEQ ID NO: 9114 - DNA, 25 bp, Artificial
  Probe
cagcaatcagagtttccattccgaa

SEQ ID NO: 9115 - DNA, 25 bp, Artificial
  Probe
aacagcaatcagagtttccattccg

SEQ ID NO: 9116 - DNA, 25 bp, Artificial
  Probe
gcaatcagagtttccattccgaagg

SEQ ID NO: 9117 - DNA, 25 bp, Artificial
  Probe
acagcaatcagagtttccattccga

SEQ ID NO: 9118 - DNA, 25 bp, Artificial
  Probe
tggacctccagaggtgattacagaa

SEQ ID NO: 9119 - DNA, 25 bp, Artificial
  Probe
tcaaggaaagtcataatggagaatc

SEQ ID NO: 9120 - DNA, 25 bp, Artificial
  Probe
caaggaaagtcataatggagaatct

SEQ ID NO: 9121 - DNA, 25 bp, Artificial
  Probe
cttggaggtgggattcaatgtttaa

SEQ ID NO: 9122 - DNA, 25 bp, Artificial
  Probe
ttcaaggaaagtcataatggagaat

SEQ ID NO: 9123 - DNA, 25 bp, Artificial
  Probe
attcaaggaaagtcataatggagaa

SEQ ID NO: 9124 - DNA, 25 bp, Artificial
  Probe
aattcaaggaaagtcataatggaga

SEQ ID NO: 9125 - DNA, 25 bp, Artificial
  Probe
aaggaaagtcataatggagaatctt

SEQ ID NO: 9126 - DNA, 25 bp, Artificial
  Probe
ttggaggtgggattcaatgtttaaa

SEQ ID NO: 9127 - DNA, 25 bp, Artificial
  Probe
aagtcctctgacaaatgatctaatt

SEQ ID NO: 9128 - DNA, 25 bp, Artificial
  Probe
gcttggaggtgggattcaatgttta

SEQ ID NO: 9129 - DNA, 25 bp, Artificial
  Probe
aggaaagtcataatggagaatcttt

SEQ ID NO: 9130 - DNA, 25 bp, Artificial
  Probe
taagtcctctgacaaatgatctaat

SEQ ID NO: 9131 - DNA, 25 bp, Artificial
  Probe
agtcctctgacaaatgatctaatta

SEQ ID NO: 9132 - DNA, 25 bp, Artificial
  Probe
agaattcaaggaaagtcataatgga

SEQ ID NO: 9133 - DNA, 25 bp, Artificial
  Probe
gaattcaaggaaagtcataatggag

SEQ ID NO: 9134 - DNA, 25 bp, Artificial
  Probe
ggaggtgggattcaatgtttaaaat

SEQ ID NO: 9135 - DNA, 25 bp, Artificial
  Probe
tggaggtgggattcaatgtttaaaa

SEQ ID NO: 9136 - DNA, 25 bp, Artificial
  Probe
aagaattcaaggaaagtcataatgg

SEQ ID NO: 9137 - DNA, 25 bp, Artificial
  Probe
gtcctctgacaaatgatctaattaa

SEQ ID NO: 9138 - DNA, 25 bp, Artificial
  Probe
gaggtgggattcaatgtttaaaatt

SEQ ID NO: 9139 - DNA, 25 bp, Artificial
  Probe
tcctctgacaaatgatctaattaaa

SEQ ID NO: 9140 - DNA, 25 bp, Artificial
  Probe
ggtggtcctctaaggcggattattt

SEQ ID NO: 9141 - DNA, 25 bp, Artificial
  Probe
aggtgggattcaatgtttaaaattt

SEQ ID NO: 9142 - DNA, 25 bp, Artificial
  Probe
ttcaatgctgttgtcttggagcttg

SEQ ID NO: 9143 - DNA, 25 bp, Artificial
  Probe
tggtggtcctctaaggcggattatt

SEQ ID NO: 9144 - DNA, 25 bp, Artificial
  Probe
ttggtggtcctctaaggcggattat

SEQ ID NO: 9145 - DNA, 25 bp, Artificial
  Probe
gtggtcctctaaggcggattatttt

SEQ ID NO: 9146 - DNA, 25 bp, Artificial
  Probe
gtttatgtgaacattcctatgaatt

SEQ ID NO: 9147 - DNA, 25 bp, Artificial
  Probe
tgtttatgtgaacattcctatgaat

SEQ ID NO: 9148 - DNA, 25 bp, Artificial
  Probe
tttcaatgctgttgtcttggagctt

SEQ ID NO: 9149 - DNA, 25 bp, Artificial
  Probe
ggaaagtcataatggagaatctttt

SEQ ID NO: 9150 - DNA, 25 bp, Artificial
  Probe
aaagaattcaaggaaagtcataatg

SEQ ID NO: 9151 - DNA, 25 bp, Artificial
  Probe
agcttggaggtgggattcaatgttt

SEQ ID NO: 9152 - DNA, 25 bp, Artificial
  Probe
gagcttggaggtgggattcaatgtt

SEQ ID NO: 9153 - DNA, 25 bp, Artificial
  Probe
tttatgtgaacattcctatgaattc

SEQ ID NO: 9154 - DNA, 25 bp, Artificial
  Probe
cctctgacaaatgatctaattaaaa

SEQ ID NO: 9155 - DNA, 25 bp, Artificial
  Probe
ttttcaatgctgttgtcttggagct

SEQ ID NO: 9156 - DNA, 25 bp, Artificial
  Probe
ggtgggattcaatgtttaaaatttt

SEQ ID NO: 9157 - DNA, 25 bp, Artificial
  Probe
ggaaggcgtagggaatcaggtaaaa

SEQ ID NO: 9158 - DNA, 25 bp, Artificial
  Probe
gtcacagagagcgaaaacaaaaccc

SEQ ID NO: 9159 - DNA, 25 bp, Artificial
  Probe
aaaaggttaaaacccacctaaggcg

SEQ ID NO: 9160 - DNA, 25 bp, Artificial
  Probe
ttgaaacttccatttgaaattgtgt

SEQ ID NO: 9161 - DNA, 25 bp, Artificial
  Probe
tgaaacttccatttgaaattgtgtt

SEQ ID NO: 9162 - DNA, 25 bp, Artificial
  Probe
attgaaacttccatttgaaattgtg

SEQ ID NO: 9163 - DNA, 25 bp, Artificial
  Probe
ccatttgaaattgtgttttgcttga

SEQ ID NO: 9164 - DNA, 25 bp, Artificial
  Probe
tccatttgaaattgtgttttgcttg

SEQ ID NO: 9165 - DNA, 25 bp, Artificial
  Probe
aaattgcttcccaaaggctgtcata

SEQ ID NO: 9166 - DNA, 25 bp, Artificial
  Probe
taaattgcttcccaaaggctgtcat

SEQ ID NO: 9167 - DNA, 25 bp, Artificial
  Probe
tttgaaattgtgttttgcttgactt

SEQ ID NO: 9168 - DNA, 25 bp, Artificial
  Probe
acttccatttgaaattgtgttttgc

SEQ ID NO: 9169 - DNA, 25 bp, Artificial
  Probe
cttccatttgaaattgtgttttgct

SEQ ID NO: 9170 - DNA, 25 bp, Artificial
  Probe
tagtcttttaagtagccttgtcctt

SEQ ID NO: 9171 - DNA, 25 bp, Artificial
  Probe
atttgaaattgtgttttgcttgact

SEQ ID NO: 9172 - DNA, 25 bp, Artificial
  Probe
catttgaaattgtgttttgcttgac

SEQ ID NO: 9173 - DNA, 25 bp, Artificial
  Probe
atagtcttttaagtagccttgtcct

SEQ ID NO: 9174 - DNA, 25 bp, Artificial
  Probe
ttccatttgaaattgtgttttgctt

SEQ ID NO: 9175 - DNA, 25 bp, Artificial
  Probe
tgaaattgtgttttgcttgacttaa

SEQ ID NO: 9176 - DNA, 25 bp, Artificial
  Probe
ttgaaattgtgttttgcttgactta

SEQ ID NO: 9177 - DNA, 25 bp, Artificial
  Probe
aattgaaacttccatttgaaattgt

SEQ ID NO: 9178 - DNA, 25 bp, Artificial
  Probe
aattgcttcccaaaggctgtcatag

SEQ ID NO: 9179 - DNA, 25 bp, Artificial
  Probe
gaaacttccatttgaaattgtgttt

SEQ ID NO: 9180 - DNA, 25 bp, Artificial
  Probe
agtcttttaagtagccttgtcctta

SEQ ID NO: 9181 - DNA, 25 bp, Artificial
  Probe
tatagtcttttaagtagccttgtcc

SEQ ID NO: 9182 - DNA, 25 bp, Artificial
  Probe
tgtttgctggtattaaaattcttca

SEQ ID NO: 9183 - DNA, 25 bp, Artificial
  Probe
aacttccatttgaaattgtgttttg

SEQ ID NO: 9184 - DNA, 25 bp, Artificial
  Probe
gtcttttaagtagccttgtccttat

SEQ ID NO: 9185 - DNA, 25 bp, Artificial
  Probe
gtgtttgctggtattaaaattcttc

SEQ ID NO: 9186 - DNA, 25 bp, Artificial
  Probe
tgtatagtcttttaagtagccttgt

SEQ ID NO: 9187 - DNA, 25 bp, Artificial
  Probe
tttaagtagccttgtccttatttaa

SEQ ID NO: 9188 - DNA, 25 bp, Artificial
  Probe
tcttttaagtagccttgtccttatt

SEQ ID NO: 9189 - DNA, 25 bp, Artificial
  Probe
aaattgaaacttccatttgaaattg

SEQ ID NO: 9190 - DNA, 25 bp, Artificial
  Probe
gtatagtcttttaagtagccttgtc

SEQ ID NO: 9191 - DNA, 25 bp, Artificial
  Probe
attgcttcccaaaggctgtcatagt

SEQ ID NO: 9192 - DNA, 25 bp, Artificial
  Probe
cttttaagtagccttgtccttattt

SEQ ID NO: 9193 - DNA, 25 bp, Artificial
  Probe
gtttgctggtattaaaattcttcaa

SEQ ID NO: 9194 - DNA, 25 bp, Artificial
  Probe
ttaagtagccttgtccttatttaaa

SEQ ID NO: 9195 - DNA, 25 bp, Artificial
  Probe
aattcagtatagaaaaggttgacct

SEQ ID NO: 9196 - DNA, 25 bp, Artificial
  Probe
atgtatagtcttttaagtagccttg

SEQ ID NO: 9197 - DNA, 25 bp, Artificial
  Probe
gaaattgtgttttgcttgacttaag

SEQ ID NO: 9198 - DNA, 25 bp, Artificial
  Probe
taattcagtatagaaaaggttgacc

SEQ ID NO: 9199 - DNA, 25 bp, Artificial
  Probe
tgtatgtatagtcttttaagtagcc

SEQ ID NO: 9200 - DNA, 25 bp, Artificial
  Probe
ttgctggtattaaaattcttcaaaa

SEQ ID NO: 9201 - DNA, 25 bp, Artificial
  Probe
aaacttccatttgaaattgtgtttt

SEQ ID NO: 9202 - DNA, 25 bp, Artificial
  Probe
tgctggtattaaaattcttcaaaat

SEQ ID NO: 9203 - DNA, 25 bp, Artificial
  Probe
gtatgtatagtcttttaagtagcct

SEQ ID NO: 9204 - DNA, 25 bp, Artificial
  Probe
tgtaattcagtatagaaaaggttga

SEQ ID NO: 9205 - DNA, 25 bp, Artificial
  Probe
ggtgtataattgtctgctgtagaga

SEQ ID NO: 9206 - DNA, 25 bp, Artificial
  Probe
aggtgtataattgtctgctgtagag

SEQ ID NO: 9207 - DNA, 25 bp, Artificial
  Probe
aaggtgtataattgtctgctgtaga

SEQ ID NO: 9208 - DNA, 25 bp, Artificial
  Probe
ggaataaggtgtataattgtctgct

SEQ ID NO: 9209 - DNA, 25 bp, Artificial
  Probe
aggaataaggtgtataattgtctgc

SEQ ID NO: 9210 - DNA, 25 bp, Artificial
  Probe
taaggtgtataattgtctgctgtag

SEQ ID NO: 9211 - DNA, 25 bp, Artificial
  Probe
aataaggtgtataattgtctgctgt

SEQ ID NO: 9212 - DNA, 25 bp, Artificial
  Probe
gtgtataattgtctgctgtagagaa

SEQ ID NO: 9213 - DNA, 25 bp, Artificial
  Probe
gaataaggtgtataattgtctgctg

SEQ ID NO: 9214 - DNA, 25 bp, Artificial
  Probe
ataaggtgtataattgtctgctgta

SEQ ID NO: 9215 - DNA, 25 bp, Artificial
  Probe
tgtataattgtctgctgtagagaaa

SEQ ID NO: 9216 - DNA, 25 bp, Artificial
  Probe
taggaataaggtgtataattgtctg

SEQ ID NO: 9217 - DNA, 25 bp, Artificial
  Probe
taagagaggaaaacaagtgtggaaa

SEQ ID NO: 9218 - DNA, 25 bp, Artificial
  Probe
ttaagagaggaaaacaagtgtggaa

SEQ ID NO: 9219 - DNA, 25 bp, Artificial
  Probe
tctgctgtagagaaaagattgactt

SEQ ID NO: 9220 - DNA, 25 bp, Artificial
  Probe
ttgtctgctgtagagaaaagattga

SEQ ID NO: 9221 - DNA, 25 bp, Artificial
  Probe
aagagaggaaaacaagtgtggaaaa

SEQ ID NO: 9222 - DNA, 25 bp, Artificial
  Probe
attgtctgctgtagagaaaagattg

SEQ ID NO: 9223 - DNA, 25 bp, Artificial
  Probe
ctgctgtagagaaaagattgactta

SEQ ID NO: 9224 - DNA, 25 bp, Artificial
  Probe
aattgtctgctgtagagaaaagatt

SEQ ID NO: 9225 - DNA, 25 bp, Artificial
  Probe
tgctgtagagaaaagattgacttaa

SEQ ID NO: 9226 - DNA, 25 bp, Artificial
  Probe
gtctgctgtagagaaaagattgact

SEQ ID NO: 9227 - DNA, 25 bp, Artificial
  Probe
aatgaatccaaagtgtacaggtgaa

SEQ ID NO: 9228 - DNA, 25 bp, Artificial
  Probe
aaatgaatccaaagtgtacaggtga

SEQ ID NO: 9229 - DNA, 25 bp, Artificial
  Probe
tgtctgctgtagagaaaagattgac

SEQ ID NO: 9230 - DNA, 25 bp, Artificial
  Probe
taattgtctgctgtagagaaaagat

SEQ ID NO: 9231 - DNA, 25 bp, Artificial
  Probe
ataattgtctgctgtagagaaaaga

SEQ ID NO: 9232 - DNA, 25 bp, Artificial
  Probe
atgaatccaaagtgtacaggtgaac

SEQ ID NO: 9233 - DNA, 25 bp, Artificial
  Probe
ataggaataaggtgtataattgtct

SEQ ID NO: 9234 - DNA, 25 bp, Artificial
  Probe
gaatccaaagtgtacaggtgaacat

SEQ ID NO: 9235 - DNA, 25 bp, Artificial
  Probe
aatccaaagtgtacaggtgaacatg

SEQ ID NO: 9236 - DNA, 25 bp, Artificial
  Probe
cttaagagaggaaaacaagtgtgga

SEQ ID NO: 9237 - DNA, 25 bp, Artificial
  Probe
gtataattgtctgctgtagagaaaa

SEQ ID NO: 9238 - DNA, 25 bp, Artificial
  Probe
aaaagaaactgtcaaaatggtaaaa

SEQ ID NO: 9239 - DNA, 25 bp, Artificial
  Probe
tgaatccaaagtgtacaggtgaaca

SEQ ID NO: 9240 - DNA, 25 bp, Artificial
  Probe
tataattgtctgctgtagagaaaag

SEQ ID NO: 9241 - DNA, 25 bp, Artificial
  Probe
aagattgacttaagagaggaaaaca

SEQ ID NO: 9242 - DNA, 25 bp, Artificial
  Probe
atccaaagtgtacaggtgaacatgt

SEQ ID NO: 9243 - DNA, 25 bp, Artificial
  Probe
gagaaaagattgacttaagagagga

SEQ ID NO: 9244 - DNA, 25 bp, Artificial
  Probe
agagaaaagattgacttaagagagg

SEQ ID NO: 9245 - DNA, 25 bp, Artificial
  Probe
agattgacttaagagaggaaaacaa

SEQ ID NO: 9246 - DNA, 25 bp, Artificial
  Probe
aaaatgaatccaaagtgtacaggtg

SEQ ID NO: 9247 - DNA, 25 bp, Artificial
  Probe
gctgtagagaaaagattgacttaag

SEQ ID NO: 9248 - DNA, 25 bp, Artificial
  Probe
gattgacttaagagaggaaaacaag

SEQ ID NO: 9249 - DNA, 25 bp, Artificial
  Probe
agaaaagattgacttaagagaggaa

SEQ ID NO: 9250 - DNA, 25 bp, Artificial
  Probe
aaatggctggagaagttaaggcttt

SEQ ID NO: 9251 - DNA, 25 bp, Artificial
  Probe
aatggctggagaagttaaggctttc

SEQ ID NO: 9252 - DNA, 25 bp, Artificial
  Probe
agttgataaaatggctggagaagtt

SEQ ID NO: 9253 - DNA, 25 bp, Artificial
  Probe
gataaaatggctggagaagttaagg

SEQ ID NO: 9254 - DNA, 25 bp, Artificial
  Probe
gttgataaaatggctggagaagtta

SEQ ID NO: 9255 - DNA, 25 bp, Artificial
  Probe
tgataaaatggctggagaagttaag

SEQ ID NO: 9256 - DNA, 25 bp, Artificial
  Probe
ataaaatggctggagaagttaaggc

SEQ ID NO: 9257 - DNA, 25 bp, Artificial
  Probe
ttgataaaatggctggagaagttaa

SEQ ID NO: 9258 - DNA, 25 bp, Artificial
  Probe
taaaatggctggagaagttaaggct

SEQ ID NO: 9259 - DNA, 25 bp, Artificial
  Probe
gatagtaataaactagagcattccg

SEQ ID NO: 9260 - DNA, 25 bp, Artificial
  Probe
cagttgataaaatggctggagaagt

SEQ ID NO: 9261 - DNA, 25 bp, Artificial
  Probe
aaaatggctggagaagttaaggctt

SEQ ID NO: 9262 - DNA, 25 bp, Artificial
  Probe
ttgaggggtttgcagttgataaaat

SEQ ID NO: 9263 - DNA, 25 bp, Artificial
  Probe
gcagttgataaaatggctggagaag

SEQ ID NO: 9264 - DNA, 25 bp, Artificial
  Probe
atagtaataaactagagcattccgg

SEQ ID NO: 9265 - DNA, 25 bp, Artificial
  Probe
tgaggggtttgcagttgataaaatg

SEQ ID NO: 9266 - DNA, 25 bp, Artificial
  Probe
tgatagtaataaactagagcattcc

SEQ ID NO: 9267 - DNA, 25 bp, Artificial
  Probe
gttgaggggtttgcagttgataaaa

SEQ ID NO: 9268 - DNA, 25 bp, Artificial
  Probe
gaggggtttgcagttgataaaatgg

SEQ ID NO: 9269 - DNA, 25 bp, Artificial
  Probe
atggctggagaagttaaggctttct

SEQ ID NO: 9270 - DNA, 25 bp, Artificial
  Probe
gattcacatgccaagaatttggagt

SEQ ID NO: 9271 - DNA, 25 bp, Artificial
  Probe
tgattcacatgccaagaatttggag

SEQ ID NO: 9272 - DNA, 25 bp, Artificial
  Probe
agttgaggggtttgcagttgataaa

SEQ ID NO: 9273 - DNA, 25 bp, Artificial
  Probe
tggctggagaagttaaggctttctt

SEQ ID NO: 9274 - DNA, 25 bp, Artificial
  Probe
tttgcagttgataaaatggctggag

SEQ ID NO: 9275 - DNA, 25 bp, Artificial
  Probe
ataaagctgtcagttgaggggtttg

SEQ ID NO: 9276 - DNA, 25 bp, Artificial
  Probe
gtttgcagttgataaaatggctgga

SEQ ID NO: 9277 - DNA, 25 bp, Artificial
  Probe
cagttgaggggtttgcagttgataa

SEQ ID NO: 9278 - DNA, 25 bp, Artificial
  Probe
tgcagttgataaaatggctggagaa

SEQ ID NO: 9279 - DNA, 25 bp, Artificial
  Probe
ttgcagttgataaaatggctggaga

SEQ ID NO: 9280 - DNA, 25 bp, Artificial
  Probe
ggtttgcagttgataaaatggctgg

SEQ ID NO: 9281 - DNA, 25 bp, Artificial
  Probe
gggtttgcagttgataaaatggctg

SEQ ID NO: 9282 - DNA, 25 bp, Artificial
  Probe
ggggtttgcagttgataaaatggct

SEQ ID NO: 9283 - DNA, 25 bp, Artificial
  Probe
aggggtttgcagttgataaaatggc

SEQ ID NO: 9284 - DNA, 25 bp, Artificial
  Probe
tcagttgaggggtttgcagttgata

SEQ ID NO: 9285 - DNA, 25 bp, Artificial
  Probe
ccagcagttcagaatgttcttatta

SEQ ID NO: 9286 - DNA, 25 bp, Artificial
  Probe
aggttaagtgttggttcagtttcta

SEQ ID NO: 9287 - DNA, 25 bp, Artificial
  Probe
cagcagttcagaatgttcttattaa

SEQ ID NO: 9288 - DNA, 25 bp, Artificial
  Probe
ggttaagtgttggttcagtttctag

SEQ ID NO: 9289 - DNA, 25 bp, Artificial
  Probe
gttaagtgttggttcagtttctagt

SEQ ID NO: 9290 - DNA, 25 bp, Artificial
  Probe
agtgttggttcagtttctagtagac

SEQ ID NO: 9291 - DNA, 25 bp, Artificial
  Probe
aagtgttggttcagtttctagtaga

SEQ ID NO: 9292 - DNA, 25 bp, Artificial
  Probe
taagtgttggttcagtttctagtag

SEQ ID NO: 9293 - DNA, 25 bp, Artificial
  Probe
ttaagtgttggttcagtttctagta

SEQ ID NO: 9294 - DNA, 25 bp, Artificial
  Probe
gttggttcagtttctagtagaccta

SEQ ID NO: 9295 - DNA, 25 bp, Artificial
  Probe
aaacgtgaagaagaagatgatgaag

SEQ ID NO: 9296 - DNA, 25 bp, Artificial
  Probe
tggttcagtttctagtagacctagt

SEQ ID NO: 9297 - DNA, 25 bp, Artificial
  Probe
tgttggttcagtttctagtagacct

SEQ ID NO: 9298 - DNA, 25 bp, Artificial
  Probe
gtgttggttcagtttctagtagacc

SEQ ID NO: 9299 - DNA, 25 bp, Artificial
  Probe
agcagttcagaatgttcttattaat

SEQ ID NO: 9300 - DNA, 25 bp, Artificial
  Probe
ttggttcagtttctagtagacctag

SEQ ID NO: 9301 - DNA, 25 bp, Artificial
  Probe
gcagttcagaatgttcttattaatc

SEQ ID NO: 9302 - DNA, 25 bp, Artificial
  Probe
ggttcagtttctagtagacctagta

SEQ ID NO: 9303 - DNA, 25 bp, Artificial
  Probe
agttcagaatgttcttattaatcca

SEQ ID NO: 9304 - DNA, 25 bp, Artificial
  Probe
cagttcagaatgttcttattaatcc

SEQ ID NO: 9305 - DNA, 25 bp, Artificial
  Probe
tcagaatgttcttattaatccatca

SEQ ID NO: 9306 - DNA, 25 bp, Artificial
  Probe
gttcagtttctagtagacctagtac

SEQ ID NO: 9307 - DNA, 25 bp, Artificial
  Probe
gttcagaatgttcttattaatccat

SEQ ID NO: 9308 - DNA, 25 bp, Artificial
  Probe
aaaacgtgaagaagaagatgatgaa

SEQ ID NO: 9309 - DNA, 25 bp, Artificial
  Probe
agtttctagtagacctagtactccc

SEQ ID NO: 9310 - DNA, 25 bp, Artificial
  Probe
cagtttctagtagacctagtactcc

SEQ ID NO: 9311 - DNA, 25 bp, Artificial
  Probe
cagaatgttcttattaatccatcat

SEQ ID NO: 9312 - DNA, 25 bp, Artificial
  Probe
ttcagaatgttcttattaatccatc

SEQ ID NO: 9313 - DNA, 25 bp, Artificial
  Probe
tcagtttctagtagacctagtactc

SEQ ID NO: 9314 - DNA, 25 bp, Artificial
  Probe
ttcagtttctagtagacctagtact

SEQ ID NO: 9315 - DNA, 25 bp, Artificial
  Probe
tattaatccatcattaattgggtcc

SEQ ID NO: 9316 - DNA, 25 bp, Artificial
  Probe
ttattaatccatcattaattgggtc

SEQ ID NO: 9317 - DNA, 25 bp, Artificial
  Probe
cttattaatccatcattaattgggt

SEQ ID NO: 9318 - DNA, 25 bp, Artificial
  Probe
cacctctgccttctatatacttcat

SEQ ID NO: 9319 - DNA, 25 bp, Artificial
  Probe
aaccacctctgccttctatatactt

SEQ ID NO: 9320 - DNA, 25 bp, Artificial
  Probe
ccacctctgccttctatatacttca

SEQ ID NO: 9321 - DNA, 25 bp, Artificial
  Probe
accacctctgccttctatatacttc

SEQ ID NO: 9322 - DNA, 25 bp, Artificial
  Probe
acctctgccttctatatacttcatt

SEQ ID NO: 9323 - DNA, 25 bp, Artificial
  Probe
caaccacctctgccttctatatact

SEQ ID NO: 9324 - DNA, 25 bp, Artificial
  Probe
cctctgccttctatatacttcatta

SEQ ID NO: 9325 - DNA, 25 bp, Artificial
  Probe
ctagaaatctcccatttgtgactgc

SEQ ID NO: 9326 - DNA, 25 bp, Artificial
  Probe
gctagaaatctcccatttgtgactg

SEQ ID NO: 9327 - DNA, 25 bp, Artificial
  Probe
ctctgccttctatatacttcattag

SEQ ID NO: 9328 - DNA, 25 bp, Artificial
  Probe
tcattagaattcaagttgagtcctt

SEQ ID NO: 9329 - DNA, 25 bp, Artificial
  Probe
ttcattagaattcaagttgagtcct

SEQ ID NO: 9330 - DNA, 25 bp, Artificial
  Probe
cttcattagaattcaagttgagtcc

SEQ ID NO: 9331 - DNA, 25 bp, Artificial
  Probe
aaatctcccatttgtgactgcatat

SEQ ID NO: 9332 - DNA, 25 bp, Artificial
  Probe
cagctagaaatctcccatttgtgac

SEQ ID NO: 9333 - DNA, 25 bp, Artificial
  Probe
agctagaaatctcccatttgtgact

SEQ ID NO: 9334 - DNA, 25 bp, Artificial
  Probe
gcaaccacctctgccttctatatac

SEQ ID NO: 9335 - DNA, 25 bp, Artificial
  Probe
gaaatctcccatttgtgactgcata

SEQ ID NO: 9336 - DNA, 25 bp, Artificial
  Probe
agcaaccacctctgccttctatata

SEQ ID NO: 9337 - DNA, 25 bp, Artificial
  Probe
tagcaaccacctctgccttctatat

SEQ ID NO: 9338 - DNA, 25 bp, Artificial
  Probe
tctgccttctatatacttcattaga

SEQ ID NO: 9339 - DNA, 25 bp, Artificial
  Probe
caagcagctagaaatctcccatttg

SEQ ID NO: 9340 - DNA, 25 bp, Artificial
  Probe
aagcagctagaaatctcccatttgt

SEQ ID NO: 9341 - DNA, 25 bp, Artificial
  Probe
tagaaatctcccatttgtgactgca

SEQ ID NO: 9342 - DNA, 25 bp, Artificial
  Probe
aaaagtaatggactcctggaataac

SEQ ID NO: 9343 - DNA, 25 bp, Artificial
  Probe
acattgagattgctgtttcaaatta

SEQ ID NO: 9344 - DNA, 25 bp, Artificial
  Probe
aacattgagattgctgtttcaaatt

SEQ ID NO: 9345 - DNA, 25 bp, Artificial
  Probe
aattaaaagtaatggactcctggaa

SEQ ID NO: 9346 - DNA, 25 bp, Artificial
  Probe
aaattaaaagtaatggactcctgga

SEQ ID NO: 9347 - DNA, 25 bp, Artificial
  Probe
agaaatctcccatttgtgactgcat

SEQ ID NO: 9348 - DNA, 25 bp, Artificial
  Probe
gcagctagaaatctcccatttgtga

SEQ ID NO: 9349 - DNA, 25 bp, Artificial
  Probe
agcagctagaaatctcccatttgtg

SEQ ID NO: 9350 - DNA, 25 bp, Artificial
  Probe
ccaagcagctagaaatctcccattt

SEQ ID NO: 9351 - DNA, 25 bp, Artificial
  Probe
gtagcaaccacctctgccttctata

SEQ ID NO: 9352 - DNA, 25 bp, Artificial
  Probe
attaaaagtaatggactcctggaat

SEQ ID NO: 9353 - DNA, 25 bp, Artificial
  Probe
cattagaattcaagttgagtccttt

SEQ ID NO: 9354 - DNA, 25 bp, Artificial
  Probe
taaaagtaatggactcctggaataa

SEQ ID NO: 9355 - DNA, 25 bp, Artificial
  Probe
ttaaaagtaatggactcctggaata

SEQ ID NO: 9356 - DNA, 25 bp, Artificial
  Probe
acttcattagaattcaagttgagtc

SEQ ID NO: 9357 - DNA, 25 bp, Artificial
  Probe
cattgagattgctgtttcaaattat

SEQ ID NO: 9358 - DNA, 25 bp, Artificial
  Probe
taaattaaaagtaatggactcctgg

SEQ ID NO: 9359 - DNA, 25 bp, Artificial
  Probe
caagttgagtcctttattataaaca

SEQ ID NO: 9360 - DNA, 25 bp, Artificial
  Probe
tacttcattagaattcaagttgagt

SEQ ID NO: 9361 - DNA, 25 bp, Artificial
  Probe
agaattcaagttgagtcctttatta

SEQ ID NO: 9362 - DNA, 25 bp, Artificial
  Probe
tagaattcaagttgagtcctttatt

SEQ ID NO: 9363 - DNA, 25 bp, Artificial
  Probe
ttttagttgagggaagtcaccccaa

SEQ ID NO: 9364 - DNA, 25 bp, Artificial
  Probe
tttagttgagggaagtcaccccaag

SEQ ID NO: 9365 - DNA, 25 bp, Artificial
  Probe
aaggaaagtggtaagaagataacgg

SEQ ID NO: 9366 - DNA, 25 bp, Artificial
  Probe
gaaggaaagtggtaagaagataacg

SEQ ID NO: 9367 - DNA, 25 bp, Artificial
  Probe
ggagaaggaaagtggtaagaagata

SEQ ID NO: 9368 - DNA, 25 bp, Artificial
  Probe
ttaatgggagaaggaaagtggtaag

SEQ ID NO: 9369 - DNA, 25 bp, Artificial
  Probe
taatgggagaaggaaagtggtaaga

SEQ ID NO: 9370 - DNA, 25 bp, Artificial
  Probe
agtggtaagaagataacgggtgaat

SEQ ID NO: 9371 - DNA, 25 bp, Artificial
  Probe
gaaagtggtaagaagataacgggtg

SEQ ID NO: 9372 - DNA, 25 bp, Artificial
  Probe
atgtatgagaatgtcagtgaaacct

SEQ ID NO: 9373 - DNA, 25 bp, Artificial
  Probe
aatgggagaaggaaagtggtaagaa

SEQ ID NO: 9374 - DNA, 25 bp, Artificial
  Probe
aagtggtaagaagataacgggtgaa

SEQ ID NO: 9375 - DNA, 25 bp, Artificial
  Probe
aaagtggtaagaagataacgggtga

SEQ ID NO: 9376 - DNA, 25 bp, Artificial
  Probe
tgtatgagaatgtcagtgaaaccta

SEQ ID NO: 9377 - DNA, 25 bp, Artificial
  Probe
gggagaaggaaagtggtaagaagat

SEQ ID NO: 9378 - DNA, 25 bp, Artificial
  Probe
atgtcagtgaaacctattattgtgt

SEQ ID NO: 9379 - DNA, 25 bp, Artificial
  Probe
agaaggaaagtggtaagaagataac

SEQ ID NO: 9380 - DNA, 25 bp, Artificial
  Probe
atgggagaaggaaagtggtaagaag

SEQ ID NO: 9381 - DNA, 25 bp, Artificial
  Probe
aggaaagtggtaagaagataacggg

SEQ ID NO: 9382 - DNA, 25 bp, Artificial
  Probe
gagaaggaaagtggtaagaagataa

SEQ ID NO: 9383 - DNA, 25 bp, Artificial
  Probe
gtatgagaatgtcagtgaaacctat

SEQ ID NO: 9384 - DNA, 25 bp, Artificial
  Probe
ggaaagtggtaagaagataacgggt

SEQ ID NO: 9385 - DNA, 25 bp, Artificial
  Probe
tgtcagtgaaacctattattgtgta

SEQ ID NO: 9386 - DNA, 25 bp, Artificial
  Probe
attaatgggagaaggaaagtggtaa

SEQ ID NO: 9387 - DNA, 25 bp, Artificial
  Probe
aattaatgggagaaggaaagtggta

SEQ ID NO: 9388 - DNA, 25 bp, Artificial
  Probe
catgtatgagaatgtcagtgaaacc

SEQ ID NO: 9389 - DNA, 25 bp, Artificial
  Probe
gaattaatgggagaaggaaagtggt

SEQ ID NO: 9390 - DNA, 25 bp, Artificial
  Probe
aatgtcagtgaaacctattattgtg

SEQ ID NO: 9391 - DNA, 25 bp, Artificial
  Probe
ggaattaatgggagaaggaaagtgg

SEQ ID NO: 9392 - DNA, 25 bp, Artificial
  Probe
gggaattaatgggagaaggaaagtg

SEQ ID NO: 9393 - DNA, 25 bp, Artificial
  Probe
gaatgtcagtgaaacctattattgt

SEQ ID NO: 9394 - DNA, 25 bp, Artificial
  Probe
tgagaatgtcagtgaaacctattat

SEQ ID NO: 9395 - DNA, 25 bp, Artificial
  Probe
atgagaatgtcagtgaaacctatta

SEQ ID NO: 9396 - DNA, 25 bp, Artificial
  Probe
tatgagaatgtcagtgaaacctatt

SEQ ID NO: 9397 - DNA, 25 bp, Artificial
  Probe
tgggagaaggaaagtggtaagaaga

SEQ ID NO: 9398 - DNA, 25 bp, Artificial
  Probe
agaatgtcagtgaaacctattattg

SEQ ID NO: 9399 - DNA, 25 bp, Artificial
  Probe
gacgttagacttcatctttcacaga

SEQ ID NO: 9400 - DNA, 25 bp, Artificial
  Probe
cgttagacttcatctttcacagatt

SEQ ID NO: 9401 - DNA, 25 bp, Artificial
  Probe
gaggacgttagacttcatctttcac

SEQ ID NO: 9402 - DNA, 25 bp, Artificial
  Probe
gtcagtgaaacctattattgtgtat

SEQ ID NO: 9403 - DNA, 25 bp, Artificial
  Probe
gagaatgtcagtgaaacctattatt

SEQ ID NO: 9404 - DNA, 25 bp, Artificial
  Probe
ggacgttagacttcatctttcacag

SEQ ID NO: 9405 - DNA, 25 bp, Artificial
  Probe
gtgtgaaatgaggacgttagacttc

SEQ ID NO: 9406 - DNA, 25 bp, Artificial
  Probe
tgaggacgttagacttcatctttca

SEQ ID NO: 9407 - DNA, 25 bp, Artificial
  Probe
aggacgttagacttcatctttcaca

SEQ ID NO: 9408 - DNA, 25 bp, Artificial
  Probe
tggtcaggtatctagaactttaact

SEQ ID NO: 9409 - DNA, 25 bp, Artificial
  Probe
acgttagacttcatctttcacagat

SEQ ID NO: 9410 - DNA, 25 bp, Artificial
  Probe
gaagattacggattggacgagatgt

SEQ ID NO: 9411 - DNA, 25 bp, Artificial
  Probe
aagattacggattggacgagatgtg

SEQ ID NO: 9412 - DNA, 25 bp, Artificial
  Probe
ggaagattacggattggacgagatg

SEQ ID NO: 9413 - DNA, 25 bp, Artificial
  Probe
aggaagattacggattggacgagat

SEQ ID NO: 9414 - DNA, 25 bp, Artificial
  Probe
gattacggattggacgagatgtgac

SEQ ID NO: 9415 - DNA, 25 bp, Artificial
  Probe
agattacggattggacgagatgtga

SEQ ID NO: 9416 - DNA, 25 bp, Artificial
  Probe
gattggacgagatgtgacactgatg

SEQ ID NO: 9417 - DNA, 25 bp, Artificial
  Probe
attacggattggacgagatgtgaca

SEQ ID NO: 9418 - DNA, 25 bp, Artificial
  Probe
ggattggacgagatgtgacactgat

SEQ ID NO: 9419 - DNA, 25 bp, Artificial
  Probe
ctactgggttggtgtccgatatgat

SEQ ID NO: 9420 - DNA, 25 bp, Artificial
  Probe
attggacgagatgtgacactgatgg

SEQ ID NO: 9421 - DNA, 25 bp, Artificial
  Probe
ttacggattggacgagatgtgacac

SEQ ID NO: 9422 - DNA, 25 bp, Artificial
  Probe
tactgggttggtgtccgatatgatg

SEQ ID NO: 9423 - DNA, 25 bp, Artificial
  Probe
gagaatatgaggacgtgtccaaagt

SEQ ID NO: 9424 - DNA, 25 bp, Artificial
  Probe
agaatatgaggacgtgtccaaagtg

SEQ ID NO: 9425 - DNA, 25 bp, Artificial
  Probe
ggagaatatgaggacgtgtccaaag

SEQ ID NO: 9426 - DNA, 25 bp, Artificial
  Probe
gacgagatgtgacactgatggacat

SEQ ID NO: 9427 - DNA, 25 bp, Artificial
  Probe
gaatatgaggacgtgtccaaagtgg

SEQ ID NO: 9428 - DNA, 25 bp, Artificial
  Probe
gttaggcccgtacaatgaagaactc

SEQ ID NO: 9429 - DNA, 25 bp, Artificial
  Probe
acgagatgtgacactgatggacatg

SEQ ID NO: 9430 - DNA, 25 bp, Artificial
  Probe
gtccaaagtggagaaatacgagatc

SEQ ID NO: 9431 - DNA, 25 bp, Artificial
  Probe
tgtccaaagtggagaaatacgagat

SEQ ID NO: 9432 - DNA, 25 bp, Artificial
  Probe
tcggagaatatgaggacgtgtccaa

SEQ ID NO: 9433 - DNA, 25 bp, Artificial
  Probe
ttaggcccgtacaatgaagaactcc

SEQ ID NO: 9434 - DNA, 25 bp, Artificial
  Probe
cggagaatatgaggacgtgtccaaa

SEQ ID NO: 9435 - DNA, 25 bp, Artificial
  Probe
gtgtccaaagtggagaaatacgaga

SEQ ID NO: 9436 - DNA, 25 bp, Artificial
  Probe
tccaaagtggagaaatacgagatct

SEQ ID NO: 9437 - DNA, 25 bp, Artificial
  Probe
cgtgtccaaagtggagaaatacgag

SEQ ID NO: 9438 - DNA, 25 bp, Artificial
  Probe
ggacgtgtccaaagtggagaaatac

SEQ ID NO: 9439 - DNA, 25 bp, Artificial
  Probe
aggacgtgtccaaagtggagaaata

SEQ ID NO: 9440 - DNA, 25 bp, Artificial
  Probe
aatatgaggacgtgtccaaagtgga

SEQ ID NO: 9441 - DNA, 25 bp, Artificial
  Probe
gacgtgtccaaagtggagaaatacg

SEQ ID NO: 9442 - DNA, 25 bp, Artificial
  Probe
atatgaggacgtgtccaaagtggag

SEQ ID NO: 9443 - DNA, 25 bp, Artificial
  Probe
acgtgtccaaagtggagaaatacga

SEQ ID NO: 9444 - DNA, 25 bp, Artificial
  Probe
gaggacgtgtccaaagtggagaaat

SEQ ID NO: 9445 - DNA, 25 bp, Artificial
  Probe
tatgaggacgtgtccaaagtggaga

SEQ ID NO: 9446 - DNA, 25 bp, Artificial
  Probe
gaagattgtcatcaaatagaggcac

SEQ ID NO: 9447 - DNA, 25 bp, Artificial
  Probe
agaagattgtcatcaaatagaggca

SEQ ID NO: 9448 - DNA, 25 bp, Artificial
  Probe
cagaagattgtcatcaaatagaggc

SEQ ID NO: 9449 - DNA, 25 bp, Artificial
  Probe
gcgtcagaagattgtcatcaaatag

SEQ ID NO: 9450 - DNA, 25 bp, Artificial
  Probe
tgcgtcagaagattgtcatcaaata

SEQ ID NO: 9451 - DNA, 25 bp, Artificial
  Probe
cgtcagaagattgtcatcaaataga

SEQ ID NO: 9452 - DNA, 25 bp, Artificial
  Probe
aagattgtcatcaaatagaggcacc

SEQ ID NO: 9453 - DNA, 25 bp, Artificial
  Probe
ttgcgtcagaagattgtcatcaaat

SEQ ID NO: 9454 - DNA, 25 bp, Artificial
  Probe
tcagaagattgtcatcaaatagagg

SEQ ID NO: 9455 - DNA, 25 bp, Artificial
  Probe
gattgtcatcaaatagaggcacctg

SEQ ID NO: 9456 - DNA, 25 bp, Artificial
  Probe
agattgtcatcaaatagaggcacct

SEQ ID NO: 9457 - DNA, 25 bp, Artificial
  Probe
cttgcgtcagaagattgtcatcaaa

SEQ ID NO: 9458 - DNA, 25 bp, Artificial
  Probe
ccttgcgtcagaagattgtcatcaa

SEQ ID NO: 9459 - DNA, 25 bp, Artificial
  Probe
ctcacgtaccttcatcacattcagt

SEQ ID NO: 9460 - DNA, 25 bp, Artificial
  Probe
attgtcatcaaatagaggcacctga

SEQ ID NO: 9461 - DNA, 25 bp, Artificial
  Probe
gtcagaagattgtcatcaaatagag

SEQ ID NO: 9462 - DNA, 25 bp, Artificial
  Probe
tcacgtaccttcatcacattcagtg

SEQ ID NO: 9463 - DNA, 25 bp, Artificial
  Probe
gctcacgtaccttcatcacattcag

SEQ ID NO: 9464 - DNA, 25 bp, Artificial
  Probe
ccatctctgtccttgttgacctttg

SEQ ID NO: 9465 - DNA, 25 bp, Artificial
  Probe
catctctgtccttgttgacctttgc

SEQ ID NO: 9466 - DNA, 25 bp, Artificial
  Probe
cccatctctgtccttgttgaccttt

SEQ ID NO: 9467 - DNA, 25 bp, Artificial
  Probe
cacgtaccttcatcacattcagtga

SEQ ID NO: 9468 - DNA, 25 bp, Artificial
  Probe
cttcccatctctgtccttgttgacc

SEQ ID NO: 9469 - DNA, 25 bp, Artificial
  Probe
ccttcccatctctgtccttgttgac

SEQ ID NO: 9470 - DNA, 25 bp, Artificial
  Probe
atctctgtccttgttgacctttgcc

SEQ ID NO: 9471 - DNA, 25 bp, Artificial
  Probe
tcccatctctgtccttgttgacctt

SEQ ID NO: 9472 - DNA, 25 bp, Artificial
  Probe
ttcccatctctgtccttgttgacct

SEQ ID NO: 9473 - DNA, 25 bp, Artificial
  Probe
ttgtcatcaaatagaggcacctgac

SEQ ID NO: 9474 - DNA, 25 bp, Artificial
  Probe
atcaaatagaggcacctgaccccta

SEQ ID NO: 9475 - DNA, 25 bp, Artificial
  Probe
tgtcatcaaatagaggcacctgacc

SEQ ID NO: 9476 - DNA, 25 bp, Artificial
  Probe
gtcatcaaatagaggcacctgaccc

SEQ ID NO: 9477 - DNA, 25 bp, Artificial
  Probe
caaacaggagaatgatgacactttc

SEQ ID NO: 9478 - DNA, 25 bp, Artificial
  Probe
gtaagagtttggtgaaatgggagag

SEQ ID NO: 9479 - DNA, 25 bp, Artificial
  Probe
taagagtttggtgaaatgggagagt

SEQ ID NO: 9480 - DNA, 25 bp, Artificial
  Probe
tcaaacaggagaatgatgacacttt

SEQ ID NO: 9481 - DNA, 25 bp, Artificial
  Probe
tgtaagagtttggtgaaatgggaga

SEQ ID NO: 9482 - DNA, 25 bp, Artificial
  Probe
agtttggtgaaatgggagagtgaaa

SEQ ID NO: 9483 - DNA, 25 bp, Artificial
  Probe
gagtttggtgaaatgggagagtgaa

SEQ ID NO: 9484 - DNA, 25 bp, Artificial
  Probe
aagagtttggtgaaatgggagagtg

SEQ ID NO: 9485 - DNA, 25 bp, Artificial
  Probe
cagtggagatcaaacaggagaatga

SEQ ID NO: 9486 - DNA, 25 bp, Artificial
  Probe
caggagaatgatgacactttctaca

SEQ ID NO: 9487 - DNA, 25 bp, Artificial
  Probe
acaggagaatgatgacactttctac

SEQ ID NO: 9488 - DNA, 25 bp, Artificial
  Probe
aaacaggagaatgatgacactttct

SEQ ID NO: 9489 - DNA, 25 bp, Artificial
  Probe
aacaggagaatgatgacactttcta

SEQ ID NO: 9490 - DNA, 25 bp, Artificial
  Probe
aggagaatgatgacactttctacat

SEQ ID NO: 9491 - DNA, 25 bp, Artificial
  Probe
atcaaacaggagaatgatgacactt

SEQ ID NO: 9492 - DNA, 25 bp, Artificial
  Probe
gacactttctacatcaaaacctcca

SEQ ID NO: 9493 - DNA, 25 bp, Artificial
  Probe
gagatcaaacaggagaatgatgaca

SEQ ID NO: 9494 - DNA, 25 bp, Artificial
  Probe
gatcaaacaggagaatgatgacact

SEQ ID NO: 9495 - DNA, 25 bp, Artificial
  Probe
agatcaaacaggagaatgatgacac

SEQ ID NO: 9496 - DNA, 25 bp, Artificial
  Probe
agagtttggtgaaatgggagagtga

SEQ ID NO: 9497 - DNA, 25 bp, Artificial
  Probe
acactttctacatcaaaacctccac

SEQ ID NO: 9498 - DNA, 25 bp, Artificial
  Probe
ggagatcaaacaggagaatgatgac

SEQ ID NO: 9499 - DNA, 25 bp, Artificial
  Probe
tggagatcaaacaggagaatgatga

SEQ ID NO: 9500 - DNA, 25 bp, Artificial
  Probe
gtggagatcaaacaggagaatgatg

SEQ ID NO: 9501 - DNA, 25 bp, Artificial
  Probe
agtggagatcaaacaggagaatgat

SEQ ID NO: 9502 - DNA, 25 bp, Artificial
  Probe
atgacactttctacatcaaaacctc

SEQ ID NO: 9503 - DNA, 25 bp, Artificial
  Probe
tgacactttctacatcaaaacctcc

SEQ ID NO: 9504 - DNA, 25 bp, Artificial
  Probe
tttggtgaaatgggagagtgaaaac

SEQ ID NO: 9505 - DNA, 25 bp, Artificial
  Probe
gtttggtgaaatgggagagtgaaaa

SEQ ID NO: 9506 - DNA, 25 bp, Artificial
  Probe
ctttctacatcaaaacctccaccac

SEQ ID NO: 9507 - DNA, 25 bp, Artificial
  Probe
cactttctacatcaaaacctccacc

SEQ ID NO: 9508 - DNA, 25 bp, Artificial
  Probe
ggagaatgatgacactttctacatc

SEQ ID NO: 9509 - DNA, 25 bp, Artificial
  Probe
tttctacatcaaaacctccaccact

SEQ ID NO: 9510 - DNA, 25 bp, Artificial
  Probe
actttctacatcaaaacctccacca

SEQ ID NO: 9511 - DNA, 25 bp, Artificial
  Probe
gcagtggagatcaaacaggagaatg

SEQ ID NO: 9512 - DNA, 25 bp, Artificial
  Probe
agcagtggagatcaaacaggagaat

SEQ ID NO: 9513 - DNA, 25 bp, Artificial
  Probe
attttacaaactagctctcccctta

SEQ ID NO: 9514 - DNA, 25 bp, Artificial
  Probe
tccttgtagtccaagtgatttagaa

SEQ ID NO: 9515 - DNA, 25 bp, Artificial
  Probe
cattttacaaactagctctcccctt

SEQ ID NO: 9516 - DNA, 25 bp, Artificial
  Probe
ctcccatgtccattttacaaactag

SEQ ID NO: 9517 - DNA, 25 bp, Artificial
  Probe
cctcccatgtccattttacaaacta

SEQ ID NO: 9518 - DNA, 25 bp, Artificial
  Probe
ttctacatcaaaacctccaccactg

SEQ ID NO: 9519 - DNA, 25 bp, Artificial
  Probe
ttggtgaaatgggagagtgaaaaca

SEQ ID NO: 9520 - DNA, 25 bp, Artificial
  Probe
gtccattttacaaactagctctccc

SEQ ID NO: 9521 - DNA, 25 bp, Artificial
  Probe
tcccatgtccattttacaaactagc

SEQ ID NO: 9522 - DNA, 25 bp, Artificial
  Probe
tcataattaaggtgcgaaggtgaaa

SEQ ID NO: 9523 - DNA, 25 bp, Artificial
  Probe
ggtttaaagggctgtacttagaaag

SEQ ID NO: 9524 - DNA, 25 bp, Artificial
  Probe
cggtttaaagggctgtacttagaaa

SEQ ID NO: 9525 - DNA, 25 bp, Artificial
  Probe
ttaaacttacacgtatttgcttcct

SEQ ID NO: 9526 - DNA, 25 bp, Artificial
  Probe
aaacttacacgtatttgcttcctat

SEQ ID NO: 9527 - DNA, 25 bp, Artificial
  Probe
acttacacgtatttgcttcctatag

SEQ ID NO: 9528 - DNA, 25 bp, Artificial
  Probe
taaacttacacgtatttgcttccta

SEQ ID NO: 9529 - DNA, 25 bp, Artificial
  Probe
ttaaagggctgtacttagaaagcat

SEQ ID NO: 9530 - DNA, 25 bp, Artificial
  Probe
attaaacttacacgtatttgcttcc

SEQ ID NO: 9531 - DNA, 25 bp, Artificial
  Probe
taaagggctgtacttagaaagcatc

SEQ ID NO: 9532 - DNA, 25 bp, Artificial
  Probe
aacttacacgtatttgcttcctata

SEQ ID NO: 9533 - DNA, 25 bp, Artificial
  Probe
gtttaaagggctgtacttagaaagc

SEQ ID NO: 9534 - DNA, 25 bp, Artificial
  Probe
tttaaagggctgtacttagaaagca

SEQ ID NO: 9535 - DNA, 25 bp, Artificial
  Probe
agggctgtacttagaaagcatcttt

SEQ ID NO: 9536 - DNA, 25 bp, Artificial
  Probe
aagggctgtacttagaaagcatctt

SEQ ID NO: 9537 - DNA, 25 bp, Artificial
  Probe
aaagggctgtacttagaaagcatct

SEQ ID NO: 9538 - DNA, 25 bp, Artificial
  Probe
ataattaaggtgcgaaggtgaaaag

SEQ ID NO: 9539 - DNA, 25 bp, Artificial
  Probe
cataattaaggtgcgaaggtgaaaa

SEQ ID NO: 9540 - DNA, 25 bp, Artificial
  Probe
acttgtaatgtttcagaaaatagcg

SEQ ID NO: 9541 - DNA, 25 bp, Artificial
  Probe
gcggtttaaagggctgtacttagaa

SEQ ID NO: 9542 - DNA, 25 bp, Artificial
  Probe
cttacacgtatttgcttcctatagc

SEQ ID NO: 9543 - DNA, 25 bp, Artificial
  Probe
ttcctatagcaagacatgggcttat

SEQ ID NO: 9544 - DNA, 25 bp, Artificial
  Probe
tcctatagcaagacatgggcttatg

SEQ ID NO: 9545 - DNA, 25 bp, Artificial
  Probe
cttcctatagcaagacatgggctta

SEQ ID NO: 9546 - DNA, 25 bp, Artificial
  Probe
ctgcggtttaaagggctgtacttag

SEQ ID NO: 9547 - DNA, 25 bp, Artificial
  Probe
gaatattttcattggttgtctctgt

SEQ ID NO: 9548 - DNA, 25 bp, Artificial
  Probe
tgcggtttaaagggctgtacttaga

SEQ ID NO: 9549 - DNA, 25 bp, Artificial
  Probe
atattttcattggttgtctctgtaa

SEQ ID NO: 9550 - DNA, 25 bp, Artificial
  Probe
ggctgtacttagaaagcatctttta

SEQ ID NO: 9551 - DNA, 25 bp, Artificial
  Probe
gttattaaacttacacgtatttgct

SEQ ID NO: 9552 - DNA, 25 bp, Artificial
  Probe
tgttattaaacttacacgtatttgc

SEQ ID NO: 9553 - DNA, 25 bp, Artificial
  Probe
tattaaacttacacgtatttgcttc

SEQ ID NO: 9554 - DNA, 25 bp, Artificial
  Probe
cctatagcaagacatgggcttatgg

SEQ ID NO: 9555 - DNA, 25 bp, Artificial
  Probe
gggctgtacttagaaagcatctttt

SEQ ID NO: 9556 - DNA, 25 bp, Artificial
  Probe
aacttgtaatgtttcagaaaatagc

SEQ ID NO: 9557 - DNA, 25 bp, Artificial
  Probe
tttccccataacatttaattagggc

SEQ ID NO: 9558 - DNA, 25 bp, Artificial
  Probe
aatattttcattggttgtctctgta

SEQ ID NO: 9559 - DNA, 25 bp, Artificial
  Probe
ttattaaacttacacgtatttgctt

SEQ ID NO: 9560 - DNA, 25 bp, Artificial
  Probe
gctgtacttagaaagcatcttttaa

SEQ ID NO: 9561 - DNA, 25 bp, Artificial
  Probe
cttgtaatgtttcagaaaatagcgc

SEQ ID NO: 9562 - DNA, 25 bp, Artificial
  Probe
tgtgaatattttcattggttgtctc

SEQ ID NO: 9563 - DNA, 25 bp, Artificial
  Probe
ccaaagtataacttgtaatgtttca

SEQ ID NO: 9564 - DNA, 25 bp, Artificial
  Probe
tgaatattttcattggttgtctctg

SEQ ID NO: 9565 - DNA, 25 bp, Artificial
  Probe
gtgaatattttcattggttgtctct

SEQ ID NO: 9566 - DNA, 25 bp, Artificial
  Probe
ttttccccataacatttaattaggg

SEQ ID NO: 9567 - DNA, 25 bp, Artificial
  Probe
tagcctttcttccactattggtaag

SEQ ID NO: 9568 - DNA, 25 bp, Artificial
  Probe
gttagcctttcttccactattggta

SEQ ID NO: 9569 - DNA, 25 bp, Artificial
  Probe
ttagcctttcttccactattggtaa

SEQ ID NO: 9570 - DNA, 25 bp, Artificial
  Probe
ggttagcctttcttccactattggt

SEQ ID NO: 9571 - DNA, 25 bp, Artificial
  Probe
tggttagcctttcttccactattgg

SEQ ID NO: 9572 - DNA, 25 bp, Artificial
  Probe
gaaacctggcagtgataccatcaag

SEQ ID NO: 9573 - DNA, 25 bp, Artificial
  Probe
agcctttcttccactattggtaagg

SEQ ID NO: 9574 - DNA, 25 bp, Artificial
  Probe
ggaaacctggcagtgataccatcaa

SEQ ID NO: 9575 - DNA, 25 bp, Artificial
  Probe
gtgattcgtcaagttacctactgag

SEQ ID NO: 9576 - DNA, 25 bp, Artificial
  Probe
attgtggaagctatggtaacttgaa

SEQ ID NO: 9577 - DNA, 25 bp, Artificial
  Probe
gattgtggaagctatggtaacttga

SEQ ID NO: 9578 - DNA, 25 bp, Artificial
  Probe
tgattcgtcaagttacctactgagg

SEQ ID NO: 9579 - DNA, 25 bp, Artificial
  Probe
tcccaataaatgactcttaacagcc

SEQ ID NO: 9580 - DNA, 25 bp, Artificial
  Probe
ggattgtggaagctatggtaacttg

SEQ ID NO: 9581 - DNA, 25 bp, Artificial
  Probe
tggattgtggaagctatggtaactt

SEQ ID NO: 9582 - DNA, 25 bp, Artificial
  Probe
atagtgtctacttggtttctctctc

SEQ ID NO: 9583 - DNA, 25 bp, Artificial
  Probe
ggtgattcgtcaagttacctactga

SEQ ID NO: 9584 - DNA, 25 bp, Artificial
  Probe
tagtgtctacttggtttctctctcc

SEQ ID NO: 9585 - DNA, 25 bp, Artificial
  Probe
gtggattgtggaagctatggtaact

SEQ ID NO: 9586 - DNA, 25 bp, Artificial
  Probe
tatagtgtctacttggtttctctct

SEQ ID NO: 9587 - DNA, 25 bp, Artificial
  Probe
tggaagctatggtaacttgaaagat

SEQ ID NO: 9588 - DNA, 25 bp, Artificial
  Probe
ttgtggaagctatggtaacttgaaa

SEQ ID NO: 9589 - DNA, 25 bp, Artificial
  Probe
gtggaagctatggtaacttgaaaga

SEQ ID NO: 9590 - DNA, 25 bp, Artificial
  Probe
tgtggaagctatggtaacttgaaag

SEQ ID NO: 9591 - DNA, 25 bp, Artificial
  Probe
gcacgcatgaccttaaatttctaaa

SEQ ID NO: 9592 - DNA, 25 bp, Artificial
  Probe
ctacttggtttctctctcccagtaa

SEQ ID NO: 9593 - DNA, 25 bp, Artificial
  Probe
atatagtgtctacttggtttctctc

SEQ ID NO: 9594 - DNA, 25 bp, Artificial
  Probe
tgcacgcatgaccttaaatttctaa

SEQ ID NO: 9595 - DNA, 25 bp, Artificial
  Probe
atgcacgcatgaccttaaatttcta

SEQ ID NO: 9596 - DNA, 25 bp, Artificial
  Probe
tctacttggtttctctctcccagta

SEQ ID NO: 9597 - DNA, 25 bp, Artificial
  Probe
tgaatatagtgtctacttggtttct

SEQ ID NO: 9598 - DNA, 25 bp, Artificial
  Probe
gattcgtcaagttacctactgaggg

SEQ ID NO: 9599 - DNA, 25 bp, Artificial
  Probe
ttcttcctcaagagaccaatgaagg

SEQ ID NO: 9600 - DNA, 25 bp, Artificial
  Probe
cgtggattgtggaagctatggtaac

SEQ ID NO: 9601 - DNA, 25 bp, Artificial
  Probe
agtgtctacttggtttctctctccc

SEQ ID NO: 9602 - DNA, 25 bp, Artificial
  Probe
aatatagtgtctacttggtttctct

SEQ ID NO: 9603 - DNA, 25 bp, Artificial
  Probe
gaatatagtgtctacttggtttctc

SEQ ID NO: 9604 - DNA, 25 bp, Artificial
  Probe
ttgaatatagtgtctacttggtttc

SEQ ID NO: 9605 - DNA, 25 bp, Artificial
  Probe
tttcttcctcaagagaccaatgaag

SEQ ID NO: 9606 - DNA, 25 bp, Artificial
  Probe
gggtgattcgtcaagttacctactg

SEQ ID NO: 9607 - DNA, 25 bp, Artificial
  Probe
gtctacttggtttctctctcccagt

SEQ ID NO: 9608 - DNA, 25 bp, Artificial
  Probe
tgtctacttggtttctctctcccag

SEQ ID NO: 9609 - DNA, 25 bp, Artificial
  Probe
tttgaatatagtgtctacttggttt

SEQ ID NO: 9610 - DNA, 25 bp, Artificial
  Probe
gtgtctacttggtttctctctccca

SEQ ID NO: 9611 - DNA, 25 bp, Artificial
  Probe
cacgcatgaccttaaatttctaaaa

SEQ ID NO: 9612 - DNA, 25 bp, Artificial
  Probe
ctattattaagcatagaggtagctc

SEQ ID NO: 9613 - DNA, 25 bp, Artificial
  Probe
ttttcttcctcaagagaccaatgaa

SEQ ID NO: 9614 - DNA, 25 bp, Artificial
  Probe
attcgtcaagttacctactgagggc

SEQ ID NO: 9615 - DNA, 25 bp, Artificial
  Probe
acgcatgaccttaaatttctaaaag

SEQ ID NO: 9616 - DNA, 25 bp, Artificial
  Probe
tttctaaaaggttttcttcctcaag

SEQ ID NO: 9617 - DNA, 25 bp, Artificial
  Probe
gttttcttcctcaagagaccaatga

SEQ ID NO: 9618 - DNA, 25 bp, Artificial
  Probe
aaaaggttttcttcctcaagagacc

SEQ ID NO: 9619 - DNA, 25 bp, Artificial
  Probe
taaaaggttttcttcctcaagagac

SEQ ID NO: 9620 - DNA, 25 bp, Artificial
  Probe
cagtatcttcagtctggacaatgac

SEQ ID NO: 9621 - DNA, 25 bp, Artificial
  Probe
attcaccatacactatacacccaga

SEQ ID NO: 9622 - DNA, 25 bp, Artificial
  Probe
aattcaccatacactatacacccag

SEQ ID NO: 9623 - DNA, 25 bp, Artificial
  Probe
ttcaccatacactatacacccagaa

SEQ ID NO: 9624 - DNA, 25 bp, Artificial
  Probe
taattcaccatacactatacaccca

SEQ ID NO: 9625 - DNA, 25 bp, Artificial
  Probe
tcaccatacactatacacccagaac

SEQ ID NO: 9626 - DNA, 25 bp, Artificial
  Probe
caccatacactatacacccagaaca

SEQ ID NO: 9627 - DNA, 25 bp, Artificial
  Probe
atctgtttctccagtatcttcagtc

SEQ ID NO: 9628 - DNA, 25 bp, Artificial
  Probe
ctgtttctccagtatcttcagtctg

SEQ ID NO: 9629 - DNA, 25 bp, Artificial
  Probe
tctgtttctccagtatcttcagtct

SEQ ID NO: 9630 - DNA, 25 bp, Artificial
  Probe
ataattcaccatacactatacaccc

SEQ ID NO: 9631 - DNA, 25 bp, Artificial
  Probe
aataattcaccatacactatacacc

SEQ ID NO: 9632 - DNA, 25 bp, Artificial
  Probe
acaagtgttaaatccatgttgcttt

SEQ ID NO: 9633 - DNA, 25 bp, Artificial
  Probe
ttagggaaataattcaccatacact

SEQ ID NO: 9634 - DNA, 25 bp, Artificial
  Probe
agggaaataattcaccatacactat

SEQ ID NO: 9635 - DNA, 25 bp, Artificial
  Probe
tagggaaataattcaccatacacta

SEQ ID NO: 9636 - DNA, 25 bp, Artificial
  Probe
attagggaaataattcaccatacac

SEQ ID NO: 9637 - DNA, 25 bp, Artificial
  Probe
agtatcttcagtctggacaatgact

SEQ ID NO: 9638 - DNA, 25 bp, Artificial
  Probe
aacaagtgttaaatccatgttgctt

SEQ ID NO: 9639 - DNA, 25 bp, Artificial
  Probe
aaacaagtgttaaatccatgttgct

SEQ ID NO: 9640 - DNA, 25 bp, Artificial
  Probe
gaaacaagtgttaaatccatgttgc

SEQ ID NO: 9641 - DNA, 25 bp, Artificial
  Probe
ggaaacaagtgttaaatccatgttg

SEQ ID NO: 9642 - DNA, 25 bp, Artificial
  Probe
caagtgttaaatccatgttgctttt

SEQ ID NO: 9643 - DNA, 25 bp, Artificial
  Probe
gggaaataattcaccatacactata

SEQ ID NO: 9644 - DNA, 25 bp, Artificial
  Probe
caatcagttgaaacttggaaacaag

SEQ ID NO: 9645 - DNA, 25 bp, Artificial
  Probe
gagaaaagaagatgaggctgtgaca

SEQ ID NO: 9646 - DNA, 25 bp, Artificial
  Probe
tttgggagaaaagaagatgaggctg

SEQ ID NO: 9647 - DNA, 25 bp, Artificial
  Probe
aagtgttaaatccatgttgctttta

SEQ ID NO: 9648 - DNA, 25 bp, Artificial
  Probe
tccatgttgcttttattagggaaat

SEQ ID NO: 9649 - DNA, 25 bp, Artificial
  Probe
atccatgttgcttttattagggaaa

SEQ ID NO: 9650 - DNA, 25 bp, Artificial
  Probe
aatccatgttgcttttattagggaa

SEQ ID NO: 9651 - DNA, 25 bp, Artificial
  Probe
aaatccatgttgcttttattaggga

SEQ ID NO: 9652 - DNA, 25 bp, Artificial
  Probe
gaaaagaagatgaggctgtgacact

SEQ ID NO: 9653 - DNA, 25 bp, Artificial
  Probe
agaaaagaagatgaggctgtgacac

SEQ ID NO: 9654 - DNA, 25 bp, Artificial
  Probe
agtgttaaatccatgttgcttttat

SEQ ID NO: 9655 - DNA, 25 bp, Artificial
  Probe
ccatgttgcttttattagggaaata

SEQ ID NO: 9656 - DNA, 25 bp, Artificial
  Probe
taaatccatgttgcttttattaggg

SEQ ID NO: 9657 - DNA, 25 bp, Artificial
  Probe
ggagaaaagaagatgaggctgtgac

SEQ ID NO: 9658 - DNA, 25 bp, Artificial
  Probe
ccaatcagttgaaacttggaaacaa

SEQ ID NO: 9659 - DNA, 25 bp, Artificial
  Probe
aaaagaagatgaggctgtgacactg

SEQ ID NO: 9660 - DNA, 25 bp, Artificial
  Probe
ggaaataattcaccatacactatac

SEQ ID NO: 9661 - DNA, 25 bp, Artificial
  Probe
tattagggaaataattcaccataca

SEQ ID NO: 9662 - DNA, 25 bp, Artificial
  Probe
tctggacaatgactgccatctgttg

SEQ ID NO: 9663 - DNA, 25 bp, Artificial
  Probe
gtctggacaatgactgccatctgtt

SEQ ID NO: 9664 - DNA, 25 bp, Artificial
  Probe
aaagaagatgaggctgtgacactgg

SEQ ID NO: 9665 - DNA, 25 bp, Artificial
  Probe
gacaattccctacctctccttatga

SEQ ID NO: 9666 - DNA, 25 bp, Artificial
  Probe
tgacaattccctacctctccttatg

SEQ ID NO: 9667 - DNA, 25 bp, Artificial
  Probe
acaattccctacctctccttatgag

SEQ ID NO: 9668 - DNA, 25 bp, Artificial
  Probe
caattccctacctctccttatgagg

SEQ ID NO: 9669 - DNA, 25 bp, Artificial
  Probe
ctctccttatgaggtttaccccacc

SEQ ID NO: 9670 - DNA, 25 bp, Artificial
  Probe
tctccttatgaggtttaccccaccc

SEQ ID NO: 9671 - DNA, 25 bp, Artificial
  Probe
cctctccttatgaggtttaccccac

SEQ ID NO: 9672 - DNA, 25 bp, Artificial
  Probe
aatagtgacaacgcaattaacttcg

SEQ ID NO: 9673 - DNA, 25 bp, Artificial
  Probe
tcaatagtgacaacgcaattaactt

SEQ ID NO: 9674 - DNA, 25 bp, Artificial
  Probe
caatagtgacaacgcaattaacttc

SEQ ID NO: 9675 - DNA, 25 bp, Artificial
  Probe
atagtgacaacgcaattaacttcga

SEQ ID NO: 9676 - DNA, 25 bp, Artificial
  Probe
gtcaatagtgacaacgcaattaact

SEQ ID NO: 9677 - DNA, 25 bp, Artificial
  Probe
tagtgacaacgcaattaacttcgaa

SEQ ID NO: 9678 - DNA, 25 bp, Artificial
  Probe
cgtcaatagtgacaacgcaattaac

SEQ ID NO: 9679 - DNA, 25 bp, Artificial
  Probe
tacagggatgacttcaggaaaatgg

SEQ ID NO: 9680 - DNA, 25 bp, Artificial
  Probe
acagaataaagtcgtcatatcttaa

SEQ ID NO: 9681 - DNA, 25 bp, Artificial
  Probe
acgtcaatagtgacaacgcaattaa

SEQ ID NO: 9682 - DNA, 25 bp, Artificial
  Probe
gaaagcttgttcaaagaattggacg

SEQ ID NO: 9683 - DNA, 25 bp, Artificial
  Probe
aaagcttgttcaaagaattggacgt

SEQ ID NO: 9684 - DNA, 25 bp, Artificial
  Probe
tacagaataaagtcgtcatatctta

SEQ ID NO: 9685 - DNA, 25 bp, Artificial
  Probe
cagaataaagtcgtcatatcttaaa

SEQ ID NO: 9686 - DNA, 25 bp, Artificial
  Probe
acagggatgacttcaggaaaatggt

SEQ ID NO: 9687 - DNA, 25 bp, Artificial
  Probe
cagggatgacttcaggaaaatggtc

SEQ ID NO: 9688 - DNA, 25 bp, Artificial
  Probe
gtgccctcagtttgtgcagaataaa

SEQ ID NO: 9689 - DNA, 25 bp, Artificial
  Probe
agtgccctcagtttgtgcagaataa

SEQ ID NO: 9690 - DNA, 25 bp, Artificial
  Probe
tgccctcagtttgtgcagaataaaa

SEQ ID NO: 9691 - DNA, 25 bp, Artificial
  Probe
gagtgccctcagtttgtgcagaata

SEQ ID NO: 9692 - DNA, 25 bp, Artificial
  Probe
agggatgacttcaggaaaatggtca

SEQ ID NO: 9693 - DNA, 25 bp, Artificial
  Probe
taacaatctattcacaagcctcctg

SEQ ID NO: 9694 - DNA, 25 bp, Artificial
  Probe
gtaacaatctattcacaagcctcct

SEQ ID NO: 9695 - DNA, 25 bp, Artificial
  Probe
aatctattcacaagcctcctgtatc

SEQ ID NO: 9696 - DNA, 25 bp, Artificial
  Probe
caatctattcacaagcctcctgtat

SEQ ID NO: 9697 - DNA, 25 bp, Artificial
  Probe
atctattcacaagcctcctgtatct

SEQ ID NO: 9698 - DNA, 25 bp, Artificial
  Probe
tgtaacaatctattcacaagcctcc

SEQ ID NO: 9699 - DNA, 25 bp, Artificial
  Probe
tctattcacaagcctcctgtatctc

SEQ ID NO: 9700 - DNA, 25 bp, Artificial
  Probe
acaatctattcacaagcctcctgta

SEQ ID NO: 9701 - DNA, 25 bp, Artificial
  Probe
aacaatctattcacaagcctcctgt

SEQ ID NO: 9702 - DNA, 25 bp, Artificial
  Probe
tttatttccctacccaaacccttaa

SEQ ID NO: 9703 - DNA, 25 bp, Artificial
  Probe
ttatttccctacccaaacccttaac

SEQ ID NO: 9704 - DNA, 25 bp, Artificial
  Probe
tatttccctacccaaacccttaact

SEQ ID NO: 9705 - DNA, 25 bp, Artificial
  Probe
atttccctacccaaacccttaactg

SEQ ID NO: 9706 - DNA, 25 bp, Artificial
  Probe
gcaaaccttaatgacagctcttaat

SEQ ID NO: 9707 - DNA, 25 bp, Artificial
  Probe
ttgtaacaatctattcacaagcctc

SEQ ID NO: 9708 - DNA, 25 bp, Artificial
  Probe
tgcaaaccttaatgacagctcttaa

SEQ ID NO: 9709 - DNA, 25 bp, Artificial
  Probe
tttccctacccaaacccttaactga

SEQ ID NO: 9710 - DNA, 25 bp, Artificial
  Probe
ttttatttccctacccaaaccctta

SEQ ID NO: 9711 - DNA, 25 bp, Artificial
  Probe
cctacccaaacccttaactgacatg

SEQ ID NO: 9712 - DNA, 25 bp, Artificial
  Probe
ctgcaaaccttaatgacagctctta

SEQ ID NO: 9713 - DNA, 25 bp, Artificial
  Probe
ttccctacccaaacccttaactgac

SEQ ID NO: 9714 - DNA, 25 bp, Artificial
  Probe
gtaaacacacttgggaccttccttt

SEQ ID NO: 9715 - DNA, 25 bp, Artificial
  Probe
cagcggggaagcctttatttatttt

SEQ ID NO: 9716 - DNA, 25 bp, Artificial
  Probe
ccctacccaaacccttaactgacat

SEQ ID NO: 9717 - DNA, 25 bp, Artificial
  Probe
tctgcaaaccttaatgacagctctt

SEQ ID NO: 9718 - DNA, 25 bp, Artificial
  Probe
ctacccaaacccttaactgacatgg

SEQ ID NO: 9719 - DNA, 25 bp, Artificial
  Probe
agtaaacacacttgggaccttcctt

SEQ ID NO: 9720 - DNA, 25 bp, Artificial
  Probe
ctctgcaaaccttaatgacagctct

SEQ ID NO: 9721 - DNA, 25 bp, Artificial
  Probe
taaacacacttgggaccttcctttt

SEQ ID NO: 9722 - DNA, 25 bp, Artificial
  Probe
tccctacccaaacccttaactgaca

SEQ ID NO: 9723 - DNA, 25 bp, Artificial
  Probe
ccagcggggaagcctttatttattt

SEQ ID NO: 9724 - DNA, 25 bp, Artificial
  Probe
cagtaaacacacttgggaccttcct

SEQ ID NO: 9725 - DNA, 25 bp, Artificial
  Probe
cccagcggggaagcctttatttatt

SEQ ID NO: 9726 - DNA, 25 bp, Artificial
  Probe
cagaaataatgaatcagagagagca

SEQ ID NO: 9727 - DNA, 25 bp, Artificial
  Probe
acagaaataatgaatcagagagagc

SEQ ID NO: 9728 - DNA, 25 bp, Artificial
  Probe
agaaataatgaatcagagagagcaa

SEQ ID NO: 9729 - DNA, 25 bp, Artificial
  Probe
cacagaaataatgaatcagagagag

SEQ ID NO: 9730 - DNA, 25 bp, Artificial
  Probe
gaaataatgaatcagagagagcaat

SEQ ID NO: 9731 - DNA, 25 bp, Artificial
  Probe
tcacagaaataatgaatcagagaga

SEQ ID NO: 9732 - DNA, 25 bp, Artificial
  Probe
aataatgaatcagagagagcaattt

SEQ ID NO: 9733 - DNA, 25 bp, Artificial
  Probe
aaataatgaatcagagagagcaatt

SEQ ID NO: 9734 - DNA, 25 bp, Artificial
  Probe
gaatcagagagagcaattttaccac

SEQ ID NO: 9735 - DNA, 25 bp, Artificial
  Probe
tgaatcagagagagcaattttacca

SEQ ID NO: 9736 - DNA, 25 bp, Artificial
  Probe
atcagagagagcaattttaccacaa

SEQ ID NO: 9737 - DNA, 25 bp, Artificial
  Probe
aatcagagagagcaattttaccaca

SEQ ID NO: 9738 - DNA, 25 bp, Artificial
  Probe
tttaccacaaggtgaacttctctcc

SEQ ID NO: 9739 - DNA, 25 bp, Artificial
  Probe
atgaatcagagagagcaattttacc

SEQ ID NO: 9740 - DNA, 25 bp, Artificial
  Probe
tcagagagagcaattttaccacaag

SEQ ID NO: 9741 - DNA, 25 bp, Artificial
  Probe
cagagagagcaattttaccacaagg

SEQ ID NO: 9742 - DNA, 25 bp, Artificial
  Probe
aatgaatcagagagagcaattttac

SEQ ID NO: 9743 - DNA, 25 bp, Artificial
  Probe
caattttaccacaaggtgaacttct

SEQ ID NO: 9744 - DNA, 25 bp, Artificial
  Probe
attttaccacaaggtgaacttctct

SEQ ID NO: 9745 - DNA, 25 bp, Artificial
  Probe
aattttaccacaaggtgaacttctc

SEQ ID NO: 9746 - DNA, 25 bp, Artificial
  Probe
ttttaccacaaggtgaacttctctc

SEQ ID NO: 9747 - DNA, 25 bp, Artificial
  Probe
gcaattttaccacaaggtgaacttc

SEQ ID NO: 9748 - DNA, 25 bp, Artificial
  Probe
agcaattttaccacaaggtgaactt

SEQ ID NO: 9749 - DNA, 25 bp, Artificial
  Probe
gagagcaattttaccacaaggtgaa

SEQ ID NO: 9750 - DNA, 25 bp, Artificial
  Probe
ttaccacaaggtgaacttctctccc

SEQ ID NO: 9751 - DNA, 25 bp, Artificial
  Probe
gagcaattttaccacaaggtgaact

SEQ ID NO: 9752 - DNA, 25 bp, Artificial
  Probe
agagcaattttaccacaaggtgaac

SEQ ID NO: 9753 - DNA, 25 bp, Artificial
  Probe
ataatgaatcagagagagcaatttt

SEQ ID NO: 9754 - DNA, 25 bp, Artificial
  Probe
gagagagcaattttaccacaaggtg

SEQ ID NO: 9755 - DNA, 25 bp, Artificial
  Probe
agagagagcaattttaccacaaggt

SEQ ID NO: 9756 - DNA, 25 bp, Artificial
  Probe
ttcacagaaataatgaatcagagag

SEQ ID NO: 9757 - DNA, 25 bp, Artificial
  Probe
agagagcaattttaccacaaggtga

SEQ ID NO: 9758 - DNA, 25 bp, Artificial
  Probe
ttaaaattccacccacagcagtgaa

SEQ ID NO: 9759 - DNA, 25 bp, Artificial
  Probe
taatgaatcagagagagcaatttta

SEQ ID NO: 9760 - DNA, 25 bp, Artificial
  Probe
cttaaaattccacccacagcagtga

SEQ ID NO: 9761 - DNA, 25 bp, Artificial
  Probe
taaaattccacccacagcagtgaac

SEQ ID NO: 9762 - DNA, 25 bp, Artificial
  Probe
attcacagaaataatgaatcagaga

SEQ ID NO: 9763 - DNA, 25 bp, Artificial
  Probe
aggaattcacagaaataatgaatca

SEQ ID NO: 9764 - DNA, 25 bp, Artificial
  Probe
tgaggaattcacagaaataatgaat

SEQ ID NO: 9765 - DNA, 25 bp, Artificial
  Probe
ggaattcacagaaataatgaatcag

SEQ ID NO: 9766 - DNA, 25 bp, Artificial
  Probe
aattcacagaaataatgaatcagag

SEQ ID NO: 9767 - DNA, 25 bp, Artificial
  Probe
gaggaattcacagaaataatgaatc

SEQ ID NO: 9768 - DNA, 25 bp, Artificial
  Probe
gaattcacagaaataatgaatcaga

SEQ ID NO: 9769 - DNA, 25 bp, Artificial
  Probe
ccttcaccatttcttcatctgtttc

SEQ ID NO: 9770 - DNA, 25 bp, Artificial
  Probe
cttcaccatttcttcatctgtttct

SEQ ID NO: 9771 - DNA, 25 bp, Artificial
  Probe
ttcaccatttcttcatctgtttctt

SEQ ID NO: 9772 - DNA, 25 bp, Artificial
  Probe
cccttcaccatttcttcatctgttt

SEQ ID NO: 9773 - DNA, 25 bp, Artificial
  Probe
tcaccatttcttcatctgtttctta

SEQ ID NO: 9774 - DNA, 25 bp, Artificial
  Probe
caccatttcttcatctgtttcttaa

SEQ ID NO: 9775 - DNA, 25 bp, Artificial
  Probe
actagctgtagaaataaaccgttcc

SEQ ID NO: 9776 - DNA, 25 bp, Artificial
  Probe
gggaaccatgtaaatatgtgagata

SEQ ID NO: 9777 - DNA, 25 bp, Artificial
  Probe
aactagctgtagaaataaaccgttc

SEQ ID NO: 9778 - DNA, 25 bp, Artificial
  Probe
ctagctgtagaaataaaccgttccc

SEQ ID NO: 9779 - DNA, 25 bp, Artificial
  Probe
tgggaaccatgtaaatatgtgagat

SEQ ID NO: 9780 - DNA, 25 bp, Artificial
  Probe
gtgggaaccatgtaaatatgtgaga

SEQ ID NO: 9781 - DNA, 25 bp, Artificial
  Probe
ttaactagctgtagaaataaaccgt

SEQ ID NO: 9782 - DNA, 25 bp, Artificial
  Probe
ctgtttcttaaggtttgagcgtaat

SEQ ID NO: 9783 - DNA, 25 bp, Artificial
  Probe
atctgtttcttaaggtttgagcgta

SEQ ID NO: 9784 - DNA, 25 bp, Artificial
  Probe
tgtttcttaaggtttgagcgtaatt

SEQ ID NO: 9785 - DNA, 25 bp, Artificial
  Probe
tctgtttcttaaggtttgagcgtaa

SEQ ID NO: 9786 - DNA, 25 bp, Artificial
  Probe
ggtgggaaccatgtaaatatgtgag

SEQ ID NO: 9787 - DNA, 25 bp, Artificial
  Probe
gaggtgggaaccatgtaaatatgtg

SEQ ID NO: 9788 - DNA, 25 bp, Artificial
  Probe
gtgaggtgggaaccatgtaaatatg

SEQ ID NO: 9789 - DNA, 25 bp, Artificial
  Probe
taactagctgtagaaataaaccgtt

SEQ ID NO: 9790 - DNA, 25 bp, Artificial
  Probe
tttattttctggatgtgtttggagc

SEQ ID NO: 9791 - DNA, 25 bp, Artificial
  Probe
aggtgggaaccatgtaaatatgtga

SEQ ID NO: 9792 - DNA, 25 bp, Artificial
  Probe
tgaggtgggaaccatgtaaatatgt

SEQ ID NO: 9793 - DNA, 25 bp, Artificial
  Probe
ttcatctgtttcttaaggtttgagc

SEQ ID NO: 9794 - DNA, 25 bp, Artificial
  Probe
gtttcttaaggtttgagcgtaattt

SEQ ID NO: 9795 - DNA, 25 bp, Artificial
  Probe
catctgtttcttaaggtttgagcgt

SEQ ID NO: 9796 - DNA, 25 bp, Artificial
  Probe
ataataatgtagactgggaagttcc

SEQ ID NO: 9797 - DNA, 25 bp, Artificial
  Probe
tcatctgtttcttaaggtttgagcg

SEQ ID NO: 9798 - DNA, 25 bp, Artificial
  Probe
ggtgaggtgggaaccatgtaaatat

SEQ ID NO: 9799 - DNA, 25 bp, Artificial
  Probe
ccatttcttcatctgtttcttaagg

SEQ ID NO: 9800 - DNA, 25 bp, Artificial
  Probe
tcttcatctgtttcttaaggtttga

SEQ ID NO: 9801 - DNA, 25 bp, Artificial
  Probe
atttattttctggatgtgtttggag

SEQ ID NO: 9802 - DNA, 25 bp, Artificial
  Probe
tttaactagctgtagaaataaaccg

SEQ ID NO: 9803 - DNA, 25 bp, Artificial
  Probe
cttcatctgtttcttaaggtttgag

SEQ ID NO: 9804 - DNA, 25 bp, Artificial
  Probe
aataataatgtagactgggaagttc

SEQ ID NO: 9805 - DNA, 25 bp, Artificial
  Probe
ttcttcatctgtttcttaaggtttg

SEQ ID NO: 9806 - DNA, 25 bp, Artificial
  Probe
ggaaccatgtaaatatgtgagatat

SEQ ID NO: 9807 - DNA, 25 bp, Artificial
  Probe
atttctgacccatctctatttattt

SEQ ID NO: 9808 - DNA, 25 bp, Artificial
  Probe
catttcttcatctgtttcttaaggt

SEQ ID NO: 9809 - DNA, 25 bp, Artificial
  Probe
accatttcttcatctgtttcttaag

SEQ ID NO: 9810 - DNA, 25 bp, Artificial
  Probe
aatttctgacccatctctatttatt

SEQ ID NO: 9811 - DNA, 25 bp, Artificial
  Probe
tattttctggatgtgtttggagctt

SEQ ID NO: 9812 - DNA, 25 bp, Artificial
  Probe
ttattttctggatgtgtttggagct

SEQ ID NO: 9813 - DNA, 25 bp, Artificial
  Probe
ggaagaaacactttgtgcttggttt

SEQ ID NO: 9814 - DNA, 25 bp, Artificial
  Probe
aaacaaataaccgaggtaccagagc

SEQ ID NO: 9815 - DNA, 25 bp, Artificial
  Probe
aaaacaaataaccgaggtaccagag

SEQ ID NO: 9816 - DNA, 25 bp, Artificial
  Probe
aacaaataaccgaggtaccagagct

SEQ ID NO: 9817 - DNA, 25 bp, Artificial
  Probe
acaaataaccgaggtaccagagctg

SEQ ID NO: 9818 - DNA, 25 bp, Artificial
  Probe
gagcacaaaggaatcttgagacatt

SEQ ID NO: 9819 - DNA, 25 bp, Artificial
  Probe
ttgagagcacaaaggaatcttgaga

SEQ ID NO: 9820 - DNA, 25 bp, Artificial
  Probe
agagcacaaaggaatcttgagacat

SEQ ID NO: 9821 - DNA, 25 bp, Artificial
  Probe
gagagcacaaaggaatcttgagaca

SEQ ID NO: 9822 - DNA, 25 bp, Artificial
  Probe
tgagagcacaaaggaatcttgagac

SEQ ID NO: 9823 - DNA, 25 bp, Artificial
  Probe
tttcttcttccttgttggagaccct

SEQ ID NO: 9824 - DNA, 25 bp, Artificial
  Probe
taattcatgcgtatatgcagacaaa

SEQ ID NO: 9825 - DNA, 25 bp, Artificial
  Probe
gttttcttcttccttgttggagacc

SEQ ID NO: 9826 - DNA, 25 bp, Artificial
  Probe
gcgtatatgcagacaaaatatgttc

SEQ ID NO: 9827 - DNA, 25 bp, Artificial
  Probe
ttcttcttccttgttggagaccctg

SEQ ID NO: 9828 - DNA, 25 bp, Artificial
  Probe
ttttcttcttccttgttggagaccc

SEQ ID NO: 9829 - DNA, 25 bp, Artificial
  Probe
cgtatatgcagacaaaatatgttct

SEQ ID NO: 9830 - DNA, 25 bp, Artificial
  Probe
aattcatgcgtatatgcagacaaaa

SEQ ID NO: 9831 - DNA, 25 bp, Artificial
  Probe
attcatgcgtatatgcagacaaaat

SEQ ID NO: 9832 - DNA, 25 bp, Artificial
  Probe
tgcgtatatgcagacaaaatatgtt

SEQ ID NO: 9833 - DNA, 25 bp, Artificial
  Probe
atgcgtatatgcagacaaaatatgt

SEQ ID NO: 9834 - DNA, 25 bp, Artificial
  Probe
ttcatgcgtatatgcagacaaaata

SEQ ID NO: 9835 - DNA, 25 bp, Artificial
  Probe
catgcgtatatgcagacaaaatatg

SEQ ID NO: 9836 - DNA, 25 bp, Artificial
  Probe
tcatgcgtatatgcagacaaaatat

SEQ ID NO: 9837 - DNA, 25 bp, Artificial
  Probe
tgcagacaaaatatgttcttaattg

SEQ ID NO: 9838 - DNA, 25 bp, Artificial
  Probe
gcagacaaaatatgttcttaattgt

SEQ ID NO: 9839 - DNA, 25 bp, Artificial
  Probe
atgcagacaaaatatgttcttaatt

SEQ ID NO: 9840 - DNA, 25 bp, Artificial
  Probe
gtatatgcagacaaaatatgttctt

SEQ ID NO: 9841 - DNA, 25 bp, Artificial
  Probe
tatgcagacaaaatatgttcttaat

SEQ ID NO: 9842 - DNA, 25 bp, Artificial
  Probe
atatgcagacaaaatatgttcttaa

SEQ ID NO: 9843 - DNA, 25 bp, Artificial
  Probe
aagatggaccagattggaattacag

SEQ ID NO: 9844 - DNA, 25 bp, Artificial
  Probe
tgacagggtgaatacagatttacaa

SEQ ID NO: 9845 - DNA, 25 bp, Artificial
  Probe
ttgacagggtgaatacagatttaca

SEQ ID NO: 9846 - DNA, 25 bp, Artificial
  Probe
gacagggtgaatacagatttacaac

SEQ ID NO: 9847 - DNA, 25 bp, Artificial
  Probe
gatggaccagattggaattacagtg

SEQ ID NO: 9848 - DNA, 25 bp, Artificial
  Probe
agatggaccagattggaattacagt

SEQ ID NO: 9849 - DNA, 25 bp, Artificial
  Probe
atatggataggaggaaagatggacc

SEQ ID NO: 9850 - DNA, 25 bp, Artificial
  Probe
attgacagggtgaatacagatttac

SEQ ID NO: 9851 - DNA, 25 bp, Artificial
  Probe
tatatggataggaggaaagatggac

SEQ ID NO: 9852 - DNA, 25 bp, Artificial
  Probe
gtaattgacagggtgaatacagatt

SEQ ID NO: 9853 - DNA, 25 bp, Artificial
  Probe
gataggaggaaagatggaccagatt

SEQ ID NO: 9854 - DNA, 25 bp, Artificial
  Probe
ccattgtaattgacagggtgaatac

SEQ ID NO: 9855 - DNA, 25 bp, Artificial
  Probe
ataggaggaaagatggaccagattg

SEQ ID NO: 9856 - DNA, 25 bp, Artificial
  Probe
aattgacagggtgaatacagattta

SEQ ID NO: 9857 - DNA, 25 bp, Artificial
  Probe
taattgacagggtgaatacagattt

SEQ ID NO: 9858 - DNA, 25 bp, Artificial
  Probe
atggaccagattggaattacagtgg

SEQ ID NO: 9859 - DNA, 25 bp, Artificial
  Probe
gggtgaatacagatttacaaccttg

SEQ ID NO: 9860 - DNA, 25 bp, Artificial
  Probe
accattgtaattgacagggtgaata

SEQ ID NO: 9861 - DNA, 25 bp, Artificial
  Probe
aaagatggaccagattggaattaca

SEQ ID NO: 9862 - DNA, 25 bp, Artificial
  Probe
agggtgaatacagatttacaacctt

SEQ ID NO: 9863 - DNA, 25 bp, Artificial
  Probe
gaaagatggaccagattggaattac

SEQ ID NO: 9864 - DNA, 25 bp, Artificial
  Probe
acaaccttgtgtaagaagctgactt

SEQ ID NO: 9865 - DNA, 25 bp, Artificial
  Probe
cagggtgaatacagatttacaacct

SEQ ID NO: 9866 - DNA, 25 bp, Artificial
  Probe
ggaaagatggaccagattggaatta

SEQ ID NO: 9867 - DNA, 25 bp, Artificial
  Probe
tgggtttaatatatggataggagga

SEQ ID NO: 9868 - DNA, 25 bp, Artificial
  Probe
acagggtgaatacagatttacaacc

SEQ ID NO: 9869 - DNA, 25 bp, Artificial
  Probe
atatatggataggaggaaagatgga

SEQ ID NO: 9870 - DNA, 25 bp, Artificial
  Probe
tgaatacagatttacaaccttgtgt

SEQ ID NO: 9871 - DNA, 25 bp, Artificial
  Probe
agctgtatgtgagatatccagtaca

SEQ ID NO: 9872 - DNA, 25 bp, Artificial
  Probe
tacaaccttgtgtaagaagctgact

SEQ ID NO: 9873 - DNA, 25 bp, Artificial
  Probe
gtgaatacagatttacaaccttgtg

SEQ ID NO: 9874 - DNA, 25 bp, Artificial
  Probe
ttgtaattgacagggtgaatacaga

SEQ ID NO: 9875 - DNA, 25 bp, Artificial
  Probe
tgtaattgacagggtgaatacagat

SEQ ID NO: 9876 - DNA, 25 bp, Artificial
  Probe
caaccttgtgtaagaagctgacttt

SEQ ID NO: 9877 - DNA, 25 bp, Artificial
  Probe
ggtgaatacagatttacaaccttgt

SEQ ID NO: 9878 - DNA, 25 bp, Artificial
  Probe
ggataggaggaaagatggaccagat

SEQ ID NO: 9879 - DNA, 25 bp, Artificial
  Probe
cattgtaattgacagggtgaataca

SEQ ID NO: 9880 - DNA, 25 bp, Artificial
  Probe
attgtaattgacagggtgaatacag

SEQ ID NO: 9881 - DNA, 25 bp, Artificial
  Probe
aggaaagatggaccagattggaatt

SEQ ID NO: 9882 - DNA, 25 bp, Artificial
  Probe
aatatatggataggaggaaagatgg

SEQ ID NO: 9883 - DNA, 25 bp, Artificial
  Probe
tatggataggaggaaagatggacca

SEQ ID NO: 9884 - DNA, 25 bp, Artificial
  Probe
gggtttaatatatggataggaggaa

SEQ ID NO: 9885 - DNA, 25 bp, Artificial
  Probe
atgggtttaatatatggataggagg

SEQ ID NO: 9886 - DNA, 25 bp, Artificial
  Probe
accagattggaattacagtgggttt

SEQ ID NO: 9887 - DNA, 25 bp, Artificial
  Probe
gaggaaagatggaccagattggaat

SEQ ID NO: 9888 - DNA, 25 bp, Artificial
  Probe
tccaagcataattgttaagaacaca

SEQ ID NO: 9889 - DNA, 25 bp, Artificial
  Probe
caatccaagcataattgttaagaac

SEQ ID NO: 9890 - DNA, 25 bp, Artificial
  Probe
ccaagcataattgttaagaacacat

SEQ ID NO: 9891 - DNA, 25 bp, Artificial
  Probe
atccaagcataattgttaagaacac

SEQ ID NO: 9892 - DNA, 25 bp, Artificial
  Probe
caagcataattgttaagaacacatg

SEQ ID NO: 9893 - DNA, 25 bp, Artificial
  Probe
aatccaagcataattgttaagaaca

SEQ ID NO: 9894 - DNA, 25 bp, Artificial
  Probe
aagcataattgttaagaacacatgt

SEQ ID NO: 9895 - DNA, 25 bp, Artificial
  Probe
acaatccaagcataattgttaagaa

SEQ ID NO: 9896 - DNA, 25 bp, Artificial
  Probe
agcataattgttaagaacacatgta

SEQ ID NO: 9897 - DNA, 25 bp, Artificial
  Probe
tcatgaacaatccaagcataattgt

SEQ ID NO: 9898 - DNA, 25 bp, Artificial
  Probe
agctttgttttaatgtcttatgaaa

SEQ ID NO: 9899 - DNA, 25 bp, Artificial
  Probe
gctttgttttaatgtcttatgaaat

SEQ ID NO: 9900 - DNA, 25 bp, Artificial
  Probe
ctagctttgttttaatgtcttatga

SEQ ID NO: 9901 - DNA, 25 bp, Artificial
  Probe
gcataattgttaagaacacatgtat

SEQ ID NO: 9902 - DNA, 25 bp, Artificial
  Probe
tagctttgttttaatgtcttatgaa

SEQ ID NO: 9903 - DNA, 25 bp, Artificial
  Probe
aagaacacatgtattaaagttcatg

SEQ ID NO: 9904 - DNA, 25 bp, Artificial
  Probe
tgttaagaacacatgtattaaagtt

SEQ ID NO: 9905 - DNA, 25 bp, Artificial
  Probe
ttgttaagaacacatgtattaaagt

SEQ ID NO: 9906 - DNA, 25 bp, Artificial
  Probe
tggatgtgacacttattggatgtta

SEQ ID NO: 9907 - DNA, 25 bp, Artificial
  Probe
ttggatgtgacacttattggatgtt

SEQ ID NO: 9908 - DNA, 25 bp, Artificial
  Probe
ggatgtgacacttattggatgttat

SEQ ID NO: 9909 - DNA, 25 bp, Artificial
  Probe
ttaggaggtggaattaagaacacac

SEQ ID NO: 9910 - DNA, 25 bp, Artificial
  Probe
taggaggtggaattaagaacacaca

SEQ ID NO: 9911 - DNA, 25 bp, Artificial
  Probe
tgtgacacttattggatgttattct

SEQ ID NO: 9912 - DNA, 25 bp, Artificial
  Probe
aatgtcaaggaatagcaaagtcaac

SEQ ID NO: 9913 - DNA, 25 bp, Artificial
  Probe
caaatgtcaaggaatagcaaagtca

SEQ ID NO: 9914 - DNA, 25 bp, Artificial
  Probe
aaatgtcaaggaatagcaaagtcaa

SEQ ID NO: 9915 - DNA, 25 bp, Artificial
  Probe
acaaatgtcaaggaatagcaaagtc

SEQ ID NO: 9916 - DNA, 25 bp, Artificial
  Probe
ccttcttatgtgttaccatagatgt

SEQ ID NO: 9917 - DNA, 25 bp, Artificial
  Probe
taatgcccttcttatgtgttaccat

SEQ ID NO: 9918 - DNA, 25 bp, Artificial
  Probe
aacaaatgtcaaggaatagcaaagt

SEQ ID NO: 9919 - DNA, 25 bp, Artificial
  Probe
ctttggatgtgacacttattggatg

SEQ ID NO: 9920 - DNA, 25 bp, Artificial
  Probe
tctttggatgtgacacttattggat

SEQ ID NO: 9921 - DNA, 25 bp, Artificial
  Probe
ttctttggatgtgacacttattgga

SEQ ID NO: 9922 - DNA, 25 bp, Artificial
  Probe
tgtgttaccatagatgtgaaacctt

SEQ ID NO: 9923 - DNA, 25 bp, Artificial
  Probe
atgtgttaccatagatgtgaaacct

SEQ ID NO: 9924 - DNA, 25 bp, Artificial
  Probe
ataatgcccttcttatgtgttacca

SEQ ID NO: 9925 - DNA, 25 bp, Artificial
  Probe
attctttggatgtgacacttattgg

SEQ ID NO: 9926 - DNA, 25 bp, Artificial
  Probe
actttaggaggtggaattaagaaca

SEQ ID NO: 9927 - DNA, 25 bp, Artificial
  Probe
gcatttctttccctgttctctcttt

SEQ ID NO: 9928 - DNA, 25 bp, Artificial
  Probe
gactttaggaggtggaattaagaac

SEQ ID NO: 9929 - DNA, 25 bp, Artificial
  Probe
atgtgacacttattggatgttattc

SEQ ID NO: 9930 - DNA, 25 bp, Artificial
  Probe
gatgtgacacttattggatgttatt

SEQ ID NO: 9931 - DNA, 25 bp, Artificial
  Probe
tgattctttggatgtgacacttatt

SEQ ID NO: 9932 - DNA, 25 bp, Artificial
  Probe
ggaggtggaattaagaacacacaga

SEQ ID NO: 9933 - DNA, 25 bp, Artificial
  Probe
aggaggtggaattaagaacacacag

SEQ ID NO: 9934 - DNA, 25 bp, Artificial
  Probe
tatggattggcacattatattactg

SEQ ID NO: 9935 - DNA, 25 bp, Artificial
  Probe
gattctttggatgtgacacttattg

SEQ ID NO: 9936 - DNA, 25 bp, Artificial
  Probe
tcttatgtgttaccatagatgtgaa

SEQ ID NO: 9937 - DNA, 25 bp, Artificial
  Probe
ttcttatgtgttaccatagatgtga

SEQ ID NO: 9938 - DNA, 25 bp, Artificial
  Probe
gtgttaccatagatgtgaaacctta

SEQ ID NO: 9939 - DNA, 25 bp, Artificial
  Probe
tataatgcccttcttatgtgttacc

SEQ ID NO: 9940 - DNA, 25 bp, Artificial
  Probe
tttggatgtgacacttattggatgt

SEQ ID NO: 9941 - DNA, 25 bp, Artificial
  Probe
atgtcaaggaatagcaaagtcaaca

SEQ ID NO: 9942 - DNA, 25 bp, Artificial
  Probe
taacaaatgtcaaggaatagcaaag

SEQ ID NO: 9943 - DNA, 25 bp, Artificial
  Probe
agcatttctttccctgttctctctt

SEQ ID NO: 9944 - DNA, 25 bp, Artificial
  Probe
cttcttatgtgttaccatagatgtg

SEQ ID NO: 9945 - DNA, 25 bp, Artificial
  Probe
tgtcaaggaatagcaaagtcaacaa

SEQ ID NO: 9946 - DNA, 25 bp, Artificial
  Probe
atggattggcacattatattactgc

SEQ ID NO: 9947 - DNA, 25 bp, Artificial
  Probe
gcccttcttatgtgttaccatagat

SEQ ID NO: 9948 - DNA, 25 bp, Artificial
  Probe
aatgcccttcttatgtgttaccata

SEQ ID NO: 9949 - DNA, 25 bp, Artificial
  Probe
tttaggaggtggaattaagaacaca

SEQ ID NO: 9950 - DNA, 25 bp, Artificial
  Probe
atgcccttcttatgtgttaccatag

SEQ ID NO: 9951 - DNA, 25 bp, Artificial
  Probe
gaagttgtgattagcctaagacctc

SEQ ID NO: 9952 - DNA, 25 bp, Artificial
  Probe
tgtgattagcctaagacctcaagaa

SEQ ID NO: 9953 - DNA, 25 bp, Artificial
  Probe
ttgtgattagcctaagacctcaaga

SEQ ID NO: 9954 - DNA, 25 bp, Artificial
  Probe
gttgtgattagcctaagacctcaag

SEQ ID NO: 9955 - DNA, 25 bp, Artificial
  Probe
agttgtgattagcctaagacctcaa

SEQ ID NO: 9956 - DNA, 25 bp, Artificial
  Probe
aagttgtgattagcctaagacctca

SEQ ID NO: 9957 - DNA, 25 bp, Artificial
  Probe
ggaagttgtgattagcctaagacct

SEQ ID NO: 9958 - DNA, 25 bp, Artificial
  Probe
gaggaagttgtgattagcctaagac

SEQ ID NO: 9959 - DNA, 25 bp, Artificial
  Probe
ggaggaagttgtgattagcctaaga

SEQ ID NO: 9960 - DNA, 25 bp, Artificial
  Probe
aggaagttgtgattagcctaagacc

SEQ ID NO: 9961 - DNA, 25 bp, Artificial
  Probe
gtgattagcctaagacctcaagaaa

SEQ ID NO: 9962 - DNA, 25 bp, Artificial
  Probe
ggtagagggaggaagttgtgattag

SEQ ID NO: 9963 - DNA, 25 bp, Artificial
  Probe
gaataggtagagggaggaagttgtg

SEQ ID NO: 9964 - DNA, 25 bp, Artificial
  Probe
ataggtagagggaggaagttgtgat

SEQ ID NO: 9965 - DNA, 25 bp, Artificial
  Probe
atggaataggtagagggaggaagtt

SEQ ID NO: 9966 - DNA, 25 bp, Artificial
  Probe
aggtagagggaggaagttgtgatta

SEQ ID NO: 9967 - DNA, 25 bp, Artificial
  Probe
taggtagagggaggaagttgtgatt

SEQ ID NO: 9968 - DNA, 25 bp, Artificial
  Probe
aataggtagagggaggaagttgtga

SEQ ID NO: 9969 - DNA, 25 bp, Artificial
  Probe
gatggaataggtagagggaggaagt

SEQ ID NO: 9970 - DNA, 25 bp, Artificial
  Probe
gtagagggaggaagttgtgattagc

SEQ ID NO: 9971 - DNA, 25 bp, Artificial
  Probe
ggaataggtagagggaggaagttgt

SEQ ID NO: 9972 - DNA, 25 bp, Artificial
  Probe
tggaataggtagagggaggaagttg

SEQ ID NO: 9973 - DNA, 25 bp, Artificial
  Probe
ggatggaataggtagagggaggaag

SEQ ID NO: 9974 - DNA, 25 bp, Artificial
  Probe
tagagggaggaagttgtgattagcc

SEQ ID NO: 9975 - DNA, 25 bp, Artificial
  Probe
tggatggaataggtagagggaggaa

SEQ ID NO: 9976 - DNA, 25 bp, Artificial
  Probe
gggaggaagttgtgattagcctaag

SEQ ID NO: 9977 - DNA, 25 bp, Artificial
  Probe
agggaggaagttgtgattagcctaa

SEQ ID NO: 9978 - DNA, 25 bp, Artificial
  Probe
tgattagcctaagacctcaagaaaa

SEQ ID NO: 9979 - DNA, 25 bp, Artificial
  Probe
gagggaggaagttgtgattagccta

SEQ ID NO: 9980 - DNA, 25 bp, Artificial
  Probe
gttgtgttttgagcaaaagcatttt

SEQ ID NO: 9981 - DNA, 25 bp, Artificial
  Probe
aacttggttgtgttttgagcaaaag

SEQ ID NO: 9982 - DNA, 25 bp, Artificial
  Probe
ggttgtgttttgagcaaaagcattt

SEQ ID NO: 9983 - DNA, 25 bp, Artificial
  Probe
caaacttggttgtgttttgagcaaa

SEQ ID NO: 9984 - DNA, 25 bp, Artificial
  Probe
aaacttggttgtgttttgagcaaaa

SEQ ID NO: 9985 - DNA, 25 bp, Artificial
  Probe
agagggaggaagttgtgattagcct

SEQ ID NO: 9986 - DNA, 25 bp, Artificial
  Probe
tggttgtgttttgagcaaaagcatt

SEQ ID NO: 9987 - DNA, 25 bp, Artificial
  Probe
ttggttgtgttttgagcaaaagcat

SEQ ID NO: 9988 - DNA, 25 bp, Artificial
  Probe
cttggttgtgttttgagcaaaagca

SEQ ID NO: 9989 - DNA, 25 bp, Artificial
  Probe
acttggttgtgttttgagcaaaagc

SEQ ID NO: 9990 - DNA, 25 bp, Artificial
  Probe
acaaacttggttgtgttttgagcaa

SEQ ID NO: 9991 - DNA, 25 bp, Artificial
  Probe
aacaaacttggttgtgttttgagca

SEQ ID NO: 9992 - DNA, 25 bp, Artificial
  Probe
tcttttgtgagcgtatgcatggttt

SEQ ID NO: 9993 - DNA, 25 bp, Artificial
  Probe
ttcttttgtgagcgtatgcatggtt

SEQ ID NO: 9994 - DNA, 25 bp, Artificial
  Probe
gttcttttgtgagcgtatgcatggt

SEQ ID NO: 9995 - DNA, 25 bp, Artificial
  Probe
tggttcttttgtgagcgtatgcatg

SEQ ID NO: 9996 - DNA, 25 bp, Artificial
  Probe
ggttcttttgtgagcgtatgcatgg

SEQ ID NO: 9997 - DNA, 25 bp, Artificial
  Probe
cagtttgaagatggacagaagattg

SEQ ID NO: 9998 - DNA, 25 bp, Artificial
  Probe
ttgaagatggacagaagattgtggt

SEQ ID NO: 9999 - DNA, 25 bp, Artificial
  Probe
tgaagatggacagaagattgtggtg

SEQ ID NO: 10000 - DNA, 25 bp, Artificial
  Probe
agtttgaagatggacagaagattgt

SEQ ID NO: 10001 - DNA, 25 bp, Artificial
  Probe
gtttgaagatggacagaagattgtg

SEQ ID NO: 10002 - DNA, 25 bp, Artificial
  Probe
tttgaagatggacagaagattgtgg

SEQ ID NO: 10003 - DNA, 25 bp, Artificial
  Probe
ccagtttgaagatggacagaagatt

SEQ ID NO: 10004 - DNA, 25 bp, Artificial
  Probe
gaagatggacagaagattgtggtgc

SEQ ID NO: 10005 - DNA, 25 bp, Artificial
  Probe
cagaagattgtggtgcaaggagaac

SEQ ID NO: 10006 - DNA, 25 bp, Artificial
  Probe
gatggacagaagattgtggtgcaag

SEQ ID NO: 10007 - DNA, 25 bp, Artificial
  Probe
cctttgaagtgcgttaagttggacc

SEQ ID NO: 10008 - DNA, 25 bp, Artificial
  Probe
ccctttgaagtgcgttaagttggac

SEQ ID NO: 10009 - DNA, 25 bp, Artificial
  Probe
acagaagattgtggtgcaaggagaa

SEQ ID NO: 10010 - DNA, 25 bp, Artificial
  Probe
agatggacagaagattgtggtgcaa

SEQ ID NO: 10011 - DNA, 25 bp, Artificial
  Probe
aagatggacagaagattgtggtgca

SEQ ID NO: 10012 - DNA, 25 bp, Artificial
  Probe
ctttgaagtgcgttaagttggaccg

SEQ ID NO: 10013 - DNA, 25 bp, Artificial
  Probe
gacagaagattgtggtgcaaggaga

SEQ ID NO: 10014 - DNA, 25 bp, Artificial
  Probe
tccagtttgaagatggacagaagat

SEQ ID NO: 10015 - DNA, 25 bp, Artificial
  Probe
ggggatgagttcttcattattttag

SEQ ID NO: 10016 - DNA, 25 bp, Artificial
  Probe
agaagattgtggtgcaaggagaacc

SEQ ID NO: 10017 - DNA, 25 bp, Artificial
  Probe
gggatgagttcttcattattttaga

SEQ ID NO: 10018 - DNA, 25 bp, Artificial
  Probe
gtacaacagctttgtgtcactgtcc

SEQ ID NO: 10019 - DNA, 25 bp, Artificial
  Probe
acataaggccataactttagtagca

SEQ ID NO: 10020 - DNA, 25 bp, Artificial
  Probe
taaggccataactttagtagcattg

SEQ ID NO: 10021 - DNA, 25 bp, Artificial
  Probe
cataaggccataactttagtagcat

SEQ ID NO: 10022 - DNA, 25 bp, Artificial
  Probe
ataaggccataactttagtagcatt

SEQ ID NO: 10023 - DNA, 25 bp, Artificial
  Probe
gttacttgatcctgtaactcccaac

SEQ ID NO: 10024 - DNA, 25 bp, Artificial
  Probe
gatagatggtaggattgaggtaagt

SEQ ID NO: 10025 - DNA, 25 bp, Artificial
  Probe
tgatagatggtaggattgaggtaag

SEQ ID NO: 10026 - DNA, 25 bp, Artificial
  Probe
atagatggtaggattgaggtaagtt

SEQ ID NO: 10027 - DNA, 25 bp, Artificial
  Probe
atgatagatggtaggattgaggtaa

SEQ ID NO: 10028 - DNA, 25 bp, Artificial
  Probe
acatgatagatggtaggattgaggt

SEQ ID NO: 10029 - DNA, 25 bp, Artificial
  Probe
catgatagatggtaggattgaggta

SEQ ID NO: 10030 - DNA, 25 bp, Artificial
  Probe
tacatgatagatggtaggattgagg

SEQ ID NO: 10031 - DNA, 25 bp, Artificial
  Probe
agtacatgatagatggtaggattga

SEQ ID NO: 10032 - DNA, 25 bp, Artificial
  Probe
tgagttgtagtacatgatagatggt

SEQ ID NO: 10033 - DNA, 25 bp, Artificial
  Probe
gtacatgatagatggtaggattgag

SEQ ID NO: 10034 - DNA, 25 bp, Artificial
  Probe
gttgtagtacatgatagatggtagg

SEQ ID NO: 10035 - DNA, 25 bp, Artificial
  Probe
ttgtagtacatgatagatggtagga

SEQ ID NO: 10036 - DNA, 25 bp, Artificial
  Probe
tgtagtacatgatagatggtaggat

SEQ ID NO: 10037 - DNA, 25 bp, Artificial
  Probe
tagtacatgatagatggtaggattg

SEQ ID NO: 10038 - DNA, 25 bp, Artificial
  Probe
gtagtacatgatagatggtaggatt

SEQ ID NO: 10039 - DNA, 25 bp, Artificial
  Probe
agttgtagtacatgatagatggtag

SEQ ID NO: 10040 - DNA, 25 bp, Artificial
  Probe
gagttgtagtacatgatagatggta

SEQ ID NO: 10041 - DNA, 25 bp, Artificial
  Probe
acactaaataaagcagcaataagat

SEQ ID NO: 10042 - DNA, 25 bp, Artificial
  Probe
tacactaaataaagcagcaataaga

SEQ ID NO: 10043 - DNA, 25 bp, Artificial
  Probe
atacactaaataaagcagcaataag

SEQ ID NO: 10044 - DNA, 25 bp, Artificial
  Probe
ccagtaggggtttataataaaggac

SEQ ID NO: 10045 - DNA, 25 bp, Artificial
  Probe
gtaggggtttataataaaggactgt

SEQ ID NO: 10046 - DNA, 25 bp, Artificial
  Probe
aaatatacactaaataaagcagcaa

SEQ ID NO: 10047 - DNA, 25 bp, Artificial
  Probe
accagtaggggtttataataaagga

SEQ ID NO: 10048 - DNA, 25 bp, Artificial
  Probe
agtaggggtttataataaaggactg

SEQ ID NO: 10049 - DNA, 25 bp, Artificial
  Probe
cagtaggggtttataataaaggact

SEQ ID NO: 10050 - DNA, 25 bp, Artificial
  Probe
aatatacactaaataaagcagcaat

SEQ ID NO: 10051 - DNA, 25 bp, Artificial
  Probe
aggggtttataataaaggactgtaa

SEQ ID NO: 10052 - DNA, 25 bp, Artificial
  Probe
taccagtaggggtttataataaagg

SEQ ID NO: 10053 - DNA, 25 bp, Artificial
  Probe
taggggtttataataaaggactgta

SEQ ID NO: 10054 - DNA, 25 bp, Artificial
  Probe
gagcaacggtgtagtgaaatgttga

SEQ ID NO: 10055 - DNA, 25 bp, Artificial
  Probe
agagcaacggtgtagtgaaatgttg

SEQ ID NO: 10056 - DNA, 25 bp, Artificial
  Probe
agtaccagtaggggtttataataaa

SEQ ID NO: 10057 - DNA, 25 bp, Artificial
  Probe
aaaatatacactaaataaagcagca

SEQ ID NO: 10058 - DNA, 25 bp, Artificial
  Probe
gtaccagtaggggtttataataaag

SEQ ID NO: 10059 - DNA, 25 bp, Artificial
  Probe
gcttttcaaagttatgtgatatttc

SEQ ID NO: 10060 - DNA, 25 bp, Artificial
  Probe
gaaaatatacactaaataaagcagc

SEQ ID NO: 10061 - DNA, 25 bp, Artificial
  Probe
gattaaaacatgaaatcctttcact

SEQ ID NO: 10062 - DNA, 25 bp, Artificial
  Probe
attaaaacatgaaatcctttcactt

SEQ ID NO: 10063 - DNA, 25 bp, Artificial
  Probe
ctagctcctcacaataggaatgtgg

SEQ ID NO: 10064 - DNA, 25 bp, Artificial
  Probe
cctagctcctcacaataggaatgtg

SEQ ID NO: 10065 - DNA, 25 bp, Artificial
  Probe
aatattcacttggggagagaggagg

SEQ ID NO: 10066 - DNA, 25 bp, Artificial
  Probe
atattcacttggggagagaggagga

SEQ ID NO: 10067 - DNA, 25 bp, Artificial
  Probe
taccctagctcctcacaataggaat

SEQ ID NO: 10068 - DNA, 25 bp, Artificial
  Probe
tattcacttggggagagaggaggag

SEQ ID NO: 10069 - DNA, 25 bp, Artificial
  Probe
ccctagctcctcacaataggaatgt

SEQ ID NO: 10070 - DNA, 25 bp, Artificial
  Probe
accctagctcctcacaataggaatg

SEQ ID NO: 10071 - DNA, 25 bp, Artificial
  Probe
gaatattcacttggggagagaggag

SEQ ID NO: 10072 - DNA, 25 bp, Artificial
  Probe
ttaaatcaagcatctcactgtcact

SEQ ID NO: 10073 - DNA, 25 bp, Artificial
  Probe
cagtatcttcaggatgagaacggtg

SEQ ID NO: 10074 - DNA, 25 bp, Artificial
  Probe
tataggaaagaagtacactcacacc

SEQ ID NO: 10075 - DNA, 25 bp, Artificial
  Probe
gtatcttcaggatgagaacggtgtg

SEQ ID NO: 10076 - DNA, 25 bp, Artificial
  Probe
agtatcttcaggatgagaacggtgt

SEQ ID NO: 10077 - DNA, 25 bp, Artificial
  Probe
ataggaaagaagtacactcacacca

SEQ ID NO: 10078 - DNA, 25 bp, Artificial
  Probe
taggaaagaagtacactcacaccaa

SEQ ID NO: 10079 - DNA, 25 bp, Artificial
  Probe
ctttcactatggatctgaggactct

SEQ ID NO: 10080 - DNA, 25 bp, Artificial
  Probe
tttaaatcaagcatctcactgtcac

SEQ ID NO: 10081 - DNA, 25 bp, Artificial
  Probe
catataggaaagaagtacactcaca

SEQ ID NO: 10082 - DNA, 25 bp, Artificial
  Probe
atataggaaagaagtacactcacac

SEQ ID NO: 10083 - DNA, 25 bp, Artificial
  Probe
acatataggaaagaagtacactcac

SEQ ID NO: 10084 - DNA, 25 bp, Artificial
  Probe
tatcttcaggatgagaacggtgtgg

SEQ ID NO: 10085 - DNA, 25 bp, Artificial
  Probe
gctttcactatggatctgaggactc

SEQ ID NO: 10086 - DNA, 25 bp, Artificial
  Probe
gcagtatcttcaggatgagaacggt

SEQ ID NO: 10087 - DNA, 25 bp, Artificial
  Probe
tacgctttcactatggatctgagga

SEQ ID NO: 10088 - DNA, 25 bp, Artificial
  Probe
ctctggaaaatcactcttcaagacc

SEQ ID NO: 10089 - DNA, 25 bp, Artificial
  Probe
cctctggaaaatcactcttcaagac

SEQ ID NO: 10090 - DNA, 25 bp, Artificial
  Probe
aagcctctggaaaatcactcttcaa

SEQ ID NO: 10091 - DNA, 25 bp, Artificial
  Probe
ttttaaatcaagcatctcactgtca

SEQ ID NO: 10092 - DNA, 25 bp, Artificial
  Probe
tgcagtatcttcaggatgagaacgg

SEQ ID NO: 10093 - DNA, 25 bp, Artificial
  Probe
agcctctggaaaatcactcttcaag

SEQ ID NO: 10094 - DNA, 25 bp, Artificial
  Probe
cgctttcactatggatctgaggact

SEQ ID NO: 10095 - DNA, 25 bp, Artificial
  Probe
acgctttcactatggatctgaggac

SEQ ID NO: 10096 - DNA, 25 bp, Artificial
  Probe
gcctctggaaaatcactcttcaaga

SEQ ID NO: 10097 - DNA, 25 bp, Artificial
  Probe
tctggaaaatcactcttcaagacca

SEQ ID NO: 10098 - DNA, 25 bp, Artificial
  Probe
aaatcactcttcaagaccagcctcc

SEQ ID NO: 10099 - DNA, 25 bp, Artificial
  Probe
aaaatcactcttcaagaccagcctc

SEQ ID NO: 10100 - DNA, 25 bp, Artificial
  Probe
gaaaatcactcttcaagaccagcct

SEQ ID NO: 10101 - DNA, 25 bp, Artificial
  Probe
tggaagcctctggaaaatcactctt

SEQ ID NO: 10102 - DNA, 25 bp, Artificial
  Probe
ggaaaatcactcttcaagaccagcc

SEQ ID NO: 10103 - DNA, 25 bp, Artificial
  Probe
tggaaaatcactcttcaagaccagc

SEQ ID NO: 10104 - DNA, 25 bp, Artificial
  Probe
gaagcctctggaaaatcactcttca

SEQ ID NO: 10105 - DNA, 25 bp, Artificial
  Probe
ggaagcctctggaaaatcactcttc

SEQ ID NO: 10106 - DNA, 25 bp, Artificial
  Probe
ctggaaaatcactcttcaagaccag

SEQ ID NO: 10107 - DNA, 25 bp, Artificial
  Probe
cccctaccccaaagaaattaacata

SEQ ID NO: 10108 - DNA, 25 bp, Artificial
  Probe
tttcagttccaaggaagataaatac

SEQ ID NO: 10109 - DNA, 25 bp, Artificial
  Probe
ccctaccccaaagaaattaacatat

SEQ ID NO: 10110 - DNA, 25 bp, Artificial
  Probe
tcccctaccccaaagaaattaacat

SEQ ID NO: 10111 - DNA, 25 bp, Artificial
  Probe
aagtcccctaccccaaagaaattaa

SEQ ID NO: 10112 - DNA, 25 bp, Artificial
  Probe
agtcccctaccccaaagaaattaac

SEQ ID NO: 10113 - DNA, 25 bp, Artificial
  Probe
caagtcccctaccccaaagaaatta

SEQ ID NO: 10114 - DNA, 25 bp, Artificial
  Probe
gtcccctaccccaaagaaattaaca

SEQ ID NO: 10115 - DNA, 25 bp, Artificial
  Probe
ccaaagaaattaacatattgttgcc

SEQ ID NO: 10116 - DNA, 25 bp, Artificial
  Probe
cccaaagaaattaacatattgttgc

SEQ ID NO: 10117 - DNA, 25 bp, Artificial
  Probe
cctaccccaaagaaattaacatatt

SEQ ID NO: 10118 - DNA, 25 bp, Artificial
  Probe
agaaattaacatattgttgcctgaa

SEQ ID NO: 10119 - DNA, 25 bp, Artificial
  Probe
aagaaattaacatattgttgcctga

SEQ ID NO: 10120 - DNA, 25 bp, Artificial
  Probe
aaagaaattaacatattgttgcctg

SEQ ID NO: 10121 - DNA, 25 bp, Artificial
  Probe
caaagaaattaacatattgttgcct

SEQ ID NO: 10122 - DNA, 25 bp, Artificial
  Probe
taccccaaagaaattaacatattgt

SEQ ID NO: 10123 - DNA, 25 bp, Artificial
  Probe
gaaattaacatattgttgcctgaat

SEQ ID NO: 10124 - DNA, 25 bp, Artificial
  Probe
ctaccccaaagaaattaacatattg

SEQ ID NO: 10125 - DNA, 25 bp, Artificial
  Probe
ttttcagttccaaggaagataaata

SEQ ID NO: 10126 - DNA, 25 bp, Artificial
  Probe
ccaagtcccctaccccaaagaaatt

SEQ ID NO: 10127 - DNA, 25 bp, Artificial
  Probe
ccagtcttttcctgttttgtacata

SEQ ID NO: 10128 - DNA, 25 bp, Artificial
  Probe
agtcttttcctgttttgtacataga

SEQ ID NO: 10129 - DNA, 25 bp, Artificial
  Probe
cagtcttttcctgttttgtacatag

SEQ ID NO: 10130 - DNA, 25 bp, Artificial
  Probe
gccagtcttttcctgttttgtacat

SEQ ID NO: 10131 - DNA, 25 bp, Artificial
  Probe
accccaaagaaattaacatattgtt

SEQ ID NO: 10132 - DNA, 25 bp, Artificial
  Probe
ccccaaagaaattaacatattgttg

SEQ ID NO: 10133 - DNA, 25 bp, Artificial
  Probe
tccaagtcccctaccccaaagaaat

SEQ ID NO: 10134 - DNA, 25 bp, Artificial
  Probe
atccaagtcccctaccccaaagaaa

SEQ ID NO: 10135 - DNA, 25 bp, Artificial
  Probe
aatccaagtcccctaccccaaagaa

SEQ ID NO: 10136 - DNA, 25 bp, Artificial
  Probe
gtcttttcctgttttgtacatagat

SEQ ID NO: 10137 - DNA, 25 bp, Artificial
  Probe
tcttttcctgttttgtacatagatt

SEQ ID NO: 10138 - DNA, 25 bp, Artificial
  Probe
ggccagtcttttcctgttttgtaca

SEQ ID NO: 10139 - DNA, 25 bp, Artificial
  Probe
gggccagtcttttcctgttttgtac

SEQ ID NO: 10140 - DNA, 25 bp, Artificial
  Probe
cttttcctgttttgtacatagattt

SEQ ID NO: 10141 - DNA, 25 bp, Artificial
  Probe
agggccagtcttttcctgttttgta

SEQ ID NO: 10142 - DNA, 25 bp, Artificial
  Probe
gctagatgattgccaattatgatgt

SEQ ID NO: 10143 - DNA, 25 bp, Artificial
  Probe
agagctagatgattgccaattatga

SEQ ID NO: 10144 - DNA, 25 bp, Artificial
  Probe
agctagatgattgccaattatgatg

SEQ ID NO: 10145 - DNA, 25 bp, Artificial
  Probe
aagagctagatgattgccaattatg

SEQ ID NO: 10146 - DNA, 25 bp, Artificial
  Probe
gagctagatgattgccaattatgat

SEQ ID NO: 10147 - DNA, 25 bp, Artificial
  Probe
aataagagctagatgattgccaatt

SEQ ID NO: 10148 - DNA, 25 bp, Artificial
  Probe
taagagctagatgattgccaattat

SEQ ID NO: 10149 - DNA, 25 bp, Artificial
  Probe
ataagagctagatgattgccaatta

SEQ ID NO: 10150 - DNA, 25 bp, Artificial
  Probe
ctagatgattgccaattatgatgta

SEQ ID NO: 10151 - DNA, 25 bp, Artificial
  Probe
cacatacacagtctcacatttacct

SEQ ID NO: 10152 - DNA, 25 bp, Artificial
  Probe
ccacatacacagtctcacatttacc

SEQ ID NO: 10153 - DNA, 25 bp, Artificial
  Probe
acatacacagtctcacatttacctg

SEQ ID NO: 10154 - DNA, 25 bp, Artificial
  Probe
catacacagtctcacatttacctgt

SEQ ID NO: 10155 - DNA, 25 bp, Artificial
  Probe
cccacagagatctatgtttcttata

SEQ ID NO: 10156 - DNA, 25 bp, Artificial
  Probe
ccacgtcactcacaagtttctgttt

SEQ ID NO: 10157 - DNA, 25 bp, Artificial
  Probe
catccacgtcactcacaagtttctg

SEQ ID NO: 10158 - DNA, 25 bp, Artificial
  Probe
ccccacagagatctatgtttcttat

SEQ ID NO: 10159 - DNA, 25 bp, Artificial
  Probe
accccacagagatctatgtttctta

SEQ ID NO: 10160 - DNA, 25 bp, Artificial
  Probe
atacaccccacagagatctatgttt

SEQ ID NO: 10161 - DNA, 25 bp, Artificial
  Probe
gatacaccccacagagatctatgtt

SEQ ID NO: 10162 - DNA, 25 bp, Artificial
  Probe
tacaccccacagagatctatgtttc

SEQ ID NO: 10163 - DNA, 25 bp, Artificial
  Probe
atccacgtcactcacaagtttctgt

SEQ ID NO: 10164 - DNA, 25 bp, Artificial
  Probe
caccccacagagatctatgtttctt

SEQ ID NO: 10165 - DNA, 25 bp, Artificial
  Probe
tccacgtcactcacaagtttctgtt

SEQ ID NO: 10166 - DNA, 25 bp, Artificial
  Probe
tgatacaccccacagagatctatgt

SEQ ID NO: 10167 - DNA, 25 bp, Artificial
  Probe
gtgatacaccccacagagatctatg

SEQ ID NO: 10168 - DNA, 25 bp, Artificial
  Probe
ccatccacgtcactcacaagtttct

SEQ ID NO: 10169 - DNA, 25 bp, Artificial
  Probe
cagtctcacatttacctgtgggttt

SEQ ID NO: 10170 - DNA, 25 bp, Artificial
  Probe
acaccccacagagatctatgtttct

SEQ ID NO: 10171 - DNA, 25 bp, Artificial
  Probe
acagtctcacatttacctgtgggtt

SEQ ID NO: 10172 - DNA, 25 bp, Artificial
  Probe
agtctcacatttacctgtgggtttt

SEQ ID NO: 10173 - DNA, 25 bp, Artificial
  Probe
tgtgatacaccccacagagatctat

SEQ ID NO: 10174 - DNA, 25 bp, Artificial
  Probe
ttgtgatacaccccacagagatcta

SEQ ID NO: 10175 - DNA, 25 bp, Artificial
  Probe
gttgtgatacaccccacagagatct

SEQ ID NO: 10176 - DNA, 25 bp, Artificial
  Probe
cgttgtgatacaccccacagagatc

SEQ ID NO: 10177 - DNA, 25 bp, Artificial
  Probe
tttattaagaaatggcttgctcagg

SEQ ID NO: 10178 - DNA, 25 bp, Artificial
  Probe
cctttattaagaaatggcttgctca

SEQ ID NO: 10179 - DNA, 25 bp, Artificial
  Probe
ctttattaagaaatggcttgctcag

SEQ ID NO: 10180 - DNA, 25 bp, Artificial
  Probe
ttattaagaaatggcttgctcaggg

SEQ ID NO: 10181 - DNA, 25 bp, Artificial
  Probe
aaactgatagcctcaaactccaaac

SEQ ID NO: 10182 - DNA, 25 bp, Artificial
  Probe
attaagaaatggcttgctcagggta

SEQ ID NO: 10183 - DNA, 25 bp, Artificial
  Probe
tattaagaaatggcttgctcagggt

SEQ ID NO: 10184 - DNA, 25 bp, Artificial
  Probe
ttaagaaatggcttgctcagggtaa

SEQ ID NO: 10185 - DNA, 25 bp, Artificial
  Probe
aactgatagcctcaaactccaaaca

SEQ ID NO: 10186 - DNA, 25 bp, Artificial
  Probe
agttaatttaaagacgtttgtgcct

SEQ ID NO: 10187 - DNA, 25 bp, Artificial
  Probe
aagttaatttaaagacgtttgtgcc

SEQ ID NO: 10188 - DNA, 25 bp, Artificial
  Probe
gatagcctcaaactccaaacaccat

SEQ ID NO: 10189 - DNA, 25 bp, Artificial
  Probe
taagaaatggcttgctcagggtaac

SEQ ID NO: 10190 - DNA, 25 bp, Artificial
  Probe
gttaatttaaagacgtttgtgccta

SEQ ID NO: 10191 - DNA, 25 bp, Artificial
  Probe
actgatagcctcaaactccaaacac

SEQ ID NO: 10192 - DNA, 25 bp, Artificial
  Probe
taggaaatgtaaaatcactgttggc

SEQ ID NO: 10193 - DNA, 25 bp, Artificial
  Probe
gaaatgtaaaatcactgttggcgaa

SEQ ID NO: 10194 - DNA, 25 bp, Artificial
  Probe
aaatgtaaaatcactgttggcgaac

SEQ ID NO: 10195 - DNA, 25 bp, Artificial
  Probe
gtaggaaatgtaaaatcactgttgg

SEQ ID NO: 10196 - DNA, 25 bp, Artificial
  Probe
ctgatagcctcaaactccaaacacc

SEQ ID NO: 10197 - DNA, 25 bp, Artificial
  Probe
ggaaatgtaaaatcactgttggcga

SEQ ID NO: 10198 - DNA, 25 bp, Artificial
  Probe
aggaaatgtaaaatcactgttggcg

SEQ ID NO: 10199 - DNA, 25 bp, Artificial
  Probe
taagttaatttaaagacgtttgtgc

SEQ ID NO: 10200 - DNA, 25 bp, Artificial
  Probe
ttgctcagggtaactggtcagattt

SEQ ID NO: 10201 - DNA, 25 bp, Artificial
  Probe
tgatagcctcaaactccaaacacca

SEQ ID NO: 10202 - DNA, 25 bp, Artificial
  Probe
agtaggaaatgtaaaatcactgttg

SEQ ID NO: 10203 - DNA, 25 bp, Artificial
  Probe
aagaaatggcttgctcagggtaact

SEQ ID NO: 10204 - DNA, 25 bp, Artificial
  Probe
tgctcagggtaactggtcagatttc

SEQ ID NO: 10205 - DNA, 25 bp, Artificial
  Probe
cttgctcagggtaactggtcagatt

SEQ ID NO: 10206 - DNA, 25 bp, Artificial
  Probe
gcacctttctagttgaaaataaagt

SEQ ID NO: 10207 - DNA, 25 bp, Artificial
  Probe
gctcagggtaactggtcagatttcc

SEQ ID NO: 10208 - DNA, 25 bp, Artificial
  Probe
taaaatcactgttggcgaacaaatg

SEQ ID NO: 10209 - DNA, 25 bp, Artificial
  Probe
gtaaaatcactgttggcgaacaaat

SEQ ID NO: 10210 - DNA, 25 bp, Artificial
  Probe
agaaatggcttgctcagggtaactg

SEQ ID NO: 10211 - DNA, 25 bp, Artificial
  Probe
tagtaggaaatgtaaaatcactgtt

SEQ ID NO: 10212 - DNA, 25 bp, Artificial
  Probe
gtttgcacctttctagttgaaaata

SEQ ID NO: 10213 - DNA, 25 bp, Artificial
  Probe
ctaagttaatttaaagacgtttgtg

SEQ ID NO: 10214 - DNA, 25 bp, Artificial
  Probe
tgcacctttctagttgaaaataaag

SEQ ID NO: 10215 - DNA, 25 bp, Artificial
  Probe
atgtaaaatcactgttggcgaacaa

SEQ ID NO: 10216 - DNA, 25 bp, Artificial
  Probe
aatgtaaaatcactgttggcgaaca

SEQ ID NO: 10217 - DNA, 25 bp, Artificial
  Probe
tgtaaaatcactgttggcgaacaaa

SEQ ID NO: 10218 - DNA, 25 bp, Artificial
  Probe
ttgcacctttctagttgaaaataaa

SEQ ID NO: 10219 - DNA, 25 bp, Artificial
  Probe
tttgcacctttctagttgaaaataa

SEQ ID NO: 10220 - DNA, 25 bp, Artificial
  Probe
tctaagttaatttaaagacgtttgt

SEQ ID NO: 10221 - DNA, 25 bp, Artificial
  Probe
gaatttgccggtaacaagccagatt

SEQ ID NO: 10222 - DNA, 25 bp, Artificial
  Probe
cttaagggcggacccatgtaatttg

SEQ ID NO: 10223 - DNA, 25 bp, Artificial
  Probe
ttaagggcggacccatgtaatttgg

SEQ ID NO: 10224 - DNA, 25 bp, Artificial
  Probe
ttataatcaacagatacgagcagct

SEQ ID NO: 10225 - DNA, 25 bp, Artificial
  Probe
tataatcaacagatacgagcagcta

SEQ ID NO: 10226 - DNA, 25 bp, Artificial
  Probe
attataatcaacagatacgagcagc

SEQ ID NO: 10227 - DNA, 25 bp, Artificial
  Probe
ttgacatttcctactctttggatat

SEQ ID NO: 10228 - DNA, 25 bp, Artificial
  Probe
aattataatcaacagatacgagcag

SEQ ID NO: 10229 - DNA, 25 bp, Artificial
  Probe
taattataatcaacagatacgagca

SEQ ID NO: 10230 - DNA, 25 bp, Artificial
  Probe
ctaattataatcaacagatacgagc

SEQ ID NO: 10231 - DNA, 25 bp, Artificial
  Probe
gcaaagtagacatttatacttcgtg

SEQ ID NO: 10232 - DNA, 25 bp, Artificial
  Probe
agcaaagtagacatttatacttcgt

SEQ ID NO: 10233 - DNA, 25 bp, Artificial
  Probe
aagcaaagtagacatttatacttcg

SEQ ID NO: 10234 - DNA, 25 bp, Artificial
  Probe
tagtgctcaaaagaatttcttgttt

SEQ ID NO: 10235 - DNA, 25 bp, Artificial
  Probe
ccttagatatgaaggaagtttcttt

SEQ ID NO: 10236 - DNA, 25 bp, Artificial
  Probe
cttagatatgaaggaagtttctttt

SEQ ID NO: 10237 - DNA, 25 bp, Artificial
  Probe
tggctatattaaggttaatatcact

SEQ ID NO: 10238 - DNA, 25 bp, Artificial
  Probe
aaagcaaagtagacatttatacttc

SEQ ID NO: 10239 - DNA, 25 bp, Artificial
  Probe
ttgttttgtcctggattccgataaa

SEQ ID NO: 10240 - DNA, 25 bp, Artificial
  Probe
ggaatgtgtggttatagttctgtgg

SEQ ID NO: 10241 - DNA, 25 bp, Artificial
  Probe
atttatactgtctgggaatgtgtgg

SEQ ID NO: 10242 - DNA, 25 bp, Artificial
  Probe
tactgtctgggaatgtgtggttata

SEQ ID NO: 10243 - DNA, 25 bp, Artificial
  Probe
tatactgtctgggaatgtgtggtta

SEQ ID NO: 10244 - DNA, 25 bp, Artificial
  Probe
gtgggagaaatagtttgtcagtgtt

SEQ ID NO: 10245 - DNA, 25 bp, Artificial
  Probe
tgggagaaatagtttgtcagtgttc

SEQ ID NO: 10246 - DNA, 25 bp, Artificial
  Probe
atactgtctgggaatgtgtggttat

SEQ ID NO: 10247 - DNA, 25 bp, Artificial
  Probe
ctgggaatgtgtggttatagttctg

SEQ ID NO: 10248 - DNA, 25 bp, Artificial
  Probe
tctgggaatgtgtggttatagttct

SEQ ID NO: 10249 - DNA, 25 bp, Artificial
  Probe
gtctgggaatgtgtggttatagttc

SEQ ID NO: 10250 - DNA, 25 bp, Artificial
  Probe
aatgtgtggttatagttctgtggga

SEQ ID NO: 10251 - DNA, 25 bp, Artificial
  Probe
gaatgtgtggttatagttctgtggg

SEQ ID NO: 10252 - DNA, 25 bp, Artificial
  Probe
gggaatgtgtggttatagttctgtg

SEQ ID NO: 10253 - DNA, 25 bp, Artificial
  Probe
tgtctgggaatgtgtggttatagtt

SEQ ID NO: 10254 - DNA, 25 bp, Artificial
  Probe
ttatactgtctgggaatgtgtggtt

SEQ ID NO: 10255 - DNA, 25 bp, Artificial
  Probe
tttatactgtctgggaatgtgtggt

SEQ ID NO: 10256 - DNA, 25 bp, Artificial
  Probe
tatttatactgtctgggaatgtgtg

SEQ ID NO: 10257 - DNA, 25 bp, Artificial
  Probe
tgggaatgtgtggttatagttctgt

SEQ ID NO: 10258 - DNA, 25 bp, Artificial
  Probe
tgtgggagaaatagtttgtcagtgt

SEQ ID NO: 10259 - DNA, 25 bp, Artificial
  Probe
atgtgtggttatagttctgtgggag

SEQ ID NO: 10260 - DNA, 25 bp, Artificial
  Probe
ctgtctgggaatgtgtggttatagt

SEQ ID NO: 10261 - DNA, 25 bp, Artificial
  Probe
actgtctgggaatgtgtggttatag

SEQ ID NO: 10262 - DNA, 25 bp, Artificial
  Probe
atatttatactgtctgggaatgtgt

SEQ ID NO: 10263 - DNA, 25 bp, Artificial
  Probe
ctgtgggagaaatagtttgtcagtg

SEQ ID NO: 10264 - DNA, 25 bp, Artificial
  Probe
tctgtgggagaaatagtttgtcagt

SEQ ID NO: 10265 - DNA, 25 bp, Artificial
  Probe
tgtgtattaatgttagttcaaccat

SEQ ID NO: 10266 - DNA, 25 bp, Artificial
  Probe
atgtgtattaatgttagttcaacca

SEQ ID NO: 10267 - DNA, 25 bp, Artificial
  Probe
tgtgtggttatagttctgtgggaga

SEQ ID NO: 10268 - DNA, 25 bp, Artificial
  Probe
gtggttatagttctgtgggagaaat

SEQ ID NO: 10269 - DNA, 25 bp, Artificial
  Probe
tagttctgtgggagaaatagtttgt

SEQ ID NO: 10270 - DNA, 25 bp, Artificial
  Probe
ttctgtgggagaaatagtttgtcag

SEQ ID NO: 10271 - DNA, 25 bp, Artificial
  Probe
agttctgtgggagaaatagtttgtc

SEQ ID NO: 10272 - DNA, 25 bp, Artificial
  Probe
gttctgtgggagaaatagtttgtca

SEQ ID NO: 10273 - DNA, 25 bp, Artificial
  Probe
tggttatagttctgtgggagaaata

SEQ ID NO: 10274 - DNA, 25 bp, Artificial
  Probe
cagtcacttgtagctttatgcagtt

SEQ ID NO: 10275 - DNA, 25 bp, Artificial
  Probe
tgtggttatagttctgtgggagaaa

SEQ ID NO: 10276 - DNA, 25 bp, Artificial
  Probe
atagttctgtgggagaaatagtttg

SEQ ID NO: 10277 - DNA, 25 bp, Artificial
  Probe
ggttatagttctgtgggagaaatag

SEQ ID NO: 10278 - DNA, 25 bp, Artificial
  Probe
gtgtggttatagttctgtgggagaa

SEQ ID NO: 10279 - DNA, 25 bp, Artificial
  Probe
gggaaaacggtttgtaatagttgat

SEQ ID NO: 10280 - DNA, 25 bp, Artificial
  Probe
aagggaaaacggtttgtaatagttg

SEQ ID NO: 10281 - DNA, 25 bp, Artificial
  Probe
agggaaaacggtttgtaatagttga

SEQ ID NO: 10282 - DNA, 25 bp, Artificial
  Probe
caagggaaaacggtttgtaatagtt

SEQ ID NO: 10283 - DNA, 25 bp, Artificial
  Probe
gttatagttctgtgggagaaatagt

SEQ ID NO: 10284 - DNA, 25 bp, Artificial
  Probe
ggaaaacggtttgtaatagttgatg

SEQ ID NO: 10285 - DNA, 25 bp, Artificial
  Probe
tttataagggctgtgttgaaatgac

SEQ ID NO: 10286 - DNA, 25 bp, Artificial
  Probe
ttataagggctgtgttgaaatgacc

SEQ ID NO: 10287 - DNA, 25 bp, Artificial
  Probe
ataagggctgtgttgaaatgaccta

SEQ ID NO: 10288 - DNA, 25 bp, Artificial
  Probe
tataagggctgtgttgaaatgacct

SEQ ID NO: 10289 - DNA, 25 bp, Artificial
  Probe
ttccaccctatacacccttttaatc

SEQ ID NO: 10290 - DNA, 25 bp, Artificial
  Probe
cttccaccctatacacccttttaat

SEQ ID NO: 10291 - DNA, 25 bp, Artificial
  Probe
accctatacacccttttaatctcac

SEQ ID NO: 10292 - DNA, 25 bp, Artificial
  Probe
caccctatacacccttttaatctca

SEQ ID NO: 10293 - DNA, 25 bp, Artificial
  Probe
ccaccctatacacccttttaatctc

SEQ ID NO: 10294 - DNA, 25 bp, Artificial
  Probe
ccctatacacccttttaatctcact

SEQ ID NO: 10295 - DNA, 25 bp, Artificial
  Probe
tccaccctatacacccttttaatct

SEQ ID NO: 10296 - DNA, 25 bp, Artificial
  Probe
ttcttccaccctatacaccctttta

SEQ ID NO: 10297 - DNA, 25 bp, Artificial
  Probe
taagggctgtgttgaaatgacctag

SEQ ID NO: 10298 - DNA, 25 bp, Artificial
  Probe
tcttccaccctatacacccttttaa

SEQ ID NO: 10299 - DNA, 25 bp, Artificial
  Probe
cctatacacccttttaatctcactg

SEQ ID NO: 10300 - DNA, 25 bp, Artificial
  Probe
gttcttccaccctatacaccctttt

SEQ ID NO: 10301 - DNA, 25 bp, Artificial
  Probe
ttttataagggctgtgttgaaatga

SEQ ID NO: 10302 - DNA, 25 bp, Artificial
  Probe
cgttcttccaccctatacacccttt

SEQ ID NO: 10303 - DNA, 25 bp, Artificial
  Probe
cttttataagggctgtgttgaaatg

SEQ ID NO: 10304 - DNA, 25 bp, Artificial
  Probe
ctatacacccttttaatctcactgt

SEQ ID NO: 10305 - DNA, 25 bp, Artificial
  Probe
tatacacccttttaatctcactgtg

SEQ ID NO: 10306 - DNA, 25 bp, Artificial
  Probe
cacccttttaatctcactgtgtgtg

SEQ ID NO: 10307 - DNA, 25 bp, Artificial
  Probe
gcagggttagcttttccttttataa

SEQ ID NO: 10308 - DNA, 25 bp, Artificial
  Probe
ggcagggttagcttttccttttata

SEQ ID NO: 10309 - DNA, 25 bp, Artificial
  Probe
caagacgttcttccaccctatacac

SEQ ID NO: 10310 - DNA, 25 bp, Artificial
  Probe
cagggttagcttttccttttataag

SEQ ID NO: 10311 - DNA, 25 bp, Artificial
  Probe
aggcagggttagcttttccttttat

SEQ ID NO: 10312 - DNA, 25 bp, Artificial
  Probe
aagacgttcttccaccctatacacc

SEQ ID NO: 10313 - DNA, 25 bp, Artificial
  Probe
ttttccttttataagggctgtgttg

SEQ ID NO: 10314 - DNA, 25 bp, Artificial
  Probe
ccttttataagggctgtgttgaaat

SEQ ID NO: 10315 - DNA, 25 bp, Artificial
  Probe
cttttccttttataagggctgtgtt

SEQ ID NO: 10316 - DNA, 25 bp, Artificial
  Probe
tccttttataagggctgtgttgaaa

SEQ ID NO: 10317 - DNA, 25 bp, Artificial
  Probe
ttccttttataagggctgtgttgaa

SEQ ID NO: 10318 - DNA, 25 bp, Artificial
  Probe
tttccttttataagggctgtgttga

SEQ ID NO: 10319 - DNA, 25 bp, Artificial
  Probe
acgttcttccaccctatacaccctt

SEQ ID NO: 10320 - DNA, 25 bp, Artificial
  Probe
tagcttttccttttataagggctgt

SEQ ID NO: 10321 - DNA, 25 bp, Artificial
  Probe
ggttagcttttccttttataagggc

SEQ ID NO: 10322 - DNA, 25 bp, Artificial
  Probe
gggttagcttttccttttataaggg

SEQ ID NO: 10323 - DNA, 25 bp, Artificial
  Probe
ttagcttttccttttataagggctg

SEQ ID NO: 10324 - DNA, 25 bp, Artificial
  Probe
gttagcttttccttttataagggct

SEQ ID NO: 10325 - DNA, 25 bp, Artificial
  Probe
gcttttccttttataagggctgtgt

SEQ ID NO: 10326 - DNA, 25 bp, Artificial
  Probe
gcaagacgttcttccaccctataca

SEQ ID NO: 10327 - DNA, 25 bp, Artificial
  Probe
agggttagcttttccttttataagg

SEQ ID NO: 10328 - DNA, 25 bp, Artificial
  Probe
atacacccttttaatctcactgtgt

SEQ ID NO: 10329 - DNA, 25 bp, Artificial
  Probe
tacacccttttaatctcactgtgtg

SEQ ID NO: 10330 - DNA, 25 bp, Artificial
  Probe
cttgaagtggaaagtgctgttcttg

SEQ ID NO: 10331 - DNA, 25 bp, Artificial
  Probe
ggtcagttctaggtacttggtctcc

SEQ ID NO: 10332 - DNA, 25 bp, Artificial
  Probe
gttctaggtacttggtctccctttc

SEQ ID NO: 10333 - DNA, 25 bp, Artificial
  Probe
gtgtggacctagaatgttcgaccta

SEQ ID NO: 10334 - DNA, 25 bp, Artificial
  Probe
agttctaggtacttggtctcccttt

SEQ ID NO: 10335 - DNA, 25 bp, Artificial
  Probe
ttctaggtacttggtctccctttcc

SEQ ID NO: 10336 - DNA, 25 bp, Artificial
  Probe
cagttctaggtacttggtctccctt

SEQ ID NO: 10337 - DNA, 25 bp, Artificial
  Probe
ttgaagtggaaagtgctgttcttgg

SEQ ID NO: 10338 - DNA, 25 bp, Artificial
  Probe
tgtggacctagaatgttcgacctag

SEQ ID NO: 10339 - DNA, 25 bp, Artificial
  Probe
tagaatgttcgacctaggactagct

SEQ ID NO: 10340 - DNA, 25 bp, Artificial
  Probe
gaagtggaaagtgctgttcttggag

SEQ ID NO: 10341 - DNA, 25 bp, Artificial
  Probe
taggtacttggtctccctttccatc

SEQ ID NO: 10342 - DNA, 25 bp, Artificial
  Probe
ctaggtacttggtctccctttccat

SEQ ID NO: 10343 - DNA, 25 bp, Artificial
  Probe
gtcagttctaggtacttggtctccc

SEQ ID NO: 10344 - DNA, 25 bp, Artificial
  Probe
gggtcagttctaggtacttggtctc

SEQ ID NO: 10345 - DNA, 25 bp, Artificial
  Probe
gcttgaagtggaaagtgctgttctt

SEQ ID NO: 10346 - DNA, 25 bp, Artificial
  Probe
cagggtcagttctaggtacttggtc

SEQ ID NO: 10347 - DNA, 25 bp, Artificial
  Probe
gaatgttcgacctaggactagcttc

SEQ ID NO: 10348 - DNA, 25 bp, Artificial
  Probe
agggtcagttctaggtacttggtct

SEQ ID NO: 10349 - DNA, 25 bp, Artificial
  Probe
agaatgttcgacctaggactagctt

SEQ ID NO: 10350 - DNA, 25 bp, Artificial
  Probe
cctaggactagcttccaatactgtc

SEQ ID NO: 10351 - DNA, 25 bp, Artificial
  Probe
gacctaggactagcttccaatactg

SEQ ID NO: 10352 - DNA, 25 bp, Artificial
  Probe
tcagttctaggtacttggtctccct

SEQ ID NO: 10353 - DNA, 25 bp, Artificial
  Probe
acctaggactagcttccaatactgt

SEQ ID NO: 10354 - DNA, 25 bp, Artificial
  Probe
ctagaatgttcgacctaggactagc

SEQ ID NO: 10355 - DNA, 25 bp, Artificial
  Probe
tgaagtggaaagtgctgttcttgga

SEQ ID NO: 10356 - DNA, 25 bp, Artificial
  Probe
cagtgtggacctagaatgttcgacc

SEQ ID NO: 10357 - DNA, 25 bp, Artificial
  Probe
ttcgacctaggactagcttccaata

SEQ ID NO: 10358 - DNA, 25 bp, Artificial
  Probe
tctaggtacttggtctccctttcca

SEQ ID NO: 10359 - DNA, 25 bp, Artificial
  Probe
agtgtggacctagaatgttcgacct

SEQ ID NO: 10360 - DNA, 25 bp, Artificial
  Probe
cgacctaggactagcttccaatact

SEQ ID NO: 10361 - DNA, 25 bp, Artificial
  Probe
tcgacctaggactagcttccaatac

SEQ ID NO: 10362 - DNA, 25 bp, Artificial
  Probe
cttggtctccctttccatcccattt

SEQ ID NO: 10363 - DNA, 25 bp, Artificial
  Probe
ctaggactagcttccaatactgtcc

SEQ ID NO: 10364 - DNA, 25 bp, Artificial
  Probe
ttggtctccctttccatcccatttg

SEQ ID NO: 10365 - DNA, 25 bp, Artificial
  Probe
tacttggtctccctttccatcccat

SEQ ID NO: 10366 - DNA, 25 bp, Artificial
  Probe
gttcgacctaggactagcttccaat

SEQ ID NO: 10367 - DNA, 25 bp, Artificial
  Probe
aatgttcgacctaggactagcttcc

SEQ ID NO: 10368 - DNA, 25 bp, Artificial
  Probe
gaaagtgctgttcttggaggacaag

SEQ ID NO: 10369 - DNA, 25 bp, Artificial
  Probe
ccagggtcagttctaggtacttggt

SEQ ID NO: 10370 - DNA, 25 bp, Artificial
  Probe
atgttcgacctaggactagcttcca

SEQ ID NO: 10371 - DNA, 25 bp, Artificial
  Probe
tgttcgacctaggactagcttccaa

SEQ ID NO: 10372 - DNA, 25 bp, Artificial
  Probe
ttgatcagaacccaggcttgaagtg

SEQ ID NO: 10373 - DNA, 25 bp, Artificial
  Probe
tgaggggatagaattaaagatgact

SEQ ID NO: 10374 - DNA, 25 bp, Artificial
  Probe
gaggggatagaattaaagatgactg

SEQ ID NO: 10375 - DNA, 25 bp, Artificial
  Probe
cacattgaggggatagaattaaaga

SEQ ID NO: 10376 - DNA, 25 bp, Artificial
  Probe
ttgaggggatagaattaaagatgac

SEQ ID NO: 10377 - DNA, 25 bp, Artificial
  Probe
tcacattgaggggatagaattaaag

SEQ ID NO: 10378 - DNA, 25 bp, Artificial
  Probe
acattgaggggatagaattaaagat

SEQ ID NO: 10379 - DNA, 25 bp, Artificial
  Probe
attgaggggatagaattaaagatga

SEQ ID NO: 10380 - DNA, 25 bp, Artificial
  Probe
cattgaggggatagaattaaagatg

SEQ ID NO: 10381 - DNA, 25 bp, Artificial
  Probe
cctttctgcctttctcaatgggaaa

SEQ ID NO: 10382 - DNA, 25 bp, Artificial
  Probe
atcctttctgcctttctcaatggga

SEQ ID NO: 10383 - DNA, 25 bp, Artificial
  Probe
tcctttctgcctttctcaatgggaa

SEQ ID NO: 10384 - DNA, 25 bp, Artificial
  Probe
gctcacattgaggggatagaattaa

SEQ ID NO: 10385 - DNA, 25 bp, Artificial
  Probe
tgctcacattgaggggatagaatta

SEQ ID NO: 10386 - DNA, 25 bp, Artificial
  Probe
ctcacattgaggggatagaattaaa

SEQ ID NO: 10387 - DNA, 25 bp, Artificial
  Probe
ctgctcacattgaggggatagaatt

SEQ ID NO: 10388 - DNA, 25 bp, Artificial
  Probe
tctgctcacattgaggggatagaat

SEQ ID NO: 10389 - DNA, 25 bp, Artificial
  Probe
gtctgctcacattgaggggatagaa

SEQ ID NO: 10390 - DNA, 25 bp, Artificial
  Probe
gtgtctgctcacattgaggggatag

SEQ ID NO: 10391 - DNA, 25 bp, Artificial
  Probe
tgtctgctcacattgaggggataga

SEQ ID NO: 10392 - DNA, 25 bp, Artificial
  Probe
gagcagcttagtgaggagccatata

SEQ ID NO: 10393 - DNA, 25 bp, Artificial
  Probe
ccataatcgctgtatgaaatattaa

SEQ ID NO: 10394 - DNA, 25 bp, Artificial
  Probe
ccaattgttacaccccaatccctag

SEQ ID NO: 10395 - DNA, 25 bp, Artificial
  Probe
caattgttacaccccaatccctagg

SEQ ID NO: 10396 - DNA, 25 bp, Artificial
  Probe
aattgttacaccccaatccctagga

SEQ ID NO: 10397 - DNA, 25 bp, Artificial
  Probe
cccaattgttacaccccaatcccta

SEQ ID NO: 10398 - DNA, 25 bp, Artificial
  Probe
attgttacaccccaatccctaggag

SEQ ID NO: 10399 - DNA, 25 bp, Artificial
  Probe
ggataaagctagaagtgaccctcag

SEQ ID NO: 10400 - DNA, 25 bp, Artificial
  Probe
tcggataaagctagaagtgaccctc

SEQ ID NO: 10401 - DNA, 25 bp, Artificial
  Probe
cggataaagctagaagtgaccctca

SEQ ID NO: 10402 - DNA, 25 bp, Artificial
  Probe
gataaagctagaagtgaccctcagc

SEQ ID NO: 10403 - DNA, 25 bp, Artificial
  Probe
tctttgtcatcacactccccttcag

SEQ ID NO: 10404 - DNA, 25 bp, Artificial
  Probe
ctctttgtcatcacactccccttca

SEQ ID NO: 10405 - DNA, 25 bp, Artificial
  Probe
ctttgtcatcacactccccttcagt

SEQ ID NO: 10406 - DNA, 25 bp, Artificial
  Probe
ataaagctagaagtgaccctcagct

SEQ ID NO: 10407 - DNA, 25 bp, Artificial
  Probe
tttgtcatcacactccccttcagtg

SEQ ID NO: 10408 - DNA, 25 bp, Artificial
  Probe
actcacataaacatcgtcggaattg

SEQ ID NO: 10409 - DNA, 25 bp, Artificial
  Probe
ctcacataaacatcgtcggaattgg

SEQ ID NO: 10410 - DNA, 25 bp, Artificial
  Probe
gactcacataaacatcgtcggaatt

SEQ ID NO: 10411 - DNA, 25 bp, Artificial
  Probe
tcacataaacatcgtcggaattgga

SEQ ID NO: 10412 - DNA, 25 bp, Artificial
  Probe
agactcacataaacatcgtcggaat

SEQ ID NO: 10413 - DNA, 25 bp, Artificial
  Probe
aagactcacataaacatcgtcggaa

SEQ ID NO: 10414 - DNA, 25 bp, Artificial
  Probe
aaagactcacataaacatcgtcgga

SEQ ID NO: 10415 - DNA, 25 bp, Artificial
  Probe
cataaacatcgtcggaattggacac

SEQ ID NO: 10416 - DNA, 25 bp, Artificial
  Probe
cacataaacatcgtcggaattggac

SEQ ID NO: 10417 - DNA, 25 bp, Artificial
  Probe
gggaaaggaaaagactcacataaac

SEQ ID NO: 10418 - DNA, 25 bp, Artificial
  Probe
tgggaaaggaaaagactcacataaa

SEQ ID NO: 10419 - DNA, 25 bp, Artificial
  Probe
aggaaaagactcacataaacatcgt

SEQ ID NO: 10420 - DNA, 25 bp, Artificial
  Probe
aaggaaaagactcacataaacatcg

SEQ ID NO: 10421 - DNA, 25 bp, Artificial
  Probe
ggaaaggaaaagactcacataaaca

SEQ ID NO: 10422 - DNA, 25 bp, Artificial
  Probe
atgggaaaggaaaagactcacataa

SEQ ID NO: 10423 - DNA, 25 bp, Artificial
  Probe
aatgggaaaggaaaagactcacata

SEQ ID NO: 10424 - DNA, 25 bp, Artificial
  Probe
aaaatgggaaaggaaaagactcaca

SEQ ID NO: 10425 - DNA, 25 bp, Artificial
  Probe
acataaacatcgtcggaattggaca

SEQ ID NO: 10426 - DNA, 25 bp, Artificial
  Probe
aaatgggaaaggaaaagactcacat

SEQ ID NO: 10427 - DNA, 25 bp, Artificial
  Probe
ggaaaagactcacataaacatcgtc

SEQ ID NO: 10428 - DNA, 25 bp, Artificial
  Probe
gaaaagactcacataaacatcgtcg

SEQ ID NO: 10429 - DNA, 25 bp, Artificial
  Probe
aaaggaaaagactcacataaacatc

SEQ ID NO: 10430 - DNA, 25 bp, Artificial
  Probe
gaaaggaaaagactcacataaacat

SEQ ID NO: 10431 - DNA, 25 bp, Artificial
  Probe
aaaagactcacataaacatcgtcgg

SEQ ID NO: 10432 - DNA, 25 bp, Artificial
  Probe
ataaacatcgtcggaattggacacg

SEQ ID NO: 10433 - DNA, 25 bp, Artificial
  Probe
taaacatcgtcggaattggacacgt

SEQ ID NO: 10434 - DNA, 25 bp, Artificial
  Probe
aaatacacaagtaaacattccgaca

SEQ ID NO: 10435 - DNA, 25 bp, Artificial
  Probe
atacacaagtaaacattccgacatt

SEQ ID NO: 10436 - DNA, 25 bp, Artificial
  Probe
aatacacaagtaaacattccgacat

SEQ ID NO: 10437 - DNA, 25 bp, Artificial
  Probe
tacacaagtaaacattccgacattg

SEQ ID NO: 10438 - DNA, 25 bp, Artificial
  Probe
tgaaatacacaagtaaacattccga

SEQ ID NO: 10439 - DNA, 25 bp, Artificial
  Probe
gaaatacacaagtaaacattccgac

SEQ ID NO: 10440 - DNA, 25 bp, Artificial
  Probe
atgaaatacacaagtaaacattccg

SEQ ID NO: 10441 - DNA, 25 bp, Artificial
  Probe
acattgtctttaggagtgtttgtta

SEQ ID NO: 10442 - DNA, 25 bp, Artificial
  Probe
cattgtctttaggagtgtttgttaa

SEQ ID NO: 10443 - DNA, 25 bp, Artificial
  Probe
caagtaaacattccgacattgtctt

SEQ ID NO: 10444 - DNA, 25 bp, Artificial
  Probe
gacattgtctttaggagtgtttgtt

SEQ ID NO: 10445 - DNA, 25 bp, Artificial
  Probe
aagtaaacattccgacattgtcttt

SEQ ID NO: 10446 - DNA, 25 bp, Artificial
  Probe
taaacattccgacattgtctttagg

SEQ ID NO: 10447 - DNA, 25 bp, Artificial
  Probe
agtaaacattccgacattgtcttta

SEQ ID NO: 10448 - DNA, 25 bp, Artificial
  Probe
aaacattccgacattgtctttagga

SEQ ID NO: 10449 - DNA, 25 bp, Artificial
  Probe
cgacattgtctttaggagtgtttgt

SEQ ID NO: 10450 - DNA, 25 bp, Artificial
  Probe
gtaaacattccgacattgtctttag

SEQ ID NO: 10451 - DNA, 25 bp, Artificial
  Probe
attgtctttaggagtgtttgttaaa

SEQ ID NO: 10452 - DNA, 25 bp, Artificial
  Probe
aacattccgacattgtctttaggag

SEQ ID NO: 10453 - DNA, 25 bp, Artificial
  Probe
cattccgacattgtctttaggagtg

SEQ ID NO: 10454 - DNA, 25 bp, Artificial
  Probe
ccgacattgtctttaggagtgtttg

SEQ ID NO: 10455 - DNA, 25 bp, Artificial
  Probe
attccgacattgtctttaggagtgt

SEQ ID NO: 10456 - DNA, 25 bp, Artificial
  Probe
acattccgacattgtctttaggagt

SEQ ID NO: 10457 - DNA, 25 bp, Artificial
  Probe
tccgacattgtctttaggagtgttt

SEQ ID NO: 10458 - DNA, 25 bp, Artificial
  Probe
ttccgacattgtctttaggagtgtt

SEQ ID NO: 10459 - DNA, 25 bp, Artificial
  Probe
acacaagtaaacattccgacattgt

SEQ ID NO: 10460 - DNA, 25 bp, Artificial
  Probe
acaagtaaacattccgacattgtct

SEQ ID NO: 10461 - DNA, 25 bp, Artificial
  Probe
cacaagtaaacattccgacattgtc

SEQ ID NO: 10462 - DNA, 25 bp, Artificial
  Probe
ttgtctttaggagtgtttgttaaaa

SEQ ID NO: 10463 - DNA, 25 bp, Artificial
  Probe
gttggaagaaggagaatggtcttag

SEQ ID NO: 10464 - DNA, 25 bp, Artificial
  Probe
gaaggagaatggtcttaggtttgtg

SEQ ID NO: 10465 - DNA, 25 bp, Artificial
  Probe
agaaggagaatggtcttaggtttgt

SEQ ID NO: 10466 - DNA, 25 bp, Artificial
  Probe
agttggaagaaggagaatggtctta

SEQ ID NO: 10467 - DNA, 25 bp, Artificial
  Probe
ggaagaaggagaatggtcttaggtt

SEQ ID NO: 10468 - DNA, 25 bp, Artificial
  Probe
ttggaagaaggagaatggtcttagg

SEQ ID NO: 10469 - DNA, 25 bp, Artificial
  Probe
cagttggaagaaggagaatggtctt

SEQ ID NO: 10470 - DNA, 25 bp, Artificial
  Probe
tggaagaaggagaatggtcttaggt

SEQ ID NO: 10471 - DNA, 25 bp, Artificial
  Probe
gaagaaggagaatggtcttaggttt

SEQ ID NO: 10472 - DNA, 25 bp, Artificial
  Probe
aagaaggagaatggtcttaggtttg

SEQ ID NO: 10473 - DNA, 25 bp, Artificial
  Probe
ggggtcttaatctgtgaaaatacct

SEQ ID NO: 10474 - DNA, 25 bp, Artificial
  Probe
gggtcttaatctgtgaaaatacctt

SEQ ID NO: 10475 - DNA, 25 bp, Artificial
  Probe
ggtcttaatctgtgaaaataccttg

SEQ ID NO: 10476 - DNA, 25 bp, Artificial
  Probe
catctcacattcggaggaagatcat

SEQ ID NO: 10477 - DNA, 25 bp, Artificial
  Probe
atctcacattcggaggaagatcatg

SEQ ID NO: 10478 - DNA, 25 bp, Artificial
  Probe
cacattcggaggaagatcatgtctt

SEQ ID NO: 10479 - DNA, 25 bp, Artificial
  Probe
ctcacattcggaggaagatcatgtc

SEQ ID NO: 10480 - DNA, 25 bp, Artificial
  Probe
ccatctcacattcggaggaagatca

SEQ ID NO: 10481 - DNA, 25 bp, Artificial
  Probe
accatctcacattcggaggaagatc

SEQ ID NO: 10482 - DNA, 25 bp, Artificial
  Probe
tcacattcggaggaagatcatgtct

SEQ ID NO: 10483 - DNA, 25 bp, Artificial
  Probe
tctcacattcggaggaagatcatgt

SEQ ID NO: 10484 - DNA, 25 bp, Artificial
  Probe
caccatctcacattcggaggaagat

SEQ ID NO: 10485 - DNA, 25 bp, Artificial
  Probe
atttcaatgcaccatctcacattcg

SEQ ID NO: 10486 - DNA, 25 bp, Artificial
  Probe
ttcaatgcaccatctcacattcgga

SEQ ID NO: 10487 - DNA, 25 bp, Artificial
  Probe
tttcaatgcaccatctcacattcgg

SEQ ID NO: 10488 - DNA, 25 bp, Artificial
  Probe
tcttatcctgacctgaccatactaa

SEQ ID NO: 10489 - DNA, 25 bp, Artificial
  Probe
ttcttatcctgacctgaccatacta

SEQ ID NO: 10490 - DNA, 25 bp, Artificial
  Probe
cttatcctgacctgaccatactaat

SEQ ID NO: 10491 - DNA, 25 bp, Artificial
  Probe
gcaattagagacaactacttccgaa

SEQ ID NO: 10492 - DNA, 25 bp, Artificial
  Probe
tatcctgacctgaccatactaataa

SEQ ID NO: 10493 - DNA, 25 bp, Artificial
  Probe
ttatcctgacctgaccatactaata

SEQ ID NO: 10494 - DNA, 25 bp, Artificial
  Probe
caattagagacaactacttccgaag

SEQ ID NO: 10495 - DNA, 25 bp, Artificial
  Probe
ctttcttatcctgacctgaccatac

SEQ ID NO: 10496 - DNA, 25 bp, Artificial
  Probe
tttcttatcctgacctgaccatact

SEQ ID NO: 10497 - DNA, 25 bp, Artificial
  Probe
caaactcctttcttatcctgacctg

SEQ ID NO: 10498 - DNA, 25 bp, Artificial
  Probe
aaactcctttcttatcctgacctga

SEQ ID NO: 10499 - DNA, 25 bp, Artificial
  Probe
tcctgacctgaccatactaataaat

SEQ ID NO: 10500 - DNA, 25 bp, Artificial
  Probe
atcctgacctgaccatactaataaa

SEQ ID NO: 10501 - DNA, 25 bp, Artificial
  Probe
cctttcttatcctgacctgaccata

SEQ ID NO: 10502 - DNA, 25 bp, Artificial
  Probe
ctgcaattagagacaactacttccg

SEQ ID NO: 10503 - DNA, 25 bp, Artificial
  Probe
ctacgctgcaattagagacaactac

SEQ ID NO: 10504 - DNA, 25 bp, Artificial
  Probe
tgcaattagagacaactacttccga

SEQ ID NO: 10505 - DNA, 25 bp, Artificial
  Probe
gctgcaattagagacaactacttcc

SEQ ID NO: 10506 - DNA, 25 bp, Artificial
  Probe
aactcctttcttatcctgacctgac

SEQ ID NO: 10507 - DNA, 25 bp, Artificial
  Probe
taatgagggaaatacgagccagaaa

SEQ ID NO: 10508 - DNA, 25 bp, Artificial
  Probe
tacgctgcaattagagacaactact

SEQ ID NO: 10509 - DNA, 25 bp, Artificial
  Probe
actacgctgcaattagagacaacta

SEQ ID NO: 10510 - DNA, 25 bp, Artificial
  Probe
tgagtttgtagaagactatgaacct

SEQ ID NO: 10511 - DNA, 25 bp, Artificial
  Probe
ttaatgagggaaatacgagccagaa

SEQ ID NO: 10512 - DNA, 25 bp, Artificial
  Probe
tttaatgagggaaatacgagccaga

SEQ ID NO: 10513 - DNA, 25 bp, Artificial
  Probe
ttgtagaagactatgaacctaccaa

SEQ ID NO: 10514 - DNA, 25 bp, Artificial
  Probe
catttctcctggttggtaacaaatc

SEQ ID NO: 10515 - DNA, 25 bp, Artificial
  Probe
ccaaactcctttcttatcctgacct

SEQ ID NO: 10516 - DNA, 25 bp, Artificial
  Probe
ttgatttaatgagggaaatacgagc

SEQ ID NO: 10517 - DNA, 25 bp, Artificial
  Probe
cgctgcaattagagacaactacttc

SEQ ID NO: 10518 - DNA, 25 bp, Artificial
  Probe
atttctcctggttggtaacaaatca

SEQ ID NO: 10519 - DNA, 25 bp, Artificial
  Probe
atttaatgagggaaatacgagccag

SEQ ID NO: 10520 - DNA, 25 bp, Artificial
  Probe
gatttaatgagggaaatacgagcca

SEQ ID NO: 10521 - DNA, 25 bp, Artificial
  Probe
tgatttaatgagggaaatacgagcc

SEQ ID NO: 10522 - DNA, 25 bp, Artificial
  Probe
aagactacgctgcaattagagacaa

SEQ ID NO: 10523 - DNA, 25 bp, Artificial
  Probe
atgagtttgtagaagactatgaacc

SEQ ID NO: 10524 - DNA, 25 bp, Artificial
  Probe
tttctcctggttggtaacaaatcag

SEQ ID NO: 10525 - DNA, 25 bp, Artificial
  Probe
ctcctggttggtaacaaatcagatt

SEQ ID NO: 10526 - DNA, 25 bp, Artificial
  Probe
acgctgcaattagagacaactactt

SEQ ID NO: 10527 - DNA, 25 bp, Artificial
  Probe
cagatcgacatcttagatacagcag

SEQ ID NO: 10528 - DNA, 25 bp, Artificial
  Probe
tttataatcaaagcccaaactcctt

SEQ ID NO: 10529 - DNA, 25 bp, Artificial
  Probe
gaagactacgctgcaattagagaca

SEQ ID NO: 10530 - DNA, 25 bp, Artificial
  Probe
cctgacctgaccatactaataaata

SEQ ID NO: 10531 - DNA, 25 bp, Artificial
  Probe
tcctttcttatcctgacctgaccat

SEQ ID NO: 10532 - DNA, 25 bp, Artificial
  Probe
tctcctggttggtaacaaatcagat

SEQ ID NO: 10533 - DNA, 25 bp, Artificial
  Probe
gtccgcgagcttattgctattagtg

SEQ ID NO: 10534 - DNA, 25 bp, Artificial
  Probe
cgtccgcgagcttattgctattagt

SEQ ID NO: 10535 - DNA, 25 bp, Artificial
  Probe
tagtcttcattgctcagaggaggat

SEQ ID NO: 10536 - DNA, 25 bp, Artificial
  Probe
agtcttcattgctcagaggaggatt

SEQ ID NO: 10537 - DNA, 25 bp, Artificial
  Probe
gtagtcttcattgctcagaggagga

SEQ ID NO: 10538 - DNA, 25 bp, Artificial
  Probe
cgtagtcttcattgctcagaggagg

SEQ ID NO: 10539 - DNA, 25 bp, Artificial
  Probe
acgtagtcttcattgctcagaggag

SEQ ID NO: 10540 - DNA, 25 bp, Artificial
  Probe
cacgtagtcttcattgctcagagga

SEQ ID NO: 10541 - DNA, 25 bp, Artificial
  Probe
acacgtagtcttcattgctcagagg

SEQ ID NO: 10542 - DNA, 25 bp, Artificial
  Probe
ggaatgacctgcaactgttaaataa

SEQ ID NO: 10543 - DNA, 25 bp, Artificial
  Probe
atgacctgcaactgttaaataaagc

SEQ ID NO: 10544 - DNA, 25 bp, Artificial
  Probe
tggaatgacctgcaactgttaaata

SEQ ID NO: 10545 - DNA, 25 bp, Artificial
  Probe
atggaatgacctgcaactgttaaat

SEQ ID NO: 10546 - DNA, 25 bp, Artificial
  Probe
aatgacctgcaactgttaaataaag

SEQ ID NO: 10547 - DNA, 25 bp, Artificial
  Probe
gaatgacctgcaactgttaaataaa

SEQ ID NO: 10548 - DNA, 25 bp, Artificial
  Probe
catggaatgacctgcaactgttaaa

SEQ ID NO: 10549 - DNA, 25 bp, Artificial
  Probe
acctgcaactgttaaataaagcatt

SEQ ID NO: 10550 - DNA, 25 bp, Artificial
  Probe
gacctgcaactgttaaataaagcat

SEQ ID NO: 10551 - DNA, 25 bp, Artificial
  Probe
cctgcaactgttaaataaagcattt

SEQ ID NO: 10552 - DNA, 25 bp, Artificial
  Probe
tgacctgcaactgttaaataaagca

SEQ ID NO: 10553 - DNA, 25 bp, Artificial
  Probe
ccatggaatgacctgcaactgttaa

SEQ ID NO: 10554 - DNA, 25 bp, Artificial
  Probe
cccatggaatgacctgcaactgtta

SEQ ID NO: 10555 - DNA, 25 bp, Artificial
  Probe
ccgttaccgctaattgacgtaatat

SEQ ID NO: 10556 - DNA, 25 bp, Artificial
  Probe
gtgcatacaaatacatccaggagct

SEQ ID NO: 10557 - DNA, 25 bp, Artificial
  Probe
gggtgcatacaaatacatccaggag

SEQ ID NO: 10558 - DNA, 25 bp, Artificial
  Probe
tgcatacaaatacatccaggagctg

SEQ ID NO: 10559 - DNA, 25 bp, Artificial
  Probe
ggtgcatacaaatacatccaggagc

SEQ ID NO: 10560 - DNA, 25 bp, Artificial
  Probe
gtttgttgatgtgcggtacattcac

SEQ ID NO: 10561 - DNA, 25 bp, Artificial
  Probe
tgtttgttgatgtgcggtacattca

SEQ ID NO: 10562 - DNA, 25 bp, Artificial
  Probe
tgggtgcatacaaatacatccagga

SEQ ID NO: 10563 - DNA, 25 bp, Artificial
  Probe
tttgttgatgtgcggtacattcacc

SEQ ID NO: 10564 - DNA, 25 bp, Artificial
  Probe
gtgaaatggaaagttacttatgcaa

SEQ ID NO: 10565 - DNA, 25 bp, Artificial
  Probe
tgaaatggaaagttacttatgcaaa

SEQ ID NO: 10566 - DNA, 25 bp, Artificial
  Probe
gaaatggaaagttacttatgcaaag

SEQ ID NO: 10567 - DNA, 25 bp, Artificial
  Probe
atggaaagttacttatgcaaagtgg

SEQ ID NO: 10568 - DNA, 25 bp, Artificial
  Probe
ggaaagttacttatgcaaagtggat

SEQ ID NO: 10569 - DNA, 25 bp, Artificial
  Probe
tggaaagttacttatgcaaagtgga

SEQ ID NO: 10570 - DNA, 25 bp, Artificial
  Probe
aatggaaagttacttatgcaaagtg

SEQ ID NO: 10571 - DNA, 25 bp, Artificial
  Probe
gaaagttacttatgcaaagtggatt

SEQ ID NO: 10572 - DNA, 25 bp, Artificial
  Probe
aaagttacttatgcaaagtggattt

SEQ ID NO: 10573 - DNA, 25 bp, Artificial
  Probe
aaatggaaagttacttatgcaaagt

SEQ ID NO: 10574 - DNA, 25 bp, Artificial
  Probe
gttacttatgcaaagtggattttgt

SEQ ID NO: 10575 - DNA, 25 bp, Artificial
  Probe
agttacttatgcaaagtggattttg

SEQ ID NO: 10576 - DNA, 25 bp, Artificial
  Probe
aagttacttatgcaaagtggatttt

SEQ ID NO: 10577 - DNA, 25 bp, Artificial
  Probe
cttcttgtagtaaccgctctagttg

SEQ ID NO: 10578 - DNA, 25 bp, Artificial
  Probe
ttcttgtagtaaccgctctagttgt

SEQ ID NO: 10579 - DNA, 25 bp, Artificial
  Probe
ccttcttgtagtaaccgctctagtt

SEQ ID NO: 10580 - DNA, 25 bp, Artificial
  Probe
tcttgtagtaaccgctctagttgtg

SEQ ID NO: 10581 - DNA, 25 bp, Artificial
  Probe
ctatagcttcaagtctgccttctac

SEQ ID NO: 10582 - DNA, 25 bp, Artificial
  Probe
tctatagcttcaagtctgccttcta

SEQ ID NO: 10583 - DNA, 25 bp, Artificial
  Probe
tatagcttcaagtctgccttctacg

SEQ ID NO: 10584 - DNA, 25 bp, Artificial
  Probe
ctctatagcttcaagtctgccttct

SEQ ID NO: 10585 - DNA, 25 bp, Artificial
  Probe
tctctatagcttcaagtctgccttc

SEQ ID NO: 10586 - DNA, 25 bp, Artificial
  Probe
ctctctatagcttcaagtctgcctt

SEQ ID NO: 10587 - DNA, 25 bp, Artificial
  Probe
cttgtagtaaccgctctagttgtgg

SEQ ID NO: 10588 - DNA, 25 bp, Artificial
  Probe
cactctctatagcttcaagtctgcc

SEQ ID NO: 10589 - DNA, 25 bp, Artificial
  Probe
ccactctctatagcttcaagtctgc

SEQ ID NO: 10590 - DNA, 25 bp, Artificial
  Probe
ttcccttcttgtagtaaccgctcta

SEQ ID NO: 10591 - DNA, 25 bp, Artificial
  Probe
actctctatagcttcaagtctgcct

SEQ ID NO: 10592 - DNA, 25 bp, Artificial
  Probe
tcccttcttgtagtaaccgctctag

SEQ ID NO: 10593 - DNA, 25 bp, Artificial
  Probe
tttcccttcttgtagtaaccgctct

SEQ ID NO: 10594 - DNA, 25 bp, Artificial
  Probe
tattttcccttcttgtagtaaccgc

SEQ ID NO: 10595 - DNA, 25 bp, Artificial
  Probe
cccttcttgtagtaaccgctctagt

SEQ ID NO: 10596 - DNA, 25 bp, Artificial
  Probe
ttattttcccttcttgtagtaaccg

SEQ ID NO: 10597 - DNA, 25 bp, Artificial
  Probe
cccactctctatagcttcaagtctg

SEQ ID NO: 10598 - DNA, 25 bp, Artificial
  Probe
ggctttattttcccttcttgtagta

SEQ ID NO: 10599 - DNA, 25 bp, Artificial
  Probe
ctttgagagaaaaccaaggctttat

SEQ ID NO: 10600 - DNA, 25 bp, Artificial
  Probe
ttgagagaaaaccaaggctttattt

SEQ ID NO: 10601 - DNA, 25 bp, Artificial
  Probe
tttgagagaaaaccaaggctttatt

SEQ ID NO: 10602 - DNA, 25 bp, Artificial
  Probe
cacccactctctatagcttcaagtc

SEQ ID NO: 10603 - DNA, 25 bp, Artificial
  Probe
acccactctctatagcttcaagtct

SEQ ID NO: 10604 - DNA, 25 bp, Artificial
  Probe
atagcttcaagtctgccttctacgg

SEQ ID NO: 10605 - DNA, 25 bp, Artificial
  Probe
attttcccttcttgtagtaaccgct

SEQ ID NO: 10606 - DNA, 25 bp, Artificial
  Probe
aggctttattttcccttcttgtagt

SEQ ID NO: 10607 - DNA, 25 bp, Artificial
  Probe
gctttgagagaaaaccaaggcttta

SEQ ID NO: 10608 - DNA, 25 bp, Artificial
  Probe
ccttctacggatgctttgagagaaa

SEQ ID NO: 10609 - DNA, 25 bp, Artificial
  Probe
tgagagaaaaccaaggctttatttt

SEQ ID NO: 10610 - DNA, 25 bp, Artificial
  Probe
accacccactctctatagcttcaag

SEQ ID NO: 10611 - DNA, 25 bp, Artificial
  Probe
ttttcccttcttgtagtaaccgctc

SEQ ID NO: 10612 - DNA, 25 bp, Artificial
  Probe
gctttattttcccttcttgtagtaa

SEQ ID NO: 10613 - DNA, 25 bp, Artificial
  Probe
ttgtagtaaccgctctagttgtggg

SEQ ID NO: 10614 - DNA, 25 bp, Artificial
  Probe
tacggatgctttgagagaaaaccaa

SEQ ID NO: 10615 - DNA, 25 bp, Artificial
  Probe
caccacccactctctatagcttcaa

SEQ ID NO: 10616 - DNA, 25 bp, Artificial
  Probe
ccacccactctctatagcttcaagt

SEQ ID NO: 10617 - DNA, 25 bp, Artificial
  Probe
ctacggatgctttgagagaaaacca

SEQ ID NO: 10618 - DNA, 25 bp, Artificial
  Probe
tctacggatgctttgagagaaaacc

SEQ ID NO: 10619 - DNA, 25 bp, Artificial
  Probe
tttattttcccttcttgtagtaacc

SEQ ID NO: 10620 - DNA, 25 bp, Artificial
  Probe
cttctacggatgctttgagagaaaa

SEQ ID NO: 10621 - DNA, 25 bp, Artificial
  Probe
ttctacggatgctttgagagaaaac

SEQ ID NO: 10622 - DNA, 25 bp, Artificial
  Probe
gtaatagcacagaagatccagaagc

SEQ ID NO: 10623 - DNA, 25 bp, Artificial
  Probe
tgtaatagcacagaagatccagaag

SEQ ID NO: 10624 - DNA, 25 bp, Artificial
  Probe
tgaggtacagcagataatgagtgac

SEQ ID NO: 10625 - DNA, 25 bp, Artificial
  Probe
ctgaggtacagcagataatgagtga

SEQ ID NO: 10626 - DNA, 25 bp, Artificial
  Probe
gcgaacacttaaagaatcctgtaat

SEQ ID NO: 10627 - DNA, 25 bp, Artificial
  Probe
agcgaacacttaaagaatcctgtaa

SEQ ID NO: 10628 - DNA, 25 bp, Artificial
  Probe
cctgaggtacagcagataatgagtg

SEQ ID NO: 10629 - DNA, 25 bp, Artificial
  Probe
gagcgaacacttaaagaatcctgta

SEQ ID NO: 10630 - DNA, 25 bp, Artificial
  Probe
cacttaaagaatcctgtaatagcac

SEQ ID NO: 10631 - DNA, 25 bp, Artificial
  Probe
acttaaagaatcctgtaatagcaca

SEQ ID NO: 10632 - DNA, 25 bp, Artificial
  Probe
acacttaaagaatcctgtaatagca

SEQ ID NO: 10633 - DNA, 25 bp, Artificial
  Probe
taatagcacagaagatccagaagct

SEQ ID NO: 10634 - DNA, 25 bp, Artificial
  Probe
tgagcgaacacttaaagaatcctgt

SEQ ID NO: 10635 - DNA, 25 bp, Artificial
  Probe
aacacttaaagaatcctgtaatagc

SEQ ID NO: 10636 - DNA, 25 bp, Artificial
  Probe
aatagcacagaagatccagaagctg

SEQ ID NO: 10637 - DNA, 25 bp, Artificial
  Probe
cgaacacttaaagaatcctgtaata

SEQ ID NO: 10638 - DNA, 25 bp, Artificial
  Probe
ctgtaatagcacagaagatccagaa

SEQ ID NO: 10639 - DNA, 25 bp, Artificial
  Probe
aatcctgtaatagcacagaagatcc

SEQ ID NO: 10640 - DNA, 25 bp, Artificial
  Probe
aagaatcctgtaatagcacagaaga

SEQ ID NO: 10641 - DNA, 25 bp, Artificial
  Probe
caattcggtgataacttgcttttcc

SEQ ID NO: 10642 - DNA, 25 bp, Artificial
  Probe
agaatcctgtaatagcacagaagat

SEQ ID NO: 10643 - DNA, 25 bp, Artificial
  Probe
gaatcctgtaatagcacagaagatc

SEQ ID NO: 10644 - DNA, 25 bp, Artificial
  Probe
atcctgtaatagcacagaagatcca

SEQ ID NO: 10645 - DNA, 25 bp, Artificial
  Probe
aattcggtgataacttgcttttccc

SEQ ID NO: 10646 - DNA, 25 bp, Artificial
  Probe
cctgtaatagcacagaagatccaga

SEQ ID NO: 10647 - DNA, 25 bp, Artificial
  Probe
tcctgtaatagcacagaagatccag

SEQ ID NO: 10648 - DNA, 25 bp, Artificial
  Probe
ccctgaggtacagcagataatgagt

SEQ ID NO: 10649 - DNA, 25 bp, Artificial
  Probe
tagcacagaagatccagaagctgat

SEQ ID NO: 10650 - DNA, 25 bp, Artificial
  Probe
atagcacagaagatccagaagctga

SEQ ID NO: 10651 - DNA, 25 bp, Artificial
  Probe
accctgaggtacagcagataatgag

SEQ ID NO: 10652 - DNA, 25 bp, Artificial
  Probe
gaccctgaggtacagcagataatga

SEQ ID NO: 10653 - DNA, 25 bp, Artificial
  Probe
tgaccctgaggtacagcagataatg

SEQ ID NO: 10654 - DNA, 25 bp, Artificial
  Probe
gtgataacttgcttttcccctctcc

SEQ ID NO: 10655 - DNA, 25 bp, Artificial
  Probe
ggtgataacttgcttttcccctctc

SEQ ID NO: 10656 - DNA, 25 bp, Artificial
  Probe
aaagaatcctgtaatagcacagaag

SEQ ID NO: 10657 - DNA, 25 bp, Artificial
  Probe
attcggtgataacttgcttttcccc

SEQ ID NO: 10658 - DNA, 25 bp, Artificial
  Probe
gaacacttaaagaatcctgtaatag

SEQ ID NO: 10659 - DNA, 25 bp, Artificial
  Probe
agcacagaagatccagaagctgatg

SEQ ID NO: 10660 - DNA, 25 bp, Artificial
  Probe
taaagaatcctgtaatagcacagaa

SEQ ID NO: 10661 - DNA, 25 bp, Artificial
  Probe
ttaaagaatcctgtaatagcacaga

SEQ ID NO: 10662 - DNA, 25 bp, Artificial
  Probe
cttaaagaatcctgtaatagcacag

SEQ ID NO: 10663 - DNA, 25 bp, Artificial
  Probe
tgataacttgcttttcccctctccc

SEQ ID NO: 10664 - DNA, 25 bp, Artificial
  Probe
ttcggtgataacttgcttttcccct

SEQ ID NO: 10665 - DNA, 25 bp, Artificial
  Probe
cggtgataacttgcttttcccctct

SEQ ID NO: 10666 - DNA, 25 bp, Artificial
  Probe
tcggtgataacttgcttttcccctc

SEQ ID NO: 10667 - DNA, 25 bp, Artificial
  Probe
gtagatgtgaactgaggtatcgaag

SEQ ID NO: 10668 - DNA, 25 bp, Artificial
  Probe
tgtagatgtgaactgaggtatcgaa

SEQ ID NO: 10669 - DNA, 25 bp, Artificial
  Probe
ctgtagatgtgaactgaggtatcga

SEQ ID NO: 10670 - DNA, 25 bp, Artificial
  Probe
tagatgtgaactgaggtatcgaagt

SEQ ID NO: 10671 - DNA, 25 bp, Artificial
  Probe
agattctggaaattcaagtatagcg

SEQ ID NO: 10672 - DNA, 25 bp, Artificial
  Probe
aatgctagattctggaaattcaagt

SEQ ID NO: 10673 - DNA, 25 bp, Artificial
  Probe
tgctagattctggaaattcaagtat

SEQ ID NO: 10674 - DNA, 25 bp, Artificial
  Probe
atgctagattctggaaattcaagta

SEQ ID NO: 10675 - DNA, 25 bp, Artificial
  Probe
atatctaagttcaacatgggctatg

SEQ ID NO: 10676 - DNA, 25 bp, Artificial
  Probe
gaatatctaagttcaacatgggcta

SEQ ID NO: 10677 - DNA, 25 bp, Artificial
  Probe
gatgcctttcccgtatgacttatca

SEQ ID NO: 10678 - DNA, 25 bp, Artificial
  Probe
aatatctaagttcaacatgggctat

SEQ ID NO: 10679 - DNA, 25 bp, Artificial
  Probe
gaatgctagattctggaaattcaag

SEQ ID NO: 10680 - DNA, 25 bp, Artificial
  Probe
tagattctggaaattcaagtatagc

SEQ ID NO: 10681 - DNA, 25 bp, Artificial
  Probe
tgaatatctaagttcaacatgggct

SEQ ID NO: 10682 - DNA, 25 bp, Artificial
  Probe
tctaagttcaacatgggctatgtaa

SEQ ID NO: 10683 - DNA, 25 bp, Artificial
  Probe
atctaagttcaacatgggctatgta

SEQ ID NO: 10684 - DNA, 25 bp, Artificial
  Probe
tatctaagttcaacatgggctatgt

SEQ ID NO: 10685 - DNA, 25 bp, Artificial
  Probe
gctagattctggaaattcaagtata

SEQ ID NO: 10686 - DNA, 25 bp, Artificial
  Probe
ctaagttcaacatgggctatgtaaa

SEQ ID NO: 10687 - DNA, 25 bp, Artificial
  Probe
atgcctttcccgtatgacttatcat

SEQ ID NO: 10688 - DNA, 25 bp, Artificial
  Probe
ggatgcctttcccgtatgacttatc

SEQ ID NO: 10689 - DNA, 25 bp, Artificial
  Probe
gattctggaaattcaagtatagcgc

SEQ ID NO: 10690 - DNA, 25 bp, Artificial
  Probe
tgcctttcccgtatgacttatcatg

SEQ ID NO: 10691 - DNA, 25 bp, Artificial
  Probe
attctggaaattcaagtatagcgcg

SEQ ID NO: 10692 - DNA, 25 bp, Artificial
  Probe
cctttcccgtatgacttatcatgca

SEQ ID NO: 10693 - DNA, 25 bp, Artificial
  Probe
gctaaattgactcttttgacataaa

SEQ ID NO: 10694 - DNA, 25 bp, Artificial
  Probe
agttcaacatgggctatgtaaaatt

SEQ ID NO: 10695 - DNA, 25 bp, Artificial
  Probe
aagttcaacatgggctatgtaaaat

SEQ ID NO: 10696 - DNA, 25 bp, Artificial
  Probe
agctaaattgactcttttgacataa

SEQ ID NO: 10697 - DNA, 25 bp, Artificial
  Probe
gagctaaattgactcttttgacata

SEQ ID NO: 10698 - DNA, 25 bp, Artificial
  Probe
taagttcaacatgggctatgtaaaa

SEQ ID NO: 10699 - DNA, 25 bp, Artificial
  Probe
gcctttcccgtatgacttatcatgc

SEQ ID NO: 10700 - DNA, 25 bp, Artificial
  Probe
agaatgctagattctggaaattcaa

SEQ ID NO: 10701 - DNA, 25 bp, Artificial
  Probe
aagaatgctagattctggaaattca

SEQ ID NO: 10702 - DNA, 25 bp, Artificial
  Probe
aagaaagaatgctagattctggaaa

SEQ ID NO: 10703 - DNA, 25 bp, Artificial
  Probe
aaagaaagaatgctagattctggaa

SEQ ID NO: 10704 - DNA, 25 bp, Artificial
  Probe
ctggaaattcaagtatagcgcggat

SEQ ID NO: 10705 - DNA, 25 bp, Artificial
  Probe
agaaagaatgctagattctggaaat

SEQ ID NO: 10706 - DNA, 25 bp, Artificial
  Probe
tttcccgtatgacttatcatgcatc

SEQ ID NO: 10707 - DNA, 25 bp, Artificial
  Probe
ctttcccgtatgacttatcatgcat

SEQ ID NO: 10708 - DNA, 25 bp, Artificial
  Probe
ttctggaaattcaagtatagcgcgg

SEQ ID NO: 10709 - DNA, 25 bp, Artificial
  Probe
gttcaacatgggctatgtaaaattt

SEQ ID NO: 10710 - DNA, 25 bp, Artificial
  Probe
tgacataaagtcaaatgtagaactc

SEQ ID NO: 10711 - DNA, 25 bp, Artificial
  Probe
tggaaattcaagtatagcgcggatg

SEQ ID NO: 10712 - DNA, 25 bp, Artificial
  Probe
ggctctcttgaagaatggtatgatc

SEQ ID NO: 10713 - DNA, 25 bp, Artificial
  Probe
tggctctcttgaagaatggtatgat

SEQ ID NO: 10714 - DNA, 25 bp, Artificial
  Probe
ggaagaagagttatccagactatgg

SEQ ID NO: 10715 - DNA, 25 bp, Artificial
  Probe
gtctgagatggacatgagtgttaag

SEQ ID NO: 10716 - DNA, 25 bp, Artificial
  Probe
ctctggttgctttgtatcttgttta

SEQ ID NO: 10717 - DNA, 25 bp, Artificial
  Probe
agtctgagatggacatgagtgttaa

SEQ ID NO: 10718 - DNA, 25 bp, Artificial
  Probe
gtggctctcttgaagaatggtatga

SEQ ID NO: 10719 - DNA, 25 bp, Artificial
  Probe
agtggctctcttgaagaatggtatg

SEQ ID NO: 10720 - DNA, 25 bp, Artificial
  Probe
cagtggctctcttgaagaatggtat

SEQ ID NO: 10721 - DNA, 25 bp, Artificial
  Probe
tggttgctttgtatcttgtttatga

SEQ ID NO: 10722 - DNA, 25 bp, Artificial
  Probe
ctggttgctttgtatcttgtttatg

SEQ ID NO: 10723 - DNA, 25 bp, Artificial
  Probe
tctggttgctttgtatcttgtttat

SEQ ID NO: 10724 - DNA, 25 bp, Artificial
  Probe
gagtctgagatggacatgagtgtta

SEQ ID NO: 10725 - DNA, 25 bp, Artificial
  Probe
tctgagatggacatgagtgttaagg

SEQ ID NO: 10726 - DNA, 25 bp, Artificial
  Probe
cttcccttgtagtctctcatagaaa

SEQ ID NO: 10727 - DNA, 25 bp, Artificial
  Probe
gctgtgggaaggaagtgtaatttat

SEQ ID NO: 10728 - DNA, 25 bp, Artificial
  Probe
tagtctctcatagaaatagtcacgg

SEQ ID NO: 10729 - DNA, 25 bp, Artificial
  Probe
ggttgctttgtatcttgtttatgaa

SEQ ID NO: 10730 - DNA, 25 bp, Artificial
  Probe
cctctggttgctttgtatcttgttt

SEQ ID NO: 10731 - DNA, 25 bp, Artificial
  Probe
gcttcccttgtagtctctcatagaa

SEQ ID NO: 10732 - DNA, 25 bp, Artificial
  Probe
tgtgggaaggaagtgtaatttatac

SEQ ID NO: 10733 - DNA, 25 bp, Artificial
  Probe
ttcccttgtagtctctcatagaaat

SEQ ID NO: 10734 - DNA, 25 bp, Artificial
  Probe
atgaaacgagagatgtcactacaaa

SEQ ID NO: 10735 - DNA, 25 bp, Artificial
  Probe
ctgtgggaaggaagtgtaatttata

SEQ ID NO: 10736 - DNA, 25 bp, Artificial
  Probe
tatgaaacgagagatgtcactacaa

SEQ ID NO: 10737 - DNA, 25 bp, Artificial
  Probe
ttatgaaacgagagatgtcactaca

SEQ ID NO: 10738 - DNA, 25 bp, Artificial
  Probe
tttatgaaacgagagatgtcactac

SEQ ID NO: 10739 - DNA, 25 bp, Artificial
  Probe
agtctctcatagaaatagtcacggc

SEQ ID NO: 10740 - DNA, 25 bp, Artificial
  Probe
gtagtctctcatagaaatagtcacg

SEQ ID NO: 10741 - DNA, 25 bp, Artificial
  Probe
tctctcatagaaatagtcacggcac

SEQ ID NO: 10742 - DNA, 25 bp, Artificial
  Probe
gtctctcatagaaatagtcacggca

SEQ ID NO: 10743 - DNA, 25 bp, Artificial
  Probe
gtgggaaggaagtgtaatttatact

SEQ ID NO: 10744 - DNA, 25 bp, Artificial
  Probe
ctaagaagtaggaagacaaagcctg

SEQ ID NO: 10745 - DNA, 25 bp, Artificial
  Probe
tcccttgtagtctctcatagaaata

SEQ ID NO: 10746 - DNA, 25 bp, Artificial
  Probe
ctcatagaaatagtcacggcactct

SEQ ID NO: 10747 - DNA, 25 bp, Artificial
  Probe
tctcatagaaatagtcacggcactc

SEQ ID NO: 10748 - DNA, 25 bp, Artificial
  Probe
ctctcatagaaatagtcacggcact

SEQ ID NO: 10749 - DNA, 25 bp, Artificial
  Probe
gggaagaagagttatccagactatg

SEQ ID NO: 10750 - DNA, 25 bp, Artificial
  Probe
cccttgtagtctctcatagaaatag

SEQ ID NO: 10751 - DNA, 25 bp, Artificial
  Probe
gaagaagagttatccagactatggg

SEQ ID NO: 10752 - DNA, 25 bp, Artificial
  Probe
tcatagaaatagtcacggcactctg

SEQ ID NO: 10753 - DNA, 25 bp, Artificial
  Probe
agagtctgagatggacatgagtgtt

SEQ ID NO: 10754 - DNA, 25 bp, Artificial
  Probe
aagaatggtatgatcaggataagcc

SEQ ID NO: 10755 - DNA, 25 bp, Artificial
  Probe
aatgggaactttgggcaaattcaat

SEQ ID NO: 10756 - DNA, 25 bp, Artificial
  Probe
gacatgagtgttaaggcagagatgg

SEQ ID NO: 10757 - DNA, 25 bp, Artificial
  Probe
atatcttctacagtatgtctgctgc

SEQ ID NO: 10758 - DNA, 25 bp, Artificial
  Probe
tatcttctacagtatgtctgctgct

SEQ ID NO: 10759 - DNA, 25 bp, Artificial
  Probe
ccaatatcttctacagtatgtctgc

SEQ ID NO: 10760 - DNA, 25 bp, Artificial
  Probe
tgagtccaatatcttctacagtatg

SEQ ID NO: 10761 - DNA, 25 bp, Artificial
  Probe
atcttctacagtatgtctgctgctc

SEQ ID NO: 10762 - DNA, 25 bp, Artificial
  Probe
aatatcttctacagtatgtctgctg

SEQ ID NO: 10763 - DNA, 25 bp, Artificial
  Probe
caatatcttctacagtatgtctgct

SEQ ID NO: 10764 - DNA, 25 bp, Artificial
  Probe
gtccaatatcttctacagtatgtct

SEQ ID NO: 10765 - DNA, 25 bp, Artificial
  Probe
agtccaatatcttctacagtatgtc

SEQ ID NO: 10766 - DNA, 25 bp, Artificial
  Probe
gagtccaatatcttctacagtatgt

SEQ ID NO: 10767 - DNA, 25 bp, Artificial
  Probe
tccaatatcttctacagtatgtctg

SEQ ID NO: 10768 - DNA, 25 bp, Artificial
  Probe
ggactacaccgaaatgaatgatctg

SEQ ID NO: 10769 - DNA, 25 bp, Artificial
  Probe
ttgagtccaatatcttctacagtat

SEQ ID NO: 10770 - DNA, 25 bp, Artificial
  Probe
gactacaccgaaatgaatgatctgc

SEQ ID NO: 10771 - DNA, 25 bp, Artificial
  Probe
gcaatcagttcggacatcaggtatg

SEQ ID NO: 10772 - DNA, 25 bp, Artificial
  Probe
gggactacaccgaaatgaatgatct

SEQ ID NO: 10773 - DNA, 25 bp, Artificial
  Probe
cttactttccctctggtactacagc

SEQ ID NO: 10774 - DNA, 25 bp, Artificial
  Probe
gcttactttccctctggtactacag

SEQ ID NO: 10775 - DNA, 25 bp, Artificial
  Probe
tttgagtccaatatcttctacagta

SEQ ID NO: 10776 - DNA, 25 bp, Artificial
  Probe
aatcagttcggacatcaggtatgtg

SEQ ID NO: 10777 - DNA, 25 bp, Artificial
  Probe
caatcagttcggacatcaggtatgt

SEQ ID NO: 10778 - DNA, 25 bp, Artificial
  Probe
tcttctacagtatgtctgctgctcg

SEQ ID NO: 10779 - DNA, 25 bp, Artificial
  Probe
actacaccgaaatgaatgatctgca

SEQ ID NO: 10780 - DNA, 25 bp, Artificial
  Probe
cgcttactttccctctggtactaca

SEQ ID NO: 10781 - DNA, 25 bp, Artificial
  Probe
ttactttccctctggtactacagct

SEQ ID NO: 10782 - DNA, 25 bp, Artificial
  Probe
atcagttcggacatcaggtatgtga

SEQ ID NO: 10783 - DNA, 25 bp, Artificial
  Probe
tgcaatcagttcggacatcaggtat

SEQ ID NO: 10784 - DNA, 25 bp, Artificial
  Probe
ttttgagtccaatatcttctacagt

SEQ ID NO: 10785 - DNA, 25 bp, Artificial
  Probe
cttctacagtatgtctgctgctcgg

SEQ ID NO: 10786 - DNA, 25 bp, Artificial
  Probe
agttcggacatcaggtatgtgagac

SEQ ID NO: 10787 - DNA, 25 bp, Artificial
  Probe
cagttcggacatcaggtatgtgaga

SEQ ID NO: 10788 - DNA, 25 bp, Artificial
  Probe
tcagttcggacatcaggtatgtgag

SEQ ID NO: 10789 - DNA, 25 bp, Artificial
  Probe
ccgcttactttccctctggtactac

SEQ ID NO: 10790 - DNA, 25 bp, Artificial
  Probe
caaggtgctgctcattgagaatgtc

SEQ ID NO: 10791 - DNA, 25 bp, Artificial
  Probe
gtgcaatcagttcggacatcaggta

SEQ ID NO: 10792 - DNA, 25 bp, Artificial
  Probe
gatctcagccccatccagttaaaag

SEQ ID NO: 10793 - DNA, 25 bp, Artificial
  Probe
gataaggcgggaccctgagatttag

SEQ ID NO: 10794 - DNA, 25 bp, Artificial
  Probe
tgatctcagccccatccagttaaaa

SEQ ID NO: 10795 - DNA, 25 bp, Artificial
  Probe
ataaggcgggaccctgagatttaga

SEQ ID NO: 10796 - DNA, 25 bp, Artificial
  Probe
accgcttactttccctctggtacta

SEQ ID NO: 10797 - DNA, 25 bp, Artificial
  Probe
gttcggacatcaggtatgtgagacg

SEQ ID NO: 10798 - DNA, 25 bp, Artificial
  Probe
atctcagccccatccagttaaaagg

SEQ ID NO: 10799 - DNA, 25 bp, Artificial
  Probe
cgggactacaccgaaatgaatgatc

SEQ ID NO: 10800 - DNA, 25 bp, Artificial
  Probe
gtgatctcagccccatccagttaaa

SEQ ID NO: 10801 - DNA, 25 bp, Artificial
  Probe
taaggcgggaccctgagatttagag

SEQ ID NO: 10802 - DNA, 25 bp, Artificial
  Probe
gactcagagcaaagacagagaatat

SEQ ID NO: 10803 - DNA, 25 bp, Artificial
  Probe
actcagagcaaagacagagaatata

SEQ ID NO: 10804 - DNA, 25 bp, Artificial
  Probe
tgactcagagcaaagacagagaata

SEQ ID NO: 10805 - DNA, 25 bp, Artificial
  Probe
tgtccttggaactctgacctatgtc

SEQ ID NO: 10806 - DNA, 25 bp, Artificial
  Probe
ctgtgtccttggaactctgacctat

SEQ ID NO: 10807 - DNA, 25 bp, Artificial
  Probe
ctcagagcaaagacagagaatatat

SEQ ID NO: 10808 - DNA, 25 bp, Artificial
  Probe
gtgactcagagcaaagacagagaat

SEQ ID NO: 10809 - DNA, 25 bp, Artificial
  Probe
gtgtccttggaactctgacctatgt

SEQ ID NO: 10810 - DNA, 25 bp, Artificial
  Probe
tgtgtccttggaactctgacctatg

SEQ ID NO: 10811 - DNA, 25 bp, Artificial
  Probe
tatgtccctcttccctaagccattc

SEQ ID NO: 10812 - DNA, 25 bp, Artificial
  Probe
ctatgtccctcttccctaagccatt

SEQ ID NO: 10813 - DNA, 25 bp, Artificial
  Probe
gatcctgacagcctcatcctacatc

SEQ ID NO: 10814 - DNA, 25 bp, Artificial
  Probe
ctgacctatgtccctcttccctaag

SEQ ID NO: 10815 - DNA, 25 bp, Artificial
  Probe
tgactgtgaatgtcgtgactcagag

SEQ ID NO: 10816 - DNA, 25 bp, Artificial
  Probe
gtccttggaactctgacctatgtcc

SEQ ID NO: 10817 - DNA, 25 bp, Artificial
  Probe
tctgacctatgtccctcttccctaa

SEQ ID NO: 10818 - DNA, 25 bp, Artificial
  Probe
tgatcctgacagcctcatcctacat

SEQ ID NO: 10819 - DNA, 25 bp, Artificial
  Probe
gaactctgacctatgtccctcttcc

SEQ ID NO: 10820 - DNA, 25 bp, Artificial
  Probe
taccagagtaaccttggctctttag

SEQ ID NO: 10821 - DNA, 25 bp, Artificial
  Probe
gtaccagagtaaccttggctcttta

SEQ ID NO: 10822 - DNA, 25 bp, Artificial
  Probe
tcagagcaaagacagagaatatatt

SEQ ID NO: 10823 - DNA, 25 bp, Artificial
  Probe
gaatgtcgtgactcagagcaaagac

SEQ ID NO: 10824 - DNA, 25 bp, Artificial
  Probe
ttgatcctgacagcctcatcctaca

SEQ ID NO: 10825 - DNA, 25 bp, Artificial
  Probe
ctctgacctatgtccctcttcccta

SEQ ID NO: 10826 - DNA, 25 bp, Artificial
  Probe
tttgatcctgacagcctcatcctac

SEQ ID NO: 10827 - DNA, 25 bp, Artificial
  Probe
gtttgatcctgacagcctcatccta

SEQ ID NO: 10828 - DNA, 25 bp, Artificial
  Probe
ggaactctgacctatgtccctcttc

SEQ ID NO: 10829 - DNA, 25 bp, Artificial
  Probe
cactgactgtgaatgtcgtgactca

SEQ ID NO: 10830 - DNA, 25 bp, Artificial
  Probe
tgaatgtcgtgactcagagcaaaga

SEQ ID NO: 10831 - DNA, 25 bp, Artificial
  Probe
gtgaatgtcgtgactcagagcaaag

SEQ ID NO: 10832 - DNA, 25 bp, Artificial
  Probe
ctgtgaatgtcgtgactcagagcaa

SEQ ID NO: 10833 - DNA, 25 bp, Artificial
  Probe
cttggaactctgacctatgtccctc

SEQ ID NO: 10834 - DNA, 25 bp, Artificial
  Probe
cctaagctggagagaagtgaggttg

SEQ ID NO: 10835 - DNA, 25 bp, Artificial
  Probe
ctaagctggagagaagtgaggttgc

SEQ ID NO: 10836 - DNA, 25 bp, Artificial
  Probe
cagagcaaagacagagaatatattt

SEQ ID NO: 10837 - DNA, 25 bp, Artificial
  Probe
cgtgactcagagcaaagacagagaa

SEQ ID NO: 10838 - DNA, 25 bp, Artificial
  Probe
tggaactctgacctatgtccctctt

SEQ ID NO: 10839 - DNA, 25 bp, Artificial
  Probe
ttggaactctgacctatgtccctct

SEQ ID NO: 10840 - DNA, 25 bp, Artificial
  Probe
tgtgaatgtcgtgactcagagcaaa

SEQ ID NO: 10841 - DNA, 25 bp, Artificial
  Probe
cctatgtccctcttccctaagccat

SEQ ID NO: 10842 - DNA, 25 bp, Artificial
  Probe
aactctgacctatgtccctcttccc

SEQ ID NO: 10843 - DNA, 25 bp, Artificial
  Probe
tgaacttgaagggcaaaggtcaaag

SEQ ID NO: 10844 - DNA, 25 bp, Artificial
  Probe
ctgaacttgaagggcaaaggtcaaa

SEQ ID NO: 10845 - DNA, 25 bp, Artificial
  Probe
tgacctatgtccctcttccctaagc

SEQ ID NO: 10846 - DNA, 25 bp, Artificial
  Probe
gagtaaccttggctctttagggctg

SEQ ID NO: 10847 - DNA, 25 bp, Artificial
  Probe
ttacaacttcttctctccactcaac

SEQ ID NO: 10848 - DNA, 25 bp, Artificial
  Probe
agcacagatacatagaactcttcct

SEQ ID NO: 10849 - DNA, 25 bp, Artificial
  Probe
cagcacagatacatagaactcttcc

SEQ ID NO: 10850 - DNA, 25 bp, Artificial
  Probe
gagttcatattgagattggtcctga

SEQ ID NO: 10851 - DNA, 25 bp, Artificial
  Probe
agagttcatattgagattggtcctg

SEQ ID NO: 10852 - DNA, 25 bp, Artificial
  Probe
gagagttcatattgagattggtcct

SEQ ID NO: 10853 - DNA, 25 bp, Artificial
  Probe
tgagagttcatattgagattggtcc

SEQ ID NO: 10854 - DNA, 25 bp, Artificial
  Probe
gctattgtctctcaggaatgtatga

SEQ ID NO: 10855 - DNA, 25 bp, Artificial
  Probe
tgtgagagttcatattgagattggt

SEQ ID NO: 10856 - DNA, 25 bp, Artificial
  Probe
gtgagagttcatattgagattggtc

SEQ ID NO: 10857 - DNA, 25 bp, Artificial
  Probe
ctgtgagagttcatattgagattgg

SEQ ID NO: 10858 - DNA, 25 bp, Artificial
  Probe
cctgtgagagttcatattgagattg

SEQ ID NO: 10859 - DNA, 25 bp, Artificial
  Probe
gcagcacagatacatagaactcttc

SEQ ID NO: 10860 - DNA, 25 bp, Artificial
  Probe
cagtcaggaggaagttaggtcatac

SEQ ID NO: 10861 - DNA, 25 bp, Artificial
  Probe
ggaggaagttaggtcatactcagat

SEQ ID NO: 10862 - DNA, 25 bp, Artificial
  Probe
tacaacttcttctctccactcaacc

SEQ ID NO: 10863 - DNA, 25 bp, Artificial
  Probe
gaagttaggtcatactcagatccac

SEQ ID NO: 10864 - DNA, 25 bp, Artificial
  Probe
cacagatacatagaactcttcctga

SEQ ID NO: 10865 - DNA, 25 bp, Artificial
  Probe
gcacagatacatagaactcttcctg

SEQ ID NO: 10866 - DNA, 25 bp, Artificial
  Probe
gaggaagttaggtcatactcagatc

SEQ ID NO: 10867 - DNA, 25 bp, Artificial
  Probe
aggaggaagttaggtcatactcaga

SEQ ID NO: 10868 - DNA, 25 bp, Artificial
  Probe
caggaggaagttaggtcatactcag

SEQ ID NO: 10869 - DNA, 25 bp, Artificial
  Probe
gtcaggaggaagttaggtcatactc

SEQ ID NO: 10870 - DNA, 25 bp, Artificial
  Probe
agtcaggaggaagttaggtcatact

SEQ ID NO: 10871 - DNA, 25 bp, Artificial
  Probe
acagatacatagaactcttcctgaa

SEQ ID NO: 10872 - DNA, 25 bp, Artificial
  Probe
agctattgtctctcaggaatgtatg

SEQ ID NO: 10873 - DNA, 25 bp, Artificial
  Probe
cagctattgtctctcaggaatgtat

SEQ ID NO: 10874 - DNA, 25 bp, Artificial
  Probe
tcagctattgtctctcaggaatgta

SEQ ID NO: 10875 - DNA, 25 bp, Artificial
  Probe
tcaggaggaagttaggtcatactca

SEQ ID NO: 10876 - DNA, 25 bp, Artificial
  Probe
ctattgtctctcaggaatgtatgat

SEQ ID NO: 10877 - DNA, 25 bp, Artificial
  Probe
tttacaacttcttctctccactcaa

SEQ ID NO: 10878 - DNA, 25 bp, Artificial
  Probe
acatttacaacttcttctctccact

SEQ ID NO: 10879 - DNA, 25 bp, Artificial
  Probe
aggaagttaggtcatactcagatcc

SEQ ID NO: 10880 - DNA, 25 bp, Artificial
  Probe
atttacaacttcttctctccactca

SEQ ID NO: 10881 - DNA, 25 bp, Artificial
  Probe
gacatttacaacttcttctctccac

SEQ ID NO: 10882 - DNA, 25 bp, Artificial
  Probe
catttacaacttcttctctccactc

SEQ ID NO: 10883 - DNA, 25 bp, Artificial
  Probe
ggaagttaggtcatactcagatcca

SEQ ID NO: 10884 - DNA, 25 bp, Artificial
  Probe
aacgacatttacaacttcttctctc

SEQ ID NO: 10885 - DNA, 25 bp, Artificial
  Probe
cgacatttacaacttcttctctcca

SEQ ID NO: 10886 - DNA, 25 bp, Artificial
  Probe
acgacatttacaacttcttctctcc

SEQ ID NO: 10887 - DNA, 25 bp, Artificial
  Probe
ctcagctattgtctctcaggaatgt

SEQ ID NO: 10888 - DNA, 25 bp, Artificial
  Probe
gaacgacatttacaacttcttctct

SEQ ID NO: 10889 - DNA, 25 bp, Artificial
  Probe
tattgtctctcaggaatgtatgatc

SEQ ID NO: 10890 - DNA, 25 bp, Artificial
  Probe
aagttaggtcatactcagatccacc

SEQ ID NO: 10891 - DNA, 25 bp, Artificial
  Probe
atccacctctgaagtttatgtctgt

SEQ ID NO: 10892 - DNA, 25 bp, Artificial
  Probe
aatggagtggaacaaagaagatagg

SEQ ID NO: 10893 - DNA, 25 bp, Artificial
  Probe
aaatggagtggaacaaagaagatag

SEQ ID NO: 10894 - DNA, 25 bp, Artificial
  Probe
atggagtggaacaaagaagataggg

SEQ ID NO: 10895 - DNA, 25 bp, Artificial
  Probe
ttaattccactgggagtttaatggg

SEQ ID NO: 10896 - DNA, 25 bp, Artificial
  Probe
tttaattccactgggagtttaatgg

SEQ ID NO: 10897 - DNA, 25 bp, Artificial
  Probe
taattccactgggagtttaatggga

SEQ ID NO: 10898 - DNA, 25 bp, Artificial
  Probe
gaaaatggagtggaacaaagaagat

SEQ ID NO: 10899 - DNA, 25 bp, Artificial
  Probe
tcagacccattagaagaaaagtttg

SEQ ID NO: 10900 - DNA, 25 bp, Artificial
  Probe
ctctcctctcttctccctttggttt

SEQ ID NO: 10901 - DNA, 25 bp, Artificial
  Probe
agtcagacccattagaagaaaagtt

SEQ ID NO: 10902 - DNA, 25 bp, Artificial
  Probe
gagtcagacccattagaagaaaagt

SEQ ID NO: 10903 - DNA, 25 bp, Artificial
  Probe
aaggaaaatggagtggaacaaagaa

SEQ ID NO: 10904 - DNA, 25 bp, Artificial
  Probe
aaaggaaaatggagtggaacaaaga

SEQ ID NO: 10905 - DNA, 25 bp, Artificial
  Probe
caaaggaaaatggagtggaacaaag

SEQ ID NO: 10906 - DNA, 25 bp, Artificial
  Probe
tcaccgttagattttaattccactg

SEQ ID NO: 10907 - DNA, 25 bp, Artificial
  Probe
gttttcactcttcaccgttagattt

SEQ ID NO: 10908 - DNA, 25 bp, Artificial
  Probe
caccgttagattttaattccactgg

SEQ ID NO: 10909 - DNA, 25 bp, Artificial
  Probe
gtcagacccattagaagaaaagttt

SEQ ID NO: 10910 - DNA, 25 bp, Artificial
  Probe
ggagtcagacccattagaagaaaag

SEQ ID NO: 10911 - DNA, 25 bp, Artificial
  Probe
aattccactgggagtttaatgggag

SEQ ID NO: 10912 - DNA, 25 bp, Artificial
  Probe
aaaatggagtggaacaaagaagata

SEQ ID NO: 10913 - DNA, 25 bp, Artificial
  Probe
ggaaaatggagtggaacaaagaaga

SEQ ID NO: 10914 - DNA, 25 bp, Artificial
  Probe
aggaaaatggagtggaacaaagaag

SEQ ID NO: 10915 - DNA, 25 bp, Artificial
  Probe
acaaaggaaaatggagtggaacaaa

SEQ ID NO: 10916 - DNA, 25 bp, Artificial
  Probe
ttttcactcttcaccgttagatttt

SEQ ID NO: 10917 - DNA, 25 bp, Artificial
  Probe
accgttagattttaattccactggg

SEQ ID NO: 10918 - DNA, 25 bp, Artificial
  Probe
ttcaccgttagattttaattccact

SEQ ID NO: 10919 - DNA, 25 bp, Artificial
  Probe
cttcaccgttagattttaattccac

SEQ ID NO: 10920 - DNA, 25 bp, Artificial
  Probe
cttctccctttggttttcactcttc

SEQ ID NO: 10921 - DNA, 25 bp, Artificial
  Probe
tttcactcttcaccgttagatttta

SEQ ID NO: 10922 - DNA, 25 bp, Artificial
  Probe
tcttcaccgttagattttaattcca

SEQ ID NO: 10923 - DNA, 25 bp, Artificial
  Probe
ttcactcttcaccgttagattttaa

SEQ ID NO: 10924 - DNA, 25 bp, Artificial
  Probe
tcttctccctttggttttcactctt

SEQ ID NO: 10925 - DNA, 25 bp, Artificial
  Probe
attccctctcctctcttctcccttt

SEQ ID NO: 10926 - DNA, 25 bp, Artificial
  Probe
tcactcttcaccgttagattttaat

SEQ ID NO: 10927 - DNA, 25 bp, Artificial
  Probe
ttctccctttggttttcactcttca

SEQ ID NO: 10928 - DNA, 25 bp, Artificial
  Probe
aattccctctcctctcttctccctt

SEQ ID NO: 10929 - DNA, 25 bp, Artificial
  Probe
ctcttctccctttggttttcactct

SEQ ID NO: 10930 - DNA, 25 bp, Artificial
  Probe
tctcttctccctttggttttcactc

SEQ ID NO: 10931 - DNA, 25 bp, Artificial
  Probe
ctctcttctccctttggttttcact

SEQ ID NO: 10932 - DNA, 25 bp, Artificial
  Probe
ctcttcaccgttagattttaattcc

SEQ ID NO: 10933 - DNA, 25 bp, Artificial
  Probe
cgttagattttaattccactgggag

SEQ ID NO: 10934 - DNA, 25 bp, Artificial
  Probe
tggagtggaacaaagaagatagggc

SEQ ID NO: 10935 - DNA, 25 bp, Artificial
  Probe
ccgttagattttaattccactggga

SEQ ID NO: 10936 - DNA, 25 bp, Artificial
  Probe
cagacccattagaagaaaagtttgg

SEQ ID NO: 10937 - DNA, 25 bp, Artificial
  Probe
tgacactgtattagcttcctgaatt

SEQ ID NO: 10938 - DNA, 25 bp, Artificial
  Probe
ttgacactgtattagcttcctgaat

SEQ ID NO: 10939 - DNA, 25 bp, Artificial
  Probe
gacactgtattagcttcctgaattg

SEQ ID NO: 10940 - DNA, 25 bp, Artificial
  Probe
cttgacactgtattagcttcctgaa

SEQ ID NO: 10941 - DNA, 25 bp, Artificial
  Probe
cactgtattagcttcctgaattgtt

SEQ ID NO: 10942 - DNA, 25 bp, Artificial
  Probe
ctgtattagcttcctgaattgttcg

SEQ ID NO: 10943 - DNA, 25 bp, Artificial
  Probe
tgtattagcttcctgaattgttcga

SEQ ID NO: 10944 - DNA, 25 bp, Artificial
  Probe
actgtattagcttcctgaattgttc

SEQ ID NO: 10945 - DNA, 25 bp, Artificial
  Probe
acactgtattagcttcctgaattgt

SEQ ID NO: 10946 - DNA, 25 bp, Artificial
  Probe
tgtctcctctctaaatgtttcagaa

SEQ ID NO: 10947 - DNA, 25 bp, Artificial
  Probe
atgtctcctctctaaatgtttcaga

SEQ ID NO: 10948 - DNA, 25 bp, Artificial
  Probe
tctcctctctaaatgtttcagaact

SEQ ID NO: 10949 - DNA, 25 bp, Artificial
  Probe
gtctcctctctaaatgtttcagaac

SEQ ID NO: 10950 - DNA, 25 bp, Artificial
  Probe
ctcctctctaaatgtttcagaactg

SEQ ID NO: 10951 - DNA, 25 bp, Artificial
  Probe
tgcttcatacccattgtactagaaa

SEQ ID NO: 10952 - DNA, 25 bp, Artificial
  Probe
gtgcttcatacccattgtactagaa

SEQ ID NO: 10953 - DNA, 25 bp, Artificial
  Probe
gtatgtctcctctctaaatgtttca

SEQ ID NO: 10954 - DNA, 25 bp, Artificial
  Probe
tgtatgtctcctctctaaatgtttc

SEQ ID NO: 10955 - DNA, 25 bp, Artificial
  Probe
acccatgtatgtctcctctctaaat

SEQ ID NO: 10956 - DNA, 25 bp, Artificial
  Probe
aacccatgtatgtctcctctctaaa

SEQ ID NO: 10957 - DNA, 25 bp, Artificial
  Probe
aaacccatgtatgtctcctctctaa

SEQ ID NO: 10958 - DNA, 25 bp, Artificial
  Probe
ctggcatttctgacctacaaatact

SEQ ID NO: 10959 - DNA, 25 bp, Artificial
  Probe
cccatgtatgtctcctctctaaatg

SEQ ID NO: 10960 - DNA, 25 bp, Artificial
  Probe
ccatgtatgtctcctctctaaatgt

SEQ ID NO: 10961 - DNA, 25 bp, Artificial
  Probe
tggcatttctgacctacaaatactg

SEQ ID NO: 10962 - DNA, 25 bp, Artificial
  Probe
gagtgcttcatacccattgtactag

SEQ ID NO: 10963 - DNA, 25 bp, Artificial
  Probe
tatgtctcctctctaaatgtttcag

SEQ ID NO: 10964 - DNA, 25 bp, Artificial
  Probe
agtgcttcatacccattgtactaga

SEQ ID NO: 10965 - DNA, 25 bp, Artificial
  Probe
agagtgcttcatacccattgtacta

SEQ ID NO: 10966 - DNA, 25 bp, Artificial
  Probe
tcctctctaaatgtttcagaactga

SEQ ID NO: 10967 - DNA, 25 bp, Artificial
  Probe
gtgacctttgcctttgctagataag

SEQ ID NO: 10968 - DNA, 25 bp, Artificial
  Probe
agtgacctttgcctttgctagataa

SEQ ID NO: 10969 - DNA, 25 bp, Artificial
  Probe
cctggcatttctgacctacaaatac

SEQ ID NO: 10970 - DNA, 25 bp, Artificial
  Probe
atgtatgtctcctctctaaatgttt

SEQ ID NO: 10971 - DNA, 25 bp, Artificial
  Probe
cctctctaaatgtttcagaactgag

SEQ ID NO: 10972 - DNA, 25 bp, Artificial
  Probe
taaatgtttcagaactgagttgtga

SEQ ID NO: 10973 - DNA, 25 bp, Artificial
  Probe
ctaaatgtttcagaactgagttgtg

SEQ ID NO: 10974 - DNA, 25 bp, Artificial
  Probe
tctaaatgtttcagaactgagttgt

SEQ ID NO: 10975 - DNA, 25 bp, Artificial
  Probe
catttctgacctacaaatactgccg

SEQ ID NO: 10976 - DNA, 25 bp, Artificial
  Probe
catgtatgtctcctctctaaatgtt

SEQ ID NO: 10977 - DNA, 25 bp, Artificial
  Probe
ctgagtccaatttcctccttctgaa

SEQ ID NO: 10978 - DNA, 25 bp, Artificial
  Probe
ctctctaaatgtttcagaactgagt

SEQ ID NO: 10979 - DNA, 25 bp, Artificial
  Probe
ctctaaatgtttcagaactgagttg

SEQ ID NO: 10980 - DNA, 25 bp, Artificial
  Probe
cagtgacctttgcctttgctagata

SEQ ID NO: 10981 - DNA, 25 bp, Artificial
  Probe
caatttcctccttctgaaagttgta

SEQ ID NO: 10982 - DNA, 25 bp, Artificial
  Probe
agaatgttcttgtcttgtcaaccaa

SEQ ID NO: 10983 - DNA, 25 bp, Artificial
  Probe
gatcattagtcaccaggtcttgttg

SEQ ID NO: 10984 - DNA, 25 bp, Artificial
  Probe
agagaatgttcttgtcttgtcaacc

SEQ ID NO: 10985 - DNA, 25 bp, Artificial
  Probe
gagaatgttcttgtcttgtcaacca

SEQ ID NO: 10986 - DNA, 25 bp, Artificial
  Probe
atcattagtcaccaggtcttgttga

SEQ ID NO: 10987 - DNA, 25 bp, Artificial
  Probe
attagtcaccaggtcttgttgagtt

SEQ ID NO: 10988 - DNA, 25 bp, Artificial
  Probe
ggatcattagtcaccaggtcttgtt

SEQ ID NO: 10989 - DNA, 25 bp, Artificial
  Probe
tcattagtcaccaggtcttgttgag

SEQ ID NO: 10990 - DNA, 25 bp, Artificial
  Probe
cattagtcaccaggtcttgttgagt

SEQ ID NO: 10991 - DNA, 25 bp, Artificial
  Probe
cataagatttgggctcagaaacaag

SEQ ID NO: 10992 - DNA, 25 bp, Artificial
  Probe
aagagaatgttcttgtcttgtcaac

SEQ ID NO: 10993 - DNA, 25 bp, Artificial
  Probe
cacataagatttgggctcagaaaca

SEQ ID NO: 10994 - DNA, 25 bp, Artificial
  Probe
gtctcagtgtcctggatcattagtc

SEQ ID NO: 10995 - DNA, 25 bp, Artificial
  Probe
acataagatttgggctcagaaacaa

SEQ ID NO: 10996 - DNA, 25 bp, Artificial
  Probe
cttccctaagaactaaagcaacctg

SEQ ID NO: 10997 - DNA, 25 bp, Artificial
  Probe
atgagaaagggacttagccacataa

SEQ ID NO: 10998 - DNA, 25 bp, Artificial
  Probe
ataagatttgggctcagaaacaagg

SEQ ID NO: 10999 - DNA, 25 bp, Artificial
  Probe
aaagagtttaacagcatcatggaga

SEQ ID NO: 11000 - DNA, 25 bp, Artificial
  Probe
caaagagtttaacagcatcatggag

SEQ ID NO: 11001 - DNA, 25 bp, Artificial
  Probe
tctcagtgtcctggatcattagtca

SEQ ID NO: 11002 - DNA, 25 bp, Artificial
  Probe
gaccaaagagtttaacagcatcatg

SEQ ID NO: 11003 - DNA, 25 bp, Artificial
  Probe
gatgagaaagggacttagccacata

SEQ ID NO: 11004 - DNA, 25 bp, Artificial
  Probe
aaagggacttagccacataagattt

SEQ ID NO: 11005 - DNA, 25 bp, Artificial
  Probe
ctcagtgtcctggatcattagtcac

SEQ ID NO: 11006 - DNA, 25 bp, Artificial
  Probe
gaaagggacttagccacataagatt

SEQ ID NO: 11007 - DNA, 25 bp, Artificial
  Probe
aagggacttagccacataagatttg

SEQ ID NO: 11008 - DNA, 25 bp, Artificial
  Probe
agaaagggacttagccacataagat

SEQ ID NO: 11009 - DNA, 25 bp, Artificial
  Probe
gttctatgccaacaccatctttgag

SEQ ID NO: 11010 - DNA, 25 bp, Artificial
  Probe
taagaactaaagcaacctggacgag

SEQ ID NO: 11011 - DNA, 25 bp, Artificial
  Probe
ctaagaactaaagcaacctggacga

SEQ ID NO: 11012 - DNA, 25 bp, Artificial
  Probe
ttccctaagaactaaagcaacctgg

SEQ ID NO: 11013 - DNA, 25 bp, Artificial
  Probe
taagatttgggctcagaaacaaggt

SEQ ID NO: 11014 - DNA, 25 bp, Artificial
  Probe
ttagtcaccaggtcttgttgagttt

SEQ ID NO: 11015 - DNA, 25 bp, Artificial
  Probe
gagaaagggacttagccacataaga

SEQ ID NO: 11016 - DNA, 25 bp, Artificial
  Probe
tgagaaagggacttagccacataag

SEQ ID NO: 11017 - DNA, 25 bp, Artificial
  Probe
tagtcaccaggtcttgttgagtttc

SEQ ID NO: 11018 - DNA, 25 bp, Artificial
  Probe
ggtctcagtgtcctggatcattagt

SEQ ID NO: 11019 - DNA, 25 bp, Artificial
  Probe
tggtctcagtgtcctggatcattag

SEQ ID NO: 11020 - DNA, 25 bp, Artificial
  Probe
ctggtctcagtgtcctggatcatta

SEQ ID NO: 11021 - DNA, 25 bp, Artificial
  Probe
ttacccatcacttacaggttctctc

SEQ ID NO: 11022 - DNA, 25 bp, Artificial
  Probe
cttacccatcacttacaggttctct

SEQ ID NO: 11023 - DNA, 25 bp, Artificial
  Probe
ccctaagaactaaagcaacctggac

SEQ ID NO: 11024 - DNA, 25 bp, Artificial
  Probe
accaggtcttgttgagtttcagaaa

SEQ ID NO: 11025 - DNA, 25 bp, Artificial
  Probe
gaatgttcttgtcttgtcaaccaag

SEQ ID NO: 11026 - DNA, 25 bp, Artificial
  Probe
tggatcattagtcaccaggtcttgt

SEQ ID NO: 11027 - DNA, 25 bp, Artificial
  Probe
tcacatacctatattctcaccacaa

SEQ ID NO: 11028 - DNA, 25 bp, Artificial
  Probe
ttcacatacctatattctcaccaca

SEQ ID NO: 11029 - DNA, 25 bp, Artificial
  Probe
ataccagcaacaggagtcttctatc

SEQ ID NO: 11030 - DNA, 25 bp, Artificial
  Probe
cataccagcaacaggagtcttctat

SEQ ID NO: 11031 - DNA, 25 bp, Artificial
  Probe
taccagcaacaggagtcttctatct

SEQ ID NO: 11032 - DNA, 25 bp, Artificial
  Probe
ctacaaggtttctgaaatgaaggtg

SEQ ID NO: 11033 - DNA, 25 bp, Artificial
  Probe
cacatacctatattctcaccacaaa

SEQ ID NO: 11034 - DNA, 25 bp, Artificial
  Probe
acatacctatattctcaccacaaag

SEQ ID NO: 11035 - DNA, 25 bp, Artificial
  Probe
gctacaaggtttctgaaatgaaggt

SEQ ID NO: 11036 - DNA, 25 bp, Artificial
  Probe
tacaaggtttctgaaatgaaggtgc

SEQ ID NO: 11037 - DNA, 25 bp, Artificial
  Probe
catacctatattctcaccacaaaga

SEQ ID NO: 11038 - DNA, 25 bp, Artificial
  Probe
gaagtcatggaaagggtacaactac

SEQ ID NO: 11039 - DNA, 25 bp, Artificial
  Probe
gtacaactacagctacaaggtttct

SEQ ID NO: 11040 - DNA, 25 bp, Artificial
  Probe
gaaagggtacaactacagctacaag

SEQ ID NO: 11041 - DNA, 25 bp, Artificial
  Probe
aagtcatggaaagggtacaactaca

SEQ ID NO: 11042 - DNA, 25 bp, Artificial
  Probe
aattggaagtcatggaaagggtaca

SEQ ID NO: 11043 - DNA, 25 bp, Artificial
  Probe
agctacaaggtttctgaaatgaagg

SEQ ID NO: 11044 - DNA, 25 bp, Artificial
  Probe
gcataccagcaacaggagtcttcta

SEQ ID NO: 11045 - DNA, 25 bp, Artificial
  Probe
tagcataccagcaacaggagtcttc

SEQ ID NO: 11046 - DNA, 25 bp, Artificial
  Probe
ggtacaactacagctacaaggtttc

SEQ ID NO: 11047 - DNA, 25 bp, Artificial
  Probe
agtcatggaaagggtacaactacag

SEQ ID NO: 11048 - DNA, 25 bp, Artificial
  Probe
ggaagtcatggaaagggtacaacta

SEQ ID NO: 11049 - DNA, 25 bp, Artificial
  Probe
attggaagtcatggaaagggtacaa

SEQ ID NO: 11050 - DNA, 25 bp, Artificial
  Probe
tacagctacaaggtttctgaaatga

SEQ ID NO: 11051 - DNA, 25 bp, Artificial
  Probe
ctacagctacaaggtttctgaaatg

SEQ ID NO: 11052 - DNA, 25 bp, Artificial
  Probe
actacagctacaaggtttctgaaat

SEQ ID NO: 11053 - DNA, 25 bp, Artificial
  Probe
cagctacaaggtttctgaaatgaag

SEQ ID NO: 11054 - DNA, 25 bp, Artificial
  Probe
aactacagctacaaggtttctgaaa

SEQ ID NO: 11055 - DNA, 25 bp, Artificial
  Probe
tacaactacagctacaaggtttctg

SEQ ID NO: 11056 - DNA, 25 bp, Artificial
  Probe
ctagcataccagcaacaggagtctt

SEQ ID NO: 11057 - DNA, 25 bp, Artificial
  Probe
acagctacaaggtttctgaaatgaa

SEQ ID NO: 11058 - DNA, 25 bp, Artificial
  Probe
caactacagctacaaggtttctgaa

SEQ ID NO: 11059 - DNA, 25 bp, Artificial
  Probe
atggaaagggtacaactacagctac

SEQ ID NO: 11060 - DNA, 25 bp, Artificial
  Probe
catggaaagggtacaactacagcta

SEQ ID NO: 11061 - DNA, 25 bp, Artificial
  Probe
aaagggtacaactacagctacaagg

SEQ ID NO: 11062 - DNA, 25 bp, Artificial
  Probe
ggaaagggtacaactacagctacaa

SEQ ID NO: 11063 - DNA, 25 bp, Artificial
  Probe
aactctagcataccagcaacaggag

SEQ ID NO: 11064 - DNA, 25 bp, Artificial
  Probe
tttctccaccaaagaccaagacaac

SEQ ID NO: 11065 - DNA, 25 bp, Artificial
  Probe
acaactacagctacaaggtttctga

SEQ ID NO: 11066 - DNA, 25 bp, Artificial
  Probe
gggtacaactacagctacaaggttt

SEQ ID NO: 11067 - DNA, 25 bp, Artificial
  Probe
ttggaagtcatggaaagggtacaac

SEQ ID NO: 11068 - DNA, 25 bp, Artificial
  Probe
gtcatggaaagggtacaactacagc

SEQ ID NO: 11069 - DNA, 25 bp, Artificial
  Probe
caaactctagcataccagcaacagg

SEQ ID NO: 11070 - DNA, 25 bp, Artificial
  Probe
ccaaactctagcataccagcaacag

SEQ ID NO: 11071 - DNA, 25 bp, Artificial
  Probe
aaactctagcataccagcaacagga

SEQ ID NO: 11072 - DNA, 25 bp, Artificial
  Probe
agagattctggagatccttcggaag

SEQ ID NO: 11073 - DNA, 25 bp, Artificial
  Probe
gagattctggagatccttcggaagc

SEQ ID NO: 11074 - DNA, 25 bp, Artificial
  Probe
cagagattctggagatccttcggaa

SEQ ID NO: 11075 - DNA, 25 bp, Artificial
  Probe
agggcagagattctggagatccttc

SEQ ID NO: 11076 - DNA, 25 bp, Artificial
  Probe
gtatgaggatctgaagaaccactac

SEQ ID NO: 11077 - DNA, 25 bp, Artificial
  Probe
tgtatgaggatctgaagaaccacta

SEQ ID NO: 11078 - DNA, 25 bp, Artificial
  Probe
tatgaggatctgaagaaccactacc

SEQ ID NO: 11079 - DNA, 25 bp, Artificial
  Probe
ttgtatgaggatctgaagaaccact

SEQ ID NO: 11080 - DNA, 25 bp, Artificial
  Probe
cttgtatgaggatctgaagaaccac

SEQ ID NO: 11081 - DNA, 25 bp, Artificial
  Probe
caacctgttctacatagtgagttcc

SEQ ID NO: 11082 - DNA, 25 bp, Artificial
  Probe
ccaacctgttctacatagtgagttc

SEQ ID NO: 11083 - DNA, 25 bp, Artificial
  Probe
aacctgttctacatagtgagttcca

SEQ ID NO: 11084 - DNA, 25 bp, Artificial
  Probe
atgctgatgtagaatggtattagaa

SEQ ID NO: 11085 - DNA, 25 bp, Artificial
  Probe
aatgctgatgtagaatggtattaga

SEQ ID NO: 11086 - DNA, 25 bp, Artificial
  Probe
acctgttctacatagtgagttccag

SEQ ID NO: 11087 - DNA, 25 bp, Artificial
  Probe
ctgcgtagagaaataaagtttggtc

SEQ ID NO: 11088 - DNA, 25 bp, Artificial
  Probe
gaaccactaccaggacattcttcag

SEQ ID NO: 11089 - DNA, 25 bp, Artificial
  Probe
aaggctgcgtagagaaataaagttt

SEQ ID NO: 11090 - DNA, 25 bp, Artificial
  Probe
atttgtgctttaccattgtgaagac

SEQ ID NO: 11091 - DNA, 25 bp, Artificial
  Probe
gcgtagagaaataaagtttggtcct

SEQ ID NO: 11092 - DNA, 25 bp, Artificial
  Probe
atgaggatctgaagaaccactacca

SEQ ID NO: 11093 - DNA, 25 bp, Artificial
  Probe
tatttgtgctttaccattgtgaaga

SEQ ID NO: 11094 - DNA, 25 bp, Artificial
  Probe
ccttgtatgaggatctgaagaacca

SEQ ID NO: 11095 - DNA, 25 bp, Artificial
  Probe
ttgccttgtatgaggatctgaagaa

SEQ ID NO: 11096 - DNA, 25 bp, Artificial
  Probe
tgcgtagagaaataaagtttggtcc

SEQ ID NO: 11097 - DNA, 25 bp, Artificial
  Probe
cgtagagaaataaagtttggtcctt

SEQ ID NO: 11098 - DNA, 25 bp, Artificial
  Probe
gccaacctgttctacatagtgagtt

SEQ ID NO: 11099 - DNA, 25 bp, Artificial
  Probe
aaccactaccaggacattcttcaga

SEQ ID NO: 11100 - DNA, 25 bp, Artificial
  Probe
tagaatctggacatacgggtaagac

SEQ ID NO: 11101 - DNA, 25 bp, Artificial
  Probe
caaggctgcgtagagaaataaagtt

SEQ ID NO: 11102 - DNA, 25 bp, Artificial
  Probe
aggctgcgtagagaaataaagtttg

SEQ ID NO: 11103 - DNA, 25 bp, Artificial
  Probe
ctgttctacatagtgagttccaggc

SEQ ID NO: 11104 - DNA, 25 bp, Artificial
  Probe
gctgcgtagagaaataaagtttggt

SEQ ID NO: 11105 - DNA, 25 bp, Artificial
  Probe
atatttgtgctttaccattgtgaag

SEQ ID NO: 11106 - DNA, 25 bp, Artificial
  Probe
tgccttgtatgaggatctgaagaac

SEQ ID NO: 11107 - DNA, 25 bp, Artificial
  Probe
gttgccttgtatgaggatctgaaga

SEQ ID NO: 11108 - DNA, 25 bp, Artificial
  Probe
accactaccaggacattcttcagag

SEQ ID NO: 11109 - DNA, 25 bp, Artificial
  Probe
tgttgccaataggtagccactctaa

SEQ ID NO: 11110 - DNA, 25 bp, Artificial
  Probe
aaggacacaaagaaggaagtctaat

SEQ ID NO: 11111 - DNA, 25 bp, Artificial
  Probe
ctgaagaaccactaccaggacattc

SEQ ID NO: 11112 - DNA, 25 bp, Artificial
  Probe
cttgactgttgcctggttatctttc

SEQ ID NO: 11113 - DNA, 25 bp, Artificial
  Probe
gaaggacacaaagaaggaagtctaa

SEQ ID NO: 11114 - DNA, 25 bp, Artificial
  Probe
cagatacaaatgctgctgaatgaaa

SEQ ID NO: 11115 - DNA, 25 bp, Artificial
  Probe
cttccttgactgttgcctggttatc

SEQ ID NO: 11116 - DNA, 25 bp, Artificial
  Probe
tgctgatgtagaatggtattagaaa

SEQ ID NO: 11117 - DNA, 25 bp, Artificial
  Probe
atctgaagaaccactaccaggacat

SEQ ID NO: 11118 - DNA, 25 bp, Artificial
  Probe
gaatctggacatacgggtaagacat

SEQ ID NO: 11119 - DNA, 25 bp, Artificial
  Probe
aggacacaaagaaggaagtctaata

SEQ ID NO: 11120 - DNA, 25 bp, Artificial
  Probe
agtaaagaatgtaacctacccaagg

SEQ ID NO: 11121 - DNA, 25 bp, Artificial
  Probe
tcccgaataactacaacctttctac

SEQ ID NO: 11122 - DNA, 25 bp, Artificial
  Probe
gtcccgaataactacaacctttcta

SEQ ID NO: 11123 - DNA, 25 bp, Artificial
  Probe
cccgaataactacaacctttctaca

SEQ ID NO: 11124 - DNA, 25 bp, Artificial
  Probe
ttcaagagaaccataaggaaagacc

SEQ ID NO: 11125 - DNA, 25 bp, Artificial
  Probe
ccgaataactacaacctttctacac

SEQ ID NO: 11126 - DNA, 25 bp, Artificial
  Probe
cttcaagagaaccataaggaaagac

SEQ ID NO: 11127 - DNA, 25 bp, Artificial
  Probe
cctggaacacctcttcttcttcaag

SEQ ID NO: 11128 - DNA, 25 bp, Artificial
  Probe
cgaataactacaacctttctacaca

SEQ ID NO: 11129 - DNA, 25 bp, Artificial
  Probe
cacctcttcttcttcaagctcattg

SEQ ID NO: 11130 - DNA, 25 bp, Artificial
  Probe
gcttcttcaagagaaccataaggaa

SEQ ID NO: 11131 - DNA, 25 bp, Artificial
  Probe
aaggcttcttcaagagaaccataag

SEQ ID NO: 11132 - DNA, 25 bp, Artificial
  Probe
acacctcttcttcttcaagctcatt

SEQ ID NO: 11133 - DNA, 25 bp, Artificial
  Probe
aacacctcttcttcttcaagctcat

SEQ ID NO: 11134 - DNA, 25 bp, Artificial
  Probe
ctacaacctttctacacatgagact

SEQ ID NO: 11135 - DNA, 25 bp, Artificial
  Probe
actacaacctttctacacatgagac

SEQ ID NO: 11136 - DNA, 25 bp, Artificial
  Probe
atgtgatgcttgtcccgaataacta

SEQ ID NO: 11137 - DNA, 25 bp, Artificial
  Probe
aaatgtgatgcttgtcccgaataac

SEQ ID NO: 11138 - DNA, 25 bp, Artificial
  Probe
acaacctttctacacatgagacttt

SEQ ID NO: 11139 - DNA, 25 bp, Artificial
  Probe
tacaacctttctacacatgagactt

SEQ ID NO: 11140 - DNA, 25 bp, Artificial
  Probe
aactacaacctttctacacatgaga

SEQ ID NO: 11141 - DNA, 25 bp, Artificial
  Probe
aaccataaggaaagacctcatctac

SEQ ID NO: 11142 - DNA, 25 bp, Artificial
  Probe
ccataaggaaagacctcatctacac

SEQ ID NO: 11143 - DNA, 25 bp, Artificial
  Probe
gaaccataaggaaagacctcatcta

SEQ ID NO: 11144 - DNA, 25 bp, Artificial
  Probe
ctggaacacctcttcttcttcaagc

SEQ ID NO: 11145 - DNA, 25 bp, Artificial
  Probe
accataaggaaagacctcatctaca

SEQ ID NO: 11146 - DNA, 25 bp, Artificial
  Probe
gagaaccataaggaaagacctcatc

SEQ ID NO: 11147 - DNA, 25 bp, Artificial
  Probe
cataaggaaagacctcatctacacg

SEQ ID NO: 11148 - DNA, 25 bp, Artificial
  Probe
caagagaaccataaggaaagacctc

SEQ ID NO: 11149 - DNA, 25 bp, Artificial
  Probe
agaaccataaggaaagacctcatct

SEQ ID NO: 11150 - DNA, 25 bp, Artificial
  Probe
agagaaccataaggaaagacctcat

SEQ ID NO: 11151 - DNA, 25 bp, Artificial
  Probe
tgtcccgaataactacaacctttct

SEQ ID NO: 11152 - DNA, 25 bp, Artificial
  Probe
gaacacctcttcttcttcaagctca

SEQ ID NO: 11153 - DNA, 25 bp, Artificial
  Probe
taactacaacctttctacacatgag

SEQ ID NO: 11154 - DNA, 25 bp, Artificial
  Probe
aagagaaccataaggaaagacctca

SEQ ID NO: 11155 - DNA, 25 bp, Artificial
  Probe
tcaagagaaccataaggaaagacct

SEQ ID NO: 11156 - DNA, 25 bp, Artificial
  Probe
acctcttcttcttcaagctcattgg

SEQ ID NO: 11157 - DNA, 25 bp, Artificial
  Probe
ggcttcttcaagagaaccataagga

SEQ ID NO: 11158 - DNA, 25 bp, Artificial
  Probe
aggcttcttcaagagaaccataagg

SEQ ID NO: 11159 - DNA, 25 bp, Artificial
  Probe
gatgaaggacatgcggatggataag

SEQ ID NO: 11160 - DNA, 25 bp, Artificial
  Probe
aatgtgatgcttgtcccgaataact

SEQ ID NO: 11161 - DNA, 25 bp, Artificial
  Probe
gtagccaagcctctgtacatataat

SEQ ID NO: 11162 - DNA, 25 bp, Artificial
  Probe
tgtgatgcttgtcccgaataactac

SEQ ID NO: 11163 - DNA, 25 bp, Artificial
  Probe
agccaagcctctgtacatataatta

SEQ ID NO: 11164 - DNA, 25 bp, Artificial
  Probe
tagccaagcctctgtacatataatt

SEQ ID NO: 11165 - DNA, 25 bp, Artificial
  Probe
agtagccaagcctctgtacatataa

SEQ ID NO: 11166 - DNA, 25 bp, Artificial
  Probe
ccaactccaagcactctatctataa

SEQ ID NO: 11167 - DNA, 25 bp, Artificial
  Probe
gccaactccaagcactctatctata

SEQ ID NO: 11168 - DNA, 25 bp, Artificial
  Probe
caagcactctatctataaagggacc

SEQ ID NO: 11169 - DNA, 25 bp, Artificial
  Probe
ccaagcactctatctataaagggac

SEQ ID NO: 11170 - DNA, 25 bp, Artificial
  Probe
ctccaagcactctatctataaaggg

SEQ ID NO: 11171 - DNA, 25 bp, Artificial
  Probe
actccaagcactctatctataaagg

SEQ ID NO: 11172 - DNA, 25 bp, Artificial
  Probe
ctacccgcacttatcctgagattat

SEQ ID NO: 11173 - DNA, 25 bp, Artificial
  Probe
caactccaagcactctatctataaa

SEQ ID NO: 11174 - DNA, 25 bp, Artificial
  Probe
aagcactctatctataaagggaccc

SEQ ID NO: 11175 - DNA, 25 bp, Artificial
  Probe
aaatcatagcagtccatttctaccc

SEQ ID NO: 11176 - DNA, 25 bp, Artificial
  Probe
ggtaaaggcatttgaagaataaagt

SEQ ID NO: 11177 - DNA, 25 bp, Artificial
  Probe
aactccaagcactctatctataaag

SEQ ID NO: 11178 - DNA, 25 bp, Artificial
  Probe
aggtaaaggcatttgaagaataaag

SEQ ID NO: 11179 - DNA, 25 bp, Artificial
  Probe
ctgtacctcctctgaactcatctcc

SEQ ID NO: 11180 - DNA, 25 bp, Artificial
  Probe
aatcatagcagtccatttctacccg

SEQ ID NO: 11181 - DNA, 25 bp, Artificial
  Probe
tccaagcactctatctataaaggga

SEQ ID NO: 11182 - DNA, 25 bp, Artificial
  Probe
tctacccgcacttatcctgagatta

SEQ ID NO: 11183 - DNA, 25 bp, Artificial
  Probe
aaggtaaaggcatttgaagaataaa

SEQ ID NO: 11184 - DNA, 25 bp, Artificial
  Probe
aaaggtaaaggcatttgaagaataa

SEQ ID NO: 11185 - DNA, 25 bp, Artificial
  Probe
cccttagattggaaatcatagcagt

SEQ ID NO: 11186 - DNA, 25 bp, Artificial
  Probe
cttagattggaaatcatagcagtcc

SEQ ID NO: 11187 - DNA, 25 bp, Artificial
  Probe
ccttagattggaaatcatagcagtc

SEQ ID NO: 11188 - DNA, 25 bp, Artificial
  Probe
aaggcatttgaagaataaagtcatt

SEQ ID NO: 11189 - DNA, 25 bp, Artificial
  Probe
aaaggcatttgaagaataaagtcat

SEQ ID NO: 11190 - DNA, 25 bp, Artificial
  Probe
ccgttaacagcactatgagtattgg

SEQ ID NO: 11191 - DNA, 25 bp, Artificial
  Probe
gtaaaggcatttgaagaataaagtc

SEQ ID NO: 11192 - DNA, 25 bp, Artificial
  Probe
catttctacccgcacttatcctgag

SEQ ID NO: 11193 - DNA, 25 bp, Artificial
  Probe
gcccttagattggaaatcatagcag

SEQ ID NO: 11194 - DNA, 25 bp, Artificial
  Probe
gaccttctctgcattaactgtcagt

SEQ ID NO: 11195 - DNA, 25 bp, Artificial
  Probe
agtgaccttctctgcattaactgtc

SEQ ID NO: 11196 - DNA, 25 bp, Artificial
  Probe
cgttaacagcactatgagtattggc

SEQ ID NO: 11197 - DNA, 25 bp, Artificial
  Probe
gttaacagcactatgagtattggcc

SEQ ID NO: 11198 - DNA, 25 bp, Artificial
  Probe
gctgtacctcctctgaactcatctc

SEQ ID NO: 11199 - DNA, 25 bp, Artificial
  Probe
taaaggcatttgaagaataaagtca

SEQ ID NO: 11200 - DNA, 25 bp, Artificial
  Probe
ttctacccgcacttatcctgagatt

SEQ ID NO: 11201 - DNA, 25 bp, Artificial
  Probe
tttctacccgcacttatcctgagat

SEQ ID NO: 11202 - DNA, 25 bp, Artificial
  Probe
atttctacccgcacttatcctgaga

SEQ ID NO: 11203 - DNA, 25 bp, Artificial
  Probe
aggcatttgaagaataaagtcattc

SEQ ID NO: 11204 - DNA, 25 bp, Artificial
  Probe
accttctctgcattaactgtcagtg

SEQ ID NO: 11205 - DNA, 25 bp, Artificial
  Probe
tacgaaaaggtaaaggcatttgaag

SEQ ID NO: 11206 - DNA, 25 bp, Artificial
  Probe
ctacgaaaaggtaaaggcatttgaa

SEQ ID NO: 11207 - DNA, 25 bp, Artificial
  Probe
cgaaaaggtaaaggcatttgaagaa

SEQ ID NO: 11208 - DNA, 25 bp, Artificial
  Probe
cagtccatttctacccgcacttatc

SEQ ID NO: 11209 - DNA, 25 bp, Artificial
  Probe
ctccagtgaccttctctgcattaac

SEQ ID NO: 11210 - DNA, 25 bp, Artificial
  Probe
tctccagtgaccttctctgcattaa

SEQ ID NO: 11211 - DNA, 25 bp, Artificial
  Probe
attgtagaatccacacaggagagaa

SEQ ID NO: 11212 - DNA, 25 bp, Artificial
  Probe
ttcattgtagaatccacacaggaga

SEQ ID NO: 11213 - DNA, 25 bp, Artificial
  Probe
gttcattgtagaatccacacaggag

SEQ ID NO: 11214 - DNA, 25 bp, Artificial
  Probe
ttcagtgtagagtctcaccttcaag

SEQ ID NO: 11215 - DNA, 25 bp, Artificial
  Probe
cttcagtgtagagtctcaccttcaa

SEQ ID NO: 11216 - DNA, 25 bp, Artificial
  Probe
ggagagaaaccctataaatgtgaga

SEQ ID NO: 11217 - DNA, 25 bp, Artificial
  Probe
ataaatgtgagaggtgtggtaaagc

SEQ ID NO: 11218 - DNA, 25 bp, Artificial
  Probe
cattgtagaatccacacaggagaga

SEQ ID NO: 11219 - DNA, 25 bp, Artificial
  Probe
tcattgtagaatccacacaggagag

SEQ ID NO: 11220 - DNA, 25 bp, Artificial
  Probe
gagagaaaccctataaatgtgagag

SEQ ID NO: 11221 - DNA, 25 bp, Artificial
  Probe
tataaatgtgagaggtgtggtaaag

SEQ ID NO: 11222 - DNA, 25 bp, Artificial
  Probe
ctataaatgtgagaggtgtggtaaa

SEQ ID NO: 11223 - DNA, 25 bp, Artificial
  Probe
acaggagagaaaccctataaatgtg

SEQ ID NO: 11224 - DNA, 25 bp, Artificial
  Probe
cacaggagagaaaccctataaatgt

SEQ ID NO: 11225 - DNA, 25 bp, Artificial
  Probe
acacaggagagaaaccctataaatg

SEQ ID NO: 11226 - DNA, 25 bp, Artificial
  Probe
cacacaggagagaaaccctataaat

SEQ ID NO: 11227 - DNA, 25 bp, Artificial
  Probe
cctataaatgtgagaggtgtggtaa

SEQ ID NO: 11228 - DNA, 25 bp, Artificial
  Probe
caggagagaaaccctataaatgtga

SEQ ID NO: 11229 - DNA, 25 bp, Artificial
  Probe
agagaaaccctataaatgtgagagg

SEQ ID NO: 11230 - DNA, 25 bp, Artificial
  Probe
aggagagaaaccctataaatgtgag

SEQ ID NO: 11231 - DNA, 25 bp, Artificial
  Probe
cgttcattgtagaatccacacagga

SEQ ID NO: 11232 - DNA, 25 bp, Artificial
  Probe
ttcagtcgagtctcaattctccaag

SEQ ID NO: 11233 - DNA, 25 bp, Artificial
  Probe
cttcagtcgagtctcaattctccaa

SEQ ID NO: 11234 - DNA, 25 bp, Artificial
  Probe
acacaggagagaaaccgtatcaatg

SEQ ID NO: 11235 - DNA, 25 bp, Artificial
  Probe
cacacaggagagaaaccgtatcaat

SEQ ID NO: 11236 - DNA, 25 bp, Artificial
  Probe
ccctataaatgtgagaggtgtggta

SEQ ID NO: 11237 - DNA, 25 bp, Artificial
  Probe
agaaaccctataaatgtgagaggtg

SEQ ID NO: 11238 - DNA, 25 bp, Artificial
  Probe
gaaaccctataaatgtgagaggtgt

SEQ ID NO: 11239 - DNA, 25 bp, Artificial
  Probe
gagaaaccctataaatgtgagaggt

SEQ ID NO: 11240 - DNA, 25 bp, Artificial
  Probe
aaaccctataaatgtgagaggtgtg

SEQ ID NO: 11241 - DNA, 25 bp, Artificial
  Probe
taaatgtgagaggtgtggtaaagcc

SEQ ID NO: 11242 - DNA, 25 bp, Artificial
  Probe
aggagagaaaccgtatcaatgtgac

SEQ ID NO: 11243 - DNA, 25 bp, Artificial
  Probe
caggagagaaaccgtatcaatgtga

SEQ ID NO: 11244 - DNA, 25 bp, Artificial
  Probe
agtctcaattctccaagtgcatcag

SEQ ID NO: 11245 - DNA, 25 bp, Artificial
  Probe
ttgtagaatccacacaggagagaaa

SEQ ID NO: 11246 - DNA, 25 bp, Artificial
  Probe
ccacacaggagagaaaccctataaa

SEQ ID NO: 11247 - DNA, 25 bp, Artificial
  Probe
tctcaattctccaagtgcatcagag

SEQ ID NO: 11248 - DNA, 25 bp, Artificial
  Probe
gtctcaattctccaagtgcatcaga

SEQ ID NO: 11249 - DNA, 25 bp, Artificial
  Probe
tgtagaatccacacaggagagaaac

SEQ ID NO: 11250 - DNA, 25 bp, Artificial
  Probe
acaggagagaaaccgtatcaatgtg

SEQ ID NO: 11251 - DNA, 25 bp, Artificial
  Probe
cacaggagagaaaccgtatcaatgt

SEQ ID NO: 11252 - DNA, 25 bp, Artificial
  Probe
gagtctcaattctccaagtgcatca

SEQ ID NO: 11253 - DNA, 25 bp, Artificial
  Probe
taaagccttcagtcgagtctcaatt

SEQ ID NO: 11254 - DNA, 25 bp, Artificial
  Probe
cagtcgagtctcaattctccaagtg

SEQ ID NO: 11255 - DNA, 25 bp, Artificial
  Probe
atccacacaggagagaaaccctata

SEQ ID NO: 11256 - DNA, 25 bp, Artificial
  Probe
attcttctcctactcttctctcctc

SEQ ID NO: 11257 - DNA, 25 bp, Artificial
  Probe
gattcttctcctactcttctctcct

SEQ ID NO: 11258 - DNA, 25 bp, Artificial
  Probe
tgattcttctcctactcttctctcc

SEQ ID NO: 11259 - DNA, 25 bp, Artificial
  Probe
ccatcttgattcttctcctactctt

SEQ ID NO: 11260 - DNA, 25 bp, Artificial
  Probe
ttgattcttctcctactcttctctc

SEQ ID NO: 11261 - DNA, 25 bp, Artificial
  Probe
cttgattcttctcctactcttctct

SEQ ID NO: 11262 - DNA, 25 bp, Artificial
  Probe
tcttgattcttctcctactcttctc

SEQ ID NO: 11263 - DNA, 25 bp, Artificial
  Probe
catcttgattcttctcctactcttc

SEQ ID NO: 11264 - DNA, 25 bp, Artificial
  Probe
atcttgattcttctcctactcttct

SEQ ID NO: 11265 - DNA, 25 bp, Artificial
  Probe
ttcttctcttctagtaacctgttga

SEQ ID NO: 11266 - DNA, 25 bp, Artificial
  Probe
tcttctcttctagtaacctgttgaa

SEQ ID NO: 11267 - DNA, 25 bp, Artificial
  Probe
ttcttctcctactcttctctcctcc

SEQ ID NO: 11268 - DNA, 25 bp, Artificial
  Probe
tgtgccagtcctcaccttaatataa

SEQ ID NO: 11269 - DNA, 25 bp, Artificial
  Probe
ttgtgccagtcctcaccttaatata

SEQ ID NO: 11270 - DNA, 25 bp, Artificial
  Probe
gccagtcctcaccttaatataaaca

SEQ ID NO: 11271 - DNA, 25 bp, Artificial
  Probe
tgccagtcctcaccttaatataaac

SEQ ID NO: 11272 - DNA, 25 bp, Artificial
  Probe
cccatcttgattcttctcctactct

SEQ ID NO: 11273 - DNA, 25 bp, Artificial
  Probe
cgtctatacaataaactcagagcca

SEQ ID NO: 11274 - DNA, 25 bp, Artificial
  Probe
aaactgcctacctagataagacaaa

SEQ ID NO: 11275 - DNA, 25 bp, Artificial
  Probe
aacaacaatctacagacatgcagtt

SEQ ID NO: 11276 - DNA, 25 bp, Artificial
  Probe
actgcctacctagataagacaaatt

SEQ ID NO: 11277 - DNA, 25 bp, Artificial
  Probe
aactgcctacctagataagacaaat

SEQ ID NO: 11278 - DNA, 25 bp, Artificial
  Probe
attgccaatccatctctgtgtattt

SEQ ID NO: 11279 - DNA, 25 bp, Artificial
  Probe
cttgtgccagtcctcaccttaatat

SEQ ID NO: 11280 - DNA, 25 bp, Artificial
  Probe
cttctctcctcccttcaactctatg

SEQ ID NO: 11281 - DNA, 25 bp, Artificial
  Probe
tcttctctcctcccttcaactctat

SEQ ID NO: 11282 - DNA, 25 bp, Artificial
  Probe
ctgcctacctagataagacaaattg

SEQ ID NO: 11283 - DNA, 25 bp, Artificial
  Probe
aaacgacaatccctaatcttgagat

SEQ ID NO: 11284 - DNA, 25 bp, Artificial
  Probe
ccagtcctcaccttaatataaacaa

SEQ ID NO: 11285 - DNA, 25 bp, Artificial
  Probe
taaactgcctacctagataagacaa

SEQ ID NO: 11286 - DNA, 25 bp, Artificial
  Probe
cccttcttgtctgtattcacatctt

SEQ ID NO: 11287 - DNA, 25 bp, Artificial
  Probe
ataaactgcctacctagataagaca

SEQ ID NO: 11288 - DNA, 25 bp, Artificial
  Probe
gtctatacaataaactcagagccaa

SEQ ID NO: 11289 - DNA, 25 bp, Artificial
  Probe
ctaatcttgagattgccaatccatc

SEQ ID NO: 11290 - DNA, 25 bp, Artificial
  Probe
ccttcttgtctgtattcacatcttt

SEQ ID NO: 11291 - DNA, 25 bp, Artificial
  Probe
gagaagttcttcagcaaatagacat

SEQ ID NO: 11292 - DNA, 25 bp, Artificial
  Probe
tgagaagttcttcagcaaatagaca

SEQ ID NO: 11293 - DNA, 25 bp, Artificial
  Probe
agaagttcttcagcaaatagacatg

SEQ ID NO: 11294 - DNA, 25 bp, Artificial
  Probe
ctcttctctcctcccttcaactcta

SEQ ID NO: 11295 - DNA, 25 bp, Artificial
  Probe
tttcttctcttctagtaacctgttg

SEQ ID NO: 11296 - DNA, 25 bp, Artificial
  Probe
ttgagaagttcttcagcaaatagac

SEQ ID NO: 11297 - DNA, 25 bp, Artificial
  Probe
gtgccagtcctcaccttaatataaa

SEQ ID NO: 11298 - DNA, 25 bp, Artificial
  Probe
cctaatcttgagattgccaatccat

SEQ ID NO: 11299 - DNA, 25 bp, Artificial
  Probe
ctcttctagtaacctgttgaaatca

SEQ ID NO: 11300 - DNA, 25 bp, Artificial
  Probe
aagttcttcagcaaatagacatgac

SEQ ID NO: 11301 - DNA, 25 bp, Artificial
  Probe
ctatggctaattgctattcactgga

SEQ ID NO: 11302 - DNA, 25 bp, Artificial
  Probe
gactatggctaattgctattcactg

SEQ ID NO: 11303 - DNA, 25 bp, Artificial
  Probe
actatggctaattgctattcactgg

SEQ ID NO: 11304 - DNA, 25 bp, Artificial
  Probe
tatggctaattgctattcactggaa

SEQ ID NO: 11305 - DNA, 25 bp, Artificial
  Probe
gctaattgctattcactggaaccta

SEQ ID NO: 11306 - DNA, 25 bp, Artificial
  Probe
ttctgactatggctaattgctattc

SEQ ID NO: 11307 - DNA, 25 bp, Artificial
  Probe
tgactatggctaattgctattcact

SEQ ID NO: 11308 - DNA, 25 bp, Artificial
  Probe
ctgactatggctaattgctattcac

SEQ ID NO: 11309 - DNA, 25 bp, Artificial
  Probe
tctgactatggctaattgctattca

SEQ ID NO: 11310 - DNA, 25 bp, Artificial
  Probe
ctaattgctattcactggaacctag

SEQ ID NO: 11311 - DNA, 25 bp, Artificial
  Probe
atggctaattgctattcactggaac

SEQ ID NO: 11312 - DNA, 25 bp, Artificial
  Probe
ttggatggatcaacacagattacat

SEQ ID NO: 11313 - DNA, 25 bp, Artificial
  Probe
aagaggaagatgagagagttcaagg

SEQ ID NO: 11314 - DNA, 25 bp, Artificial
  Probe
tggatggatcaacacagattacatg

SEQ ID NO: 11315 - DNA, 25 bp, Artificial
  Probe
gaagatgagagagttcaaggaggag

SEQ ID NO: 11316 - DNA, 25 bp, Artificial
  Probe
gaggaagatgagagagttcaaggag

SEQ ID NO: 11317 - DNA, 25 bp, Artificial
  Probe
ctactccaggaagaataacagctag

SEQ ID NO: 11318 - DNA, 25 bp, Artificial
  Probe
caggaagaataacagctaggagatg

SEQ ID NO: 11319 - DNA, 25 bp, Artificial
  Probe
aagatgagagagttcaaggaggaga

SEQ ID NO: 11320 - DNA, 25 bp, Artificial
  Probe
agaggaagatgagagagttcaagga

SEQ ID NO: 11321 - DNA, 25 bp, Artificial
  Probe
tactccaggaagaataacagctagg

SEQ ID NO: 11322 - DNA, 25 bp, Artificial
  Probe
ccaggaagaataacagctaggagat

SEQ ID NO: 11323 - DNA, 25 bp, Artificial
  Probe
gatggatcaacacagattacatgcc

SEQ ID NO: 11324 - DNA, 25 bp, Artificial
  Probe
ggatggatcaacacagattacatgc

SEQ ID NO: 11325 - DNA, 25 bp, Artificial
  Probe
tgtttctgactatggctaattgcta

SEQ ID NO: 11326 - DNA, 25 bp, Artificial
  Probe
gaagacaaagggatgggaatgatag

SEQ ID NO: 11327 - DNA, 25 bp, Artificial
  Probe
gagaaagaggaagatgagagagttc

SEQ ID NO: 11328 - DNA, 25 bp, Artificial
  Probe
ggaagaataacagctaggagatgtc

SEQ ID NO: 11329 - DNA, 25 bp, Artificial
  Probe
atggagaaagaggaagatgagagag

SEQ ID NO: 11330 - DNA, 25 bp, Artificial
  Probe
ggactcagacaagaccacgtatata

SEQ ID NO: 11331 - DNA, 25 bp, Artificial
  Probe
gatttctaaagagacttctgggcta

SEQ ID NO: 11332 - DNA, 25 bp, Artificial
  Probe
gggaatggagatttctaaagagact

SEQ ID NO: 11333 - DNA, 25 bp, Artificial
  Probe
ggagatttctaaagagacttctggg

SEQ ID NO: 11334 - DNA, 25 bp, Artificial
  Probe
tggagatttctaaagagacttctgg

SEQ ID NO: 11335 - DNA, 25 bp, Artificial
  Probe
aggaagaataacagctaggagatgt

SEQ ID NO: 11336 - DNA, 25 bp, Artificial
  Probe
aagacaaagggatgggaatgataga

SEQ ID NO: 11337 - DNA, 25 bp, Artificial
  Probe
ggctaattgctattcactggaacct

SEQ ID NO: 11338 - DNA, 25 bp, Artificial
  Probe
gaagaataacagctaggagatgtcg

SEQ ID NO: 11339 - DNA, 25 bp, Artificial
  Probe
ggagaaagaggaagatgagagagtt

SEQ ID NO: 11340 - DNA, 25 bp, Artificial
  Probe
aaagagacttctgggctattaaact

SEQ ID NO: 11341 - DNA, 25 bp, Artificial
  Probe
tttctaaagagacttctgggctatt

SEQ ID NO: 11342 - DNA, 25 bp, Artificial
  Probe
gtttctgactatggctaattgctat

SEQ ID NO: 11343 - DNA, 25 bp, Artificial
  Probe
agatgagagagttcaaggaggagac

SEQ ID NO: 11344 - DNA, 25 bp, Artificial
  Probe
atttctaaagagacttctgggctat

SEQ ID NO: 11345 - DNA, 25 bp, Artificial
  Probe
ctgtttctgactatggctaattgct

SEQ ID NO: 11346 - DNA, 25 bp, Artificial
  Probe
tgttaatgtcttcgttaggttctga

SEQ ID NO: 11347 - DNA, 25 bp, Artificial
  Probe
ttgttaatgtcttcgttaggttctg

SEQ ID NO: 11348 - DNA, 25 bp, Artificial
  Probe
gttaatgtcttcgttaggttctgaa

SEQ ID NO: 11349 - DNA, 25 bp, Artificial
  Probe
catcgtacatcagagaactcataca

SEQ ID NO: 11350 - DNA, 25 bp, Artificial
  Probe
atcgtacatcagagaactcatacag

SEQ ID NO: 11351 - DNA, 25 bp, Artificial
  Probe
tcatcgtacatcagagaactcatac

SEQ ID NO: 11352 - DNA, 25 bp, Artificial
  Probe
atatgaagactcactcggaagaaca

SEQ ID NO: 11353 - DNA, 25 bp, Artificial
  Probe
tatgaagactcactcggaagaacaa

SEQ ID NO: 11354 - DNA, 25 bp, Artificial
  Probe
tcgtacatcagagaactcatacagg

SEQ ID NO: 11355 - DNA, 25 bp, Artificial
  Probe
ctcatcgtacatcagagaactcata

SEQ ID NO: 11356 - DNA, 25 bp, Artificial
  Probe
aacagaatcttaccatattagtgct

SEQ ID NO: 11357 - DNA, 25 bp, Artificial
  Probe
accagagagttcatacaggagagaa

SEQ ID NO: 11358 - DNA, 25 bp, Artificial
  Probe
atgaagactcactcggaagaacaat

SEQ ID NO: 11359 - DNA, 25 bp, Artificial
  Probe
gaacagaatcttaccatattagtgc

SEQ ID NO: 11360 - DNA, 25 bp, Artificial
  Probe
aagactcactcggaagaacaatctc

SEQ ID NO: 11361 - DNA, 25 bp, Artificial
  Probe
gaagactcactcggaagaacaatct

SEQ ID NO: 11362 - DNA, 25 bp, Artificial
  Probe
acagaatcttaccatattagtgctg

SEQ ID NO: 11363 - DNA, 25 bp, Artificial
  Probe
tcttaccatattagtgctggctaac

SEQ ID NO: 11364 - DNA, 25 bp, Artificial
  Probe
gaatcttaccatattagtgctggct

SEQ ID NO: 11365 - DNA, 25 bp, Artificial
  Probe
agaatcttaccatattagtgctggc

SEQ ID NO: 11366 - DNA, 25 bp, Artificial
  Probe
acaacttgttattcatcagagatcc

SEQ ID NO: 11367 - DNA, 25 bp, Artificial
  Probe
atcttaccatattagtgctggctaa

SEQ ID NO: 11368 - DNA, 25 bp, Artificial
  Probe
aatcttaccatattagtgctggcta

SEQ ID NO: 11369 - DNA, 25 bp, Artificial
  Probe
caccagagagttcatacaggagaga

SEQ ID NO: 11370 - DNA, 25 bp, Artificial
  Probe
ctatgagtgtgttgaatgtggcaag

SEQ ID NO: 11371 - DNA, 25 bp, Artificial
  Probe
atattagtgctggctaaccaagaac

SEQ ID NO: 11372 - DNA, 25 bp, Artificial
  Probe
catattagtgctggctaaccaagaa

SEQ ID NO: 11373 - DNA, 25 bp, Artificial
  Probe
cagaatcttaccatattagtgctgg

SEQ ID NO: 11374 - DNA, 25 bp, Artificial
  Probe
cctcatcgtacatcagagaactcat

SEQ ID NO: 11375 - DNA, 25 bp, Artificial
  Probe
gtgcttagccaccacaattagtatt

SEQ ID NO: 11376 - DNA, 25 bp, Artificial
  Probe
cttaccatattagtgctggctaacc

SEQ ID NO: 11377 - DNA, 25 bp, Artificial
  Probe
aaaccctataaaccctatgagtgtg

SEQ ID NO: 11378 - DNA, 25 bp, Artificial
  Probe
ggagagaaaccctataaaccctatg

SEQ ID NO: 11379 - DNA, 25 bp, Artificial
  Probe
tggagagaaaccctataaaccctat

SEQ ID NO: 11380 - DNA, 25 bp, Artificial
  Probe
aacatcataactacgaaactccaga

SEQ ID NO: 11381 - DNA, 25 bp, Artificial
  Probe
gaaaccctataaaccctatgagtgt

SEQ ID NO: 11382 - DNA, 25 bp, Artificial
  Probe
aacaccagagagttcatacaggaga

SEQ ID NO: 11383 - DNA, 25 bp, Artificial
  Probe
caacaccagagagttcatacaggag

SEQ ID NO: 11384 - DNA, 25 bp, Artificial
  Probe
gaacatcataactacgaaactccag

SEQ ID NO: 11385 - DNA, 25 bp, Artificial
  Probe
agaaaccctataaaccctatgagtg

SEQ ID NO: 11386 - DNA, 25 bp, Artificial
  Probe
gcttcctttgttaatgtcttcgtta

SEQ ID NO: 11387 - DNA, 25 bp, Artificial
  Probe
acatcataactacgaaactccagat

SEQ ID NO: 11388 - DNA, 25 bp, Artificial
  Probe
gagaaaccctataaaccctatgagt

SEQ ID NO: 11389 - DNA, 25 bp, Artificial
  Probe
ctggagagaaaccctataaacccta

SEQ ID NO: 11390 - DNA, 25 bp, Artificial
  Probe
gctcacggaacatcataactacgaa

SEQ ID NO: 11391 - DNA, 25 bp, Artificial
  Probe
accatcagtccttcctcataataac

SEQ ID NO: 11392 - DNA, 25 bp, Artificial
  Probe
ccatcagtccttcctcataataacc

SEQ ID NO: 11393 - DNA, 25 bp, Artificial
  Probe
gataccatcagtccttcctcataat

SEQ ID NO: 11394 - DNA, 25 bp, Artificial
  Probe
actagcatagatgaaggtagagagg

SEQ ID NO: 11395 - DNA, 25 bp, Artificial
  Probe
ggactagcatagatgaaggtagaga

SEQ ID NO: 11396 - DNA, 25 bp, Artificial
  Probe
gactagcatagatgaaggtagagag

SEQ ID NO: 11397 - DNA, 25 bp, Artificial
  Probe
taccatcagtccttcctcataataa

SEQ ID NO: 11398 - DNA, 25 bp, Artificial
  Probe
ataccatcagtccttcctcataata

SEQ ID NO: 11399 - DNA, 25 bp, Artificial
  Probe
ggttaatacaggataccatcagtcc

SEQ ID NO: 11400 - DNA, 25 bp, Artificial
  Probe
ggataccatcagtccttcctcataa

SEQ ID NO: 11401 - DNA, 25 bp, Artificial
  Probe
aggttaatacaggataccatcagtc

SEQ ID NO: 11402 - DNA, 25 bp, Artificial
  Probe
acaaggttaatacaggataccatca

SEQ ID NO: 11403 - DNA, 25 bp, Artificial
  Probe
atagatgaaggtagagagggagaag

SEQ ID NO: 11404 - DNA, 25 bp, Artificial
  Probe
atcagtccttcctcataataaccct

SEQ ID NO: 11405 - DNA, 25 bp, Artificial
  Probe
catcagtccttcctcataataaccc

SEQ ID NO: 11406 - DNA, 25 bp, Artificial
  Probe
aaggttaatacaggataccatcagt

SEQ ID NO: 11407 - DNA, 25 bp, Artificial
  Probe
catagatgaaggtagagagggagaa

SEQ ID NO: 11408 - DNA, 25 bp, Artificial
  Probe
caaggttaatacaggataccatcag

SEQ ID NO: 11409 - DNA, 25 bp, Artificial
  Probe
aaagggactagcatagatgaaggta

SEQ ID NO: 11410 - DNA, 25 bp, Artificial
  Probe
tagcatagatgaaggtagagaggga

SEQ ID NO: 11411 - DNA, 25 bp, Artificial
  Probe
aagggactagcatagatgaaggtag

SEQ ID NO: 11412 - DNA, 25 bp, Artificial
  Probe
cctgaggaatgtccagtagaatgag

SEQ ID NO: 11413 - DNA, 25 bp, Artificial
  Probe
ctagcatagatgaaggtagagaggg

SEQ ID NO: 11414 - DNA, 25 bp, Artificial
  Probe
gggactagcatagatgaaggtagag

SEQ ID NO: 11415 - DNA, 25 bp, Artificial
  Probe
atcaaagggactagcatagatgaag

SEQ ID NO: 11416 - DNA, 25 bp, Artificial
  Probe
agggactagcatagatgaaggtaga

SEQ ID NO: 11417 - DNA, 25 bp, Artificial
  Probe
caaagggactagcatagatgaaggt

SEQ ID NO: 11418 - DNA, 25 bp, Artificial
  Probe
tagatgaaggtagagagggagaagc

SEQ ID NO: 11419 - DNA, 25 bp, Artificial
  Probe
tcaaagggactagcatagatgaagg

SEQ ID NO: 11420 - DNA, 25 bp, Artificial
  Probe
tcagtccttcctcataataaccctg

SEQ ID NO: 11421 - DNA, 25 bp, Artificial
  Probe
gcatagatgaaggtagagagggaga

SEQ ID NO: 11422 - DNA, 25 bp, Artificial
  Probe
agcatagatgaaggtagagagggag

SEQ ID NO: 11423 - DNA, 25 bp, Artificial
  Probe
aagtacactggaatttatcgagaga

SEQ ID NO: 11424 - DNA, 25 bp, Artificial
  Probe
gggtctaaagtacactggaatttat

SEQ ID NO: 11425 - DNA, 25 bp, Artificial
  Probe
tcctgaggaatgtccagtagaatga

SEQ ID NO: 11426 - DNA, 25 bp, Artificial
  Probe
aaagtacactggaatttatcgagag

SEQ ID NO: 11427 - DNA, 25 bp, Artificial
  Probe
cagtccttcctcataataaccctgg

SEQ ID NO: 11428 - DNA, 25 bp, Artificial
  Probe
gtctaaagtacactggaatttatcg

SEQ ID NO: 11429 - DNA, 25 bp, Artificial
  Probe
tttctgcttctttgtgaatgccaac

SEQ ID NO: 11430 - DNA, 25 bp, Artificial
  Probe
agtccttcctcataataaccctgga

SEQ ID NO: 11431 - DNA, 25 bp, Artificial
  Probe
ggtctaaagtacactggaatttatc

SEQ ID NO: 11432 - DNA, 25 bp, Artificial
  Probe
tcacatggtccagatatcaataaat

SEQ ID NO: 11433 - DNA, 25 bp, Artificial
  Probe
taaagtacactggaatttatcgaga

SEQ ID NO: 11434 - DNA, 25 bp, Artificial
  Probe
tctaaagtacactggaatttatcga

SEQ ID NO: 11435 - DNA, 25 bp, Artificial
  Probe
ctaaagtacactggaatttatcgag

SEQ ID NO: 11436 - DNA, 25 bp, Artificial
  Probe
tcttgtcacctggctactactatta

SEQ ID NO: 11437 - DNA, 25 bp, Artificial
  Probe
cttgtcacctggctactactattaa

SEQ ID NO: 11438 - DNA, 25 bp, Artificial
  Probe
gtcttgtcacctggctactactatt

SEQ ID NO: 11439 - DNA, 25 bp, Artificial
  Probe
ttaatctatggaggacagtacaggc

SEQ ID NO: 11440 - DNA, 25 bp, Artificial
  Probe
attaatctatggaggacagtacagg

SEQ ID NO: 11441 - DNA, 25 bp, Artificial
  Probe
tgtcttgtcacctggctactactat

SEQ ID NO: 11442 - DNA, 25 bp, Artificial
  Probe
taatctatggaggacagtacaggct

SEQ ID NO: 11443 - DNA, 25 bp, Artificial
  Probe
tgtcacctggctactactattaaag

SEQ ID NO: 11444 - DNA, 25 bp, Artificial
  Probe
ttgtcacctggctactactattaaa

SEQ ID NO: 11445 - DNA, 25 bp, Artificial
  Probe
ctgtcttgtcacctggctactacta

SEQ ID NO: 11446 - DNA, 25 bp, Artificial
  Probe
gtcacctggctactactattaaagt

SEQ ID NO: 11447 - DNA, 25 bp, Artificial
  Probe
ctattaaagtgccatttcttgtctg

SEQ ID NO: 11448 - DNA, 25 bp, Artificial
  Probe
actattaaagtgccatttcttgtct

SEQ ID NO: 11449 - DNA, 25 bp, Artificial
  Probe
tcacctggctactactattaaagtg

SEQ ID NO: 11450 - DNA, 25 bp, Artificial
  Probe
cacctggctactactattaaagtgc

SEQ ID NO: 11451 - DNA, 25 bp, Artificial
  Probe
gctactactattaaagtgccatttc

SEQ ID NO: 11452 - DNA, 25 bp, Artificial
  Probe
aatctatggaggacagtacaggctc

SEQ ID NO: 11453 - DNA, 25 bp, Artificial
  Probe
agaggcagatgcagtttattgtaat

SEQ ID NO: 11454 - DNA, 25 bp, Artificial
  Probe
gaggcagatgcagtttattgtaata

SEQ ID NO: 11455 - DNA, 25 bp, Artificial
  Probe
gagaggcagatgcagtttattgtaa

SEQ ID NO: 11456 - DNA, 25 bp, Artificial
  Probe
tactattaaagtgccatttcttgtc

SEQ ID NO: 11457 - DNA, 25 bp, Artificial
  Probe
ctactattaaagtgccatttcttgt

SEQ ID NO: 11458 - DNA, 25 bp, Artificial
  Probe
actactattaaagtgccatttcttg

SEQ ID NO: 11459 - DNA, 25 bp, Artificial
  Probe
aggcagatgcagtttattgtaatat

SEQ ID NO: 11460 - DNA, 25 bp, Artificial
  Probe
atctatggaggacagtacaggctct

SEQ ID NO: 11461 - DNA, 25 bp, Artificial
  Probe
cactgtcttgtcacctggctactac

SEQ ID NO: 11462 - DNA, 25 bp, Artificial
  Probe
actgtcttgtcacctggctactact

SEQ ID NO: 11463 - DNA, 25 bp, Artificial
  Probe
tcactgtcttgtcacctggctacta

SEQ ID NO: 11464 - DNA, 25 bp, Artificial
  Probe
ggagaggcagatgcagtttattgta

SEQ ID NO: 11465 - DNA, 25 bp, Artificial
  Probe
ctactactattaaagtgccatttct

SEQ ID NO: 11466 - DNA, 25 bp, Artificial
  Probe
tatggaggacagtacaggctctctc

SEQ ID NO: 11467 - DNA, 25 bp, Artificial
  Probe
ctatggaggacagtacaggctctct

SEQ ID NO: 11468 - DNA, 25 bp, Artificial
  Probe
tctatggaggacagtacaggctctc

SEQ ID NO: 11469 - DNA, 25 bp, Artificial
  Probe
tactactattaaagtgccatttctt

SEQ ID NO: 11470 - DNA, 25 bp, Artificial
  Probe
gattaatctatggaggacagtacag

SEQ ID NO: 11471 - DNA, 25 bp, Artificial
  Probe
ggctactactattaaagtgccattt

SEQ ID NO: 11472 - DNA, 25 bp, Artificial
  Probe
atcctgggccttgtttcatactaga

SEQ ID NO: 11473 - DNA, 25 bp, Artificial
  Probe
catcctgggccttgtttcatactag

SEQ ID NO: 11474 - DNA, 25 bp, Artificial
  Probe
acctggctactactattaaagtgcc

SEQ ID NO: 11475 - DNA, 25 bp, Artificial
  Probe
cagtaaggaaatggcaacatgtgac

SEQ ID NO: 11476 - DNA, 25 bp, Artificial
  Probe
tcctgggccttgtttcatactagag

SEQ ID NO: 11477 - DNA, 25 bp, Artificial
  Probe
cacctccgaaggactttccagtaag

SEQ ID NO: 11478 - DNA, 25 bp, Artificial
  Probe
agtaaggaaatggcaacatgtgaca

SEQ ID NO: 11479 - DNA, 25 bp, Artificial
  Probe
tttcatactagaggccctggctttc

SEQ ID NO: 11480 - DNA, 25 bp, Artificial
  Probe
gggagaggcagatgcagtttattgt

SEQ ID NO: 11481 - DNA, 25 bp, Artificial
  Probe
taacttggaatcaaccttcagaact

SEQ ID NO: 11482 - DNA, 25 bp, Artificial
  Probe
ttaacttggaatcaaccttcagaac

SEQ ID NO: 11483 - DNA, 25 bp, Artificial
  Probe
cttaacttggaatcaaccttcagaa

SEQ ID NO: 11484 - DNA, 25 bp, Artificial
  Probe
aacttggaatcaaccttcagaactg

SEQ ID NO: 11485 - DNA, 25 bp, Artificial
  Probe
gaagacctgttcagccttattgaga

SEQ ID NO: 11486 - DNA, 25 bp, Artificial
  Probe
aagacctgttcagccttattgagac

SEQ ID NO: 11487 - DNA, 25 bp, Artificial
  Probe
acttggaatcaaccttcagaactga

SEQ ID NO: 11488 - DNA, 25 bp, Artificial
  Probe
aactgatgtggtctgtctatttaac

SEQ ID NO: 11489 - DNA, 25 bp, Artificial
  Probe
agaactgatgtggtctgtctattta

SEQ ID NO: 11490 - DNA, 25 bp, Artificial
  Probe
gaactgatgtggtctgtctatttaa

SEQ ID NO: 11491 - DNA, 25 bp, Artificial
  Probe
ccattgatttcatctagtttgtacg

SEQ ID NO: 11492 - DNA, 25 bp, Artificial
  Probe
cttggaatcaaccttcagaactgat

SEQ ID NO: 11493 - DNA, 25 bp, Artificial
  Probe
agcaatgttctcagtacaggtgttc

SEQ ID NO: 11494 - DNA, 25 bp, Artificial
  Probe
cattaccaagtctgatgcctttgtc

SEQ ID NO: 11495 - DNA, 25 bp, Artificial
  Probe
ttggaatcaaccttcagaactgatg

SEQ ID NO: 11496 - DNA, 25 bp, Artificial
  Probe
actgatgtggtctgtctatttaacc

SEQ ID NO: 11497 - DNA, 25 bp, Artificial
  Probe
cacattaccaagtctgatgcctttg

SEQ ID NO: 11498 - DNA, 25 bp, Artificial
  Probe
atgggatcatatctggaatcgcaaa

SEQ ID NO: 11499 - DNA, 25 bp, Artificial
  Probe
cagcaatgttctcagtacaggtgtt

SEQ ID NO: 11500 - DNA, 25 bp, Artificial
  Probe
attaccaagtctgatgcctttgtca

SEQ ID NO: 11501 - DNA, 25 bp, Artificial
  Probe
gaatcaaccttcagaactgatgtgg

SEQ ID NO: 11502 - DNA, 25 bp, Artificial
  Probe
ggaatcaaccttcagaactgatgtg

SEQ ID NO: 11503 - DNA, 25 bp, Artificial
  Probe
ccttattgagacccatgaagcaaag

SEQ ID NO: 11504 - DNA, 25 bp, Artificial
  Probe
tggaatcaaccttcagaactgatgt

SEQ ID NO: 11505 - DNA, 25 bp, Artificial
  Probe
caatgttctcagtacaggtgttccg

SEQ ID NO: 11506 - DNA, 25 bp, Artificial
  Probe
gtcagcaatgttctcagtacaggtg

SEQ ID NO: 11507 - DNA, 25 bp, Artificial
  Probe
gggatcatatctggaatcgcaaact

SEQ ID NO: 11508 - DNA, 25 bp, Artificial
  Probe
aatcaaccttcagaactgatgtggt

SEQ ID NO: 11509 - DNA, 25 bp, Artificial
  Probe
acattaccaagtctgatgcctttgt

SEQ ID NO: 11510 - DNA, 25 bp, Artificial
  Probe
aagatttcccttccaggacaaatga

SEQ ID NO: 11511 - DNA, 25 bp, Artificial
  Probe
aatgttctcagtacaggtgttccga

SEQ ID NO: 11512 - DNA, 25 bp, Artificial
  Probe
cttattgagacccatgaagcaaagc

SEQ ID NO: 11513 - DNA, 25 bp, Artificial
  Probe
agacctgttcagccttattgagacc

SEQ ID NO: 11514 - DNA, 25 bp, Artificial
  Probe
ccacattaccaagtctgatgccttt

SEQ ID NO: 11515 - DNA, 25 bp, Artificial
  Probe
tgggatcatatctggaatcgcaaac

SEQ ID NO: 11516 - DNA, 25 bp, Artificial
  Probe
catgggatcatatctggaatcgcaa

SEQ ID NO: 11517 - DNA, 25 bp, Artificial
  Probe
gcaatgttctcagtacaggtgttcc

SEQ ID NO: 11518 - DNA, 25 bp, Artificial
  Probe
tcagcaatgttctcagtacaggtgt

SEQ ID NO: 11519 - DNA, 25 bp, Artificial
  Probe
tgtcagcaatgttctcagtacaggt

SEQ ID NO: 11520 - DNA, 25 bp, Artificial
  Probe
tcagaactgatgtggtctgtctatt

SEQ ID NO: 11521 - DNA, 25 bp, Artificial
  Probe
ttcagaactgatgtggtctgtctat

SEQ ID NO: 11522 - DNA, 25 bp, Artificial
  Probe
atcaaccttcagaactgatgtggtc

SEQ ID NO: 11523 - DNA, 25 bp, Artificial
  Probe
tatggttatttgcaccgaataccta

SEQ ID NO: 11524 - DNA, 25 bp, Artificial
  Probe
cattgatttcatctagtttgtacgt

SEQ ID NO: 11525 - DNA, 25 bp, Artificial
  Probe
gatttcccttccaggacaaatgact

SEQ ID NO: 11526 - DNA, 25 bp, Artificial
  Probe
aaagacaaatgaatgggacaagaca

SEQ ID NO: 11527 - DNA, 25 bp, Artificial
  Probe
cagattcacctacactgtccttgtc

SEQ ID NO: 11528 - DNA, 25 bp, Artificial
  Probe
cttctcagaacatcacctaccactg

SEQ ID NO: 11529 - DNA, 25 bp, Artificial
  Probe
caacaagcatgtctggttaggagag

SEQ ID NO: 11530 - DNA, 25 bp, Artificial
  Probe
aacaagcatgtctggttaggagaga

SEQ ID NO: 11531 - DNA, 25 bp, Artificial
  Probe
gcttctcagaacatcacctaccact

SEQ ID NO: 11532 - DNA, 25 bp, Artificial
  Probe
aaaagacaaatgaatgggacaagac

SEQ ID NO: 11533 - DNA, 25 bp, Artificial
  Probe
agattcacctacactgtccttgtcg

SEQ ID NO: 11534 - DNA, 25 bp, Artificial
  Probe
tgaatacaaaacgaataagccatct

SEQ ID NO: 11535 - DNA, 25 bp, Artificial
  Probe
tgcttctcagaacatcacctaccac

SEQ ID NO: 11536 - DNA, 25 bp, Artificial
  Probe
ccctgtctgtttcaaataagtgaac

SEQ ID NO: 11537 - DNA, 25 bp, Artificial
  Probe
attcacctacactgtccttgtcgat

SEQ ID NO: 11538 - DNA, 25 bp, Artificial
  Probe
cctgtctgtttcaaataagtgaact

SEQ ID NO: 11539 - DNA, 25 bp, Artificial
  Probe
gaatacaaaacgaataagccatctc

SEQ ID NO: 11540 - DNA, 25 bp, Artificial
  Probe
tgtttcaaataagtgaactcaacct

SEQ ID NO: 11541 - DNA, 25 bp, Artificial
  Probe
ctgtttcaaataagtgaactcaacc

SEQ ID NO: 11542 - DNA, 25 bp, Artificial
  Probe
tgtctgtttcaaataagtgaactca

SEQ ID NO: 11543 - DNA, 25 bp, Artificial
  Probe
agcagattcacctacactgtccttg

SEQ ID NO: 11544 - DNA, 25 bp, Artificial
  Probe
cagcagattcacctacactgtcctt

SEQ ID NO: 11545 - DNA, 25 bp, Artificial
  Probe
tactaaccaagaattccgtgtggag

SEQ ID NO: 11546 - DNA, 25 bp, Artificial
  Probe
cattgaatacaaaacgaataagcca

SEQ ID NO: 11547 - DNA, 25 bp, Artificial
  Probe
ttgaatacaaaacgaataagccatc

SEQ ID NO: 11548 - DNA, 25 bp, Artificial
  Probe
tcattgaatacaaaacgaataagcc

SEQ ID NO: 11549 - DNA, 25 bp, Artificial
  Probe
ctgtctgtttcaaataagtgaactc

SEQ ID NO: 11550 - DNA, 25 bp, Artificial
  Probe
ttctcagaacatcacctaccactgc

SEQ ID NO: 11551 - DNA, 25 bp, Artificial
  Probe
gccctgtctgtttcaaataagtgaa

SEQ ID NO: 11552 - DNA, 25 bp, Artificial
  Probe
gtactaaccaagaattccgtgtgga

SEQ ID NO: 11553 - DNA, 25 bp, Artificial
  Probe
gcagattcacctacactgtccttgt

SEQ ID NO: 11554 - DNA, 25 bp, Artificial
  Probe
gtgcttctcagaacatcacctacca

SEQ ID NO: 11555 - DNA, 25 bp, Artificial
  Probe
tctgtttcaaataagtgaactcaac

SEQ ID NO: 11556 - DNA, 25 bp, Artificial
  Probe
gtctgtttcaaataagtgaactcaa

SEQ ID NO: 11557 - DNA, 25 bp, Artificial
  Probe
attgaatacaaaacgaataagccat

SEQ ID NO: 11558 - DNA, 25 bp, Artificial
  Probe
gattcacctacactgtccttgtcga

SEQ ID NO: 11559 - DNA, 25 bp, Artificial
  Probe
agccagtttgaatacaacgcagaag

SEQ ID NO: 11560 - DNA, 25 bp, Artificial
  Probe
ttcacctacactgtccttgtcgatg

SEQ ID NO: 11561 - DNA, 25 bp, Artificial
  Probe
cagccagtttgaatacaacgcagaa

SEQ ID NO: 11562 - DNA, 25 bp, Artificial
  Probe
actctgacacctgttgtggacattg

SEQ ID NO: 11563 - DNA, 25 bp, Artificial
  Probe
cactctgacacctgttgtggacatt

SEQ ID NO: 11564 - DNA, 25 bp, Artificial
  Probe
ggtactaaccaagaattccgtgtgg

SEQ ID NO: 11565 - DNA, 25 bp, Artificial
  Probe
ccagtttgaatacaacgcagaaggg

SEQ ID NO: 11566 - DNA, 25 bp, Artificial
  Probe
ccaacaagcatgtctggttaggaga

SEQ ID NO: 11567 - DNA, 25 bp, Artificial
  Probe
gttggccctgtctgtttcaaataag

SEQ ID NO: 11568 - DNA, 25 bp, Artificial
  Probe
aatacaaaacgaataagccatctcg

SEQ ID NO: 11569 - DNA, 25 bp, Artificial
  Probe
ttggccctgtctgtttcaaataagt

SEQ ID NO: 11570 - DNA, 25 bp, Artificial
  Probe
acatcggtggtactaaccaagaatt

SEQ ID NO: 11571 - DNA, 25 bp, Artificial
  Probe
ttatgttactccctgatctttgtct

SEQ ID NO: 11572 - DNA, 25 bp, Artificial
  Probe
tttatgttactccctgatctttgtc

SEQ ID NO: 11573 - DNA, 25 bp, Artificial
  Probe
atttatgttactccctgatctttgt

SEQ ID NO: 11574 - DNA, 25 bp, Artificial
  Probe
tgtcgtgacaaagcatttatttaat

SEQ ID NO: 11575 - DNA, 25 bp, Artificial
  Probe
aatttatgttactccctgatctttg

SEQ ID NO: 11576 - DNA, 25 bp, Artificial
  Probe
gtcgtgacaaagcatttatttaata

SEQ ID NO: 11577 - DNA, 25 bp, Artificial
  Probe
tgctgtattctatttattcaactca

SEQ ID NO: 11578 - DNA, 25 bp, Artificial
  Probe
actcataatttatgttactccctga

SEQ ID NO: 11579 - DNA, 25 bp, Artificial
  Probe
aactcataatttatgttactccctg

SEQ ID NO: 11580 - DNA, 25 bp, Artificial
  Probe
caactcataatttatgttactccct

SEQ ID NO: 11581 - DNA, 25 bp, Artificial
  Probe
tcaactcataatttatgttactccc

SEQ ID NO: 11582 - DNA, 25 bp, Artificial
  Probe
tcgtgacaaagcatttatttaataa

SEQ ID NO: 11583 - DNA, 25 bp, Artificial
  Probe
taatttatgttactccctgatcttt

SEQ ID NO: 11584 - DNA, 25 bp, Artificial
  Probe
ttgctgtattctatttattcaactc

SEQ ID NO: 11585 - DNA, 25 bp, Artificial
  Probe
cataatttatgttactccctgatct

SEQ ID NO: 11586 - DNA, 25 bp, Artificial
  Probe
tcataatttatgttactccctgatc

SEQ ID NO: 11587 - DNA, 25 bp, Artificial
  Probe
ctcataatttatgttactccctgat

SEQ ID NO: 11588 - DNA, 25 bp, Artificial
  Probe
gctgtattctatttattcaactcat

SEQ ID NO: 11589 - DNA, 25 bp, Artificial
  Probe
ataatttatgttactccctgatctt

SEQ ID NO: 11590 - DNA, 25 bp, Artificial
  Probe
ttgtcgtgacaaagcatttatttaa

SEQ ID NO: 11591 - DNA, 25 bp, Artificial
  Probe
ttcaactcataatttatgttactcc

SEQ ID NO: 11592 - DNA, 25 bp, Artificial
  Probe
cgtgacaaagcatttatttaataaa

SEQ ID NO: 11593 - DNA, 25 bp, Artificial
  Probe
ctcttgagcactgatataagtcact

SEQ ID NO: 11594 - DNA, 25 bp, Artificial
  Probe
actcttgagcactgatataagtcac

SEQ ID NO: 11595 - DNA, 25 bp, Artificial
  Probe
tactcttgagcactgatataagtca

SEQ ID NO: 11596 - DNA, 25 bp, Artificial
  Probe
tcttgagcactgatataagtcactt

SEQ ID NO: 11597 - DNA, 25 bp, Artificial
  Probe
gtctcaacacgacaatacagaatgt

SEQ ID NO: 11598 - DNA, 25 bp, Artificial
  Probe
ttactcttgagcactgatataagtc

SEQ ID NO: 11599 - DNA, 25 bp, Artificial
  Probe
gcactgatataagtcacttagacct

SEQ ID NO: 11600 - DNA, 25 bp, Artificial
  Probe
agcactgatataagtcacttagacc

SEQ ID NO: 11601 - DNA, 25 bp, Artificial
  Probe
caatctggcatttaggaacaacaaa

SEQ ID NO: 11602 - DNA, 25 bp, Artificial
  Probe
tagtcaagtctacagtctcccaaat

SEQ ID NO: 11603 - DNA, 25 bp, Artificial
  Probe
aatcttaacgagtttactgagtggt

SEQ ID NO: 11604 - DNA, 25 bp, Artificial
  Probe
gaatcttaacgagtttactgagtgg

SEQ ID NO: 11605 - DNA, 25 bp, Artificial
  Probe
agactctcacctgtgtttatacttc

SEQ ID NO: 11606 - DNA, 25 bp, Artificial
  Probe
tctcaacacgacaatacagaatgta

SEQ ID NO: 11607 - DNA, 25 bp, Artificial
  Probe
cacctgtgtttatacttcgttagac

SEQ ID NO: 11608 - DNA, 25 bp, Artificial
  Probe
tcacctgtgtttatacttcgttaga

SEQ ID NO: 11609 - DNA, 25 bp, Artificial
  Probe
tctcacctgtgtttatacttcgtta

SEQ ID NO: 11610 - DNA, 25 bp, Artificial
  Probe
ctctcacctgtgtttatacttcgtt

SEQ ID NO: 11611 - DNA, 25 bp, Artificial
  Probe
tgagcactgatataagtcacttaga

SEQ ID NO: 11612 - DNA, 25 bp, Artificial
  Probe
ctcacctgtgtttatacttcgttag

SEQ ID NO: 11613 - DNA, 25 bp, Artificial
  Probe
atcttaacgagtttactgagtggtt

SEQ ID NO: 11614 - DNA, 25 bp, Artificial
  Probe
tgaatcttaacgagtttactgagtg

SEQ ID NO: 11615 - DNA, 25 bp, Artificial
  Probe
gaaagggttctggtatgtcttcaaa

SEQ ID NO: 11616 - DNA, 25 bp, Artificial
  Probe
ctcaacacgacaatacagaatgtac

SEQ ID NO: 11617 - DNA, 25 bp, Artificial
  Probe
gagcactgatataagtcacttagac

SEQ ID NO: 11618 - DNA, 25 bp, Artificial
  Probe
attactcttgagcactgatataagt

SEQ ID NO: 11619 - DNA, 25 bp, Artificial
  Probe
gactctcacctgtgtttatacttcg

SEQ ID NO: 11620 - DNA, 25 bp, Artificial
  Probe
tgacgatagaagaactcaaagtgaa

SEQ ID NO: 11621 - DNA, 25 bp, Artificial
  Probe
acgatagaagaactcaaagtgaaca

SEQ ID NO: 11622 - DNA, 25 bp, Artificial
  Probe
gacgatagaagaactcaaagtgaac

SEQ ID NO: 11623 - DNA, 25 bp, Artificial
  Probe
ctgacgatagaagaactcaaagtga

SEQ ID NO: 11624 - DNA, 25 bp, Artificial
  Probe
tctgacgatagaagaactcaaagtg

SEQ ID NO: 11625 - DNA, 25 bp, Artificial
  Probe
agtcaagtctacagtctcccaaatt

SEQ ID NO: 11626 - DNA, 25 bp, Artificial
  Probe
ctgaatcttaacgagtttactgagt

SEQ ID NO: 11627 - DNA, 25 bp, Artificial
  Probe
aaagggttctggtatgtcttcaaac

SEQ ID NO: 11628 - DNA, 25 bp, Artificial
  Probe
cgatagaagaactcaaagtgaacac

SEQ ID NO: 11629 - DNA, 25 bp, Artificial
  Probe
gaagaactcaaagtgaacacaacaa

SEQ ID NO: 11630 - DNA, 25 bp, Artificial
  Probe
actctcacctgtgtttatacttcgt

SEQ ID NO: 11631 - DNA, 25 bp, Artificial
  Probe
ctagtcaagtctacagtctcccaaa

SEQ ID NO: 11632 - DNA, 25 bp, Artificial
  Probe
tagaagaactcaaagtgaacacaac

SEQ ID NO: 11633 - DNA, 25 bp, Artificial
  Probe
ttgagcactgatataagtcacttag

SEQ ID NO: 11634 - DNA, 25 bp, Artificial
  Probe
cttgagcactgatataagtcactta

SEQ ID NO: 11635 - DNA, 25 bp, Artificial
  Probe
acctgtgtttatacttcgttagaca

SEQ ID NO: 11636 - DNA, 25 bp, Artificial
  Probe
atctggcatttaggaacaacaaatt

SEQ ID NO: 11637 - DNA, 25 bp, Artificial
  Probe
aatctggcatttaggaacaacaaat

SEQ ID NO: 11638 - DNA, 25 bp, Artificial
  Probe
cagtgaacacatagaactcctactt

SEQ ID NO: 11639 - DNA, 25 bp, Artificial
  Probe
agtgaacacatagaactcctactta

SEQ ID NO: 11640 - DNA, 25 bp, Artificial
  Probe
gtgaacacatagaactcctacttaa

SEQ ID NO: 11641 - DNA, 25 bp, Artificial
  Probe
cacacaatcttggcatgtattaagt

SEQ ID NO: 11642 - DNA, 25 bp, Artificial
  Probe
gcagtgaacacatagaactcctact

SEQ ID NO: 11643 - DNA, 25 bp, Artificial
  Probe
acacaatcttggcatgtattaagta

SEQ ID NO: 11644 - DNA, 25 bp, Artificial
  Probe
ccacacaatcttggcatgtattaag

SEQ ID NO: 11645 - DNA, 25 bp, Artificial
  Probe
gtggcacagtaactcatcagatagc

SEQ ID NO: 11646 - DNA, 25 bp, Artificial
  Probe
cacaatcttggcatgtattaagtaa

SEQ ID NO: 11647 - DNA, 25 bp, Artificial
  Probe
tgtggcacagtaactcatcagatag

SEQ ID NO: 11648 - DNA, 25 bp, Artificial
  Probe
tagaaacatagatcaaactgtggca

SEQ ID NO: 11649 - DNA, 25 bp, Artificial
  Probe
gcacagtaactcatcagatagctag

SEQ ID NO: 11650 - DNA, 25 bp, Artificial
  Probe
atagaaacatagatcaaactgtggc

SEQ ID NO: 11651 - DNA, 25 bp, Artificial
  Probe
tgcagtgaacacatagaactcctac

SEQ ID NO: 11652 - DNA, 25 bp, Artificial
  Probe
tgaacacatagaactcctacttaag

SEQ ID NO: 11653 - DNA, 25 bp, Artificial
  Probe
tacagtgcagtgaacacatagaact

SEQ ID NO: 11654 - DNA, 25 bp, Artificial
  Probe
gtacagtgcagtgaacacatagaac

SEQ ID NO: 11655 - DNA, 25 bp, Artificial
  Probe
agaaacatagatcaaactgtggcac

SEQ ID NO: 11656 - DNA, 25 bp, Artificial
  Probe
ggcacagtaactcatcagatagcta

SEQ ID NO: 11657 - DNA, 25 bp, Artificial
  Probe
tggcacagtaactcatcagatagct

SEQ ID NO: 11658 - DNA, 25 bp, Artificial
  Probe
gtgcagtgaacacatagaactccta

SEQ ID NO: 11659 - DNA, 25 bp, Artificial
  Probe
ttataagccctaaagcattaagttg

SEQ ID NO: 11660 - DNA, 25 bp, Artificial
  Probe
gaaacatagatcaaactgtggcaca

SEQ ID NO: 11661 - DNA, 25 bp, Artificial
  Probe
gatagaaacatagatcaaactgtgg

SEQ ID NO: 11662 - DNA, 25 bp, Artificial
  Probe
taagtattcgtcagcatccttttgt

SEQ ID NO: 11663 - DNA, 25 bp, Artificial
  Probe
ttaagtattcgtcagcatccttttg

SEQ ID NO: 11664 - DNA, 25 bp, Artificial
  Probe
tttgtctctaactcggttctgtttt

SEQ ID NO: 11665 - DNA, 25 bp, Artificial
  Probe
ttttgtctctaactcggttctgttt

SEQ ID NO: 11666 - DNA, 25 bp, Artificial
  Probe
acagtgcagtgaacacatagaactc

SEQ ID NO: 11667 - DNA, 25 bp, Artificial
  Probe
gtcagcatccttttgtctctaactc

SEQ ID NO: 11668 - DNA, 25 bp, Artificial
  Probe
tataagccctaaagcattaagttgc

SEQ ID NO: 11669 - DNA, 25 bp, Artificial
  Probe
cttttgtctctaactcggttctgtt

SEQ ID NO: 11670 - DNA, 25 bp, Artificial
  Probe
ttgtctctaactcggttctgttttg

SEQ ID NO: 11671 - DNA, 25 bp, Artificial
  Probe
atccttttgtctctaactcggttct

SEQ ID NO: 11672 - DNA, 25 bp, Artificial
  Probe
catccttttgtctctaactcggttc

SEQ ID NO: 11673 - DNA, 25 bp, Artificial
  Probe
aagtattcgtcagcatccttttgtc

SEQ ID NO: 11674 - DNA, 25 bp, Artificial
  Probe
attcgtcagcatccttttgtctcta

SEQ ID NO: 11675 - DNA, 25 bp, Artificial
  Probe
tattcgtcagcatccttttgtctct

SEQ ID NO: 11676 - DNA, 25 bp, Artificial
  Probe
gtattcgtcagcatccttttgtctc

SEQ ID NO: 11677 - DNA, 25 bp, Artificial
  Probe
acaatcttggcatgtattaagtaaa

SEQ ID NO: 11678 - DNA, 25 bp, Artificial
  Probe
tgtctctaactcggttctgttttga

SEQ ID NO: 11679 - DNA, 25 bp, Artificial
  Probe
ttcgtcagcatccttttgtctctaa

SEQ ID NO: 11680 - DNA, 25 bp, Artificial
  Probe
agtattcgtcagcatccttttgtct

SEQ ID NO: 11681 - DNA, 25 bp, Artificial
  Probe
tcaaatgagaaaatcgcaaggagtg

SEQ ID NO: 11682 - DNA, 25 bp, Artificial
  Probe
gtcaaatgagaaaatcgcaaggagt

SEQ ID NO: 11683 - DNA, 25 bp, Artificial
  Probe
gactagaataggagacattgttgct

SEQ ID NO: 11684 - DNA, 25 bp, Artificial
  Probe
ccttagaatcaagatgaagccagta

SEQ ID NO: 11685 - DNA, 25 bp, Artificial
  Probe
aatcaagatgaagccagtaagtagg

SEQ ID NO: 11686 - DNA, 25 bp, Artificial
  Probe
agaatcaagatgaagccagtaagta

SEQ ID NO: 11687 - DNA, 25 bp, Artificial
  Probe
tagaatcaagatgaagccagtaagt

SEQ ID NO: 11688 - DNA, 25 bp, Artificial
  Probe
actagaataggagacattgttgcta

SEQ ID NO: 11689 - DNA, 25 bp, Artificial
  Probe
ggactagaataggagacattgttgc

SEQ ID NO: 11690 - DNA, 25 bp, Artificial
  Probe
gaatcaagatgaagccagtaagtag

SEQ ID NO: 11691 - DNA, 25 bp, Artificial
  Probe
ctagaataggagacattgttgctac

SEQ ID NO: 11692 - DNA, 25 bp, Artificial
  Probe
agaataggagacattgttgctacat

SEQ ID NO: 11693 - DNA, 25 bp, Artificial
  Probe
cctcctgctcatgtattcatatcaa

SEQ ID NO: 11694 - DNA, 25 bp, Artificial
  Probe
tagaataggagacattgttgctaca

SEQ ID NO: 11695 - DNA, 25 bp, Artificial
  Probe
ttagaatcaagatgaagccagtaag

SEQ ID NO: 11696 - DNA, 25 bp, Artificial
  Probe
cttagaatcaagatgaagccagtaa

SEQ ID NO: 11697 - DNA, 25 bp, Artificial
  Probe
gaataggagacattgttgctacata

SEQ ID NO: 11698 - DNA, 25 bp, Artificial
  Probe
ttctgatggacttgtaagacctgtg

SEQ ID NO: 11699 - DNA, 25 bp, Artificial
  Probe
ttcatatcaaacccatcgtcttaca

SEQ ID NO: 11700 - DNA, 25 bp, Artificial
  Probe
tttccttactcaaacctcaccatac

SEQ ID NO: 11701 - DNA, 25 bp, Artificial
  Probe
atttccttactcaaacctcaccata

SEQ ID NO: 11702 - DNA, 25 bp, Artificial
  Probe
tatttccttactcaaacctcaccat

SEQ ID NO: 11703 - DNA, 25 bp, Artificial
  Probe
tgtattcatatcaaacccatcgtct

SEQ ID NO: 11704 - DNA, 25 bp, Artificial
  Probe
gtatttccttactcaaacctcacca

SEQ ID NO: 11705 - DNA, 25 bp, Artificial
  Probe
tgtatttccttactcaaacctcacc

SEQ ID NO: 11706 - DNA, 25 bp, Artificial
  Probe
atatcaaacccatcgtcttacacag

SEQ ID NO: 11707 - DNA, 25 bp, Artificial
  Probe
ataggagacattgttgctacatatt

SEQ ID NO: 11708 - DNA, 25 bp, Artificial
  Probe
aataggagacattgttgctacatat

SEQ ID NO: 11709 - DNA, 25 bp, Artificial
  Probe
tcatatcaaacccatcgtcttacac

SEQ ID NO: 11710 - DNA, 25 bp, Artificial
  Probe
caatagtcaatacgctgtgctcatg

SEQ ID NO: 11711 - DNA, 25 bp, Artificial
  Probe
catatcaaacccatcgtcttacaca

SEQ ID NO: 11712 - DNA, 25 bp, Artificial
  Probe
attcatatcaaacccatcgtcttac

SEQ ID NO: 11713 - DNA, 25 bp, Artificial
  Probe
gtattcatatcaaacccatcgtctt

SEQ ID NO: 11714 - DNA, 25 bp, Artificial
  Probe
atttctgatggacttgtaagacctg

SEQ ID NO: 11715 - DNA, 25 bp, Artificial
  Probe
ttccttactcaaacctcaccataca

SEQ ID NO: 11716 - DNA, 25 bp, Artificial
  Probe
ttgctacatatttctgatggacttg

SEQ ID NO: 11717 - DNA, 25 bp, Artificial
  Probe
gttgctacatatttctgatggactt

SEQ ID NO: 11718 - DNA, 25 bp, Artificial
  Probe
gggactagaataggagacattgttg

SEQ ID NO: 11719 - DNA, 25 bp, Artificial
  Probe
atgtattcatatcaaacccatcgtc

SEQ ID NO: 11720 - DNA, 25 bp, Artificial
  Probe
tgggactagaataggagacattgtt

SEQ ID NO: 11721 - DNA, 25 bp, Artificial
  Probe
tatttctgatggacttgtaagacct

SEQ ID NO: 11722 - DNA, 25 bp, Artificial
  Probe
aatagtcaatacgctgtgctcatgt

SEQ ID NO: 11723 - DNA, 25 bp, Artificial
  Probe
ctgggactagaataggagacattgt

SEQ ID NO: 11724 - DNA, 25 bp, Artificial
  Probe
aaatgcccttagaatcaagatgaag

SEQ ID NO: 11725 - DNA, 25 bp, Artificial
  Probe
tctgatggacttgtaagacctgtgt

SEQ ID NO: 11726 - DNA, 25 bp, Artificial
  Probe
tgctacatatttctgatggacttgt

SEQ ID NO: 11727 - DNA, 25 bp, Artificial
  Probe
tgttgctacatatttctgatggact

SEQ ID NO: 11728 - DNA, 25 bp, Artificial
  Probe
taatcattagtagtgtggtcagaga

SEQ ID NO: 11729 - DNA, 25 bp, Artificial
  Probe
aatcattagtagtgtggtcagagac

SEQ ID NO: 11730 - DNA, 25 bp, Artificial
  Probe
atcattagtagtgtggtcagagact

SEQ ID NO: 11731 - DNA, 25 bp, Artificial
  Probe
tcattagtagtgtggtcagagactt

SEQ ID NO: 11732 - DNA, 25 bp, Artificial
  Probe
cattagtagtgtggtcagagactta

SEQ ID NO: 11733 - DNA, 25 bp, Artificial
  Probe
ttaatcattagtagtgtggtcagag

SEQ ID NO: 11734 - DNA, 25 bp, Artificial
  Probe
attagtagtgtggtcagagacttag

SEQ ID NO: 11735 - DNA, 25 bp, Artificial
  Probe
ttagtagtgtggtcagagacttagc

SEQ ID NO: 11736 - DNA, 25 bp, Artificial
  Probe
tagtagtgtggtcagagacttagca

SEQ ID NO: 11737 - DNA, 25 bp, Artificial
  Probe
gccttgctagtagaataaacagttc

SEQ ID NO: 11738 - DNA, 25 bp, Artificial
  Probe
actattctgagccttgctagtagaa

SEQ ID NO: 11739 - DNA, 25 bp, Artificial
  Probe
cttgctagtagaataaacagttccc

SEQ ID NO: 11740 - DNA, 25 bp, Artificial
  Probe
ccttgctagtagaataaacagttcc

SEQ ID NO: 11741 - DNA, 25 bp, Artificial
  Probe
tctgtactattctgagccttgctag

SEQ ID NO: 11742 - DNA, 25 bp, Artificial
  Probe
ctctgtactattctgagccttgcta

SEQ ID NO: 11743 - DNA, 25 bp, Artificial
  Probe
attaatcattagtagtgtggtcaga

SEQ ID NO: 11744 - DNA, 25 bp, Artificial
  Probe
ctgtactattctgagccttgctagt

SEQ ID NO: 11745 - DNA, 25 bp, Artificial
  Probe
ttactggaaggcttaaccaaagttt

SEQ ID NO: 11746 - DNA, 25 bp, Artificial
  Probe
tactattctgagccttgctagtaga

SEQ ID NO: 11747 - DNA, 25 bp, Artificial
  Probe
gtactattctgagccttgctagtag

SEQ ID NO: 11748 - DNA, 25 bp, Artificial
  Probe
tgtactattctgagccttgctagta

SEQ ID NO: 11749 - DNA, 25 bp, Artificial
  Probe
cctcaggaactaacgtgtgaagtag

SEQ ID NO: 11750 - DNA, 25 bp, Artificial
  Probe
gttactggaaggcttaaccaaagtt

SEQ ID NO: 11751 - DNA, 25 bp, Artificial
  Probe
agtagtgtggtcagagacttagcac

SEQ ID NO: 11752 - DNA, 25 bp, Artificial
  Probe
agccttgctagtagaataaacagtt

SEQ ID NO: 11753 - DNA, 25 bp, Artificial
  Probe
gagccttgctagtagaataaacagt

SEQ ID NO: 11754 - DNA, 25 bp, Artificial
  Probe
tctgagccttgctagtagaataaac

SEQ ID NO: 11755 - DNA, 25 bp, Artificial
  Probe
tgagccttgctagtagaataaacag

SEQ ID NO: 11756 - DNA, 25 bp, Artificial
  Probe
ctgagccttgctagtagaataaaca

SEQ ID NO: 11757 - DNA, 25 bp, Artificial
  Probe
ttctgagccttgctagtagaataaa

SEQ ID NO: 11758 - DNA, 25 bp, Artificial
  Probe
cacagttactggaaggcttaaccaa

SEQ ID NO: 11759 - DNA, 25 bp, Artificial
  Probe
gcagtcactacagctactcagagag

SEQ ID NO: 11760 - DNA, 25 bp, Artificial
  Probe
agttactggaaggcttaaccaaagt

SEQ ID NO: 11761 - DNA, 25 bp, Artificial
  Probe
ctcaggaactaacgtgtgaagtagc

SEQ ID NO: 11762 - DNA, 25 bp, Artificial
  Probe
acctcaggaactaacgtgtgaagta

SEQ ID NO: 11763 - DNA, 25 bp, Artificial
  Probe
tagtagaataaacagttccccaagc

SEQ ID NO: 11764 - DNA, 25 bp, Artificial
  Probe
gaacctcaggaactaacgtgtgaag

SEQ ID NO: 11765 - DNA, 25 bp, Artificial
  Probe
attggctaaggacaaaatgatgaac

SEQ ID NO: 11766 - DNA, 25 bp, Artificial
  Probe
cagttactggaaggcttaaccaaag

SEQ ID NO: 11767 - DNA, 25 bp, Artificial
  Probe
aaatgatgaacggcagtcactacag

SEQ ID NO: 11768 - DNA, 25 bp, Artificial
  Probe
gctagtagaataaacagttccccaa

SEQ ID NO: 11769 - DNA, 25 bp, Artificial
  Probe
ttgctagtagaataaacagttcccc

SEQ ID NO: 11770 - DNA, 25 bp, Artificial
  Probe
tattaatcattagtagtgtggtcag

SEQ ID NO: 11771 - DNA, 25 bp, Artificial
  Probe
tgctagtagaataaacagttcccca

SEQ ID NO: 11772 - DNA, 25 bp, Artificial
  Probe
caaggacatggctaaccaagtgaag

SEQ ID NO: 11773 - DNA, 25 bp, Artificial
  Probe
tggtgtttcatccctctctatttac

SEQ ID NO: 11774 - DNA, 25 bp, Artificial
  Probe
tagcactttctgtttctcctgatac

SEQ ID NO: 11775 - DNA, 25 bp, Artificial
  Probe
ttagcactttctgtttctcctgata

SEQ ID NO: 11776 - DNA, 25 bp, Artificial
  Probe
gtttcatccctctctatttacccag

SEQ ID NO: 11777 - DNA, 25 bp, Artificial
  Probe
ggtccttccagttcatcctttatag

SEQ ID NO: 11778 - DNA, 25 bp, Artificial
  Probe
aatgttagcactttctgtttctcct

SEQ ID NO: 11779 - DNA, 25 bp, Artificial
  Probe
caatgttagcactttctgtttctcc

SEQ ID NO: 11780 - DNA, 25 bp, Artificial
  Probe
gtgtttcatccctctctatttaccc

SEQ ID NO: 11781 - DNA, 25 bp, Artificial
  Probe
tgtttcatccctctctatttaccca

SEQ ID NO: 11782 - DNA, 25 bp, Artificial
  Probe
aatggtgtttcatccctctctattt

SEQ ID NO: 11783 - DNA, 25 bp, Artificial
  Probe
aaatggtgtttcatccctctctatt

SEQ ID NO: 11784 - DNA, 25 bp, Artificial
  Probe
cactttctgtttctcctgatacttt

SEQ ID NO: 11785 - DNA, 25 bp, Artificial
  Probe
gcactttctgtttctcctgatactt

SEQ ID NO: 11786 - DNA, 25 bp, Artificial
  Probe
gttagcactttctgtttctcctgat

SEQ ID NO: 11787 - DNA, 25 bp, Artificial
  Probe
atgttagcactttctgtttctcctg

SEQ ID NO: 11788 - DNA, 25 bp, Artificial
  Probe
ttcatccctctctatttacccagaa

SEQ ID NO: 11789 - DNA, 25 bp, Artificial
  Probe
tttcatccctctctatttacccaga

SEQ ID NO: 11790 - DNA, 25 bp, Artificial
  Probe
atggtgtttcatccctctctattta

SEQ ID NO: 11791 - DNA, 25 bp, Artificial
  Probe
ctgccaaaccatctgtcttcattat

SEQ ID NO: 11792 - DNA, 25 bp, Artificial
  Probe
catccctctctatttacccagaact

SEQ ID NO: 11793 - DNA, 25 bp, Artificial
  Probe
tcatccctctctatttacccagaac

SEQ ID NO: 11794 - DNA, 25 bp, Artificial
  Probe
gggtccttccagttcatcctttata

SEQ ID NO: 11795 - DNA, 25 bp, Artificial
  Probe
agcactttctgtttctcctgatact

SEQ ID NO: 11796 - DNA, 25 bp, Artificial
  Probe
atccctctctatttacccagaactg

SEQ ID NO: 11797 - DNA, 25 bp, Artificial
  Probe
acaatgttagcactttctgtttctc

SEQ ID NO: 11798 - DNA, 25 bp, Artificial
  Probe
tgccaaaccatctgtcttcattatg

SEQ ID NO: 11799 - DNA, 25 bp, Artificial
  Probe
tgttagcactttctgtttctcctga

SEQ ID NO: 11800 - DNA, 25 bp, Artificial
  Probe
gtccttccagttcatcctttatagg

SEQ ID NO: 11801 - DNA, 25 bp, Artificial
  Probe
catgaggagactgaaagaaatcaaa

SEQ ID NO: 11802 - DNA, 25 bp, Artificial
  Probe
gccaaaccatctgtcttcattatga

SEQ ID NO: 11803 - DNA, 25 bp, Artificial
  Probe
actttctgtttctcctgatacttta

SEQ ID NO: 11804 - DNA, 25 bp, Artificial
  Probe
cctttatagggataactacaggtcc

SEQ ID NO: 11805 - DNA, 25 bp, Artificial
  Probe
tccttccagttcatcctttataggg

SEQ ID NO: 11806 - DNA, 25 bp, Artificial
  Probe
ctttctgtttctcctgatactttac

SEQ ID NO: 11807 - DNA, 25 bp, Artificial
  Probe
gcatgaggagactgaaagaaatcaa

SEQ ID NO: 11808 - DNA, 25 bp, Artificial
  Probe
ggtgtttcatccctctctatttacc

SEQ ID NO: 11809 - DNA, 25 bp, Artificial
  Probe
ccttccagttcatcctttataggga

SEQ ID NO: 11810 - DNA, 25 bp, Artificial
  Probe
tcctttatagggataactacaggtc

SEQ ID NO: 11811 - DNA, 25 bp, Artificial
  Probe
gtgtgaacaatgttagcactttctg

SEQ ID NO: 11812 - DNA, 25 bp, Artificial
  Probe
taggtaatcctccagtctagaagaa

SEQ ID NO: 11813 - DNA, 25 bp, Artificial
  Probe
tctgtttctcctgatactttacaaa

SEQ ID NO: 11814 - DNA, 25 bp, Artificial
  Probe
ttctgtttctcctgatactttacaa

SEQ ID NO: 11815 - DNA, 25 bp, Artificial
  Probe
tttctgtttctcctgatactttaca

SEQ ID NO: 11816 - DNA, 25 bp, Artificial
  Probe
tgtgaacaatgttagcactttctgt

SEQ ID NO: 11817 - DNA, 25 bp, Artificial
  Probe
cctgccaaaccatctgtcttcatta

SEQ ID NO: 11818 - DNA, 25 bp, Artificial
  Probe
cttcatcttcacggagagaatcatc

SEQ ID NO: 11819 - DNA, 25 bp, Artificial
  Probe
ccttcatcttcacggagagaatcat

SEQ ID NO: 11820 - DNA, 25 bp, Artificial
  Probe
aattagcagatagcactcagccatc

SEQ ID NO: 11821 - DNA, 25 bp, Artificial
  Probe
gagaagaggaagagacaaatagcac

SEQ ID NO: 11822 - DNA, 25 bp, Artificial
  Probe
gtgagaagaggaagagacaaatagc

SEQ ID NO: 11823 - DNA, 25 bp, Artificial
  Probe
gaggaagagacaaatagcactgaag

SEQ ID NO: 11824 - DNA, 25 bp, Artificial
  Probe
gaagaggaagagacaaatagcactg

SEQ ID NO: 11825 - DNA, 25 bp, Artificial
  Probe
agaagaggaagagacaaatagcact

SEQ ID NO: 11826 - DNA, 25 bp, Artificial
  Probe
tgagaagaggaagagacaaatagca

SEQ ID NO: 11827 - DNA, 25 bp, Artificial
  Probe
cccttctaaattagcagatagcact

SEQ ID NO: 11828 - DNA, 25 bp, Artificial
  Probe
accacccttctaaattagcagatag

SEQ ID NO: 11829 - DNA, 25 bp, Artificial
  Probe
caccacccttctaaattagcagata

SEQ ID NO: 11830 - DNA, 25 bp, Artificial
  Probe
agaggaagagacaaatagcactgaa

SEQ ID NO: 11831 - DNA, 25 bp, Artificial
  Probe
aagaggaagagacaaatagcactga

SEQ ID NO: 11832 - DNA, 25 bp, Artificial
  Probe
acccttctaaattagcagatagcac

SEQ ID NO: 11833 - DNA, 25 bp, Artificial
  Probe
cacccttctaaattagcagatagca

SEQ ID NO: 11834 - DNA, 25 bp, Artificial
  Probe
tctaaattagcagatagcactcagc

SEQ ID NO: 11835 - DNA, 25 bp, Artificial
  Probe
ctacttgggcttgtaattcaggaat

SEQ ID NO: 11836 - DNA, 25 bp, Artificial
  Probe
tacttgggcttgtaattcaggaatg

SEQ ID NO: 11837 - DNA, 25 bp, Artificial
  Probe
ttcatcttcacggagagaatcatcc

SEQ ID NO: 11838 - DNA, 25 bp, Artificial
  Probe
ttatggctagaaaccctgcttaaac

SEQ ID NO: 11839 - DNA, 25 bp, Artificial
  Probe
ctaaattagcagatagcactcagcc

SEQ ID NO: 11840 - DNA, 25 bp, Artificial
  Probe
aaccctgcttaaactttcaataaac

SEQ ID NO: 11841 - DNA, 25 bp, Artificial
  Probe
ccttctaaattagcagatagcactc

SEQ ID NO: 11842 - DNA, 25 bp, Artificial
  Probe
ccacccttctaaattagcagatagc

SEQ ID NO: 11843 - DNA, 25 bp, Artificial
  Probe
tttatggctagaaaccctgcttaaa

SEQ ID NO: 11844 - DNA, 25 bp, Artificial
  Probe
gtgtgagaagaggaagagacaaata

SEQ ID NO: 11845 - DNA, 25 bp, Artificial
  Probe
ttatggtctccaatatctcaacatg

SEQ ID NO: 11846 - DNA, 25 bp, Artificial
  Probe
tgtgagaagaggaagagacaaatag

SEQ ID NO: 11847 - DNA, 25 bp, Artificial
  Probe
taaattagcagatagcactcagcca

SEQ ID NO: 11848 - DNA, 25 bp, Artificial
  Probe
ttctaaattagcagatagcactcag

SEQ ID NO: 11849 - DNA, 25 bp, Artificial
  Probe
cttctaaattagcagatagcactca

SEQ ID NO: 11850 - DNA, 25 bp, Artificial
  Probe
ctgttcaacatcaacttctacgcag

SEQ ID NO: 11851 - DNA, 25 bp, Artificial
  Probe
tatggctagaaaccctgcttaaact

SEQ ID NO: 11852 - DNA, 25 bp, Artificial
  Probe
aggaagagacaaatagcactgaagg

SEQ ID NO: 11853 - DNA, 25 bp, Artificial
  Probe
aaaccctgcttaaactttcaataaa

SEQ ID NO: 11854 - DNA, 25 bp, Artificial
  Probe
ttgtaattcaggaatgcaactggag

SEQ ID NO: 11855 - DNA, 25 bp, Artificial
  Probe
cttgtaattcaggaatgcaactgga

SEQ ID NO: 11856 - DNA, 25 bp, Artificial
  Probe
catcttcacggagagaatcatcctg

SEQ ID NO: 11857 - DNA, 25 bp, Artificial
  Probe
tcatcttcacggagagaatcatcct

SEQ ID NO: 11858 - DNA, 25 bp, Artificial
  Probe
aaattagcagatagcactcagccat

SEQ ID NO: 11859 - DNA, 25 bp, Artificial
  Probe
gagaatcatcctggtctgagacaac

SEQ ID NO: 11860 - DNA, 25 bp, Artificial
  Probe
tgtgtgagaagaggaagagacaaat

SEQ ID NO: 11861 - DNA, 25 bp, Artificial
  Probe
agagaatcatcctggtctgagacaa

SEQ ID NO: 11862 - DNA, 25 bp, Artificial
  Probe
actgaatgtgtttatggtctccaat

SEQ ID NO: 11863 - DNA, 25 bp, Artificial
  Probe
cgttgtaacctgttagtcattctca

SEQ ID NO: 11864 - DNA, 25 bp, Artificial
  Probe
gttgtaacctgttagtcattctcaa

SEQ ID NO: 11865 - DNA, 25 bp, Artificial
  Probe
tgaataatacagtcactctctctgc

SEQ ID NO: 11866 - DNA, 25 bp, Artificial
  Probe
ataatacagtcactctctctgcttc

SEQ ID NO: 11867 - DNA, 25 bp, Artificial
  Probe
gaataatacagtcactctctctgct

SEQ ID NO: 11868 - DNA, 25 bp, Artificial
  Probe
taatacagtcactctctctgcttct

SEQ ID NO: 11869 - DNA, 25 bp, Artificial
  Probe
aataatacagtcactctctctgctt

SEQ ID NO: 11870 - DNA, 25 bp, Artificial
  Probe
aatacagtcactctctctgcttctc

SEQ ID NO: 11871 - DNA, 25 bp, Artificial
  Probe
acttgagtctgaagacaacgattat

SEQ ID NO: 11872 - DNA, 25 bp, Artificial
  Probe
ctgaataatacagtcactctctctg

SEQ ID NO: 11873 - DNA, 25 bp, Artificial
  Probe
ttgagtctgaagacaacgattatct

SEQ ID NO: 11874 - DNA, 25 bp, Artificial
  Probe
aacttgagtctgaagacaacgatta

SEQ ID NO: 11875 - DNA, 25 bp, Artificial
  Probe
cttgagtctgaagacaacgattatc

SEQ ID NO: 11876 - DNA, 25 bp, Artificial
  Probe
atagaacttgagtctgaagacaacg

SEQ ID NO: 11877 - DNA, 25 bp, Artificial
  Probe
agaatagaacttgagtctgaagaca

SEQ ID NO: 11878 - DNA, 25 bp, Artificial
  Probe
acgttgtaacctgttagtcattctc

SEQ ID NO: 11879 - DNA, 25 bp, Artificial
  Probe
aatagaacttgagtctgaagacaac

SEQ ID NO: 11880 - DNA, 25 bp, Artificial
  Probe
cacgttgtaacctgttagtcattct

SEQ ID NO: 11881 - DNA, 25 bp, Artificial
  Probe
tcgtgcctcaaattagaatagaact

SEQ ID NO: 11882 - DNA, 25 bp, Artificial
  Probe
gtcgtgcctcaaattagaatagaac

SEQ ID NO: 11883 - DNA, 25 bp, Artificial
  Probe
agtcgtgcctcaaattagaatagaa

SEQ ID NO: 11884 - DNA, 25 bp, Artificial
  Probe
aagtcgtgcctcaaattagaataga

SEQ ID NO: 11885 - DNA, 25 bp, Artificial
  Probe
gaacttgagtctgaagacaacgatt

SEQ ID NO: 11886 - DNA, 25 bp, Artificial
  Probe
cgtgcctcaaattagaatagaactt

SEQ ID NO: 11887 - DNA, 25 bp, Artificial
  Probe
aaagtcgtgcctcaaattagaatag

SEQ ID NO: 11888 - DNA, 25 bp, Artificial
  Probe
gaaagtcgtgcctcaaattagaata

SEQ ID NO: 11889 - DNA, 25 bp, Artificial
  Probe
tagaacttgagtctgaagacaacga

SEQ ID NO: 11890 - DNA, 25 bp, Artificial
  Probe
atacagtcactctctctgcttctct

SEQ ID NO: 11891 - DNA, 25 bp, Artificial
  Probe
gaatagaacttgagtctgaagacaa

SEQ ID NO: 11892 - DNA, 25 bp, Artificial
  Probe
caacgattatctttggaggaacaag

SEQ ID NO: 11893 - DNA, 25 bp, Artificial
  Probe
gattatctttggaggaacaagggaa

SEQ ID NO: 11894 - DNA, 25 bp, Artificial
  Probe
attatctttggaggaacaagggaac

SEQ ID NO: 11895 - DNA, 25 bp, Artificial
  Probe
acaacgattatctttggaggaacaa

SEQ ID NO: 11896 - DNA, 25 bp, Artificial
  Probe
agacaacgattatctttggaggaac

SEQ ID NO: 11897 - DNA, 25 bp, Artificial
  Probe
aacgattatctttggaggaacaagg

SEQ ID NO: 11898 - DNA, 25 bp, Artificial
  Probe
agtcactctctctgcttctctcttg

SEQ ID NO: 11899 - DNA, 25 bp, Artificial
  Probe
agaacttgagtctgaagacaacgat

SEQ ID NO: 11900 - DNA, 25 bp, Artificial
  Probe
gacaacgattatctttggaggaaca

SEQ ID NO: 11901 - DNA, 25 bp, Artificial
  Probe
ttagaatagaacttgagtctgaaga

SEQ ID NO: 11902 - DNA, 25 bp, Artificial
  Probe
ccacgttgtaacctgttagtcattc

SEQ ID NO: 11903 - DNA, 25 bp, Artificial
  Probe
tgaaagtcgtgcctcaaattagaat

SEQ ID NO: 11904 - DNA, 25 bp, Artificial
  Probe
tgagtctgaagacaacgattatctt

SEQ ID NO: 11905 - DNA, 25 bp, Artificial
  Probe
tacagtcactctctctgcttctctc

SEQ ID NO: 11906 - DNA, 25 bp, Artificial
  Probe
ttatctttggaggaacaagggaaca

SEQ ID NO: 11907 - DNA, 25 bp, Artificial
  Probe
tagaatagaacttgagtctgaagac

SEQ ID NO: 11908 - DNA, 25 bp, Artificial
  Probe
cttcttagcacaacacaattctacc

SEQ ID NO: 11909 - DNA, 25 bp, Artificial
  Probe
agtcttcttagcacaacacaattct

SEQ ID NO: 11910 - DNA, 25 bp, Artificial
  Probe
tcttcttagcacaacacaattctac

SEQ ID NO: 11911 - DNA, 25 bp, Artificial
  Probe
gtcttcttagcacaacacaattcta

SEQ ID NO: 11912 - DNA, 25 bp, Artificial
  Probe
aagtcttcttagcacaacacaattc

SEQ ID NO: 11913 - DNA, 25 bp, Artificial
  Probe
agttactgtcagaattggatgaaga

SEQ ID NO: 11914 - DNA, 25 bp, Artificial
  Probe
tactgtcagaattggatgaagagaa

SEQ ID NO: 11915 - DNA, 25 bp, Artificial
  Probe
ttactgtcagaattggatgaagaga

SEQ ID NO: 11916 - DNA, 25 bp, Artificial
  Probe
gttactgtcagaattggatgaagag

SEQ ID NO: 11917 - DNA, 25 bp, Artificial
  Probe
tacacctattgcgtgaacagaatat

SEQ ID NO: 11918 - DNA, 25 bp, Artificial
  Probe
ttacacctattgcgtgaacagaata

SEQ ID NO: 11919 - DNA, 25 bp, Artificial
  Probe
acacctattgcgtgaacagaatatg

SEQ ID NO: 11920 - DNA, 25 bp, Artificial
  Probe
taagcagttactgtcagaattggat

SEQ ID NO: 11921 - DNA, 25 bp, Artificial
  Probe
ttaagcagttactgtcagaattgga

SEQ ID NO: 11922 - DNA, 25 bp, Artificial
  Probe
cagttactgtcagaattggatgaag

SEQ ID NO: 11923 - DNA, 25 bp, Artificial
  Probe
tgagattaagcagttactgtcagaa

SEQ ID NO: 11924 - DNA, 25 bp, Artificial
  Probe
gtgagattaagcagttactgtcaga

SEQ ID NO: 11925 - DNA, 25 bp, Artificial
  Probe
tcaggcagtttagtccatagtagta

SEQ ID NO: 11926 - DNA, 25 bp, Artificial
  Probe
attaagcagttactgtcagaattgg

SEQ ID NO: 11927 - DNA, 25 bp, Artificial
  Probe
agatggaggtgaatgacataaagaa

SEQ ID NO: 11928 - DNA, 25 bp, Artificial
  Probe
cagatggaggtgaatgacataaaga

SEQ ID NO: 11929 - DNA, 25 bp, Artificial
  Probe
aaagtcttcttagcacaacacaatt

SEQ ID NO: 11930 - DNA, 25 bp, Artificial
  Probe
gcagttactgtcagaattggatgaa

SEQ ID NO: 11931 - DNA, 25 bp, Artificial
  Probe
aagcagttactgtcagaattggatg

SEQ ID NO: 11932 - DNA, 25 bp, Artificial
  Probe
ctcaggcagtttagtccatagtagt

SEQ ID NO: 11933 - DNA, 25 bp, Artificial
  Probe
gatggaggtgaatgacataaagaaa

SEQ ID NO: 11934 - DNA, 25 bp, Artificial
  Probe
ttcggattattcgtttataggcttt

SEQ ID NO: 11935 - DNA, 25 bp, Artificial
  Probe
tttcggattattcgtttataggctt

SEQ ID NO: 11936 - DNA, 25 bp, Artificial
  Probe
gagattaagcagttactgtcagaat

SEQ ID NO: 11937 - DNA, 25 bp, Artificial
  Probe
tggaggtgaatgacataaagaaagc

SEQ ID NO: 11938 - DNA, 25 bp, Artificial
  Probe
atggaggtgaatgacataaagaaag

SEQ ID NO: 11939 - DNA, 25 bp, Artificial
  Probe
ttcttagcacaacacaattctaccc

SEQ ID NO: 11940 - DNA, 25 bp, Artificial
  Probe
cgtgagattaagcagttactgtcag

SEQ ID NO: 11941 - DNA, 25 bp, Artificial
  Probe
atttcggattattcgtttataggct

SEQ ID NO: 11942 - DNA, 25 bp, Artificial
  Probe
caggcagtttagtccatagtagtac

SEQ ID NO: 11943 - DNA, 25 bp, Artificial
  Probe
ttagcacaacacaattctacccaag

SEQ ID NO: 11944 - DNA, 25 bp, Artificial
  Probe
cttagcacaacacaattctacccaa

SEQ ID NO: 11945 - DNA, 25 bp, Artificial
  Probe
actgtcagaattggatgaagagaaa

SEQ ID NO: 11946 - DNA, 25 bp, Artificial
  Probe
gattaagcagttactgtcagaattg

SEQ ID NO: 11947 - DNA, 25 bp, Artificial
  Probe
agattaagcagttactgtcagaatt

SEQ ID NO: 11948 - DNA, 25 bp, Artificial
  Probe
cacctattgcgtgaacagaatatgc

SEQ ID NO: 11949 - DNA, 25 bp, Artificial
  Probe
agcagttactgtcagaattggatga

SEQ ID NO: 11950 - DNA, 25 bp, Artificial
  Probe
gcagatggaggtgaatgacataaag

SEQ ID NO: 11951 - DNA, 25 bp, Artificial
  Probe
actcaggcagtttagtccatagtag

SEQ ID NO: 11952 - DNA, 25 bp, Artificial
  Probe
tcggattattcgtttataggcttta

SEQ ID NO: 11953 - DNA, 25 bp, Artificial
  Probe
atcatactacaccattacattgcca

SEQ ID NO: 11954 - DNA, 25 bp, Artificial
  Probe
atactacaccattacattgccagat

SEQ ID NO: 11955 - DNA, 25 bp, Artificial
  Probe
catactacaccattacattgccaga

SEQ ID NO: 11956 - DNA, 25 bp, Artificial
  Probe
tcatactacaccattacattgccag

SEQ ID NO: 11957 - DNA, 25 bp, Artificial
  Probe
tactacaccattacattgccagatg

SEQ ID NO: 11958 - DNA, 25 bp, Artificial
  Probe
tatcatactacaccattacattgcc

SEQ ID NO: 11959 - DNA, 25 bp, Artificial
  Probe
tggtacacagattcttcagatcatg

SEQ ID NO: 11960 - DNA, 25 bp, Artificial
  Probe
gtggtacacagattcttcagatcat

SEQ ID NO: 11961 - DNA, 25 bp, Artificial
  Probe
cctaaacctgtgaatacttgaaccc

SEQ ID NO: 11962 - DNA, 25 bp, Artificial
  Probe
ccctaaacctgtgaatacttgaacc

SEQ ID NO: 11963 - DNA, 25 bp, Artificial
  Probe
gtcttgattaagccaaatgtagcaa

SEQ ID NO: 11964 - DNA, 25 bp, Artificial
  Probe
aagtcttgattaagccaaatgtagc

SEQ ID NO: 11965 - DNA, 25 bp, Artificial
  Probe
agtcttgattaagccaaatgtagca

SEQ ID NO: 11966 - DNA, 25 bp, Artificial
  Probe
atatcatactacaccattacattgc

SEQ ID NO: 11967 - DNA, 25 bp, Artificial
  Probe
ttgattaagccaaatgtagcaaggg

SEQ ID NO: 11968 - DNA, 25 bp, Artificial
  Probe
gattaagccaaatgtagcaagggtg

SEQ ID NO: 11969 - DNA, 25 bp, Artificial
  Probe
aaagtcttgattaagccaaatgtag

SEQ ID NO: 11970 - DNA, 25 bp, Artificial
  Probe
tgattaagccaaatgtagcaagggt

SEQ ID NO: 11971 - DNA, 25 bp, Artificial
  Probe
ggtacacagattcttcagatcatga

SEQ ID NO: 11972 - DNA, 25 bp, Artificial
  Probe
cccatcctgagtgtagtggtaattt

SEQ ID NO: 11973 - DNA, 25 bp, Artificial
  Probe
gcttcccagaaagttagttttagtt

SEQ ID NO: 11974 - DNA, 25 bp, Artificial
  Probe
aggggtgagaaaagtcttgattaag

SEQ ID NO: 11975 - DNA, 25 bp, Artificial
  Probe
cataggggtgagaaaagtcttgatt

SEQ ID NO: 11976 - DNA, 25 bp, Artificial
  Probe
ctaaacctgtgaatacttgaacccc

SEQ ID NO: 11977 - DNA, 25 bp, Artificial
  Probe
cccctaaacctgtgaatacttgaac

SEQ ID NO: 11978 - DNA, 25 bp, Artificial
  Probe
gtgagaaaagtcttgattaagccaa

SEQ ID NO: 11979 - DNA, 25 bp, Artificial
  Probe
taggggtgagaaaagtcttgattaa

SEQ ID NO: 11980 - DNA, 25 bp, Artificial
  Probe
caagatcgcctccagcctatttaag

SEQ ID NO: 11981 - DNA, 25 bp, Artificial
  Probe
ataggggtgagaaaagtcttgatta

SEQ ID NO: 11982 - DNA, 25 bp, Artificial
  Probe
cgcttcccagaaagttagttttagt

SEQ ID NO: 11983 - DNA, 25 bp, Artificial
  Probe
aagatcgcctccagcctatttaaga

SEQ ID NO: 11984 - DNA, 25 bp, Artificial
  Probe
tgagaaaagtcttgattaagccaaa

SEQ ID NO: 11985 - DNA, 25 bp, Artificial
  Probe
ggtgagaaaagtcttgattaagcca

SEQ ID NO: 11986 - DNA, 25 bp, Artificial
  Probe
acataggggtgagaaaagtcttgat

SEQ ID NO: 11987 - DNA, 25 bp, Artificial
  Probe
taaacctgtgaatacttgaacccca

SEQ ID NO: 11988 - DNA, 25 bp, Artificial
  Probe
aacataggggtgagaaaagtcttga

SEQ ID NO: 11989 - DNA, 25 bp, Artificial
  Probe
gttttagttttatactcccctctgg

SEQ ID NO: 11990 - DNA, 25 bp, Artificial
  Probe
gaaaagtcttgattaagccaaatgt

SEQ ID NO: 11991 - DNA, 25 bp, Artificial
  Probe
caacataggggtgagaaaagtcttg

SEQ ID NO: 11992 - DNA, 25 bp, Artificial
  Probe
ccgcttcccagaaagttagttttag

SEQ ID NO: 11993 - DNA, 25 bp, Artificial
  Probe
agaaaagtcttgattaagccaaatg

SEQ ID NO: 11994 - DNA, 25 bp, Artificial
  Probe
gggtgagaaaagtcttgattaagcc

SEQ ID NO: 11995 - DNA, 25 bp, Artificial
  Probe
ggggtgagaaaagtcttgattaagc

SEQ ID NO: 11996 - DNA, 25 bp, Artificial
  Probe
acaacataggggtgagaaaagtctt

SEQ ID NO: 11997 - DNA, 25 bp, Artificial
  Probe
tacaccattacattgccagatggat

SEQ ID NO: 11998 - DNA, 25 bp, Artificial
  Probe
tgttgtttgtatctggacctgtata

SEQ ID NO: 11999 - DNA, 25 bp, Artificial
  Probe
gtgttgtttgtatctggacctgtat

SEQ ID NO: 12000 - DNA, 25 bp, Artificial
  Probe
atctggacctgtatatttgtaaagc

SEQ ID NO: 12001 - DNA, 25 bp, Artificial
  Probe
agtgttgtttgtatctggacctgta

SEQ ID NO: 12002 - DNA, 25 bp, Artificial
  Probe
ctatcagaaaggtttattccagagg

SEQ ID NO: 12003 - DNA, 25 bp, Artificial
  Probe
gagcaccaaatgagaatgtaagagg

SEQ ID NO: 12004 - DNA, 25 bp, Artificial
  Probe
ggagcaccaaatgagaatgtaagag

SEQ ID NO: 12005 - DNA, 25 bp, Artificial
  Probe
gttgtttgtatctggacctgtatat

SEQ ID NO: 12006 - DNA, 25 bp, Artificial
  Probe
aggagcaccaaatgagaatgtaaga

SEQ ID NO: 12007 - DNA, 25 bp, Artificial
  Probe
caggagcaccaaatgagaatgtaag

SEQ ID NO: 12008 - DNA, 25 bp, Artificial
  Probe
tttgtatctggacctgtatatttgt

SEQ ID NO: 12009 - DNA, 25 bp, Artificial
  Probe
tgtttgtatctggacctgtatattt

SEQ ID NO: 12010 - DNA, 25 bp, Artificial
  Probe
ttgtttgtatctggacctgtatatt

SEQ ID NO: 12011 - DNA, 25 bp, Artificial
  Probe
tctatcagaaaggtttattccagag

SEQ ID NO: 12012 - DNA, 25 bp, Artificial
  Probe
tctggacctgtatatttgtaaagct

SEQ ID NO: 12013 - DNA, 25 bp, Artificial
  Probe
gtttgtatctggacctgtatatttg

SEQ ID NO: 12014 - DNA, 25 bp, Artificial
  Probe
tatcagaaaggtttattccagagga

SEQ ID NO: 12015 - DNA, 25 bp, Artificial
  Probe
agcaccaaatgagaatgtaagaggg

SEQ ID NO: 12016 - DNA, 25 bp, Artificial
  Probe
tgtaaagctatttatcaaccctcgg

SEQ ID NO: 12017 - DNA, 25 bp, Artificial
  Probe
ttgtaaagctatttatcaaccctcg

SEQ ID NO: 12018 - DNA, 25 bp, Artificial
  Probe
cttcccatcctgtccctcaaattac

SEQ ID NO: 12019 - DNA, 25 bp, Artificial
  Probe
ccaggagcaccaaatgagaatgtaa

SEQ ID NO: 12020 - DNA, 25 bp, Artificial
  Probe
tgtatctggacctgtatatttgtaa

SEQ ID NO: 12021 - DNA, 25 bp, Artificial
  Probe
ttgtatctggacctgtatatttgta

SEQ ID NO: 12022 - DNA, 25 bp, Artificial
  Probe
ctggacctgtatatttgtaaagcta

SEQ ID NO: 12023 - DNA, 25 bp, Artificial
  Probe
gccataacttctatcagaaaggttt

SEQ ID NO: 12024 - DNA, 25 bp, Artificial
  Probe
tggacctgtatatttgtaaagctat

SEQ ID NO: 12025 - DNA, 25 bp, Artificial
  Probe
cagtgttgtttgtatctggacctgt

SEQ ID NO: 12026 - DNA, 25 bp, Artificial
  Probe
tttgtaaagctatttatcaaccctc

SEQ ID NO: 12027 - DNA, 25 bp, Artificial
  Probe
attgcagtgttgtttgtatctggac

SEQ ID NO: 12028 - DNA, 25 bp, Artificial
  Probe
cattgcagtgttgtttgtatctgga

SEQ ID NO: 12029 - DNA, 25 bp, Artificial
  Probe
gtatctggacctgtatatttgtaaa

SEQ ID NO: 12030 - DNA, 25 bp, Artificial
  Probe
acttctatcagaaaggtttattcca

SEQ ID NO: 12031 - DNA, 25 bp, Artificial
  Probe
cttatgtggcaagcctctctcctac

SEQ ID NO: 12032 - DNA, 25 bp, Artificial
  Probe
ggacctgtatatttgtaaagctatt

SEQ ID NO: 12033 - DNA, 25 bp, Artificial
  Probe
ttctatcagaaaggtttattccaga

SEQ ID NO: 12034 - DNA, 25 bp, Artificial
  Probe
gcaccaaatgagaatgtaagagggc

SEQ ID NO: 12035 - DNA, 25 bp, Artificial
  Probe
tatctggacctgtatatttgtaaag

SEQ ID NO: 12036 - DNA, 25 bp, Artificial
  Probe
tcttatgtggcaagcctctctccta

SEQ ID NO: 12037 - DNA, 25 bp, Artificial
  Probe
cttctatcagaaaggtttattccag

SEQ ID NO: 12038 - DNA, 25 bp, Artificial
  Probe
atttgtaaagctatttatcaaccct

SEQ ID NO: 12039 - DNA, 25 bp, Artificial
  Probe
ttcccatcctgtccctcaaattacg

SEQ ID NO: 12040 - DNA, 25 bp, Artificial
  Probe
gcttcccatcctgtccctcaaatta

SEQ ID NO: 12041 - DNA, 25 bp, Artificial
  Probe
tcagaaaggtttattccagaggaaa

SEQ ID NO: 12042 - DNA, 25 bp, Artificial
  Probe
atcagaaaggtttattccagaggaa

SEQ ID NO: 12043 - DNA, 25 bp, Artificial
  Probe
gacagacattcataggtcacgaatc

SEQ ID NO: 12044 - DNA, 25 bp, Artificial
  Probe
ataggtcacgaatcggacatcaatg

SEQ ID NO: 12045 - DNA, 25 bp, Artificial
  Probe
cataggtcacgaatcggacatcaat

SEQ ID NO: 12046 - DNA, 25 bp, Artificial
  Probe
attcataggtcacgaatcggacatc

SEQ ID NO: 12047 - DNA, 25 bp, Artificial
  Probe
cgacagacattcataggtcacgaat

SEQ ID NO: 12048 - DNA, 25 bp, Artificial
  Probe
ctatgacgacttcaactgcaacatc

SEQ ID NO: 12049 - DNA, 25 bp, Artificial
  Probe
cattcataggtcacgaatcggacat

SEQ ID NO: 12050 - DNA, 25 bp, Artificial
  Probe
acagacattcataggtcacgaatcg

SEQ ID NO: 12051 - DNA, 25 bp, Artificial
  Probe
tatgacgacttcaactgcaacatct

SEQ ID NO: 12052 - DNA, 25 bp, Artificial
  Probe
tcataggtcacgaatcggacatcaa

SEQ ID NO: 12053 - DNA, 25 bp, Artificial
  Probe
ttcataggtcacgaatcggacatca

SEQ ID NO: 12054 - DNA, 25 bp, Artificial
  Probe
gacattcataggtcacgaatcggac

SEQ ID NO: 12055 - DNA, 25 bp, Artificial
  Probe
agacattcataggtcacgaatcgga

SEQ ID NO: 12056 - DNA, 25 bp, Artificial
  Probe
cagacattcataggtcacgaatcgg

SEQ ID NO: 12057 - DNA, 25 bp, Artificial
  Probe
acattcataggtcacgaatcggaca

SEQ ID NO: 12058 - DNA, 25 bp, Artificial
  Probe
ccgacagacattcataggtcacgaa

SEQ ID NO: 12059 - DNA, 25 bp, Artificial
  Probe
atgacgacttcaactgcaacatctg

SEQ ID NO: 12060 - DNA, 25 bp, Artificial
  Probe
gctatgacgacttcaactgcaacat

SEQ ID NO: 12061 - DNA, 25 bp, Artificial
  Probe
cttcctggacgacaaccaaatcatc

SEQ ID NO: 12062 - DNA, 25 bp, Artificial
  Probe
taggtcacgaatcggacatcaatgc

SEQ ID NO: 12063 - DNA, 25 bp, Artificial
  Probe
gacaaccaaatcatcaccagctctg

SEQ ID NO: 12064 - DNA, 25 bp, Artificial
  Probe
tttcttccccaatggttatgccttc

SEQ ID NO: 12065 - DNA, 25 bp, Artificial
  Probe
atgtgccgacagacattcataggtc

SEQ ID NO: 12066 - DNA, 25 bp, Artificial
  Probe
ttcctggacgacaaccaaatcatca

SEQ ID NO: 12067 - DNA, 25 bp, Artificial
  Probe
tccatgtgccgacagacattcatag

SEQ ID NO: 12068 - DNA, 25 bp, Artificial
  Probe
catgtgccgacagacattcataggt

SEQ ID NO: 12069 - DNA, 25 bp, Artificial
  Probe
tgatcaggagctgctcatgtattcc

SEQ ID NO: 12070 - DNA, 25 bp, Artificial
  Probe
ttcttccccaatggttatgccttca

SEQ ID NO: 12071 - DNA, 25 bp, Artificial
  Probe
tcctggacgacaaccaaatcatcac

SEQ ID NO: 12072 - DNA, 25 bp, Artificial
  Probe
gatcaggagctgctcatgtattccc

SEQ ID NO: 12073 - DNA, 25 bp, Artificial
  Probe
tcttccccaatggttatgccttcac

SEQ ID NO: 12074 - DNA, 25 bp, Artificial
  Probe
gacttcaactgcaacatctgggatg

SEQ ID NO: 12075 - DNA, 25 bp, Artificial
  Probe
tcctctttgtgttcctgatgtattt

SEQ ID NO: 12076 - DNA, 25 bp, Artificial
  Probe
ttcctctttgtgttcctgatgtatt

SEQ ID NO: 12077 - DNA, 25 bp, Artificial
  Probe
gttcctctttgtgttcctgatgtat

SEQ ID NO: 12078 - DNA, 25 bp, Artificial
  Probe
aagatggatactgatgggtgacatt

SEQ ID NO: 12079 - DNA, 25 bp, Artificial
  Probe
ctttctaccgttcctctttgtgttc

SEQ ID NO: 12080 - DNA, 25 bp, Artificial
  Probe
gacaaagatgtgtgtgtttacagaa

SEQ ID NO: 12081 - DNA, 25 bp, Artificial
  Probe
acaaagatgtgtgtgtttacagaac

SEQ ID NO: 12082 - DNA, 25 bp, Artificial
  Probe
ttgacaaagatgtgtgtgtttacag

SEQ ID NO: 12083 - DNA, 25 bp, Artificial
  Probe
ctacaagggtactttggatggtatt

SEQ ID NO: 12084 - DNA, 25 bp, Artificial
  Probe
tacaagggtactttggatggtattt

SEQ ID NO: 12085 - DNA, 25 bp, Artificial
  Probe
caaagatgtgtgtgtttacagaacc

SEQ ID NO: 12086 - DNA, 25 bp, Artificial
  Probe
tgacaaagatgtgtgtgtttacaga

SEQ ID NO: 12087 - DNA, 25 bp, Artificial
  Probe
tctacaagggtactttggatggtat

SEQ ID NO: 12088 - DNA, 25 bp, Artificial
  Probe
agatggatactgatgggtgacattc

SEQ ID NO: 12089 - DNA, 25 bp, Artificial
  Probe
gaagatggatactgatgggtgacat

SEQ ID NO: 12090 - DNA, 25 bp, Artificial
  Probe
ttctgtgaagatggatactgatggg

SEQ ID NO: 12091 - DNA, 25 bp, Artificial
  Probe
aaagatgtgtgtgtttacagaacca

SEQ ID NO: 12092 - DNA, 25 bp, Artificial
  Probe
gaatgatgaatcagagggcaatagt

SEQ ID NO: 12093 - DNA, 25 bp, Artificial
  Probe
aatgatgaatcagagggcaatagtg

SEQ ID NO: 12094 - DNA, 25 bp, Artificial
  Probe
atggatactgatgggtgacattcaa

SEQ ID NO: 12095 - DNA, 25 bp, Artificial
  Probe
tttgacaaagatgtgtgtgtttaca

SEQ ID NO: 12096 - DNA, 25 bp, Artificial
  Probe
ctctacaagggtactttggatggta

SEQ ID NO: 12097 - DNA, 25 bp, Artificial
  Probe
aagatgtgtgtgtttacagaaccag

SEQ ID NO: 12098 - DNA, 25 bp, Artificial
  Probe
tggatactgatgggtgacattcaaa

SEQ ID NO: 12099 - DNA, 25 bp, Artificial
  Probe
gatggatactgatgggtgacattca

SEQ ID NO: 12100 - DNA, 25 bp, Artificial
  Probe
cttctgtgaagatggatactgatgg

SEQ ID NO: 12101 - DNA, 25 bp, Artificial
  Probe
cgaatgatgaatcagagggcaatag

SEQ ID NO: 12102 - DNA, 25 bp, Artificial
  Probe
tttgacctcagttctcattaaagta

SEQ ID NO: 12103 - DNA, 25 bp, Artificial
  Probe
gtgaagatggatactgatgggtgac

SEQ ID NO: 12104 - DNA, 25 bp, Artificial
  Probe
ctgtgaagatggatactgatgggtg

SEQ ID NO: 12105 - DNA, 25 bp, Artificial
  Probe
cgttcctctttgtgttcctgatgta

SEQ ID NO: 12106 - DNA, 25 bp, Artificial
  Probe
gagaagaagtttcgacattgagagt

SEQ ID NO: 12107 - DNA, 25 bp, Artificial
  Probe
tgagaagaagtttcgacattgagag

SEQ ID NO: 12108 - DNA, 25 bp, Artificial
  Probe
ctgagaagaagtttcgacattgaga

SEQ ID NO: 12109 - DNA, 25 bp, Artificial
  Probe
tgacctcagttctcattaaagtatt

SEQ ID NO: 12110 - DNA, 25 bp, Artificial
  Probe
ttgacctcagttctcattaaagtat

SEQ ID NO: 12111 - DNA, 25 bp, Artificial
  Probe
actgtagcttcaatgtagttggttt

SEQ ID NO: 12112 - DNA, 25 bp, Artificial
  Probe
agaagaagtttcgacattgagagtg

SEQ ID NO: 12113 - DNA, 25 bp, Artificial
  Probe
taactgtagcttcaatgtagttggt

SEQ ID NO: 12114 - DNA, 25 bp, Artificial
  Probe
aactgtagcttcaatgtagttggtt

SEQ ID NO: 12115 - DNA, 25 bp, Artificial
  Probe
tgaagatggatactgatgggtgaca

SEQ ID NO: 12116 - DNA, 25 bp, Artificial
  Probe
tgtgaagatggatactgatgggtga

SEQ ID NO: 12117 - DNA, 25 bp, Artificial
  Probe
tttctaccgttcctctttgtgttcc

SEQ ID NO: 12118 - DNA, 25 bp, Artificial
  Probe
cctttctaccgttcctctttgtgtt

SEQ ID NO: 12119 - DNA, 25 bp, Artificial
  Probe
tctgtgaagatggatactgatgggt

SEQ ID NO: 12120 - DNA, 25 bp, Artificial
  Probe
ccatgtatcagtcctcagagatgaa

SEQ ID NO: 12121 - DNA, 25 bp, Artificial
  Probe
ctcatgtaggatgtgatctggagat

SEQ ID NO: 12122 - DNA, 25 bp, Artificial
  Probe
tcatgtaggatgtgatctggagatg

SEQ ID NO: 12123 - DNA, 25 bp, Artificial
  Probe
gctttgaaataaacttgtgaaaccc

SEQ ID NO: 12124 - DNA, 25 bp, Artificial
  Probe
tgctttgaaataaacttgtgaaacc

SEQ ID NO: 12125 - DNA, 25 bp, Artificial
  Probe
catgtaggatgtgatctggagatgg

SEQ ID NO: 12126 - DNA, 25 bp, Artificial
  Probe
ctttgaaataaacttgtgaaaccca

SEQ ID NO: 12127 - DNA, 25 bp, Artificial
  Probe
ccgtaattctcaaggatttgtcatt

SEQ ID NO: 12128 - DNA, 25 bp, Artificial
  Probe
atgtatcagtcctcagagatgaaag

SEQ ID NO: 12129 - DNA, 25 bp, Artificial
  Probe
cccgtaattctcaaggatttgtcat

SEQ ID NO: 12130 - DNA, 25 bp, Artificial
  Probe
cgtaattctcaaggatttgtcattg

SEQ ID NO: 12131 - DNA, 25 bp, Artificial
  Probe
ttgaaataaacttgtgaaacccaaa

SEQ ID NO: 12132 - DNA, 25 bp, Artificial
  Probe
tttgaaataaacttgtgaaacccaa

SEQ ID NO: 12133 - DNA, 25 bp, Artificial
  Probe
tgcctatatggtagagcaataatgc

SEQ ID NO: 12134 - DNA, 25 bp, Artificial
  Probe
catgtatcagtcctcagagatgaaa

SEQ ID NO: 12135 - DNA, 25 bp, Artificial
  Probe
atgctttgaaataaacttgtgaaac

SEQ ID NO: 12136 - DNA, 25 bp, Artificial
  Probe
tgtatcagtcctcagagatgaaagg

SEQ ID NO: 12137 - DNA, 25 bp, Artificial
  Probe
cctcatgtaggatgtgatctggaga

SEQ ID NO: 12138 - DNA, 25 bp, Artificial
  Probe
attgatgtttaatggctttgcagaa

SEQ ID NO: 12139 - DNA, 25 bp, Artificial
  Probe
tctgttaggacaagaacatgattgt

SEQ ID NO: 12140 - DNA, 25 bp, Artificial
  Probe
ctgttaggacaagaacatgattgtt

SEQ ID NO: 12141 - DNA, 25 bp, Artificial
  Probe
caacagtttccgtatgcgacaaatt

SEQ ID NO: 12142 - DNA, 25 bp, Artificial
  Probe
atctgttaggacaagaacatgattg

SEQ ID NO: 12143 - DNA, 25 bp, Artificial
  Probe
gtatcagtcctcagagatgaaaggg

SEQ ID NO: 12144 - DNA, 25 bp, Artificial
  Probe
ttgatgtttaatggctttgcagaag

SEQ ID NO: 12145 - DNA, 25 bp, Artificial
  Probe
ggatttgtcattgatgtttaatggc

SEQ ID NO: 12146 - DNA, 25 bp, Artificial
  Probe
aatgctttgaaataaacttgtgaaa

SEQ ID NO: 12147 - DNA, 25 bp, Artificial
  Probe
ttgtcattgatgtttaatggctttg

SEQ ID NO: 12148 - DNA, 25 bp, Artificial
  Probe
tatcagtcctcagagatgaaagggt

SEQ ID NO: 12149 - DNA, 25 bp, Artificial
  Probe
gaccattgggacataaggagtcatt

SEQ ID NO: 12150 - DNA, 25 bp, Artificial
  Probe
tgtcattgatgtttaatggctttgc

SEQ ID NO: 12151 - DNA, 25 bp, Artificial
  Probe
gatgtgatctggagatgggatgttc

SEQ ID NO: 12152 - DNA, 25 bp, Artificial
  Probe
aatctgttaggacaagaacatgatt

SEQ ID NO: 12153 - DNA, 25 bp, Artificial
  Probe
ctaatctgttaggacaagaacatga

SEQ ID NO: 12154 - DNA, 25 bp, Artificial
  Probe
cagtgcaatgatgtcatcaagaatg

SEQ ID NO: 12155 - DNA, 25 bp, Artificial
  Probe
gatttgtcattgatgtttaatggct

SEQ ID NO: 12156 - DNA, 25 bp, Artificial
  Probe
ccattgggacataaggagtcattgt

SEQ ID NO: 12157 - DNA, 25 bp, Artificial
  Probe
accattgggacataaggagtcattg

SEQ ID NO: 12158 - DNA, 25 bp, Artificial
  Probe
taggatgtgatctggagatgggatg

SEQ ID NO: 12159 - DNA, 25 bp, Artificial
  Probe
gtaggatgtgatctggagatgggat

SEQ ID NO: 12160 - DNA, 25 bp, Artificial
  Probe
tttgtcattgatgtttaatggcttt

SEQ ID NO: 12161 - DNA, 25 bp, Artificial
  Probe
gtcaccctttgcctatatggtagag

SEQ ID NO: 12162 - DNA, 25 bp, Artificial
  Probe
atttgtcattgatgtttaatggctt

SEQ ID NO: 12163 - DNA, 25 bp, Artificial
  Probe
cataccccgtaattctcaaggattt

SEQ ID NO: 12164 - DNA, 25 bp, Artificial
  Probe
atgtaggatgtgatctggagatggg

SEQ ID NO: 12165 - DNA, 25 bp, Artificial
  Probe
taatgagcattctattcttggtcca

SEQ ID NO: 12166 - DNA, 25 bp, Artificial
  Probe
gtaatgagcattctattcttggtcc

SEQ ID NO: 12167 - DNA, 25 bp, Artificial
  Probe
aatgagcattctattcttggtccag

SEQ ID NO: 12168 - DNA, 25 bp, Artificial
  Probe
tgtaatgagcattctattcttggtc

SEQ ID NO: 12169 - DNA, 25 bp, Artificial
  Probe
agtgctaataagatgaccaagaatt

SEQ ID NO: 12170 - DNA, 25 bp, Artificial
  Probe
tgctaataagatgaccaagaattga

SEQ ID NO: 12171 - DNA, 25 bp, Artificial
  Probe
gtgctaataagatgaccaagaattg

SEQ ID NO: 12172 - DNA, 25 bp, Artificial
  Probe
atgtaatgagcattctattcttggt

SEQ ID NO: 12173 - DNA, 25 bp, Artificial
  Probe
ttagtgctaataagatgaccaagaa

SEQ ID NO: 12174 - DNA, 25 bp, Artificial
  Probe
tagtgctaataagatgaccaagaat

SEQ ID NO: 12175 - DNA, 25 bp, Artificial
  Probe
atgagcattctattcttggtccagg

SEQ ID NO: 12176 - DNA, 25 bp, Artificial
  Probe
ggctacagaagataggtcagatcac

SEQ ID NO: 12177 - DNA, 25 bp, Artificial
  Probe
gagcattctattcttggtccaggaa

SEQ ID NO: 12178 - DNA, 25 bp, Artificial
  Probe
tggctacagaagataggtcagatca

SEQ ID NO: 12179 - DNA, 25 bp, Artificial
  Probe
acattagtgctaataagatgaccaa

SEQ ID NO: 12180 - DNA, 25 bp, Artificial
  Probe
aacattagtgctaataagatgacca

SEQ ID NO: 12181 - DNA, 25 bp, Artificial
  Probe
cgaatgagagtggagaacaaattag

SEQ ID NO: 12182 - DNA, 25 bp, Artificial
  Probe
acgaatgagagtggagaacaaatta

SEQ ID NO: 12183 - DNA, 25 bp, Artificial
  Probe
gagagtggagaacaaattagtatgc

SEQ ID NO: 12184 - DNA, 25 bp, Artificial
  Probe
ctggctacagaagataggtcagatc

SEQ ID NO: 12185 - DNA, 25 bp, Artificial
  Probe
cattagtgctaataagatgaccaag

SEQ ID NO: 12186 - DNA, 25 bp, Artificial
  Probe
gaatgagagtggagaacaaattagt

SEQ ID NO: 12187 - DNA, 25 bp, Artificial
  Probe
cattctattcttggtccaggaaagt

SEQ ID NO: 12188 - DNA, 25 bp, Artificial
  Probe
tctattcttggtccaggaaagtaaa

SEQ ID NO: 12189 - DNA, 25 bp, Artificial
  Probe
ttctattcttggtccaggaaagtaa

SEQ ID NO: 12190 - DNA, 25 bp, Artificial
  Probe
attagtgctaataagatgaccaaga

SEQ ID NO: 12191 - DNA, 25 bp, Artificial
  Probe
attcttggtccaggaaagtaaattc

SEQ ID NO: 12192 - DNA, 25 bp, Artificial
  Probe
attctattcttggtccaggaaagta

SEQ ID NO: 12193 - DNA, 25 bp, Artificial
  Probe
tgagagtggagaacaaattagtatg

SEQ ID NO: 12194 - DNA, 25 bp, Artificial
  Probe
tgagcattctattcttggtccagga

SEQ ID NO: 12195 - DNA, 25 bp, Artificial
  Probe
gctacagaagataggtcagatcacc

SEQ ID NO: 12196 - DNA, 25 bp, Artificial
  Probe
ctattcttggtccaggaaagtaaat

SEQ ID NO: 12197 - DNA, 25 bp, Artificial
  Probe
ctgttgatggcattaaagggatagc

SEQ ID NO: 12198 - DNA, 25 bp, Artificial
  Probe
gctgttgatggcattaaagggatag

SEQ ID NO: 12199 - DNA, 25 bp, Artificial
  Probe
gcattctattcttggtccaggaaag

SEQ ID NO: 12200 - DNA, 25 bp, Artificial
  Probe
tatgtaatgagcattctattcttgg

SEQ ID NO: 12201 - DNA, 25 bp, Artificial
  Probe
aattagtatgcagaagagttcatct

SEQ ID NO: 12202 - DNA, 25 bp, Artificial
  Probe
tattcttggtccaggaaagtaaatt

SEQ ID NO: 12203 - DNA, 25 bp, Artificial
  Probe
agcattctattcttggtccaggaaa

SEQ ID NO: 12204 - DNA, 25 bp, Artificial
  Probe
cctgattcaaacagacacagtcaat

SEQ ID NO: 12205 - DNA, 25 bp, Artificial
  Probe
aatgagagtggagaacaaattagta

SEQ ID NO: 12206 - DNA, 25 bp, Artificial
  Probe
atgagagtggagaacaaattagtat

SEQ ID NO: 12207 - DNA, 25 bp, Artificial
  Probe
ctgattcaaacagacacagtcaatc

SEQ ID NO: 12208 - DNA, 25 bp, Artificial
  Probe
tgattcaaacagacacagtcaatct

SEQ ID NO: 12209 - DNA, 25 bp, Artificial
  Probe
cacgaatgagagtggagaacaaatt

SEQ ID NO: 12210 - DNA, 25 bp, Artificial
  Probe
attattactgtcagcctggagaatg

SEQ ID NO: 12211 - DNA, 25 bp, Artificial
  Probe
cattattactgtcagcctggagaat

SEQ ID NO: 12212 - DNA, 25 bp, Artificial
  Probe
ctggagaatggaagaggctaactaa

SEQ ID NO: 12213 - DNA, 25 bp, Artificial
  Probe
ttattactgtcagcctggagaatgg

SEQ ID NO: 12214 - DNA, 25 bp, Artificial
  Probe
acattattactgtcagcctggagaa

SEQ ID NO: 12215 - DNA, 25 bp, Artificial
  Probe
gaagaggctaactaaatggagatga

SEQ ID NO: 12216 - DNA, 25 bp, Artificial
  Probe
ggagaatggaagaggctaactaaat

SEQ ID NO: 12217 - DNA, 25 bp, Artificial
  Probe
aatggaagaggctaactaaatggag

SEQ ID NO: 12218 - DNA, 25 bp, Artificial
  Probe
gaatggaagaggctaactaaatgga

SEQ ID NO: 12219 - DNA, 25 bp, Artificial
  Probe
agaatggaagaggctaactaaatgg

SEQ ID NO: 12220 - DNA, 25 bp, Artificial
  Probe
cacattattactgtcagcctggaga

SEQ ID NO: 12221 - DNA, 25 bp, Artificial
  Probe
tattactgtcagcctggagaatgga

SEQ ID NO: 12222 - DNA, 25 bp, Artificial
  Probe
ggaagaggctaactaaatggagatg

SEQ ID NO: 12223 - DNA, 25 bp, Artificial
  Probe
caaagcagaatggtcatagtgttaa

SEQ ID NO: 12224 - DNA, 25 bp, Artificial
  Probe
ttaacaaagcagaatggtcatagtg

SEQ ID NO: 12225 - DNA, 25 bp, Artificial
  Probe
aagatgaaagcgacccaagattatt

SEQ ID NO: 12226 - DNA, 25 bp, Artificial
  Probe
aaagatgaaagcgacccaagattat

SEQ ID NO: 12227 - DNA, 25 bp, Artificial
  Probe
aagaggctaactaaatggagatgat

SEQ ID NO: 12228 - DNA, 25 bp, Artificial
  Probe
gagaatggaagaggctaactaaatg

SEQ ID NO: 12229 - DNA, 25 bp, Artificial
  Probe
tggaagaggctaactaaatggagat

SEQ ID NO: 12230 - DNA, 25 bp, Artificial
  Probe
atggaagaggctaactaaatggaga

SEQ ID NO: 12231 - DNA, 25 bp, Artificial
  Probe
atttctgctttcatctatgtatgcg

SEQ ID NO: 12232 - DNA, 25 bp, Artificial
  Probe
tggagaatggaagaggctaactaaa

SEQ ID NO: 12233 - DNA, 25 bp, Artificial
  Probe
gctttcatctatgtatgcggagtat

SEQ ID NO: 12234 - DNA, 25 bp, Artificial
  Probe
ctttcatctatgtatgcggagtatg

SEQ ID NO: 12235 - DNA, 25 bp, Artificial
  Probe
aaagcagaatggtcatagtgttaaa

SEQ ID NO: 12236 - DNA, 25 bp, Artificial
  Probe
tttaacaaagcagaatggtcatagt

SEQ ID NO: 12237 - DNA, 25 bp, Artificial
  Probe
agaggctaactaaatggagatgata

SEQ ID NO: 12238 - DNA, 25 bp, Artificial
  Probe
agatgaaagcgacccaagattattc

SEQ ID NO: 12239 - DNA, 25 bp, Artificial
  Probe
caaagatgaaagcgacccaagatta

SEQ ID NO: 12240 - DNA, 25 bp, Artificial
  Probe
tttctgctttcatctatgtatgcgg

SEQ ID NO: 12241 - DNA, 25 bp, Artificial
  Probe
ataacaaagatgaaagcgacccaag

SEQ ID NO: 12242 - DNA, 25 bp, Artificial
  Probe
ttcatctatgtatgcggagtatgac

SEQ ID NO: 12243 - DNA, 25 bp, Artificial
  Probe
gatttctgctttcatctatgtatgc

SEQ ID NO: 12244 - DNA, 25 bp, Artificial
  Probe
atgaaagcacattattactgtcagc

SEQ ID NO: 12245 - DNA, 25 bp, Artificial
  Probe
acaaagcagaatggtcatagtgtta

SEQ ID NO: 12246 - DNA, 25 bp, Artificial
  Probe
taacaaagcagaatggtcatagtgt

SEQ ID NO: 12247 - DNA, 25 bp, Artificial
  Probe
tgctttcatctatgtatgcggagta

SEQ ID NO: 12248 - DNA, 25 bp, Artificial
  Probe
tcatctatgtatgcggagtatgact

SEQ ID NO: 12249 - DNA, 25 bp, Artificial
  Probe
gaggctaactaaatggagatgataa

SEQ ID NO: 12250 - DNA, 25 bp, Artificial
  Probe
attactgtcagcctggagaatggaa

SEQ ID NO: 12251 - DNA, 25 bp, Artificial
  Probe
aagcacattattactgtcagcctgg

SEQ ID NO: 12252 - DNA, 25 bp, Artificial
  Probe
cataacaaagatgaaagcgacccaa

SEQ ID NO: 12253 - DNA, 25 bp, Artificial
  Probe
ttctgctttcatctatgtatgcgga

SEQ ID NO: 12254 - DNA, 25 bp, Artificial
  Probe
gaaagcacattattactgtcagcct

SEQ ID NO: 12255 - DNA, 25 bp, Artificial
  Probe
ctagtgagatgagccgaattatgcg

SEQ ID NO: 12256 - DNA, 25 bp, Artificial
  Probe
tagtgagatgagccgaattatgcgt

SEQ ID NO: 12257 - DNA, 25 bp, Artificial
  Probe
ttataaacaaaggctccttggtcca

SEQ ID NO: 12258 - DNA, 25 bp, Artificial
  Probe
tataaacaaaggctccttggtccaa

SEQ ID NO: 12259 - DNA, 25 bp, Artificial
  Probe
aaataaagggtcttgatggggaaaa

SEQ ID NO: 12260 - DNA, 25 bp, Artificial
  Probe
ataaacaaaggctccttggtccaaa

SEQ ID NO: 12261 - DNA, 25 bp, Artificial
  Probe
tttataaacaaaggctccttggtcc

SEQ ID NO: 12262 - DNA, 25 bp, Artificial
  Probe
ctttataaacaaaggctccttggtc

SEQ ID NO: 12263 - DNA, 25 bp, Artificial
  Probe
tcacatttagtgctgctgctttcac

SEQ ID NO: 12264 - DNA, 25 bp, Artificial
  Probe
gtcacatttagtgctgctgctttca

SEQ ID NO: 12265 - DNA, 25 bp, Artificial
  Probe
taaacaaaggctccttggtccaaaa

SEQ ID NO: 12266 - DNA, 25 bp, Artificial
  Probe
ggtcacatttagtgctgctgctttc

SEQ ID NO: 12267 - DNA, 25 bp, Artificial
  Probe
aaatccctcccttgtgtctcaagtg

SEQ ID NO: 12268 - DNA, 25 bp, Artificial
  Probe
caaatccctcccttgtgtctcaagt

SEQ ID NO: 12269 - DNA, 25 bp, Artificial
  Probe
gattataaaacctcattttccagaa

SEQ ID NO: 12270 - DNA, 25 bp, Artificial
  Probe
acatttagtgctgctgctttcactg

SEQ ID NO: 12271 - DNA, 25 bp, Artificial
  Probe
cacatttagtgctgctgctttcact

SEQ ID NO: 12272 - DNA, 25 bp, Artificial
  Probe
ccaaatccctcccttgtgtctcaag

SEQ ID NO: 12273 - DNA, 25 bp, Artificial
  Probe
cttcattctcgatgtcctgctgaac

SEQ ID NO: 12274 - DNA, 25 bp, Artificial
  Probe
ttcattctcgatgtcctgctgaacc

SEQ ID NO: 12275 - DNA, 25 bp, Artificial
  Probe
tggagattaagtagagaaagaaggg

SEQ ID NO: 12276 - DNA, 25 bp, Artificial
  Probe
ggagattaagtagagaaagaaggga

SEQ ID NO: 12277 - DNA, 25 bp, Artificial
  Probe
gattaagtagagaaagaagggaagc

SEQ ID NO: 12278 - DNA, 25 bp, Artificial
  Probe
aactccttggagattaagtagagaa

SEQ ID NO: 12279 - DNA, 25 bp, Artificial
  Probe
gaccgtccatctttcttcttatgaa

SEQ ID NO: 12280 - DNA, 25 bp, Artificial
  Probe
tgtaactccttggagattaagtaga

SEQ ID NO: 12281 - DNA, 25 bp, Artificial
  Probe
acagcatattattcacttggaaaga

SEQ ID NO: 12282 - DNA, 25 bp, Artificial
  Probe
agaccgtccatctttcttcttatga

SEQ ID NO: 12283 - DNA, 25 bp, Artificial
  Probe
cagaccgtccatctttcttcttatg

SEQ ID NO: 12284 - DNA, 25 bp, Artificial
  Probe
acagaccgtccatctttcttcttat

SEQ ID NO: 12285 - DNA, 25 bp, Artificial
  Probe
taactccttggagattaagtagaga

SEQ ID NO: 12286 - DNA, 25 bp, Artificial
  Probe
gtaactccttggagattaagtagag

SEQ ID NO: 12287 - DNA, 25 bp, Artificial
  Probe
aacagaccgtccatctttcttctta

SEQ ID NO: 12288 - DNA, 25 bp, Artificial
  Probe
tccttggagattaagtagagaaaga

SEQ ID NO: 12289 - DNA, 25 bp, Artificial
  Probe
ttgtaactccttggagattaagtag

SEQ ID NO: 12290 - DNA, 25 bp, Artificial
  Probe
aattgtaactccttggagattaagt

SEQ ID NO: 12291 - DNA, 25 bp, Artificial
  Probe
acctaacgactttgtagtttatacc

SEQ ID NO: 12292 - DNA, 25 bp, Artificial
  Probe
gtacagagtcattgccattaccgag

SEQ ID NO: 12293 - DNA, 25 bp, Artificial
  Probe
aacagcatattattcacttggaaag

SEQ ID NO: 12294 - DNA, 25 bp, Artificial
  Probe
ttggagattaagtagagaaagaagg

SEQ ID NO: 12295 - DNA, 25 bp, Artificial
  Probe
tcttatgaaattgtaactccttgga

SEQ ID NO: 12296 - DNA, 25 bp, Artificial
  Probe
cctaacgactttgtagtttatacct

SEQ ID NO: 12297 - DNA, 25 bp, Artificial
  Probe
caacgtacagagtcattgccattac

SEQ ID NO: 12298 - DNA, 25 bp, Artificial
  Probe
ccttggagattaagtagagaaagaa

SEQ ID NO: 12299 - DNA, 25 bp, Artificial
  Probe
cagcatattattcacttggaaagaa

SEQ ID NO: 12300 - DNA, 25 bp, Artificial
  Probe
agattaagtagagaaagaagggaag

SEQ ID NO: 12301 - DNA, 25 bp, Artificial
  Probe
gagattaagtagagaaagaagggaa

SEQ ID NO: 12302 - DNA, 25 bp, Artificial
  Probe
attaagtagagaaagaagggaagct

SEQ ID NO: 12303 - DNA, 25 bp, Artificial
  Probe
aaacagcatattattcacttggaaa

SEQ ID NO: 12304 - DNA, 25 bp, Artificial
  Probe
ttaagtagagaaagaagggaagctc

SEQ ID NO: 12305 - DNA, 25 bp, Artificial
  Probe
attgtaactccttggagattaagta

SEQ ID NO: 12306 - DNA, 25 bp, Artificial
  Probe
ttcttatgaaattgtaactccttgg

SEQ ID NO: 12307 - DNA, 25 bp, Artificial
  Probe
accgtccatctttcttcttatgaaa

SEQ ID NO: 12308 - DNA, 25 bp, Artificial
  Probe
tacagagtcattgccattaccgagg

SEQ ID NO: 12309 - DNA, 25 bp, Artificial
  Probe
gaacagaccgtccatctttcttctt

SEQ ID NO: 12310 - DNA, 25 bp, Artificial
  Probe
gcatattattcacttggaaagaaac

SEQ ID NO: 12311 - DNA, 25 bp, Artificial
  Probe
aacgtacagagtcattgccattacc

SEQ ID NO: 12312 - DNA, 25 bp, Artificial
  Probe
actccttggagattaagtagagaaa

SEQ ID NO: 12313 - DNA, 25 bp, Artificial
  Probe
ccgtccatctttcttcttatgaaat

SEQ ID NO: 12314 - DNA, 25 bp, Artificial
  Probe
agcatattattcacttggaaagaaa

SEQ ID NO: 12315 - DNA, 25 bp, Artificial
  Probe
atgaaattgtaactccttggagatt

SEQ ID NO: 12316 - DNA, 25 bp, Artificial
  Probe
ccaacgtacagagtcattgccatta

SEQ ID NO: 12317 - DNA, 25 bp, Artificial
  Probe
ctccttggagattaagtagagaaag

SEQ ID NO: 12318 - DNA, 25 bp, Artificial
  Probe
agaccttttacctaacgactttgta

SEQ ID NO: 12319 - DNA, 25 bp, Artificial
  Probe
gaccttttacctaacgactttgtag

SEQ ID NO: 12320 - DNA, 25 bp, Artificial
  Probe
attctctgagacttcacacttatcc

SEQ ID NO: 12321 - DNA, 25 bp, Artificial
  Probe
ggattctctgagacttcacacttat

SEQ ID NO: 12322 - DNA, 25 bp, Artificial
  Probe
gattctctgagacttcacacttatc

SEQ ID NO: 12323 - DNA, 25 bp, Artificial
  Probe
cggattctctgagacttcacactta

SEQ ID NO: 12324 - DNA, 25 bp, Artificial
  Probe
gagtacggattctctgagacttcac

SEQ ID NO: 12325 - DNA, 25 bp, Artificial
  Probe
gtacggattctctgagacttcacac

SEQ ID NO: 12326 - DNA, 25 bp, Artificial
  Probe
tacggattctctgagacttcacact

SEQ ID NO: 12327 - DNA, 25 bp, Artificial
  Probe
agtacggattctctgagacttcaca

SEQ ID NO: 12328 - DNA, 25 bp, Artificial
  Probe
cttgtctgagacctaccatgctaac

SEQ ID NO: 12329 - DNA, 25 bp, Artificial
  Probe
tcttgtctgagacctaccatgctaa

SEQ ID NO: 12330 - DNA, 25 bp, Artificial
  Probe
ttctctgagacttcacacttatccc

SEQ ID NO: 12331 - DNA, 25 bp, Artificial
  Probe
ttgtctgagacctaccatgctaact

SEQ ID NO: 12332 - DNA, 25 bp, Artificial
  Probe
tagagtacggattctctgagacttc

SEQ ID NO: 12333 - DNA, 25 bp, Artificial
  Probe
gtagagtacggattctctgagactt

SEQ ID NO: 12334 - DNA, 25 bp, Artificial
  Probe
acggattctctgagacttcacactt

SEQ ID NO: 12335 - DNA, 25 bp, Artificial
  Probe
tgtctgagacctaccatgctaactc

SEQ ID NO: 12336 - DNA, 25 bp, Artificial
  Probe
ctgagacctaccatgctaactcctc

SEQ ID NO: 12337 - DNA, 25 bp, Artificial
  Probe
agagtacggattctctgagacttca

SEQ ID NO: 12338 - DNA, 25 bp, Artificial
  Probe
tctgagacctaccatgctaactcct

SEQ ID NO: 12339 - DNA, 25 bp, Artificial
  Probe
ggtagagtacggattctctgagact

SEQ ID NO: 12340 - DNA, 25 bp, Artificial
  Probe
gtctgagacctaccatgctaactcc

SEQ ID NO: 12341 - DNA, 25 bp, Artificial
  Probe
cttaggcaacaccactgtcttgtct

SEQ ID NO: 12342 - DNA, 25 bp, Artificial
  Probe
gagaaaggaccagagggtagagtac

SEQ ID NO: 12343 - DNA, 25 bp, Artificial
  Probe
tgagaaaggaccagagggtagagta

SEQ ID NO: 12344 - DNA, 25 bp, Artificial
  Probe
ttaggcaacaccactgtcttgtctg

SEQ ID NO: 12345 - DNA, 25 bp, Artificial
  Probe
tgagacctaccatgctaactcctcc

SEQ ID NO: 12346 - DNA, 25 bp, Artificial
  Probe
gtcttgtctgagacctaccatgcta

SEQ ID NO: 12347 - DNA, 25 bp, Artificial
  Probe
actgtcttgtctgagacctaccatg

SEQ ID NO: 12348 - DNA, 25 bp, Artificial
  Probe
cactgtcttgtctgagacctaccat

SEQ ID NO: 12349 - DNA, 25 bp, Artificial
  Probe
aactgagaaaggaccagagggtaga

SEQ ID NO: 12350 - DNA, 25 bp, Artificial
  Probe
caactgagaaaggaccagagggtag

SEQ ID NO: 12351 - DNA, 25 bp, Artificial
  Probe
gagggtagagtacggattctctgag

SEQ ID NO: 12352 - DNA, 25 bp, Artificial
  Probe
tctctgagacttcacacttatcccc

SEQ ID NO: 12353 - DNA, 25 bp, Artificial
  Probe
agagggtagagtacggattctctga

SEQ ID NO: 12354 - DNA, 25 bp, Artificial
  Probe
gggtagagtacggattctctgagac

SEQ ID NO: 12355 - DNA, 25 bp, Artificial
  Probe
agggtagagtacggattctctgaga

SEQ ID NO: 12356 - DNA, 25 bp, Artificial
  Probe
ctgagaaaggaccagagggtagagt

SEQ ID NO: 12357 - DNA, 25 bp, Artificial
  Probe
actgagaaaggaccagagggtagag

SEQ ID NO: 12358 - DNA, 25 bp, Artificial
  Probe
accagagggtagagtacggattctc

SEQ ID NO: 12359 - DNA, 25 bp, Artificial
  Probe
gaccagagggtagagtacggattct

SEQ ID NO: 12360 - DNA, 25 bp, Artificial
  Probe
agaaaggaccagagggtagagtacg

SEQ ID NO: 12361 - DNA, 25 bp, Artificial
  Probe
caccactgtcttgtctgagacctac

SEQ ID NO: 12362 - DNA, 25 bp, Artificial
  Probe
ctctgagacttcacacttatccccg

SEQ ID NO: 12363 - DNA, 25 bp, Artificial
  Probe
ctgtcttgtctgagacctaccatgc

SEQ ID NO: 12364 - DNA, 25 bp, Artificial
  Probe
acaccactgtcttgtctgagaccta

SEQ ID NO: 12365 - DNA, 25 bp, Artificial
  Probe
ttaattcagttccaagctaagaggc

SEQ ID NO: 12366 - DNA, 25 bp, Artificial
  Probe
atgaacacagtctgcaatgatctaa

SEQ ID NO: 12367 - DNA, 25 bp, Artificial
  Probe
aatgaacacagtctgcaatgatcta

SEQ ID NO: 12368 - DNA, 25 bp, Artificial
  Probe
aaactggaatcatacaaacccttag

SEQ ID NO: 12369 - DNA, 25 bp, Artificial
  Probe
aactggaatcatacaaacccttagg

SEQ ID NO: 12370 - DNA, 25 bp, Artificial
  Probe
cttaattcagttccaagctaagagg

SEQ ID NO: 12371 - DNA, 25 bp, Artificial
  Probe
gaatgaacacagtctgcaatgatct

SEQ ID NO: 12372 - DNA, 25 bp, Artificial
  Probe
ctgctcatatttagggcttgaatct

SEQ ID NO: 12373 - DNA, 25 bp, Artificial
  Probe
gctcatatttagggcttgaatctgt

SEQ ID NO: 12374 - DNA, 25 bp, Artificial
  Probe
tgctcatatttagggcttgaatctg

SEQ ID NO: 12375 - DNA, 25 bp, Artificial
  Probe
ctcatatttagggcttgaatctgta

SEQ ID NO: 12376 - DNA, 25 bp, Artificial
  Probe
ggaatgaacacagtctgcaatgatc

SEQ ID NO: 12377 - DNA, 25 bp, Artificial
  Probe
taattcagttccaagctaagaggcg

SEQ ID NO: 12378 - DNA, 25 bp, Artificial
  Probe
gctgctcatatttagggcttgaatc

SEQ ID NO: 12379 - DNA, 25 bp, Artificial
  Probe
aatcatacaaacccttaggtccttc

SEQ ID NO: 12380 - DNA, 25 bp, Artificial
  Probe
gaatcatacaaacccttaggtcctt

SEQ ID NO: 12381 - DNA, 25 bp, Artificial
  Probe
catacaaacccttaggtccttcatc

SEQ ID NO: 12382 - DNA, 25 bp, Artificial
  Probe
ctggaatcatacaaacccttaggtc

SEQ ID NO: 12383 - DNA, 25 bp, Artificial
  Probe
tcatacaaacccttaggtccttcat

SEQ ID NO: 12384 - DNA, 25 bp, Artificial
  Probe
atcatacaaacccttaggtccttca

SEQ ID NO: 12385 - DNA, 25 bp, Artificial
  Probe
tgaacacagtctgcaatgatctaaa

SEQ ID NO: 12386 - DNA, 25 bp, Artificial
  Probe
gttccaagctaagaggcgatttaaa

SEQ ID NO: 12387 - DNA, 25 bp, Artificial
  Probe
actggaatcatacaaacccttaggt

SEQ ID NO: 12388 - DNA, 25 bp, Artificial
  Probe
atacaaacccttaggtccttcatcc

SEQ ID NO: 12389 - DNA, 25 bp, Artificial
  Probe
ggaatcatacaaacccttaggtcct

SEQ ID NO: 12390 - DNA, 25 bp, Artificial
  Probe
agttccaagctaagaggcgatttaa

SEQ ID NO: 12391 - DNA, 25 bp, Artificial
  Probe
tggaatcatacaaacccttaggtcc

SEQ ID NO: 12392 - DNA, 25 bp, Artificial
  Probe
ctaaaactggaatcatacaaaccct

SEQ ID NO: 12393 - DNA, 25 bp, Artificial
  Probe
tctaaaactggaatcatacaaaccc

SEQ ID NO: 12394 - DNA, 25 bp, Artificial
  Probe
aaacccttaggtccttcatcctttg

SEQ ID NO: 12395 - DNA, 25 bp, Artificial
  Probe
caaacccttaggtccttcatccttt

SEQ ID NO: 12396 - DNA, 25 bp, Artificial
  Probe
aaaactggaatcatacaaaccctta

SEQ ID NO: 12397 - DNA, 25 bp, Artificial
  Probe
taaaactggaatcatacaaaccctt

SEQ ID NO: 12398 - DNA, 25 bp, Artificial
  Probe
tacaaacccttaggtccttcatcct

SEQ ID NO: 12399 - DNA, 25 bp, Artificial
  Probe
cagttccaagctaagaggcgattta

SEQ ID NO: 12400 - DNA, 25 bp, Artificial
  Probe
attcagttccaagctaagaggcgat

SEQ ID NO: 12401 - DNA, 25 bp, Artificial
  Probe
tttcttaattcagttccaagctaag

SEQ ID NO: 12402 - DNA, 25 bp, Artificial
  Probe
ttcagttccaagctaagaggcgatt

SEQ ID NO: 12403 - DNA, 25 bp, Artificial
  Probe
aattcagttccaagctaagaggcga

SEQ ID NO: 12404 - DNA, 25 bp, Artificial
  Probe
tcttaattcagttccaagctaagag

SEQ ID NO: 12405 - DNA, 25 bp, Artificial
  Probe
cttttgaaaacatgacacacacagg

SEQ ID NO: 12406 - DNA, 25 bp, Artificial
  Probe
ctaagaggcgatttaaatgtgcttt

SEQ ID NO: 12407 - DNA, 25 bp, Artificial
  Probe
caagctaagaggcgatttaaatgtg

SEQ ID NO: 12408 - DNA, 25 bp, Artificial
  Probe
ttccaagctaagaggcgatttaaat

SEQ ID NO: 12409 - DNA, 25 bp, Artificial
  Probe
ttcttaattcagttccaagctaaga

SEQ ID NO: 12410 - DNA, 25 bp, Artificial
  Probe
ttctatggtatgtactgtgtgtgtg

SEQ ID NO: 12411 - DNA, 25 bp, Artificial
  Probe
ctatggtatgtactgtgtgtgtgtg

SEQ ID NO: 12412 - DNA, 25 bp, Artificial
  Probe
tctatggtatgtactgtgtgtgtgt

SEQ ID NO: 12413 - DNA, 25 bp, Artificial
  Probe
tatggtatgtactgtgtgtgtgtgt

SEQ ID NO: 12414 - DNA, 25 bp, Artificial
  Probe
cacaataaccagagtcctcacatct

SEQ ID NO: 12415 - DNA, 25 bp, Artificial
  Probe
tatgtactgtgtgtgtgtgtgtgtg

SEQ ID NO: 12416 - DNA, 25 bp, Artificial
  Probe
gtatgtactgtgtgtgtgtgtgtgt

SEQ ID NO: 12417 - DNA, 25 bp, Artificial
  Probe
ctcacagcaagtaaaggaaagaaat

SEQ ID NO: 12418 - DNA, 25 bp, Artificial
  Probe
agcaagtaaaggaaagaaatacacg

SEQ ID NO: 12419 - DNA, 25 bp, Artificial
  Probe
agtaaaggaaagaaatacacggaga

SEQ ID NO: 12420 - DNA, 25 bp, Artificial
  Probe
gtaaaggaaagaaatacacggagag

SEQ ID NO: 12421 - DNA, 25 bp, Artificial
  Probe
ccacaataaccagagtcctcacatc

SEQ ID NO: 12422 - DNA, 25 bp, Artificial
  Probe
aaataatcaaaccaacacataccga

SEQ ID NO: 12423 - DNA, 25 bp, Artificial
  Probe
taaaggaaagaaatacacggagagc

SEQ ID NO: 12424 - DNA, 25 bp, Artificial
  Probe
caagtaaaggaaagaaatacacgga

SEQ ID NO: 12425 - DNA, 25 bp, Artificial
  Probe
gcaagtaaaggaaagaaatacacgg

SEQ ID NO: 12426 - DNA, 25 bp, Artificial
  Probe
aagtaaaggaaagaaatacacggag

SEQ ID NO: 12427 - DNA, 25 bp, Artificial
  Probe
atcaaaccaacacataccgattaaa

SEQ ID NO: 12428 - DNA, 25 bp, Artificial
  Probe
aataatcaaaccaacacataccgat

SEQ ID NO: 12429 - DNA, 25 bp, Artificial
  Probe
acagcaagtaaaggaaagaaataca

SEQ ID NO: 12430 - DNA, 25 bp, Artificial
  Probe
cagcaagtaaaggaaagaaatacac

SEQ ID NO: 12431 - DNA, 25 bp, Artificial
  Probe
cacagcaagtaaaggaaagaaatac

SEQ ID NO: 12432 - DNA, 25 bp, Artificial
  Probe
tcacagcaagtaaaggaaagaaata

SEQ ID NO: 12433 - DNA, 25 bp, Artificial
  Probe
tttctatggtatgtactgtgtgtgt

SEQ ID NO: 12434 - DNA, 25 bp, Artificial
  Probe
ggtttctatggtatgtactgtgtgt

SEQ ID NO: 12435 - DNA, 25 bp, Artificial
  Probe
tggtttctatggtatgtactgtgtg

SEQ ID NO: 12436 - DNA, 25 bp, Artificial
  Probe
gtggtttctatggtatgtactgtgt

SEQ ID NO: 12437 - DNA, 25 bp, Artificial
  Probe
tgtggtttctatggtatgtactgtg

SEQ ID NO: 12438 - DNA, 25 bp, Artificial
  Probe
gtgtggtttctatggtatgtactgt

SEQ ID NO: 12439 - DNA, 25 bp, Artificial
  Probe
gtttctatggtatgtactgtgtgtg

SEQ ID NO: 12440 - DNA, 25 bp, Artificial
  Probe
caagtgtggtttctatggtatgtac

SEQ ID NO: 12441 - DNA, 25 bp, Artificial
  Probe
atggtatgtactgtgtgtgtgtgtg

SEQ ID NO: 12442 - DNA, 25 bp, Artificial
  Probe
agtgtggtttctatggtatgtactg

SEQ ID NO: 12443 - DNA, 25 bp, Artificial
  Probe
acgttacctaataacaactagaggc

SEQ ID NO: 12444 - DNA, 25 bp, Artificial
  Probe
atcaccacgttacctaataacaact

SEQ ID NO: 12445 - DNA, 25 bp, Artificial
  Probe
aagtgtggtttctatggtatgtact

SEQ ID NO: 12446 - DNA, 25 bp, Artificial
  Probe
tcaccacgttacctaataacaacta

SEQ ID NO: 12447 - DNA, 25 bp, Artificial
  Probe
aatcaccacgttacctaataacaac

SEQ ID NO: 12448 - DNA, 25 bp, Artificial
  Probe
accacgttacctaataacaactaga

SEQ ID NO: 12449 - DNA, 25 bp, Artificial
  Probe
caccacgttacctaataacaactag

SEQ ID NO: 12450 - DNA, 25 bp, Artificial
  Probe
aaggaaagaaatacacggagagcaa

SEQ ID NO: 12451 - DNA, 25 bp, Artificial
  Probe
aaaggaaagaaatacacggagagca

SEQ ID NO: 12452 - DNA, 25 bp, Artificial
  Probe
cacgttacctaataacaactagagg

SEQ ID NO: 12453 - DNA, 25 bp, Artificial
  Probe
ccacgttacctaataacaactagag

SEQ ID NO: 12454 - DNA, 25 bp, Artificial
  Probe
ccaagtgtggtttctatggtatgta

SEQ ID NO: 12455 - DNA, 25 bp, Artificial
  Probe
attgaatgcggaatgaagtatgaag

SEQ ID NO: 12456 - DNA, 25 bp, Artificial
  Probe
gattgaatgcggaatgaagtatgaa

SEQ ID NO: 12457 - DNA, 25 bp, Artificial
  Probe
gaatgcggaatgaagtatgaagatg

SEQ ID NO: 12458 - DNA, 25 bp, Artificial
  Probe
tgaatgcggaatgaagtatgaagat

SEQ ID NO: 12459 - DNA, 25 bp, Artificial
  Probe
ctgattgaatgcggaatgaagtatg

SEQ ID NO: 12460 - DNA, 25 bp, Artificial
  Probe
ttgaatgcggaatgaagtatgaaga

SEQ ID NO: 12461 - DNA, 25 bp, Artificial
  Probe
tgattgaatgcggaatgaagtatga

SEQ ID NO: 12462 - DNA, 25 bp, Artificial
  Probe
ggaatgaagtatgaagatgctgttc

SEQ ID NO: 12463 - DNA, 25 bp, Artificial
  Probe
ggaacaagcaagttgaatagagaag

SEQ ID NO: 12464 - DNA, 25 bp, Artificial
  Probe
aggaacaagcaagttgaatagagaa

SEQ ID NO: 12465 - DNA, 25 bp, Artificial
  Probe
aaggaacaagcaagttgaatagaga

SEQ ID NO: 12466 - DNA, 25 bp, Artificial
  Probe
cggaatgaagtatgaagatgctgtt

SEQ ID NO: 12467 - DNA, 25 bp, Artificial
  Probe
gaacaagcaagttgaatagagaaga

SEQ ID NO: 12468 - DNA, 25 bp, Artificial
  Probe
taaggaacaagcaagttgaatagag

SEQ ID NO: 12469 - DNA, 25 bp, Artificial
  Probe
actgattgaatgcggaatgaagtat

SEQ ID NO: 12470 - DNA, 25 bp, Artificial
  Probe
gcaagttgaatagagaagatagtga

SEQ ID NO: 12471 - DNA, 25 bp, Artificial
  Probe
agcaagttgaatagagaagatagtg

SEQ ID NO: 12472 - DNA, 25 bp, Artificial
  Probe
aacaagcaagttgaatagagaagat

SEQ ID NO: 12473 - DNA, 25 bp, Artificial
  Probe
tcataaggaacaagcaagttgaata

SEQ ID NO: 12474 - DNA, 25 bp, Artificial
  Probe
cataaggaacaagcaagttgaatag

SEQ ID NO: 12475 - DNA, 25 bp, Artificial
  Probe
aatgcggaatgaagtatgaagatgc

SEQ ID NO: 12476 - DNA, 25 bp, Artificial
  Probe
ataaggaacaagcaagttgaataga

SEQ ID NO: 12477 - DNA, 25 bp, Artificial
  Probe
cactgattgaatgcggaatgaagta

SEQ ID NO: 12478 - DNA, 25 bp, Artificial
  Probe
aagcaagttgaatagagaagatagt

SEQ ID NO: 12479 - DNA, 25 bp, Artificial
  Probe
acaagcaagttgaatagagaagata

SEQ ID NO: 12480 - DNA, 25 bp, Artificial
  Probe
atgcggaatgaagtatgaagatgct

SEQ ID NO: 12481 - DNA, 25 bp, Artificial
  Probe
caagcaagttgaatagagaagatag

SEQ ID NO: 12482 - DNA, 25 bp, Artificial
  Probe
atagtagatgattggctaaacctgt

SEQ ID NO: 12483 - DNA, 25 bp, Artificial
  Probe
atgattggctaaacctgttaaagac

SEQ ID NO: 12484 - DNA, 25 bp, Artificial
  Probe
agtagatgattggctaaacctgtta

SEQ ID NO: 12485 - DNA, 25 bp, Artificial
  Probe
tagtagatgattggctaaacctgtt

SEQ ID NO: 12486 - DNA, 25 bp, Artificial
  Probe
ggctaaacctgttaaagaccaaatt

SEQ ID NO: 12487 - DNA, 25 bp, Artificial
  Probe
taaacctgttaaagaccaaattccg

SEQ ID NO: 12488 - DNA, 25 bp, Artificial
  Probe
gatgattggctaaacctgttaaaga

SEQ ID NO: 12489 - DNA, 25 bp, Artificial
  Probe
agatgattggctaaacctgttaaag

SEQ ID NO: 12490 - DNA, 25 bp, Artificial
  Probe
atcaataagaggcatttagtggtct

SEQ ID NO: 12491 - DNA, 25 bp, Artificial
  Probe
gatagtagatgattggctaaacctg

SEQ ID NO: 12492 - DNA, 25 bp, Artificial
  Probe
agatagtagatgattggctaaacct

SEQ ID NO: 12493 - DNA, 25 bp, Artificial
  Probe
cagatagtagatgattggctaaacc

SEQ ID NO: 12494 - DNA, 25 bp, Artificial
  Probe
tgattggctaaacctgttaaagacc

SEQ ID NO: 12495 - DNA, 25 bp, Artificial
  Probe
gtagatgattggctaaacctgttaa

SEQ ID NO: 12496 - DNA, 25 bp, Artificial
  Probe
gctaaacctgttaaagaccaaattc

SEQ ID NO: 12497 - DNA, 25 bp, Artificial
  Probe
tgctgcgaaacatttcaagatttat

SEQ ID NO: 12498 - DNA, 25 bp, Artificial
  Probe
tttatttgccataatgaaccgtcca

SEQ ID NO: 12499 - DNA, 25 bp, Artificial
  Probe
gctgcgaaacatttcaagatttatt

SEQ ID NO: 12500 - DNA, 25 bp, Artificial
  Probe
attccagacatttcagcagtttatc

SEQ ID NO: 12501 - DNA, 25 bp, Artificial
  Probe
ttaattccagacatttcagcagttt

SEQ ID NO: 12502 - DNA, 25 bp, Artificial
  Probe
aattccagacatttcagcagtttat

SEQ ID NO: 12503 - DNA, 25 bp, Artificial
  Probe
taattccagacatttcagcagttta

SEQ ID NO: 12504 - DNA, 25 bp, Artificial
  Probe
ttccagacatttcagcagtttatcg

SEQ ID NO: 12505 - DNA, 25 bp, Artificial
  Probe
cagacatttcagcagtttatcggaa

SEQ ID NO: 12506 - DNA, 25 bp, Artificial
  Probe
agacatttcagcagtttatcggaac

SEQ ID NO: 12507 - DNA, 25 bp, Artificial
  Probe
acatttcagcagtttatcggaacag

SEQ ID NO: 12508 - DNA, 25 bp, Artificial
  Probe
gacatttcagcagtttatcggaaca

SEQ ID NO: 12509 - DNA, 25 bp, Artificial
  Probe
attaattccagacatttcagcagtt

SEQ ID NO: 12510 - DNA, 25 bp, Artificial
  Probe
tattaattccagacatttcagcagt

SEQ ID NO: 12511 - DNA, 25 bp, Artificial
  Probe
cagtttatcggaacagcaacaacag

SEQ ID NO: 12512 - DNA, 25 bp, Artificial
  Probe
ccagacatttcagcagtttatcgga

SEQ ID NO: 12513 - DNA, 25 bp, Artificial
  Probe
tccagacatttcagcagtttatcgg

SEQ ID NO: 12514 - DNA, 25 bp, Artificial
  Probe
catttcagcagtttatcggaacagc

SEQ ID NO: 12515 - DNA, 25 bp, Artificial
  Probe
ttattaattccagacatttcagcag

SEQ ID NO: 12516 - DNA, 25 bp, Artificial
  Probe
atttgttggctgttgatttcactgc

SEQ ID NO: 12517 - DNA, 25 bp, Artificial
  Probe
atttcagcagtttatcggaacagca

SEQ ID NO: 12518 - DNA, 25 bp, Artificial
  Probe
caacagcaacaaaaccttcaaaatt

SEQ ID NO: 12519 - DNA, 25 bp, Artificial
  Probe
ttatcggaacagcaacaacagcaac

SEQ ID NO: 12520 - DNA, 25 bp, Artificial
  Probe
acaacagcaacaaaaccttcaaaat

SEQ ID NO: 12521 - DNA, 25 bp, Artificial
  Probe
catacgatgtggttgttcttccagg

SEQ ID NO: 12522 - DNA, 25 bp, Artificial
  Probe
ccatacgatgtggttgttcttccag

SEQ ID NO: 12523 - DNA, 25 bp, Artificial
  Probe
cttatctgagtcggctttggtgaag

SEQ ID NO: 12524 - DNA, 25 bp, Artificial
  Probe
aacaacagcaacaaaaccttcaaaa

SEQ ID NO: 12525 - DNA, 25 bp, Artificial
  Probe
tttattaattccagacatttcagca

SEQ ID NO: 12526 - DNA, 25 bp, Artificial
  Probe
aagtctttaagaaatagaaatggca

SEQ ID NO: 12527 - DNA, 25 bp, Artificial
  Probe
atacgatgtggttgttcttccagga

SEQ ID NO: 12528 - DNA, 25 bp, Artificial
  Probe
tttcagcagtttatcggaacagcaa

SEQ ID NO: 12529 - DNA, 25 bp, Artificial
  Probe
caagtctttaagaaatagaaatggc

SEQ ID NO: 12530 - DNA, 25 bp, Artificial
  Probe
agtctttaagaaatagaaatggcat

SEQ ID NO: 12531 - DNA, 25 bp, Artificial
  Probe
caacaacagcaacaaaaccttcaaa

SEQ ID NO: 12532 - DNA, 25 bp, Artificial
  Probe
ctttattaattccagacatttcagc

SEQ ID NO: 12533 - DNA, 25 bp, Artificial
  Probe
gaacttatctgagtcggctttggtg

SEQ ID NO: 12534 - DNA, 25 bp, Artificial
  Probe
tttatcggaacagcaacaacagcaa

SEQ ID NO: 12535 - DNA, 25 bp, Artificial
  Probe
agaacttatctgagtcggctttggt

SEQ ID NO: 12536 - DNA, 25 bp, Artificial
  Probe
tacgatgtggttgttcttccaggag

SEQ ID NO: 12537 - DNA, 25 bp, Artificial
  Probe
ttcagcagtttatcggaacagcaac

SEQ ID NO: 12538 - DNA, 25 bp, Artificial
  Probe
acttatctgagtcggctttggtgaa

SEQ ID NO: 12539 - DNA, 25 bp, Artificial
  Probe
aacttatctgagtcggctttggtga

SEQ ID NO: 12540 - DNA, 25 bp, Artificial
  Probe
aacagcaacaaaaccttcaaaattt

SEQ ID NO: 12541 - DNA, 25 bp, Artificial
  Probe
agtttatcggaacagcaacaacagc

SEQ ID NO: 12542 - DNA, 25 bp, Artificial
  Probe
agcagtttatcggaacagcaacaac

SEQ ID NO: 12543 - DNA, 25 bp, Artificial
  Probe
cagcagtttatcggaacagcaacaa

SEQ ID NO: 12544 - DNA, 25 bp, Artificial
  Probe
agcaacaaaaccttcaaaatttaca

SEQ ID NO: 12545 - DNA, 25 bp, Artificial
  Probe
ctctctggagtctaacttcttgagt

SEQ ID NO: 12546 - DNA, 25 bp, Artificial
  Probe
gctctctggagtctaacttcttgag

SEQ ID NO: 12547 - DNA, 25 bp, Artificial
  Probe
ggtatatgcccaagagaagtatagc

SEQ ID NO: 12548 - DNA, 25 bp, Artificial
  Probe
tctggctaatataaataaggctgct

SEQ ID NO: 12549 - DNA, 25 bp, Artificial
  Probe
aataaggctgctatgaacatagtgg

SEQ ID NO: 12550 - DNA, 25 bp, Artificial
  Probe
ctttgttgtatgttggagcatcttt

SEQ ID NO: 12551 - DNA, 25 bp, Artificial
  Probe
ttctggctaatataaataaggctgc

SEQ ID NO: 12552 - DNA, 25 bp, Artificial
  Probe
ttaatagggttatttggctctctgg

SEQ ID NO: 12553 - DNA, 25 bp, Artificial
  Probe
taatccattcctttgttgaagtctg

SEQ ID NO: 12554 - DNA, 25 bp, Artificial
  Probe
tctttgttgtatgttggagcatctt

SEQ ID NO: 12555 - DNA, 25 bp, Artificial
  Probe
taatagggttatttggctctctgga

SEQ ID NO: 12556 - DNA, 25 bp, Artificial
  Probe
ataaggctgctatgaacatagtgga

SEQ ID NO: 12557 - DNA, 25 bp, Artificial
  Probe
taaggctgctatgaacatagtggaa

SEQ ID NO: 12558 - DNA, 25 bp, Artificial
  Probe
gcttctggctaatataaataaggct

SEQ ID NO: 12559 - DNA, 25 bp, Artificial
  Probe
cctctatcagaaagtaagatgggta

SEQ ID NO: 12560 - DNA, 25 bp, Artificial
  Probe
ttggctctctggagtctaacttctt

SEQ ID NO: 12561 - DNA, 25 bp, Artificial
  Probe
ctggctaatataaataaggctgcta

SEQ ID NO: 12562 - DNA, 25 bp, Artificial
  Probe
ttaatccattcctttgttgaagtct

SEQ ID NO: 12563 - DNA, 25 bp, Artificial
  Probe
gtctttgttgtatgttggagcatct

SEQ ID NO: 12564 - DNA, 25 bp, Artificial
  Probe
tttaatagggttatttggctctctg

SEQ ID NO: 12565 - DNA, 25 bp, Artificial
  Probe
tatttggctctctggagtctaactt

SEQ ID NO: 12566 - DNA, 25 bp, Artificial
  Probe
ttatttggctctctggagtctaact

SEQ ID NO: 12567 - DNA, 25 bp, Artificial
  Probe
cctttgttgaagtctggagtctttc

SEQ ID NO: 12568 - DNA, 25 bp, Artificial
  Probe
atgtgtctttgttgtatgttggagc

SEQ ID NO: 12569 - DNA, 25 bp, Artificial
  Probe
gctgctatgaacatagtggaacatg

SEQ ID NO: 12570 - DNA, 25 bp, Artificial
  Probe
tgtctttgttgtatgttggagcatc

SEQ ID NO: 12571 - DNA, 25 bp, Artificial
  Probe
catgtgtctttgttgtatgttggag

SEQ ID NO: 12572 - DNA, 25 bp, Artificial
  Probe
ctggagtctaacttcttgagttctt

SEQ ID NO: 12573 - DNA, 25 bp, Artificial
  Probe
ctctggagtctaacttcttgagttc

SEQ ID NO: 12574 - DNA, 25 bp, Artificial
  Probe
gtgtctttgttgtatgttggagcat

SEQ ID NO: 12575 - DNA, 25 bp, Artificial
  Probe
caagagaagtatagctggtcctcag

SEQ ID NO: 12576 - DNA, 25 bp, Artificial
  Probe
tctggagtctaacttcttgagttct

SEQ ID NO: 12577 - DNA, 25 bp, Artificial
  Probe
tctctggagtctaacttcttgagtt

SEQ ID NO: 12578 - DNA, 25 bp, Artificial
  Probe
tttaatccattcctttgttgaagtc

SEQ ID NO: 12579 - DNA, 25 bp, Artificial
  Probe
ggctctctggagtctaacttcttga

SEQ ID NO: 12580 - DNA, 25 bp, Artificial
  Probe
gtactccattgtgtagatgtaccac

SEQ ID NO: 12581 - DNA, 25 bp, Artificial
  Probe
tggctaatataaataaggctgctat

SEQ ID NO: 12582 - DNA, 25 bp, Artificial
  Probe
actgaacattgctttaggtgctttg

SEQ ID NO: 12583 - DNA, 25 bp, Artificial
  Probe
ggttatttggctctctggagtctaa

SEQ ID NO: 12584 - DNA, 25 bp, Artificial
  Probe
aatagggttatttggctctctggag

SEQ ID NO: 12585 - DNA, 25 bp, Artificial
  Probe
tatatgcccaagagaagtatagctg

SEQ ID NO: 12586 - DNA, 25 bp, Artificial
  Probe
gtatatgcccaagagaagtatagct

SEQ ID NO: 12587 - DNA, 25 bp, Artificial
  Probe
ggctaatataaataaggctgctatg

SEQ ID NO: 12588 - DNA, 25 bp, Artificial
  Probe
tggctctctggagtctaacttcttg

SEQ ID NO: 12589 - DNA, 25 bp, Artificial
  Probe
gttatttggctctctggagtctaac

SEQ ID NO: 12590 - DNA, 25 bp, Artificial
  Probe
ctaggtaatcctccagtctataaga

SEQ ID NO: 12591 - DNA, 25 bp, Artificial
  Probe
taggtaatcctccagtctataagaa

SEQ ID NO: 12592 - DNA, 25 bp, Artificial
  Probe
aggtaatcctccagtctataagaaa

SEQ ID NO: 12593 - DNA, 25 bp, Artificial
  Probe
tataaaggcaccgaaaactatgaaa

SEQ ID NO: 12594 - DNA, 25 bp, Artificial
  Probe
gcctaggtaatcctccagtctataa

SEQ ID NO: 12595 - DNA, 25 bp, Artificial
  Probe
ttataaaggcaccgaaaactatgaa

SEQ ID NO: 12596 - DNA, 25 bp, Artificial
  Probe
agcctaggtaatcctccagtctata

SEQ ID NO: 12597 - DNA, 25 bp, Artificial
  Probe
cctaggtaatcctccagtctataag

SEQ ID NO: 12598 - DNA, 25 bp, Artificial
  Probe
ggtaatcctccagtctataagaaaa

SEQ ID NO: 12599 - DNA, 25 bp, Artificial
  Probe
aagcctaggtaatcctccagtctat

SEQ ID NO: 12600 - DNA, 25 bp, Artificial
  Probe
tttataaaggcaccgaaaactatga

SEQ ID NO: 12601 - DNA, 25 bp, Artificial
  Probe
aaaacaaaagtccttgggagtggag

SEQ ID NO: 12602 - DNA, 25 bp, Artificial
  Probe
aagaagatagcggaattcgaccctg

SEQ ID NO: 12603 - DNA, 25 bp, Artificial
  Probe
caagaagatagcggaattcgaccct

SEQ ID NO: 12604 - DNA, 25 bp, Artificial
  Probe
aaacaaaagtccttgggagtggagt

SEQ ID NO: 12605 - DNA, 25 bp, Artificial
  Probe
aacaaaagtccttgggagtggagtg

SEQ ID NO: 12606 - DNA, 25 bp, Artificial
  Probe
gcatctattagtagtagtagcggtt

SEQ ID NO: 12607 - DNA, 25 bp, Artificial
  Probe
attagtagtagtagcggttacatct

SEQ ID NO: 12608 - DNA, 25 bp, Artificial
  Probe
ttagtagtagtagcggttacatcta

SEQ ID NO: 12609 - DNA, 25 bp, Artificial
  Probe
tctattagtagtagtagcggttaca

SEQ ID NO: 12610 - DNA, 25 bp, Artificial
  Probe
tacatctactatgcagacacagtga

SEQ ID NO: 12611 - DNA, 25 bp, Artificial
  Probe
ctgaagacactgccttgtattactg

SEQ ID NO: 12612 - DNA, 25 bp, Artificial
  Probe
tctgaagacactgccttgtattact

SEQ ID NO: 12613 - DNA, 25 bp, Artificial
  Probe
gtaactatggaatgaactggattcg

SEQ ID NO: 12614 - DNA, 25 bp, Artificial
  Probe
tgaagacactgccttgtattactgt

SEQ ID NO: 12615 - DNA, 25 bp, Artificial
  Probe
gaagacactgccttgtattactgtg

SEQ ID NO: 12616 - DNA, 25 bp, Artificial
  Probe
taactatggaatgaactggattcgc

SEQ ID NO: 12617 - DNA, 25 bp, Artificial
  Probe
tgcatctattagtagtagtagcggt

SEQ ID NO: 12618 - DNA, 25 bp, Artificial
  Probe
ttgcatctattagtagtagtagcgg

SEQ ID NO: 12619 - DNA, 25 bp, Artificial
  Probe
tattagtagtagtagcggttacatc

SEQ ID NO: 12620 - DNA, 25 bp, Artificial
  Probe
ctattagtagtagtagcggttacat

SEQ ID NO: 12621 - DNA, 25 bp, Artificial
  Probe
gtctgaagacactgccttgtattac

SEQ ID NO: 12622 - DNA, 25 bp, Artificial
  Probe
gttgcatctattagtagtagtagcg

SEQ ID NO: 12623 - DNA, 25 bp, Artificial
  Probe
ggttacatctactatgcagacacag

SEQ ID NO: 12624 - DNA, 25 bp, Artificial
  Probe
ttacatctactatgcagacacagtg

SEQ ID NO: 12625 - DNA, 25 bp, Artificial
  Probe
gttacatctactatgcagacacagt

SEQ ID NO: 12626 - DNA, 25 bp, Artificial
  Probe
agtaactatggaatgaactggattc

SEQ ID NO: 12627 - DNA, 25 bp, Artificial
  Probe
ggttgcatctattagtagtagtagc

SEQ ID NO: 12628 - DNA, 25 bp, Artificial
  Probe
catctattagtagtagtagcggtta

SEQ ID NO: 12629 - DNA, 25 bp, Artificial
  Probe
catctactatgcagacacagtgaag

SEQ ID NO: 12630 - DNA, 25 bp, Artificial
  Probe
atctattagtagtagtagcggttac

SEQ ID NO: 12631 - DNA, 25 bp, Artificial
  Probe
acatctactatgcagacacagtgaa

SEQ ID NO: 12632 - DNA, 25 bp, Artificial
  Probe
tagcggttacatctactatgcagac

SEQ ID NO: 12633 - DNA, 25 bp, Artificial
  Probe
ggtctgaagacactgccttgtatta

SEQ ID NO: 12634 - DNA, 25 bp, Artificial
  Probe
tagtagtagtagcggttacatctac

SEQ ID NO: 12635 - DNA, 25 bp, Artificial
  Probe
atctactatgcagacacagtgaagg

SEQ ID NO: 12636 - DNA, 25 bp, Artificial
  Probe
cggttacatctactatgcagacaca

SEQ ID NO: 12637 - DNA, 25 bp, Artificial
  Probe
ttcactttcagtaactatggaatga

SEQ ID NO: 12638 - DNA, 25 bp, Artificial
  Probe
aagacactgccttgtattactgtgc

SEQ ID NO: 12639 - DNA, 25 bp, Artificial
  Probe
gtgggttgcatctattagtagtagt

SEQ ID NO: 12640 - DNA, 25 bp, Artificial
  Probe
agtgggttgcatctattagtagtag

SEQ ID NO: 12641 - DNA, 25 bp, Artificial
  Probe
gagtgggttgcatctattagtagta

SEQ ID NO: 12642 - DNA, 25 bp, Artificial
  Probe
aactatggaatgaactggattcgcc

SEQ ID NO: 12643 - DNA, 25 bp, Artificial
  Probe
ggagtgggttgcatctattagtagt

SEQ ID NO: 12644 - DNA, 25 bp, Artificial
  Probe
tggagtgggttgcatctattagtag

SEQ ID NO: 12645 - DNA, 25 bp, Artificial
  Probe
ctggagtgggttgcatctattagta

SEQ ID NO: 12646 - DNA, 25 bp, Artificial
  Probe
tgggttgcatctattagtagtagta

SEQ ID NO: 12647 - DNA, 25 bp, Artificial
  Probe
gtagcggttacatctactatgcaga

SEQ ID NO: 12648 - DNA, 25 bp, Artificial
  Probe
gcggttacatctactatgcagacac

SEQ ID NO: 12649 - DNA, 25 bp, Artificial
  Probe
agcggttacatctactatgcagaca

SEQ ID NO: 12650 - DNA, 25 bp, Artificial
  Probe
gggttgcatctattagtagtagtag

SEQ ID NO: 12651 - DNA, 25 bp, Artificial
  Probe
agaaatccagaaactcagtaatccc

SEQ ID NO: 12652 - DNA, 25 bp, Artificial
  Probe
tcaaagacagtggctataaggtttc

SEQ ID NO: 12653 - DNA, 25 bp, Artificial
  Probe
gaaatccagaaactcagtaatccca

SEQ ID NO: 12654 - DNA, 25 bp, Artificial
  Probe
ctgctctccctgaaattaaagtttg

SEQ ID NO: 12655 - DNA, 25 bp, Artificial
  Probe
cgaggctgagaatttgtatttgaag

SEQ ID NO: 12656 - DNA, 25 bp, Artificial
  Probe
aaatccagaaactcagtaatcccac

SEQ ID NO: 12657 - DNA, 25 bp, Artificial
  Probe
cccaagaaatccagaaactcagtaa

SEQ ID NO: 12658 - DNA, 25 bp, Artificial
  Probe
ccaagaaatccagaaactcagtaat

SEQ ID NO: 12659 - DNA, 25 bp, Artificial
  Probe
ctccctgaaattaaagtttggctta

SEQ ID NO: 12660 - DNA, 25 bp, Artificial
  Probe
aagaaatccagaaactcagtaatcc

SEQ ID NO: 12661 - DNA, 25 bp, Artificial
  Probe
tctccctgaaattaaagtttggctt

SEQ ID NO: 12662 - DNA, 25 bp, Artificial
  Probe
ctctccctgaaattaaagtttggct

SEQ ID NO: 12663 - DNA, 25 bp, Artificial
  Probe
tttccgaggctgagaatttgtattt

SEQ ID NO: 12664 - DNA, 25 bp, Artificial
  Probe
caaagacagtggctataaggtttcc

SEQ ID NO: 12665 - DNA, 25 bp, Artificial
  Probe
acctctaaagtcatttcactgtagt

SEQ ID NO: 12666 - DNA, 25 bp, Artificial
  Probe
tgctctccctgaaattaaagtttgg

SEQ ID NO: 12667 - DNA, 25 bp, Artificial
  Probe
aatccagaaactcagtaatcccaca

SEQ ID NO: 12668 - DNA, 25 bp, Artificial
  Probe
tccctgaaattaaagtttggcttaa

SEQ ID NO: 12669 - DNA, 25 bp, Artificial
  Probe
tttgctctatgataaagtgtgtacg

SEQ ID NO: 12670 - DNA, 25 bp, Artificial
  Probe
ccgaggctgagaatttgtatttgaa

SEQ ID NO: 12671 - DNA, 25 bp, Artificial
  Probe
tataaggtttccgaggctgagaatt

SEQ ID NO: 12672 - DNA, 25 bp, Artificial
  Probe
gctgctctccctgaaattaaagttt

SEQ ID NO: 12673 - DNA, 25 bp, Artificial
  Probe
ttccgaggctgagaatttgtatttg

SEQ ID NO: 12674 - DNA, 25 bp, Artificial
  Probe
gtttccgaggctgagaatttgtatt

SEQ ID NO: 12675 - DNA, 25 bp, Artificial
  Probe
aacattcaagattggtccctcagat

SEQ ID NO: 12676 - DNA, 25 bp, Artificial
  Probe
ggacctctaaagtcatttcactgta

SEQ ID NO: 12677 - DNA, 25 bp, Artificial
  Probe
ctgagaatttgtatttgaagcaggg

SEQ ID NO: 12678 - DNA, 25 bp, Artificial
  Probe
ctataaggtttccgaggctgagaat

SEQ ID NO: 12679 - DNA, 25 bp, Artificial
  Probe
atccagaaactcagtaatcccacag

SEQ ID NO: 12680 - DNA, 25 bp, Artificial
  Probe
caagaaatccagaaactcagtaatc

SEQ ID NO: 12681 - DNA, 25 bp, Artificial
  Probe
gtcaaagacagtggctataaggttt

SEQ ID NO: 12682 - DNA, 25 bp, Artificial
  Probe
atctctgtcatcaagcactctcctc

SEQ ID NO: 12683 - DNA, 25 bp, Artificial
  Probe
gacctctaaagtcatttcactgtag

SEQ ID NO: 12684 - DNA, 25 bp, Artificial
  Probe
ctggacctctaaagtcatttcactg

SEQ ID NO: 12685 - DNA, 25 bp, Artificial
  Probe
gaagtcaaagacagtggctataagg

SEQ ID NO: 12686 - DNA, 25 bp, Artificial
  Probe
ggaagtcaaagacagtggctataag

SEQ ID NO: 12687 - DNA, 25 bp, Artificial
  Probe
tccgaggctgagaatttgtatttga

SEQ ID NO: 12688 - DNA, 25 bp, Artificial
  Probe
actggacctctaaagtcatttcact

SEQ ID NO: 12689 - DNA, 25 bp, Artificial
  Probe
cactggacctctaaagtcatttcac

SEQ ID NO: 12690 - DNA, 25 bp, Artificial
  Probe
ataaggtttccgaggctgagaattt

SEQ ID NO: 12691 - DNA, 25 bp, Artificial
  Probe
gaacattcaagattggtccctcaga

SEQ ID NO: 12692 - DNA, 25 bp, Artificial
  Probe
aggtgacgaacattcaagattggtc

SEQ ID NO: 12693 - DNA, 25 bp, Artificial
  Probe
catctctgtcatcaagcactctcct

SEQ ID NO: 12694 - DNA, 25 bp, Artificial
  Probe
caggtgacgaacattcaagattggt

SEQ ID NO: 12695 - DNA, 25 bp, Artificial
  Probe
tggacctctaaagtcatttcactgt

SEQ ID NO: 12696 - DNA, 25 bp, Artificial
  Probe
ctatgtggcagatattgaagtggac

SEQ ID NO: 12697 - DNA, 25 bp, Artificial
  Probe
aactatgtggcagatattgaagtgg

SEQ ID NO: 12698 - DNA, 25 bp, Artificial
  Probe
ccagacactgatgttatactgatgt

SEQ ID NO: 12699 - DNA, 25 bp, Artificial
  Probe
actatgtggcagatattgaagtgga

SEQ ID NO: 12700 - DNA, 25 bp, Artificial
  Probe
cagacactgatgttatactgatgtg

SEQ ID NO: 12701 - DNA, 25 bp, Artificial
  Probe
tatgtggcagatattgaagtggacg

SEQ ID NO: 12702 - DNA, 25 bp, Artificial
  Probe
gacaggaagattatgaccgtctgag

SEQ ID NO: 12703 - DNA, 25 bp, Artificial
  Probe
aaactatgtggcagatattgaagtg

SEQ ID NO: 12704 - DNA, 25 bp, Artificial
  Probe
gtggtaagacatgcttgctcatagt

SEQ ID NO: 12705 - DNA, 25 bp, Artificial
  Probe
gaagaaactggtgattgttggtgat

SEQ ID NO: 12706 - DNA, 25 bp, Artificial
  Probe
ttgtggtaagacatgcttgctcata

SEQ ID NO: 12707 - DNA, 25 bp, Artificial
  Probe
atcttcggaatgatgagcacacaag

SEQ ID NO: 12708 - DNA, 25 bp, Artificial
  Probe
aagaaactggtgattgttggtgatg

SEQ ID NO: 12709 - DNA, 25 bp, Artificial
  Probe
tggtaagacatgcttgctcatagtc

SEQ ID NO: 12710 - DNA, 25 bp, Artificial
  Probe
catagtcttcagcaaggaccagttc

SEQ ID NO: 12711 - DNA, 25 bp, Artificial
  Probe
tgtggtaagacatgcttgctcatag

SEQ ID NO: 12712 - DNA, 25 bp, Artificial
  Probe
gatcttcggaatgatgagcacacaa

SEQ ID NO: 12713 - DNA, 25 bp, Artificial
  Probe
gaacaagaaggatcttcggaatgat

SEQ ID NO: 12714 - DNA, 25 bp, Artificial
  Probe
aacaagaaggatcttcggaatgatg

SEQ ID NO: 12715 - DNA, 25 bp, Artificial
  Probe
catcatcctagttgggaacaagaag

SEQ ID NO: 12716 - DNA, 25 bp, Artificial
  Probe
caagaaggatcttcggaatgatgag

SEQ ID NO: 12717 - DNA, 25 bp, Artificial
  Probe
tcatagtcttcagcaaggaccagtt

SEQ ID NO: 12718 - DNA, 25 bp, Artificial
  Probe
atcgacagccctgatagtttagaaa

SEQ ID NO: 12719 - DNA, 25 bp, Artificial
  Probe
acaagaaggatcttcggaatgatga

SEQ ID NO: 12720 - DNA, 25 bp, Artificial
  Probe
aagaaggcagagatatggcaaacag

SEQ ID NO: 12721 - DNA, 25 bp, Artificial
  Probe
gaagaaggcagagatatggcaaaca

SEQ ID NO: 12722 - DNA, 25 bp, Artificial
  Probe
tgaagaaggcagagatatggcaaac

SEQ ID NO: 12723 - DNA, 25 bp, Artificial
  Probe
acaggaagattatgaccgtctgagg

SEQ ID NO: 12724 - DNA, 25 bp, Artificial
  Probe
ggacaggaagattatgaccgtctga

SEQ ID NO: 12725 - DNA, 25 bp, Artificial
  Probe
ctggacaggaagattatgaccgtct

SEQ ID NO: 12726 - DNA, 25 bp, Artificial
  Probe
gtagagttggctttatgggacacag

SEQ ID NO: 12727 - DNA, 25 bp, Artificial
  Probe
ctcatagtcttcagcaaggaccagt

SEQ ID NO: 12728 - DNA, 25 bp, Artificial
  Probe
aaacctgaagaaggcagagatatgg

SEQ ID NO: 12729 - DNA, 25 bp, Artificial
  Probe
atcatcctagttgggaacaagaagg

SEQ ID NO: 12730 - DNA, 25 bp, Artificial
  Probe
cttgtggtaagacatgcttgctcat

SEQ ID NO: 12731 - DNA, 25 bp, Artificial
  Probe
tggacaggaagattatgaccgtctg

SEQ ID NO: 12732 - DNA, 25 bp, Artificial
  Probe
catcgacagccctgatagtttagaa

SEQ ID NO: 12733 - DNA, 25 bp, Artificial
  Probe
agaagtcaagcatttctgtccaaat

SEQ ID NO: 12734 - DNA, 25 bp, Artificial
  Probe
aaggatcttcggaatgatgagcaca

SEQ ID NO: 12735 - DNA, 25 bp, Artificial
  Probe
ccatcatcctagttgggaacaagaa

SEQ ID NO: 12736 - DNA, 25 bp, Artificial
  Probe
ctgaagaaggcagagatatggcaaa

SEQ ID NO: 12737 - DNA, 25 bp, Artificial
  Probe
ggaagaaactggtgattgttggtga

SEQ ID NO: 12738 - DNA, 25 bp, Artificial
  Probe
aggaagaaactggtgattgttggtg

SEQ ID NO: 12739 - DNA, 25 bp, Artificial
  Probe
ggaacaagaaggatcttcggaatga

SEQ ID NO: 12740 - DNA, 25 bp, Artificial
  Probe
tgaaaactatgtggcagatattgaa

SEQ ID NO: 12741 - DNA, 25 bp, Artificial
  Probe
tattgaacgcttactgtgctaacta

SEQ ID NO: 12742 - DNA, 25 bp, Artificial
  Probe
attgaacgcttactgtgctaactat

SEQ ID NO: 12743 - DNA, 25 bp, Artificial
  Probe
ttgaacgcttactgtgctaactatt

SEQ ID NO: 12744 - DNA, 25 bp, Artificial
  Probe
cgcttactgtgctaactattggaat

SEQ ID NO: 12745 - DNA, 25 bp, Artificial
  Probe
tgaacgcttactgtgctaactattg

SEQ ID NO: 12746 - DNA, 25 bp, Artificial
  Probe
gtattgaacgcttactgtgctaact

SEQ ID NO: 12747 - DNA, 25 bp, Artificial
  Probe
cagtaccagcgagaatatagtgaat

SEQ ID NO: 12748 - DNA, 25 bp, Artificial
  Probe
agtaccagcgagaatatagtgaatt

SEQ ID NO: 12749 - DNA, 25 bp, Artificial
  Probe
cctcacttctagtattgaacgctta

SEQ ID NO: 12750 - DNA, 25 bp, Artificial
  Probe
actctgtcctcacttctagtattga

SEQ ID NO: 12751 - DNA, 25 bp, Artificial
  Probe
tctgtcctcacttctagtattgaac

SEQ ID NO: 12752 - DNA, 25 bp, Artificial
  Probe
aactctgtcctcacttctagtattg

SEQ ID NO: 12753 - DNA, 25 bp, Artificial
  Probe
ctcacttctagtattgaacgcttac

SEQ ID NO: 12754 - DNA, 25 bp, Artificial
  Probe
ctgtcctcacttctagtattgaacg

SEQ ID NO: 12755 - DNA, 25 bp, Artificial
  Probe
ctctgtcctcacttctagtattgaa

SEQ ID NO: 12756 - DNA, 25 bp, Artificial
  Probe
gaacgcttactgtgctaactattgg

SEQ ID NO: 12757 - DNA, 25 bp, Artificial
  Probe
atctctctcaacttcctgtacttaa

SEQ ID NO: 12758 - DNA, 25 bp, Artificial
  Probe
ttatctctctcaacttcctgtactt

SEQ ID NO: 12759 - DNA, 25 bp, Artificial
  Probe
acgcttactgtgctaactattggaa

SEQ ID NO: 12760 - DNA, 25 bp, Artificial
  Probe
aacgcttactgtgctaactattgga

SEQ ID NO: 12761 - DNA, 25 bp, Artificial
  Probe
tcagtaccagcgagaatatagtgaa

SEQ ID NO: 12762 - DNA, 25 bp, Artificial
  Probe
tcctcacttctagtattgaacgctt

SEQ ID NO: 12763 - DNA, 25 bp, Artificial
  Probe
ctcagtaccagcgagaatatagtga

SEQ ID NO: 12764 - DNA, 25 bp, Artificial
  Probe
taactctgtcctcacttctagtatt

SEQ ID NO: 12765 - DNA, 25 bp, Artificial
  Probe
ttaactctgtcctcacttctagtat

SEQ ID NO: 12766 - DNA, 25 bp, Artificial
  Probe
tagtattgaacgcttactgtgctaa

SEQ ID NO: 12767 - DNA, 25 bp, Artificial
  Probe
tatctctctcaacttcctgtactta

SEQ ID NO: 12768 - DNA, 25 bp, Artificial
  Probe
acttctagtattgaacgcttactgt

SEQ ID NO: 12769 - DNA, 25 bp, Artificial
  Probe
cttctagtattgaacgcttactgtg

SEQ ID NO: 12770 - DNA, 25 bp, Artificial
  Probe
cacttctagtattgaacgcttactg

SEQ ID NO: 12771 - DNA, 25 bp, Artificial
  Probe
ctagtattgaacgcttactgtgcta

SEQ ID NO: 12772 - DNA, 25 bp, Artificial
  Probe
tcacttctagtattgaacgcttact

SEQ ID NO: 12773 - DNA, 25 bp, Artificial
  Probe
gtcctcacttctagtattgaacgct

SEQ ID NO: 12774 - DNA, 25 bp, Artificial
  Probe
tcttcaatgcgaccttccatatctg

SEQ ID NO: 12775 - DNA, 25 bp, Artificial
  Probe
ttctagtattgaacgcttactgtgc

SEQ ID NO: 12776 - DNA, 25 bp, Artificial
  Probe
tgtcctcacttctagtattgaacgc

SEQ ID NO: 12777 - DNA, 25 bp, Artificial
  Probe
agtattgaacgcttactgtgctaac

SEQ ID NO: 12778 - DNA, 25 bp, Artificial
  Probe
cctgtggaatggaatgaaatcaatg

SEQ ID NO: 12779 - DNA, 25 bp, Artificial
  Probe
ggtttaactctgtcctcacttctag

SEQ ID NO: 12780 - DNA, 25 bp, Artificial
  Probe
atgtcttcaatgcgaccttccatat

SEQ ID NO: 12781 - DNA, 25 bp, Artificial
  Probe
ctcaagagtgtagagaaccagatgc

SEQ ID NO: 12782 - DNA, 25 bp, Artificial
  Probe
gctcaagagtgtagagaaccagatg

SEQ ID NO: 12783 - DNA, 25 bp, Artificial
  Probe
gtggaatggaatgaaatcaatgctg

SEQ ID NO: 12784 - DNA, 25 bp, Artificial
  Probe
ctgtggaatggaatgaaatcaatgc

SEQ ID NO: 12785 - DNA, 25 bp, Artificial
  Probe
tctagtattgaacgcttactgtgct

SEQ ID NO: 12786 - DNA, 25 bp, Artificial
  Probe
ctctaagtctacctgtgtcttcaag

SEQ ID NO: 12787 - DNA, 25 bp, Artificial
  Probe
atctctaagtctacctgtgtcttca

SEQ ID NO: 12788 - DNA, 25 bp, Artificial
  Probe
tctctaagtctacctgtgtcttcaa

SEQ ID NO: 12789 - DNA, 25 bp, Artificial
  Probe
atggtctctatcttaggagtgttgt

SEQ ID NO: 12790 - DNA, 25 bp, Artificial
  Probe
actatggtctctatcttaggagtgt

SEQ ID NO: 12791 - DNA, 25 bp, Artificial
  Probe
taagtctacctgtgtcttcaagatg

SEQ ID NO: 12792 - DNA, 25 bp, Artificial
  Probe
tctaagtctacctgtgtcttcaaga

SEQ ID NO: 12793 - DNA, 25 bp, Artificial
  Probe
ctaagtctacctgtgtcttcaagat

SEQ ID NO: 12794 - DNA, 25 bp, Artificial
  Probe
gatctctaagtctacctgtgtcttc

SEQ ID NO: 12795 - DNA, 25 bp, Artificial
  Probe
tggtctctatcttaggagtgttgtg

SEQ ID NO: 12796 - DNA, 25 bp, Artificial
  Probe
tatggtctctatcttaggagtgttg

SEQ ID NO: 12797 - DNA, 25 bp, Artificial
  Probe
ctatggtctctatcttaggagtgtt

SEQ ID NO: 12798 - DNA, 25 bp, Artificial
  Probe
aactatggtctctatcttaggagtg

SEQ ID NO: 12799 - DNA, 25 bp, Artificial
  Probe
cctgtgtcttcaagatggttatatt

SEQ ID NO: 12800 - DNA, 25 bp, Artificial
  Probe
acatgacttgcttgaattattaggt

SEQ ID NO: 12801 - DNA, 25 bp, Artificial
  Probe
ggtctctatcttaggagtgttgtgg

SEQ ID NO: 12802 - DNA, 25 bp, Artificial
  Probe
gtgtgataacatgacttgcttgaat

SEQ ID NO: 12803 - DNA, 25 bp, Artificial
  Probe
tgtgataacatgacttgcttgaatt

SEQ ID NO: 12804 - DNA, 25 bp, Artificial
  Probe
aagtctacctgtgtcttcaagatgg

SEQ ID NO: 12805 - DNA, 25 bp, Artificial
  Probe
ctacctgtgtcttcaagatggttat

SEQ ID NO: 12806 - DNA, 25 bp, Artificial
  Probe
tgtgtgataacatgacttgcttgaa

SEQ ID NO: 12807 - DNA, 25 bp, Artificial
  Probe
catgacttgcttgaattattaggtt

SEQ ID NO: 12808 - DNA, 25 bp, Artificial
  Probe
aacatgacttgcttgaattattagg

SEQ ID NO: 12809 - DNA, 25 bp, Artificial
  Probe
gtgataacatgacttgcttgaatta

SEQ ID NO: 12810 - DNA, 25 bp, Artificial
  Probe
ctctgtgtgataacatgacttgctt

SEQ ID NO: 12811 - DNA, 25 bp, Artificial
  Probe
acctgtgtcttcaagatggttatat

SEQ ID NO: 12812 - DNA, 25 bp, Artificial
  Probe
tctacctgtgtcttcaagatggtta

SEQ ID NO: 12813 - DNA, 25 bp, Artificial
  Probe
ctgtgtgataacatgacttgcttga

SEQ ID NO: 12814 - DNA, 25 bp, Artificial
  Probe
tctgtgtgataacatgacttgcttg

SEQ ID NO: 12815 - DNA, 25 bp, Artificial
  Probe
tacctgtgtcttcaagatggttata

SEQ ID NO: 12816 - DNA, 25 bp, Artificial
  Probe
gtctacctgtgtcttcaagatggtt

SEQ ID NO: 12817 - DNA, 25 bp, Artificial
  Probe
tgataacatgacttgcttgaattat

SEQ ID NO: 12818 - DNA, 25 bp, Artificial
  Probe
ctctatcttaggagtgttgtgggtc

SEQ ID NO: 12819 - DNA, 25 bp, Artificial
  Probe
gtctctatcttaggagtgttgtggg

SEQ ID NO: 12820 - DNA, 25 bp, Artificial
  Probe
agatctctaagtctacctgtgtctt

SEQ ID NO: 12821 - DNA, 25 bp, Artificial
  Probe
cccaaactatggtctctatcttagg

SEQ ID NO: 12822 - DNA, 25 bp, Artificial
  Probe
ttaaatttgggctctgtgtgataac

SEQ ID NO: 12823 - DNA, 25 bp, Artificial
  Probe
aaatagtggctgaagtgttccctag

SEQ ID NO: 12824 - DNA, 25 bp, Artificial
  Probe
tctctatcttaggagtgttgtgggt

SEQ ID NO: 12825 - DNA, 25 bp, Artificial
  Probe
aaactatggtctctatcttaggagt

SEQ ID NO: 12826 - DNA, 25 bp, Artificial
  Probe
agtctacctgtgtcttcaagatggt

SEQ ID NO: 12827 - DNA, 25 bp, Artificial
  Probe
gtatcctcactgactagctccatgt

SEQ ID NO: 12828 - DNA, 25 bp, Artificial
  Probe
acccaaactatggtctctatcttag

SEQ ID NO: 12829 - DNA, 25 bp, Artificial
  Probe
caaactatggtctctatcttaggag

SEQ ID NO: 12830 - DNA, 25 bp, Artificial
  Probe
ccaaactatggtctctatcttagga

SEQ ID NO: 12831 - DNA, 25 bp, Artificial
  Probe
aatcttcaggaacggtatcagtagt

SEQ ID NO: 12832 - DNA, 25 bp, Artificial
  Probe
atcttcaggaacggtatcagtagtg

SEQ ID NO: 12833 - DNA, 25 bp, Artificial
  Probe
cttcaggaacggtatcagtagtgag

SEQ ID NO: 12834 - DNA, 25 bp, Artificial
  Probe
tcttcaggaacggtatcagtagtga

SEQ ID NO: 12835 - DNA, 25 bp, Artificial
  Probe
aaatcttcaggaacggtatcagtag

SEQ ID NO: 12836 - DNA, 25 bp, Artificial
  Probe
ataaatataagaaatggcgtgctcc

SEQ ID NO: 12837 - DNA, 25 bp, Artificial
  Probe
gctacctgcctggaataaatataag

SEQ ID NO: 12838 - DNA, 25 bp, Artificial
  Probe
ggaataaatataagaaatggcgtgc

SEQ ID NO: 12839 - DNA, 25 bp, Artificial
  Probe
taaatataagaaatggcgtgctccc

SEQ ID NO: 12840 - DNA, 25 bp, Artificial
  Probe
cctggaataaatataagaaatggcg

SEQ ID NO: 12841 - DNA, 25 bp, Artificial
  Probe
aataaatataagaaatggcgtgctc

SEQ ID NO: 12842 - DNA, 25 bp, Artificial
  Probe
gaataaatataagaaatggcgtgct

SEQ ID NO: 12843 - DNA, 25 bp, Artificial
  Probe
caggatagactggtcttccaagtac

SEQ ID NO: 12844 - DNA, 25 bp, Artificial
  Probe
acctgcctggaataaatataagaaa

SEQ ID NO: 12845 - DNA, 25 bp, Artificial
  Probe
tggaataaatataagaaatggcgtg

SEQ ID NO: 12846 - DNA, 25 bp, Artificial
  Probe
ctacctgcctggaataaatataaga

SEQ ID NO: 12847 - DNA, 25 bp, Artificial
  Probe
ctggaataaatataagaaatggcgt

SEQ ID NO: 12848 - DNA, 25 bp, Artificial
  Probe
tgcctggaataaatataagaaatgg

SEQ ID NO: 12849 - DNA, 25 bp, Artificial
  Probe
tacctgcctggaataaatataagaa

SEQ ID NO: 12850 - DNA, 25 bp, Artificial
  Probe
aggatagactggtcttccaagtacc

SEQ ID NO: 12851 - DNA, 25 bp, Artificial
  Probe
ttcaggaacggtatcagtagtgagc

SEQ ID NO: 12852 - DNA, 25 bp, Artificial
  Probe
ttgatttgaatgcaataccctcttt

SEQ ID NO: 12853 - DNA, 25 bp, Artificial
  Probe
cctgcctggaataaatataagaaat

SEQ ID NO: 12854 - DNA, 25 bp, Artificial
  Probe
tacagcagttctgaactaacacatt

SEQ ID NO: 12855 - DNA, 25 bp, Artificial
  Probe
ttacagcagttctgaactaacacat

SEQ ID NO: 12856 - DNA, 25 bp, Artificial
  Probe
caggaacggtatcagtagtgagcaa

SEQ ID NO: 12857 - DNA, 25 bp, Artificial
  Probe
aaaatcttcaggaacggtatcagta

SEQ ID NO: 12858 - DNA, 25 bp, Artificial
  Probe
cttacagcagttctgaactaacaca

SEQ ID NO: 12859 - DNA, 25 bp, Artificial
  Probe
acttacagcagttctgaactaacac

SEQ ID NO: 12860 - DNA, 25 bp, Artificial
  Probe
cacttacagcagttctgaactaaca

SEQ ID NO: 12861 - DNA, 25 bp, Artificial
  Probe
acacttacagcagttctgaactaac

SEQ ID NO: 12862 - DNA, 25 bp, Artificial
  Probe
cacacttacagcagttctgaactaa

SEQ ID NO: 12863 - DNA, 25 bp, Artificial
  Probe
gttctggtttgtctggaaaatcttc

SEQ ID NO: 12864 - DNA, 25 bp, Artificial
  Probe
gcaggatagactggtcttccaagta

SEQ ID NO: 12865 - DNA, 25 bp, Artificial
  Probe
agttctggtttgtctggaaaatctt

SEQ ID NO: 12866 - DNA, 25 bp, Artificial
  Probe
gaaaatcttcaggaacggtatcagt

SEQ ID NO: 12867 - DNA, 25 bp, Artificial
  Probe
ttctggtttgtctggaaaatcttca

SEQ ID NO: 12868 - DNA, 25 bp, Artificial
  Probe
aaggactttcttccatcaagttcat

SEQ ID NO: 12869 - DNA, 25 bp, Artificial
  Probe
acggtatcagtagtgagcaaaataa

SEQ ID NO: 12870 - DNA, 25 bp, Artificial
  Probe
aacggtatcagtagtgagcaaaata

SEQ ID NO: 12871 - DNA, 25 bp, Artificial
  Probe
cggtatcagtagtgagcaaaataac

SEQ ID NO: 12872 - DNA, 25 bp, Artificial
  Probe
cagtagtgagcaaaataacttcagt

SEQ ID NO: 12873 - DNA, 25 bp, Artificial
  Probe
aggaacggtatcagtagtgagcaaa

SEQ ID NO: 12874 - DNA, 25 bp, Artificial
  Probe
ggaaaatcttcaggaacggtatcag

SEQ ID NO: 12875 - DNA, 25 bp, Artificial
  Probe
caaggactttcttccatcaagttca

SEQ ID NO: 12876 - DNA, 25 bp, Artificial
  Probe
gaagtgctttgatgtgaaggatgta

SEQ ID NO: 12877 - DNA, 25 bp, Artificial
  Probe
aagtgctttgatgtgaaggatgtac

SEQ ID NO: 12878 - DNA, 25 bp, Artificial
  Probe
cagaaacacaagaccttcgttgaaa

SEQ ID NO: 12879 - DNA, 25 bp, Artificial
  Probe
gaatagagaaggccatgaaggagta

SEQ ID NO: 12880 - DNA, 25 bp, Artificial
  Probe
agaagtgctttgatgtgaaggatgt

SEQ ID NO: 12881 - DNA, 25 bp, Artificial
  Probe
aatagagaaggccatgaaggagtac

SEQ ID NO: 12882 - DNA, 25 bp, Artificial
  Probe
cagaagtacctgtcagacaatgtcc

SEQ ID NO: 12883 - DNA, 25 bp, Artificial
  Probe
ccagaagtacctgtcagacaatgtc

SEQ ID NO: 12884 - DNA, 25 bp, Artificial
  Probe
aaatacgagaaacagatcaaacatt

SEQ ID NO: 12885 - DNA, 25 bp, Artificial
  Probe
aatacgagaaacagatcaaacattt

SEQ ID NO: 12886 - DNA, 25 bp, Artificial
  Probe
gaagtacctgtcagacaatgtccac

SEQ ID NO: 12887 - DNA, 25 bp, Artificial
  Probe
agaagtacctgtcagacaatgtcca

SEQ ID NO: 12888 - DNA, 25 bp, Artificial
  Probe
tacgagaaacagatcaaacatttcg

SEQ ID NO: 12889 - DNA, 25 bp, Artificial
  Probe
gagacagccaactacctggttatct

SEQ ID NO: 12890 - DNA, 25 bp, Artificial
  Probe
cagtacatggagggcttcaagtatg

SEQ ID NO: 12891 - DNA, 25 bp, Artificial
  Probe
aactacctggttatctggtgcattg

SEQ ID NO: 12892 - DNA, 25 bp, Artificial
  Probe
caactacctggttatctggtgcatt

SEQ ID NO: 12893 - DNA, 25 bp, Artificial
  Probe
agaaacagatcaaacatttcggcat

SEQ ID NO: 12894 - DNA, 25 bp, Artificial
  Probe
agacagccaactacctggttatctg

SEQ ID NO: 12895 - DNA, 25 bp, Artificial
  Probe
gaaacagatcaaacatttcggcatg

SEQ ID NO: 12896 - DNA, 25 bp, Artificial
  Probe
agtacatggagggcttcaagtatga

SEQ ID NO: 12897 - DNA, 25 bp, Artificial
  Probe
atacgagaaacagatcaaacatttc

SEQ ID NO: 12898 - DNA, 25 bp, Artificial
  Probe
ttgatgtgaaggatgtacagatgct

SEQ ID NO: 12899 - DNA, 25 bp, Artificial
  Probe
tttcaccaagatcaagactgctgac

SEQ ID NO: 12900 - DNA, 25 bp, Artificial
  Probe
ctacctggttatctggtgcattgac

SEQ ID NO: 12901 - DNA, 25 bp, Artificial
  Probe
gagaaacagatcaaacatttcggca

SEQ ID NO: 12902 - DNA, 25 bp, Artificial
  Probe
acgagaaacagatcaaacatttcgg

SEQ ID NO: 12903 - DNA, 25 bp, Artificial
  Probe
agaaacacaagaccttcgttgaaaa

SEQ ID NO: 12904 - DNA, 25 bp, Artificial
  Probe
cttcagcaagagcatggtcaatacc

SEQ ID NO: 12905 - DNA, 25 bp, Artificial
  Probe
atagagaaggccatgaaggagtacg

SEQ ID NO: 12906 - DNA, 25 bp, Artificial
  Probe
aagtacctgtcagacaatgtccacc

SEQ ID NO: 12907 - DNA, 25 bp, Artificial
  Probe
actacctggttatctggtgcattga

SEQ ID NO: 12908 - DNA, 25 bp, Artificial
  Probe
ggagacagccaactacctggttatc

SEQ ID NO: 12909 - DNA, 25 bp, Artificial
  Probe
agccagaagtacctgtcagacaatg

SEQ ID NO: 12910 - DNA, 25 bp, Artificial
  Probe
cagccagaagtacctgtcagacaat

SEQ ID NO: 12911 - DNA, 25 bp, Artificial
  Probe
tgatgtgaaggatgtacagatgctg

SEQ ID NO: 12912 - DNA, 25 bp, Artificial
  Probe
gttatctggtgcattgacctggaag

SEQ ID NO: 12913 - DNA, 25 bp, Artificial
  Probe
ctttgatgtgaaggatgtacagatg

SEQ ID NO: 12914 - DNA, 25 bp, Artificial
  Probe
gcagaaacacaagaccttcgttgaa

SEQ ID NO: 12915 - DNA, 25 bp, Artificial
  Probe
ttcaccaagatcaagactgctgacc

SEQ ID NO: 12916 - DNA, 25 bp, Artificial
  Probe
tacatggagggcttcaagtatgaac

SEQ ID NO: 12917 - DNA, 25 bp, Artificial
  Probe
gtacatggagggcttcaagtatgaa

SEQ ID NO: 12918 - DNA, 25 bp, Artificial
  Probe
gctttgatgtgaaggatgtacagat

SEQ ID NO: 12919 - DNA, 25 bp, Artificial
  Probe
gacagccaactacctggttatctgg

SEQ ID NO: 12920 - DNA, 25 bp, Artificial
  Probe
gccagaagtacctgtcagacaatgt

SEQ ID NO: 12921 - DNA, 25 bp, Artificial
  Probe
cattgtggctgtattggagtatatc

SEQ ID NO: 12922 - DNA, 25 bp, Artificial
  Probe
attgtggctgtattggagtatatct

SEQ ID NO: 12923 - DNA, 25 bp, Artificial
  Probe
ttgtggctgtattggagtatatctc

SEQ ID NO: 12924 - DNA, 25 bp, Artificial
  Probe
tgtggctgtattggagtatatctca

SEQ ID NO: 12925 - DNA, 25 bp, Artificial
  Probe
acattgtggctgtattggagtatat

SEQ ID NO: 12926 - DNA, 25 bp, Artificial
  Probe
gtggctgtattggagtatatctcag

SEQ ID NO: 12927 - DNA, 25 bp, Artificial
  Probe
ctgtattggagtatatctcagcaga

SEQ ID NO: 12928 - DNA, 25 bp, Artificial
  Probe
ttgaagacacagtagaaatgacaga

SEQ ID NO: 12929 - DNA, 25 bp, Artificial
  Probe
aggtttgattgaagacacagtagaa

SEQ ID NO: 12930 - DNA, 25 bp, Artificial
  Probe
gaaatcgcagaagaaagacagtatc

SEQ ID NO: 12931 - DNA, 25 bp, Artificial
  Probe
agacacagtagaaatgacagatgaa

SEQ ID NO: 12932 - DNA, 25 bp, Artificial
  Probe
aagacacagtagaaatgacagatga

SEQ ID NO: 12933 - DNA, 25 bp, Artificial
  Probe
tgaagacacagtagaaatgacagat

SEQ ID NO: 12934 - DNA, 25 bp, Artificial
  Probe
atgtttgaccaggatgacgatatag

SEQ ID NO: 12935 - DNA, 25 bp, Artificial
  Probe
acacagtagaaatgacagatgaagg

SEQ ID NO: 12936 - DNA, 25 bp, Artificial
  Probe
gacacagtagaaatgacagatgaag

SEQ ID NO: 12937 - DNA, 25 bp, Artificial
  Probe
gaagacacagtagaaatgacagatg

SEQ ID NO: 12938 - DNA, 25 bp, Artificial
  Probe
ggtttgattgaagacacagtagaaa

SEQ ID NO: 12939 - DNA, 25 bp, Artificial
  Probe
tgaaatcgcagaagaaagacagtat

SEQ ID NO: 12940 - DNA, 25 bp, Artificial
  Probe
actattatgaccttgttagaactga

SEQ ID NO: 12941 - DNA, 25 bp, Artificial
  Probe
taggtttgattgaagacacagtaga

SEQ ID NO: 12942 - DNA, 25 bp, Artificial
  Probe
gatataggcttggtttctctctgtg

SEQ ID NO: 12943 - DNA, 25 bp, Artificial
  Probe
attgaagacacagtagaaatgacag

SEQ ID NO: 12944 - DNA, 25 bp, Artificial
  Probe
gattgaagacacagtagaaatgaca

SEQ ID NO: 12945 - DNA, 25 bp, Artificial
  Probe
tgattgaagacacagtagaaatgac

SEQ ID NO: 12946 - DNA, 25 bp, Artificial
  Probe
atataggcttggtttctctctgtga

SEQ ID NO: 12947 - DNA, 25 bp, Artificial
  Probe
atcgcagaagaaagacagtatctac

SEQ ID NO: 12948 - DNA, 25 bp, Artificial
  Probe
ctacattgtggctgtattggagtat

SEQ ID NO: 12949 - DNA, 25 bp, Artificial
  Probe
aaatcgcagaagaaagacagtatct

SEQ ID NO: 12950 - DNA, 25 bp, Artificial
  Probe
gatgacgatataggcttggtttctc

SEQ ID NO: 12951 - DNA, 25 bp, Artificial
  Probe
aatcgcagaagaaagacagtatcta

SEQ ID NO: 12952 - DNA, 25 bp, Artificial
  Probe
cagatatacatgaactgactgtgaa

SEQ ID NO: 12953 - DNA, 25 bp, Artificial
  Probe
tatgaccttgttagaactgaaatcg

SEQ ID NO: 12954 - DNA, 25 bp, Artificial
  Probe
tacattgtggctgtattggagtata

SEQ ID NO: 12955 - DNA, 25 bp, Artificial
  Probe
ttaggtttgattgaagacacagtag

SEQ ID NO: 12956 - DNA, 25 bp, Artificial
  Probe
gaagaaagacagtatctacgggaac

SEQ ID NO: 12957 - DNA, 25 bp, Artificial
  Probe
agaagaaagacagtatctacgggaa

SEQ ID NO: 12958 - DNA, 25 bp, Artificial
  Probe
atgacgatataggcttggtttctct

SEQ ID NO: 12959 - DNA, 25 bp, Artificial
  Probe
ttgaccaggatgacgatataggctt

SEQ ID NO: 12960 - DNA, 25 bp, Artificial
  Probe
cagtagaaatgacagatgaaggcag

SEQ ID NO: 12961 - DNA, 25 bp, Artificial
  Probe
tataggcttggtttctctctgtgaa

SEQ ID NO: 12962 - DNA, 25 bp, Artificial
  Probe
agaaatcctctcttactacctgtgg

SEQ ID NO: 12963 - DNA, 25 bp, Artificial
  Probe
cggcattatgaaatatctcagcaag

SEQ ID NO: 12964 - DNA, 25 bp, Artificial
  Probe
ttcctcatcctattgataaatgggc

SEQ ID NO: 12965 - DNA, 25 bp, Artificial
  Probe
atcctctcttactacctgtggacaa

SEQ ID NO: 12966 - DNA, 25 bp, Artificial
  Probe
cacttgactacatctggaatgaact

SEQ ID NO: 12967 - DNA, 25 bp, Artificial
  Probe
ttgactacatctggaatgaactaca

SEQ ID NO: 12968 - DNA, 25 bp, Artificial
  Probe
tgactacatctggaatgaactacat

SEQ ID NO: 12969 - DNA, 25 bp, Artificial
  Probe
acttgactacatctggaatgaacta

SEQ ID NO: 12970 - DNA, 25 bp, Artificial
  Probe
cttgactacatctggaatgaactac

SEQ ID NO: 12971 - DNA, 25 bp, Artificial
  Probe
tcatatctgtgaactgagaaggctt

SEQ ID NO: 12972 - DNA, 25 bp, Artificial
  Probe
gactacatctggaatgaactacata

SEQ ID NO: 12973 - DNA, 25 bp, Artificial
  Probe
tatatgagaggtctatctacatgcc

SEQ ID NO: 12974 - DNA, 25 bp, Artificial
  Probe
atatgagaggtctatctacatgcct

SEQ ID NO: 12975 - DNA, 25 bp, Artificial
  Probe
tatgagaggtctatctacatgcctg

SEQ ID NO: 12976 - DNA, 25 bp, Artificial
  Probe
tgaactacatatagtccagagatgg

SEQ ID NO: 12977 - DNA, 25 bp, Artificial
  Probe
ccacttgactacatctggaatgaac

SEQ ID NO: 12978 - DNA, 25 bp, Artificial
  Probe
gaatttatattggaagttgacggga

SEQ ID NO: 12979 - DNA, 25 bp, Artificial
  Probe
agaatttatattggaagttgacggg

SEQ ID NO: 12980 - DNA, 25 bp, Artificial
  Probe
atatctgtgaactgagaaggctttc

SEQ ID NO: 12981 - DNA, 25 bp, Artificial
  Probe
gtatatgagaggtctatctacatgc

SEQ ID NO: 12982 - DNA, 25 bp, Artificial
  Probe
catatctgtgaactgagaaggcttt

SEQ ID NO: 12983 - DNA, 25 bp, Artificial
  Probe
actacatctggaatgaactacatat

SEQ ID NO: 12984 - DNA, 25 bp, Artificial
  Probe
agaaatgctcatatctgtgaactga

SEQ ID NO: 12985 - DNA, 25 bp, Artificial
  Probe
acttcattatagatgtgatttgccg

SEQ ID NO: 12986 - DNA, 25 bp, Artificial
  Probe
ggaatgaactacatatagtccagag

SEQ ID NO: 12987 - DNA, 25 bp, Artificial
  Probe
gagaaatgctcatatctgtgaactg

SEQ ID NO: 12988 - DNA, 25 bp, Artificial
  Probe
ttggagaaatgctcatatctgtgaa

SEQ ID NO: 12989 - DNA, 25 bp, Artificial
  Probe
aatttatattggaagttgacgggat

SEQ ID NO: 12990 - DNA, 25 bp, Artificial
  Probe
ggagaaatgctcatatctgtgaact

SEQ ID NO: 12991 - DNA, 25 bp, Artificial
  Probe
cagaatttatattggaagttgacgg

SEQ ID NO: 12992 - DNA, 25 bp, Artificial
  Probe
tggagaaatgctcatatctgtgaac

SEQ ID NO: 12993 - DNA, 25 bp, Artificial
  Probe
atttatattggaagttgacgggatc

SEQ ID NO: 12994 - DNA, 25 bp, Artificial
  Probe
tttatattggaagttgacgggatca

SEQ ID NO: 12995 - DNA, 25 bp, Artificial
  Probe
ttatattggaagttgacgggatcac

SEQ ID NO: 12996 - DNA, 25 bp, Artificial
  Probe
tttgttgttgttgttgttgttgaca

SEQ ID NO: 12997 - DNA, 25 bp, Artificial
  Probe
atctggaatgaactacatatagtcc

SEQ ID NO: 12998 - DNA, 25 bp, Artificial
  Probe
gacttcattatagatgtgatttgcc

SEQ ID NO: 12999 - DNA, 25 bp, Artificial
  Probe
atgaactacatatagtccagagatg

SEQ ID NO: 13000 - DNA, 25 bp, Artificial
  Probe
gaatgaactacatatagtccagaga

SEQ ID NO: 13001 - DNA, 25 bp, Artificial
  Probe
tgccagaagagacttcattatagat

SEQ ID NO: 13002 - DNA, 25 bp, Artificial
  Probe
atgccagaagagacttcattataga

SEQ ID NO: 13003 - DNA, 25 bp, Artificial
  Probe
gccagaagagacttcattatagatg

SEQ ID NO: 13004 - DNA, 25 bp, Artificial
  Probe
catgccagaagagacttcattatag

SEQ ID NO: 13005 - DNA, 25 bp, Artificial
  Probe
ctcttacctgctgagtcatctctcc

SEQ ID NO: 13006 - DNA, 25 bp, Artificial
  Probe
acatctggaatgaactacatatagt

SEQ ID NO: 13007 - DNA, 25 bp, Artificial
  Probe
ttgttgttgttgttgttgttgacaa

SEQ ID NO: 13008 - DNA, 25 bp, Artificial
  Probe
tatattggaagttgacgggatcacc

SEQ ID NO: 13009 - DNA, 25 bp, Artificial
  Probe
gccagaatttatattggaagttgac

SEQ ID NO: 13010 - DNA, 25 bp, Artificial
  Probe
agacttcattatagatgtgatttgc

SEQ ID NO: 13011 - DNA, 25 bp, Artificial
  Probe
gaacatctcacattacgaagaacag

SEQ ID NO: 13012 - DNA, 25 bp, Artificial
  Probe
aggaacatctcacattacgaagaac

SEQ ID NO: 13013 - DNA, 25 bp, Artificial
  Probe
aagtgagcatcttgattagaagcaa

SEQ ID NO: 13014 - DNA, 25 bp, Artificial
  Probe
ggaacatctcacattacgaagaaca

SEQ ID NO: 13015 - DNA, 25 bp, Artificial
  Probe
gaagtgagcatcttgattagaagca

SEQ ID NO: 13016 - DNA, 25 bp, Artificial
  Probe
gaggaacatctcacattacgaagaa

SEQ ID NO: 13017 - DNA, 25 bp, Artificial
  Probe
aagaggaacatctcacattacgaag

SEQ ID NO: 13018 - DNA, 25 bp, Artificial
  Probe
gaagaggaacatctcacattacgaa

SEQ ID NO: 13019 - DNA, 25 bp, Artificial
  Probe
atgaagaggaacatctcacattacg

SEQ ID NO: 13020 - DNA, 25 bp, Artificial
  Probe
aacatctcacattacgaagaacagc

SEQ ID NO: 13021 - DNA, 25 bp, Artificial
  Probe
tagaccacttatgtcacgattactc

SEQ ID NO: 13022 - DNA, 25 bp, Artificial
  Probe
tcattagaccacttatgtcacgatt

SEQ ID NO: 13023 - DNA, 25 bp, Artificial
  Probe
agaggaacatctcacattacgaaga

SEQ ID NO: 13024 - DNA, 25 bp, Artificial
  Probe
gtcattagaccacttatgtcacgat

SEQ ID NO: 13025 - DNA, 25 bp, Artificial
  Probe
accacttatgtcacgattactccag

SEQ ID NO: 13026 - DNA, 25 bp, Artificial
  Probe
ttagaccacttatgtcacgattact

SEQ ID NO: 13027 - DNA, 25 bp, Artificial
  Probe
tgaagaggaacatctcacattacga

SEQ ID NO: 13028 - DNA, 25 bp, Artificial
  Probe
catgaagaggaacatctcacattac

SEQ ID NO: 13029 - DNA, 25 bp, Artificial
  Probe
attagaccacttatgtcacgattac

SEQ ID NO: 13030 - DNA, 25 bp, Artificial
  Probe
cattagaccacttatgtcacgatta

SEQ ID NO: 13031 - DNA, 25 bp, Artificial
  Probe
agaccacttatgtcacgattactcc

SEQ ID NO: 13032 - DNA, 25 bp, Artificial
  Probe
gaccacttatgtcacgattactcca

SEQ ID NO: 13033 - DNA, 25 bp, Artificial
  Probe
cacttatgtcacgattactccagcc

SEQ ID NO: 13034 - DNA, 25 bp, Artificial
  Probe
ccacttatgtcacgattactccagc

SEQ ID NO: 13035 - DNA, 25 bp, Artificial
  Probe
ttctcagtgtgataccaaatccttc

SEQ ID NO: 13036 - DNA, 25 bp, Artificial
  Probe
cttctcagtgtgataccaaatcctt

SEQ ID NO: 13037 - DNA, 25 bp, Artificial
  Probe
caaatgcttagtcatggatgttcaa

SEQ ID NO: 13038 - DNA, 25 bp, Artificial
  Probe
cttagtcatggatgttcaagcattt

SEQ ID NO: 13039 - DNA, 25 bp, Artificial
  Probe
aaatgcttagtcatggatgttcaag

SEQ ID NO: 13040 - DNA, 25 bp, Artificial
  Probe
taaagggcacttagaagtcttgaaa

SEQ ID NO: 13041 - DNA, 25 bp, Artificial
  Probe
acatctcacattacgaagaacagct

SEQ ID NO: 13042 - DNA, 25 bp, Artificial
  Probe
gtcaaatgcttagtcatggatgttc

SEQ ID NO: 13043 - DNA, 25 bp, Artificial
  Probe
tcaaatgcttagtcatggatgttca

SEQ ID NO: 13044 - DNA, 25 bp, Artificial
  Probe
ttagtcatggatgttcaagcatttg

SEQ ID NO: 13045 - DNA, 25 bp, Artificial
  Probe
gtaaagggcacttagaagtcttgaa

SEQ ID NO: 13046 - DNA, 25 bp, Artificial
  Probe
gcacttagaagtcttgaaagatgga

SEQ ID NO: 13047 - DNA, 25 bp, Artificial
  Probe
agtgtgataccaaatccttccagtc

SEQ ID NO: 13048 - DNA, 25 bp, Artificial
  Probe
tagaagtcttgaaagatggacagag

SEQ ID NO: 13049 - DNA, 25 bp, Artificial
  Probe
aaagggcacttagaagtcttgaaag

SEQ ID NO: 13050 - DNA, 25 bp, Artificial
  Probe
ttagaagtcttgaaagatggacaga

SEQ ID NO: 13051 - DNA, 25 bp, Artificial
  Probe
acttagaagtcttgaaagatggaca

SEQ ID NO: 13052 - DNA, 25 bp, Artificial
  Probe
cttagaagtcttgaaagatggacag

SEQ ID NO: 13053 - DNA, 25 bp, Artificial
  Probe
cacttagaagtcttgaaagatggac

SEQ ID NO: 13054 - DNA, 25 bp, Artificial
  Probe
tctcagtgtgataccaaatccttcc

SEQ ID NO: 13055 - DNA, 25 bp, Artificial
  Probe
ccttctcagtgtgataccaaatcct

SEQ ID NO: 13056 - DNA, 25 bp, Artificial
  Probe
atgatgctctacttcttcagtatgg

SEQ ID NO: 13057 - DNA, 25 bp, Artificial
  Probe
catgatgctctacttcttcagtatg

SEQ ID NO: 13058 - DNA, 25 bp, Artificial
  Probe
gcactaagaaagaaggctgtactat

SEQ ID NO: 13059 - DNA, 25 bp, Artificial
  Probe
tgatgctctacttcttcagtatggc

SEQ ID NO: 13060 - DNA, 25 bp, Artificial
  Probe
aagaaagaaggctgtactatactct

SEQ ID NO: 13061 - DNA, 25 bp, Artificial
  Probe
ccgtcctatctcagctataagtttc

SEQ ID NO: 13062 - DNA, 25 bp, Artificial
  Probe
cgtcctatctcagctataagtttct

SEQ ID NO: 13063 - DNA, 25 bp, Artificial
  Probe
tgccgtcctatctcagctataagtt

SEQ ID NO: 13064 - DNA, 25 bp, Artificial
  Probe
ggcactaagaaagaaggctgtacta

SEQ ID NO: 13065 - DNA, 25 bp, Artificial
  Probe
agaaggctgtactatactcttcatg

SEQ ID NO: 13066 - DNA, 25 bp, Artificial
  Probe
actcttcatgatgctctacttcttc

SEQ ID NO: 13067 - DNA, 25 bp, Artificial
  Probe
gctgtactatactcttcatgatgct

SEQ ID NO: 13068 - DNA, 25 bp, Artificial
  Probe
aagaaggctgtactatactcttcat

SEQ ID NO: 13069 - DNA, 25 bp, Artificial
  Probe
aggctgtactatactcttcatgatg

SEQ ID NO: 13070 - DNA, 25 bp, Artificial
  Probe
cactaagaaagaaggctgtactata

SEQ ID NO: 13071 - DNA, 25 bp, Artificial
  Probe
actaagaaagaaggctgtactatac

SEQ ID NO: 13072 - DNA, 25 bp, Artificial
  Probe
ggctgtactatactcttcatgatgc

SEQ ID NO: 13073 - DNA, 25 bp, Artificial
  Probe
tactcttcatgatgctctacttctt

SEQ ID NO: 13074 - DNA, 25 bp, Artificial
  Probe
atactcttcatgatgctctacttct

SEQ ID NO: 13075 - DNA, 25 bp, Artificial
  Probe
cctatctcagctataagtttctggg

SEQ ID NO: 13076 - DNA, 25 bp, Artificial
  Probe
tcttcatgatgctctacttcttcag

SEQ ID NO: 13077 - DNA, 25 bp, Artificial
  Probe
ctcttcatgatgctctacttcttca

SEQ ID NO: 13078 - DNA, 25 bp, Artificial
  Probe
tatctcagctataagtttctgggtg

SEQ ID NO: 13079 - DNA, 25 bp, Artificial
  Probe
taagaaagaaggctgtactatactc

SEQ ID NO: 13080 - DNA, 25 bp, Artificial
  Probe
ctaagaaagaaggctgtactatact

SEQ ID NO: 13081 - DNA, 25 bp, Artificial
  Probe
cttcatgatgctctacttcttcagt

SEQ ID NO: 13082 - DNA, 25 bp, Artificial
  Probe
tgtactatactcttcatgatgctct

SEQ ID NO: 13083 - DNA, 25 bp, Artificial
  Probe
ctatctcagctataagtttctgggt

SEQ ID NO: 13084 - DNA, 25 bp, Artificial
  Probe
aaggctgtactatactcttcatgat

SEQ ID NO: 13085 - DNA, 25 bp, Artificial
  Probe
gccgtcctatctcagctataagttt

SEQ ID NO: 13086 - DNA, 25 bp, Artificial
  Probe
tcctatctcagctataagtttctgg

SEQ ID NO: 13087 - DNA, 25 bp, Artificial
  Probe
ctgtactatactcttcatgatgctc

SEQ ID NO: 13088 - DNA, 25 bp, Artificial
  Probe
atctcagctataagtttctgggtga

SEQ ID NO: 13089 - DNA, 25 bp, Artificial
  Probe
gtgccgtcctatctcagctataagt

SEQ ID NO: 13090 - DNA, 25 bp, Artificial
  Probe
actatactcttcatgatgctctact

SEQ ID NO: 13091 - DNA, 25 bp, Artificial
  Probe
caccctacggactcctattttattt

SEQ ID NO: 13092 - DNA, 25 bp, Artificial
  Probe
gtcctatctcagctataagtttctg

SEQ ID NO: 13093 - DNA, 25 bp, Artificial
  Probe
agaaagaaggctgtactatactctt

SEQ ID NO: 13094 - DNA, 25 bp, Artificial
  Probe
cttctactttcttcacggtcaccac

SEQ ID NO: 13095 - DNA, 25 bp, Artificial
  Probe
accctacggactcctattttatttt

SEQ ID NO: 13096 - DNA, 25 bp, Artificial
  Probe
ttcatgatgctctacttcttcagta

SEQ ID NO: 13097 - DNA, 25 bp, Artificial
  Probe
tcatgatgctctacttcttcagtat

SEQ ID NO: 13098 - DNA, 25 bp, Artificial
  Probe
tatactcttcatgatgctctacttc

SEQ ID NO: 13099 - DNA, 25 bp, Artificial
  Probe
ctatactcttcatgatgctctactt

SEQ ID NO: 13100 - DNA, 25 bp, Artificial
  Probe
ggtgccgtcctatctcagctataag

SEQ ID NO: 13101 - DNA, 25 bp, Artificial
  Probe
cacattagtcacgacaacataggtg

SEQ ID NO: 13102 - DNA, 25 bp, Artificial
  Probe
ttatatgaagcaagctgtgttactt

SEQ ID NO: 13103 - DNA, 25 bp, Artificial
  Probe
ccgaagaaggattgaaatagcacat

SEQ ID NO: 13104 - DNA, 25 bp, Artificial
  Probe
gcacattagtcacgacaacataggt

SEQ ID NO: 13105 - DNA, 25 bp, Artificial
  Probe
acattagtcacgacaacataggtgg

SEQ ID NO: 13106 - DNA, 25 bp, Artificial
  Probe
cgaagaaggattgaaatagcacatg

SEQ ID NO: 13107 - DNA, 25 bp, Artificial
  Probe
ctgcacattagtcacgacaacatag

SEQ ID NO: 13108 - DNA, 25 bp, Artificial
  Probe
gaagaaggattgaaatagcacatgc

SEQ ID NO: 13109 - DNA, 25 bp, Artificial
  Probe
aagaaggattgaaatagcacatgcc

SEQ ID NO: 13110 - DNA, 25 bp, Artificial
  Probe
tttatatgaagcaagctgtgttact

SEQ ID NO: 13111 - DNA, 25 bp, Artificial
  Probe
tgcacattagtcacgacaacatagg

SEQ ID NO: 13112 - DNA, 25 bp, Artificial
  Probe
atttatatgaagcaagctgtgttac

SEQ ID NO: 13113 - DNA, 25 bp, Artificial
  Probe
cattagtcacgacaacataggtggc

SEQ ID NO: 13114 - DNA, 25 bp, Artificial
  Probe
aactctccgtagtgtcagtactaag

SEQ ID NO: 13115 - DNA, 25 bp, Artificial
  Probe
tatatgaagcaagctgtgttacttg

SEQ ID NO: 13116 - DNA, 25 bp, Artificial
  Probe
cttatttatatgaagcaagctgtgt

SEQ ID NO: 13117 - DNA, 25 bp, Artificial
  Probe
acttatttatatgaagcaagctgtg

SEQ ID NO: 13118 - DNA, 25 bp, Artificial
  Probe
ggattgaaatagcacatgccctttg

SEQ ID NO: 13119 - DNA, 25 bp, Artificial
  Probe
atatgaagcaagctgtgttacttga

SEQ ID NO: 13120 - DNA, 25 bp, Artificial
  Probe
tatgaagcaagctgtgttacttgaa

SEQ ID NO: 13121 - DNA, 25 bp, Artificial
  Probe
tccgagagacaaattaaaatctggt

SEQ ID NO: 13122 - DNA, 25 bp, Artificial
  Probe
gctgcacattagtcacgacaacata

SEQ ID NO: 13123 - DNA, 25 bp, Artificial
  Probe
ccgagagacaaattaaaatctggtt

SEQ ID NO: 13124 - DNA, 25 bp, Artificial
  Probe
gccgaagaaggattgaaatagcaca

SEQ ID NO: 13125 - DNA, 25 bp, Artificial
  Probe
ttatttatatgaagcaagctgtgtt

SEQ ID NO: 13126 - DNA, 25 bp, Artificial
  Probe
gaagcaagctgtgttacttgaagta

SEQ ID NO: 13127 - DNA, 25 bp, Artificial
  Probe
ctccgagagacaaattaaaatctgg

SEQ ID NO: 13128 - DNA, 25 bp, Artificial
  Probe
agaaggattgaaatagcacatgccc

SEQ ID NO: 13129 - DNA, 25 bp, Artificial
  Probe
cgagagacaaattaaaatctggttc

SEQ ID NO: 13130 - DNA, 25 bp, Artificial
  Probe
aacttatttatatgaagcaagctgt

SEQ ID NO: 13131 - DNA, 25 bp, Artificial
  Probe
tttaatcatgagcctgtttattgcc

SEQ ID NO: 13132 - DNA, 25 bp, Artificial
  Probe
atgaagcaagctgtgttacttgaag

SEQ ID NO: 13133 - DNA, 25 bp, Artificial
  Probe
gagagacaaattaaaatctggttcc

SEQ ID NO: 13134 - DNA, 25 bp, Artificial
  Probe
ttaatcatgagcctgtttattgcca

SEQ ID NO: 13135 - DNA, 25 bp, Artificial
  Probe
aggattgaaatagcacatgcccttt

SEQ ID NO: 13136 - DNA, 25 bp, Artificial
  Probe
atcatgagcctgtttattgccatta

SEQ ID NO: 13137 - DNA, 25 bp, Artificial
  Probe
taatcatgagcctgtttattgccat

SEQ ID NO: 13138 - DNA, 25 bp, Artificial
  Probe
ctctccgtagtgtcagtactaaggt

SEQ ID NO: 13139 - DNA, 25 bp, Artificial
  Probe
actctccgtagtgtcagtactaagg

SEQ ID NO: 13140 - DNA, 25 bp, Artificial
  Probe
tatttatatgaagcaagctgtgtta

SEQ ID NO: 13141 - DNA, 25 bp, Artificial
  Probe
gaaagaattccacttcaaccgctac

SEQ ID NO: 13142 - DNA, 25 bp, Artificial
  Probe
agaaagaattccacttcaaccgcta

SEQ ID NO: 13143 - DNA, 25 bp, Artificial
  Probe
aatcatgagcctgtttattgccatt

SEQ ID NO: 13144 - DNA, 25 bp, Artificial
  Probe
ctccgtagtgtcagtactaaggtga

SEQ ID NO: 13145 - DNA, 25 bp, Artificial
  Probe
tctccgtagtgtcagtactaaggtg

SEQ ID NO: 13146 - DNA, 25 bp, Artificial
  Probe
gatattattcctggttggtgtctgt

SEQ ID NO: 13147 - DNA, 25 bp, Artificial
  Probe
atattattcctggttggtgtctgtg

SEQ ID NO: 13148 - DNA, 25 bp, Artificial
  Probe
agaagatattattcctggttggtgt

SEQ ID NO: 13149 - DNA, 25 bp, Artificial
  Probe
agatattattcctggttggtgtctg

SEQ ID NO: 13150 - DNA, 25 bp, Artificial
  Probe
gaagatattattcctggttggtgtc

SEQ ID NO: 13151 - DNA, 25 bp, Artificial
  Probe
aagatattattcctggttggtgtct

SEQ ID NO: 13152 - DNA, 25 bp, Artificial
  Probe
tattattcctggttggtgtctgtgt

SEQ ID NO: 13153 - DNA, 25 bp, Artificial
  Probe
aagaagatattattcctggttggtg

SEQ ID NO: 13154 - DNA, 25 bp, Artificial
  Probe
atggttgtataaagaggaatgtgct

SEQ ID NO: 13155 - DNA, 25 bp, Artificial
  Probe
tggttgtataaagaggaatgtgcta

SEQ ID NO: 13156 - DNA, 25 bp, Artificial
  Probe
gagcgatatggttgtataaagagga

SEQ ID NO: 13157 - DNA, 25 bp, Artificial
  Probe
agagcgatatggttgtataaagagg

SEQ ID NO: 13158 - DNA, 25 bp, Artificial
  Probe
agcgatatggttgtataaagaggaa

SEQ ID NO: 13159 - DNA, 25 bp, Artificial
  Probe
attattcctggttggtgtctgtgtg

SEQ ID NO: 13160 - DNA, 25 bp, Artificial
  Probe
cagagcgatatggttgtataaagag

SEQ ID NO: 13161 - DNA, 25 bp, Artificial
  Probe
tatggttgtataaagaggaatgtgc

SEQ ID NO: 13162 - DNA, 25 bp, Artificial
  Probe
aattccactttaaccgatacctgac

SEQ ID NO: 13163 - DNA, 25 bp, Artificial
  Probe
ggttgtataaagaggaatgtgctaa

SEQ ID NO: 13164 - DNA, 25 bp, Artificial
  Probe
gcgatatggttgtataaagaggaat

SEQ ID NO: 13165 - DNA, 25 bp, Artificial
  Probe
catctgtcctggttactgcttagtg

SEQ ID NO: 13166 - DNA, 25 bp, Artificial
  Probe
acccattccctcgtctatataatct

SEQ ID NO: 13167 - DNA, 25 bp, Artificial
  Probe
cacccattccctcgtctatataatc

SEQ ID NO: 13168 - DNA, 25 bp, Artificial
  Probe
acacccattccctcgtctatataat

SEQ ID NO: 13169 - DNA, 25 bp, Artificial
  Probe
aagaggaatgtgctaagaataaact

SEQ ID NO: 13170 - DNA, 25 bp, Artificial
  Probe
aggaatgtgctaagaataaacttca

SEQ ID NO: 13171 - DNA, 25 bp, Artificial
  Probe
acagagcgatatggttgtataaaga

SEQ ID NO: 13172 - DNA, 25 bp, Artificial
  Probe
agaggaatgtgctaagaataaactt

SEQ ID NO: 13173 - DNA, 25 bp, Artificial
  Probe
cacacccattccctcgtctatataa

SEQ ID NO: 13174 - DNA, 25 bp, Artificial
  Probe
acatctgtcctggttactgcttagt

SEQ ID NO: 13175 - DNA, 25 bp, Artificial
  Probe
cccattccctcgtctatataatcta

SEQ ID NO: 13176 - DNA, 25 bp, Artificial
  Probe
gttgtataaagaggaatgtgctaag

SEQ ID NO: 13177 - DNA, 25 bp, Artificial
  Probe
gaggaatgtgctaagaataaacttc

SEQ ID NO: 13178 - DNA, 25 bp, Artificial
  Probe
agagatattgttgtcttattctggg

SEQ ID NO: 13179 - DNA, 25 bp, Artificial
  Probe
aaagaagatattattcctggttggt

SEQ ID NO: 13180 - DNA, 25 bp, Artificial
  Probe
tgtataaagaggaatgtgctaagaa

SEQ ID NO: 13181 - DNA, 25 bp, Artificial
  Probe
ttgtataaagaggaatgtgctaaga

SEQ ID NO: 13182 - DNA, 25 bp, Artificial
  Probe
attccactttaaccgatacctgacc

SEQ ID NO: 13183 - DNA, 25 bp, Artificial
  Probe
ggaatgtgctaagaataaacttcaa

SEQ ID NO: 13184 - DNA, 25 bp, Artificial
  Probe
aaagaggaatgtgctaagaataaac

SEQ ID NO: 13185 - DNA, 25 bp, Artificial
  Probe
tagagacctagatcagtttctgtca

SEQ ID NO: 13186 - DNA, 25 bp, Artificial
  Probe
gacctagatcagtttctgtcactta

SEQ ID NO: 13187 - DNA, 25 bp, Artificial
  Probe
gacatctgtcctggttactgcttag

SEQ ID NO: 13188 - DNA, 25 bp, Artificial
  Probe
caagagacatctgtcctggttactg

SEQ ID NO: 13189 - DNA, 25 bp, Artificial
  Probe
agacctagatcagtttctgtcactt

SEQ ID NO: 13190 - DNA, 25 bp, Artificial
  Probe
tcacacccattccctcgtctatata

SEQ ID NO: 13191 - DNA, 25 bp, Artificial
  Probe
agacctggctgtttattactgtatg

SEQ ID NO: 13192 - DNA, 25 bp, Artificial
  Probe
aagacctggctgtttattactgtat

SEQ ID NO: 13193 - DNA, 25 bp, Artificial
  Probe
gaagacctggctgtttattactgta

SEQ ID NO: 13194 - DNA, 25 bp, Artificial
  Probe
gaacagatttcactttcaccatcag

SEQ ID NO: 13195 - DNA, 25 bp, Artificial
  Probe
ctgaagacctggctgtttattactg

SEQ ID NO: 13196 - DNA, 25 bp, Artificial
  Probe
tcacatactagggtcttcatattcc

SEQ ID NO: 13197 - DNA, 25 bp, Artificial
  Probe
atttcactttcaccatcagcaacat

SEQ ID NO: 13198 - DNA, 25 bp, Artificial
  Probe
ggaacagatttcactttcaccatca

SEQ ID NO: 13199 - DNA, 25 bp, Artificial
  Probe
gtctcctaaactgcttatctacaaa

SEQ ID NO: 13200 - DNA, 25 bp, Artificial
  Probe
gacctggctgtttattactgtatgc

SEQ ID NO: 13201 - DNA, 25 bp, Artificial
  Probe
agtctcctaaactgcttatctacaa

SEQ ID NO: 13202 - DNA, 25 bp, Artificial
  Probe
tgaagacctggctgtttattactgt

SEQ ID NO: 13203 - DNA, 25 bp, Artificial
  Probe
ggagtcacatactagggtcttcata

SEQ ID NO: 13204 - DNA, 25 bp, Artificial
  Probe
agatttcactttcaccatcagcaac

SEQ ID NO: 13205 - DNA, 25 bp, Artificial
  Probe
cagatttcactttcaccatcagcaa

SEQ ID NO: 13206 - DNA, 25 bp, Artificial
  Probe
aacagatttcactttcaccatcagc

SEQ ID NO: 13207 - DNA, 25 bp, Artificial
  Probe
tctcctaaactgcttatctacaaag

SEQ ID NO: 13208 - DNA, 25 bp, Artificial
  Probe
gtcacatactagggtcttcatattc

SEQ ID NO: 13209 - DNA, 25 bp, Artificial
  Probe
gagtcacatactagggtcttcatat

SEQ ID NO: 13210 - DNA, 25 bp, Artificial
  Probe
gatttcactttcaccatcagcaaca

SEQ ID NO: 13211 - DNA, 25 bp, Artificial
  Probe
agtcacatactagggtcttcatatt

SEQ ID NO: 13212 - DNA, 25 bp, Artificial
  Probe
atactagggtcttcatattcctgct

SEQ ID NO: 13213 - DNA, 25 bp, Artificial
  Probe
catactagggtcttcatattcctgc

SEQ ID NO: 13214 - DNA, 25 bp, Artificial
  Probe
aaatgtgggttctaatgtagactgg

SEQ ID NO: 13215 - DNA, 25 bp, Artificial
  Probe
gatggagtcacatactagggtcttc

SEQ ID NO: 13216 - DNA, 25 bp, Artificial
  Probe
atgtgggttctaatgtagactggta

SEQ ID NO: 13217 - DNA, 25 bp, Artificial
  Probe
acatactagggtcttcatattcctg

SEQ ID NO: 13218 - DNA, 25 bp, Artificial
  Probe
cacatactagggtcttcatattcct

SEQ ID NO: 13219 - DNA, 25 bp, Artificial
  Probe
gtatgcagtctaactcctatccgtg

SEQ ID NO: 13220 - DNA, 25 bp, Artificial
  Probe
tactagggtcttcatattcctgctg

SEQ ID NO: 13221 - DNA, 25 bp, Artificial
  Probe
ctgtatgcagtctaactcctatccg

SEQ ID NO: 13222 - DNA, 25 bp, Artificial
  Probe
cttcatattcctgctgctggttgtc

SEQ ID NO: 13223 - DNA, 25 bp, Artificial
  Probe
gtcttcatattcctgctgctggttg

SEQ ID NO: 13224 - DNA, 25 bp, Artificial
  Probe
aatgtgggttctaatgtagactggt

SEQ ID NO: 13225 - DNA, 25 bp, Artificial
  Probe
gctgaagacctggctgtttattact

SEQ ID NO: 13226 - DNA, 25 bp, Artificial
  Probe
tggagtcacatactagggtcttcat

SEQ ID NO: 13227 - DNA, 25 bp, Artificial
  Probe
atggagtcacatactagggtcttca

SEQ ID NO: 13228 - DNA, 25 bp, Artificial
  Probe
tgtatgcagtctaactcctatccgt

SEQ ID NO: 13229 - DNA, 25 bp, Artificial
  Probe
acagatttcactttcaccatcagca

SEQ ID NO: 13230 - DNA, 25 bp, Artificial
  Probe
tggaacagatttcactttcaccatc

SEQ ID NO: 13231 - DNA, 25 bp, Artificial
  Probe
ctggaacagatttcactttcaccat

SEQ ID NO: 13232 - DNA, 25 bp, Artificial
  Probe
tgtgggttctaatgtagactggtac

SEQ ID NO: 13233 - DNA, 25 bp, Artificial
  Probe
tttcactttcaccatcagcaacatg

SEQ ID NO: 13234 - DNA, 25 bp, Artificial
  Probe
ttcatattcctgctgctggttgtct

SEQ ID NO: 13235 - DNA, 25 bp, Artificial
  Probe
tcttcatattcctgctgctggttgt

SEQ ID NO: 13236 - DNA, 25 bp, Artificial
  Probe
gatctggcacacagtattctcttaa

SEQ ID NO: 13237 - DNA, 25 bp, Artificial
  Probe
atctggcacacagtattctcttaag

SEQ ID NO: 13238 - DNA, 25 bp, Artificial
  Probe
tatcagcagaaaccagggaaatctc

SEQ ID NO: 13239 - DNA, 25 bp, Artificial
  Probe
gtatcagcagaaaccagggaaatct

SEQ ID NO: 13240 - DNA, 25 bp, Artificial
  Probe
ttacacagaaacatgaacatgccac

SEQ ID NO: 13241 - DNA, 25 bp, Artificial
  Probe
gttacacagaaacatgaacatgcca

SEQ ID NO: 13242 - DNA, 25 bp, Artificial
  Probe
agatctggcacacagtattctctta

SEQ ID NO: 13243 - DNA, 25 bp, Artificial
  Probe
tagatctggcacacagtattctctt

SEQ ID NO: 13244 - DNA, 25 bp, Artificial
  Probe
tacaggtggtaaatgtgacatccat

SEQ ID NO: 13245 - DNA, 25 bp, Artificial
  Probe
gtagatctggcacacagtattctct

SEQ ID NO: 13246 - DNA, 25 bp, Artificial
  Probe
agtagatctggcacacagtattctc

SEQ ID NO: 13247 - DNA, 25 bp, Artificial
  Probe
ttacaggtggtaaatgtgacatcca

SEQ ID NO: 13248 - DNA, 25 bp, Artificial
  Probe
cagtagatctggcacacagtattct

SEQ ID NO: 13249 - DNA, 25 bp, Artificial
  Probe
ggtaaatgtgacatccatgtgacac

SEQ ID NO: 13250 - DNA, 25 bp, Artificial
  Probe
tacacagaaacatgaacatgccact

SEQ ID NO: 13251 - DNA, 25 bp, Artificial
  Probe
gaaacatgaacatgccactcaactc

SEQ ID NO: 13252 - DNA, 25 bp, Artificial
  Probe
gtggtaaatgtgacatccatgtgac

SEQ ID NO: 13253 - DNA, 25 bp, Artificial
  Probe
cagaaacatgaacatgccactcaac

SEQ ID NO: 13254 - DNA, 25 bp, Artificial
  Probe
tggtaaatgtgacatccatgtgaca

SEQ ID NO: 13255 - DNA, 25 bp, Artificial
  Probe
agaaacatgaacatgccactcaact

SEQ ID NO: 13256 - DNA, 25 bp, Artificial
  Probe
tgctactctggtttacaggtggtaa

SEQ ID NO: 13257 - DNA, 25 bp, Artificial
  Probe
ctgctactctggtttacaggtggta

SEQ ID NO: 13258 - DNA, 25 bp, Artificial
  Probe
catgaacatgccactcaactccttg

SEQ ID NO: 13259 - DNA, 25 bp, Artificial
  Probe
acagaaacatgaacatgccactcaa

SEQ ID NO: 13260 - DNA, 25 bp, Artificial
  Probe
ggtatcagcagaaaccagggaaatc

SEQ ID NO: 13261 - DNA, 25 bp, Artificial
  Probe
ggtggtaaatgtgacatccatgtga

SEQ ID NO: 13262 - DNA, 25 bp, Artificial
  Probe
aggtggtaaatgtgacatccatgtg

SEQ ID NO: 13263 - DNA, 25 bp, Artificial
  Probe
caggtggtaaatgtgacatccatgt

SEQ ID NO: 13264 - DNA, 25 bp, Artificial
  Probe
acaggtggtaaatgtgacatccatg

SEQ ID NO: 13265 - DNA, 25 bp, Artificial
  Probe
acatgaacatgccactcaactcctt

SEQ ID NO: 13266 - DNA, 25 bp, Artificial
  Probe
aacatgaacatgccactcaactcct

SEQ ID NO: 13267 - DNA, 25 bp, Artificial
  Probe
gcagtagatctggcacacagtattc

SEQ ID NO: 13268 - DNA, 25 bp, Artificial
  Probe
acacagaaacatgaacatgccactc

SEQ ID NO: 13269 - DNA, 25 bp, Artificial
  Probe
gtttacaggtggtaaatgtgacatc

SEQ ID NO: 13270 - DNA, 25 bp, Artificial
  Probe
tactctggtttacaggtggtaaatg

SEQ ID NO: 13271 - DNA, 25 bp, Artificial
  Probe
ctactctggtttacaggtggtaaat

SEQ ID NO: 13272 - DNA, 25 bp, Artificial
  Probe
aaacatgaacatgccactcaactcc

SEQ ID NO: 13273 - DNA, 25 bp, Artificial
  Probe
cacagaaacatgaacatgccactca

SEQ ID NO: 13274 - DNA, 25 bp, Artificial
  Probe
tgttacacagaaacatgaacatgcc

SEQ ID NO: 13275 - DNA, 25 bp, Artificial
  Probe
tttacaggtggtaaatgtgacatcc

SEQ ID NO: 13276 - DNA, 25 bp, Artificial
  Probe
ggtttacaggtggtaaatgtgacat

SEQ ID NO: 13277 - DNA, 25 bp, Artificial
  Probe
gaaatctcctcagctcctgatctat

SEQ ID NO: 13278 - DNA, 25 bp, Artificial
  Probe
ctctggtttacaggtggtaaatgtg

SEQ ID NO: 13279 - DNA, 25 bp, Artificial
  Probe
ctggtttacaggtggtaaatgtgac

SEQ ID NO: 13280 - DNA, 25 bp, Artificial
  Probe
tctggtttacaggtggtaaatgtga

SEQ ID NO: 13281 - DNA, 25 bp, Artificial
  Probe
aagattatacatccagtcaggaagc

SEQ ID NO: 13282 - DNA, 25 bp, Artificial
  Probe
acttcgggaaacctttgatttagat

SEQ ID NO: 13283 - DNA, 25 bp, Artificial
  Probe
attatacatccagtcaggaagcctc

SEQ ID NO: 13284 - DNA, 25 bp, Artificial
  Probe
gattatacatccagtcaggaagcct

SEQ ID NO: 13285 - DNA, 25 bp, Artificial
  Probe
agattatacatccagtcaggaagcc

SEQ ID NO: 13286 - DNA, 25 bp, Artificial
  Probe
agttgagatcctatgtcacacttcg

SEQ ID NO: 13287 - DNA, 25 bp, Artificial
  Probe
tatacatccagtcaggaagcctcta

SEQ ID NO: 13288 - DNA, 25 bp, Artificial
  Probe
acctagttcaaagtggatttcagat

SEQ ID NO: 13289 - DNA, 25 bp, Artificial
  Probe
cttcgggaaacctttgatttagata

SEQ ID NO: 13290 - DNA, 25 bp, Artificial
  Probe
cacttcgggaaacctttgatttaga

SEQ ID NO: 13291 - DNA, 25 bp, Artificial
  Probe
gacctagttcaaagtggatttcaga

SEQ ID NO: 13292 - DNA, 25 bp, Artificial
  Probe
acacttcgggaaacctttgatttag

SEQ ID NO: 13293 - DNA, 25 bp, Artificial
  Probe
taggacctagttcaaagtggatttc

SEQ ID NO: 13294 - DNA, 25 bp, Artificial
  Probe
caagaagtcctgcaatgatgtgatt

SEQ ID NO: 13295 - DNA, 25 bp, Artificial
  Probe
cacacttcgggaaacctttgattta

SEQ ID NO: 13296 - DNA, 25 bp, Artificial
  Probe
cctagttcaaagtggatttcagatc

SEQ ID NO: 13297 - DNA, 25 bp, Artificial
  Probe
ggacctagttcaaagtggatttcag

SEQ ID NO: 13298 - DNA, 25 bp, Artificial
  Probe
tcgggaaacctttgatttagatatt

SEQ ID NO: 13299 - DNA, 25 bp, Artificial
  Probe
ttcgggaaacctttgatttagatat

SEQ ID NO: 13300 - DNA, 25 bp, Artificial
  Probe
aggacctagttcaaagtggatttca

SEQ ID NO: 13301 - DNA, 25 bp, Artificial
  Probe
ttatacatccagtcaggaagcctct

SEQ ID NO: 13302 - DNA, 25 bp, Artificial
  Probe
gaaagttgagatcctatgtcacact

SEQ ID NO: 13303 - DNA, 25 bp, Artificial
  Probe
atgaaagttgagatcctatgtcaca

SEQ ID NO: 13304 - DNA, 25 bp, Artificial
  Probe
tgaaagttgagatcctatgtcacac

SEQ ID NO: 13305 - DNA, 25 bp, Artificial
  Probe
acacacacaccaaatattaccctat

SEQ ID NO: 13306 - DNA, 25 bp, Artificial
  Probe
taagattatacatccagtcaggaag

SEQ ID NO: 13307 - DNA, 25 bp, Artificial
  Probe
aagttgagatcctatgtcacacttc

SEQ ID NO: 13308 - DNA, 25 bp, Artificial
  Probe
gttgagatcctatgtcacacttcgg

SEQ ID NO: 13309 - DNA, 25 bp, Artificial
  Probe
agaatgaaagttgagatcctatgtc

SEQ ID NO: 13310 - DNA, 25 bp, Artificial
  Probe
cacacacacaccaaatattacccta

SEQ ID NO: 13311 - DNA, 25 bp, Artificial
  Probe
cacacacacacacaccaaatattac

SEQ ID NO: 13312 - DNA, 25 bp, Artificial
  Probe
aatgaaagttgagatcctatgtcac

SEQ ID NO: 13313 - DNA, 25 bp, Artificial
  Probe
acacacacacacacaccaaatatta

SEQ ID NO: 13314 - DNA, 25 bp, Artificial
  Probe
gaatgaaagttgagatcctatgtca

SEQ ID NO: 13315 - DNA, 25 bp, Artificial
  Probe
atattaccctattactccactcagt

SEQ ID NO: 13316 - DNA, 25 bp, Artificial
  Probe
cacacacaccaaatattaccctatt

SEQ ID NO: 13317 - DNA, 25 bp, Artificial
  Probe
ttaagattatacatccagtcaggaa

SEQ ID NO: 13318 - DNA, 25 bp, Artificial
  Probe
acacacacacacaccaaatattacc

SEQ ID NO: 13319 - DNA, 25 bp, Artificial
  Probe
atacatccagtcaggaagcctctac

SEQ ID NO: 13320 - DNA, 25 bp, Artificial
  Probe
ctatttctacggatgcctcaggatg

SEQ ID NO: 13321 - DNA, 25 bp, Artificial
  Probe
gcacctgtcaacatatattgttaga

SEQ ID NO: 13322 - DNA, 25 bp, Artificial
  Probe
actatttctacggatgcctcaggat

SEQ ID NO: 13323 - DNA, 25 bp, Artificial
  Probe
aagaagtcctgcaatgatgtgattt

SEQ ID NO: 13324 - DNA, 25 bp, Artificial
  Probe
gaactatttctacggatgcctcagg

SEQ ID NO: 13325 - DNA, 25 bp, Artificial
  Probe
ctatgtcacacttcgggaaaccttt

SEQ ID NO: 13326 - DNA, 25 bp, Artificial
  Probe
gatctctggacttggaaattcggca

SEQ ID NO: 13327 - DNA, 25 bp, Artificial
  Probe
atctctggacttggaaattcggcag

SEQ ID NO: 13328 - DNA, 25 bp, Artificial
  Probe
gatctaagagtcgccctgtctttgg

SEQ ID NO: 13329 - DNA, 25 bp, Artificial
  Probe
agatctctggacttggaaattcggc

SEQ ID NO: 13330 - DNA, 25 bp, Artificial
  Probe
agatctaagagtcgccctgtctttg

SEQ ID NO: 13331 - DNA, 25 bp, Artificial
  Probe
cagatctaagagtcgccctgtcttt

SEQ ID NO: 13332 - DNA, 25 bp, Artificial
  Probe
ctggacttggaaattcggcagaatt

SEQ ID NO: 13333 - DNA, 25 bp, Artificial
  Probe
tctggacttggaaattcggcagaat

SEQ ID NO: 13334 - DNA, 25 bp, Artificial
  Probe
tcagatctaagagtcgccctgtctt

SEQ ID NO: 13335 - DNA, 25 bp, Artificial
  Probe
ctctggacttggaaattcggcagaa

SEQ ID NO: 13336 - DNA, 25 bp, Artificial
  Probe
tggacttggaaattcggcagaattc

SEQ ID NO: 13337 - DNA, 25 bp, Artificial
  Probe
cgatagaaggtcagatgtctctcaa

SEQ ID NO: 13338 - DNA, 25 bp, Artificial
  Probe
ggaaatgaaacagatggcaataact

SEQ ID NO: 13339 - DNA, 25 bp, Artificial
  Probe
aattgcagcagttatgttgtgaatc

SEQ ID NO: 13340 - DNA, 25 bp, Artificial
  Probe
agatggcaataactactggctgatc

SEQ ID NO: 13341 - DNA, 25 bp, Artificial
  Probe
gggaaatgaaacagatggcaataac

SEQ ID NO: 13342 - DNA, 25 bp, Artificial
  Probe
agggaaatgaaacagatggcaataa

SEQ ID NO: 13343 - DNA, 25 bp, Artificial
  Probe
taaggattggagaaaggaaggctat

SEQ ID NO: 13344 - DNA, 25 bp, Artificial
  Probe
cagttatgttgtgaatcatgcagtg

SEQ ID NO: 13345 - DNA, 25 bp, Artificial
  Probe
gatagaaggtcagatgtctctcaaa

SEQ ID NO: 13346 - DNA, 25 bp, Artificial
  Probe
ttaaggattggagaaaggaaggcta

SEQ ID NO: 13347 - DNA, 25 bp, Artificial
  Probe
aatgaaacagatggcaataactact

SEQ ID NO: 13348 - DNA, 25 bp, Artificial
  Probe
gagggaaatgaaacagatggcaata

SEQ ID NO: 13349 - DNA, 25 bp, Artificial
  Probe
atgactctttcagattctacagtgg

SEQ ID NO: 13350 - DNA, 25 bp, Artificial
  Probe
attgcagcagttatgttgtgaatca

SEQ ID NO: 13351 - DNA, 25 bp, Artificial
  Probe
gactctttcagattctacagtggag

SEQ ID NO: 13352 - DNA, 25 bp, Artificial
  Probe
tgactctttcagattctacagtgga

SEQ ID NO: 13353 - DNA, 25 bp, Artificial
  Probe
cagatggcaataactactggctgat

SEQ ID NO: 13354 - DNA, 25 bp, Artificial
  Probe
ttgcagcagttatgttgtgaatcat

SEQ ID NO: 13355 - DNA, 25 bp, Artificial
  Probe
gattctacagtggaggtgtttatca

SEQ ID NO: 13356 - DNA, 25 bp, Artificial
  Probe
cagattctacagtggaggtgtttat

SEQ ID NO: 13357 - DNA, 25 bp, Artificial
  Probe
agattctacagtggaggtgtttatc

SEQ ID NO: 13358 - DNA, 25 bp, Artificial
  Probe
aaatgaaacagatggcaataactac

SEQ ID NO: 13359 - DNA, 25 bp, Artificial
  Probe
gatttgagggaaatgaaacagatgg

SEQ ID NO: 13360 - DNA, 25 bp, Artificial
  Probe
ggatttgagggaaatgaaacagatg

SEQ ID NO: 13361 - DNA, 25 bp, Artificial
  Probe
tttaaggattggagaaaggaaggct

SEQ ID NO: 13362 - DNA, 25 bp, Artificial
  Probe
attctacagtggaggtgtttatcat

SEQ ID NO: 13363 - DNA, 25 bp, Artificial
  Probe
tctttcagattctacagtggaggtg

SEQ ID NO: 13364 - DNA, 25 bp, Artificial
  Probe
ctatgtgactcctgtacggaatcag

SEQ ID NO: 13365 - DNA, 25 bp, Artificial
  Probe
tcagattctacagtggaggtgttta

SEQ ID NO: 13366 - DNA, 25 bp, Artificial
  Probe
gaaatgaaacagatggcaataacta

SEQ ID NO: 13367 - DNA, 25 bp, Artificial
  Probe
atgaaacagatggcaataactactg

SEQ ID NO: 13368 - DNA, 25 bp, Artificial
  Probe
gcgatagaaggtcagatgtctctca

SEQ ID NO: 13369 - DNA, 25 bp, Artificial
  Probe
tgcgatagaaggtcagatgtctctc

SEQ ID NO: 13370 - DNA, 25 bp, Artificial
  Probe
ctctttcagattctacagtggaggt

SEQ ID NO: 13371 - DNA, 25 bp, Artificial
  Probe
actctttcagattctacagtggagg

SEQ ID NO: 13372 - DNA, 25 bp, Artificial
  Probe
tgaaacagatggcaataactactgg

SEQ ID NO: 13373 - DNA, 25 bp, Artificial
  Probe
gcacaccaagcattcaattatgttt

SEQ ID NO: 13374 - DNA, 25 bp, Artificial
  Probe
gattggagaaaggaaggctatgtga

SEQ ID NO: 13375 - DNA, 25 bp, Artificial
  Probe
aaggattggagaaaggaaggctatg

SEQ ID NO: 13376 - DNA, 25 bp, Artificial
  Probe
cagtgagaacgctagtgctaacatc

SEQ ID NO: 13377 - DNA, 25 bp, Artificial
  Probe
aacagatggcaataactactggctg

SEQ ID NO: 13378 - DNA, 25 bp, Artificial
  Probe
ttatgttgtgaatcatgcagtgctg

SEQ ID NO: 13379 - DNA, 25 bp, Artificial
  Probe
gttatgttgtgaatcatgcagtgct

SEQ ID NO: 13380 - DNA, 25 bp, Artificial
  Probe
agttatgttgtgaatcatgcagtgc

SEQ ID NO: 13381 - DNA, 25 bp, Artificial
  Probe
tgcagcagttatgttgtgaatcatg

SEQ ID NO: 13382 - DNA, 25 bp, Artificial
  Probe
gagtccagataaccaatgagatagg

SEQ ID NO: 13383 - DNA, 25 bp, Artificial
  Probe
ccagatagagtccagataaccaatg

SEQ ID NO: 13384 - DNA, 25 bp, Artificial
  Probe
cagatagagtccagataaccaatga

SEQ ID NO: 13385 - DNA, 25 bp, Artificial
  Probe
agagtccagataaccaatgagatag

SEQ ID NO: 13386 - DNA, 25 bp, Artificial
  Probe
gatagagtccagataaccaatgaga

SEQ ID NO: 13387 - DNA, 25 bp, Artificial
  Probe
agatagagtccagataaccaatgag

SEQ ID NO: 13388 - DNA, 25 bp, Artificial
  Probe
atagagtccagataaccaatgagat

SEQ ID NO: 13389 - DNA, 25 bp, Artificial
  Probe
ggaagagagatgaataggagactgc

SEQ ID NO: 13390 - DNA, 25 bp, Artificial
  Probe
tagagtccagataaccaatgagata

SEQ ID NO: 13391 - DNA, 25 bp, Artificial
  Probe
agtcctcattcctctgtaatcagta

SEQ ID NO: 13392 - DNA, 25 bp, Artificial
  Probe
cctcattcctctgtaatcagtaacc

SEQ ID NO: 13393 - DNA, 25 bp, Artificial
  Probe
tcctcattcctctgtaatcagtaac

SEQ ID NO: 13394 - DNA, 25 bp, Artificial
  Probe
gtcctcattcctctgtaatcagtaa

SEQ ID NO: 13395 - DNA, 25 bp, Artificial
  Probe
cagtcctcattcctctgtaatcagt

SEQ ID NO: 13396 - DNA, 25 bp, Artificial
  Probe
tggctcaaagttcagtcataaagta

SEQ ID NO: 13397 - DNA, 25 bp, Artificial
  Probe
gataaccaatgagatagggagacag

SEQ ID NO: 13398 - DNA, 25 bp, Artificial
  Probe
agataaccaatgagatagggagaca

SEQ ID NO: 13399 - DNA, 25 bp, Artificial
  Probe
cagataaccaatgagatagggagac

SEQ ID NO: 13400 - DNA, 25 bp, Artificial
  Probe
ataaccaatgagatagggagacagt

SEQ ID NO: 13401 - DNA, 25 bp, Artificial
  Probe
atgaagctcagagagatgaatacac

SEQ ID NO: 13402 - DNA, 25 bp, Artificial
  Probe
catgaagctcagagagatgaataca

SEQ ID NO: 13403 - DNA, 25 bp, Artificial
  Probe
gagaacccagatagagtccagataa

SEQ ID NO: 13404 - DNA, 25 bp, Artificial
  Probe
ggctcaaagttcagtcataaagtaa

SEQ ID NO: 13405 - DNA, 25 bp, Artificial
  Probe
ccagataaccaatgagatagggaga

SEQ ID NO: 13406 - DNA, 25 bp, Artificial
  Probe
agaacccagatagagtccagataac

SEQ ID NO: 13407 - DNA, 25 bp, Artificial
  Probe
aagagagatgaataggagactgcaa

SEQ ID NO: 13408 - DNA, 25 bp, Artificial
  Probe
agtccagataaccaatgagataggg

SEQ ID NO: 13409 - DNA, 25 bp, Artificial
  Probe
cccagatagagtccagataaccaat

SEQ ID NO: 13410 - DNA, 25 bp, Artificial
  Probe
agagaacccagatagagtccagata

SEQ ID NO: 13411 - DNA, 25 bp, Artificial
  Probe
gaagagagatgaataggagactgca

SEQ ID NO: 13412 - DNA, 25 bp, Artificial
  Probe
taaccaatgagatagggagacagtc

SEQ ID NO: 13413 - DNA, 25 bp, Artificial
  Probe
gggaagagagatgaataggagactg

SEQ ID NO: 13414 - DNA, 25 bp, Artificial
  Probe
attgtggagttctcctatgtaccta

SEQ ID NO: 13415 - DNA, 25 bp, Artificial
  Probe
aagattgtggagttctcctatgtac

SEQ ID NO: 13416 - DNA, 25 bp, Artificial
  Probe
gaagctcagagagatgaatacacct

SEQ ID NO: 13417 - DNA, 25 bp, Artificial
  Probe
gaacccagatagagtccagataacc

SEQ ID NO: 13418 - DNA, 25 bp, Artificial
  Probe
gctcaaagttcagtcataaagtaag

SEQ ID NO: 13419 - DNA, 25 bp, Artificial
  Probe
ttgtggagttctcctatgtacctac

SEQ ID NO: 13420 - DNA, 25 bp, Artificial
  Probe
tgaagctcagagagatgaatacacc

SEQ ID NO: 13421 - DNA, 25 bp, Artificial
  Probe
gattgtggagttctcctatgtacct

SEQ ID NO: 13422 - DNA, 25 bp, Artificial
  Probe
agattgtggagttctcctatgtacc

SEQ ID NO: 13423 - DNA, 25 bp, Artificial
  Probe
tggagttctcctatgtacctacaga

SEQ ID NO: 13424 - DNA, 25 bp, Artificial
  Probe
gtggagttctcctatgtacctacag

SEQ ID NO: 13425 - DNA, 25 bp, Artificial
  Probe
ctcattcctctgtaatcagtaaccc

SEQ ID NO: 13426 - DNA, 25 bp, Artificial
  Probe
aagctcagagagatgaatacacctg

SEQ ID NO: 13427 - DNA, 25 bp, Artificial
  Probe
tgtgtgtctttggtttccttgataa

SEQ ID NO: 13428 - DNA, 25 bp, Artificial
  Probe
gtgtgtctttggtttccttgataag

SEQ ID NO: 13429 - DNA, 25 bp, Artificial
  Probe
gtgtgtgtctttggtttccttgata

SEQ ID NO: 13430 - DNA, 25 bp, Artificial
  Probe
tgtgtgtgtctttggtttccttgat

SEQ ID NO: 13431 - DNA, 25 bp, Artificial
  Probe
gaacagtgtagagaccaaaagagtg

SEQ ID NO: 13432 - DNA, 25 bp, Artificial
  Probe
gtgtgtgtgtctttggtttccttga

SEQ ID NO: 13433 - DNA, 25 bp, Artificial
  Probe
tatttctgtcctttctgcctccctc

SEQ ID NO: 13434 - DNA, 25 bp, Artificial
  Probe
ctatttctgtcctttctgcctccct

SEQ ID NO: 13435 - DNA, 25 bp, Artificial
  Probe
cagtgtagagaccaaaagagtgcta

SEQ ID NO: 13436 - DNA, 25 bp, Artificial
  Probe
tgtgtgtgtgtctttggtttccttg

SEQ ID NO: 13437 - DNA, 25 bp, Artificial
  Probe
gtgtgtgtgtgtctttggtttcctt

SEQ ID NO: 13438 - DNA, 25 bp, Artificial
  Probe
cgaacagtgtagagaccaaaagagt

SEQ ID NO: 13439 - DNA, 25 bp, Artificial
  Probe
tgtgtgtgtgtgtgtctttggtttc

SEQ ID NO: 13440 - DNA, 25 bp, Artificial
  Probe
gtgtgtgtgtgtgtgtctttggttt

SEQ ID NO: 13441 - DNA, 25 bp, Artificial
  Probe
aacagtgtagagaccaaaagagtgc

SEQ ID NO: 13442 - DNA, 25 bp, Artificial
  Probe
aaccgaacagtgtagagaccaaaag

SEQ ID NO: 13443 - DNA, 25 bp, Artificial
  Probe
gaaccgaacagtgtagagaccaaaa

SEQ ID NO: 13444 - DNA, 25 bp, Artificial
  Probe
ggaaccgaacagtgtagagaccaaa

SEQ ID NO: 13445 - DNA, 25 bp, Artificial
  Probe
aagttggggctatttctgtcctttc

SEQ ID NO: 13446 - DNA, 25 bp, Artificial
  Probe
ccgaacagtgtagagaccaaaagag

SEQ ID NO: 13447 - DNA, 25 bp, Artificial
  Probe
tgtgtctttggtttccttgataagg

SEQ ID NO: 13448 - DNA, 25 bp, Artificial
  Probe
gtgtctttggtttccttgataaggg

SEQ ID NO: 13449 - DNA, 25 bp, Artificial
  Probe
gtgtgtgtgtgtgtctttggtttcc

SEQ ID NO: 13450 - DNA, 25 bp, Artificial
  Probe
gttggggctatttctgtcctttctg

SEQ ID NO: 13451 - DNA, 25 bp, Artificial
  Probe
acagtgtagagaccaaaagagtgct

SEQ ID NO: 13452 - DNA, 25 bp, Artificial
  Probe
tgtgtgtgtgtgtctttggtttcct

SEQ ID NO: 13453 - DNA, 25 bp, Artificial
  Probe
agttggggctatttctgtcctttct

SEQ ID NO: 13454 - DNA, 25 bp, Artificial
  Probe
accgaacagtgtagagaccaaaaga

SEQ ID NO: 13455 - DNA, 25 bp, Artificial
  Probe
gtgtgtgtgtgtgtgtgtgtctttg

SEQ ID NO: 13456 - DNA, 25 bp, Artificial
  Probe
gtgtagagaccaaaagagtgctact

SEQ ID NO: 13457 - DNA, 25 bp, Artificial
  Probe
agtgtagagaccaaaagagtgctac

SEQ ID NO: 13458 - DNA, 25 bp, Artificial
  Probe
aaagttggggctatttctgtccttt

SEQ ID NO: 13459 - DNA, 25 bp, Artificial
  Probe
gaaaagtgctggtctgtgactaagg

SEQ ID NO: 13460 - DNA, 25 bp, Artificial
  Probe
ggaaaagtgctggtctgtgactaag

SEQ ID NO: 13461 - DNA, 25 bp, Artificial
  Probe
gaaagttggggctatttctgtcctt

SEQ ID NO: 13462 - DNA, 25 bp, Artificial
  Probe
ctggaaagttggggctatttctgtc

SEQ ID NO: 13463 - DNA, 25 bp, Artificial
  Probe
tgtagagaccaaaagagtgctactc

SEQ ID NO: 13464 - DNA, 25 bp, Artificial
  Probe
ttggggctatttctgtcctttctgc

SEQ ID NO: 13465 - DNA, 25 bp, Artificial
  Probe
aaaagtgctggtctgtgactaaggg

SEQ ID NO: 13466 - DNA, 25 bp, Artificial
  Probe
gggaaaagtgctggtctgtgactaa

SEQ ID NO: 13467 - DNA, 25 bp, Artificial
  Probe
tctttggtttccttgataaggggac

SEQ ID NO: 13468 - DNA, 25 bp, Artificial
  Probe
gtctttggtttccttgataagggga

SEQ ID NO: 13469 - DNA, 25 bp, Artificial
  Probe
tttggtttccttgataaggggacag

SEQ ID NO: 13470 - DNA, 25 bp, Artificial
  Probe
ctttggtttccttgataaggggaca

SEQ ID NO: 13471 - DNA, 25 bp, Artificial
  Probe
tgtctttggtttccttgataagggg

SEQ ID NO: 13472 - DNA, 25 bp, Artificial
  Probe
tcaagagcttcaacaggaatgagtg

SEQ ID NO: 13473 - DNA, 25 bp, Artificial
  Probe
gtcaagagcttcaacaggaatgagt

SEQ ID NO: 13474 - DNA, 25 bp, Artificial
  Probe
caggaatgagtgttagacccaaagg

SEQ ID NO: 13475 - DNA, 25 bp, Artificial
  Probe
acaggaatgagtgttagacccaaag

SEQ ID NO: 13476 - DNA, 25 bp, Artificial
  Probe
cttcaacaggaatgagtgttagacc

SEQ ID NO: 13477 - DNA, 25 bp, Artificial
  Probe
gcttcaacaggaatgagtgttagac

SEQ ID NO: 13478 - DNA, 25 bp, Artificial
  Probe
caagagcttcaacaggaatgagtgt

SEQ ID NO: 13479 - DNA, 25 bp, Artificial
  Probe
gagcttcaacaggaatgagtgttag

SEQ ID NO: 13480 - DNA, 25 bp, Artificial
  Probe
agcttcaacaggaatgagtgttaga

SEQ ID NO: 13481 - DNA, 25 bp, Artificial
  Probe
agagcttcaacaggaatgagtgtta

SEQ ID NO: 13482 - DNA, 25 bp, Artificial
  Probe
cgtcaagagcttcaacaggaatgag

SEQ ID NO: 13483 - DNA, 25 bp, Artificial
  Probe
ctccttcctttccttggctttgatc

SEQ ID NO: 13484 - DNA, 25 bp, Artificial
  Probe
gtcgtcaagagcttcaacaggaatg

SEQ ID NO: 13485 - DNA, 25 bp, Artificial
  Probe
ccttggctttgatcatgctaatatt

SEQ ID NO: 13486 - DNA, 25 bp, Artificial
  Probe
tccttggctttgatcatgctaatat

SEQ ID NO: 13487 - DNA, 25 bp, Artificial
  Probe
ttccttggctttgatcatgctaata

SEQ ID NO: 13488 - DNA, 25 bp, Artificial
  Probe
tcgtcaagagcttcaacaggaatga

SEQ ID NO: 13489 - DNA, 25 bp, Artificial
  Probe
tttccttggctttgatcatgctaat

SEQ ID NO: 13490 - DNA, 25 bp, Artificial
  Probe
aagagcttcaacaggaatgagtgtt

SEQ ID NO: 13491 - DNA, 25 bp, Artificial
  Probe
tcataagacatcatcctcacccgtc

SEQ ID NO: 13492 - DNA, 25 bp, Artificial
  Probe
aggaatgagtgttagacccaaaggt

SEQ ID NO: 13493 - DNA, 25 bp, Artificial
  Probe
cttggctttgatcatgctaatattt

SEQ ID NO: 13494 - DNA, 25 bp, Artificial
  Probe
ctttccttggctttgatcatgctaa

SEQ ID NO: 13495 - DNA, 25 bp, Artificial
  Probe
aacaggaatgagtgttagacccaaa

SEQ ID NO: 13496 - DNA, 25 bp, Artificial
  Probe
cacctcatcctccttcctttccttg

SEQ ID NO: 13497 - DNA, 25 bp, Artificial
  Probe
cttcctttccttggctttgatcatg

SEQ ID NO: 13498 - DNA, 25 bp, Artificial
  Probe
ttcaacaggaatgagtgttagaccc

SEQ ID NO: 13499 - DNA, 25 bp, Artificial
  Probe
cctccttcctttccttggctttgat

SEQ ID NO: 13500 - DNA, 25 bp, Artificial
  Probe
atcctccttcctttccttggctttg

SEQ ID NO: 13501 - DNA, 25 bp, Artificial
  Probe
catcctccttcctttccttggcttt

SEQ ID NO: 13502 - DNA, 25 bp, Artificial
  Probe
caacaggaatgagtgttagacccaa

SEQ ID NO: 13503 - DNA, 25 bp, Artificial
  Probe
ccttcctttccttggctttgatcat

SEQ ID NO: 13504 - DNA, 25 bp, Artificial
  Probe
cctttccttggctttgatcatgcta

SEQ ID NO: 13505 - DNA, 25 bp, Artificial
  Probe
tcaacaggaatgagtgttagaccca

SEQ ID NO: 13506 - DNA, 25 bp, Artificial
  Probe
cataagacatcatcctcacccgtcg

SEQ ID NO: 13507 - DNA, 25 bp, Artificial
  Probe
cagaaaccagggcagtctcctaaac

SEQ ID NO: 13508 - DNA, 25 bp, Artificial
  Probe
agaaaccagggcagtctcctaaact

SEQ ID NO: 13509 - DNA, 25 bp, Artificial
  Probe
ttcctttccttggctttgatcatgc

SEQ ID NO: 13510 - DNA, 25 bp, Artificial
  Probe
tccttcctttccttggctttgatca

SEQ ID NO: 13511 - DNA, 25 bp, Artificial
  Probe
tcctttccttggctttgatcatgct

SEQ ID NO: 13512 - DNA, 25 bp, Artificial
  Probe
gaatgagtgttagacccaaaggtcc

SEQ ID NO: 13513 - DNA, 25 bp, Artificial
  Probe
ggaatgagtgttagacccaaaggtc

SEQ ID NO: 13514 - DNA, 25 bp, Artificial
  Probe
aatgagtgttagacccaaaggtcct

SEQ ID NO: 13515 - DNA, 25 bp, Artificial
  Probe
ttccctcctaaggtcttggagactt

SEQ ID NO: 13516 - DNA, 25 bp, Artificial
  Probe
gaaaccagggcagtctcctaaactg

SEQ ID NO: 13517 - DNA, 25 bp, Artificial
  Probe
gaactaagaatggcgtcataagagg

SEQ ID NO: 13518 - DNA, 25 bp, Artificial
  Probe
aactacaaccaacagtaaggactta

SEQ ID NO: 13519 - DNA, 25 bp, Artificial
  Probe
cgaactaagaatggcgtcataagag

SEQ ID NO: 13520 - DNA, 25 bp, Artificial
  Probe
aagaactgatatacaaggaggtcat

SEQ ID NO: 13521 - DNA, 25 bp, Artificial
  Probe
ctgatatacaaggaggtcatggatt

SEQ ID NO: 13522 - DNA, 25 bp, Artificial
  Probe
agaactgatatacaaggaggtcatg

SEQ ID NO: 13523 - DNA, 25 bp, Artificial
  Probe
actgatatacaaggaggtcatggat

SEQ ID NO: 13524 - DNA, 25 bp, Artificial
  Probe
gaactgatatacaaggaggtcatgg

SEQ ID NO: 13525 - DNA, 25 bp, Artificial
  Probe
aactgatatacaaggaggtcatgga

SEQ ID NO: 13526 - DNA, 25 bp, Artificial
  Probe
ggaaagaactgatatacaaggaggt

SEQ ID NO: 13527 - DNA, 25 bp, Artificial
  Probe
tggaaagaactgatatacaaggagg

SEQ ID NO: 13528 - DNA, 25 bp, Artificial
  Probe
ttagatgaaagggagcacacaatag

SEQ ID NO: 13529 - DNA, 25 bp, Artificial
  Probe
gttagatgaaagggagcacacaata

SEQ ID NO: 13530 - DNA, 25 bp, Artificial
  Probe
tcagaacataacaaacttaaagcca

SEQ ID NO: 13531 - DNA, 25 bp, Artificial
  Probe
gtggaaagaactgatatacaaggag

SEQ ID NO: 13532 - DNA, 25 bp, Artificial
  Probe
tagatgaaagggagcacacaataga

SEQ ID NO: 13533 - DNA, 25 bp, Artificial
  Probe
cagaacataacaaacttaaagccag

SEQ ID NO: 13534 - DNA, 25 bp, Artificial
  Probe
gaaagaactgatatacaaggaggtc

SEQ ID NO: 13535 - DNA, 25 bp, Artificial
  Probe
ctcagaacataacaaacttaaagcc

SEQ ID NO: 13536 - DNA, 25 bp, Artificial
  Probe
caatagaggagtggaaagaactgat

SEQ ID NO: 13537 - DNA, 25 bp, Artificial
  Probe
aagaaactacaaccaacagtaagga

SEQ ID NO: 13538 - DNA, 25 bp, Artificial
  Probe
cataacaaacttaaagccagtcagg

SEQ ID NO: 13539 - DNA, 25 bp, Artificial
  Probe
acataacaaacttaaagccagtcag

SEQ ID NO: 13540 - DNA, 25 bp, Artificial
  Probe
aaactacaaccaacagtaaggactt

SEQ ID NO: 13541 - DNA, 25 bp, Artificial
  Probe
gaagaaactacaaccaacagtaagg

SEQ ID NO: 13542 - DNA, 25 bp, Artificial
  Probe
gaggagtggaaagaactgatataca

SEQ ID NO: 13543 - DNA, 25 bp, Artificial
  Probe
actacaaccaacagtaaggacttac

SEQ ID NO: 13544 - DNA, 25 bp, Artificial
  Probe
gaaactacaaccaacagtaaggact

SEQ ID NO: 13545 - DNA, 25 bp, Artificial
  Probe
agaaactacaaccaacagtaaggac

SEQ ID NO: 13546 - DNA, 25 bp, Artificial
  Probe
agaggagtggaaagaactgatatac

SEQ ID NO: 13547 - DNA, 25 bp, Artificial
  Probe
aacataacaaacttaaagccagtca

SEQ ID NO: 13548 - DNA, 25 bp, Artificial
  Probe
gatttggaggagcgaactaagaatg

SEQ ID NO: 13549 - DNA, 25 bp, Artificial
  Probe
tgaagaaactacaaccaacagtaag

SEQ ID NO: 13550 - DNA, 25 bp, Artificial
  Probe
aaagaactgatatacaaggaggtca

SEQ ID NO: 13551 - DNA, 25 bp, Artificial
  Probe
agtggaaagaactgatatacaagga

SEQ ID NO: 13552 - DNA, 25 bp, Artificial
  Probe
aggagtggaaagaactgatatacaa

SEQ ID NO: 13553 - DNA, 25 bp, Artificial
  Probe
agaacataacaaacttaaagccagt

SEQ ID NO: 13554 - DNA, 25 bp, Artificial
  Probe
gcgaactaagaatggcgtcataaga

SEQ ID NO: 13555 - DNA, 25 bp, Artificial
  Probe
agcgaactaagaatggcgtcataag

SEQ ID NO: 13556 - DNA, 25 bp, Artificial
  Probe
gagcgaactaagaatggcgtcataa

SEQ ID NO: 13557 - DNA, 25 bp, Artificial
  Probe
gagtggaaagaactgatatacaagg

SEQ ID NO: 13558 - DNA, 25 bp, Artificial
  Probe
ggagtggaaagaactgatatacaag

SEQ ID NO: 13559 - DNA, 25 bp, Artificial
  Probe
acaatagaggagtggaaagaactga

SEQ ID NO: 13560 - DNA, 25 bp, Artificial
  Probe
gaacataacaaacttaaagccagtc

SEQ ID NO: 13561 - DNA, 25 bp, Artificial
  Probe
ctacaaccaacagtaaggacttacg

SEQ ID NO: 13562 - DNA, 25 bp, Artificial
  Probe
agaacatctctcatcactggaacaa

SEQ ID NO: 13563 - DNA, 25 bp, Artificial
  Probe
ttgttatagatgcaccagtcactac

SEQ ID NO: 13564 - DNA, 25 bp, Artificial
  Probe
ttcccttcttccaaacctttacata

SEQ ID NO: 13565 - DNA, 25 bp, Artificial
  Probe
tcccttcttccaaacctttacatat

SEQ ID NO: 13566 - DNA, 25 bp, Artificial
  Probe
tttcccttcttccaaacctttacat

SEQ ID NO: 13567 - DNA, 25 bp, Artificial
  Probe
gttatagatgcaccagtcactacat

SEQ ID NO: 13568 - DNA, 25 bp, Artificial
  Probe
ttatagatgcaccagtcactacatt

SEQ ID NO: 13569 - DNA, 25 bp, Artificial
  Probe
gaacatctctcatcactggaacaaa

SEQ ID NO: 13570 - DNA, 25 bp, Artificial
  Probe
cagaacatctctcatcactggaaca

SEQ ID NO: 13571 - DNA, 25 bp, Artificial
  Probe
tcactacatttggagtcaatcaaga

SEQ ID NO: 13572 - DNA, 25 bp, Artificial
  Probe
gtcactacatttggagtcaatcaag

SEQ ID NO: 13573 - DNA, 25 bp, Artificial
  Probe
agtcactacatttggagtcaatcaa

SEQ ID NO: 13574 - DNA, 25 bp, Artificial
  Probe
aagatccagaacatctctcatcact

SEQ ID NO: 13575 - DNA, 25 bp, Artificial
  Probe
cagtcactacatttggagtcaatca

SEQ ID NO: 13576 - DNA, 25 bp, Artificial
  Probe
cccaagagatgatttacctttacat

SEQ ID NO: 13577 - DNA, 25 bp, Artificial
  Probe
cccttcttccaaacctttacatata

SEQ ID NO: 13578 - DNA, 25 bp, Artificial
  Probe
tacctttacatgaacactgccttaa

SEQ ID NO: 13579 - DNA, 25 bp, Artificial
  Probe
ttacctttacatgaacactgcctta

SEQ ID NO: 13580 - DNA, 25 bp, Artificial
  Probe
tgatttacctttacatgaacactgc

SEQ ID NO: 13581 - DNA, 25 bp, Artificial
  Probe
gatttacctttacatgaacactgcc

SEQ ID NO: 13582 - DNA, 25 bp, Artificial
  Probe
atttacctttacatgaacactgcct

SEQ ID NO: 13583 - DNA, 25 bp, Artificial
  Probe
tgttatagatgcaccagtcactaca

SEQ ID NO: 13584 - DNA, 25 bp, Artificial
  Probe
tttacctttacatgaacactgcctt

SEQ ID NO: 13585 - DNA, 25 bp, Artificial
  Probe
cactacatttggagtcaatcaagac

SEQ ID NO: 13586 - DNA, 25 bp, Artificial
  Probe
agatccagaacatctctcatcactg

SEQ ID NO: 13587 - DNA, 25 bp, Artificial
  Probe
acctttacatgaacactgccttaaa

SEQ ID NO: 13588 - DNA, 25 bp, Artificial
  Probe
ccttcttccaaacctttacatatac

SEQ ID NO: 13589 - DNA, 25 bp, Artificial
  Probe
gcaagaagctagtaaatggtagact

SEQ ID NO: 13590 - DNA, 25 bp, Artificial
  Probe
tttgttatagatgcaccagtcacta

SEQ ID NO: 13591 - DNA, 25 bp, Artificial
  Probe
tatagatgcaccagtcactacattt

SEQ ID NO: 13592 - DNA, 25 bp, Artificial
  Probe
ccagtcactacatttggagtcaatc

SEQ ID NO: 13593 - DNA, 25 bp, Artificial
  Probe
atagatgcaccagtcactacatttg

SEQ ID NO: 13594 - DNA, 25 bp, Artificial
  Probe
ccaagagatgatttacctttacatg

SEQ ID NO: 13595 - DNA, 25 bp, Artificial
  Probe
aaagatccagaacatctctcatcac

SEQ ID NO: 13596 - DNA, 25 bp, Artificial
  Probe
atgatttacctttacatgaacactg

SEQ ID NO: 13597 - DNA, 25 bp, Artificial
  Probe
cttcttccaaacctttacatataca

SEQ ID NO: 13598 - DNA, 25 bp, Artificial
  Probe
accagtcactacatttggagtcaat

SEQ ID NO: 13599 - DNA, 25 bp, Artificial
  Probe
caagaagctagtaaatggtagactt

SEQ ID NO: 13600 - DNA, 25 bp, Artificial
  Probe
gatgatttacctttacatgaacact

SEQ ID NO: 13601 - DNA, 25 bp, Artificial
  Probe
agatgatttacctttacatgaacac

SEQ ID NO: 13602 - DNA, 25 bp, Artificial
  Probe
tctttcattttcccttcttccaaac

SEQ ID NO: 13603 - DNA, 25 bp, Artificial
  Probe
attttcccttcttccaaacctttac

SEQ ID NO: 13604 - DNA, 25 bp, Artificial
  Probe
cattttcccttcttccaaaccttta

SEQ ID NO: 13605 - DNA, 25 bp, Artificial
  Probe
aacatctctcatcactggaacaaaa

SEQ ID NO: 13606 - DNA, 25 bp, Artificial
  Probe
caagactccagcaagaagctagtaa

SEQ ID NO: 13607 - DNA, 25 bp, Artificial
  Probe
cctactctgacatcttcctctatct

SEQ ID NO: 13608 - DNA, 25 bp, Artificial
  Probe
ctactctgacatcttcctctatctt

SEQ ID NO: 13609 - DNA, 25 bp, Artificial
  Probe
gcctactctgacatcttcctctatc

SEQ ID NO: 13610 - DNA, 25 bp, Artificial
  Probe
agcctactctgacatcttcctctat

SEQ ID NO: 13611 - DNA, 25 bp, Artificial
  Probe
aagcctactctgacatcttcctcta

SEQ ID NO: 13612 - DNA, 25 bp, Artificial
  Probe
actctgacatcttcctctatctttc

SEQ ID NO: 13613 - DNA, 25 bp, Artificial
  Probe
acatcttcctctatctttctttcca

SEQ ID NO: 13614 - DNA, 25 bp, Artificial
  Probe
ctctgacatcttcctctatctttct

SEQ ID NO: 13615 - DNA, 25 bp, Artificial
  Probe
agcctgtttattctaactctggttt

SEQ ID NO: 13616 - DNA, 25 bp, Artificial
  Probe
aagcctgtttattctaactctggtt

SEQ ID NO: 13617 - DNA, 25 bp, Artificial
  Probe
aaagcctgtttattctaactctggt

SEQ ID NO: 13618 - DNA, 25 bp, Artificial
  Probe
catcttcctctatctttctttccag

SEQ ID NO: 13619 - DNA, 25 bp, Artificial
  Probe
gacatcttcctctatctttctttcc

SEQ ID NO: 13620 - DNA, 25 bp, Artificial
  Probe
tctgacatcttcctctatctttctt

SEQ ID NO: 13621 - DNA, 25 bp, Artificial
  Probe
tactctgacatcttcctctatcttt

SEQ ID NO: 13622 - DNA, 25 bp, Artificial
  Probe
tgacatcttcctctatctttctttc

SEQ ID NO: 13623 - DNA, 25 bp, Artificial
  Probe
ctgacatcttcctctatctttcttt

SEQ ID NO: 13624 - DNA, 25 bp, Artificial
  Probe
ggtaaagccaagttatcccataagc

SEQ ID NO: 13625 - DNA, 25 bp, Artificial
  Probe
atcttcctctatctttctttccagg

SEQ ID NO: 13626 - DNA, 25 bp, Artificial
  Probe
cttggtgtcgtttagaaataagaaa

SEQ ID NO: 13627 - DNA, 25 bp, Artificial
  Probe
gtacacctccacccagtttactaaa

SEQ ID NO: 13628 - DNA, 25 bp, Artificial
  Probe
cttcctctatctttctttccaggct

SEQ ID NO: 13629 - DNA, 25 bp, Artificial
  Probe
tcttcctctatctttctttccaggc

SEQ ID NO: 13630 - DNA, 25 bp, Artificial
  Probe
ggtaataatgtctttgggtaaagcc

SEQ ID NO: 13631 - DNA, 25 bp, Artificial
  Probe
gggtaataatgtctttgggtaaagc

SEQ ID NO: 13632 - DNA, 25 bp, Artificial
  Probe
ctaggaagcctactctgacatcttc

SEQ ID NO: 13633 - DNA, 25 bp, Artificial
  Probe
ttcctctatctttctttccaggctg

SEQ ID NO: 13634 - DNA, 25 bp, Artificial
  Probe
gtaataatgtctttgggtaaagcca

SEQ ID NO: 13635 - DNA, 25 bp, Artificial
  Probe
actaggaagcctactctgacatctt

SEQ ID NO: 13636 - DNA, 25 bp, Artificial
  Probe
tgtcgtttagaaataagaaactggg

SEQ ID NO: 13637 - DNA, 25 bp, Artificial
  Probe
gaggggtaataatgtctttgggtaa

SEQ ID NO: 13638 - DNA, 25 bp, Artificial
  Probe
aggggtaataatgtctttgggtaaa

SEQ ID NO: 13639 - DNA, 25 bp, Artificial
  Probe
gactaggaagcctactctgacatct

SEQ ID NO: 13640 - DNA, 25 bp, Artificial
  Probe
tggtgtcgtttagaaataagaaact

SEQ ID NO: 13641 - DNA, 25 bp, Artificial
  Probe
gtgtcgtttagaaataagaaactgg

SEQ ID NO: 13642 - DNA, 25 bp, Artificial
  Probe
ggtgtcgtttagaaataagaaactg

SEQ ID NO: 13643 - DNA, 25 bp, Artificial
  Probe
attctaactctggttttcttggtgt

SEQ ID NO: 13644 - DNA, 25 bp, Artificial
  Probe
gcctgtttattctaactctggtttt

SEQ ID NO: 13645 - DNA, 25 bp, Artificial
  Probe
agaggggtaataatgtctttgggta

SEQ ID NO: 13646 - DNA, 25 bp, Artificial
  Probe
tttagaaataagaaactggggcgac

SEQ ID NO: 13647 - DNA, 25 bp, Artificial
  Probe
tcttggtgtcgtttagaaataagaa

SEQ ID NO: 13648 - DNA, 25 bp, Artificial
  Probe
ttcttggtgtcgtttagaaataaga

SEQ ID NO: 13649 - DNA, 25 bp, Artificial
  Probe
aaaagcctgtttattctaactctgg

SEQ ID NO: 13650 - DNA, 25 bp, Artificial
  Probe
ttctaactctggttttcttggtgtc

SEQ ID NO: 13651 - DNA, 25 bp, Artificial
  Probe
ttggtgtcgtttagaaataagaaac

SEQ ID NO: 13652 - DNA, 25 bp, Artificial
  Probe
ctattctgagatgtgagatggctta

SEQ ID NO: 13653 - DNA, 25 bp, Artificial
  Probe
gatgctgatcctattctgagatgtg

SEQ ID NO: 13654 - DNA, 25 bp, Artificial
  Probe
gatcctattctgagatgtgagatgg

SEQ ID NO: 13655 - DNA, 25 bp, Artificial
  Probe
tgatcctattctgagatgtgagatg

SEQ ID NO: 13656 - DNA, 25 bp, Artificial
  Probe
atgctgatcctattctgagatgtga

SEQ ID NO: 13657 - DNA, 25 bp, Artificial
  Probe
atcctattctgagatgtgagatggc

SEQ ID NO: 13658 - DNA, 25 bp, Artificial
  Probe
ctgatcctattctgagatgtgagat

SEQ ID NO: 13659 - DNA, 25 bp, Artificial
  Probe
cctattctgagatgtgagatggctt

SEQ ID NO: 13660 - DNA, 25 bp, Artificial
  Probe
gctgatcctattctgagatgtgaga

SEQ ID NO: 13661 - DNA, 25 bp, Artificial
  Probe
tgctgatcctattctgagatgtgag

SEQ ID NO: 13662 - DNA, 25 bp, Artificial
  Probe
tcctattctgagatgtgagatggct

SEQ ID NO: 13663 - DNA, 25 bp, Artificial
  Probe
taattatgtgattcggaggacagct

SEQ ID NO: 13664 - DNA, 25 bp, Artificial
  Probe
tttaagatacctcagaagggcattc

SEQ ID NO: 13665 - DNA, 25 bp, Artificial
  Probe
gtttaagatacctcagaagggcatt

SEQ ID NO: 13666 - DNA, 25 bp, Artificial
  Probe
ccatgataattatgtgattcggagg

SEQ ID NO: 13667 - DNA, 25 bp, Artificial
  Probe
tgtccatgataattatgtgattcgg

SEQ ID NO: 13668 - DNA, 25 bp, Artificial
  Probe
atgataattatgtgattcggaggac

SEQ ID NO: 13669 - DNA, 25 bp, Artificial
  Probe
catgataattatgtgattcggagga

SEQ ID NO: 13670 - DNA, 25 bp, Artificial
  Probe
cacagggtttaagatacctcagaag

SEQ ID NO: 13671 - DNA, 25 bp, Artificial
  Probe
tgataattatgtgattcggaggaca

SEQ ID NO: 13672 - DNA, 25 bp, Artificial
  Probe
ataattatgtgattcggaggacagc

SEQ ID NO: 13673 - DNA, 25 bp, Artificial
  Probe
gataattatgtgattcggaggacag

SEQ ID NO: 13674 - DNA, 25 bp, Artificial
  Probe
acagggtttaagatacctcagaagg

SEQ ID NO: 13675 - DNA, 25 bp, Artificial
  Probe
ccacagggtttaagatacctcagaa

SEQ ID NO: 13676 - DNA, 25 bp, Artificial
  Probe
gtccatgataattatgtgattcgga

SEQ ID NO: 13677 - DNA, 25 bp, Artificial
  Probe
ggtttaagatacctcagaagggcat

SEQ ID NO: 13678 - DNA, 25 bp, Artificial
  Probe
cagggtttaagatacctcagaaggg

SEQ ID NO: 13679 - DNA, 25 bp, Artificial
  Probe
ttgtccatgataattatgtgattcg

SEQ ID NO: 13680 - DNA, 25 bp, Artificial
  Probe
ttaagatacctcagaagggcattct

SEQ ID NO: 13681 - DNA, 25 bp, Artificial
  Probe
tccatgataattatgtgattcggag

SEQ ID NO: 13682 - DNA, 25 bp, Artificial
  Probe
aatgctgtccacagggtttaagata

SEQ ID NO: 13683 - DNA, 25 bp, Artificial
  Probe
agtgattaacctccccaataacaac

SEQ ID NO: 13684 - DNA, 25 bp, Artificial
  Probe
tagtgattaacctccccaataacaa

SEQ ID NO: 13685 - DNA, 25 bp, Artificial
  Probe
ggatgctgatcctattctgagatgt

SEQ ID NO: 13686 - DNA, 25 bp, Artificial
  Probe
tgattaacctccccaataacaacac

SEQ ID NO: 13687 - DNA, 25 bp, Artificial
  Probe
gtgattaacctccccaataacaaca

SEQ ID NO: 13688 - DNA, 25 bp, Artificial
  Probe
tccacagggtttaagatacctcaga

SEQ ID NO: 13689 - DNA, 25 bp, Artificial
  Probe
gtccacagggtttaagatacctcag

SEQ ID NO: 13690 - DNA, 25 bp, Artificial
  Probe
ctagtgattaacctccccaataaca

SEQ ID NO: 13691 - DNA, 25 bp, Artificial
  Probe
cctagtgattaacctccccaataac

SEQ ID NO: 13692 - DNA, 25 bp, Artificial
  Probe
acctagtgattaacctccccaataa

SEQ ID NO: 13693 - DNA, 25 bp, Artificial
  Probe
gacctagtgattaacctccccaata

SEQ ID NO: 13694 - DNA, 25 bp, Artificial
  Probe
gattaacctccccaataacaacacc

SEQ ID NO: 13695 - DNA, 25 bp, Artificial
  Probe
atgctgtccacagggtttaagatac

SEQ ID NO: 13696 - DNA, 25 bp, Artificial
  Probe
tgtccacagggtttaagatacctca

SEQ ID NO: 13697 - DNA, 25 bp, Artificial
  Probe
atcagattattctctcaccatcagc

SEQ ID NO: 13698 - DNA, 25 bp, Artificial
  Probe
cagattattctctcaccatcagcag

SEQ ID NO: 13699 - DNA, 25 bp, Artificial
  Probe
acagtataatgagtatccgtacacg

SEQ ID NO: 13700 - DNA, 25 bp, Artificial
  Probe
tcagattattctctcaccatcagca

SEQ ID NO: 13701 - DNA, 25 bp, Artificial
  Probe
tgtctacagtataatgagtatccgt

SEQ ID NO: 13702 - DNA, 25 bp, Artificial
  Probe
ggatcagattattctctcaccatca

SEQ ID NO: 13703 - DNA, 25 bp, Artificial
  Probe
gatcagattattctctcaccatcag

SEQ ID NO: 13704 - DNA, 25 bp, Artificial
  Probe
gatgtggcagattatcactgtctac

SEQ ID NO: 13705 - DNA, 25 bp, Artificial
  Probe
agatgtggcagattatcactgtcta

SEQ ID NO: 13706 - DNA, 25 bp, Artificial
  Probe
agattattctctcaccatcagcagc

SEQ ID NO: 13707 - DNA, 25 bp, Artificial
  Probe
atgtggcagattatcactgtctaca

SEQ ID NO: 13708 - DNA, 25 bp, Artificial
  Probe
gaagatgtggcagattatcactgtc

SEQ ID NO: 13709 - DNA, 25 bp, Artificial
  Probe
ctgaagatgtggcagattatcactg

SEQ ID NO: 13710 - DNA, 25 bp, Artificial
  Probe
cagtataatgagtatccgtacacgt

SEQ ID NO: 13711 - DNA, 25 bp, Artificial
  Probe
aagatgtggcagattatcactgtct

SEQ ID NO: 13712 - DNA, 25 bp, Artificial
  Probe
tggatcagattattctctcaccatc

SEQ ID NO: 13713 - DNA, 25 bp, Artificial
  Probe
ctggatcagattattctctcaccat

SEQ ID NO: 13714 - DNA, 25 bp, Artificial
  Probe
agtataatgagtatccgtacacgtt

SEQ ID NO: 13715 - DNA, 25 bp, Artificial
  Probe
tgaagatgtggcagattatcactgt

SEQ ID NO: 13716 - DNA, 25 bp, Artificial
  Probe
agtttcttgggttattgatgctctg

SEQ ID NO: 13717 - DNA, 25 bp, Artificial
  Probe
cagtttcttgggttattgatgctct

SEQ ID NO: 13718 - DNA, 25 bp, Artificial
  Probe
tacagtataatgagtatccgtacac

SEQ ID NO: 13719 - DNA, 25 bp, Artificial
  Probe
gtctacagtataatgagtatccgta

SEQ ID NO: 13720 - DNA, 25 bp, Artificial
  Probe
gattattctctcaccatcagcagcc

SEQ ID NO: 13721 - DNA, 25 bp, Artificial
  Probe
atgctcagtttcttgggttattgat

SEQ ID NO: 13722 - DNA, 25 bp, Artificial
  Probe
ctacagtataatgagtatccgtaca

SEQ ID NO: 13723 - DNA, 25 bp, Artificial
  Probe
cagtcagaactcagaatggacatga

SEQ ID NO: 13724 - DNA, 25 bp, Artificial
  Probe
ctgtctacagtataatgagtatccg

SEQ ID NO: 13725 - DNA, 25 bp, Artificial
  Probe
tcagtttcttgggttattgatgctc

SEQ ID NO: 13726 - DNA, 25 bp, Artificial
  Probe
ctcagtttcttgggttattgatgct

SEQ ID NO: 13727 - DNA, 25 bp, Artificial
  Probe
attattctctcaccatcagcagcct

SEQ ID NO: 13728 - DNA, 25 bp, Artificial
  Probe
tgctcagtttcttgggttattgatg

SEQ ID NO: 13729 - DNA, 25 bp, Artificial
  Probe
tgtggcagattatcactgtctacag

SEQ ID NO: 13730 - DNA, 25 bp, Artificial
  Probe
tctacagtataatgagtatccgtac

SEQ ID NO: 13731 - DNA, 25 bp, Artificial
  Probe
ttgggatttatgtaatctggttcca

SEQ ID NO: 13732 - DNA, 25 bp, Artificial
  Probe
cgttgggatttatgtaatctggttc

SEQ ID NO: 13733 - DNA, 25 bp, Artificial
  Probe
cttgggttattgatgctctgctttg

SEQ ID NO: 13734 - DNA, 25 bp, Artificial
  Probe
gtttcttgggttattgatgctctgc

SEQ ID NO: 13735 - DNA, 25 bp, Artificial
  Probe
gttgggatttatgtaatctggttcc

SEQ ID NO: 13736 - DNA, 25 bp, Artificial
  Probe
tcttgggttattgatgctctgcttt

SEQ ID NO: 13737 - DNA, 25 bp, Artificial
  Probe
ttcttgggttattgatgctctgctt

SEQ ID NO: 13738 - DNA, 25 bp, Artificial
  Probe
tttcttgggttattgatgctctgct

SEQ ID NO: 13739 - DNA, 25 bp, Artificial
  Probe
catgctcagtttcttgggttattga

SEQ ID NO: 13740 - DNA, 25 bp, Artificial
  Probe
ataatgagtatccgtacacgtttgg

SEQ ID NO: 13741 - DNA, 25 bp, Artificial
  Probe
gtcaggacgttgggatttatgtaat

SEQ ID NO: 13742 - DNA, 25 bp, Artificial
  Probe
cctggacaatctgatacttggaaga

SEQ ID NO: 13743 - DNA, 25 bp, Artificial
  Probe
gcactaagtaactgttagacaagca

SEQ ID NO: 13744 - DNA, 25 bp, Artificial
  Probe
cactaagtaactgttagacaagcat

SEQ ID NO: 13745 - DNA, 25 bp, Artificial
  Probe
tggtaagttgacatactctaagatg

SEQ ID NO: 13746 - DNA, 25 bp, Artificial
  Probe
actaagtaactgttagacaagcatt

SEQ ID NO: 13747 - DNA, 25 bp, Artificial
  Probe
cacccttccaatcactctttactat

SEQ ID NO: 13748 - DNA, 25 bp, Artificial
  Probe
ctggacaatctgatacttggaagat

SEQ ID NO: 13749 - DNA, 25 bp, Artificial
  Probe
gacaatctgatacttggaagatggt

SEQ ID NO: 13750 - DNA, 25 bp, Artificial
  Probe
tggacaatctgatacttggaagatg

SEQ ID NO: 13751 - DNA, 25 bp, Artificial
  Probe
acaatctgatacttggaagatggtg

SEQ ID NO: 13752 - DNA, 25 bp, Artificial
  Probe
ggacaatctgatacttggaagatgg

SEQ ID NO: 13753 - DNA, 25 bp, Artificial
  Probe
acccttccaatcactctttactata

SEQ ID NO: 13754 - DNA, 25 bp, Artificial
  Probe
ttggtaagttgacatactctaagat

SEQ ID NO: 13755 - DNA, 25 bp, Artificial
  Probe
atgatagaatgtactgccacaggtc

SEQ ID NO: 13756 - DNA, 25 bp, Artificial
  Probe
atctgatacttggaagatggtggaa

SEQ ID NO: 13757 - DNA, 25 bp, Artificial
  Probe
aatctgatacttggaagatggtgga

SEQ ID NO: 13758 - DNA, 25 bp, Artificial
  Probe
caatctgatacttggaagatggtgg

SEQ ID NO: 13759 - DNA, 25 bp, Artificial
  Probe
catgcttcagtctctgttgtatgtg

SEQ ID NO: 13760 - DNA, 25 bp, Artificial
  Probe
ccacccttccaatcactctttacta

SEQ ID NO: 13761 - DNA, 25 bp, Artificial
  Probe
tctgatacttggaagatggtggaaa

SEQ ID NO: 13762 - DNA, 25 bp, Artificial
  Probe
aagtaactgttagacaagcattaac

SEQ ID NO: 13763 - DNA, 25 bp, Artificial
  Probe
tgcactaagtaactgttagacaagc

SEQ ID NO: 13764 - DNA, 25 bp, Artificial
  Probe
ttgcactaagtaactgttagacaag

SEQ ID NO: 13765 - DNA, 25 bp, Artificial
  Probe
catgatagaatgtactgccacaggt

SEQ ID NO: 13766 - DNA, 25 bp, Artificial
  Probe
atgcttcagtctctgttgtatgtgg

SEQ ID NO: 13767 - DNA, 25 bp, Artificial
  Probe
cccttccaatcactctttactataa

SEQ ID NO: 13768 - DNA, 25 bp, Artificial
  Probe
gaccatgcttcagtctctgttgtat

SEQ ID NO: 13769 - DNA, 25 bp, Artificial
  Probe
cagaatttggtaagttgacatactc

SEQ ID NO: 13770 - DNA, 25 bp, Artificial
  Probe
gatagaatgtactgccacaggtcac

SEQ ID NO: 13771 - DNA, 25 bp, Artificial
  Probe
ccatgcttcagtctctgttgtatgt

SEQ ID NO: 13772 - DNA, 25 bp, Artificial
  Probe
accatgcttcagtctctgttgtatg

SEQ ID NO: 13773 - DNA, 25 bp, Artificial
  Probe
agaatttggtaagttgacatactct

SEQ ID NO: 13774 - DNA, 25 bp, Artificial
  Probe
ttgacatactctaagatgtagacca

SEQ ID NO: 13775 - DNA, 25 bp, Artificial
  Probe
tgacatactctaagatgtagaccat

SEQ ID NO: 13776 - DNA, 25 bp, Artificial
  Probe
gttgacatactctaagatgtagacc

SEQ ID NO: 13777 - DNA, 25 bp, Artificial
  Probe
acatactctaagatgtagaccatgt

SEQ ID NO: 13778 - DNA, 25 bp, Artificial
  Probe
ccagaatttggtaagttgacatact

SEQ ID NO: 13779 - DNA, 25 bp, Artificial
  Probe
ctaagtaactgttagacaagcatta

SEQ ID NO: 13780 - DNA, 25 bp, Artificial
  Probe
tgatagaatgtactgccacaggtca

SEQ ID NO: 13781 - DNA, 25 bp, Artificial
  Probe
ccctggacaatctgatacttggaag

SEQ ID NO: 13782 - DNA, 25 bp, Artificial
  Probe
ggaatgtttgcactaagtaactgtt

SEQ ID NO: 13783 - DNA, 25 bp, Artificial
  Probe
cttcagtctctgttgtatgtggtgc

SEQ ID NO: 13784 - DNA, 25 bp, Artificial
  Probe
gcttcagtctctgttgtatgtggtg

SEQ ID NO: 13785 - DNA, 25 bp, Artificial
  Probe
tttggtaagttgacatactctaaga

SEQ ID NO: 13786 - DNA, 25 bp, Artificial
  Probe
gtccacccttccaatcactctttac

SEQ ID NO: 13787 - DNA, 25 bp, Artificial
  Probe
tgaagtggaagaaagagcataaaga

SEQ ID NO: 13788 - DNA, 25 bp, Artificial
  Probe
gaagtggaagaaagagcataaagat

SEQ ID NO: 13789 - DNA, 25 bp, Artificial
  Probe
ctgcttgtctgtttgtttatctcta

SEQ ID NO: 13790 - DNA, 25 bp, Artificial
  Probe
agtggaagaaagagcataaagatga

SEQ ID NO: 13791 - DNA, 25 bp, Artificial
  Probe
gaagaaagagcataaagatgagagc

SEQ ID NO: 13792 - DNA, 25 bp, Artificial
  Probe
tggaagaaagagcataaagatgaga

SEQ ID NO: 13793 - DNA, 25 bp, Artificial
  Probe
gtggaagaaagagcataaagatgag

SEQ ID NO: 13794 - DNA, 25 bp, Artificial
  Probe
aagtggaagaaagagcataaagatg

SEQ ID NO: 13795 - DNA, 25 bp, Artificial
  Probe
atgaagtggaagaaagagcataaag

SEQ ID NO: 13796 - DNA, 25 bp, Artificial
  Probe
ggaagaaagagcataaagatgagag

SEQ ID NO: 13797 - DNA, 25 bp, Artificial
  Probe
aagaaagagcataaagatgagagcc

SEQ ID NO: 13798 - DNA, 25 bp, Artificial
  Probe
gtctgtttgtttatctctatgtcca

SEQ ID NO: 13799 - DNA, 25 bp, Artificial
  Probe
tgtctgtttgtttatctctatgtcc

SEQ ID NO: 13800 - DNA, 25 bp, Artificial
  Probe
tgcttgtctgtttgtttatctctat

SEQ ID NO: 13801 - DNA, 25 bp, Artificial
  Probe
gcttgtctgtttgtttatctctatg

SEQ ID NO: 13802 - DNA, 25 bp, Artificial
  Probe
gaaagagcataaagatgagagccag

SEQ ID NO: 13803 - DNA, 25 bp, Artificial
  Probe
gctgcttgtctgtttgtttatctct

SEQ ID NO: 13804 - DNA, 25 bp, Artificial
  Probe
agaaagagcataaagatgagagcca

SEQ ID NO: 13805 - DNA, 25 bp, Artificial
  Probe
catgaagtggaagaaagagcataaa

SEQ ID NO: 13806 - DNA, 25 bp, Artificial
  Probe
aggaagaggaggaagaggagtaaag

SEQ ID NO: 13807 - DNA, 25 bp, Artificial
  Probe
gaggaagaggaggaagaggagtaaa

SEQ ID NO: 13808 - DNA, 25 bp, Artificial
  Probe
tctgtttgtttatctctatgtccaa

SEQ ID NO: 13809 - DNA, 25 bp, Artificial
  Probe
gcatgaagtggaagaaagagcataa

SEQ ID NO: 13810 - DNA, 25 bp, Artificial
  Probe
ggctgcttgtctgtttgtttatctc

SEQ ID NO: 13811 - DNA, 25 bp, Artificial
  Probe
ggaggaagaggaggaagaggagtaa

SEQ ID NO: 13812 - DNA, 25 bp, Artificial
  Probe
atctctatgtccaaatttctgctcc

SEQ ID NO: 13813 - DNA, 25 bp, Artificial
  Probe
aaagagcataaagatgagagccagg

SEQ ID NO: 13814 - DNA, 25 bp, Artificial
  Probe
ttgtctgtttgtttatctctatgtc

SEQ ID NO: 13815 - DNA, 25 bp, Artificial
  Probe
cttgtctgtttgtttatctctatgt

SEQ ID NO: 13816 - DNA, 25 bp, Artificial
  Probe
tctctatgtccaaatttctgctcct

SEQ ID NO: 13817 - DNA, 25 bp, Artificial
  Probe
tatctctatgtccaaatttctgctc

SEQ ID NO: 13818 - DNA, 25 bp, Artificial
  Probe
gaagaggaggaagaggagtaaaggg

SEQ ID NO: 13819 - DNA, 25 bp, Artificial
  Probe
ggaagaggaggaagaggagtaaagg

SEQ ID NO: 13820 - DNA, 25 bp, Artificial
  Probe
ttatctctatgtccaaatttctgct

SEQ ID NO: 13821 - DNA, 25 bp, Artificial
  Probe
ctttaagaggctcgttgattttagt

SEQ ID NO: 13822 - DNA, 25 bp, Artificial
  Probe
tttaagaggctcgttgattttagtt

SEQ ID NO: 13823 - DNA, 25 bp, Artificial
  Probe
taagaggctcgttgattttagttac

SEQ ID NO: 13824 - DNA, 25 bp, Artificial
  Probe
aggaggaagaggaggaagaggagta

SEQ ID NO: 13825 - DNA, 25 bp, Artificial
  Probe
tttatctctatgtccaaatttctgc

SEQ ID NO: 13826 - DNA, 25 bp, Artificial
  Probe
gtctttaagaggctcgttgatttta

SEQ ID NO: 13827 - DNA, 25 bp, Artificial
  Probe
ttaagaggctcgttgattttagtta

SEQ ID NO: 13828 - DNA, 25 bp, Artificial
  Probe
tctttaagaggctcgttgattttag

SEQ ID NO: 13829 - DNA, 25 bp, Artificial
  Probe
gatgaggaagaggaggaggaagagg

SEQ ID NO: 13830 - DNA, 25 bp, Artificial
  Probe
cgcatgaagtggaagaaagagcata

SEQ ID NO: 13831 - DNA, 25 bp, Artificial
  Probe
cggctgcttgtctgtttgtttatct

SEQ ID NO: 13832 - DNA, 25 bp, Artificial
  Probe
ttaagttagcaagagaagatcaacc

SEQ ID NO: 13833 - DNA, 25 bp, Artificial
  Probe
ggattaagttagcaagagaagatca

SEQ ID NO: 13834 - DNA, 25 bp, Artificial
  Probe
aggattaagttagcaagagaagatc

SEQ ID NO: 13835 - DNA, 25 bp, Artificial
  Probe
tttatttcttcctttccctccgtaa

SEQ ID NO: 13836 - DNA, 25 bp, Artificial
  Probe
gtttatttcttcctttccctccgta

SEQ ID NO: 13837 - DNA, 25 bp, Artificial
  Probe
ttaggattaagttagcaagagaaga

SEQ ID NO: 13838 - DNA, 25 bp, Artificial
  Probe
gaaggaagaggctaaagagaagaag

SEQ ID NO: 13839 - DNA, 25 bp, Artificial
  Probe
tcaccaaacaggatttctattagga

SEQ ID NO: 13840 - DNA, 25 bp, Artificial
  Probe
agaaggaagaggctaaagagaagaa

SEQ ID NO: 13841 - DNA, 25 bp, Artificial
  Probe
aagaaggaagaggctaaagagaaga

SEQ ID NO: 13842 - DNA, 25 bp, Artificial
  Probe
caagaaggaagaggctaaagagaag

SEQ ID NO: 13843 - DNA, 25 bp, Artificial
  Probe
ctcaccaaacaggatttctattagg

SEQ ID NO: 13844 - DNA, 25 bp, Artificial
  Probe
ttatttcttcctttccctccgtaag

SEQ ID NO: 13845 - DNA, 25 bp, Artificial
  Probe
taggattaagttagcaagagaagat

SEQ ID NO: 13846 - DNA, 25 bp, Artificial
  Probe
aagacaccaaggaggagaagactac

SEQ ID NO: 13847 - DNA, 25 bp, Artificial
  Probe
aagtttatttcttcctttccctccg

SEQ ID NO: 13848 - DNA, 25 bp, Artificial
  Probe
ctcaagggttggtgtaataaagttt

SEQ ID NO: 13849 - DNA, 25 bp, Artificial
  Probe
caccaaacaggatttctattaggat

SEQ ID NO: 13850 - DNA, 25 bp, Artificial
  Probe
actcaagggttggtgtaataaagtt

SEQ ID NO: 13851 - DNA, 25 bp, Artificial
  Probe
tactcaagggttggtgtaataaagt

SEQ ID NO: 13852 - DNA, 25 bp, Artificial
  Probe
cagaatagccaaagaaactcaggac

SEQ ID NO: 13853 - DNA, 25 bp, Artificial
  Probe
aaggaagaggctaaagagaagaagg

SEQ ID NO: 13854 - DNA, 25 bp, Artificial
  Probe
agtttatttcttcctttccctccgt

SEQ ID NO: 13855 - DNA, 25 bp, Artificial
  Probe
taagttagcaagagaagatcaaccc

SEQ ID NO: 13856 - DNA, 25 bp, Artificial
  Probe
ccaagaaggaagaggctaaagagaa

SEQ ID NO: 13857 - DNA, 25 bp, Artificial
  Probe
ggtactcaagggttggtgtaataaa

SEQ ID NO: 13858 - DNA, 25 bp, Artificial
  Probe
attaagttagcaagagaagatcaac

SEQ ID NO: 13859 - DNA, 25 bp, Artificial
  Probe
cgtaagaagaaacaccacttagatg

SEQ ID NO: 13860 - DNA, 25 bp, Artificial
  Probe
gtactcaagggttggtgtaataaag

SEQ ID NO: 13861 - DNA, 25 bp, Artificial
  Probe
accaaacaggatttctattaggatt

SEQ ID NO: 13862 - DNA, 25 bp, Artificial
  Probe
ccgtaagaagaaacaccacttagat

SEQ ID NO: 13863 - DNA, 25 bp, Artificial
  Probe
gattaagttagcaagagaagatcaa

SEQ ID NO: 13864 - DNA, 25 bp, Artificial
  Probe
tcaagggttggtgtaataaagttta

SEQ ID NO: 13865 - DNA, 25 bp, Artificial
  Probe
ccctcaccaaacaggatttctatta

SEQ ID NO: 13866 - DNA, 25 bp, Artificial
  Probe
ctccgtaagaagaaacaccacttag

SEQ ID NO: 13867 - DNA, 25 bp, Artificial
  Probe
attaggattaagttagcaagagaag

SEQ ID NO: 13868 - DNA, 25 bp, Artificial
  Probe
cctcaccaaacaggatttctattag

SEQ ID NO: 13869 - DNA, 25 bp, Artificial
  Probe
ctaaacccaaagagaaggcagaaga

SEQ ID NO: 13870 - DNA, 25 bp, Artificial
  Probe
aagttagcaagagaagatcaaccct

SEQ ID NO: 13871 - DNA, 25 bp, Artificial
  Probe
tccgtaagaagaaacaccacttaga

SEQ ID NO: 13872 - DNA, 25 bp, Artificial
  Probe
ccagaatagccaaagaaactcagga

SEQ ID NO: 13873 - DNA, 25 bp, Artificial
  Probe
aaagacaccaaggaggagaagacta

SEQ ID NO: 13874 - DNA, 25 bp, Artificial
  Probe
taaacccaaagagaaggcagaagac

SEQ ID NO: 13875 - DNA, 25 bp, Artificial
  Probe
gtaagaagaaacaccacttagatgg

SEQ ID NO: 13876 - DNA, 25 bp, Artificial
  Probe
taagaagaaacaccacttagatggc

SEQ ID NO: 13877 - DNA, 25 bp, Artificial
  Probe
gaaggaccatctgtaagagtagaac

SEQ ID NO: 13878 - DNA, 25 bp, Artificial
  Probe
agaaggaccatctgtaagagtagaa

SEQ ID NO: 13879 - DNA, 25 bp, Artificial
  Probe
gaccatctgtaagagtagaacttcc

SEQ ID NO: 13880 - DNA, 25 bp, Artificial
  Probe
ggaccatctgtaagagtagaacttc

SEQ ID NO: 13881 - DNA, 25 bp, Artificial
  Probe
aggaccatctgtaagagtagaactt

SEQ ID NO: 13882 - DNA, 25 bp, Artificial
  Probe
aaggaccatctgtaagagtagaact

SEQ ID NO: 13883 - DNA, 25 bp, Artificial
  Probe
cttctgtagcctggtatcgtcaatt

SEQ ID NO: 13884 - DNA, 25 bp, Artificial
  Probe
ctttgacctgatagcactttctact

SEQ ID NO: 13885 - DNA, 25 bp, Artificial
  Probe
aggcttatatttctgtggtggtaat

SEQ ID NO: 13886 - DNA, 25 bp, Artificial
  Probe
gaggcttatatttctgtggtggtaa

SEQ ID NO: 13887 - DNA, 25 bp, Artificial
  Probe
tttgacctgatagcactttctactg

SEQ ID NO: 13888 - DNA, 25 bp, Artificial
  Probe
cctttgacctgatagcactttctac

SEQ ID NO: 13889 - DNA, 25 bp, Artificial
  Probe
ctgatgacggaggcttatatttctg

SEQ ID NO: 13890 - DNA, 25 bp, Artificial
  Probe
gatgacggaggcttatatttctgtg

SEQ ID NO: 13891 - DNA, 25 bp, Artificial
  Probe
ttgacctgatagcactttctactgt

SEQ ID NO: 13892 - DNA, 25 bp, Artificial
  Probe
acctttgacctgatagcactttcta

SEQ ID NO: 13893 - DNA, 25 bp, Artificial
  Probe
atctgtaagagtagaacttccctga

SEQ ID NO: 13894 - DNA, 25 bp, Artificial
  Probe
catctgtaagagtagaacttccctg

SEQ ID NO: 13895 - DNA, 25 bp, Artificial
  Probe
tgtaagagtagaacttccctgagaa

SEQ ID NO: 13896 - DNA, 25 bp, Artificial
  Probe
tgatgacggaggcttatatttctgt

SEQ ID NO: 13897 - DNA, 25 bp, Artificial
  Probe
taagagtagaacttccctgagaatg

SEQ ID NO: 13898 - DNA, 25 bp, Artificial
  Probe
gtaagagtagaacttccctgagaat

SEQ ID NO: 13899 - DNA, 25 bp, Artificial
  Probe
ctgtaagagtagaacttccctgaga

SEQ ID NO: 13900 - DNA, 25 bp, Artificial
  Probe
tctgtaagagtagaacttccctgag

SEQ ID NO: 13901 - DNA, 25 bp, Artificial
  Probe
acttctgtagcctggtatcgtcaat

SEQ ID NO: 13902 - DNA, 25 bp, Artificial
  Probe
ccatctgtaagagtagaacttccct

SEQ ID NO: 13903 - DNA, 25 bp, Artificial
  Probe
ggaggcttatatttctgtggtggta

SEQ ID NO: 13904 - DNA, 25 bp, Artificial
  Probe
catcctgatgacggaggcttatatt

SEQ ID NO: 13905 - DNA, 25 bp, Artificial
  Probe
accatctgtaagagtagaacttccc

SEQ ID NO: 13906 - DNA, 25 bp, Artificial
  Probe
ggcttatatttctgtggtggtaata

SEQ ID NO: 13907 - DNA, 25 bp, Artificial
  Probe
aagagtagaacttccctgagaatgg

SEQ ID NO: 13908 - DNA, 25 bp, Artificial
  Probe
gatagcactttctactgtgaactct

SEQ ID NO: 13909 - DNA, 25 bp, Artificial
  Probe
atagcactttctactgtgaactctg

SEQ ID NO: 13910 - DNA, 25 bp, Artificial
  Probe
tgatagcactttctactgtgaactc

SEQ ID NO: 13911 - DNA, 25 bp, Artificial
  Probe
ctgatagcactttctactgtgaact

SEQ ID NO: 13912 - DNA, 25 bp, Artificial
  Probe
aagatgttgctgcttctgctacttc

SEQ ID NO: 13913 - DNA, 25 bp, Artificial
  Probe
atgacggaggcttatatttctgtgg

SEQ ID NO: 13914 - DNA, 25 bp, Artificial
  Probe
gacctttgacctgatagcactttct

SEQ ID NO: 13915 - DNA, 25 bp, Artificial
  Probe
agacctttgacctgatagcactttc

SEQ ID NO: 13916 - DNA, 25 bp, Artificial
  Probe
gagacctttgacctgatagcacttt

SEQ ID NO: 13917 - DNA, 25 bp, Artificial
  Probe
cctgatagcactttctactgtgaac

SEQ ID NO: 13918 - DNA, 25 bp, Artificial
  Probe
acctgatagcactttctactgtgaa

SEQ ID NO: 13919 - DNA, 25 bp, Artificial
  Probe
tccatcagtcatccaaatttatcct

SEQ ID NO: 13920 - DNA, 25 bp, Artificial
  Probe
atcctgatgacggaggcttatattt

SEQ ID NO: 13921 - DNA, 25 bp, Artificial
  Probe
ccatcagtcatccaaatttatcctt

SEQ ID NO: 13922 - DNA, 25 bp, Artificial
  Probe
catctaccacttgcagttattcgag

SEQ ID NO: 13923 - DNA, 25 bp, Artificial
  Probe
tatagtgcccacctgaatgtcaata

SEQ ID NO: 13924 - DNA, 25 bp, Artificial
  Probe
atagtgcccacctgaatgtcaataa

SEQ ID NO: 13925 - DNA, 25 bp, Artificial
  Probe
tagtgcccacctgaatgtcaataaa

SEQ ID NO: 13926 - DNA, 25 bp, Artificial
  Probe
atctaccacttgcagttattcgagg

SEQ ID NO: 13927 - DNA, 25 bp, Artificial
  Probe
ctaccacttgcagttattcgaggaa

SEQ ID NO: 13928 - DNA, 25 bp, Artificial
  Probe
ccatctaccacttgcagttattcga

SEQ ID NO: 13929 - DNA, 25 bp, Artificial
  Probe
taccacttgcagttattcgaggaac

SEQ ID NO: 13930 - DNA, 25 bp, Artificial
  Probe
ccacctgaatgtcaataaacagcag

SEQ ID NO: 13931 - DNA, 25 bp, Artificial
  Probe
tctaccacttgcagttattcgagga

SEQ ID NO: 13932 - DNA, 25 bp, Artificial
  Probe
cacctgaatgtcaataaacagcagc

SEQ ID NO: 13933 - DNA, 25 bp, Artificial
  Probe
ctatagtgcccacctgaatgtcaat

SEQ ID NO: 13934 - DNA, 25 bp, Artificial
  Probe
agtgcccacctgaatgtcaataaac

SEQ ID NO: 13935 - DNA, 25 bp, Artificial
  Probe
cccacctgaatgtcaataaacagca

SEQ ID NO: 13936 - DNA, 25 bp, Artificial
  Probe
tgcccacctgaatgtcaataaacag

SEQ ID NO: 13937 - DNA, 25 bp, Artificial
  Probe
gccatctaccacttgcagttattcg

SEQ ID NO: 13938 - DNA, 25 bp, Artificial
  Probe
gtgcccacctgaatgtcaataaaca

SEQ ID NO: 13939 - DNA, 25 bp, Artificial
  Probe
tgccatctaccacttgcagttattc

SEQ ID NO: 13940 - DNA, 25 bp, Artificial
  Probe
cacttgcagttattcgaggaactcc

SEQ ID NO: 13941 - DNA, 25 bp, Artificial
  Probe
ccacttgcagttattcgaggaactc

SEQ ID NO: 13942 - DNA, 25 bp, Artificial
  Probe
gcccacctgaatgtcaataaacagc

SEQ ID NO: 13943 - DNA, 25 bp, Artificial
  Probe
accacttgcagttattcgaggaact

SEQ ID NO: 13944 - DNA, 25 bp, Artificial
  Probe
ttgctatagtgcccacctgaatgtc

SEQ ID NO: 13945 - DNA, 25 bp, Artificial
  Probe
ctgttgctatagtgcccacctgaat

SEQ ID NO: 13946 - DNA, 25 bp, Artificial
  Probe
gctatagtgcccacctgaatgtcaa

SEQ ID NO: 13947 - DNA, 25 bp, Artificial
  Probe
gttgctatagtgcccacctgaatgt

SEQ ID NO: 13948 - DNA, 25 bp, Artificial
  Probe
tgttgctatagtgcccacctgaatg

SEQ ID NO: 13949 - DNA, 25 bp, Artificial
  Probe
acttgcagttattcgaggaactccg

SEQ ID NO: 13950 - DNA, 25 bp, Artificial
  Probe
acagctatgaccatgattacgaatt

SEQ ID NO: 13951 - DNA, 25 bp, Artificial
  Probe
aacagctatgaccatgattacgaat

SEQ ID NO: 13952 - DNA, 25 bp, Artificial
  Probe
cagctatgaccatgattacgaattc

SEQ ID NO: 13953 - DNA, 25 bp, Artificial
  Probe
agctatgaccatgattacgaattcc

SEQ ID NO: 13954 - DNA, 25 bp, Artificial
  Probe
aaacagctatgaccatgattacgaa

SEQ ID NO: 13955 - DNA, 25 bp, Artificial
  Probe
aggaaacagctatgaccatgattac

SEQ ID NO: 13956 - DNA, 25 bp, Artificial
  Probe
caggaaacagctatgaccatgatta

SEQ ID NO: 13957 - DNA, 25 bp, Artificial
  Probe
gaaacagctatgaccatgattacga

SEQ ID NO: 13958 - DNA, 25 bp, Artificial
  Probe
ttgtgtggaattgtgagcggataac

SEQ ID NO: 13959 - DNA, 25 bp, Artificial
  Probe
ggataacaatttcacacaggaaaca

SEQ ID NO: 13960 - DNA, 25 bp, Artificial
  Probe
ggaaacagctatgaccatgattacg

SEQ ID NO: 13961 - DNA, 25 bp, Artificial
  Probe
ataacaatttcacacaggaaacagc

SEQ ID NO: 13962 - DNA, 25 bp, Artificial
  Probe
cggataacaatttcacacaggaaac

SEQ ID NO: 13963 - DNA, 25 bp, Artificial
  Probe
agcggataacaatttcacacaggaa

SEQ ID NO: 13964 - DNA, 25 bp, Artificial
  Probe
gataacaatttcacacaggaaacag

SEQ ID NO: 13965 - DNA, 25 bp, Artificial
  Probe
acaggaaacagctatgaccatgatt

SEQ ID NO: 13966 - DNA, 25 bp, Artificial
  Probe
gagcggataacaatttcacacagga

SEQ ID NO: 13967 - DNA, 25 bp, Artificial
  Probe
ctatgaccatgattacgaattcccg

SEQ ID NO: 13968 - DNA, 25 bp, Artificial
  Probe
cacaggaaacagctatgaccatgat

SEQ ID NO: 13969 - DNA, 25 bp, Artificial
  Probe
aatttcacacaggaaacagctatga

SEQ ID NO: 13970 - DNA, 25 bp, Artificial
  Probe
caatttcacacaggaaacagctatg

SEQ ID NO: 13971 - DNA, 25 bp, Artificial
  Probe
gctatgaccatgattacgaattccc

SEQ ID NO: 13972 - DNA, 25 bp, Artificial
  Probe
acaatttcacacaggaaacagctat

SEQ ID NO: 13973 - DNA, 25 bp, Artificial
  Probe
gcggataacaatttcacacaggaaa

SEQ ID NO: 13974 - DNA, 25 bp, Artificial
  Probe
aacaatttcacacaggaaacagcta

SEQ ID NO: 13975 - DNA, 25 bp, Artificial
  Probe
taacaatttcacacaggaaacagct

SEQ ID NO: 13976 - DNA, 25 bp, Artificial
  Probe
tgagcggataacaatttcacacagg

SEQ ID NO: 13977 - DNA, 25 bp, Artificial
  Probe
atttcacacaggaaacagctatgac

SEQ ID NO: 13978 - DNA, 25 bp, Artificial
  Probe
tgtgtggaattgtgagcggataaca

SEQ ID NO: 13979 - DNA, 25 bp, Artificial
  Probe
tatgaccatgattacgaattcccgg

SEQ ID NO: 13980 - DNA, 25 bp, Artificial
  Probe
cacacaggaaacagctatgaccatg

SEQ ID NO: 13981 - DNA, 25 bp, Artificial
  Probe
acacaggaaacagctatgaccatga

SEQ ID NO: 13982 - DNA, 25 bp, Artificial
  Probe
gtgtggaattgtgagcggataacaa

SEQ ID NO: 13983 - DNA, 25 bp, Artificial
  Probe
tcacacaggaaacagctatgaccat

SEQ ID NO: 13984 - DNA, 25 bp, Artificial
  Probe
tttcacacaggaaacagctatgacc

SEQ ID NO: 13985 - DNA, 25 bp, Artificial
  Probe
ttcacacaggaaacagctatgacca

SEQ ID NO: 13986 - DNA, 25 bp, Artificial
  Probe
gtgagcggataacaatttcacacag

SEQ ID NO: 13987 - DNA, 25 bp, Artificial
  Probe
tgtggaattgtgagcggataacaat

SEQ ID NO: 13988 - DNA, 25 bp, Artificial
  Probe
ttgttcacagtgttcagtatcttga

SEQ ID NO: 13989 - DNA, 25 bp, Artificial
  Probe
tgttcacagtgttcagtatcttgac

SEQ ID NO: 13990 - DNA, 25 bp, Artificial
  Probe
gttcacagtgttcagtatcttgacc

SEQ ID NO: 13991 - DNA, 25 bp, Artificial
  Probe
acttgagaggacattccaatcatag

SEQ ID NO: 13992 - DNA, 25 bp, Artificial
  Probe
ctacttgagaggacattccaatcat

SEQ ID NO: 13993 - DNA, 25 bp, Artificial
  Probe
cttgagaggacattccaatcatagg

SEQ ID NO: 13994 - DNA, 25 bp, Artificial
  Probe
tctacttgagaggacattccaatca

SEQ ID NO: 13995 - DNA, 25 bp, Artificial
  Probe
tacttgagaggacattccaatcata

SEQ ID NO: 13996 - DNA, 25 bp, Artificial
  Probe
aggaatggctgtagatttgtatagg

SEQ ID NO: 13997 - DNA, 25 bp, Artificial
  Probe
ataaaccctaacctcctctacttga

SEQ ID NO: 13998 - DNA, 25 bp, Artificial
  Probe
cataaaccctaacctcctctacttg

SEQ ID NO: 13999 - DNA, 25 bp, Artificial
  Probe
tcataaaccctaacctcctctactt

SEQ ID NO: 14000 - DNA, 25 bp, Artificial
  Probe
ttatatcaacaaccaggaatggctg

SEQ ID NO: 14001 - DNA, 25 bp, Artificial
  Probe
ctcataaaccctaacctcctctact

SEQ ID NO: 14002 - DNA, 25 bp, Artificial
  Probe
gtcctcctgttaattaggtcactta

SEQ ID NO: 14003 - DNA, 25 bp, Artificial
  Probe
tttgttcacagtgttcagtatcttg

SEQ ID NO: 14004 - DNA, 25 bp, Artificial
  Probe
tctctgtcctcctgttaattaggtc

SEQ ID NO: 14005 - DNA, 25 bp, Artificial
  Probe
ctctctgtcctcctgttaattaggt

SEQ ID NO: 14006 - DNA, 25 bp, Artificial
  Probe
ctttgttcacagtgttcagtatctt

SEQ ID NO: 14007 - DNA, 25 bp, Artificial
  Probe
tgtcctcctgttaattaggtcactt

SEQ ID NO: 14008 - DNA, 25 bp, Artificial
  Probe
tcctcctgttaattaggtcacttaa

SEQ ID NO: 14009 - DNA, 25 bp, Artificial
  Probe
ctctgtcctcctgttaattaggtca

SEQ ID NO: 14010 - DNA, 25 bp, Artificial
  Probe
cctcataaaccctaacctcctctac

SEQ ID NO: 14011 - DNA, 25 bp, Artificial
  Probe
ggaatggctgtagatttgtataggc

SEQ ID NO: 14012 - DNA, 25 bp, Artificial
  Probe
cctttgttcacagtgttcagtatct

SEQ ID NO: 14013 - DNA, 25 bp, Artificial
  Probe
tcctcataaaccctaacctcctcta

SEQ ID NO: 14014 - DNA, 25 bp, Artificial
  Probe
acctttgttcacagtgttcagtatc

SEQ ID NO: 14015 - DNA, 25 bp, Artificial
  Probe
ctgtcctcctgttaattaggtcact

SEQ ID NO: 14016 - DNA, 25 bp, Artificial
  Probe
tctgtcctcctgttaattaggtcac

SEQ ID NO: 14017 - DNA, 25 bp, Artificial
  Probe
aacctttgttcacagtgttcagtat

SEQ ID NO: 14018 - DNA, 25 bp, Artificial
  Probe
cctctctgtcctcctgttaattagg

SEQ ID NO: 14019 - DNA, 25 bp, Artificial
  Probe
aaacctttgttcacagtgttcagta

SEQ ID NO: 14020 - DNA, 25 bp, Artificial
  Probe
atatcaacaaccaggaatggctgta

SEQ ID NO: 14021 - DNA, 25 bp, Artificial
  Probe
tatatcaacaaccaggaatggctgt

SEQ ID NO: 14022 - DNA, 25 bp, Artificial
  Probe
catcaatgtatcttatcatgtctgg

SEQ ID NO: 14023 - DNA, 25 bp, Artificial
  Probe
taaaccctaacctcctctacttgag

SEQ ID NO: 14024 - DNA, 25 bp, Artificial
  Probe
ttgagaggacattccaatcataggc

SEQ ID NO: 14025 - DNA, 25 bp, Artificial
  Probe
tcaatgtatcttatcatgtctggat

SEQ ID NO: 14026 - DNA, 25 bp, Artificial
  Probe
atcaatgtatcttatcatgtctgga

SEQ ID NO: 14027 - DNA, 25 bp, Artificial
  Probe
atcacaaagtttctactgttggttt

SEQ ID NO: 14028 - DNA, 25 bp, Artificial
  Probe
caatgtatcttatcatgtctggatc

SEQ ID NO: 14029 - DNA, 25 bp, Artificial
  Probe
ttatttcctggagtacaaacctttg

SEQ ID NO: 14030 - DNA, 25 bp, Artificial
  Probe
tttatttcctggagtacaaaccttt

SEQ ID NO: 14031 - DNA, 25 bp, Artificial
  Probe
tcacaaagtttctactgttggttta

SEQ ID NO: 14032 - DNA, 25 bp, Artificial
  Probe
caggaatggctgtagatttgtatag

SEQ ID NO: 14033 - DNA, 25 bp, Artificial
  Probe
cttcgtatgatctgtggagaatgta

SEQ ID NO: 14034 - DNA, 25 bp, Artificial
  Probe
ttcgtatgatctgtggagaatgtac

SEQ ID NO: 14035 - DNA, 25 bp, Artificial
  Probe
ttgtattgtctcacacatgctctat

SEQ ID NO: 14036 - DNA, 25 bp, Artificial
  Probe
attgtattgtctcacacatgctcta

SEQ ID NO: 14037 - DNA, 25 bp, Artificial
  Probe
tattgtattgtctcacacatgctct

SEQ ID NO: 14038 - DNA, 25 bp, Artificial
  Probe
tgtattgtctcacacatgctctata

SEQ ID NO: 14039 - DNA, 25 bp, Artificial
  Probe
ccttcgtatgatctgtggagaatgt

SEQ ID NO: 14040 - DNA, 25 bp, Artificial
  Probe
aaactttacctacaaactccttcgt

SEQ ID NO: 14041 - DNA, 25 bp, Artificial
  Probe
aactttacctacaaactccttcgta

SEQ ID NO: 14042 - DNA, 25 bp, Artificial
  Probe
tttacctacaaactccttcgtatga

SEQ ID NO: 14043 - DNA, 25 bp, Artificial
  Probe
actttacctacaaactccttcgtat

SEQ ID NO: 14044 - DNA, 25 bp, Artificial
  Probe
ttacctacaaactccttcgtatgat

SEQ ID NO: 14045 - DNA, 25 bp, Artificial
  Probe
ctttacctacaaactccttcgtatg

SEQ ID NO: 14046 - DNA, 25 bp, Artificial
  Probe
gaaactttacctacaaactccttcg

SEQ ID NO: 14047 - DNA, 25 bp, Artificial
  Probe
ttcccgttatgtaagtctgttcttt

SEQ ID NO: 14048 - DNA, 25 bp, Artificial
  Probe
tatgtaagtctgttctttaggctcg

SEQ ID NO: 14049 - DNA, 25 bp, Artificial
  Probe
cgttatgtaagtctgttctttaggc

SEQ ID NO: 14050 - DNA, 25 bp, Artificial
  Probe
gtattgtctcacacatgctctatat

SEQ ID NO: 14051 - DNA, 25 bp, Artificial
  Probe
tcccgttatgtaagtctgttcttta

SEQ ID NO: 14052 - DNA, 25 bp, Artificial
  Probe
ccgttatgtaagtctgttctttagg

SEQ ID NO: 14053 - DNA, 25 bp, Artificial
  Probe
cccgttatgtaagtctgttctttag

SEQ ID NO: 14054 - DNA, 25 bp, Artificial
  Probe
gttcccgttatgtaagtctgttctt

SEQ ID NO: 14055 - DNA, 25 bp, Artificial
  Probe
taagtctgttctttaggctcgtttg

SEQ ID NO: 14056 - DNA, 25 bp, Artificial
  Probe
gtaagtctgttctttaggctcgttt

SEQ ID NO: 14057 - DNA, 25 bp, Artificial
  Probe
tttccttcaaatccagttcttccac

SEQ ID NO: 14058 - DNA, 25 bp, Artificial
  Probe
ctgttcccgttatgtaagtctgttc

SEQ ID NO: 14059 - DNA, 25 bp, Artificial
  Probe
tgttcccgttatgtaagtctgttct

SEQ ID NO: 14060 - DNA, 25 bp, Artificial
  Probe
tacctacaaactccttcgtatgatc

SEQ ID NO: 14061 - DNA, 25 bp, Artificial
  Probe
gttatgtaagtctgttctttaggct

SEQ ID NO: 14062 - DNA, 25 bp, Artificial
  Probe
tccttcgtatgatctgtggagaatg

SEQ ID NO: 14063 - DNA, 25 bp, Artificial
  Probe
cctacaaactccttcgtatgatctg

SEQ ID NO: 14064 - DNA, 25 bp, Artificial
  Probe
acctacaaactccttcgtatgatct

SEQ ID NO: 14065 - DNA, 25 bp, Artificial
  Probe
atgtaagtctgttctttaggctcgt

SEQ ID NO: 14066 - DNA, 25 bp, Artificial
  Probe
ttatgtaagtctgttctttaggctc

SEQ ID NO: 14067 - DNA, 25 bp, Artificial
  Probe
ggtattggtaaatccgtattggcac

SEQ ID NO: 14068 - DNA, 25 bp, Artificial
  Probe
attgtctcacacatgctctatataa

SEQ ID NO: 14069 - DNA, 25 bp, Artificial
  Probe
gttgctgagaaatgtaagtggaact

SEQ ID NO: 14070 - DNA, 25 bp, Artificial
  Probe
tgtaagtctgttctttaggctcgtt

SEQ ID NO: 14071 - DNA, 25 bp, Artificial
  Probe
ttccttcaaatccagttcttccaca

SEQ ID NO: 14072 - DNA, 25 bp, Artificial
  Probe
aggttgctgagaaatgtaagtggaa

SEQ ID NO: 14073 - DNA, 25 bp, Artificial
  Probe
ctacaaactccttcgtatgatctgt

SEQ ID NO: 14074 - DNA, 25 bp, Artificial
  Probe
tacaaactccttcgtatgatctgtg

SEQ ID NO: 14075 - DNA, 25 bp, Artificial
  Probe
tggaaactttacctacaaactcctt

SEQ ID NO: 14076 - DNA, 25 bp, Artificial
  Probe
atggaaactttacctacaaactcct

SEQ ID NO: 14077 - DNA, 25 bp, Artificial
  Probe
ggaaactttacctacaaactccttc

SEQ ID NO: 14078 - DNA, 25 bp, Artificial
  Probe
gttgatgtgtcttctctgtccttat

SEQ ID NO: 14079 - DNA, 25 bp, Artificial
  Probe
tgatgtgtcttctctgtccttatac

SEQ ID NO: 14080 - DNA, 25 bp, Artificial
  Probe
ttgatgtgtcttctctgtccttata

SEQ ID NO: 14081 - DNA, 25 bp, Artificial
  Probe
agttgatgtgtcttctctgtcctta

SEQ ID NO: 14082 - DNA, 25 bp, Artificial
  Probe
gatgtgtcttctctgtccttataca

SEQ ID NO: 14083 - DNA, 25 bp, Artificial
  Probe
ggtatgtactgtaagtccttcatct

SEQ ID NO: 14084 - DNA, 25 bp, Artificial
  Probe
ctagttatgatctgttgatgttcca

SEQ ID NO: 14085 - DNA, 25 bp, Artificial
  Probe
ggagtggaggtatgtactgtaagtc

SEQ ID NO: 14086 - DNA, 25 bp, Artificial
  Probe
aggtatgtactgtaagtccttcatc

SEQ ID NO: 14087 - DNA, 25 bp, Artificial
  Probe
gaggtatgtactgtaagtccttcat

SEQ ID NO: 14088 - DNA, 25 bp, Artificial
  Probe
tagttatgatctgttgatgttccaa

SEQ ID NO: 14089 - DNA, 25 bp, Artificial
  Probe
ggaggtatgtactgtaagtccttca

SEQ ID NO: 14090 - DNA, 25 bp, Artificial
  Probe
tggaggtatgtactgtaagtccttc

SEQ ID NO: 14091 - DNA, 25 bp, Artificial
  Probe
gtggaggtatgtactgtaagtcctt

SEQ ID NO: 14092 - DNA, 25 bp, Artificial
  Probe
tggagtggaggtatgtactgtaagt

SEQ ID NO: 14093 - DNA, 25 bp, Artificial
  Probe
atatgtcacaaagaagatggcagaa

SEQ ID NO: 14094 - DNA, 25 bp, Artificial
  Probe
gtatgtactgtaagtccttcatctt

SEQ ID NO: 14095 - DNA, 25 bp, Artificial
  Probe
tatgtcacaaagaagatggcagaag

SEQ ID NO: 14096 - DNA, 25 bp, Artificial
  Probe
gagtggaggtatgtactgtaagtcc

SEQ ID NO: 14097 - DNA, 25 bp, Artificial
  Probe
cagttgatgtgtcttctctgtcctt

SEQ ID NO: 14098 - DNA, 25 bp, Artificial
  Probe
agtggaggtatgtactgtaagtcct

SEQ ID NO: 14099 - DNA, 25 bp, Artificial
  Probe
ttatgatctgttgatgttccaaagc

SEQ ID NO: 14100 - DNA, 25 bp, Artificial
  Probe
gcaaaggcaattagcaaattagtga

SEQ ID NO: 14101 - DNA, 25 bp, Artificial
  Probe
agcaaaggcaattagcaaattagtg

SEQ ID NO: 14102 - DNA, 25 bp, Artificial
  Probe
cagcaaaggcaattagcaaattagt

SEQ ID NO: 14103 - DNA, 25 bp, Artificial
  Probe
caaaggcaattagcaaattagtgaa

SEQ ID NO: 14104 - DNA, 25 bp, Artificial
  Probe
ccctccttaggttctgtttcataat

SEQ ID NO: 14105 - DNA, 25 bp, Artificial
  Probe
ttaataaagccctccttaggttctg

SEQ ID NO: 14106 - DNA, 25 bp, Artificial
  Probe
ccagcaaaggcaattagcaaattag

SEQ ID NO: 14107 - DNA, 25 bp, Artificial
  Probe
gttccctatattctcagagcccttg

SEQ ID NO: 14108 - DNA, 25 bp, Artificial
  Probe
tttaataaagccctccttaggttct

SEQ ID NO: 14109 - DNA, 25 bp, Artificial
  Probe
agttatgatctgttgatgttccaaa

SEQ ID NO: 14110 - DNA, 25 bp, Artificial
  Probe
taataaagccctccttaggttctgt

SEQ ID NO: 14111 - DNA, 25 bp, Artificial
  Probe
gttatgatctgttgatgttccaaag

SEQ ID NO: 14112 - DNA, 25 bp, Artificial
  Probe
atgtcacaaagaagatggcagaaga

SEQ ID NO: 14113 - DNA, 25 bp, Artificial
  Probe
tgttccctatattctcagagccctt

SEQ ID NO: 14114 - DNA, 25 bp, Artificial
  Probe
accagcaaaggcaattagcaaatta

SEQ ID NO: 14115 - DNA, 25 bp, Artificial
  Probe
actgtaagtccttcatctttagttt

SEQ ID NO: 14116 - DNA, 25 bp, Artificial
  Probe
atttaataaagccctccttaggttc

SEQ ID NO: 14117 - DNA, 25 bp, Artificial
  Probe
tatgatctgttgatgttccaaagct

SEQ ID NO: 14118 - DNA, 25 bp, Artificial
  Probe
gtcttctctgtccttatacacccag

SEQ ID NO: 14119 - DNA, 25 bp, Artificial
  Probe
aaggcaattagcaaattagtgaatt

SEQ ID NO: 14120 - DNA, 25 bp, Artificial
  Probe
aaaggcaattagcaaattagtgaat

SEQ ID NO: 14121 - DNA, 25 bp, Artificial
  Probe
ataaagccctccttaggttctgttt

SEQ ID NO: 14122 - DNA, 25 bp, Artificial
  Probe
aataaagccctccttaggttctgtt

SEQ ID NO: 14123 - DNA, 25 bp, Artificial
  Probe
gcctgctttgtcttcatttagtaga

SEQ ID NO: 14124 - DNA, 25 bp, Artificial
  Probe
agcctgctttgtcttcatttagtag

SEQ ID NO: 14125 - DNA, 25 bp, Artificial
  Probe
cagcctgctttgtcttcatttagta

SEQ ID NO: 14126 - DNA, 25 bp, Artificial
  Probe
ccagcctgctttgtcttcatttagt

SEQ ID NO: 14127 - DNA, 25 bp, Artificial
  Probe
cccagcctgctttgtcttcatttag

SEQ ID NO: 14128 - DNA, 25 bp, Artificial
  Probe
cctgctttgtcttcatttagtagac

SEQ ID NO: 14129 - DNA, 25 bp, Artificial
  Probe
ctgctttgtcttcatttagtagact

SEQ ID NO: 14130 - DNA, 25 bp, Artificial
  Probe
ttttgaaaatacccagcctgctttg

SEQ ID NO: 14131 - DNA, 25 bp, Artificial
  Probe
atacccagcctgctttgtcttcatt

SEQ ID NO: 14132 - DNA, 25 bp, Artificial
  Probe
aatacccagcctgctttgtcttcat

SEQ ID NO: 14133 - DNA, 25 bp, Artificial
  Probe
acccagcctgctttgtcttcattta

SEQ ID NO: 14134 - DNA, 25 bp, Artificial
  Probe
tacccagcctgctttgtcttcattt

SEQ ID NO: 14135 - DNA, 25 bp, Artificial
  Probe
aaatacccagcctgctttgtcttca

SEQ ID NO: 14136 - DNA, 25 bp, Artificial
  Probe
tgctttgtcttcatttagtagacta

SEQ ID NO: 14137 - DNA, 25 bp, Artificial
  Probe
tttgaaaatacccagcctgctttgt

SEQ ID NO: 14138 - DNA, 25 bp, Artificial
  Probe
aaaatacccagcctgctttgtcttc

SEQ ID NO: 14139 - DNA, 25 bp, Artificial
  Probe
gaaaatacccagcctgctttgtctt

SEQ ID NO: 14140 - DNA, 25 bp, Artificial
  Probe
ttgaaaatacccagcctgctttgtc

SEQ ID NO: 14141 - DNA, 25 bp, Artificial
  Probe
gctttgtcttcatttagtagactat

SEQ ID NO: 14142 - DNA, 25 bp, Artificial
  Probe
tgaaaatacccagcctgctttgtct

SEQ ID NO: 14143 - DNA, 25 bp, Artificial
  Probe
catgaagtacaagaaggaccagaag

SEQ ID NO: 14144 - DNA, 25 bp, Artificial
  Probe
atgaagtacaagaaggaccagaagg

SEQ ID NO: 14145 - DNA, 25 bp, Artificial
  Probe
gcatgaagtacaagaaggaccagaa

SEQ ID NO: 14146 - DNA, 25 bp, Artificial
  Probe
tgaagtacaagaaggaccagaaggc

SEQ ID NO: 14147 - DNA, 25 bp, Artificial
  Probe
gaaccgtcgcatgaagtacaagaag

SEQ ID NO: 14148 - DNA, 25 bp, Artificial
  Probe
agaaccgtcgcatgaagtacaagaa

SEQ ID NO: 14149 - DNA, 25 bp, Artificial
  Probe
cgcatgaagtacaagaaggaccaga

SEQ ID NO: 14150 - DNA, 25 bp, Artificial
  Probe
tcgcatgaagtacaagaaggaccag

SEQ ID NO: 14151 - DNA, 25 bp, Artificial
  Probe
cagaaccgtcgcatgaagtacaaga

SEQ ID NO: 14152 - DNA, 25 bp, Artificial
  Probe
gtcgcatgaagtacaagaaggacca

SEQ ID NO: 14153 - DNA, 25 bp, Artificial
  Probe
gaagtacaagaaggaccagaaggcc

SEQ ID NO: 14154 - DNA, 25 bp, Artificial
  Probe
gtacaagaaggaccagaaggccaag

SEQ ID NO: 14155 - DNA, 25 bp, Artificial
  Probe
tagagctggagaaggagttccactt

SEQ ID NO: 14156 - DNA, 25 bp, Artificial
  Probe
agatcaagatctggttccagaaccg

SEQ ID NO: 14157 - DNA, 25 bp, Artificial
  Probe
ctggagaaggagttccacttcaacc

SEQ ID NO: 14158 - DNA, 25 bp, Artificial
  Probe
atcaagatctggttccagaaccgtc

SEQ ID NO: 14159 - DNA, 25 bp, Artificial
  Probe
gatcaagatctggttccagaaccgt

SEQ ID NO: 14160 - DNA, 25 bp, Artificial
  Probe
gtagagctggagaaggagttccact

SEQ ID NO: 14161 - DNA, 25 bp, Artificial
  Probe
gagagtgaggatgagttgaagactt

SEQ ID NO: 14162 - DNA, 25 bp, Artificial
  Probe
ctcattcatttccactcagcatttc

SEQ ID NO: 14163 - DNA, 25 bp, Artificial
  Probe
tcattcatttccactcagcatttct

SEQ ID NO: 14164 - DNA, 25 bp, Artificial
  Probe
gttcttgtttaccagcattaactcg

SEQ ID NO: 14165 - DNA, 25 bp, Artificial
  Probe
agagtgaggatgagttgaagacttt

SEQ ID NO: 14166 - DNA, 25 bp, Artificial
  Probe
gacgagagtgaggatgagttgaaga

SEQ ID NO: 14167 - DNA, 25 bp, Artificial
  Probe
cattcatttccactcagcatttctg

SEQ ID NO: 14168 - DNA, 25 bp, Artificial
  Probe
ttcttgtttaccagcattaactcgc

SEQ ID NO: 14169 - DNA, 25 bp, Artificial
  Probe
acgagagtgaggatgagttgaagac

SEQ ID NO: 14170 - DNA, 25 bp, Artificial
  Probe
cgagagtgaggatgagttgaagact

SEQ ID NO: 14171 - DNA, 25 bp, Artificial
  Probe
ggttcttgtttaccagcattaactc

SEQ ID NO: 14172 - DNA, 25 bp, Artificial
  Probe
gaggttcttgtttaccagcattaac

SEQ ID NO: 14173 - DNA, 25 bp, Artificial
  Probe
aggttcttgtttaccagcattaact

SEQ ID NO: 14174 - DNA, 25 bp, Artificial
  Probe
tgaggttcttgtttaccagcattaa

SEQ ID NO: 14175 - DNA, 25 bp, Artificial
  Probe
ctgaggttcttgtttaccagcatta

SEQ ID NO: 14176 - DNA, 25 bp, Artificial
  Probe
ctttgtgtgtcctggatttggattt

SEQ ID NO: 14177 - DNA, 25 bp, Artificial
  Probe
tttgtgtgtcctggatttggatttg

SEQ ID NO: 14178 - DNA, 25 bp, Artificial
  Probe
ggacgagagtgaggatgagttgaag

SEQ ID NO: 14179 - DNA, 25 bp, Artificial
  Probe
gagtgaggatgagttgaagactttt

SEQ ID NO: 14180 - DNA, 25 bp, Artificial
  Probe
gctcattcatttccactcagcattt

SEQ ID NO: 14181 - DNA, 25 bp, Artificial
  Probe
tggacgagagtgaggatgagttgaa

SEQ ID NO: 14182 - DNA, 25 bp, Artificial
  Probe
ttggacgagagtgaggatgagttga

SEQ ID NO: 14183 - DNA, 25 bp, Artificial
  Probe
tcttgtttaccagcattaactcgct

SEQ ID NO: 14184 - DNA, 25 bp, Artificial
  Probe
tttggacgagagtgaggatgagttg

SEQ ID NO: 14185 - DNA, 25 bp, Artificial
  Probe
gaaccgctcattcatttccactcag

SEQ ID NO: 14186 - DNA, 25 bp, Artificial
  Probe
attcatttccactcagcatttctgc

SEQ ID NO: 14187 - DNA, 25 bp, Artificial
  Probe
gctttgctcctctttctgtacattt

SEQ ID NO: 14188 - DNA, 25 bp, Artificial
  Probe
tttgggctttgctcctctttctgta

SEQ ID NO: 14189 - DNA, 25 bp, Artificial
  Probe
ttgtgtgtcctggatttggatttgg

SEQ ID NO: 14190 - DNA, 25 bp, Artificial
  Probe
gtgtcctggatttggatttgggaag

SEQ ID NO: 14191 - DNA, 25 bp, Artificial
  Probe
catttgggctttgctcctctttctg

SEQ ID NO: 14192 - DNA, 25 bp, Artificial
  Probe
gctttgtgtgtcctggatttggatt

SEQ ID NO: 14193 - DNA, 25 bp, Artificial
  Probe
atttgggctttgctcctctttctgt

SEQ ID NO: 14194 - DNA, 25 bp, Artificial
  Probe
ttttggacgagagtgaggatgagtt

SEQ ID NO: 14195 - DNA, 25 bp, Artificial
  Probe
tgtgtcctggatttggatttgggaa

SEQ ID NO: 14196 - DNA, 25 bp, Artificial
  Probe
ggctttgctcctctttctgtacatt

SEQ ID NO: 14197 - DNA, 25 bp, Artificial
  Probe
tgaggctgaggttcttgtttaccag

SEQ ID NO: 14198 - DNA, 25 bp, Artificial
  Probe
tttgctcctctttctgtacattttc

SEQ ID NO: 14199 - DNA, 25 bp, Artificial
  Probe
ctttgctcctctttctgtacatttt

SEQ ID NO: 14200 - DNA, 25 bp, Artificial
  Probe
ttgggctttgctcctctttctgtac

SEQ ID NO: 14201 - DNA, 25 bp, Artificial
  Probe
cgctcattcatttccactcagcatt

SEQ ID NO: 14202 - DNA, 25 bp, Artificial
  Probe
ctcctctttctgtacattttcctcc

SEQ ID NO: 14203 - DNA, 25 bp, Artificial
  Probe
tgtcctggatttggatttgggaagg

SEQ ID NO: 14204 - DNA, 25 bp, Artificial
  Probe
ttgctcctctttctgtacattttcc

SEQ ID NO: 14205 - DNA, 25 bp, Artificial
  Probe
ctggatttggatttgggaaggagct

SEQ ID NO: 14206 - DNA, 25 bp, Artificial
  Probe
acattgctattcaactcctgcttaa

SEQ ID NO: 14207 - DNA, 25 bp, Artificial
  Probe
aacattgctattcaactcctgctta

SEQ ID NO: 14208 - DNA, 25 bp, Artificial
  Probe
gaacttcctgcttatctcatgttag

SEQ ID NO: 14209 - DNA, 25 bp, Artificial
  Probe
cgtggaatggttactgtttatactg

SEQ ID NO: 14210 - DNA, 25 bp, Artificial
  Probe
aggctttattgtttattgctggttt

SEQ ID NO: 14211 - DNA, 25 bp, Artificial
  Probe
ggaatggttactgtttatactgtgg

SEQ ID NO: 14212 - DNA, 25 bp, Artificial
  Probe
taggctttattgtttattgctggtt

SEQ ID NO: 14213 - DNA, 25 bp, Artificial
  Probe
ggaacttcctgcttatctcatgtta

SEQ ID NO: 14214 - DNA, 25 bp, Artificial
  Probe
ataggctttattgtttattgctggt

SEQ ID NO: 14215 - DNA, 25 bp, Artificial
  Probe
gctgtaccagtcagtaattatgtag

SEQ ID NO: 14216 - DNA, 25 bp, Artificial
  Probe
gaatggttactgtttatactgtggt

SEQ ID NO: 14217 - DNA, 25 bp, Artificial
  Probe
tggaatggttactgtttatactgtg

SEQ ID NO: 14218 - DNA, 25 bp, Artificial
  Probe
gtggaatggttactgtttatactgt

SEQ ID NO: 14219 - DNA, 25 bp, Artificial
  Probe
ttatctcatgttagctgtaccagtc

SEQ ID NO: 14220 - DNA, 25 bp, Artificial
  Probe
cttatctcatgttagctgtaccagt

SEQ ID NO: 14221 - DNA, 25 bp, Artificial
  Probe
atgttagctgtaccagtcagtaatt

SEQ ID NO: 14222 - DNA, 25 bp, Artificial
  Probe
catgttagctgtaccagtcagtaat

SEQ ID NO: 14223 - DNA, 25 bp, Artificial
  Probe
ggctttattgtttattgctggttta

SEQ ID NO: 14224 - DNA, 25 bp, Artificial
  Probe
tgttagctgtaccagtcagtaatta

SEQ ID NO: 14225 - DNA, 25 bp, Artificial
  Probe
tatctcatgttagctgtaccagtca

SEQ ID NO: 14226 - DNA, 25 bp, Artificial
  Probe
agctgtaccagtcagtaattatgta

SEQ ID NO: 14227 - DNA, 25 bp, Artificial
  Probe
tagctgtaccagtcagtaattatgt

SEQ ID NO: 14228 - DNA, 25 bp, Artificial
  Probe
tcatgttagctgtaccagtcagtaa

SEQ ID NO: 14229 - DNA, 25 bp, Artificial
  Probe
aatcattgttaccaccattccgaca

SEQ ID NO: 14230 - DNA, 25 bp, Artificial
  Probe
cattgctattcaactcctgcttaag

SEQ ID NO: 14231 - DNA, 25 bp, Artificial
  Probe
aaacattgctattcaactcctgctt

SEQ ID NO: 14232 - DNA, 25 bp, Artificial
  Probe
ctcatgttagctgtaccagtcagta

SEQ ID NO: 14233 - DNA, 25 bp, Artificial
  Probe
aacttcctgcttatctcatgttagc

SEQ ID NO: 14234 - DNA, 25 bp, Artificial
  Probe
tgtgatacgtggaatggttactgtt

SEQ ID NO: 14235 - DNA, 25 bp, Artificial
  Probe
ttagctgtaccagtcagtaattatg

SEQ ID NO: 14236 - DNA, 25 bp, Artificial
  Probe
gttagctgtaccagtcagtaattat

SEQ ID NO: 14237 - DNA, 25 bp, Artificial
  Probe
atctcatgttagctgtaccagtcag

SEQ ID NO: 14238 - DNA, 25 bp, Artificial
  Probe
atcattgttaccaccattccgacag

SEQ ID NO: 14239 - DNA, 25 bp, Artificial
  Probe
tgtaccagtcagtaattatgtagaa

SEQ ID NO: 14240 - DNA, 25 bp, Artificial
  Probe
caaacattgctattcaactcctgct

SEQ ID NO: 14241 - DNA, 25 bp, Artificial
  Probe
aatggttactgtttatactgtggta

SEQ ID NO: 14242 - DNA, 25 bp, Artificial
  Probe
ctgtgatacgtggaatggttactgt

SEQ ID NO: 14243 - DNA, 25 bp, Artificial
  Probe
aactcctgcttaaggtgttctaatt

SEQ ID NO: 14244 - DNA, 25 bp, Artificial
  Probe
ctgtaccagtcagtaattatgtaga

SEQ ID NO: 14245 - DNA, 25 bp, Artificial
  Probe
gtaccagtcagtaattatgtagaac

SEQ ID NO: 14246 - DNA, 25 bp, Artificial
  Probe
caactcctgcttaaggtgttctaat

SEQ ID NO: 14247 - DNA, 25 bp, Artificial
  Probe
tattcaactcctgcttaaggtgttc

SEQ ID NO: 14248 - DNA, 25 bp, Artificial
  Probe
ctattcaactcctgcttaaggtgtt

SEQ ID NO: 14249 - DNA, 25 bp, Artificial
  Probe
tataggctttattgtttattgctgg

SEQ ID NO: 14250 - DNA, 25 bp, Artificial
  Probe
acaaacattgctattcaactcctgc

SEQ ID NO: 14251 - DNA, 25 bp, Artificial
  Probe
ctgtgagagcctgaaggatactatt

SEQ ID NO: 14252 - DNA, 25 bp, Artificial
  Probe
tgtgagagcctgaaggatactattg

SEQ ID NO: 14253 - DNA, 25 bp, Artificial
  Probe
tctatgaactggacaagaacttgaa

SEQ ID NO: 14254 - DNA, 25 bp, Artificial
  Probe
ctatgaactggacaagaacttgaag

SEQ ID NO: 14255 - DNA, 25 bp, Artificial
  Probe
agaatctagtcagaagaagacctct

SEQ ID NO: 14256 - DNA, 25 bp, Artificial
  Probe
tatgaactggacaagaacttgaagc

SEQ ID NO: 14257 - DNA, 25 bp, Artificial
  Probe
atcgtctatgaactggacaagaact

SEQ ID NO: 14258 - DNA, 25 bp, Artificial
  Probe
catcgtctatgaactggacaagaac

SEQ ID NO: 14259 - DNA, 25 bp, Artificial
  Probe
tagaatctagtcagaagaagacctc

SEQ ID NO: 14260 - DNA, 25 bp, Artificial
  Probe
gtctatgaactggacaagaacttga

SEQ ID NO: 14261 - DNA, 25 bp, Artificial
  Probe
tcgtctatgaactggacaagaactt

SEQ ID NO: 14262 - DNA, 25 bp, Artificial
  Probe
gtgagagcctgaaggatactattgc

SEQ ID NO: 14263 - DNA, 25 bp, Artificial
  Probe
catagaatctagtcagaagaagacc

SEQ ID NO: 14264 - DNA, 25 bp, Artificial
  Probe
gcataacaactaagtctctttccag

SEQ ID NO: 14265 - DNA, 25 bp, Artificial
  Probe
atagaatctagtcagaagaagacct

SEQ ID NO: 14266 - DNA, 25 bp, Artificial
  Probe
cgtctatgaactggacaagaacttg

SEQ ID NO: 14267 - DNA, 25 bp, Artificial
  Probe
ggcataacaactaagtctctttcca

SEQ ID NO: 14268 - DNA, 25 bp, Artificial
  Probe
tgggcataacaactaagtctctttc

SEQ ID NO: 14269 - DNA, 25 bp, Artificial
  Probe
ttgggcataacaactaagtctcttt

SEQ ID NO: 14270 - DNA, 25 bp, Artificial
  Probe
cactcttcccacaattaggtaactg

SEQ ID NO: 14271 - DNA, 25 bp, Artificial
  Probe
gggcataacaactaagtctctttcc

SEQ ID NO: 14272 - DNA, 25 bp, Artificial
  Probe
cacactgactacatctttaggatct

SEQ ID NO: 14273 - DNA, 25 bp, Artificial
  Probe
ccacactgactacatctttaggatc

SEQ ID NO: 14274 - DNA, 25 bp, Artificial
  Probe
actcccttcatagaatctagtcaga

SEQ ID NO: 14275 - DNA, 25 bp, Artificial
  Probe
cactcccttcatagaatctagtcag

SEQ ID NO: 14276 - DNA, 25 bp, Artificial
  Probe
ccactcccttcatagaatctagtca

SEQ ID NO: 14277 - DNA, 25 bp, Artificial
  Probe
acactgactacatctttaggatctt

SEQ ID NO: 14278 - DNA, 25 bp, Artificial
  Probe
ctcccttcatagaatctagtcagaa

SEQ ID NO: 14279 - DNA, 25 bp, Artificial
  Probe
cataacaactaagtctctttccaga

SEQ ID NO: 14280 - DNA, 25 bp, Artificial
  Probe
ccatcgtctatgaactggacaagaa

SEQ ID NO: 14281 - DNA, 25 bp, Artificial
  Probe
gccacactgactacatctttaggat

SEQ ID NO: 14282 - DNA, 25 bp, Artificial
  Probe
cacccactcccttcatagaatctag

SEQ ID NO: 14283 - DNA, 25 bp, Artificial
  Probe
tcatagaatctagtcagaagaagac

SEQ ID NO: 14284 - DNA, 25 bp, Artificial
  Probe
cactgactacatctttaggatcttc

SEQ ID NO: 14285 - DNA, 25 bp, Artificial
  Probe
cctgtgagagcctgaaggatactat

SEQ ID NO: 14286 - DNA, 25 bp, Artificial
  Probe
atcatcccttctacagcaacatcag

SEQ ID NO: 14287 - DNA, 25 bp, Artificial
  Probe
cccactcccttcatagaatctagtc

SEQ ID NO: 14288 - DNA, 25 bp, Artificial
  Probe
tgactacatctttaggatcttcagt

SEQ ID NO: 14289 - DNA, 25 bp, Artificial
  Probe
actgactacatctttaggatcttca

SEQ ID NO: 14290 - DNA, 25 bp, Artificial
  Probe
taggatcttcagtttaagttgtagc

SEQ ID NO: 14291 - DNA, 25 bp, Artificial
  Probe
gagagcctgaaggatactattgcca

SEQ ID NO: 14292 - DNA, 25 bp, Artificial
  Probe
tgagagcctgaaggatactattgcc

SEQ ID NO: 14293 - DNA, 25 bp, Artificial
  Probe
aggatcttcagtttaagttgtagct

SEQ ID NO: 14294 - DNA, 25 bp, Artificial
  Probe
gcactcttcccacaattaggtaact

SEQ ID NO: 14295 - DNA, 25 bp, Artificial
  Probe
ttcatagaatctagtcagaagaaga

SEQ ID NO: 14296 - DNA, 25 bp, Artificial
  Probe
tctatcagaacattcaggatggaag

SEQ ID NO: 14297 - DNA, 25 bp, Artificial
  Probe
atctatcagaacattcaggatggaa

SEQ ID NO: 14298 - DNA, 25 bp, Artificial
  Probe
aatctatcagaacattcaggatgga

SEQ ID NO: 14299 - DNA, 25 bp, Artificial
  Probe
ctatcagaacattcaggatggaagc

SEQ ID NO: 14300 - DNA, 25 bp, Artificial
  Probe
gtatgacatcaccagaagaagtaca

SEQ ID NO: 14301 - DNA, 25 bp, Artificial
  Probe
tgacatcaccagaagaagtacatat

SEQ ID NO: 14302 - DNA, 25 bp, Artificial
  Probe
caccagaagaagtacatataaccac

SEQ ID NO: 14303 - DNA, 25 bp, Artificial
  Probe
tcaccagaagaagtacatataacca

SEQ ID NO: 14304 - DNA, 25 bp, Artificial
  Probe
atgacatcaccagaagaagtacata

SEQ ID NO: 14305 - DNA, 25 bp, Artificial
  Probe
tatgacatcaccagaagaagtacat

SEQ ID NO: 14306 - DNA, 25 bp, Artificial
  Probe
gtgtatgacatcaccagaagaagta

SEQ ID NO: 14307 - DNA, 25 bp, Artificial
  Probe
tgtatgacatcaccagaagaagtac

SEQ ID NO: 14308 - DNA, 25 bp, Artificial
  Probe
accagaagaagtacatataaccact

SEQ ID NO: 14309 - DNA, 25 bp, Artificial
  Probe
tatcagaacattcaggatggaagcc

SEQ ID NO: 14310 - DNA, 25 bp, Artificial
  Probe
atcaccagaagaagtacatataacc

SEQ ID NO: 14311 - DNA, 25 bp, Artificial
  Probe
gacatcaccagaagaagtacatata

SEQ ID NO: 14312 - DNA, 25 bp, Artificial
  Probe
caccaacccaaacactgtaataatt

SEQ ID NO: 14313 - DNA, 25 bp, Artificial
  Probe
accaacccaaacactgtaataattc

SEQ ID NO: 14314 - DNA, 25 bp, Artificial
  Probe
ccaacccaaacactgtaataattct

SEQ ID NO: 14315 - DNA, 25 bp, Artificial
  Probe
tcaccaacccaaacactgtaataat

SEQ ID NO: 14316 - DNA, 25 bp, Artificial
  Probe
gttacacggagctactatagaggag

SEQ ID NO: 14317 - DNA, 25 bp, Artificial
  Probe
ctgttacacggagctactatagagg

SEQ ID NO: 14318 - DNA, 25 bp, Artificial
  Probe
ctcaccaacccaaacactgtaataa

SEQ ID NO: 14319 - DNA, 25 bp, Artificial
  Probe
acatcaccagaagaagtacatataa

SEQ ID NO: 14320 - DNA, 25 bp, Artificial
  Probe
tgttacacggagctactatagagga

SEQ ID NO: 14321 - DNA, 25 bp, Artificial
  Probe
aacccaaacactgtaataattctca

SEQ ID NO: 14322 - DNA, 25 bp, Artificial
  Probe
catcaccagaagaagtacatataac

SEQ ID NO: 14323 - DNA, 25 bp, Artificial
  Probe
aaatctatcagaacattcaggatgg

SEQ ID NO: 14324 - DNA, 25 bp, Artificial
  Probe
acccaaacactgtaataattctcat

SEQ ID NO: 14325 - DNA, 25 bp, Artificial
  Probe
caacccaaacactgtaataattctc

SEQ ID NO: 14326 - DNA, 25 bp, Artificial
  Probe
agtacatataaccacttaagcagct

SEQ ID NO: 14327 - DNA, 25 bp, Artificial
  Probe
cctcaccaacccaaacactgtaata

SEQ ID NO: 14328 - DNA, 25 bp, Artificial
  Probe
ccagaagaagtacatataaccactt

SEQ ID NO: 14329 - DNA, 25 bp, Artificial
  Probe
atcagaacattcaggatggaagcct

SEQ ID NO: 14330 - DNA, 25 bp, Artificial
  Probe
cccaaacactgtaataattctcata

SEQ ID NO: 14331 - DNA, 25 bp, Artificial
  Probe
gctgttacacggagctactatagag

SEQ ID NO: 14332 - DNA, 25 bp, Artificial
  Probe
ggagagaatgtagaagatgcttttc

SEQ ID NO: 14333 - DNA, 25 bp, Artificial
  Probe
aacactgtaataattctcataggaa

SEQ ID NO: 14334 - DNA, 25 bp, Artificial
  Probe
aagtacatataaccacttaagcagc

SEQ ID NO: 14335 - DNA, 25 bp, Artificial
  Probe
ttacacggagctactatagaggagc

SEQ ID NO: 14336 - DNA, 25 bp, Artificial
  Probe
attctcataggaaataaagcagatt

SEQ ID NO: 14337 - DNA, 25 bp, Artificial
  Probe
aattctcataggaaataaagcagat

SEQ ID NO: 14338 - DNA, 25 bp, Artificial
  Probe
ttctcataggaaataaagcagattt

SEQ ID NO: 14339 - DNA, 25 bp, Artificial
  Probe
cctcattttgacctttcacctcttg

SEQ ID NO: 14340 - DNA, 25 bp, Artificial
  Probe
agaaaatctatcagaacattcagga

SEQ ID NO: 14341 - DNA, 25 bp, Artificial
  Probe
attgttgatgtgaagatggtgtcag

SEQ ID NO: 14342 - DNA, 25 bp, Artificial
  Probe
tcattgttgatgtgaagatggtgtc

SEQ ID NO: 14343 - DNA, 25 bp, Artificial
  Probe
atggtcattgttgatgtgaagatgg

SEQ ID NO: 14344 - DNA, 25 bp, Artificial
  Probe
cattgttgatgtgaagatggtgtca

SEQ ID NO: 14345 - DNA, 25 bp, Artificial
  Probe
gtcattgttgatgtgaagatggtgt

SEQ ID NO: 14346 - DNA, 25 bp, Artificial
  Probe
catggtcattgttgatgtgaagatg

SEQ ID NO: 14347 - DNA, 25 bp, Artificial
  Probe
caagaccagtctaacattcagagga

SEQ ID NO: 14348 - DNA, 25 bp, Artificial
  Probe
tccaagaccagtctaacattcagag

SEQ ID NO: 14349 - DNA, 25 bp, Artificial
  Probe
ctccaagaccagtctaacattcaga

SEQ ID NO: 14350 - DNA, 25 bp, Artificial
  Probe
ggtcattgttgatgtgaagatggtg

SEQ ID NO: 14351 - DNA, 25 bp, Artificial
  Probe
tggtcattgttgatgtgaagatggt

SEQ ID NO: 14352 - DNA, 25 bp, Artificial
  Probe
gataaggcagaacatcacagaaagt

SEQ ID NO: 14353 - DNA, 25 bp, Artificial
  Probe
caaccacgttctaatctacattgaa

SEQ ID NO: 14354 - DNA, 25 bp, Artificial
  Probe
ataaggcagaacatcacagaaagtt

SEQ ID NO: 14355 - DNA, 25 bp, Artificial
  Probe
ccaaccacgttctaatctacattga

SEQ ID NO: 14356 - DNA, 25 bp, Artificial
  Probe
caccaaccacgttctaatctacatt

SEQ ID NO: 14357 - DNA, 25 bp, Artificial
  Probe
aagaccagtctaacattcagaggac

SEQ ID NO: 14358 - DNA, 25 bp, Artificial
  Probe
accaaccacgttctaatctacattg

SEQ ID NO: 14359 - DNA, 25 bp, Artificial
  Probe
ccaagaccagtctaacattcagagg

SEQ ID NO: 14360 - DNA, 25 bp, Artificial
  Probe
acaccaaccacgttctaatctacat

SEQ ID NO: 14361 - DNA, 25 bp, Artificial
  Probe
ttgttgatgtgaagatggtgtcagg

SEQ ID NO: 14362 - DNA, 25 bp, Artificial
  Probe
aattcgccattgaagaatacagtgc

SEQ ID NO: 14363 - DNA, 25 bp, Artificial
  Probe
aacaccaaccacgttctaatctaca

SEQ ID NO: 14364 - DNA, 25 bp, Artificial
  Probe
aagctccaagaccagtctaacattc

SEQ ID NO: 14365 - DNA, 25 bp, Artificial
  Probe
aagttccagatccacatcaacgtaa

SEQ ID NO: 14366 - DNA, 25 bp, Artificial
  Probe
ttaaactttgataaggcagaacatc

SEQ ID NO: 14367 - DNA, 25 bp, Artificial
  Probe
acatggtcattgttgatgtgaagat

SEQ ID NO: 14368 - DNA, 25 bp, Artificial
  Probe
atcacagaaagttccagatccacat

SEQ ID NO: 14369 - DNA, 25 bp, Artificial
  Probe
gctccaagaccagtctaacattcag

SEQ ID NO: 14370 - DNA, 25 bp, Artificial
  Probe
cagatccacatcaacgtaagctaca

SEQ ID NO: 14371 - DNA, 25 bp, Artificial
  Probe
cagaaagttccagatccacatcaac

SEQ ID NO: 14372 - DNA, 25 bp, Artificial
  Probe
agttccagatccacatcaacgtaag

SEQ ID NO: 14373 - DNA, 25 bp, Artificial
  Probe
acagaaagttccagatccacatcaa

SEQ ID NO: 14374 - DNA, 25 bp, Artificial
  Probe
aacatcacagaaagttccagatcca

SEQ ID NO: 14375 - DNA, 25 bp, Artificial
  Probe
aacatggtcattgttgatgtgaaga

SEQ ID NO: 14376 - DNA, 25 bp, Artificial
  Probe
tcacagaaagttccagatccacatc

SEQ ID NO: 14377 - DNA, 25 bp, Artificial
  Probe
cttaaactttgataaggcagaacat

SEQ ID NO: 14378 - DNA, 25 bp, Artificial
  Probe
gaattcgccattgaagaatacagtg

SEQ ID NO: 14379 - DNA, 25 bp, Artificial
  Probe
cacagaaagttccagatccacatca

SEQ ID NO: 14380 - DNA, 25 bp, Artificial
  Probe
catcacagaaagttccagatccaca

SEQ ID NO: 14381 - DNA, 25 bp, Artificial
  Probe
acatcacagaaagttccagatccac

SEQ ID NO: 14382 - DNA, 25 bp, Artificial
  Probe
ccagatccacatcaacgtaagctac

SEQ ID NO: 14383 - DNA, 25 bp, Artificial
  Probe
tgaattcgccattgaagaatacagt

SEQ ID NO: 14384 - DNA, 25 bp, Artificial
  Probe
aaccacgttctaatctacattgaaa

SEQ ID NO: 14385 - DNA, 25 bp, Artificial
  Probe
agctccaagaccagtctaacattca

SEQ ID NO: 14386 - DNA, 25 bp, Artificial
  Probe
ctctgatactgatagcatgatgact

SEQ ID NO: 14387 - DNA, 25 bp, Artificial
  Probe
tgatactgatagcatgatgacttga

SEQ ID NO: 14388 - DNA, 25 bp, Artificial
  Probe
ctgatactgatagcatgatgacttg

SEQ ID NO: 14389 - DNA, 25 bp, Artificial
  Probe
tctgatactgatagcatgatgactt

SEQ ID NO: 14390 - DNA, 25 bp, Artificial
  Probe
actgatagcatgatgacttgatagt

SEQ ID NO: 14391 - DNA, 25 bp, Artificial
  Probe
gatactgatagcatgatgacttgat

SEQ ID NO: 14392 - DNA, 25 bp, Artificial
  Probe
ctgatagcatgatgacttgatagtt

SEQ ID NO: 14393 - DNA, 25 bp, Artificial
  Probe
gctctgatactgatagcatgatgac

SEQ ID NO: 14394 - DNA, 25 bp, Artificial
  Probe
tactgatagcatgatgacttgatag

SEQ ID NO: 14395 - DNA, 25 bp, Artificial
  Probe
ccacctcatgctctgatactgatag

SEQ ID NO: 14396 - DNA, 25 bp, Artificial
  Probe
attaatgccacctcatgctctgata

SEQ ID NO: 14397 - DNA, 25 bp, Artificial
  Probe
tattaatgccacctcatgctctgat

SEQ ID NO: 14398 - DNA, 25 bp, Artificial
  Probe
ttattaatgccacctcatgctctga

SEQ ID NO: 14399 - DNA, 25 bp, Artificial
  Probe
atactgatagcatgatgacttgata

SEQ ID NO: 14400 - DNA, 25 bp, Artificial
  Probe
ttaatgccacctcatgctctgatac

SEQ ID NO: 14401 - DNA, 25 bp, Artificial
  Probe
tttattaatgccacctcatgctctg

SEQ ID NO: 14402 - DNA, 25 bp, Artificial
  Probe
caatgacatcaccaacgaccgatac

SEQ ID NO: 14403 - DNA, 25 bp, Artificial
  Probe
taatgccacctcatgctctgatact

SEQ ID NO: 14404 - DNA, 25 bp, Artificial
  Probe
tgatagcatgatgacttgatagttt

SEQ ID NO: 14405 - DNA, 25 bp, Artificial
  Probe
caattaagtttgagggtggcaacag

SEQ ID NO: 14406 - DNA, 25 bp, Artificial
  Probe
aattaagtttgagggtggcaacaga

SEQ ID NO: 14407 - DNA, 25 bp, Artificial
  Probe
agcatgatgacttgatagtttagat

SEQ ID NO: 14408 - DNA, 25 bp, Artificial
  Probe
cacctcatgctctgatactgatagc

SEQ ID NO: 14409 - DNA, 25 bp, Artificial
  Probe
gcatgatgacttgatagtttagatc

SEQ ID NO: 14410 - DNA, 25 bp, Artificial
  Probe
gccacctcatgctctgatactgata

SEQ ID NO: 14411 - DNA, 25 bp, Artificial
  Probe
atgacatcaccaacgaccgatacaa

SEQ ID NO: 14412 - DNA, 25 bp, Artificial
  Probe
aatgacatcaccaacgaccgataca

SEQ ID NO: 14413 - DNA, 25 bp, Artificial
  Probe
attaagtttgagggtggcaacagag

SEQ ID NO: 14414 - DNA, 25 bp, Artificial
  Probe
tagcatgatgacttgatagtttaga

SEQ ID NO: 14415 - DNA, 25 bp, Artificial
  Probe
caagatggatgctactgccaatgac

SEQ ID NO: 14416 - DNA, 25 bp, Artificial
  Probe
tggagcatttgagcaagtttatcga

SEQ ID NO: 14417 - DNA, 25 bp, Artificial
  Probe
atgctactgccaatgacatcaccaa

SEQ ID NO: 14418 - DNA, 25 bp, Artificial
  Probe
agatggatgctactgccaatgacat

SEQ ID NO: 14419 - DNA, 25 bp, Artificial
  Probe
tgacatcaccaacgaccgatacaag

SEQ ID NO: 14420 - DNA, 25 bp, Artificial
  Probe
ccaatgacatcaccaacgaccgata

SEQ ID NO: 14421 - DNA, 25 bp, Artificial
  Probe
taagtttgagggtggcaacagagat

SEQ ID NO: 14422 - DNA, 25 bp, Artificial
  Probe
attttattaatgccacctcatgctc

SEQ ID NO: 14423 - DNA, 25 bp, Artificial
  Probe
aagatggatgctactgccaatgaca

SEQ ID NO: 14424 - DNA, 25 bp, Artificial
  Probe
gatagcatgatgacttgatagttta

SEQ ID NO: 14425 - DNA, 25 bp, Artificial
  Probe
ttttattaatgccacctcatgctct

SEQ ID NO: 14426 - DNA, 25 bp, Artificial
  Probe
atagcatgatgacttgatagtttag

SEQ ID NO: 14427 - DNA, 25 bp, Artificial
  Probe
ctactgccaatgacatcaccaacga

SEQ ID NO: 14428 - DNA, 25 bp, Artificial
  Probe
ttgagcaagtttatcgatgaacatg

SEQ ID NO: 14429 - DNA, 25 bp, Artificial
  Probe
ttaagtttgagggtggcaacagaga

SEQ ID NO: 14430 - DNA, 25 bp, Artificial
  Probe
tattttattaatgccacctcatgct

SEQ ID NO: 14431 - DNA, 25 bp, Artificial
  Probe
ccttctgttccaaacttatgttccc

SEQ ID NO: 14432 - DNA, 25 bp, Artificial
  Probe
gccttctgttccaaacttatgttcc

SEQ ID NO: 14433 - DNA, 25 bp, Artificial
  Probe
gaaaagacagaagaacaaggcattt

SEQ ID NO: 14434 - DNA, 25 bp, Artificial
  Probe
ctccaacctgtttcatcagcatttg

SEQ ID NO: 14435 - DNA, 25 bp, Artificial
  Probe
ccaacctgtttcatcagcatttgac

SEQ ID NO: 14436 - DNA, 25 bp, Artificial
  Probe
tccaacctgtttcatcagcatttga

SEQ ID NO: 14437 - DNA, 25 bp, Artificial
  Probe
actccaacctgtttcatcagcattt

SEQ ID NO: 14438 - DNA, 25 bp, Artificial
  Probe
ggaaaagacagaagaacaaggcatt

SEQ ID NO: 14439 - DNA, 25 bp, Artificial
  Probe
caacctgtttcatcagcatttgacg

SEQ ID NO: 14440 - DNA, 25 bp, Artificial
  Probe
gactccaacctgtttcatcagcatt

SEQ ID NO: 14441 - DNA, 25 bp, Artificial
  Probe
aaaagacagaagaacaaggcatttt

SEQ ID NO: 14442 - DNA, 25 bp, Artificial
  Probe
tggaaaagacagaagaacaaggcat

SEQ ID NO: 14443 - DNA, 25 bp, Artificial
  Probe
ggccttctgttccaaacttatgttc

SEQ ID NO: 14444 - DNA, 25 bp, Artificial
  Probe
ctgtttcatcagcatttgacgttgg

SEQ ID NO: 14445 - DNA, 25 bp, Artificial
  Probe
cctgtttcatcagcatttgacgttg

SEQ ID NO: 14446 - DNA, 25 bp, Artificial
  Probe
acctgtttcatcagcatttgacgtt

SEQ ID NO: 14447 - DNA, 25 bp, Artificial
  Probe
aacctgtttcatcagcatttgacgt

SEQ ID NO: 14448 - DNA, 25 bp, Artificial
  Probe
gtggaaaagacagaagaacaaggca

SEQ ID NO: 14449 - DNA, 25 bp, Artificial
  Probe
tgtggaaaagacagaagaacaaggc

SEQ ID NO: 14450 - DNA, 25 bp, Artificial
  Probe
attcttggtcttggggttcacagtt

SEQ ID NO: 14451 - DNA, 25 bp, Artificial
  Probe
ggactccaacctgtttcatcagcat

SEQ ID NO: 14452 - DNA, 25 bp, Artificial
  Probe
tttcatcagcatttgacgttggcac

SEQ ID NO: 14453 - DNA, 25 bp, Artificial
  Probe
gtttcatcagcatttgacgttggca

SEQ ID NO: 14454 - DNA, 25 bp, Artificial
  Probe
tgtttcatcagcatttgacgttggc

SEQ ID NO: 14455 - DNA, 25 bp, Artificial
  Probe
cattcttggtcttggggttcacagt

SEQ ID NO: 14456 - DNA, 25 bp, Artificial
  Probe
ttcttggtcttggggttcacagttg

SEQ ID NO: 14457 - DNA, 25 bp, Artificial
  Probe
ctgtggaaaagacagaagaacaagg

SEQ ID NO: 14458 - DNA, 25 bp, Artificial
  Probe
cctgtggaaaagacagaagaacaag

SEQ ID NO: 14459 - DNA, 25 bp, Artificial
  Probe
gaagcctgtggaaaagacagaagaa

SEQ ID NO: 14460 - DNA, 25 bp, Artificial
  Probe
aagcctgtggaaaagacagaagaac

SEQ ID NO: 14461 - DNA, 25 bp, Artificial
  Probe
gcctgtggaaaagacagaagaacaa

SEQ ID NO: 14462 - DNA, 25 bp, Artificial
  Probe
catttgacgttggcactgtcatcag

SEQ ID NO: 14463 - DNA, 25 bp, Artificial
  Probe
agcctgtggaaaagacagaagaaca

SEQ ID NO: 14464 - DNA, 25 bp, Artificial
  Probe
tatagagatacctcaaggaagagcc

SEQ ID NO: 14465 - DNA, 25 bp, Artificial
  Probe
atatgtgctcctggcttatcttacc

SEQ ID NO: 14466 - DNA, 25 bp, Artificial
  Probe
ttatagagatacctcaaggaagagc

SEQ ID NO: 14467 - DNA, 25 bp, Artificial
  Probe
agcatgttcagttatagagatacct

SEQ ID NO: 14468 - DNA, 25 bp, Artificial
  Probe
agtcagcaataaccatgtcttgatt

SEQ ID NO: 14469 - DNA, 25 bp, Artificial
  Probe
aagtcagcaataaccatgtcttgat

SEQ ID NO: 14470 - DNA, 25 bp, Artificial
  Probe
cagaagtcagcaataaccatgtctt

SEQ ID NO: 14471 - DNA, 25 bp, Artificial
  Probe
agaagtcagcaataaccatgtcttg

SEQ ID NO: 14472 - DNA, 25 bp, Artificial
  Probe
aagcatgttcagttatagagatacc

SEQ ID NO: 14473 - DNA, 25 bp, Artificial
  Probe
gaagtcagcaataaccatgtcttga

SEQ ID NO: 14474 - DNA, 25 bp, Artificial
  Probe
atagagatacctcaaggaagagcca

SEQ ID NO: 14475 - DNA, 25 bp, Artificial
  Probe
gttcagttatagagatacctcaagg

SEQ ID NO: 14476 - DNA, 25 bp, Artificial
  Probe
gcatgttcagttatagagatacctc

SEQ ID NO: 14477 - DNA, 25 bp, Artificial
  Probe
tcagttatagagatacctcaaggaa

SEQ ID NO: 14478 - DNA, 25 bp, Artificial
  Probe
ttcagttatagagatacctcaagga

SEQ ID NO: 14479 - DNA, 25 bp, Artificial
  Probe
tattggtttcagtgggatttatgga

SEQ ID NO: 14480 - DNA, 25 bp, Artificial
  Probe
gtattggtttcagtgggatttatgg

SEQ ID NO: 14481 - DNA, 25 bp, Artificial
  Probe
ggtattggtttcagtgggatttatg

SEQ ID NO: 14482 - DNA, 25 bp, Artificial
  Probe
aggtattggtttcagtgggatttat

SEQ ID NO: 14483 - DNA, 25 bp, Artificial
  Probe
aaggtattggtttcagtgggattta

SEQ ID NO: 14484 - DNA, 25 bp, Artificial
  Probe
attggtttcagtgggatttatggat

SEQ ID NO: 14485 - DNA, 25 bp, Artificial
  Probe
ctacctccagacatccttgaaatac

SEQ ID NO: 14486 - DNA, 25 bp, Artificial
  Probe
tagagatacctcaaggaagagccaa

SEQ ID NO: 14487 - DNA, 25 bp, Artificial
  Probe
aacagaagtcagcaataaccatgtc

SEQ ID NO: 14488 - DNA, 25 bp, Artificial
  Probe
gaacagaagtcagcaataaccatgt

SEQ ID NO: 14489 - DNA, 25 bp, Artificial
  Probe
agttatagagatacctcaaggaaga

SEQ ID NO: 14490 - DNA, 25 bp, Artificial
  Probe
cagttatagagatacctcaaggaag

SEQ ID NO: 14491 - DNA, 25 bp, Artificial
  Probe
aaaggtattggtttcagtgggattt

SEQ ID NO: 14492 - DNA, 25 bp, Artificial
  Probe
tacctccagacatccttgaaataca

SEQ ID NO: 14493 - DNA, 25 bp, Artificial
  Probe
ctccagacatccttgaaatacagtg

SEQ ID NO: 14494 - DNA, 25 bp, Artificial
  Probe
cgaacagaagtcagcaataaccatg

SEQ ID NO: 14495 - DNA, 25 bp, Artificial
  Probe
ttggtttcagtgggatttatggatg

SEQ ID NO: 14496 - DNA, 25 bp, Artificial
  Probe
tctacctccagacatccttgaaata

SEQ ID NO: 14497 - DNA, 25 bp, Artificial
  Probe
gttatagagatacctcaaggaagag

SEQ ID NO: 14498 - DNA, 25 bp, Artificial
  Probe
tgttcagttatagagatacctcaag

SEQ ID NO: 14499 - DNA, 25 bp, Artificial
  Probe
tatgagccaataaagactgacttga

SEQ ID NO: 14500 - DNA, 25 bp, Artificial
  Probe
agagtgaatgcttatgagccaataa

SEQ ID NO: 14501 - DNA, 25 bp, Artificial
  Probe
aagagtgaatgcttatgagccaata

SEQ ID NO: 14502 - DNA, 25 bp, Artificial
  Probe
ttatgagccaataaagactgacttg

SEQ ID NO: 14503 - DNA, 25 bp, Artificial
  Probe
atgagccaataaagactgacttgac

SEQ ID NO: 14504 - DNA, 25 bp, Artificial
  Probe
cttatgagccaataaagactgactt

SEQ ID NO: 14505 - DNA, 25 bp, Artificial
  Probe
ccgaacagaagtcagcaataaccat

SEQ ID NO: 14506 - DNA, 25 bp, Artificial
  Probe
catccttgaaatacagtgttctccc

SEQ ID NO: 14507 - DNA, 25 bp, Artificial
  Probe
acagaagtcagcaataaccatgtct

SEQ ID NO: 14508 - DNA, 25 bp, Artificial
  Probe
agacatccttgaaatacagtgttct

SEQ ID NO: 14509 - DNA, 25 bp, Artificial
  Probe
ctgtattctctgttcctgatgctat

SEQ ID NO: 14510 - DNA, 25 bp, Artificial
  Probe
caacaaggctattctctgctacata

SEQ ID NO: 14511 - DNA, 25 bp, Artificial
  Probe
atggtagtctgtattctctgttcct

SEQ ID NO: 14512 - DNA, 25 bp, Artificial
  Probe
aacaaggctattctctgctacatat

SEQ ID NO: 14513 - DNA, 25 bp, Artificial
  Probe
tgtattctctgttcctgatgctatc

SEQ ID NO: 14514 - DNA, 25 bp, Artificial
  Probe
tctgtattctctgttcctgatgcta

SEQ ID NO: 14515 - DNA, 25 bp, Artificial
  Probe
tagtctgtattctctgttcctgatg

SEQ ID NO: 14516 - DNA, 25 bp, Artificial
  Probe
gtagtctgtattctctgttcctgat

SEQ ID NO: 14517 - DNA, 25 bp, Artificial
  Probe
gtattctctgttcctgatgctatcc

SEQ ID NO: 14518 - DNA, 25 bp, Artificial
  Probe
tattctctgttcctgatgctatcca

SEQ ID NO: 14519 - DNA, 25 bp, Artificial
  Probe
ggtagtctgtattctctgttcctga

SEQ ID NO: 14520 - DNA, 25 bp, Artificial
  Probe
tggtagtctgtattctctgttcctg

SEQ ID NO: 14521 - DNA, 25 bp, Artificial
  Probe
gcaggctaatgtgaactagatagaa

SEQ ID NO: 14522 - DNA, 25 bp, Artificial
  Probe
atgttggtatatggctatgatctcg

SEQ ID NO: 14523 - DNA, 25 bp, Artificial
  Probe
tgttcctgatgctatccacattatt

SEQ ID NO: 14524 - DNA, 25 bp, Artificial
  Probe
gctaatgtgaactagatagaagacc

SEQ ID NO: 14525 - DNA, 25 bp, Artificial
  Probe
ggctaatgtgaactagatagaagac

SEQ ID NO: 14526 - DNA, 25 bp, Artificial
  Probe
caggctaatgtgaactagatagaag

SEQ ID NO: 14527 - DNA, 25 bp, Artificial
  Probe
catggtagtctgtattctctgttcc

SEQ ID NO: 14528 - DNA, 25 bp, Artificial
  Probe
ctgttcctgatgctatccacattat

SEQ ID NO: 14529 - DNA, 25 bp, Artificial
  Probe
aggctaatgtgaactagatagaaga

SEQ ID NO: 14530 - DNA, 25 bp, Artificial
  Probe
gattgctaaggtgtccatgagttaa

SEQ ID NO: 14531 - DNA, 25 bp, Artificial
  Probe
atctgtcagtcatctccagtatcta

SEQ ID NO: 14532 - DNA, 25 bp, Artificial
  Probe
gcatggtagtctgtattctctgttc

SEQ ID NO: 14533 - DNA, 25 bp, Artificial
  Probe
gcatgttggtatatggctatgatct

SEQ ID NO: 14534 - DNA, 25 bp, Artificial
  Probe
gtctgtattctctgttcctgatgct

SEQ ID NO: 14535 - DNA, 25 bp, Artificial
  Probe
agtctgtattctctgttcctgatgc

SEQ ID NO: 14536 - DNA, 25 bp, Artificial
  Probe
ggcaggctaatgtgaactagataga

SEQ ID NO: 14537 - DNA, 25 bp, Artificial
  Probe
aatctgtcagtcatctccagtatct

SEQ ID NO: 14538 - DNA, 25 bp, Artificial
  Probe
attctctgttcctgatgctatccac

SEQ ID NO: 14539 - DNA, 25 bp, Artificial
  Probe
cagtcatctccagtatctagcagtc

SEQ ID NO: 14540 - DNA, 25 bp, Artificial
  Probe
gtcagtcatctccagtatctagcag

SEQ ID NO: 14541 - DNA, 25 bp, Artificial
  Probe
cagaactacagattgctaaggtgtc

SEQ ID NO: 14542 - DNA, 25 bp, Artificial
  Probe
tctgtcagtcatctccagtatctag

SEQ ID NO: 14543 - DNA, 25 bp, Artificial
  Probe
tctgttcctgatgctatccacatta

SEQ ID NO: 14544 - DNA, 25 bp, Artificial
  Probe
catgttggtatatggctatgatctc

SEQ ID NO: 14545 - DNA, 25 bp, Artificial
  Probe
agattgctaaggtgtccatgagtta

SEQ ID NO: 14546 - DNA, 25 bp, Artificial
  Probe
gtcatctccagtatctagcagtcac

SEQ ID NO: 14547 - DNA, 25 bp, Artificial
  Probe
agtcatctccagtatctagcagtca

SEQ ID NO: 14548 - DNA, 25 bp, Artificial
  Probe
tcagtcatctccagtatctagcagt

SEQ ID NO: 14549 - DNA, 25 bp, Artificial
  Probe
tgttggtatatggctatgatctcgg

SEQ ID NO: 14550 - DNA, 25 bp, Artificial
  Probe
ggcatgttggtatatggctatgatc

SEQ ID NO: 14551 - DNA, 25 bp, Artificial
  Probe
aactacagattgctaaggtgtccat

SEQ ID NO: 14552 - DNA, 25 bp, Artificial
  Probe
ccaacaaggctattctctgctacat

SEQ ID NO: 14553 - DNA, 25 bp, Artificial
  Probe
tgtcagtcatctccagtatctagca

SEQ ID NO: 14554 - DNA, 25 bp, Artificial
  Probe
caagaagtcggtggataagaacagc

SEQ ID NO: 14555 - DNA, 25 bp, Artificial
  Probe
gtggataagaacagcaacgagtacc

SEQ ID NO: 14556 - DNA, 25 bp, Artificial
  Probe
ggtggataagaacagcaacgagtac

SEQ ID NO: 14557 - DNA, 25 bp, Artificial
  Probe
gaagtcggtggataagaacagcaac

SEQ ID NO: 14558 - DNA, 25 bp, Artificial
  Probe
agaagtcggtggataagaacagcaa

SEQ ID NO: 14559 - DNA, 25 bp, Artificial
  Probe
aagaagtcggtggataagaacagca

SEQ ID NO: 14560 - DNA, 25 bp, Artificial
  Probe
ccaagaagtcggtggataagaacag

SEQ ID NO: 14561 - DNA, 25 bp, Artificial
  Probe
cggtggataagaacagcaacgagta

SEQ ID NO: 14562 - DNA, 25 bp, Artificial
  Probe
gttggagttgaccagtgacaatgac

SEQ ID NO: 14563 - DNA, 25 bp, Artificial
  Probe
tggataagaacagcaacgagtaccg

SEQ ID NO: 14564 - DNA, 25 bp, Artificial
  Probe
tgttggagttgaccagtgacaatga

SEQ ID NO: 14565 - DNA, 25 bp, Artificial
  Probe
gtgttggagttgaccagtgacaatg

SEQ ID NO: 14566 - DNA, 25 bp, Artificial
  Probe
caagagccgagataaagccaaacag

SEQ ID NO: 14567 - DNA, 25 bp, Artificial
  Probe
gccaagaagtcggtggataagaaca

SEQ ID NO: 14568 - DNA, 25 bp, Artificial
  Probe
ttggagttgaccagtgacaatgacc

SEQ ID NO: 14569 - DNA, 25 bp, Artificial
  Probe
aagagtagacctgctgaagatatat

SEQ ID NO: 14570 - DNA, 25 bp, Artificial
  Probe
tctttctcttcctcacaaacatcat

SEQ ID NO: 14571 - DNA, 25 bp, Artificial
  Probe
aactctttctcttcctcacaaacat

SEQ ID NO: 14572 - DNA, 25 bp, Artificial
  Probe
aagggacagtttaagaagagtgatg

SEQ ID NO: 14573 - DNA, 25 bp, Artificial
  Probe
caagggacagtttaagaagagtgat

SEQ ID NO: 14574 - DNA, 25 bp, Artificial
  Probe
atgacaagggacagtttaagaagag

SEQ ID NO: 14575 - DNA, 25 bp, Artificial
  Probe
gatgacaagggacagtttaagaaga

SEQ ID NO: 14576 - DNA, 25 bp, Artificial
  Probe
agatgacaagggacagtttaagaag

SEQ ID NO: 14577 - DNA, 25 bp, Artificial
  Probe
ctctttctcttcctcacaaacatca

SEQ ID NO: 14578 - DNA, 25 bp, Artificial
  Probe
actctttctcttcctcacaaacatc

SEQ ID NO: 14579 - DNA, 25 bp, Artificial
  Probe
agagtagacctgctgaagatatata

SEQ ID NO: 14580 - DNA, 25 bp, Artificial
  Probe
tatttcaaaggtagagccagagaag

SEQ ID NO: 14581 - DNA, 25 bp, Artificial
  Probe
tagatgacaagggacagtttaagaa

SEQ ID NO: 14582 - DNA, 25 bp, Artificial
  Probe
caatcccaccaaactacactatgag

SEQ ID NO: 14583 - DNA, 25 bp, Artificial
  Probe
cagtttaagaagagtgatgcctttg

SEQ ID NO: 14584 - DNA, 25 bp, Artificial
  Probe
atatttcaaaggtagagccagagaa

SEQ ID NO: 14585 - DNA, 25 bp, Artificial
  Probe
gtttaagaagagtgatgcctttgtg

SEQ ID NO: 14586 - DNA, 25 bp, Artificial
  Probe
agtttaagaagagtgatgcctttgt

SEQ ID NO: 14587 - DNA, 25 bp, Artificial
  Probe
acagtttaagaagagtgatgccttt

SEQ ID NO: 14588 - DNA, 25 bp, Artificial
  Probe
gaactctttctcttcctcacaaaca

SEQ ID NO: 14589 - DNA, 25 bp, Artificial
  Probe
ctagatgacaagggacagtttaaga

SEQ ID NO: 14590 - DNA, 25 bp, Artificial
  Probe
tatatttcaaaggtagagccagaga

SEQ ID NO: 14591 - DNA, 25 bp, Artificial
  Probe
gacaagggacagtttaagaagagtg

SEQ ID NO: 14592 - DNA, 25 bp, Artificial
  Probe
gacagtttaagaagagtgatgcctt

SEQ ID NO: 14593 - DNA, 25 bp, Artificial
  Probe
aaagagtagacctgctgaagatata

SEQ ID NO: 14594 - DNA, 25 bp, Artificial
  Probe
acaatcccaccaaactacactatga

SEQ ID NO: 14595 - DNA, 25 bp, Artificial
  Probe
cacaatcccaccaaactacactatg

SEQ ID NO: 14596 - DNA, 25 bp, Artificial
  Probe
acaagggacagtttaagaagagtga

SEQ ID NO: 14597 - DNA, 25 bp, Artificial
  Probe
tgacaagggacagtttaagaagagt

SEQ ID NO: 14598 - DNA, 25 bp, Artificial
  Probe
tgaaacttagaaagggtcggatgta

SEQ ID NO: 14599 - DNA, 25 bp, Artificial
  Probe
gggaaatatctactatgctgtgaat

SEQ ID NO: 14600 - DNA, 25 bp, Artificial
  Probe
ctttctcttcctcacaaacatcatg

SEQ ID NO: 14601 - DNA, 25 bp, Artificial
  Probe
gtactgaagtatttcctatgctggg

SEQ ID NO: 14602 - DNA, 25 bp, Artificial
  Probe
ggtactgaagtatttcctatgctgg

SEQ ID NO: 14603 - DNA, 25 bp, Artificial
  Probe
gggtactgaagtatttcctatgctg

SEQ ID NO: 14604 - DNA, 25 bp, Artificial
  Probe
gttgaaacttagaaagggtcggatg

SEQ ID NO: 14605 - DNA, 25 bp, Artificial
  Probe
aatcccaccaaactacactatgagt

SEQ ID NO: 14606 - DNA, 25 bp, Artificial
  Probe
gaaacttagaaagggtcggatgtac

SEQ ID NO: 14607 - DNA, 25 bp, Artificial
  Probe
ctctgtactgaaagaccctaagttc

SEQ ID NO: 14608 - DNA, 25 bp, Artificial
  Probe
tctgtactgaaagaccctaagttct

SEQ ID NO: 14609 - DNA, 25 bp, Artificial
  Probe
attgcgtgagagtaaagggaagaat

SEQ ID NO: 14610 - DNA, 25 bp, Artificial
  Probe
tttaagaagagtgatgcctttgtgc

SEQ ID NO: 14611 - DNA, 25 bp, Artificial
  Probe
aaacttagaaagggtcggatgtact

SEQ ID NO: 14612 - DNA, 25 bp, Artificial
  Probe
ttgaaacttagaaagggtcggatgt

SEQ ID NO: 14613 - DNA, 25 bp, Artificial
  Probe
atttcaaaggtagagccagagaagg

SEQ ID NO: 14614 - DNA, 25 bp, Artificial
  Probe
taatgcctactgtgtgacctgtaat

SEQ ID NO: 14615 - DNA, 25 bp, Artificial
  Probe
ataatgcctactgtgtgacctgtaa

SEQ ID NO: 14616 - DNA, 25 bp, Artificial
  Probe
aataatgcctactgtgtgacctgta

SEQ ID NO: 14617 - DNA, 25 bp, Artificial
  Probe
ctactgtgtgacctgtaatcggatt

SEQ ID NO: 14618 - DNA, 25 bp, Artificial
  Probe
agaccaataatgcctactgtgtgac

SEQ ID NO: 14619 - DNA, 25 bp, Artificial
  Probe
aatgcctactgtgtgacctgtaatc

SEQ ID NO: 14620 - DNA, 25 bp, Artificial
  Probe
atcagaccaataatgcctactgtgt

SEQ ID NO: 14621 - DNA, 25 bp, Artificial
  Probe
gatcagaccaataatgcctactgtg

SEQ ID NO: 14622 - DNA, 25 bp, Artificial
  Probe
caataatgcctactgtgtgacctgt

SEQ ID NO: 14623 - DNA, 25 bp, Artificial
  Probe
ggaaagtgtatcaaagcaaagtctt

SEQ ID NO: 14624 - DNA, 25 bp, Artificial
  Probe
aagtgtatcaaagcaaagtcttgtg

SEQ ID NO: 14625 - DNA, 25 bp, Artificial
  Probe
aaagtgtatcaaagcaaagtcttgt

SEQ ID NO: 14626 - DNA, 25 bp, Artificial
  Probe
gggaaagtgtatcaaagcaaagtct

SEQ ID NO: 14627 - DNA, 25 bp, Artificial
  Probe
agggaaagtgtatcaaagcaaagtc

SEQ ID NO: 14628 - DNA, 25 bp, Artificial
  Probe
gagggaaagtgtatcaaagcaaagt

SEQ ID NO: 14629 - DNA, 25 bp, Artificial
  Probe
tgtatcaaagcaaagtcttgtgaag

SEQ ID NO: 14630 - DNA, 25 bp, Artificial
  Probe
gtgtatcaaagcaaagtcttgtgaa

SEQ ID NO: 14631 - DNA, 25 bp, Artificial
  Probe
tatgagggaaagtgtatcaaagcaa

SEQ ID NO: 14632 - DNA, 25 bp, Artificial
  Probe
gaaagtgtatcaaagcaaagtcttg

SEQ ID NO: 14633 - DNA, 25 bp, Artificial
  Probe
ggatcagaccaataatgcctactgt

SEQ ID NO: 14634 - DNA, 25 bp, Artificial
  Probe
ctatgagggaaagtgtatcaaagca

SEQ ID NO: 14635 - DNA, 25 bp, Artificial
  Probe
cagaccaataatgcctactgtgtga

SEQ ID NO: 14636 - DNA, 25 bp, Artificial
  Probe
tcagaccaataatgcctactgtgtg

SEQ ID NO: 14637 - DNA, 25 bp, Artificial
  Probe
agtgtatcaaagcaaagtcttgtga

SEQ ID NO: 14638 - DNA, 25 bp, Artificial
  Probe
atgagggaaagtgtatcaaagcaaa

SEQ ID NO: 14639 - DNA, 25 bp, Artificial
  Probe
ccaataatgcctactgtgtgacctg

SEQ ID NO: 14640 - DNA, 25 bp, Artificial
  Probe
gaccaataatgcctactgtgtgacc

SEQ ID NO: 14641 - DNA, 25 bp, Artificial
  Probe
tgagggaaagtgtatcaaagcaaag

SEQ ID NO: 14642 - DNA, 25 bp, Artificial
  Probe
tactgtgtgacctgtaatcggattt

SEQ ID NO: 14643 - DNA, 25 bp, Artificial
  Probe
tggatcagaccaataatgcctactg

SEQ ID NO: 14644 - DNA, 25 bp, Artificial
  Probe
gtggatcagaccaataatgcctact

SEQ ID NO: 14645 - DNA, 25 bp, Artificial
  Probe
attagcctatgagggaaagtgtatc

SEQ ID NO: 14646 - DNA, 25 bp, Artificial
  Probe
gattagcctatgagggaaagtgtat

SEQ ID NO: 14647 - DNA, 25 bp, Artificial
  Probe
cctactgtgtgacctgtaatcggat

SEQ ID NO: 14648 - DNA, 25 bp, Artificial
  Probe
tagcctatgagggaaagtgtatcaa

SEQ ID NO: 14649 - DNA, 25 bp, Artificial
  Probe
ttagcctatgagggaaagtgtatca

SEQ ID NO: 14650 - DNA, 25 bp, Artificial
  Probe
accaataatgcctactgtgtgacct

SEQ ID NO: 14651 - DNA, 25 bp, Artificial
  Probe
cattggattagcctatgagggaaag

SEQ ID NO: 14652 - DNA, 25 bp, Artificial
  Probe
cctatgagggaaagtgtatcaaagc

SEQ ID NO: 14653 - DNA, 25 bp, Artificial
  Probe
gcctatgagggaaagtgtatcaaag

SEQ ID NO: 14654 - DNA, 25 bp, Artificial
  Probe
attggattagcctatgagggaaagt

SEQ ID NO: 14655 - DNA, 25 bp, Artificial
  Probe
ggattagcctatgagggaaagtgta

SEQ ID NO: 14656 - DNA, 25 bp, Artificial
  Probe
agcctatgagggaaagtgtatcaaa

SEQ ID NO: 14657 - DNA, 25 bp, Artificial
  Probe
aaatgcctatgggatttcaaggttg

SEQ ID NO: 14658 - DNA, 25 bp, Artificial
  Probe
ggtggatcagaccaataatgcctac

SEQ ID NO: 14659 - DNA, 25 bp, Artificial
  Probe
ctaatgttacaacctccttctctcc

SEQ ID NO: 14660 - DNA, 25 bp, Artificial
  Probe
gctaatgttacaacctccttctctc

SEQ ID NO: 14661 - DNA, 25 bp, Artificial
  Probe
taatgttacaacctccttctctccg

SEQ ID NO: 14662 - DNA, 25 bp, Artificial
  Probe
ggctaatgttacaacctccttctct

SEQ ID NO: 14663 - DNA, 25 bp, Artificial
  Probe
ttctctccgattgaagattcagtga

SEQ ID NO: 14664 - DNA, 25 bp, Artificial
  Probe
tctccgattgaagattcagtgactt

SEQ ID NO: 14665 - DNA, 25 bp, Artificial
  Probe
ctctccgattgaagattcagtgact

SEQ ID NO: 14666 - DNA, 25 bp, Artificial
  Probe
tctctccgattgaagattcagtgac

SEQ ID NO: 14667 - DNA, 25 bp, Artificial
  Probe
gttacaacctccttctctccgattg

SEQ ID NO: 14668 - DNA, 25 bp, Artificial
  Probe
atgttacaacctccttctctccgat

SEQ ID NO: 14669 - DNA, 25 bp, Artificial
  Probe
tacaacctccttctctccgattgaa

SEQ ID NO: 14670 - DNA, 25 bp, Artificial
  Probe
ttacaacctccttctctccgattga

SEQ ID NO: 14671 - DNA, 25 bp, Artificial
  Probe
tgttacaacctccttctctccgatt

SEQ ID NO: 14672 - DNA, 25 bp, Artificial
  Probe
aatgttacaacctccttctctccga

SEQ ID NO: 14673 - DNA, 25 bp, Artificial
  Probe
ccgattgaagattcagtgactttac

SEQ ID NO: 14674 - DNA, 25 bp, Artificial
  Probe
tccgattgaagattcagtgacttta

SEQ ID NO: 14675 - DNA, 25 bp, Artificial
  Probe
cgattgaagattcagtgactttaca

SEQ ID NO: 14676 - DNA, 25 bp, Artificial
  Probe
gagagagcagtccaagaaattgatg

SEQ ID NO: 14677 - DNA, 25 bp, Artificial
  Probe
ctccgattgaagattcagtgacttt

SEQ ID NO: 14678 - DNA, 25 bp, Artificial
  Probe
tgagagagcagtccaagaaattgat

SEQ ID NO: 14679 - DNA, 25 bp, Artificial
  Probe
cttctctccgattgaagattcagtg

SEQ ID NO: 14680 - DNA, 25 bp, Artificial
  Probe
gggctaatgttacaacctccttctc

SEQ ID NO: 14681 - DNA, 25 bp, Artificial
  Probe
ttgaagattcagtgactttacaaag

SEQ ID NO: 14682 - DNA, 25 bp, Artificial
  Probe
tccttctctccgattgaagattcag

SEQ ID NO: 14683 - DNA, 25 bp, Artificial
  Probe
ctccttctctccgattgaagattca

SEQ ID NO: 14684 - DNA, 25 bp, Artificial
  Probe
gattgaagattcagtgactttacaa

SEQ ID NO: 14685 - DNA, 25 bp, Artificial
  Probe
ctgagagagcagtccaagaaattga

SEQ ID NO: 14686 - DNA, 25 bp, Artificial
  Probe
ccttctctccgattgaagattcagt

SEQ ID NO: 14687 - DNA, 25 bp, Artificial
  Probe
cctccttctctccgattgaagattc

SEQ ID NO: 14688 - DNA, 25 bp, Artificial
  Probe
attgaagattcagtgactttacaaa

SEQ ID NO: 14689 - DNA, 25 bp, Artificial
  Probe
agagagcagtccaagaaattgatgg

SEQ ID NO: 14690 - DNA, 25 bp, Artificial
  Probe
attgtaccctgggtctagttcttac

SEQ ID NO: 14691 - DNA, 25 bp, Artificial
  Probe
cattgtaccctgggtctagttctta

SEQ ID NO: 14692 - DNA, 25 bp, Artificial
  Probe
acctccttctctccgattgaagatt

SEQ ID NO: 14693 - DNA, 25 bp, Artificial
  Probe
aacctccttctctccgattgaagat

SEQ ID NO: 14694 - DNA, 25 bp, Artificial
  Probe
agggctaatgttacaacctccttct

SEQ ID NO: 14695 - DNA, 25 bp, Artificial
  Probe
gagagcagtccaagaaattgatggt

SEQ ID NO: 14696 - DNA, 25 bp, Artificial
  Probe
caacctccttctctccgattgaaga

SEQ ID NO: 14697 - DNA, 25 bp, Artificial
  Probe
ttgtaccctgggtctagttcttaca

SEQ ID NO: 14698 - DNA, 25 bp, Artificial
  Probe
tgtaccctgggtctagttcttacag

SEQ ID NO: 14699 - DNA, 25 bp, Artificial
  Probe
acaacctccttctctccgattgaag

SEQ ID NO: 14700 - DNA, 25 bp, Artificial
  Probe
gctgagagagcagtccaagaaattg

SEQ ID NO: 14701 - DNA, 25 bp, Artificial
  Probe
ccattgtaccctgggtctagttctt

SEQ ID NO: 14702 - DNA, 25 bp, Artificial
  Probe
aaaacatggattctgggtagtgggg

SEQ ID NO: 14703 - DNA, 25 bp, Artificial
  Probe
gagggctaatgttacaacctccttc

SEQ ID NO: 14704 - DNA, 25 bp, Artificial
  Probe
aatggagaagttagagtcacagaag

SEQ ID NO: 14705 - DNA, 25 bp, Artificial
  Probe
ctacgaagaactggcaatatgaatg

SEQ ID NO: 14706 - DNA, 25 bp, Artificial
  Probe
tacgaagaactggcaatatgaatgt

SEQ ID NO: 14707 - DNA, 25 bp, Artificial
  Probe
taatggagaagttagagtcacagaa

SEQ ID NO: 14708 - DNA, 25 bp, Artificial
  Probe
tctacgaagaactggcaatatgaat

SEQ ID NO: 14709 - DNA, 25 bp, Artificial
  Probe
gagaagttagagtcacagaaggagt

SEQ ID NO: 14710 - DNA, 25 bp, Artificial
  Probe
gaagaactggcaatatgaatgttga

SEQ ID NO: 14711 - DNA, 25 bp, Artificial
  Probe
ctctacgaagaactggcaatatgaa

SEQ ID NO: 14712 - DNA, 25 bp, Artificial
  Probe
aagaactggcaatatgaatgttgaa

SEQ ID NO: 14713 - DNA, 25 bp, Artificial
  Probe
atggagaagttagagtcacagaagg

SEQ ID NO: 14714 - DNA, 25 bp, Artificial
  Probe
cgaagaactggcaatatgaatgttg

SEQ ID NO: 14715 - DNA, 25 bp, Artificial
  Probe
acgaagaactggcaatatgaatgtt

SEQ ID NO: 14716 - DNA, 25 bp, Artificial
  Probe
tctctacgaagaactggcaatatga

SEQ ID NO: 14717 - DNA, 25 bp, Artificial
  Probe
ggagaagttagagtcacagaaggag

SEQ ID NO: 14718 - DNA, 25 bp, Artificial
  Probe
cctaatggagaagttagagtcacag

SEQ ID NO: 14719 - DNA, 25 bp, Artificial
  Probe
ctaatggagaagttagagtcacaga

SEQ ID NO: 14720 - DNA, 25 bp, Artificial
  Probe
tggagaagttagagtcacagaagga

SEQ ID NO: 14721 - DNA, 25 bp, Artificial
  Probe
aatattctcttacctagccagatgg

SEQ ID NO: 14722 - DNA, 25 bp, Artificial
  Probe
tcctaatggagaagttagagtcaca

SEQ ID NO: 14723 - DNA, 25 bp, Artificial
  Probe
agaagttagagtcacagaaggagtg

SEQ ID NO: 14724 - DNA, 25 bp, Artificial
  Probe
atattctcttacctagccagatggt

SEQ ID NO: 14725 - DNA, 25 bp, Artificial
  Probe
tattctcttacctagccagatggtt

SEQ ID NO: 14726 - DNA, 25 bp, Artificial
  Probe
aagccagagtcattcagagcaatac

SEQ ID NO: 14727 - DNA, 25 bp, Artificial
  Probe
gataacaagaaagacaaagccagag

SEQ ID NO: 14728 - DNA, 25 bp, Artificial
  Probe
caagataacaagaaagacaaagcca

SEQ ID NO: 14729 - DNA, 25 bp, Artificial
  Probe
acaagataacaagaaagacaaagcc

SEQ ID NO: 14730 - DNA, 25 bp, Artificial
  Probe
aagataacaagaaagacaaagccag

SEQ ID NO: 14731 - DNA, 25 bp, Artificial
  Probe
agataacaagaaagacaaagccaga

SEQ ID NO: 14732 - DNA, 25 bp, Artificial
  Probe
ataacaagaaagacaaagccagagt

SEQ ID NO: 14733 - DNA, 25 bp, Artificial
  Probe
taagcatatcagtttgtggacattc

SEQ ID NO: 14734 - DNA, 25 bp, Artificial
  Probe
ctaagcatatcagtttgtggacatt

SEQ ID NO: 14735 - DNA, 25 bp, Artificial
  Probe
cctaagcatatcagtttgtggacat

SEQ ID NO: 14736 - DNA, 25 bp, Artificial
  Probe
gaactggcaatatgaatgttgaaac

SEQ ID NO: 14737 - DNA, 25 bp, Artificial
  Probe
agaactggcaatatgaatgttgaaa

SEQ ID NO: 14738 - DNA, 25 bp, Artificial
  Probe
tctaaaggtcactatgaggtctact

SEQ ID NO: 14739 - DNA, 25 bp, Artificial
  Probe
gaagttagagtcacagaaggagtgg

SEQ ID NO: 14740 - DNA, 25 bp, Artificial
  Probe
ttctctacgaagaactggcaatatg

SEQ ID NO: 14741 - DNA, 25 bp, Artificial
  Probe
caactcatcttgaaagcacttgaag

SEQ ID NO: 14742 - DNA, 25 bp, Artificial
  Probe
ctaaaggtcactatgaggtctactc

SEQ ID NO: 14743 - DNA, 25 bp, Artificial
  Probe
ttctaaaggtcactatgaggtctac

SEQ ID NO: 14744 - DNA, 25 bp, Artificial
  Probe
agcacttgaagaatttctaaaggtc

SEQ ID NO: 14745 - DNA, 25 bp, Artificial
  Probe
atttctaaaggtcactatgaggtct

SEQ ID NO: 14746 - DNA, 25 bp, Artificial
  Probe
taaaggtcactatgaggtctactcg

SEQ ID NO: 14747 - DNA, 25 bp, Artificial
  Probe
aagcacttgaagaatttctaaaggt

SEQ ID NO: 14748 - DNA, 25 bp, Artificial
  Probe
gcacttgaagaatttctaaaggtca

SEQ ID NO: 14749 - DNA, 25 bp, Artificial
  Probe
caagcagaggttagaagaagaaact

SEQ ID NO: 14750 - DNA, 25 bp, Artificial
  Probe
tcaagcagaggttagaagaagaaac

SEQ ID NO: 14751 - DNA, 25 bp, Artificial
  Probe
gctcaagcagaggttagaagaagaa

SEQ ID NO: 14752 - DNA, 25 bp, Artificial
  Probe
aagcagaggttagaagaagaaactc

SEQ ID NO: 14753 - DNA, 25 bp, Artificial
  Probe
ctcaagcagaggttagaagaagaaa

SEQ ID NO: 14754 - DNA, 25 bp, Artificial
  Probe
gaggcagaggagtggtataagtcaa

SEQ ID NO: 14755 - DNA, 25 bp, Artificial
  Probe
gaggttagaagaagaaactcgcaag

SEQ ID NO: 14756 - DNA, 25 bp, Artificial
  Probe
agaggttagaagaagaaactcgcaa

SEQ ID NO: 14757 - DNA, 25 bp, Artificial
  Probe
agcagaggttagaagaagaaactcg

SEQ ID NO: 14758 - DNA, 25 bp, Artificial
  Probe
aggcagaggagtggtataagtcaaa

SEQ ID NO: 14759 - DNA, 25 bp, Artificial
  Probe
cagaggttagaagaagaaactcgca

SEQ ID NO: 14760 - DNA, 25 bp, Artificial
  Probe
gttcctcaagaagctacacgaagag

SEQ ID NO: 14761 - DNA, 25 bp, Artificial
  Probe
gagttcctcaagaagctacacgaag

SEQ ID NO: 14762 - DNA, 25 bp, Artificial
  Probe
agttcctcaagaagctacacgaaga

SEQ ID NO: 14763 - DNA, 25 bp, Artificial
  Probe
gcagaggagtggtataagtcaaaat

SEQ ID NO: 14764 - DNA, 25 bp, Artificial
  Probe
aggttagaagaagaaactcgcaagc

SEQ ID NO: 14765 - DNA, 25 bp, Artificial
  Probe
aggaggcagaggagtggtataagtc

SEQ ID NO: 14766 - DNA, 25 bp, Artificial
  Probe
cgctcaagcagaggttagaagaaga

SEQ ID NO: 14767 - DNA, 25 bp, Artificial
  Probe
ggaggcagaggagtggtataagtca

SEQ ID NO: 14768 - DNA, 25 bp, Artificial
  Probe
caggaggcagaggagtggtataagt

SEQ ID NO: 14769 - DNA, 25 bp, Artificial
  Probe
ctagaactagagcgcaagatcgaat

SEQ ID NO: 14770 - DNA, 25 bp, Artificial
  Probe
cagaggagtggtataagtcaaaata

SEQ ID NO: 14771 - DNA, 25 bp, Artificial
  Probe
ggcagaggagtggtataagtcaaaa

SEQ ID NO: 14772 - DNA, 25 bp, Artificial
  Probe
tagaactagagcgcaagatcgaatc

SEQ ID NO: 14773 - DNA, 25 bp, Artificial
  Probe
gcagaggttagaagaagaaactcgc

SEQ ID NO: 14774 - DNA, 25 bp, Artificial
  Probe
agtggtataagtcaaaatacgctga

SEQ ID NO: 14775 - DNA, 25 bp, Artificial
  Probe
gagtggtataagtcaaaatacgctg

SEQ ID NO: 14776 - DNA, 25 bp, Artificial
  Probe
ggagtggtataagtcaaaatacgct

SEQ ID NO: 14777 - DNA, 25 bp, Artificial
  Probe
aggagtggtataagtcaaaatacgc

SEQ ID NO: 14778 - DNA, 25 bp, Artificial
  Probe
gaggagtggtataagtcaaaatacg

SEQ ID NO: 14779 - DNA, 25 bp, Artificial
  Probe
agaggagtggtataagtcaaaatac

SEQ ID NO: 14780 - DNA, 25 bp, Artificial
  Probe
agtgtgagattcactctgagtcaaa

SEQ ID NO: 14781 - DNA, 25 bp, Artificial
  Probe
gttagaagaagaaactcgcaagcgg

SEQ ID NO: 14782 - DNA, 25 bp, Artificial
  Probe
ggttagaagaagaaactcgcaagcg

SEQ ID NO: 14783 - DNA, 25 bp, Artificial
  Probe
cctagaactagagcgcaagatcgaa

SEQ ID NO: 14784 - DNA, 25 bp, Artificial
  Probe
tgagttcctcaagaagctacacgaa

SEQ ID NO: 14785 - DNA, 25 bp, Artificial
  Probe
ctcaagaagctacacgaagaggagc

SEQ ID NO: 14786 - DNA, 25 bp, Artificial
  Probe
agaactagagcgcaagatcgaatct

SEQ ID NO: 14787 - DNA, 25 bp, Artificial
  Probe
tataagtcaaaatacgctgacctgt

SEQ ID NO: 14788 - DNA, 25 bp, Artificial
  Probe
gtataagtcaaaatacgctgacctg

SEQ ID NO: 14789 - DNA, 25 bp, Artificial
  Probe
gtggtataagtcaaaatacgctgac

SEQ ID NO: 14790 - DNA, 25 bp, Artificial
  Probe
ggtataagtcaaaatacgctgacct

SEQ ID NO: 14791 - DNA, 25 bp, Artificial
  Probe
tggtataagtcaaaatacgctgacc

SEQ ID NO: 14792 - DNA, 25 bp, Artificial
  Probe
ttcctcaagaagctacacgaagagg

SEQ ID NO: 14793 - DNA, 25 bp, Artificial
  Probe
cctcaagaagctacacgaagaggag

SEQ ID NO: 14794 - DNA, 25 bp, Artificial
  Probe
gatgccttatcattgacaagagatt

SEQ ID NO: 14795 - DNA, 25 bp, Artificial
  Probe
ctctctctctctctctctctctgtt

SEQ ID NO: 14796 - DNA, 25 bp, Artificial
  Probe
ttctgctcttggtaaggttgacata

SEQ ID NO: 14797 - DNA, 25 bp, Artificial
  Probe
acagacaaccttcaatgtagattct

SEQ ID NO: 14798 - DNA, 25 bp, Artificial
  Probe
cacagacaaccttcaatgtagattc

SEQ ID NO: 14799 - DNA, 25 bp, Artificial
  Probe
tcacagacaaccttcaatgtagatt

SEQ ID NO: 14800 - DNA, 25 bp, Artificial
  Probe
ttcacagacaaccttcaatgtagat

SEQ ID NO: 14801 - DNA, 25 bp, Artificial
  Probe
ctcttggtaaggttgacatagtgta

SEQ ID NO: 14802 - DNA, 25 bp, Artificial
  Probe
atagaatcttactcatccacatggc

SEQ ID NO: 14803 - DNA, 25 bp, Artificial
  Probe
tcttggtaaggttgacatagtgtat

SEQ ID NO: 14804 - DNA, 25 bp, Artificial
  Probe
cagacaaccttcaatgtagattctt

SEQ ID NO: 14805 - DNA, 25 bp, Artificial
  Probe
tctgctcttggtaaggttgacatag

SEQ ID NO: 14806 - DNA, 25 bp, Artificial
  Probe
cttggtaaggttgacatagtgtatg

SEQ ID NO: 14807 - DNA, 25 bp, Artificial
  Probe
ctgctcttggtaaggttgacatagt

SEQ ID NO: 14808 - DNA, 25 bp, Artificial
  Probe
tagaatcttactcatccacatggca

SEQ ID NO: 14809 - DNA, 25 bp, Artificial
  Probe
gatagaatcttactcatccacatgg

SEQ ID NO: 14810 - DNA, 25 bp, Artificial
  Probe
tgctcttggtaaggttgacatagtg

SEQ ID NO: 14811 - DNA, 25 bp, Artificial
  Probe
atcttctgctcttggtaaggttgac

SEQ ID NO: 14812 - DNA, 25 bp, Artificial
  Probe
catcttctgctcttggtaaggttga

SEQ ID NO: 14813 - DNA, 25 bp, Artificial
  Probe
gtttctcctctactcatccatcttt

SEQ ID NO: 14814 - DNA, 25 bp, Artificial
  Probe
cttctgctcttggtaaggttgacat

SEQ ID NO: 14815 - DNA, 25 bp, Artificial
  Probe
tgtttctcctctactcatccatctt

SEQ ID NO: 14816 - DNA, 25 bp, Artificial
  Probe
tctctctctctctctctctctgttt

SEQ ID NO: 14817 - DNA, 25 bp, Artificial
  Probe
tctcattccaagtctaatgtccatt

SEQ ID NO: 14818 - DNA, 25 bp, Artificial
  Probe
ttctcattccaagtctaatgtccat

SEQ ID NO: 14819 - DNA, 25 bp, Artificial
  Probe
attctcattccaagtctaatgtcca

SEQ ID NO: 14820 - DNA, 25 bp, Artificial
  Probe
tgccttatcattgacaagagatttc

SEQ ID NO: 14821 - DNA, 25 bp, Artificial
  Probe
gtgtttctcctctactcatccatct

SEQ ID NO: 14822 - DNA, 25 bp, Artificial
  Probe
gctcttggtaaggttgacatagtgt

SEQ ID NO: 14823 - DNA, 25 bp, Artificial
  Probe
tcgtttacacagatagatagatgga

SEQ ID NO: 14824 - DNA, 25 bp, Artificial
  Probe
tgtccatttgctttcaatagtgatg

SEQ ID NO: 14825 - DNA, 25 bp, Artificial
  Probe
tagtgtttctcctctactcatccat

SEQ ID NO: 14826 - DNA, 25 bp, Artificial
  Probe
ttgctttcaatagtgatgccttatc

SEQ ID NO: 14827 - DNA, 25 bp, Artificial
  Probe
ttccacttgaaacaattctcattcc

SEQ ID NO: 14828 - DNA, 25 bp, Artificial
  Probe
aattctcattccaagtctaatgtcc

SEQ ID NO: 14829 - DNA, 25 bp, Artificial
  Probe
ccacttgaaacaattctcattccaa

SEQ ID NO: 14830 - DNA, 25 bp, Artificial
  Probe
ctgtatcttaacccttctgctgttc

SEQ ID NO: 14831 - DNA, 25 bp, Artificial
  Probe
gccttatcattgacaagagatttca

SEQ ID NO: 14832 - DNA, 25 bp, Artificial
  Probe
atgccttatcattgacaagagattt

SEQ ID NO: 14833 - DNA, 25 bp, Artificial
  Probe
catttgctttcaatagtgatgcctt

SEQ ID NO: 14834 - DNA, 25 bp, Artificial
  Probe
tttgctttcaatagtgatgccttat

SEQ ID NO: 14835 - DNA, 25 bp, Artificial
  Probe
atttgctttcaatagtgatgcctta

SEQ ID NO: 14836 - DNA, 25 bp, Artificial
  Probe
atgtccatttgctttcaatagtgat

SEQ ID NO: 14837 - DNA, 25 bp, Artificial
  Probe
agaatcttactcatccacatggcac

SEQ ID NO: 14838 - DNA, 25 bp, Artificial
  Probe
caagtctaatgtccatttgctttca

SEQ ID NO: 14839 - DNA, 25 bp, Artificial
  Probe
caaatgcccaaattaaacccgtaaa

SEQ ID NO: 14840 - DNA, 25 bp, Artificial
  Probe
ctgaatgccaaatgcccaaattaaa

SEQ ID NO: 14841 - DNA, 25 bp, Artificial
  Probe
tcctcaagcaagaaatatctctagc

SEQ ID NO: 14842 - DNA, 25 bp, Artificial
  Probe
tgaatgccaaatgcccaaattaaac

SEQ ID NO: 14843 - DNA, 25 bp, Artificial
  Probe
cttcctcaagcaagaaatatctcta

SEQ ID NO: 14844 - DNA, 25 bp, Artificial
  Probe
gaatgccaaatgcccaaattaaacc

SEQ ID NO: 14845 - DNA, 25 bp, Artificial
  Probe
ttctctcccactctcgtaaccataa

SEQ ID NO: 14846 - DNA, 25 bp, Artificial
  Probe
tttctctcccactctcgtaaccata

SEQ ID NO: 14847 - DNA, 25 bp, Artificial
  Probe
atacctcactagggattctcttact

SEQ ID NO: 14848 - DNA, 25 bp, Artificial
  Probe
ttcctcaagcaagaaatatctctag

SEQ ID NO: 14849 - DNA, 25 bp, Artificial
  Probe
ccaatacctcactagggattctctt

SEQ ID NO: 14850 - DNA, 25 bp, Artificial
  Probe
ccaaatgcccaaattaaacccgtaa

SEQ ID NO: 14851 - DNA, 25 bp, Artificial
  Probe
aatacctcactagggattctcttac

SEQ ID NO: 14852 - DNA, 25 bp, Artificial
  Probe
caatacctcactagggattctctta

SEQ ID NO: 14853 - DNA, 25 bp, Artificial
  Probe
tctctcccactctcgtaaccataag

SEQ ID NO: 14854 - DNA, 25 bp, Artificial
  Probe
cctgaatgccaaatgcccaaattaa

SEQ ID NO: 14855 - DNA, 25 bp, Artificial
  Probe
gaccaatacctcactagggattctc

SEQ ID NO: 14856 - DNA, 25 bp, Artificial
  Probe
agctcgaatttacaatttcacttgg

SEQ ID NO: 14857 - DNA, 25 bp, Artificial
  Probe
accaatacctcactagggattctct

SEQ ID NO: 14858 - DNA, 25 bp, Artificial
  Probe
agaccaatacctcactagggattct

SEQ ID NO: 14859 - DNA, 25 bp, Artificial
  Probe
cagaccaatacctcactagggattc

SEQ ID NO: 14860 - DNA, 25 bp, Artificial
  Probe
aatgccaaatgcccaaattaaaccc

SEQ ID NO: 14861 - DNA, 25 bp, Artificial
  Probe
aaatgcccaaattaaacccgtaaaa

SEQ ID NO: 14862 - DNA, 25 bp, Artificial
  Probe
ttacatccctcttgccacaacattc

SEQ ID NO: 14863 - DNA, 25 bp, Artificial
  Probe
cttacatccctcttgccacaacatt

SEQ ID NO: 14864 - DNA, 25 bp, Artificial
  Probe
gctcgaatttacaatttcacttggc

SEQ ID NO: 14865 - DNA, 25 bp, Artificial
  Probe
ctttctctcccactctcgtaaccat

SEQ ID NO: 14866 - DNA, 25 bp, Artificial
  Probe
cctcaagcaagaaatatctctagct

SEQ ID NO: 14867 - DNA, 25 bp, Artificial
  Probe
ctctcccactctcgtaaccataagc

SEQ ID NO: 14868 - DNA, 25 bp, Artificial
  Probe
ctcgaatttacaatttcacttggcc

SEQ ID NO: 14869 - DNA, 25 bp, Artificial
  Probe
ttttaactcctcacgaataccaccc

SEQ ID NO: 14870 - DNA, 25 bp, Artificial
  Probe
agcaagaaatatctctagctttcat

SEQ ID NO: 14871 - DNA, 25 bp, Artificial
  Probe
gcagaccaatacctcactagggatt

SEQ ID NO: 14872 - DNA, 25 bp, Artificial
  Probe
gtgttggaaacgggaattgcataag

SEQ ID NO: 14873 - DNA, 25 bp, Artificial
  Probe
ccctgaatgccaaatgcccaaatta

SEQ ID NO: 14874 - DNA, 25 bp, Artificial
  Probe
acttacatccctcttgccacaacat

SEQ ID NO: 14875 - DNA, 25 bp, Artificial
  Probe
tttaactcctcacgaataccacccg

SEQ ID NO: 14876 - DNA, 25 bp, Artificial
  Probe
gcaagaaatatctctagctttcatt

SEQ ID NO: 14877 - DNA, 25 bp, Artificial
  Probe
atatctctagctttcatttccattt

SEQ ID NO: 14878 - DNA, 25 bp, Artificial
  Probe
aatatctctagctttcatttccatt

SEQ ID NO: 14879 - DNA, 25 bp, Artificial
  Probe
tctctagctttcatttccattttga

SEQ ID NO: 14880 - DNA, 25 bp, Artificial
  Probe
gccaaatgcccaaattaaacccgta

SEQ ID NO: 14881 - DNA, 25 bp, Artificial
  Probe
gaatttacaatttcacttggcccga

SEQ ID NO: 14882 - DNA, 25 bp, Artificial
  Probe
tcgaatttacaatttcacttggccc

SEQ ID NO: 14883 - DNA, 25 bp, Artificial
  Probe
atctctagctttcatttccattttg

SEQ ID NO: 14884 - DNA, 25 bp, Artificial
  Probe
gtgactgtcatgtgttccttagtac

SEQ ID NO: 14885 - DNA, 25 bp, Artificial
  Probe
agtgactgtcatgtgttccttagta

SEQ ID NO: 14886 - DNA, 25 bp, Artificial
  Probe
tagtgactgtcatgtgttccttagt

SEQ ID NO: 14887 - DNA, 25 bp, Artificial
  Probe
ctgtcatgtgttccttagtactgta

SEQ ID NO: 14888 - DNA, 25 bp, Artificial
  Probe
tgtcatgtgttccttagtactgtac

SEQ ID NO: 14889 - DNA, 25 bp, Artificial
  Probe
gtgcctgtttcatgttctatgtcat

SEQ ID NO: 14890 - DNA, 25 bp, Artificial
  Probe
atgtgcctgtttcatgttctatgtc

SEQ ID NO: 14891 - DNA, 25 bp, Artificial
  Probe
gactgtcatgtgttccttagtactg

SEQ ID NO: 14892 - DNA, 25 bp, Artificial
  Probe
tgactgtcatgtgttccttagtact

SEQ ID NO: 14893 - DNA, 25 bp, Artificial
  Probe
actgtcatgtgttccttagtactgt

SEQ ID NO: 14894 - DNA, 25 bp, Artificial
  Probe
gtcatgtgttccttagtactgtact

SEQ ID NO: 14895 - DNA, 25 bp, Artificial
  Probe
catgtgttccttagtactgtactcc

SEQ ID NO: 14896 - DNA, 25 bp, Artificial
  Probe
tcatgtgttccttagtactgtactc

SEQ ID NO: 14897 - DNA, 25 bp, Artificial
  Probe
tgtgcctgtttcatgttctatgtca

SEQ ID NO: 14898 - DNA, 25 bp, Artificial
  Probe
tactcttgacgattccagtgcagta

SEQ ID NO: 14899 - DNA, 25 bp, Artificial
  Probe
cctgtttcatgttctatgtcatgtg

SEQ ID NO: 14900 - DNA, 25 bp, Artificial
  Probe
ctgtttcatgttctatgtcatgtga

SEQ ID NO: 14901 - DNA, 25 bp, Artificial
  Probe
ccacctactcttgacgattccagtg

SEQ ID NO: 14902 - DNA, 25 bp, Artificial
  Probe
gtttcatgttctatgtcatgtgacc

SEQ ID NO: 14903 - DNA, 25 bp, Artificial
  Probe
tgtttcatgttctatgtcatgtgac

SEQ ID NO: 14904 - DNA, 25 bp, Artificial
  Probe
ctcttgacgattccagtgcagtagt

SEQ ID NO: 14905 - DNA, 25 bp, Artificial
  Probe
gcctgtttcatgttctatgtcatgt

SEQ ID NO: 14906 - DNA, 25 bp, Artificial
  Probe
tgcctgtttcatgttctatgtcatg

SEQ ID NO: 14907 - DNA, 25 bp, Artificial
  Probe
ttccttagtactgtactcccatgtg

SEQ ID NO: 14908 - DNA, 25 bp, Artificial
  Probe
gttccttagtactgtactcccatgt

SEQ ID NO: 14909 - DNA, 25 bp, Artificial
  Probe
tgttccttagtactgtactcccatg

SEQ ID NO: 14910 - DNA, 25 bp, Artificial
  Probe
gtgttccttagtactgtactcccat

SEQ ID NO: 14911 - DNA, 25 bp, Artificial
  Probe
atgtgttccttagtactgtactccc

SEQ ID NO: 14912 - DNA, 25 bp, Artificial
  Probe
catgtgcctgtttcatgttctatgt

SEQ ID NO: 14913 - DNA, 25 bp, Artificial
  Probe
tcttgacgattccagtgcagtagtg

SEQ ID NO: 14914 - DNA, 25 bp, Artificial
  Probe
actcttgacgattccagtgcagtag

SEQ ID NO: 14915 - DNA, 25 bp, Artificial
  Probe
ctactcttgacgattccagtgcagt

SEQ ID NO: 14916 - DNA, 25 bp, Artificial
  Probe
ccatgtgcctgtttcatgttctatg

SEQ ID NO: 14917 - DNA, 25 bp, Artificial
  Probe
tgtgttccttagtactgtactccca

SEQ ID NO: 14918 - DNA, 25 bp, Artificial
  Probe
cctactcttgacgattccagtgcag

SEQ ID NO: 14919 - DNA, 25 bp, Artificial
  Probe
tccttagtactgtactcccatgtgg

SEQ ID NO: 14920 - DNA, 25 bp, Artificial
  Probe
ccttagtactgtactcccatgtggt

SEQ ID NO: 14921 - DNA, 25 bp, Artificial
  Probe
gccatgtgcctgtttcatgttctat

SEQ ID NO: 14922 - DNA, 25 bp, Artificial
  Probe
agccatgtgcctgtttcatgttcta

SEQ ID NO: 14923 - DNA, 25 bp, Artificial
  Probe
aaggagaataaaccggatcctgttg

SEQ ID NO: 14924 - DNA, 25 bp, Artificial
  Probe
caaggagaataaaccggatcctgtt

SEQ ID NO: 14925 - DNA, 25 bp, Artificial
  Probe
gattccagtgcagtagtgccaaaag

SEQ ID NO: 14926 - DNA, 25 bp, Artificial
  Probe
ttgccaaggagaataaaccggatcc

SEQ ID NO: 14927 - DNA, 25 bp, Artificial
  Probe
ccaaggagaataaaccggatcctgt

SEQ ID NO: 14928 - DNA, 25 bp, Artificial
  Probe
aggagaataaaccggatcctgttgc

SEQ ID NO: 14929 - DNA, 25 bp, Artificial
  Probe
taagaatcaccaaggtcataagcat

SEQ ID NO: 14930 - DNA, 25 bp, Artificial
  Probe
ataagaatcaccaaggtcataagca

SEQ ID NO: 14931 - DNA, 25 bp, Artificial
  Probe
aataagaatcaccaaggtcataagc

SEQ ID NO: 14932 - DNA, 25 bp, Artificial
  Probe
agaatccactgctcagataatgaag

SEQ ID NO: 14933 - DNA, 25 bp, Artificial
  Probe
agacatgacatcagtgataagaagg

SEQ ID NO: 14934 - DNA, 25 bp, Artificial
  Probe
gaatccactgctcagataatgaagg

SEQ ID NO: 14935 - DNA, 25 bp, Artificial
  Probe
aagtacaactgtaagtccatcctac

SEQ ID NO: 14936 - DNA, 25 bp, Artificial
  Probe
cttaacttatacagcgtaggaatct

SEQ ID NO: 14937 - DNA, 25 bp, Artificial
  Probe
tcttaacttatacagcgtaggaatc

SEQ ID NO: 14938 - DNA, 25 bp, Artificial
  Probe
cagaatccactgctcagataatgaa

SEQ ID NO: 14939 - DNA, 25 bp, Artificial
  Probe
ctctctgaaccaatacaggaagaag

SEQ ID NO: 14940 - DNA, 25 bp, Artificial
  Probe
taccagaatccactgctcagataat

SEQ ID NO: 14941 - DNA, 25 bp, Artificial
  Probe
tgaagacaatactacatctacacag

SEQ ID NO: 14942 - DNA, 25 bp, Artificial
  Probe
ctgaagacaatactacatctacaca

SEQ ID NO: 14943 - DNA, 25 bp, Artificial
  Probe
aagaatcaccaaggtcataagcatg

SEQ ID NO: 14944 - DNA, 25 bp, Artificial
  Probe
gacatgacatcagtgataagaaggc

SEQ ID NO: 14945 - DNA, 25 bp, Artificial
  Probe
ttaacttatacagcgtaggaatctt

SEQ ID NO: 14946 - DNA, 25 bp, Artificial
  Probe
ctgctcagataatgaaggctcctaa

SEQ ID NO: 14947 - DNA, 25 bp, Artificial
  Probe
aatacaggaagaagcctaccagaat

SEQ ID NO: 14948 - DNA, 25 bp, Artificial
  Probe
gaagacaatactacatctacacaga

SEQ ID NO: 14949 - DNA, 25 bp, Artificial
  Probe
tctgaagacaatactacatctacac

SEQ ID NO: 14950 - DNA, 25 bp, Artificial
  Probe
actagacatgacatcagtgataaga

SEQ ID NO: 14951 - DNA, 25 bp, Artificial
  Probe
agaataagaatcaccaaggtcataa

SEQ ID NO: 14952 - DNA, 25 bp, Artificial
  Probe
aagaataagaatcaccaaggtcata

SEQ ID NO: 14953 - DNA, 25 bp, Artificial
  Probe
ctaccagaatccactgctcagataa

SEQ ID NO: 14954 - DNA, 25 bp, Artificial
  Probe
ttcttaacttatacagcgtaggaat

SEQ ID NO: 14955 - DNA, 25 bp, Artificial
  Probe
atacaggaagaagcctaccagaatc

SEQ ID NO: 14956 - DNA, 25 bp, Artificial
  Probe
gaataagaatcaccaaggtcataag

SEQ ID NO: 14957 - DNA, 25 bp, Artificial
  Probe
tagacatgacatcagtgataagaag

SEQ ID NO: 14958 - DNA, 25 bp, Artificial
  Probe
ctagacatgacatcagtgataagaa

SEQ ID NO: 14959 - DNA, 25 bp, Artificial
  Probe
gcgtaggaatctttacaaatgcttt

SEQ ID NO: 14960 - DNA, 25 bp, Artificial
  Probe
ccagaatccactgctcagataatga

SEQ ID NO: 14961 - DNA, 25 bp, Artificial
  Probe
tacagcgtaggaatctttacaaatg

SEQ ID NO: 14962 - DNA, 25 bp, Artificial
  Probe
caatacaggaagaagcctaccagaa

SEQ ID NO: 14963 - DNA, 25 bp, Artificial
  Probe
ctgaaccaatacaggaagaagccta

SEQ ID NO: 14964 - DNA, 25 bp, Artificial
  Probe
tctctgaaccaatacaggaagaagc

SEQ ID NO: 14965 - DNA, 25 bp, Artificial
  Probe
gctctctgaaccaatacaggaagaa

SEQ ID NO: 14966 - DNA, 25 bp, Artificial
  Probe
caaccagatagcctttcatttaagc

SEQ ID NO: 14967 - DNA, 25 bp, Artificial
  Probe
acaactgtaagtccatcctacattg

SEQ ID NO: 14968 - DNA, 25 bp, Artificial
  Probe
acaaccagatagcctttcatttaag

SEQ ID NO: 14969 - DNA, 25 bp, Artificial
  Probe
tccaaccatagaaacaacagaattt

SEQ ID NO: 14970 - DNA, 25 bp, Artificial
  Probe
accagaatccactgctcagataatg

SEQ ID NO: 14971 - DNA, 25 bp, Artificial
  Probe
tacaactgtaagtccatcctacatt

SEQ ID NO: 14972 - DNA, 25 bp, Artificial
  Probe
gtacaactgtaagtccatcctacat

SEQ ID NO: 14973 - DNA, 25 bp, Artificial
  Probe
atccaaccatagaaacaacagaatt

SEQ ID NO: 14974 - DNA, 25 bp, Artificial
  Probe
gaggataccactgaagagaccttaa

SEQ ID NO: 14975 - DNA, 25 bp, Artificial
  Probe
ggaagatggagaaattgatggaaac

SEQ ID NO: 14976 - DNA, 25 bp, Artificial
  Probe
atggaagatggagaaattgatggaa

SEQ ID NO: 14977 - DNA, 25 bp, Artificial
  Probe
ctgtctgaggataccactgaagaga

SEQ ID NO: 14978 - DNA, 25 bp, Artificial
  Probe
tctgtctgaggataccactgaagag

SEQ ID NO: 14979 - DNA, 25 bp, Artificial
  Probe
gttcgtgcaagaatagtaactgatc

SEQ ID NO: 14980 - DNA, 25 bp, Artificial
  Probe
tgaggataccactgaagagacctta

SEQ ID NO: 14981 - DNA, 25 bp, Artificial
  Probe
aggaaagaagacgaagtttgaatag

SEQ ID NO: 14982 - DNA, 25 bp, Artificial
  Probe
tggaagatggagaaattgatggaaa

SEQ ID NO: 14983 - DNA, 25 bp, Artificial
  Probe
gaagatggagaaattgatggaaaca

SEQ ID NO: 14984 - DNA, 25 bp, Artificial
  Probe
tgttcgtgcaagaatagtaactgat

SEQ ID NO: 14985 - DNA, 25 bp, Artificial
  Probe
tttaatagtgaggaagatgccaaag

SEQ ID NO: 14986 - DNA, 25 bp, Artificial
  Probe
ttaatagtgaggaagatgccaaagc

SEQ ID NO: 14987 - DNA, 25 bp, Artificial
  Probe
ctctgttcgtgcaagaatagtaact

SEQ ID NO: 14988 - DNA, 25 bp, Artificial
  Probe
attgatggaaacaaagttaccttgg

SEQ ID NO: 14989 - DNA, 25 bp, Artificial
  Probe
ctttaatagtgaggaagatgccaaa

SEQ ID NO: 14990 - DNA, 25 bp, Artificial
  Probe
ttcgtgcaagaatagtaactgatcg

SEQ ID NO: 14991 - DNA, 25 bp, Artificial
  Probe
ctgttcgtgcaagaatagtaactga

SEQ ID NO: 14992 - DNA, 25 bp, Artificial
  Probe
tctgttcgtgcaagaatagtaactg

SEQ ID NO: 14993 - DNA, 25 bp, Artificial
  Probe
ttgatggaaacaaagttaccttgga

SEQ ID NO: 14994 - DNA, 25 bp, Artificial
  Probe
actttaatagtgaggaagatgccaa

SEQ ID NO: 14995 - DNA, 25 bp, Artificial
  Probe
agactttaatagtgaggaagatgcc

SEQ ID NO: 14996 - DNA, 25 bp, Artificial
  Probe
tggagaaattgatggaaacaaagtt

SEQ ID NO: 14997 - DNA, 25 bp, Artificial
  Probe
gactttaatagtgaggaagatgcca

SEQ ID NO: 14998 - DNA, 25 bp, Artificial
  Probe
gtctgtctgaggataccactgaaga

SEQ ID NO: 14999 - DNA, 25 bp, Artificial
  Probe
atggagaaattgatggaaacaaagt

SEQ ID NO: 15000 - DNA, 25 bp, Artificial
  Probe
ctggttcttctaaagggtttggttt

SEQ ID NO: 15001 - DNA, 25 bp, Artificial
  Probe
caagaatagtaactgatcgggaaac

SEQ ID NO: 15002 - DNA, 25 bp, Artificial
  Probe
agatggagaaattgatggaaacaaa

SEQ ID NO: 15003 - DNA, 25 bp, Artificial
  Probe
aagatggagaaattgatggaaacaa

SEQ ID NO: 15004 - DNA, 25 bp, Artificial
  Probe
gatggagaaattgatggaaacaaag

SEQ ID NO: 15005 - DNA, 25 bp, Artificial
  Probe
gcaagaatagtaactgatcgggaaa

SEQ ID NO: 15006 - DNA, 25 bp, Artificial
  Probe
gatggaaacaaagttaccttggact

SEQ ID NO: 15007 - DNA, 25 bp, Artificial
  Probe
tgatggaaacaaagttaccttggac

SEQ ID NO: 15008 - DNA, 25 bp, Artificial
  Probe
aaagaatcatttgagggctctgttc

SEQ ID NO: 15009 - DNA, 25 bp, Artificial
  Probe
atggaaacaaagttaccttggactg

SEQ ID NO: 15010 - DNA, 25 bp, Artificial
  Probe
agaatagtaactgatcgggaaactg

SEQ ID NO: 15011 - DNA, 25 bp, Artificial
  Probe
aagaatagtaactgatcgggaaact

SEQ ID NO: 15012 - DNA, 25 bp, Artificial
  Probe
aattgatggaaacaaagttaccttg

SEQ ID NO: 15013 - DNA, 25 bp, Artificial
  Probe
catggaagatggagaaattgatgga

SEQ ID NO: 15014 - DNA, 25 bp, Artificial
  Probe
gatcgggaaactggttcttctaaag

SEQ ID NO: 15015 - DNA, 25 bp, Artificial
  Probe
gaatagtaactgatcgggaaactgg

SEQ ID NO: 15016 - DNA, 25 bp, Artificial
  Probe
gaaattgatggaaacaaagttacct

SEQ ID NO: 15017 - DNA, 25 bp, Artificial
  Probe
agaaattgatggaaacaaagttacc

SEQ ID NO: 15018 - DNA, 25 bp, Artificial
  Probe
aggataccactgaagagaccttaaa

SEQ ID NO: 15019 - DNA, 25 bp, Artificial
  Probe
atctaatacggtcacagtagtcttg

SEQ ID NO: 15020 - DNA, 25 bp, Artificial
  Probe
tccttgatacacacataccttctaa

SEQ ID NO: 15021 - DNA, 25 bp, Artificial
  Probe
ttccttgatacacacataccttcta

SEQ ID NO: 15022 - DNA, 25 bp, Artificial
  Probe
ttctgtgtatgttggaaggaactac

SEQ ID NO: 15023 - DNA, 25 bp, Artificial
  Probe
cacagtagtcttgataaccagaatc

SEQ ID NO: 15024 - DNA, 25 bp, Artificial
  Probe
gtcacagtagtcttgataaccagaa

SEQ ID NO: 15025 - DNA, 25 bp, Artificial
  Probe
atacggtcacagtagtcttgataac

SEQ ID NO: 15026 - DNA, 25 bp, Artificial
  Probe
ctaatacggtcacagtagtcttgat

SEQ ID NO: 15027 - DNA, 25 bp, Artificial
  Probe
tctaatacggtcacagtagtcttga

SEQ ID NO: 15028 - DNA, 25 bp, Artificial
  Probe
aatacggtcacagtagtcttgataa

SEQ ID NO: 15029 - DNA, 25 bp, Artificial
  Probe
tcacagtagtcttgataaccagaat

SEQ ID NO: 15030 - DNA, 25 bp, Artificial
  Probe
gatctaatacggtcacagtagtctt

SEQ ID NO: 15031 - DNA, 25 bp, Artificial
  Probe
aattctgttgatctcggctaatctc

SEQ ID NO: 15032 - DNA, 25 bp, Artificial
  Probe
ggatctaatacggtcacagtagtct

SEQ ID NO: 15033 - DNA, 25 bp, Artificial
  Probe
taatacggtcacagtagtcttgata

SEQ ID NO: 15034 - DNA, 25 bp, Artificial
  Probe
tctgtgtatgttggaaggaactacc

SEQ ID NO: 15035 - DNA, 25 bp, Artificial
  Probe
attctgttgatctcggctaatctcc

SEQ ID NO: 15036 - DNA, 25 bp, Artificial
  Probe
tgatgctatttctgtgtatgttgga

SEQ ID NO: 15037 - DNA, 25 bp, Artificial
  Probe
ctgatgctatttctgtgtatgttgg

SEQ ID NO: 15038 - DNA, 25 bp, Artificial
  Probe
tttccttgatacacacataccttct

SEQ ID NO: 15039 - DNA, 25 bp, Artificial
  Probe
tctctgatgctatttctgtgtatgt

SEQ ID NO: 15040 - DNA, 25 bp, Artificial
  Probe
gcttctctgatgctatttctgtgta

SEQ ID NO: 15041 - DNA, 25 bp, Artificial
  Probe
cataatgcagttaggtggtattcaa

SEQ ID NO: 15042 - DNA, 25 bp, Artificial
  Probe
tctgatgctatttctgtgtatgttg

SEQ ID NO: 15043 - DNA, 25 bp, Artificial
  Probe
tatgagtcttgaaattctacaggca

SEQ ID NO: 15044 - DNA, 25 bp, Artificial
  Probe
ctctgatgctatttctgtgtatgtt

SEQ ID NO: 15045 - DNA, 25 bp, Artificial
  Probe
ggtcacagtagtcttgataaccaga

SEQ ID NO: 15046 - DNA, 25 bp, Artificial
  Probe
ttggaaggaactaccaggtgttatt

SEQ ID NO: 15047 - DNA, 25 bp, Artificial
  Probe
tttctgtgtatgttggaaggaacta

SEQ ID NO: 15048 - DNA, 25 bp, Artificial
  Probe
atgctatttctgtgtatgttggaag

SEQ ID NO: 15049 - DNA, 25 bp, Artificial
  Probe
gatgctatttctgtgtatgttggaa

SEQ ID NO: 15050 - DNA, 25 bp, Artificial
  Probe
atttctgtgtatgttggaaggaact

SEQ ID NO: 15051 - DNA, 25 bp, Artificial
  Probe
atttccttgatacacacataccttc

SEQ ID NO: 15052 - DNA, 25 bp, Artificial
  Probe
gtcgttgacctctagttcttctctc

SEQ ID NO: 15053 - DNA, 25 bp, Artificial
  Probe
gctatttctgtgtatgttggaagga

SEQ ID NO: 15054 - DNA, 25 bp, Artificial
  Probe
tacggtcacagtagtcttgataacc

SEQ ID NO: 15055 - DNA, 25 bp, Artificial
  Probe
ttctctgatgctatttctgtgtatg

SEQ ID NO: 15056 - DNA, 25 bp, Artificial
  Probe
ttatgagtcttgaaattctacaggc

SEQ ID NO: 15057 - DNA, 25 bp, Artificial
  Probe
tgctatttctgtgtatgttggaagg

SEQ ID NO: 15058 - DNA, 25 bp, Artificial
  Probe
ccaatttccttgatacacacatacc

SEQ ID NO: 15059 - DNA, 25 bp, Artificial
  Probe
cccaatttccttgatacacacatac

SEQ ID NO: 15060 - DNA, 25 bp, Artificial
  Probe
gagtcttgaaattctacaggcaaat

SEQ ID NO: 15061 - DNA, 25 bp, Artificial
  Probe
atgagtcttgaaattctacaggcaa

SEQ ID NO: 15062 - DNA, 25 bp, Artificial
  Probe
tatttctgtgtatgttggaaggaac

SEQ ID NO: 15063 - DNA, 25 bp, Artificial
  Probe
cttctctgatgctatttctgtgtat

SEQ ID NO: 15064 - DNA, 25 bp, Artificial
  Probe
gtctcatctcttcaggttctcaatg

SEQ ID NO: 15065 - DNA, 25 bp, Artificial
  Probe
gtaggtctcatctcttcaggttctc

SEQ ID NO: 15066 - DNA, 25 bp, Artificial
  Probe
ttcctgatgtgttcaatgacttctc

SEQ ID NO: 15067 - DNA, 25 bp, Artificial
  Probe
ggtctcatctcttcaggttctcaat

SEQ ID NO: 15068 - DNA, 25 bp, Artificial
  Probe
taggtctcatctcttcaggttctca

SEQ ID NO: 15069 - DNA, 25 bp, Artificial
  Probe
tgtaggtctcatctcttcaggttct

SEQ ID NO: 15070 - DNA, 25 bp, Artificial
  Probe
tcctgatgtgttcaatgacttctca

SEQ ID NO: 15071 - DNA, 25 bp, Artificial
  Probe
tctcatctcttcaggttctcaatgc

SEQ ID NO: 15072 - DNA, 25 bp, Artificial
  Probe
aggtctcatctcttcaggttctcaa

SEQ ID NO: 15073 - DNA, 25 bp, Artificial
  Probe
ctgtaggtctcatctcttcaggttc

SEQ ID NO: 15074 - DNA, 25 bp, Artificial
  Probe
cctgatgtgttcaatgacttctcac

SEQ ID NO: 15075 - DNA, 25 bp, Artificial
  Probe
atgacttctcacattatagagttgt

SEQ ID NO: 15076 - DNA, 25 bp, Artificial
  Probe
ttcaaagggaagtttctgtaatggg

SEQ ID NO: 15077 - DNA, 25 bp, Artificial
  Probe
ctttcctgatgtgttcaatgacttc

SEQ ID NO: 15078 - DNA, 25 bp, Artificial
  Probe
tttcctgatgtgttcaatgacttct

SEQ ID NO: 15079 - DNA, 25 bp, Artificial
  Probe
ctcatctcttcaggttctcaatgcc

SEQ ID NO: 15080 - DNA, 25 bp, Artificial
  Probe
cctttcctgatgtgttcaatgactt

SEQ ID NO: 15081 - DNA, 25 bp, Artificial
  Probe
tgacttctcacattatagagttgta

SEQ ID NO: 15082 - DNA, 25 bp, Artificial
  Probe
ctcctttcctgatgtgttcaatgac

SEQ ID NO: 15083 - DNA, 25 bp, Artificial
  Probe
gactcctttcctgatgtgttcaatg

SEQ ID NO: 15084 - DNA, 25 bp, Artificial
  Probe
catctcttcaggttctcaatgccac

SEQ ID NO: 15085 - DNA, 25 bp, Artificial
  Probe
tcctttcctgatgtgttcaatgact

SEQ ID NO: 15086 - DNA, 25 bp, Artificial
  Probe
actcctttcctgatgtgttcaatga

SEQ ID NO: 15087 - DNA, 25 bp, Artificial
  Probe
ctcttccatgatcgtttacagtcag

SEQ ID NO: 15088 - DNA, 25 bp, Artificial
  Probe
tcatctcttcaggttctcaatgcca

SEQ ID NO: 15089 - DNA, 25 bp, Artificial
  Probe
gcttatttgatttcacattgagtgt

SEQ ID NO: 15090 - DNA, 25 bp, Artificial
  Probe
gatcgtttacagtcagtggaacaag

SEQ ID NO: 15091 - DNA, 25 bp, Artificial
  Probe
cactcttccatgatcgtttacagtc

SEQ ID NO: 15092 - DNA, 25 bp, Artificial
  Probe
cttccatgatcgtttacagtcagtg

SEQ ID NO: 15093 - DNA, 25 bp, Artificial
  Probe
tcttccatgatcgtttacagtcagt

SEQ ID NO: 15094 - DNA, 25 bp, Artificial
  Probe
actcttccatgatcgtttacagtca

SEQ ID NO: 15095 - DNA, 25 bp, Artificial
  Probe
tcaatgacttctcacattatagagt

SEQ ID NO: 15096 - DNA, 25 bp, Artificial
  Probe
gctgtaggtctcatctcttcaggtt

SEQ ID NO: 15097 - DNA, 25 bp, Artificial
  Probe
catgatcgtttacagtcagtggaac

SEQ ID NO: 15098 - DNA, 25 bp, Artificial
  Probe
gtgttcaatgacttctcacattata

SEQ ID NO: 15099 - DNA, 25 bp, Artificial
  Probe
atgatcgtttacagtcagtggaaca

SEQ ID NO: 15100 - DNA, 25 bp, Artificial
  Probe
atcgtttacagtcagtggaacaagg

SEQ ID NO: 15101 - DNA, 25 bp, Artificial
  Probe
tgatcgtttacagtcagtggaacaa

SEQ ID NO: 15102 - DNA, 25 bp, Artificial
  Probe
aacccttgctgctttagaccctata

SEQ ID NO: 15103 - DNA, 25 bp, Artificial
  Probe
tgttcaatgacttctcacattatag

SEQ ID NO: 15104 - DNA, 25 bp, Artificial
  Probe
ccactcttccatgatcgtttacagt

SEQ ID NO: 15105 - DNA, 25 bp, Artificial
  Probe
aagtcctcacttacgatcatagctg

SEQ ID NO: 15106 - DNA, 25 bp, Artificial
  Probe
caagtcctcacttacgatcatagct

SEQ ID NO: 15107 - DNA, 25 bp, Artificial
  Probe
aatgacttctcacattatagagttg

SEQ ID NO: 15108 - DNA, 25 bp, Artificial
  Probe
caatgacttctcacattatagagtt

SEQ ID NO: 15109 - DNA, 25 bp, Artificial
  Probe
cttctcagattatgccaacttcaag

SEQ ID NO: 15110 - DNA, 25 bp, Artificial
  Probe
ccttctcagattatgccaacttcaa

SEQ ID NO: 15111 - DNA, 25 bp, Artificial
  Probe
ccacactaggaatcatcaggtaata

SEQ ID NO: 15112 - DNA, 25 bp, Artificial
  Probe
aacataagagtcattccaggtaact

SEQ ID NO: 15113 - DNA, 25 bp, Artificial
  Probe
tgtaatgctaacagaactggaagaa

SEQ ID NO: 15114 - DNA, 25 bp, Artificial
  Probe
ttgtaatgctaacagaactggaaga

SEQ ID NO: 15115 - DNA, 25 bp, Artificial
  Probe
attgtaatgctaacagaactggaag

SEQ ID NO: 15116 - DNA, 25 bp, Artificial
  Probe
ttctcagattatgccaacttcaagt

SEQ ID NO: 15117 - DNA, 25 bp, Artificial
  Probe
ctccattgtaatgctaacagaactg

SEQ ID NO: 15118 - DNA, 25 bp, Artificial
  Probe
cattgtaatgctaacagaactggaa

SEQ ID NO: 15119 - DNA, 25 bp, Artificial
  Probe
ctcagattatgccaacttcaagtga

SEQ ID NO: 15120 - DNA, 25 bp, Artificial
  Probe
tctcagattatgccaacttcaagtg

SEQ ID NO: 15121 - DNA, 25 bp, Artificial
  Probe
cacactaggaatcatcaggtaataa

SEQ ID NO: 15122 - DNA, 25 bp, Artificial
  Probe
agattatgccaacttcaagtgacag

SEQ ID NO: 15123 - DNA, 25 bp, Artificial
  Probe
tcagattatgccaacttcaagtgac

SEQ ID NO: 15124 - DNA, 25 bp, Artificial
  Probe
gctccattgtaatgctaacagaact

SEQ ID NO: 15125 - DNA, 25 bp, Artificial
  Probe
cagattatgccaacttcaagtgaca

SEQ ID NO: 15126 - DNA, 25 bp, Artificial
  Probe
atgccttctcagattatgccaactt

SEQ ID NO: 15127 - DNA, 25 bp, Artificial
  Probe
ctgctccattgtaatgctaacagaa

SEQ ID NO: 15128 - DNA, 25 bp, Artificial
  Probe
tgctccattgtaatgctaacagaac

SEQ ID NO: 15129 - DNA, 25 bp, Artificial
  Probe
aatggcacataggcttctattacct

SEQ ID NO: 15130 - DNA, 25 bp, Artificial
  Probe
aagtcctgctccattgtaatgctaa

SEQ ID NO: 15131 - DNA, 25 bp, Artificial
  Probe
accacactaggaatcatcaggtaat

SEQ ID NO: 15132 - DNA, 25 bp, Artificial
  Probe
gcaacaatggactagaggaggaatt

SEQ ID NO: 15133 - DNA, 25 bp, Artificial
  Probe
acaaacataagagtcattccaggta

SEQ ID NO: 15134 - DNA, 25 bp, Artificial
  Probe
aggtaataaacactcttgattcccg

SEQ ID NO: 15135 - DNA, 25 bp, Artificial
  Probe
caggtaataaacactcttgattccc

SEQ ID NO: 15136 - DNA, 25 bp, Artificial
  Probe
ccattgtaatgctaacagaactgga

SEQ ID NO: 15137 - DNA, 25 bp, Artificial
  Probe
tccattgtaatgctaacagaactgg

SEQ ID NO: 15138 - DNA, 25 bp, Artificial
  Probe
gattatgccaacttcaagtgacagg

SEQ ID NO: 15139 - DNA, 25 bp, Artificial
  Probe
gatgccttctcagattatgccaact

SEQ ID NO: 15140 - DNA, 25 bp, Artificial
  Probe
aatgctaacagaactggaagaaaga

SEQ ID NO: 15141 - DNA, 25 bp, Artificial
  Probe
tagcaacaatggactagaggaggaa

SEQ ID NO: 15142 - DNA, 25 bp, Artificial
  Probe
gtaatgctaacagaactggaagaaa

SEQ ID NO: 15143 - DNA, 25 bp, Artificial
  Probe
aaacataagagtcattccaggtaac

SEQ ID NO: 15144 - DNA, 25 bp, Artificial
  Probe
caaacataagagtcattccaggtaa

SEQ ID NO: 15145 - DNA, 25 bp, Artificial
  Probe
gccttctcagattatgccaacttca

SEQ ID NO: 15146 - DNA, 25 bp, Artificial
  Probe
tgccttctcagattatgccaacttc

SEQ ID NO: 15147 - DNA, 25 bp, Artificial
  Probe
gaagtcctgctccattgtaatgcta

SEQ ID NO: 15148 - DNA, 25 bp, Artificial
  Probe
atgctaacagaactggaagaaagag

SEQ ID NO: 15149 - DNA, 25 bp, Artificial
  Probe
taatgctaacagaactggaagaaag

SEQ ID NO: 15150 - DNA, 25 bp, Artificial
  Probe
caacaatggactagaggaggaattt

SEQ ID NO: 15151 - DNA, 25 bp, Artificial
  Probe
acaatggactagaggaggaatttaa

SEQ ID NO: 15152 - DNA, 25 bp, Artificial
  Probe
aacaatggactagaggaggaattta

SEQ ID NO: 15153 - DNA, 25 bp, Artificial
  Probe
caccacactaggaatcatcaggtaa

SEQ ID NO: 15154 - DNA, 25 bp, Artificial
  Probe
ccagcagcgtagatttcataataaa

SEQ ID NO: 15155 - DNA, 25 bp, Artificial
  Probe
cccagcagcgtagatttcataataa

SEQ ID NO: 15156 - DNA, 25 bp, Artificial
  Probe
tatacccagcagcgtagatttcata

SEQ ID NO: 15157 - DNA, 25 bp, Artificial
  Probe
agcagcgtagatttcataataaagt

SEQ ID NO: 15158 - DNA, 25 bp, Artificial
  Probe
cagcagcgtagatttcataataaag

SEQ ID NO: 15159 - DNA, 25 bp, Artificial
  Probe
acccagcagcgtagatttcataata

SEQ ID NO: 15160 - DNA, 25 bp, Artificial
  Probe
tacccagcagcgtagatttcataat

SEQ ID NO: 15161 - DNA, 25 bp, Artificial
  Probe
atacccagcagcgtagatttcataa

SEQ ID NO: 15162 - DNA, 25 bp, Artificial
  Probe
ctgttgttctgttgactgtgtgttt

SEQ ID NO: 15163 - DNA, 25 bp, Artificial
  Probe
ctatacccagcagcgtagatttcat

SEQ ID NO: 15164 - DNA, 25 bp, Artificial
  Probe
tgttgttctgttgactgtgtgtttg

SEQ ID NO: 15165 - DNA, 25 bp, Artificial
  Probe
gcagcgtagatttcataataaagta

SEQ ID NO: 15166 - DNA, 25 bp, Artificial
  Probe
gttctgttgactgtgtgtttggaag

SEQ ID NO: 15167 - DNA, 25 bp, Artificial
  Probe
atttctatacccagcagcgtagatt

SEQ ID NO: 15168 - DNA, 25 bp, Artificial
  Probe
tttctatacccagcagcgtagattt

SEQ ID NO: 15169 - DNA, 25 bp, Artificial
  Probe
gttgttctgttgactgtgtgtttgg

SEQ ID NO: 15170 - DNA, 25 bp, Artificial
  Probe
ttgttctgttgactgtgtgtttgga

SEQ ID NO: 15171 - DNA, 25 bp, Artificial
  Probe
ctggaacgtctgattgaagaggaag

SEQ ID NO: 15172 - DNA, 25 bp, Artificial
  Probe
ttctatacccagcagcgtagatttc

SEQ ID NO: 15173 - DNA, 25 bp, Artificial
  Probe
gctgttgttctgttgactgtgtgtt

SEQ ID NO: 15174 - DNA, 25 bp, Artificial
  Probe
tgttctgttgactgtgtgtttggaa

SEQ ID NO: 15175 - DNA, 25 bp, Artificial
  Probe
catttctatacccagcagcgtagat

SEQ ID NO: 15176 - DNA, 25 bp, Artificial
  Probe
tctggaacgtctgattgaagaggaa

SEQ ID NO: 15177 - DNA, 25 bp, Artificial
  Probe
tcataataaagtaatgtgttgtgga

SEQ ID NO: 15178 - DNA, 25 bp, Artificial
  Probe
ttctgttgactgtgtgtttggaagg

SEQ ID NO: 15179 - DNA, 25 bp, Artificial
  Probe
gaagctgggcagaagaagatgtaat

SEQ ID NO: 15180 - DNA, 25 bp, Artificial
  Probe
gaacgtctgattgaagaggaagctg

SEQ ID NO: 15181 - DNA, 25 bp, Artificial
  Probe
gagatccatgacctgttacagctct

SEQ ID NO: 15182 - DNA, 25 bp, Artificial
  Probe
aagctgggcagaagaagatgtaatg

SEQ ID NO: 15183 - DNA, 25 bp, Artificial
  Probe
atccatgacctgttacagctctgta

SEQ ID NO: 15184 - DNA, 25 bp, Artificial
  Probe
tctatacccagcagcgtagatttca

SEQ ID NO: 15185 - DNA, 25 bp, Artificial
  Probe
agatccatgacctgttacagctctg

SEQ ID NO: 15186 - DNA, 25 bp, Artificial
  Probe
tgagatccatgacctgttacagctc

SEQ ID NO: 15187 - DNA, 25 bp, Artificial
  Probe
ctgagatccatgacctgttacagct

SEQ ID NO: 15188 - DNA, 25 bp, Artificial
  Probe
gatccatgacctgttacagctctgt

SEQ ID NO: 15189 - DNA, 25 bp, Artificial
  Probe
ttcataataaagtaatgtgttgtgg

SEQ ID NO: 15190 - DNA, 25 bp, Artificial
  Probe
tgacattgacgctgagatccatgac

SEQ ID NO: 15191 - DNA, 25 bp, Artificial
  Probe
gtgacattgacgctgagatccatga

SEQ ID NO: 15192 - DNA, 25 bp, Artificial
  Probe
cataataaagtaatgtgttgtggat

SEQ ID NO: 15193 - DNA, 25 bp, Artificial
  Probe
gacgctgagatccatgacctgttac

SEQ ID NO: 15194 - DNA, 25 bp, Artificial
  Probe
ttgtgtgggcttccgcatttctata

SEQ ID NO: 15195 - DNA, 25 bp, Artificial
  Probe
ggaacgtctgattgaagaggaagct

SEQ ID NO: 15196 - DNA, 25 bp, Artificial
  Probe
cagcgtagatttcataataaagtaa

SEQ ID NO: 15197 - DNA, 25 bp, Artificial
  Probe
aaggaggaggatcaaatggcagaac

SEQ ID NO: 15198 - DNA, 25 bp, Artificial
  Probe
caaggaggaggatcaaatggcagaa

SEQ ID NO: 15199 - DNA, 25 bp, Artificial
  Probe
acaaggaagtaatgaactcagaaga

SEQ ID NO: 15200 - DNA, 25 bp, Artificial
  Probe
aactcagaagagaagactaagaacg

SEQ ID NO: 15201 - DNA, 25 bp, Artificial
  Probe
tctacaaggaagtaatgaactcaga

SEQ ID NO: 15202 - DNA, 25 bp, Artificial
  Probe
aggaagtaatgaactcagaagagaa

SEQ ID NO: 15203 - DNA, 25 bp, Artificial
  Probe
aaggaagtaatgaactcagaagaga

SEQ ID NO: 15204 - DNA, 25 bp, Artificial
  Probe
caaggaagtaatgaactcagaagag

SEQ ID NO: 15205 - DNA, 25 bp, Artificial
  Probe
agtaatgaactcagaagagaagact

SEQ ID NO: 15206 - DNA, 25 bp, Artificial
  Probe
ggaagtaatgaactcagaagagaag

SEQ ID NO: 15207 - DNA, 25 bp, Artificial
  Probe
tgaactcagaagagaagactaagaa

SEQ ID NO: 15208 - DNA, 25 bp, Artificial
  Probe
gaactcagaagagaagactaagaac

SEQ ID NO: 15209 - DNA, 25 bp, Artificial
  Probe
atgaactcagaagagaagactaaga

SEQ ID NO: 15210 - DNA, 25 bp, Artificial
  Probe
actcagaagagaagactaagaacgg

SEQ ID NO: 15211 - DNA, 25 bp, Artificial
  Probe
tacaaggaagtaatgaactcagaag

SEQ ID NO: 15212 - DNA, 25 bp, Artificial
  Probe
ctacaaggaagtaatgaactcagaa

SEQ ID NO: 15213 - DNA, 25 bp, Artificial
  Probe
catctacaaggaagtaatgaactca

SEQ ID NO: 15214 - DNA, 25 bp, Artificial
  Probe
aagtaatgaactcagaagagaagac

SEQ ID NO: 15215 - DNA, 25 bp, Artificial
  Probe
atctacaaggaagtaatgaactcag

SEQ ID NO: 15216 - DNA, 25 bp, Artificial
  Probe
agaactcatctacaaggaagtaatg

SEQ ID NO: 15217 - DNA, 25 bp, Artificial
  Probe
gaagtaatgaactcagaagagaaga

SEQ ID NO: 15218 - DNA, 25 bp, Artificial
  Probe
aatgaactcagaagagaagactaag

SEQ ID NO: 15219 - DNA, 25 bp, Artificial
  Probe
gtaatgaactcagaagagaagacta

SEQ ID NO: 15220 - DNA, 25 bp, Artificial
  Probe
ctaagttaaatctttctgcgtgctt

SEQ ID NO: 15221 - DNA, 25 bp, Artificial
  Probe
taagttaaatctttctgcgtgcttc

SEQ ID NO: 15222 - DNA, 25 bp, Artificial
  Probe
aagaactcatctacaaggaagtaat

SEQ ID NO: 15223 - DNA, 25 bp, Artificial
  Probe
tggaaagaactcatctacaaggaag

SEQ ID NO: 15224 - DNA, 25 bp, Artificial
  Probe
atggaaagaactcatctacaaggaa

SEQ ID NO: 15225 - DNA, 25 bp, Artificial
  Probe
aatggaaagaactcatctacaagga

SEQ ID NO: 15226 - DNA, 25 bp, Artificial
  Probe
cgaagaatggaaagaactcatctac

SEQ ID NO: 15227 - DNA, 25 bp, Artificial
  Probe
gaatggaaagaactcatctacaagg

SEQ ID NO: 15228 - DNA, 25 bp, Artificial
  Probe
ctcagaagagaagactaagaacggc

SEQ ID NO: 15229 - DNA, 25 bp, Artificial
  Probe
gaagagaagactaagaacggcgtag

SEQ ID NO: 15230 - DNA, 25 bp, Artificial
  Probe
actaagttaaatctttctgcgtgct

SEQ ID NO: 15231 - DNA, 25 bp, Artificial
  Probe
ggaaagaactcatctacaaggaagt

SEQ ID NO: 15232 - DNA, 25 bp, Artificial
  Probe
gaagaatggaaagaactcatctaca

SEQ ID NO: 15233 - DNA, 25 bp, Artificial
  Probe
aagttaaatctttctgcgtgcttct

SEQ ID NO: 15234 - DNA, 25 bp, Artificial
  Probe
agaatggaaagaactcatctacaag

SEQ ID NO: 15235 - DNA, 25 bp, Artificial
  Probe
agttaaatctttctgcgtgcttctc

SEQ ID NO: 15236 - DNA, 25 bp, Artificial
  Probe
aactaagttaaatctttctgcgtgc

SEQ ID NO: 15237 - DNA, 25 bp, Artificial
  Probe
agaagagaagactaagaacggcgta

SEQ ID NO: 15238 - DNA, 25 bp, Artificial
  Probe
taatgaactcagaagagaagactaa

SEQ ID NO: 15239 - DNA, 25 bp, Artificial
  Probe
aagaatggaaagaactcatctacaa

SEQ ID NO: 15240 - DNA, 25 bp, Artificial
  Probe
aaactaagttaaatctttctgcgtg

SEQ ID NO: 15241 - DNA, 25 bp, Artificial
  Probe
gaaagaactcatctacaaggaagta

SEQ ID NO: 15242 - DNA, 25 bp, Artificial
  Probe
actcatctacaaggaagtaatgaac

SEQ ID NO: 15243 - DNA, 25 bp, Artificial
  Probe
catcgaagaatggaaagaactcatc

SEQ ID NO: 15244 - DNA, 25 bp, Artificial
  Probe
caaggcagaagagaggaggattatc

SEQ ID NO: 15245 - DNA, 25 bp, Artificial
  Probe
aaggcagaagagaggaggattatct

SEQ ID NO: 15246 - DNA, 25 bp, Artificial
  Probe
cttaattagccaaggcagaagagag

SEQ ID NO: 15247 - DNA, 25 bp, Artificial
  Probe
ttaattagccaaggcagaagagagg

SEQ ID NO: 15248 - DNA, 25 bp, Artificial
  Probe
ccaaggcagaagagaggaggattat

SEQ ID NO: 15249 - DNA, 25 bp, Artificial
  Probe
agaagagaggaggattatctggtcc

SEQ ID NO: 15250 - DNA, 25 bp, Artificial
  Probe
gaagagaggaggattatctggtcca

SEQ ID NO: 15251 - DNA, 25 bp, Artificial
  Probe
taattagccaaggcagaagagagga

SEQ ID NO: 15252 - DNA, 25 bp, Artificial
  Probe
aagagaggaggattatctggtccag

SEQ ID NO: 15253 - DNA, 25 bp, Artificial
  Probe
gcttaattagccaaggcagaagaga

SEQ ID NO: 15254 - DNA, 25 bp, Artificial
  Probe
aattagccaaggcagaagagaggag

SEQ ID NO: 15255 - DNA, 25 bp, Artificial
  Probe
cagaagagaggaggattatctggtc

SEQ ID NO: 15256 - DNA, 25 bp, Artificial
  Probe
gaactttgtctgcttcttaccaggt

SEQ ID NO: 15257 - DNA, 25 bp, Artificial
  Probe
aactttgtctgcttcttaccaggtg

SEQ ID NO: 15258 - DNA, 25 bp, Artificial
  Probe
ggaactttgtctgcttcttaccagg

SEQ ID NO: 15259 - DNA, 25 bp, Artificial
  Probe
gggaactttgtctgcttcttaccag

SEQ ID NO: 15260 - DNA, 25 bp, Artificial
  Probe
cgacgtaccatgtatttcagtgaaa

SEQ ID NO: 15261 - DNA, 25 bp, Artificial
  Probe
aggcagaagagaggaggattatctg

SEQ ID NO: 15262 - DNA, 25 bp, Artificial
  Probe
agagaggaggattatctggtccagg

SEQ ID NO: 15263 - DNA, 25 bp, Artificial
  Probe
cgcttaattagccaaggcagaagag

SEQ ID NO: 15264 - DNA, 25 bp, Artificial
  Probe
gcgacgtaccatgtatttcagtgaa

SEQ ID NO: 15265 - DNA, 25 bp, Artificial
  Probe
gcagaagagaggaggattatctggt

SEQ ID NO: 15266 - DNA, 25 bp, Artificial
  Probe
tacttttgcctttccttaagccttt

SEQ ID NO: 15267 - DNA, 25 bp, Artificial
  Probe
tgggaactttgtctgcttcttacca

SEQ ID NO: 15268 - DNA, 25 bp, Artificial
  Probe
gactactttcctgggactctccatg

SEQ ID NO: 15269 - DNA, 25 bp, Artificial
  Probe
ggcagaagagaggaggattatctgg

SEQ ID NO: 15270 - DNA, 25 bp, Artificial
  Probe
gtacttttgcctttccttaagcctt

SEQ ID NO: 15271 - DNA, 25 bp, Artificial
  Probe
actttgtctgcttcttaccaggtgg

SEQ ID NO: 15272 - DNA, 25 bp, Artificial
  Probe
actactttcctgggactctccatgt

SEQ ID NO: 15273 - DNA, 25 bp, Artificial
  Probe
acttttgcctttccttaagcctttg

SEQ ID NO: 15274 - DNA, 25 bp, Artificial
  Probe
agtacttttgcctttccttaagcct

SEQ ID NO: 15275 - DNA, 25 bp, Artificial
  Probe
cagtacttttgcctttccttaagcc

SEQ ID NO: 15276 - DNA, 25 bp, Artificial
  Probe
ccagtacttttgcctttccttaagc

SEQ ID NO: 15277 - DNA, 25 bp, Artificial
  Probe
gccagtacttttgcctttccttaag

SEQ ID NO: 15278 - DNA, 25 bp, Artificial
  Probe
gacgtaccatgtatttcagtgaaat

SEQ ID NO: 15279 - DNA, 25 bp, Artificial
  Probe
cctggttaggaagggactactcgat

SEQ ID NO: 15280 - DNA, 25 bp, Artificial
  Probe
ggcgacgtaccatgtatttcagtga

SEQ ID NO: 15281 - DNA, 25 bp, Artificial
  Probe
ctgacaggaaaggcagaggagtttc

SEQ ID NO: 15282 - DNA, 25 bp, Artificial
  Probe
cttttgcctttccttaagcctttgc

SEQ ID NO: 15283 - DNA, 25 bp, Artificial
  Probe
cttaagcctttgccaccagttctct

SEQ ID NO: 15284 - DNA, 25 bp, Artificial
  Probe
tttccttaagcctttgccaccagtt

SEQ ID NO: 15285 - DNA, 25 bp, Artificial
  Probe
ttttgcctttccttaagcctttgcc

SEQ ID NO: 15286 - DNA, 25 bp, Artificial
  Probe
ggccagtacttttgcctttccttaa

SEQ ID NO: 15287 - DNA, 25 bp, Artificial
  Probe
ccttctgtttattcttctctccctt

SEQ ID NO: 15288 - DNA, 25 bp, Artificial
  Probe
tttctgtctgtttatctgtctgtct

SEQ ID NO: 15289 - DNA, 25 bp, Artificial
  Probe
ttattcttctctcccttatcactgg

SEQ ID NO: 15290 - DNA, 25 bp, Artificial
  Probe
gtgataaatggaagaactctgaggt

SEQ ID NO: 15291 - DNA, 25 bp, Artificial
  Probe
tgtgataaatggaagaactctgagg

SEQ ID NO: 15292 - DNA, 25 bp, Artificial
  Probe
catttctgtctgtttatctgtctgt

SEQ ID NO: 15293 - DNA, 25 bp, Artificial
  Probe
gtgtgataaatggaagaactctgag

SEQ ID NO: 15294 - DNA, 25 bp, Artificial
  Probe
ttctgtctgtttatctgtctgtcta

SEQ ID NO: 15295 - DNA, 25 bp, Artificial
  Probe
atttctgtctgtttatctgtctgtc

SEQ ID NO: 15296 - DNA, 25 bp, Artificial
  Probe
gtagctgtcaatcttgagacttagt

SEQ ID NO: 15297 - DNA, 25 bp, Artificial
  Probe
tgtagctgtcaatcttgagacttag

SEQ ID NO: 15298 - DNA, 25 bp, Artificial
  Probe
ctgtagctgtcaatcttgagactta

SEQ ID NO: 15299 - DNA, 25 bp, Artificial
  Probe
ggaaggcaaatacaaattcaaactg

SEQ ID NO: 15300 - DNA, 25 bp, Artificial
  Probe
aggaaggcaaatacaaattcaaact

SEQ ID NO: 15301 - DNA, 25 bp, Artificial
  Probe
tgtctgtttatctgtctgtctatct

SEQ ID NO: 15302 - DNA, 25 bp, Artificial
  Probe
tctgtctgtttatctgtctgtctat

SEQ ID NO: 15303 - DNA, 25 bp, Artificial
  Probe
tattcttctctcccttatcactggc

SEQ ID NO: 15304 - DNA, 25 bp, Artificial
  Probe
tagctgtcaatcttgagacttagtt

SEQ ID NO: 15305 - DNA, 25 bp, Artificial
  Probe
tgataaatggaagaactctgaggta

SEQ ID NO: 15306 - DNA, 25 bp, Artificial
  Probe
ctgtctgtttatctgtctgtctatc

SEQ ID NO: 15307 - DNA, 25 bp, Artificial
  Probe
ataagaagagaatctggagggtgag

SEQ ID NO: 15308 - DNA, 25 bp, Artificial
  Probe
gataagaagagaatctggagggtga

SEQ ID NO: 15309 - DNA, 25 bp, Artificial
  Probe
aaggaaggcaaatacaaattcaaac

SEQ ID NO: 15310 - DNA, 25 bp, Artificial
  Probe
agtgtgataaatggaagaactctga

SEQ ID NO: 15311 - DNA, 25 bp, Artificial
  Probe
acagtgtgataaatggaagaactct

SEQ ID NO: 15312 - DNA, 25 bp, Artificial
  Probe
cctgtgattcaacttacatttctgt

SEQ ID NO: 15313 - DNA, 25 bp, Artificial
  Probe
tcctgtgattcaacttacatttctg

SEQ ID NO: 15314 - DNA, 25 bp, Artificial
  Probe
cttctctcccttatcactggcatag

SEQ ID NO: 15315 - DNA, 25 bp, Artificial
  Probe
tgtttattcttctctcccttatcac

SEQ ID NO: 15316 - DNA, 25 bp, Artificial
  Probe
gccttctgtttattcttctctccct

SEQ ID NO: 15317 - DNA, 25 bp, Artificial
  Probe
agccttctgtttattcttctctccc

SEQ ID NO: 15318 - DNA, 25 bp, Artificial
  Probe
acatttctgtctgtttatctgtctg

SEQ ID NO: 15319 - DNA, 25 bp, Artificial
  Probe
aaaggaaggcaaatacaaattcaaa

SEQ ID NO: 15320 - DNA, 25 bp, Artificial
  Probe
cagtgtgataaatggaagaactctg

SEQ ID NO: 15321 - DNA, 25 bp, Artificial
  Probe
gaagagaatctggagggtgagaatt

SEQ ID NO: 15322 - DNA, 25 bp, Artificial
  Probe
tcttctctcccttatcactggcata

SEQ ID NO: 15323 - DNA, 25 bp, Artificial
  Probe
tttattcttctctcccttatcactg

SEQ ID NO: 15324 - DNA, 25 bp, Artificial
  Probe
gtttattcttctctcccttatcact

SEQ ID NO: 15325 - DNA, 25 bp, Artificial
  Probe
ctgtttattcttctctcccttatca

SEQ ID NO: 15326 - DNA, 25 bp, Artificial
  Probe
taagaagagaatctggagggtgaga

SEQ ID NO: 15327 - DNA, 25 bp, Artificial
  Probe
ataaatggaagaactctgaggtatc

SEQ ID NO: 15328 - DNA, 25 bp, Artificial
  Probe
gataaatggaagaactctgaggtat

SEQ ID NO: 15329 - DNA, 25 bp, Artificial
  Probe
cttctgtttattcttctctccctta

SEQ ID NO: 15330 - DNA, 25 bp, Artificial
  Probe
tgattcaacttacatttctgtctgt

SEQ ID NO: 15331 - DNA, 25 bp, Artificial
  Probe
tgtgattcaacttacatttctgtct

SEQ ID NO: 15332 - DNA, 25 bp, Artificial
  Probe
gtatatgaacaggatgacttgagcg

SEQ ID NO: 15333 - DNA, 25 bp, Artificial
  Probe
tatatgaacaggatgacttgagcga

SEQ ID NO: 15334 - DNA, 25 bp, Artificial
  Probe
ccagtgtatatgaacaggatgactt

SEQ ID NO: 15335 - DNA, 25 bp, Artificial
  Probe
tgtatatgaacaggatgacttgagc

SEQ ID NO: 15336 - DNA, 25 bp, Artificial
  Probe
cagtgtatatgaacaggatgacttg

SEQ ID NO: 15337 - DNA, 25 bp, Artificial
  Probe
agtgtatatgaacaggatgacttga

SEQ ID NO: 15338 - DNA, 25 bp, Artificial
  Probe
gtgtatatgaacaggatgacttgag

SEQ ID NO: 15339 - DNA, 25 bp, Artificial
  Probe
atatgaacaggatgacttgagcgaa

SEQ ID NO: 15340 - DNA, 25 bp, Artificial
  Probe
tatgaacaggatgacttgagcgaac

SEQ ID NO: 15341 - DNA, 25 bp, Artificial
  Probe
gccagtgtatatgaacaggatgact

SEQ ID NO: 15342 - DNA, 25 bp, Artificial
  Probe
agccagtgtatatgaacaggatgac

SEQ ID NO: 15343 - DNA, 25 bp, Artificial
  Probe
cagccagtgtatatgaacaggatga

SEQ ID NO: 15344 - DNA, 25 bp, Artificial
  Probe
gcataccaattatccataaacagca

SEQ ID NO: 15345 - DNA, 25 bp, Artificial
  Probe
agcataccaattatccataaacagc

SEQ ID NO: 15346 - DNA, 25 bp, Artificial
  Probe
taccaattatccataaacagcacac

SEQ ID NO: 15347 - DNA, 25 bp, Artificial
  Probe
gggaactttacagcataccaattat

SEQ ID NO: 15348 - DNA, 25 bp, Artificial
  Probe
tgaagtgtctgaagagagtcacaag

SEQ ID NO: 15349 - DNA, 25 bp, Artificial
  Probe
ctgaagtgtctgaagagagtcacaa

SEQ ID NO: 15350 - DNA, 25 bp, Artificial
  Probe
gcatcttaactacaaagtcaaggtg

SEQ ID NO: 15351 - DNA, 25 bp, Artificial
  Probe
ccaattatccataaacagcacacct

SEQ ID NO: 15352 - DNA, 25 bp, Artificial
  Probe
atcaggaatcaaagcaaagatggtc

SEQ ID NO: 15353 - DNA, 25 bp, Artificial
  Probe
ggacatcaggaatcaaagcaaagat

SEQ ID NO: 15354 - DNA, 25 bp, Artificial
  Probe
gaagaaatctgtaacccatcctaga

SEQ ID NO: 15355 - DNA, 25 bp, Artificial
  Probe
agaagaaatctgtaacccatcctag

SEQ ID NO: 15356 - DNA, 25 bp, Artificial
  Probe
ttaactacaaagtcaaggtgaagtg

SEQ ID NO: 15357 - DNA, 25 bp, Artificial
  Probe
accaattatccataaacagcacacc

SEQ ID NO: 15358 - DNA, 25 bp, Artificial
  Probe
ataccaattatccataaacagcaca

SEQ ID NO: 15359 - DNA, 25 bp, Artificial
  Probe
acagcataccaattatccataaaca

SEQ ID NO: 15360 - DNA, 25 bp, Artificial
  Probe
aactttacagcataccaattatcca

SEQ ID NO: 15361 - DNA, 25 bp, Artificial
  Probe
cttaactacaaagtcaaggtgaagt

SEQ ID NO: 15362 - DNA, 25 bp, Artificial
  Probe
atggacatcaggaatcaaagcaaag

SEQ ID NO: 15363 - DNA, 25 bp, Artificial
  Probe
cataccaattatccataaacagcac

SEQ ID NO: 15364 - DNA, 25 bp, Artificial
  Probe
actttacagcataccaattatccat

SEQ ID NO: 15365 - DNA, 25 bp, Artificial
  Probe
taactacaaagtcaaggtgaagtgc

SEQ ID NO: 15366 - DNA, 25 bp, Artificial
  Probe
caggaatcaaagcaaagatggtcat

SEQ ID NO: 15367 - DNA, 25 bp, Artificial
  Probe
tcttaactacaaagtcaaggtgaag

SEQ ID NO: 15368 - DNA, 25 bp, Artificial
  Probe
catcttaactacaaagtcaaggtga

SEQ ID NO: 15369 - DNA, 25 bp, Artificial
  Probe
ccagccagtgtatatgaacaggatg

SEQ ID NO: 15370 - DNA, 25 bp, Artificial
  Probe
cagttaagaaacatctgaagcactt

SEQ ID NO: 15371 - DNA, 25 bp, Artificial
  Probe
catccagttaagaaacatctgaagc

SEQ ID NO: 15372 - DNA, 25 bp, Artificial
  Probe
accatccagttaagaaacatctgaa

SEQ ID NO: 15373 - DNA, 25 bp, Artificial
  Probe
cagcataccaattatccataaacag

SEQ ID NO: 15374 - DNA, 25 bp, Artificial
  Probe
atccagttaagaaacatctgaagca

SEQ ID NO: 15375 - DNA, 25 bp, Artificial
  Probe
ccatccagttaagaaacatctgaag

SEQ ID NO: 15376 - DNA, 25 bp, Artificial
  Probe
ctagatggacatcaggaatcaaagc

SEQ ID NO: 15377 - DNA, 25 bp, Artificial
  Probe
ctgatctgatcttgcttgttccata

SEQ ID NO: 15378 - DNA, 25 bp, Artificial
  Probe
tgatctgatcttgcttgttccatac

SEQ ID NO: 15379 - DNA, 25 bp, Artificial
  Probe
atcttgcttgttccatacatacaca

SEQ ID NO: 15380 - DNA, 25 bp, Artificial
  Probe
gatcttgcttgttccatacatacac

SEQ ID NO: 15381 - DNA, 25 bp, Artificial
  Probe
tgatcttgcttgttccatacataca

SEQ ID NO: 15382 - DNA, 25 bp, Artificial
  Probe
ctgatcttgcttgttccatacatac

SEQ ID NO: 15383 - DNA, 25 bp, Artificial
  Probe
tctgatcttgcttgttccatacata

SEQ ID NO: 15384 - DNA, 25 bp, Artificial
  Probe
atctgatcttgcttgttccatacat

SEQ ID NO: 15385 - DNA, 25 bp, Artificial
  Probe
gatctgatcttgcttgttccataca

SEQ ID NO: 15386 - DNA, 25 bp, Artificial
  Probe
tgtgacaacaaggaggacattctta

SEQ ID NO: 15387 - DNA, 25 bp, Artificial
  Probe
gttcacctgttaatgaggatcttgg

SEQ ID NO: 15388 - DNA, 25 bp, Artificial
  Probe
ggttcacctgttaatgaggatcttg

SEQ ID NO: 15389 - DNA, 25 bp, Artificial
  Probe
acctaattgcctttcttgtggatat

SEQ ID NO: 15390 - DNA, 25 bp, Artificial
  Probe
tacctaattgcctttcttgtggata

SEQ ID NO: 15391 - DNA, 25 bp, Artificial
  Probe
acacaattagtttagaggtagccac

SEQ ID NO: 15392 - DNA, 25 bp, Artificial
  Probe
ctacctaattgcctttcttgtggat

SEQ ID NO: 15393 - DNA, 25 bp, Artificial
  Probe
tacacaattagtttagaggtagcca

SEQ ID NO: 15394 - DNA, 25 bp, Artificial
  Probe
gtcatttctaataccactggctaca

SEQ ID NO: 15395 - DNA, 25 bp, Artificial
  Probe
gaaataactctgtgtggaaccaaag

SEQ ID NO: 15396 - DNA, 25 bp, Artificial
  Probe
ggatatctatgaagacatgctggaa

SEQ ID NO: 15397 - DNA, 25 bp, Artificial
  Probe
tggatatctatgaagacatgctgga

SEQ ID NO: 15398 - DNA, 25 bp, Artificial
  Probe
gtggatatctatgaagacatgctgg

SEQ ID NO: 15399 - DNA, 25 bp, Artificial
  Probe
aaataactctgtgtggaaccaaaga

SEQ ID NO: 15400 - DNA, 25 bp, Artificial
  Probe
agaaataactctgtgtggaaccaaa

SEQ ID NO: 15401 - DNA, 25 bp, Artificial
  Probe
atgtgagaaataactctgtgtggaa

SEQ ID NO: 15402 - DNA, 25 bp, Artificial
  Probe
gaggatgtgagaaataactctgtgt

SEQ ID NO: 15403 - DNA, 25 bp, Artificial
  Probe
gatgtgagaaataactctgtgtgga

SEQ ID NO: 15404 - DNA, 25 bp, Artificial
  Probe
aggatgtgagaaataactctgtgtg

SEQ ID NO: 15405 - DNA, 25 bp, Artificial
  Probe
agattgtgctacatcttgatccatg

SEQ ID NO: 15406 - DNA, 25 bp, Artificial
  Probe
tgtggatatctatgaagacatgctg

SEQ ID NO: 15407 - DNA, 25 bp, Artificial
  Probe
ttgtggatatctatgaagacatgct

SEQ ID NO: 15408 - DNA, 25 bp, Artificial
  Probe
tgtgagaaataactctgtgtggaac

SEQ ID NO: 15409 - DNA, 25 bp, Artificial
  Probe
aataactctgtgtggaaccaaagac

SEQ ID NO: 15410 - DNA, 25 bp, Artificial
  Probe
cttgtggatatctatgaagacatgc

SEQ ID NO: 15411 - DNA, 25 bp, Artificial
  Probe
atacacaattagtttagaggtagcc

SEQ ID NO: 15412 - DNA, 25 bp, Artificial
  Probe
gagaaataactctgtgtggaaccaa

SEQ ID NO: 15413 - DNA, 25 bp, Artificial
  Probe
tcatttctaataccactggctacag

SEQ ID NO: 15414 - DNA, 25 bp, Artificial
  Probe
ggatgtgagaaataactctgtgtgg

SEQ ID NO: 15415 - DNA, 25 bp, Artificial
  Probe
tcaaagaggatgtgagaaataactc

SEQ ID NO: 15416 - DNA, 25 bp, Artificial
  Probe
cggttcacctgttaatgaggatctt

SEQ ID NO: 15417 - DNA, 25 bp, Artificial
  Probe
gtgagaaataactctgtgtggaacc

SEQ ID NO: 15418 - DNA, 25 bp, Artificial
  Probe
gtgtgacaacaaggaggacattctt

SEQ ID NO: 15419 - DNA, 25 bp, Artificial
  Probe
gctgatctgatcttgcttgttccat

SEQ ID NO: 15420 - DNA, 25 bp, Artificial
  Probe
gatggactatgtcatttgtggtgag

SEQ ID NO: 15421 - DNA, 25 bp, Artificial
  Probe
cctacctaattgcctttcttgtgga

SEQ ID NO: 15422 - DNA, 25 bp, Artificial
  Probe
gatgaatctgacgaatctcaccatt

SEQ ID NO: 15423 - DNA, 25 bp, Artificial
  Probe
gagttcatcttctgaggtcaattaa

SEQ ID NO: 15424 - DNA, 25 bp, Artificial
  Probe
atgaatctgacgaatctcaccattc

SEQ ID NO: 15425 - DNA, 25 bp, Artificial
  Probe
ttctgtgaactcggatgaatctgac

SEQ ID NO: 15426 - DNA, 25 bp, Artificial
  Probe
ggatgaatctgacgaatctcaccat

SEQ ID NO: 15427 - DNA, 25 bp, Artificial
  Probe
tgaggtcaattaaagaagaggcaaa

SEQ ID NO: 15428 - DNA, 25 bp, Artificial
  Probe
gaaacggatgactttaagcaagaaa

SEQ ID NO: 15429 - DNA, 25 bp, Artificial
  Probe
ctctgaagaaacggatgactttaag

SEQ ID NO: 15430 - DNA, 25 bp, Artificial
  Probe
gaatctcaccattccgatgaatctg

SEQ ID NO: 15431 - DNA, 25 bp, Artificial
  Probe
aaacggatgactttaagcaagaaac

SEQ ID NO: 15432 - DNA, 25 bp, Artificial
  Probe
gaagaaacggatgactttaagcaag

SEQ ID NO: 15433 - DNA, 25 bp, Artificial
  Probe
attccgatgaatctgatgagtcctt

SEQ ID NO: 15434 - DNA, 25 bp, Artificial
  Probe
atctcaccattccgatgaatctgat

SEQ ID NO: 15435 - DNA, 25 bp, Artificial
  Probe
cctctgaagaaacggatgactttaa

SEQ ID NO: 15436 - DNA, 25 bp, Artificial
  Probe
ctgaggtcaattaaagaagaggcaa

SEQ ID NO: 15437 - DNA, 25 bp, Artificial
  Probe
agaaacggatgactttaagcaagaa

SEQ ID NO: 15438 - DNA, 25 bp, Artificial
  Probe
aagaaacggatgactttaagcaaga

SEQ ID NO: 15439 - DNA, 25 bp, Artificial
  Probe
aatctcaccattccgatgaatctga

SEQ ID NO: 15440 - DNA, 25 bp, Artificial
  Probe
attctgtgaactcggatgaatctga

SEQ ID NO: 15441 - DNA, 25 bp, Artificial
  Probe
aacggatgactttaagcaagaaact

SEQ ID NO: 15442 - DNA, 25 bp, Artificial
  Probe
tgaagaaacggatgactttaagcaa

SEQ ID NO: 15443 - DNA, 25 bp, Artificial
  Probe
tctgaagaaacggatgactttaagc

SEQ ID NO: 15444 - DNA, 25 bp, Artificial
  Probe
cggatgactttaagcaagaaactct

SEQ ID NO: 15445 - DNA, 25 bp, Artificial
  Probe
acggatgactttaagcaagaaactc

SEQ ID NO: 15446 - DNA, 25 bp, Artificial
  Probe
ctgaagaaacggatgactttaagca

SEQ ID NO: 15447 - DNA, 25 bp, Artificial
  Probe
cattccgatgaatctgatgagtcct

SEQ ID NO: 15448 - DNA, 25 bp, Artificial
  Probe
tctgaggtcaattaaagaagaggca

SEQ ID NO: 15449 - DNA, 25 bp, Artificial
  Probe
accattccgatgaatctgatgagtc

SEQ ID NO: 15450 - DNA, 25 bp, Artificial
  Probe
tcaccattccgatgaatctgatgag

SEQ ID NO: 15451 - DNA, 25 bp, Artificial
  Probe
ctcaccattccgatgaatctgatga

SEQ ID NO: 15452 - DNA, 25 bp, Artificial
  Probe
tctcaccattccgatgaatctgatg

SEQ ID NO: 15453 - DNA, 25 bp, Artificial
  Probe
gaggattctgtgaactcggatgaat

SEQ ID NO: 15454 - DNA, 25 bp, Artificial
  Probe
gctagtcctagaccctaagagtaag

SEQ ID NO: 15455 - DNA, 25 bp, Artificial
  Probe
cctagaccctaagagtaaggaagat

SEQ ID NO: 15456 - DNA, 25 bp, Artificial
  Probe
ctagtcctagaccctaagagtaagg

SEQ ID NO: 15457 - DNA, 25 bp, Artificial
  Probe
tgaatctgacgaatctcaccattcc

SEQ ID NO: 15458 - DNA, 25 bp, Artificial
  Probe
agttcatcttctgaggtcaattaaa

SEQ ID NO: 15459 - DNA, 25 bp, Artificial
  Probe
caccattccgatgaatctgatgagt

SEQ ID NO: 15460 - DNA, 25 bp, Artificial
  Probe
cgaatctcaccattccgatgaatct

SEQ ID NO: 15461 - DNA, 25 bp, Artificial
  Probe
gttcatcttctgaggtcaattaaag

SEQ ID NO: 15462 - DNA, 25 bp, Artificial
  Probe
tcctctgaagaaacggatgacttta

SEQ ID NO: 15463 - DNA, 25 bp, Artificial
  Probe
ccattccgatgaatctgatgagtcc

SEQ ID NO: 15464 - DNA, 25 bp, Artificial
  Probe
acgaatctcaccattccgatgaatc

SEQ ID NO: 15465 - DNA, 25 bp, Artificial
  Probe
gacgaatctcaccattccgatgaat

SEQ ID NO: 15466 - DNA, 25 bp, Artificial
  Probe
aactcggatgaatctgacgaatctc

SEQ ID NO: 15467 - DNA, 25 bp, Artificial
  Probe
agctggaattcatgagacaacatac

SEQ ID NO: 15468 - DNA, 25 bp, Artificial
  Probe
gctggaattcatgagacaacataca

SEQ ID NO: 15469 - DNA, 25 bp, Artificial
  Probe
tgaagatcaagatcatcgctcctcc

SEQ ID NO: 15470 - DNA, 25 bp, Artificial
  Probe
tagccctggattttgagaatgagat

SEQ ID NO: 15471 - DNA, 25 bp, Artificial
  Probe
gtagccctggattttgagaatgaga

SEQ ID NO: 15472 - DNA, 25 bp, Artificial
  Probe
gaagatcaagatcatcgctcctccg

SEQ ID NO: 15473 - DNA, 25 bp, Artificial
  Probe
agccctggattttgagaatgagatg

SEQ ID NO: 15474 - DNA, 25 bp, Artificial
  Probe
gagacatcaaggagaagctgtgcta

SEQ ID NO: 15475 - DNA, 25 bp, Artificial
  Probe
cgtagccctggattttgagaatgag

SEQ ID NO: 15476 - DNA, 25 bp, Artificial
  Probe
ccctggattttgagaatgagatggc

SEQ ID NO: 15477 - DNA, 25 bp, Artificial
  Probe
gccctggattttgagaatgagatgg

SEQ ID NO: 15478 - DNA, 25 bp, Artificial
  Probe
agacatcaaggagaagctgtgctac

SEQ ID NO: 15479 - DNA, 25 bp, Artificial
  Probe
tacgtagccctggattttgagaatg

SEQ ID NO: 15480 - DNA, 25 bp, Artificial
  Probe
catcaaggagaagctgtgctacgta

SEQ ID NO: 15481 - DNA, 25 bp, Artificial
  Probe
acgtagccctggattttgagaatga

SEQ ID NO: 15482 - DNA, 25 bp, Artificial
  Probe
cctggattttgagaatgagatggcc

SEQ ID NO: 15483 - DNA, 25 bp, Artificial
  Probe
attcaactatcctaacctcacagtc

SEQ ID NO: 15484 - DNA, 25 bp, Artificial
  Probe
ctgacctgacctgatattcaactat

SEQ ID NO: 15485 - DNA, 25 bp, Artificial
  Probe
gacctgacctgatattcaactatcc

SEQ ID NO: 15486 - DNA, 25 bp, Artificial
  Probe
tgacctgacctgatattcaactatc

SEQ ID NO: 15487 - DNA, 25 bp, Artificial
  Probe
acctgacctgatattcaactatcct

SEQ ID NO: 15488 - DNA, 25 bp, Artificial
  Probe
tattcaactatcctaacctcacagt

SEQ ID NO: 15489 - DNA, 25 bp, Artificial
  Probe
ttcaactatcctaacctcacagtcc

SEQ ID NO: 15490 - DNA, 25 bp, Artificial
  Probe
cctgacctgatattcaactatccta

SEQ ID NO: 15491 - DNA, 25 bp, Artificial
  Probe
gctgacctgacctgatattcaacta

SEQ ID NO: 15492 - DNA, 25 bp, Artificial
  Probe
atattcaactatcctaacctcacag

SEQ ID NO: 15493 - DNA, 25 bp, Artificial
  Probe
acctgatattcaactatcctaacct

SEQ ID NO: 15494 - DNA, 25 bp, Artificial
  Probe
gacctgatattcaactatcctaacc

SEQ ID NO: 15495 - DNA, 25 bp, Artificial
  Probe
cctgatattcaactatcctaacctc

SEQ ID NO: 15496 - DNA, 25 bp, Artificial
  Probe
gatattcaactatcctaacctcaca

SEQ ID NO: 15497 - DNA, 25 bp, Artificial
  Probe
tgatattcaactatcctaacctcac

SEQ ID NO: 15498 - DNA, 25 bp, Artificial
  Probe
tgacctgatattcaactatcctaac

SEQ ID NO: 15499 - DNA, 25 bp, Artificial
  Probe
ctgatattcaactatcctaacctca

SEQ ID NO: 15500 - DNA, 25 bp, Artificial
  Probe
ctgacctgatattcaactatcctaa

SEQ ID NO: 15501 - DNA, 25 bp, Artificial
  Probe
gatcaggaatttggtgtggacatag

SEQ ID NO: 15502 - DNA, 25 bp, Artificial
  Probe
tgaatggctgacctgacctgatatt

SEQ ID NO: 15503 - DNA, 25 bp, Artificial
  Probe
tcaactatcctaacctcacagtccg

SEQ ID NO: 15504 - DNA, 25 bp, Artificial
  Probe
atggctgacctgacctgatattcaa

SEQ ID NO: 15505 - DNA, 25 bp, Artificial
  Probe
aatggctgacctgacctgatattca

SEQ ID NO: 15506 - DNA, 25 bp, Artificial
  Probe
ctgaatggctgacctgacctgatat

SEQ ID NO: 15507 - DNA, 25 bp, Artificial
  Probe
atcaggaatttggtgtggacatagg

SEQ ID NO: 15508 - DNA, 25 bp, Artificial
  Probe
gaatggctgacctgacctgatattc

SEQ ID NO: 15509 - DNA, 25 bp, Artificial
  Probe
gtcactctaggatctgcactgaatg

SEQ ID NO: 15510 - DNA, 25 bp, Artificial
  Probe
agtcactctaggatctgcactgaat

SEQ ID NO: 15511 - DNA, 25 bp, Artificial
  Probe
ggctgacctgacctgatattcaact

SEQ ID NO: 15512 - DNA, 25 bp, Artificial
  Probe
tggctgacctgacctgatattcaac

SEQ ID NO: 15513 - DNA, 25 bp, Artificial
  Probe
gagtaccgatcacagaagacctcac

SEQ ID NO: 15514 - DNA, 25 bp, Artificial
  Probe
tcactctaggatctgcactgaatgg

SEQ ID NO: 15515 - DNA, 25 bp, Artificial
  Probe
atagggcctgtctgtttcttgtaaa

SEQ ID NO: 15516 - DNA, 25 bp, Artificial
  Probe
actgaatggctgacctgacctgata

SEQ ID NO: 15517 - DNA, 25 bp, Artificial
  Probe
tcaggaatttggtgtggacataggg

SEQ ID NO: 15518 - DNA, 25 bp, Artificial
  Probe
caaccccaaaacaacacaatccatt

SEQ ID NO: 15519 - DNA, 25 bp, Artificial
  Probe
gtaaaaccctcaaccccaaaacaac

SEQ ID NO: 15520 - DNA, 25 bp, Artificial
  Probe
tgatcaggaatttggtgtggacata

SEQ ID NO: 15521 - DNA, 25 bp, Artificial
  Probe
catagggcctgtctgtttcttgtaa

SEQ ID NO: 15522 - DNA, 25 bp, Artificial
  Probe
cttgtaaaaccctcaaccccaaaac

SEQ ID NO: 15523 - DNA, 25 bp, Artificial
  Probe
tcttgtaaaaccctcaaccccaaaa

SEQ ID NO: 15524 - DNA, 25 bp, Artificial
  Probe
ttcttgtaaaaccctcaaccccaaa

SEQ ID NO: 15525 - DNA, 25 bp, Artificial
  Probe
tttcttgtaaaaccctcaaccccaa

SEQ ID NO: 15526 - DNA, 25 bp, Artificial
  Probe
cagactgcaaaataaaatctcgaag

SEQ ID NO: 15527 - DNA, 25 bp, Artificial
  Probe
taaaaccctcaaccccaaaacaaca

SEQ ID NO: 15528 - DNA, 25 bp, Artificial
  Probe
cacttacgaggtcacatatagaaca

SEQ ID NO: 15529 - DNA, 25 bp, Artificial
  Probe
ttcttacacttcttactgcttcgtt

SEQ ID NO: 15530 - DNA, 25 bp, Artificial
  Probe
actcttcttacacttcttactgctt

SEQ ID NO: 15531 - DNA, 25 bp, Artificial
  Probe
aactcttcttacacttcttactgct

SEQ ID NO: 15532 - DNA, 25 bp, Artificial
  Probe
caactcttcttacacttcttactgc

SEQ ID NO: 15533 - DNA, 25 bp, Artificial
  Probe
tcacttacgaggtcacatatagaac

SEQ ID NO: 15534 - DNA, 25 bp, Artificial
  Probe
gttcacttacgaggtcacatataga

SEQ ID NO: 15535 - DNA, 25 bp, Artificial
  Probe
tcttcttacacttcttactgcttcg

SEQ ID NO: 15536 - DNA, 25 bp, Artificial
  Probe
acttacgaggtcacatatagaacaa

SEQ ID NO: 15537 - DNA, 25 bp, Artificial
  Probe
tcttacacttcttactgcttcgttc

SEQ ID NO: 15538 - DNA, 25 bp, Artificial
  Probe
cttcttacacttcttactgcttcgt

SEQ ID NO: 15539 - DNA, 25 bp, Artificial
  Probe
ctcttcttacacttcttactgcttc

SEQ ID NO: 15540 - DNA, 25 bp, Artificial
  Probe
acttcttactgcttcgttcacttac

SEQ ID NO: 15541 - DNA, 25 bp, Artificial
  Probe
cacttcttactgcttcgttcactta

SEQ ID NO: 15542 - DNA, 25 bp, Artificial
  Probe
cttacacttcttactgcttcgttca

SEQ ID NO: 15543 - DNA, 25 bp, Artificial
  Probe
ttacacttcttactgcttcgttcac

SEQ ID NO: 15544 - DNA, 25 bp, Artificial
  Probe
ttcacttacgaggtcacatatagaa

SEQ ID NO: 15545 - DNA, 25 bp, Artificial
  Probe
tcaactcttcttacacttcttactg

SEQ ID NO: 15546 - DNA, 25 bp, Artificial
  Probe
tacacttcttactgcttcgttcact

SEQ ID NO: 15547 - DNA, 25 bp, Artificial
  Probe
taacactagctccaacatcaacttc

SEQ ID NO: 15548 - DNA, 25 bp, Artificial
  Probe
aacatcaccaactattagcttaccg

SEQ ID NO: 15549 - DNA, 25 bp, Artificial
  Probe
acacttcttactgcttcgttcactt

SEQ ID NO: 15550 - DNA, 25 bp, Artificial
  Probe
atcaactcttcttacacttcttact

SEQ ID NO: 15551 - DNA, 25 bp, Artificial
  Probe
gtaacactagctccaacatcaactt

SEQ ID NO: 15552 - DNA, 25 bp, Artificial
  Probe
gtgtgtaaggaatggttcaattctt

SEQ ID NO: 15553 - DNA, 25 bp, Artificial
  Probe
ctgtgtgtaaggaatggttcaattc

SEQ ID NO: 15554 - DNA, 25 bp, Artificial
  Probe
tcaccaactattagcttaccgttag

SEQ ID NO: 15555 - DNA, 25 bp, Artificial
  Probe
cctgtgtgtaaggaatggttcaatt

SEQ ID NO: 15556 - DNA, 25 bp, Artificial
  Probe
atcaccaactattagcttaccgtta

SEQ ID NO: 15557 - DNA, 25 bp, Artificial
  Probe
tgtgtgtaaggaatggttcaattct

SEQ ID NO: 15558 - DNA, 25 bp, Artificial
  Probe
catcaccaactattagcttaccgtt

SEQ ID NO: 15559 - DNA, 25 bp, Artificial
  Probe
acgaggtcacatatagaacaaacat

SEQ ID NO: 15560 - DNA, 25 bp, Artificial
  Probe
agaacaaacatcaccaactattagc

SEQ ID NO: 15561 - DNA, 25 bp, Artificial
  Probe
cgaggtcacatatagaacaaacatc

SEQ ID NO: 15562 - DNA, 25 bp, Artificial
  Probe
tacgaggtcacatatagaacaaaca

SEQ ID NO: 15563 - DNA, 25 bp, Artificial
  Probe
gtcacatatagaacaaacatcacca

SEQ ID NO: 15564 - DNA, 25 bp, Artificial
  Probe
acatcaccaactattagcttaccgt

SEQ ID NO: 15565 - DNA, 25 bp, Artificial
  Probe
aggtcacatatagaacaaacatcac

SEQ ID NO: 15566 - DNA, 25 bp, Artificial
  Probe
tgtgtaaggaatggttcaattctta

SEQ ID NO: 15567 - DNA, 25 bp, Artificial
  Probe
ttacgaggtcacatatagaacaaac

SEQ ID NO: 15568 - DNA, 25 bp, Artificial
  Probe
gaggtcacatatagaacaaacatca

SEQ ID NO: 15569 - DNA, 25 bp, Artificial
  Probe
cactagctccaacatcaacttcatg

SEQ ID NO: 15570 - DNA, 25 bp, Artificial
  Probe
cacatatagaacaaacatcaccaac

SEQ ID NO: 15571 - DNA, 25 bp, Artificial
  Probe
aatcaactcttcttacacttcttac

SEQ ID NO: 15572 - DNA, 25 bp, Artificial
  Probe
acatatagaacaaacatcaccaact

SEQ ID NO: 15573 - DNA, 25 bp, Artificial
  Probe
ggatagcacacacttgagacatata

SEQ ID NO: 15574 - DNA, 25 bp, Artificial
  Probe
tagcacacacttgagacatataaca

SEQ ID NO: 15575 - DNA, 25 bp, Artificial
  Probe
agcacacacttgagacatataacat

SEQ ID NO: 15576 - DNA, 25 bp, Artificial
  Probe
gcacacacttgagacatataacatt

SEQ ID NO: 15577 - DNA, 25 bp, Artificial
  Probe
tactaaggatagcacacacttgaga

SEQ ID NO: 15578 - DNA, 25 bp, Artificial
  Probe
atagcacacacttgagacatataac

SEQ ID NO: 15579 - DNA, 25 bp, Artificial
  Probe
aggatagcacacacttgagacatat

SEQ ID NO: 15580 - DNA, 25 bp, Artificial
  Probe
gatagcacacacttgagacatataa

SEQ ID NO: 15581 - DNA, 25 bp, Artificial
  Probe
tatgtaggctcttctctgactagat

SEQ ID NO: 15582 - DNA, 25 bp, Artificial
  Probe
atatgtaggctcttctctgactaga

SEQ ID NO: 15583 - DNA, 25 bp, Artificial
  Probe
aaggatagcacacacttgagacata

SEQ ID NO: 15584 - DNA, 25 bp, Artificial
  Probe
taaggatagcacacacttgagacat

SEQ ID NO: 15585 - DNA, 25 bp, Artificial
  Probe
gtactaaggatagcacacacttgag

SEQ ID NO: 15586 - DNA, 25 bp, Artificial
  Probe
gctcttctctgactagatcctaact

SEQ ID NO: 15587 - DNA, 25 bp, Artificial
  Probe
atgtaggctcttctctgactagatc

SEQ ID NO: 15588 - DNA, 25 bp, Artificial
  Probe
tatatgtaggctcttctctgactag

SEQ ID NO: 15589 - DNA, 25 bp, Artificial
  Probe
ctaaggatagcacacacttgagaca

SEQ ID NO: 15590 - DNA, 25 bp, Artificial
  Probe
actaaggatagcacacacttgagac

SEQ ID NO: 15591 - DNA, 25 bp, Artificial
  Probe
ctcttctctgactagatcctaactt

SEQ ID NO: 15592 - DNA, 25 bp, Artificial
  Probe
ggctcttctctgactagatcctaac

SEQ ID NO: 15593 - DNA, 25 bp, Artificial
  Probe
caatgtcatgcaagtaagaacctac

SEQ ID NO: 15594 - DNA, 25 bp, Artificial
  Probe
gtaccaatgtcatgcaagtaagaac

SEQ ID NO: 15595 - DNA, 25 bp, Artificial
  Probe
ttaccctttgaatcctgagaactac

SEQ ID NO: 15596 - DNA, 25 bp, Artificial
  Probe
atggtacagtaataagactcagagt

SEQ ID NO: 15597 - DNA, 25 bp, Artificial
  Probe
catggtacagtaataagactcagag

SEQ ID NO: 15598 - DNA, 25 bp, Artificial
  Probe
taccctttgaatcctgagaactaca

SEQ ID NO: 15599 - DNA, 25 bp, Artificial
  Probe
atatatgtaggctcttctctgacta

SEQ ID NO: 15600 - DNA, 25 bp, Artificial
  Probe
ccaatgtcatgcaagtaagaaccta

SEQ ID NO: 15601 - DNA, 25 bp, Artificial
  Probe
attaccctttgaatcctgagaacta

SEQ ID NO: 15602 - DNA, 25 bp, Artificial
  Probe
tattaccctttgaatcctgagaact

SEQ ID NO: 15603 - DNA, 25 bp, Artificial
  Probe
aggctcttctctgactagatcctaa

SEQ ID NO: 15604 - DNA, 25 bp, Artificial
  Probe
tgtaggctcttctctgactagatcc

SEQ ID NO: 15605 - DNA, 25 bp, Artificial
  Probe
tacccttcagaacataacagtcaga

SEQ ID NO: 15606 - DNA, 25 bp, Artificial
  Probe
taccaatgtcatgcaagtaagaacc

SEQ ID NO: 15607 - DNA, 25 bp, Artificial
  Probe
agaacataacagtcagaccctagta

SEQ ID NO: 15608 - DNA, 25 bp, Artificial
  Probe
ttcagaacataacagtcagacccta

SEQ ID NO: 15609 - DNA, 25 bp, Artificial
  Probe
cactactagaagagaaaggtaacca

SEQ ID NO: 15610 - DNA, 25 bp, Artificial
  Probe
actagaagagaaaggtaaccatcaa

SEQ ID NO: 15611 - DNA, 25 bp, Artificial
  Probe
tcttctctgactagatcctaactta

SEQ ID NO: 15612 - DNA, 25 bp, Artificial
  Probe
gaacataacagtcagaccctagtac

SEQ ID NO: 15613 - DNA, 25 bp, Artificial
  Probe
tcactactagaagagaaaggtaacc

SEQ ID NO: 15614 - DNA, 25 bp, Artificial
  Probe
tataacccatttactctaggctacc

SEQ ID NO: 15615 - DNA, 25 bp, Artificial
  Probe
attgtcactactagaagagaaaggt

SEQ ID NO: 15616 - DNA, 25 bp, Artificial
  Probe
atattaccctttgaatcctgagaac

SEQ ID NO: 15617 - DNA, 25 bp, Artificial
  Probe
tcagaacataacagtcagaccctag

SEQ ID NO: 15618 - DNA, 25 bp, Artificial
  Probe
ctgatgatggatgtggatctaatgt

SEQ ID NO: 15619 - DNA, 25 bp, Artificial
  Probe
tctgatgatggatgtggatctaatg

SEQ ID NO: 15620 - DNA, 25 bp, Artificial
  Probe
gtctgatgatggatgtggatctaat

SEQ ID NO: 15621 - DNA, 25 bp, Artificial
  Probe
tgatgatggatgtggatctaatgtg

SEQ ID NO: 15622 - DNA, 25 bp, Artificial
  Probe
tgtctgatgatggatgtggatctaa

SEQ ID NO: 15623 - DNA, 25 bp, Artificial
  Probe
gatgatggatgtggatctaatgtgc

SEQ ID NO: 15624 - DNA, 25 bp, Artificial
  Probe
gtgtctgatgatggatgtggatcta

SEQ ID NO: 15625 - DNA, 25 bp, Artificial
  Probe
atggatgtggatctaatgtgcaatt

SEQ ID NO: 15626 - DNA, 25 bp, Artificial
  Probe
tggatgtggatctaatgtgcaatta

SEQ ID NO: 15627 - DNA, 25 bp, Artificial
  Probe
ggatgtggatctaatgtgcaattaa

SEQ ID NO: 15628 - DNA, 25 bp, Artificial
  Probe
gatggatgtggatctaatgtgcaat

SEQ ID NO: 15629 - DNA, 25 bp, Artificial
  Probe
cctacagaaagtacacagaacagat

SEQ ID NO: 15630 - DNA, 25 bp, Artificial
  Probe
ctacagaaagtacacagaacagatc

SEQ ID NO: 15631 - DNA, 25 bp, Artificial
  Probe
atgatggatgtggatctaatgtgca

SEQ ID NO: 15632 - DNA, 25 bp, Artificial
  Probe
ctccacacgagaggctaacaatatt

SEQ ID NO: 15633 - DNA, 25 bp, Artificial
  Probe
tgatggatgtggatctaatgtgcaa

SEQ ID NO: 15634 - DNA, 25 bp, Artificial
  Probe
actccacacgagaggctaacaatat

SEQ ID NO: 15635 - DNA, 25 bp, Artificial
  Probe
gcctacagaaagtacacagaacaga

SEQ ID NO: 15636 - DNA, 25 bp, Artificial
  Probe
agcctacagaaagtacacagaacag

SEQ ID NO: 15637 - DNA, 25 bp, Artificial
  Probe
cagcctacagaaagtacacagaaca

SEQ ID NO: 15638 - DNA, 25 bp, Artificial
  Probe
ctaaacatgcagcctacagaaagta

SEQ ID NO: 15639 - DNA, 25 bp, Artificial
  Probe
taaacatgcagcctacagaaagtac

SEQ ID NO: 15640 - DNA, 25 bp, Artificial
  Probe
cactccacacgagaggctaacaata

SEQ ID NO: 15641 - DNA, 25 bp, Artificial
  Probe
aatataatccccgtgtctgatgatg

SEQ ID NO: 15642 - DNA, 25 bp, Artificial
  Probe
caatataatccccgtgtctgatgat

SEQ ID NO: 15643 - DNA, 25 bp, Artificial
  Probe
gtggatctaatgtgcaattaaatgt

SEQ ID NO: 15644 - DNA, 25 bp, Artificial
  Probe
tgtggatctaatgtgcaattaaatg

SEQ ID NO: 15645 - DNA, 25 bp, Artificial
  Probe
cgtgtctgatgatggatgtggatct

SEQ ID NO: 15646 - DNA, 25 bp, Artificial
  Probe
aaattagaaaacttgcttcagggtg

SEQ ID NO: 15647 - DNA, 25 bp, Artificial
  Probe
gatgtggatctaatgtgcaattaaa

SEQ ID NO: 15648 - DNA, 25 bp, Artificial
  Probe
ttcctaaacatgcagcctacagaaa

SEQ ID NO: 15649 - DNA, 25 bp, Artificial
  Probe
tttcctaaacatgcagcctacagaa

SEQ ID NO: 15650 - DNA, 25 bp, Artificial
  Probe
atataatccccgtgtctgatgatgg

SEQ ID NO: 15651 - DNA, 25 bp, Artificial
  Probe
ctaatgtgcaattaaatgttctgtg

SEQ ID NO: 15652 - DNA, 25 bp, Artificial
  Probe
aaacatgcagcctacagaaagtaca

SEQ ID NO: 15653 - DNA, 25 bp, Artificial
  Probe
tctaatgtgcaattaaatgttctgt

SEQ ID NO: 15654 - DNA, 25 bp, Artificial
  Probe
tggatctaatgtgcaattaaatgtt

SEQ ID NO: 15655 - DNA, 25 bp, Artificial
  Probe
gcagcctacagaaagtacacagaac

SEQ ID NO: 15656 - DNA, 25 bp, Artificial
  Probe
ccaatataatccccgtgtctgatga

SEQ ID NO: 15657 - DNA, 25 bp, Artificial
  Probe
aattagaaaacttgcttcagggtgg

SEQ ID NO: 15658 - DNA, 25 bp, Artificial
  Probe
tcctaaacatgcagcctacagaaag

SEQ ID NO: 15659 - DNA, 25 bp, Artificial
  Probe
ctttcctaaacatgcagcctacaga

SEQ ID NO: 15660 - DNA, 25 bp, Artificial
  Probe
atgtggatctaatgtgcaattaaat

SEQ ID NO: 15661 - DNA, 25 bp, Artificial
  Probe
cctaaacatgcagcctacagaaagt

SEQ ID NO: 15662 - DNA, 25 bp, Artificial
  Probe
actttcctaaacatgcagcctacag

SEQ ID NO: 15663 - DNA, 25 bp, Artificial
  Probe
aagacaagacatcaggagataatga

SEQ ID NO: 15664 - DNA, 25 bp, Artificial
  Probe
aaagacaagacatcaggagataatg

SEQ ID NO: 15665 - DNA, 25 bp, Artificial
  Probe
gcatgaacagaaacccatagtattt

SEQ ID NO: 15666 - DNA, 25 bp, Artificial
  Probe
agacaagacatcaggagataatgat

SEQ ID NO: 15667 - DNA, 25 bp, Artificial
  Probe
acagaaacccatagtatttatgccc

SEQ ID NO: 15668 - DNA, 25 bp, Artificial
  Probe
aacagaaacccatagtatttatgcc

SEQ ID NO: 15669 - DNA, 25 bp, Artificial
  Probe
tgcatgaacagaaacccatagtatt

SEQ ID NO: 15670 - DNA, 25 bp, Artificial
  Probe
aagaatttgatatcgacatggatgc

SEQ ID NO: 15671 - DNA, 25 bp, Artificial
  Probe
gaacagaaacccatagtatttatgc

SEQ ID NO: 15672 - DNA, 25 bp, Artificial
  Probe
gaatttgatatcgacatggatgcac

SEQ ID NO: 15673 - DNA, 25 bp, Artificial
  Probe
agaatttgatatcgacatggatgca

SEQ ID NO: 15674 - DNA, 25 bp, Artificial
  Probe
ggaaaagacaagacatcaggagata

SEQ ID NO: 15675 - DNA, 25 bp, Artificial
  Probe
aatttgatatcgacatggatgcacc

SEQ ID NO: 15676 - DNA, 25 bp, Artificial
  Probe
gaagaatttgatatcgacatggatg

SEQ ID NO: 15677 - DNA, 25 bp, Artificial
  Probe
agtctcagttcagaaaattccagaa

SEQ ID NO: 15678 - DNA, 25 bp, Artificial
  Probe
tctcagttcagaaaattccagaaga

SEQ ID NO: 15679 - DNA, 25 bp, Artificial
  Probe
gtctcagttcagaaaattccagaag

SEQ ID NO: 15680 - DNA, 25 bp, Artificial
  Probe
ttcagtctcagttcagaaaattcca

SEQ ID NO: 15681 - DNA, 25 bp, Artificial
  Probe
aatggaaaagacaagacatcaggag

SEQ ID NO: 15682 - DNA, 25 bp, Artificial
  Probe
ctcagttcagaaaattccagaagaa

SEQ ID NO: 15683 - DNA, 25 bp, Artificial
  Probe
cagtctcagttcagaaaattccaga

SEQ ID NO: 15684 - DNA, 25 bp, Artificial
  Probe
tcagtctcagttcagaaaattccag

SEQ ID NO: 15685 - DNA, 25 bp, Artificial
  Probe
attcagtctcagttcagaaaattcc

SEQ ID NO: 15686 - DNA, 25 bp, Artificial
  Probe
gaaaagacaagacatcaggagataa

SEQ ID NO: 15687 - DNA, 25 bp, Artificial
  Probe
caatggaaaagacaagacatcagga

SEQ ID NO: 15688 - DNA, 25 bp, Artificial
  Probe
tcagttcagaaaattccagaagaaa

SEQ ID NO: 15689 - DNA, 25 bp, Artificial
  Probe
tggaaaagacaagacatcaggagat

SEQ ID NO: 15690 - DNA, 25 bp, Artificial
  Probe
catgaacagaaacccatagtattta

SEQ ID NO: 15691 - DNA, 25 bp, Artificial
  Probe
atggaaaagacaagacatcaggaga

SEQ ID NO: 15692 - DNA, 25 bp, Artificial
  Probe
accaatggaaaagacaagacatcag

SEQ ID NO: 15693 - DNA, 25 bp, Artificial
  Probe
cattcagtctcagttcagaaaattc

SEQ ID NO: 15694 - DNA, 25 bp, Artificial
  Probe
tgaacagaaacccatagtatttatg

SEQ ID NO: 15695 - DNA, 25 bp, Artificial
  Probe
cagttcagaaaattccagaagaaaa

SEQ ID NO: 15696 - DNA, 25 bp, Artificial
  Probe
aaaagacaagacatcaggagataat

SEQ ID NO: 15697 - DNA, 25 bp, Artificial
  Probe
ccaatggaaaagacaagacatcagg

SEQ ID NO: 15698 - DNA, 25 bp, Artificial
  Probe
agaaacccatagtatttatgcccct

SEQ ID NO: 15699 - DNA, 25 bp, Artificial
  Probe
cagaaacccatagtatttatgcccc

SEQ ID NO: 15700 - DNA, 25 bp, Artificial
  Probe
atgaacagaaacccatagtatttat

SEQ ID NO: 15701 - DNA, 25 bp, Artificial
  Probe
atgcatgaacagaaacccatagtat

SEQ ID NO: 15702 - DNA, 25 bp, Artificial
  Probe
aatgcatgaacagaaacccatagta

SEQ ID NO: 15703 - DNA, 25 bp, Artificial
  Probe
gaaatgcatgaacagaaacccatag

SEQ ID NO: 15704 - DNA, 25 bp, Artificial
  Probe
atttgatatcgacatggatgcacca

SEQ ID NO: 15705 - DNA, 25 bp, Artificial
  Probe
aaatgcatgaacagaaacccatagt

SEQ ID NO: 15706 - DNA, 25 bp, Artificial
  Probe
tgaaatgcatgaacagaaacccata

SEQ ID NO: 15707 - DNA, 25 bp, Artificial
  Probe
ctaacctgaaatgcatgaacagaaa

SEQ ID NO: 15708 - DNA, 25 bp, Artificial
  Probe
cagaatggtaatgtgtagccagaag

SEQ ID NO: 15709 - DNA, 25 bp, Artificial
  Probe
atcctgttgctacatcagagtgtat

SEQ ID NO: 15710 - DNA, 25 bp, Artificial
  Probe
tctccattaaacttctactgagcaa

SEQ ID NO: 15711 - DNA, 25 bp, Artificial
  Probe
ttctccattaaacttctactgagca

SEQ ID NO: 15712 - DNA, 25 bp, Artificial
  Probe
tcctgttgctacatcagagtgtatt

SEQ ID NO: 15713 - DNA, 25 bp, Artificial
  Probe
aatcctgttgctacatcagagtgta

SEQ ID NO: 15714 - DNA, 25 bp, Artificial
  Probe
ctccattaaacttctactgagcaaa

SEQ ID NO: 15715 - DNA, 25 bp, Artificial
  Probe
caatcctgttgctacatcagagtgt

SEQ ID NO: 15716 - DNA, 25 bp, Artificial
  Probe
acaatcctgttgctacatcagagtg

SEQ ID NO: 15717 - DNA, 25 bp, Artificial
  Probe
cacaatcctgttgctacatcagagt

SEQ ID NO: 15718 - DNA, 25 bp, Artificial
  Probe
tttctccattaaacttctactgagc

SEQ ID NO: 15719 - DNA, 25 bp, Artificial
  Probe
aatggtaatgtgtagccagaaggag

SEQ ID NO: 15720 - DNA, 25 bp, Artificial
  Probe
gaatggtaatgtgtagccagaagga

SEQ ID NO: 15721 - DNA, 25 bp, Artificial
  Probe
agaatggtaatgtgtagccagaagg

SEQ ID NO: 15722 - DNA, 25 bp, Artificial
  Probe
ccagaatggtaatgtgtagccagaa

SEQ ID NO: 15723 - DNA, 25 bp, Artificial
  Probe
actttctccattaaacttctactga

SEQ ID NO: 15724 - DNA, 25 bp, Artificial
  Probe
ataactggtttgtaaaggagctgtt

SEQ ID NO: 15725 - DNA, 25 bp, Artificial
  Probe
cataactggtttgtaaaggagctgt

SEQ ID NO: 15726 - DNA, 25 bp, Artificial
  Probe
aaacaactttctccattaaacttct

SEQ ID NO: 15727 - DNA, 25 bp, Artificial
  Probe
ccacaatcctgttgctacatcagag

SEQ ID NO: 15728 - DNA, 25 bp, Artificial
  Probe
acaactttctccattaaacttctac

SEQ ID NO: 15729 - DNA, 25 bp, Artificial
  Probe
taactggtttgtaaaggagctgttc

SEQ ID NO: 15730 - DNA, 25 bp, Artificial
  Probe
ctcaccacaatcctgttgctacatc

SEQ ID NO: 15731 - DNA, 25 bp, Artificial
  Probe
aactttctccattaaacttctactg

SEQ ID NO: 15732 - DNA, 25 bp, Artificial
  Probe
caactttctccattaaacttctact

SEQ ID NO: 15733 - DNA, 25 bp, Artificial
  Probe
cctgttgctacatcagagtgtattt

SEQ ID NO: 15734 - DNA, 25 bp, Artificial
  Probe
tttgtaattcctccagctaacattt

SEQ ID NO: 15735 - DNA, 25 bp, Artificial
  Probe
ctgccataactggtttgtaaaggag

SEQ ID NO: 15736 - DNA, 25 bp, Artificial
  Probe
ctttctccattaaacttctactgag

SEQ ID NO: 15737 - DNA, 25 bp, Artificial
  Probe
caccacaatcctgttgctacatcag

SEQ ID NO: 15738 - DNA, 25 bp, Artificial
  Probe
tctcaccacaatcctgttgctacat

SEQ ID NO: 15739 - DNA, 25 bp, Artificial
  Probe
atgtctcaccacaatcctgttgcta

SEQ ID NO: 15740 - DNA, 25 bp, Artificial
  Probe
cagaagcggttcagtgagtttatga

SEQ ID NO: 15741 - DNA, 25 bp, Artificial
  Probe
accacaatcctgttgctacatcaga

SEQ ID NO: 15742 - DNA, 25 bp, Artificial
  Probe
aacaactttctccattaaacttcta

SEQ ID NO: 15743 - DNA, 25 bp, Artificial
  Probe
actgccataactggtttgtaaagga

SEQ ID NO: 15744 - DNA, 25 bp, Artificial
  Probe
cactgccataactggtttgtaaagg

SEQ ID NO: 15745 - DNA, 25 bp, Artificial
  Probe
ccactgccataactggtttgtaaag

SEQ ID NO: 15746 - DNA, 25 bp, Artificial
  Probe
ttaaacttctactgagcaaaatggt

SEQ ID NO: 15747 - DNA, 25 bp, Artificial
  Probe
tcaccacaatcctgttgctacatca

SEQ ID NO: 15748 - DNA, 25 bp, Artificial
  Probe
actggtttgtaaaggagctgttctt

SEQ ID NO: 15749 - DNA, 25 bp, Artificial
  Probe
acttctactgagcaaaatggttaat

SEQ ID NO: 15750 - DNA, 25 bp, Artificial
  Probe
aactggtttgtaaaggagctgttct

SEQ ID NO: 15751 - DNA, 25 bp, Artificial
  Probe
tccattaaacttctactgagcaaaa

SEQ ID NO: 15752 - DNA, 25 bp, Artificial
  Probe
aaacttctactgagcaaaatggtta

SEQ ID NO: 15753 - DNA, 25 bp, Artificial
  Probe
cctacagcatggtaattcttcacat

SEQ ID NO: 15754 - DNA, 25 bp, Artificial
  Probe
gtaggctgattctttacaaacactg

SEQ ID NO: 15755 - DNA, 25 bp, Artificial
  Probe
tatctaagtcacctggagatcacac

SEQ ID NO: 15756 - DNA, 25 bp, Artificial
  Probe
gtatctaagtcacctggagatcaca

SEQ ID NO: 15757 - DNA, 25 bp, Artificial
  Probe
taggctgattctttacaaacactgt

SEQ ID NO: 15758 - DNA, 25 bp, Artificial
  Probe
ctgattctttacaaacactgtggtt

SEQ ID NO: 15759 - DNA, 25 bp, Artificial
  Probe
ggtatctaagtcacctggagatcac

SEQ ID NO: 15760 - DNA, 25 bp, Artificial
  Probe
aggctgattctttacaaacactgtg

SEQ ID NO: 15761 - DNA, 25 bp, Artificial
  Probe
atattgggtatctaagtcacctgga

SEQ ID NO: 15762 - DNA, 25 bp, Artificial
  Probe
tctaagtcacctggagatcacacac

SEQ ID NO: 15763 - DNA, 25 bp, Artificial
  Probe
gctgattctttacaaacactgtggt

SEQ ID NO: 15764 - DNA, 25 bp, Artificial
  Probe
tattgggtatctaagtcacctggag

SEQ ID NO: 15765 - DNA, 25 bp, Artificial
  Probe
ggatgtaggctgattctttacaaac

SEQ ID NO: 15766 - DNA, 25 bp, Artificial
  Probe
tgtaggctgattctttacaaacact

SEQ ID NO: 15767 - DNA, 25 bp, Artificial
  Probe
atgtaggctgattctttacaaacac

SEQ ID NO: 15768 - DNA, 25 bp, Artificial
  Probe
ctacagcatggtaattcttcacatg

SEQ ID NO: 15769 - DNA, 25 bp, Artificial
  Probe
atctaagtcacctggagatcacaca

SEQ ID NO: 15770 - DNA, 25 bp, Artificial
  Probe
gatgtaggctgattctttacaaaca

SEQ ID NO: 15771 - DNA, 25 bp, Artificial
  Probe
gggatgtaggctgattctttacaaa

SEQ ID NO: 15772 - DNA, 25 bp, Artificial
  Probe
ccctacagcatggtaattcttcaca

SEQ ID NO: 15773 - DNA, 25 bp, Artificial
  Probe
ttcctctgccaattctgctaactgt

SEQ ID NO: 15774 - DNA, 25 bp, Artificial
  Probe
ctttcctctgccaattctgctaact

SEQ ID NO: 15775 - DNA, 25 bp, Artificial
  Probe
ggctgattctttacaaacactgtgg

SEQ ID NO: 15776 - DNA, 25 bp, Artificial
  Probe
tacagcatggtaattcttcacatgg

SEQ ID NO: 15777 - DNA, 25 bp, Artificial
  Probe
tgattctttacaaacactgtggttt

SEQ ID NO: 15778 - DNA, 25 bp, Artificial
  Probe
aatattgggtatctaagtcacctgg

SEQ ID NO: 15779 - DNA, 25 bp, Artificial
  Probe
tttcctctgccaattctgctaactg

SEQ ID NO: 15780 - DNA, 25 bp, Artificial
  Probe
aaatcatattccttacccctacagc

SEQ ID NO: 15781 - DNA, 25 bp, Artificial
  Probe
ccaattctgctaactgtgcatagaa

SEQ ID NO: 15782 - DNA, 25 bp, Artificial
  Probe
attgggtatctaagtcacctggaga

SEQ ID NO: 15783 - DNA, 25 bp, Artificial
  Probe
atcatattccttacccctacagcat

SEQ ID NO: 15784 - DNA, 25 bp, Artificial
  Probe
aatcatattccttacccctacagca

SEQ ID NO: 15785 - DNA, 25 bp, Artificial
  Probe
ctaagtcacctggagatcacacacc

SEQ ID NO: 15786 - DNA, 25 bp, Artificial
  Probe
agaaatcatattccttacccctaca

SEQ ID NO: 15787 - DNA, 25 bp, Artificial
  Probe
ctctcaccttctcactacccttgtc

SEQ ID NO: 15788 - DNA, 25 bp, Artificial
  Probe
ttgggtatctaagtcacctggagat

SEQ ID NO: 15789 - DNA, 25 bp, Artificial
  Probe
atgtagatgcatgtcacttgaggta

SEQ ID NO: 15790 - DNA, 25 bp, Artificial
  Probe
gaaatcatattccttacccctacag

SEQ ID NO: 15791 - DNA, 25 bp, Artificial
  Probe
tcctctgccaattctgctaactgtg

SEQ ID NO: 15792 - DNA, 25 bp, Artificial
  Probe
cctttcctctgccaattctgctaac

SEQ ID NO: 15793 - DNA, 25 bp, Artificial
  Probe
gggtatctaagtcacctggagatca

SEQ ID NO: 15794 - DNA, 25 bp, Artificial
  Probe
tgggtatctaagtcacctggagatc

SEQ ID NO: 15795 - DNA, 25 bp, Artificial
  Probe
atggtaattcttcacatggctttta

SEQ ID NO: 15796 - DNA, 25 bp, Artificial
  Probe
tgtagatgcatgtcacttgaggtac

SEQ ID NO: 15797 - DNA, 25 bp, Artificial
  Probe
aagaaatcatattccttacccctac

SEQ ID NO: 15798 - DNA, 25 bp, Artificial
  Probe
cagaataagcggcaatgattcagat

SEQ ID NO: 15799 - DNA, 25 bp, Artificial
  Probe
agaataagcggcaatgattcagatc

SEQ ID NO: 15800 - DNA, 25 bp, Artificial
  Probe
atttgagcatagcaggtcagtaaag

SEQ ID NO: 15801 - DNA, 25 bp, Artificial
  Probe
gatttgagcatagcaggtcagtaaa

SEQ ID NO: 15802 - DNA, 25 bp, Artificial
  Probe
ggaagcatggtggaacaatttattt

SEQ ID NO: 15803 - DNA, 25 bp, Artificial
  Probe
tagttggaagcatggtggaacaatt

SEQ ID NO: 15804 - DNA, 25 bp, Artificial
  Probe
ttagttggaagcatggtggaacaat

SEQ ID NO: 15805 - DNA, 25 bp, Artificial
  Probe
gattctgagtttcaacccattggaa

SEQ ID NO: 15806 - DNA, 25 bp, Artificial
  Probe
agatttgagcatagcaggtcagtaa

SEQ ID NO: 15807 - DNA, 25 bp, Artificial
  Probe
tggaagcatggtggaacaatttatt

SEQ ID NO: 15808 - DNA, 25 bp, Artificial
  Probe
tcagaataagcggcaatgattcaga

SEQ ID NO: 15809 - DNA, 25 bp, Artificial
  Probe
ttgagcatagcaggtcagtaaagaa

SEQ ID NO: 15810 - DNA, 25 bp, Artificial
  Probe
tttgagcatagcaggtcagtaaaga

SEQ ID NO: 15811 - DNA, 25 bp, Artificial
  Probe
attctgagtttcaacccattggaac

SEQ ID NO: 15812 - DNA, 25 bp, Artificial
  Probe
cgtaaatcagaataagcggcaatga

SEQ ID NO: 15813 - DNA, 25 bp, Artificial
  Probe
cctgattctgagtttcaacccattg

SEQ ID NO: 15814 - DNA, 25 bp, Artificial
  Probe
atcagaataagcggcaatgattcag

SEQ ID NO: 15815 - DNA, 25 bp, Artificial
  Probe
ttggaagcatggtggaacaatttat

SEQ ID NO: 15816 - DNA, 25 bp, Artificial
  Probe
aataagcggcaatgattcagatcag

SEQ ID NO: 15817 - DNA, 25 bp, Artificial
  Probe
gaataagcggcaatgattcagatca

SEQ ID NO: 15818 - DNA, 25 bp, Artificial
  Probe
ctgattctgagtttcaacccattgg

SEQ ID NO: 15819 - DNA, 25 bp, Artificial
  Probe
acctgattctgagtttcaacccatt

SEQ ID NO: 15820 - DNA, 25 bp, Artificial
  Probe
aacctgattctgagtttcaacccat

SEQ ID NO: 15821 - DNA, 25 bp, Artificial
  Probe
attggaacgtaaatcagaataagcg

SEQ ID NO: 15822 - DNA, 25 bp, Artificial
  Probe
acccattggaacgtaaatcagaata

SEQ ID NO: 15823 - DNA, 25 bp, Artificial
  Probe
cccattggaacgtaaatcagaataa

SEQ ID NO: 15824 - DNA, 25 bp, Artificial
  Probe
cagatttgagcatagcaggtcagta

SEQ ID NO: 15825 - DNA, 25 bp, Artificial
  Probe
aacccattggaacgtaaatcagaat

SEQ ID NO: 15826 - DNA, 25 bp, Artificial
  Probe
tgattctgagtttcaacccattgga

SEQ ID NO: 15827 - DNA, 25 bp, Artificial
  Probe
tgagcatagcaggtcagtaaagaac

SEQ ID NO: 15828 - DNA, 25 bp, Artificial
  Probe
tttcagatttgagcatagcaggtca

SEQ ID NO: 15829 - DNA, 25 bp, Artificial
  Probe
cttagttggaagcatggtggaacaa

SEQ ID NO: 15830 - DNA, 25 bp, Artificial
  Probe
cattggaacgtaaatcagaataagc

SEQ ID NO: 15831 - DNA, 25 bp, Artificial
  Probe
gttggaagcatggtggaacaattta

SEQ ID NO: 15832 - DNA, 25 bp, Artificial
  Probe
aacgtaaatcagaataagcggcaat

SEQ ID NO: 15833 - DNA, 25 bp, Artificial
  Probe
gtttcaacccattggaacgtaaatc

SEQ ID NO: 15834 - DNA, 25 bp, Artificial
  Probe
aaagaacctgattctgagtttcaac

SEQ ID NO: 15835 - DNA, 25 bp, Artificial
  Probe
ttcagatttgagcatagcaggtcag

SEQ ID NO: 15836 - DNA, 25 bp, Artificial
  Probe
ttggaacgtaaatcagaataagcgg

SEQ ID NO: 15837 - DNA, 25 bp, Artificial
  Probe
ccattggaacgtaaatcagaataag

SEQ ID NO: 15838 - DNA, 25 bp, Artificial
  Probe
gaacctgattctgagtttcaaccca

SEQ ID NO: 15839 - DNA, 25 bp, Artificial
  Probe
tttcaacccattggaacgtaaatca

SEQ ID NO: 15840 - DNA, 25 bp, Artificial
  Probe
agtttcaacccattggaacgtaaat

SEQ ID NO: 15841 - DNA, 25 bp, Artificial
  Probe
gtaaagaacctgattctgagtttca

SEQ ID NO: 15842 - DNA, 25 bp, Artificial
  Probe
cagtaaagaacctgattctgagttt

SEQ ID NO: 15843 - DNA, 25 bp, Artificial
  Probe
ctataaggactccactctcatcatg

SEQ ID NO: 15844 - DNA, 25 bp, Artificial
  Probe
tataaggactccactctcatcatgc

SEQ ID NO: 15845 - DNA, 25 bp, Artificial
  Probe
cctataaggactccactctcatcat

SEQ ID NO: 15846 - DNA, 25 bp, Artificial
  Probe
ttctgtgttctactatgagatccag

SEQ ID NO: 15847 - DNA, 25 bp, Artificial
  Probe
ttggagggttattagtagcattgag

SEQ ID NO: 15848 - DNA, 25 bp, Artificial
  Probe
cttggagggttattagtagcattga

SEQ ID NO: 15849 - DNA, 25 bp, Artificial
  Probe
tcttggagggttattagtagcattg

SEQ ID NO: 15850 - DNA, 25 bp, Artificial
  Probe
gggttattagtagcattgagcagaa

SEQ ID NO: 15851 - DNA, 25 bp, Artificial
  Probe
ttcttggagggttattagtagcatt

SEQ ID NO: 15852 - DNA, 25 bp, Artificial
  Probe
ggttattagtagcattgagcagaaa

SEQ ID NO: 15853 - DNA, 25 bp, Artificial
  Probe
gagggttattagtagcattgagcag

SEQ ID NO: 15854 - DNA, 25 bp, Artificial
  Probe
agggttattagtagcattgagcaga

SEQ ID NO: 15855 - DNA, 25 bp, Artificial
  Probe
tactatgagatccagaatgcaccag

SEQ ID NO: 15856 - DNA, 25 bp, Artificial
  Probe
ctactatgagatccagaatgcacca

SEQ ID NO: 15857 - DNA, 25 bp, Artificial
  Probe
tctactatgagatccagaatgcacc

SEQ ID NO: 15858 - DNA, 25 bp, Artificial
  Probe
tgttctactatgagatccagaatgc

SEQ ID NO: 15859 - DNA, 25 bp, Artificial
  Probe
ctgtgttctactatgagatccagaa

SEQ ID NO: 15860 - DNA, 25 bp, Artificial
  Probe
ctatcgggagaagattgagaaggag

SEQ ID NO: 15861 - DNA, 25 bp, Artificial
  Probe
tgctcgacaagttccttatcaagaa

SEQ ID NO: 15862 - DNA, 25 bp, Artificial
  Probe
tgtgttctactatgagatccagaat

SEQ ID NO: 15863 - DNA, 25 bp, Artificial
  Probe
ggagggttattagtagcattgagca

SEQ ID NO: 15864 - DNA, 25 bp, Artificial
  Probe
tggagggttattagtagcattgagc

SEQ ID NO: 15865 - DNA, 25 bp, Artificial
  Probe
gtgttctactatgagatccagaatg

SEQ ID NO: 15866 - DNA, 25 bp, Artificial
  Probe
tttctgtgttctactatgagatcca

SEQ ID NO: 15867 - DNA, 25 bp, Artificial
  Probe
ctgctcgacaagttccttatcaaga

SEQ ID NO: 15868 - DNA, 25 bp, Artificial
  Probe
tctgctcgacaagttccttatcaag

SEQ ID NO: 15869 - DNA, 25 bp, Artificial
  Probe
ctctgctcgacaagttccttatcaa

SEQ ID NO: 15870 - DNA, 25 bp, Artificial
  Probe
ctatgagatccagaatgcaccagag

SEQ ID NO: 15871 - DNA, 25 bp, Artificial
  Probe
ttcagtacgagagcaaggtgttcta

SEQ ID NO: 15872 - DNA, 25 bp, Artificial
  Probe
ttctactatgagatccagaatgcac

SEQ ID NO: 15873 - DNA, 25 bp, Artificial
  Probe
gttctactatgagatccagaatgca

SEQ ID NO: 15874 - DNA, 25 bp, Artificial
  Probe
gaatgagaagaagctggagaaagtc

SEQ ID NO: 15875 - DNA, 25 bp, Artificial
  Probe
gagaagaagctggagaaagtcaaag

SEQ ID NO: 15876 - DNA, 25 bp, Artificial
  Probe
ataaggactccactctcatcatgca

SEQ ID NO: 15877 - DNA, 25 bp, Artificial
  Probe
actatgagatccagaatgcaccaga

SEQ ID NO: 15878 - DNA, 25 bp, Artificial
  Probe
gagaagattgagaaggagctggaga

SEQ ID NO: 15879 - DNA, 25 bp, Artificial
  Probe
aagcctatcgggagaagattgagaa

SEQ ID NO: 15880 - DNA, 25 bp, Artificial
  Probe
aaagcctatcgggagaagattgaga

SEQ ID NO: 15881 - DNA, 25 bp, Artificial
  Probe
gaaagtcaaagcctatcgggagaag

SEQ ID NO: 15882 - DNA, 25 bp, Artificial
  Probe
ttccttatcaagaactgcaatgatt

SEQ ID NO: 15883 - DNA, 25 bp, Artificial
  Probe
tcagtacgagagcaaggtgttctac

SEQ ID NO: 15884 - DNA, 25 bp, Artificial
  Probe
agaagattgagaaggagctggagac

SEQ ID NO: 15885 - DNA, 25 bp, Artificial
  Probe
tctgtgttctactatgagatccaga

SEQ ID NO: 15886 - DNA, 25 bp, Artificial
  Probe
agtcaaagcctatcgggagaagatt

SEQ ID NO: 15887 - DNA, 25 bp, Artificial
  Probe
aagtcaaagcctatcgggagaagat

SEQ ID NO: 15888 - DNA, 25 bp, Artificial
  Probe
cttcaacaagtacctaacaagagcc

SEQ ID NO: 15889 - DNA, 25 bp, Artificial
  Probe
gatttcttacccaaagcacattctt

SEQ ID NO: 15890 - DNA, 25 bp, Artificial
  Probe
tttcttacccaaagcacattcttag

SEQ ID NO: 15891 - DNA, 25 bp, Artificial
  Probe
gagatttcttacccaaagcacattc

SEQ ID NO: 15892 - DNA, 25 bp, Artificial
  Probe
gctcctggctaagataagatatttc

SEQ ID NO: 15893 - DNA, 25 bp, Artificial
  Probe
tatcttcctttctttccagactctc

SEQ ID NO: 15894 - DNA, 25 bp, Artificial
  Probe
gcttatcttcctttctttccagact

SEQ ID NO: 15895 - DNA, 25 bp, Artificial
  Probe
agatttcttacccaaagcacattct

SEQ ID NO: 15896 - DNA, 25 bp, Artificial
  Probe
tgagatttcttacccaaagcacatt

SEQ ID NO: 15897 - DNA, 25 bp, Artificial
  Probe
atcttcctttctttccagactctct

SEQ ID NO: 15898 - DNA, 25 bp, Artificial
  Probe
ttatcttcctttctttccagactct

SEQ ID NO: 15899 - DNA, 25 bp, Artificial
  Probe
atttcttacccaaagcacattctta

SEQ ID NO: 15900 - DNA, 25 bp, Artificial
  Probe
ttctttccagactctctcttccttt

SEQ ID NO: 15901 - DNA, 25 bp, Artificial
  Probe
tttctttccagactctctcttcctt

SEQ ID NO: 15902 - DNA, 25 bp, Artificial
  Probe
ttcctttctttccagactctctctt

SEQ ID NO: 15903 - DNA, 25 bp, Artificial
  Probe
actgaagaatcatctgagaaatcca

SEQ ID NO: 15904 - DNA, 25 bp, Artificial
  Probe
cttatcttcctttctttccagactc

SEQ ID NO: 15905 - DNA, 25 bp, Artificial
  Probe
ctgagatttcttacccaaagcacat

SEQ ID NO: 15906 - DNA, 25 bp, Artificial
  Probe
ctcctggctaagataagatatttcc

SEQ ID NO: 15907 - DNA, 25 bp, Artificial
  Probe
ttcttacccaaagcacattcttagc

SEQ ID NO: 15908 - DNA, 25 bp, Artificial
  Probe
ctttccagactctctcttcctttct

SEQ ID NO: 15909 - DNA, 25 bp, Artificial
  Probe
tctttccagactctctcttcctttc

SEQ ID NO: 15910 - DNA, 25 bp, Artificial
  Probe
ctttctttccagactctctcttcct

SEQ ID NO: 15911 - DNA, 25 bp, Artificial
  Probe
tcctttctttccagactctctcttc

SEQ ID NO: 15912 - DNA, 25 bp, Artificial
  Probe
cttcctttctttccagactctctct

SEQ ID NO: 15913 - DNA, 25 bp, Artificial
  Probe
tcttcctttctttccagactctctc

SEQ ID NO: 15914 - DNA, 25 bp, Artificial
  Probe
aactgaagaatcatctgagaaatcc

SEQ ID NO: 15915 - DNA, 25 bp, Artificial
  Probe
ttccacttcaacaagtacctaacaa

SEQ ID NO: 15916 - DNA, 25 bp, Artificial
  Probe
ctgaagaatcatctgagaaatccag

SEQ ID NO: 15917 - DNA, 25 bp, Artificial
  Probe
cacttcaacaagtacctaacaagag

SEQ ID NO: 15918 - DNA, 25 bp, Artificial
  Probe
gagttccacttcaacaagtacctaa

SEQ ID NO: 15919 - DNA, 25 bp, Artificial
  Probe
tgaagaatcatctgagaaatccagc

SEQ ID NO: 15920 - DNA, 25 bp, Artificial
  Probe
ccacttcaacaagtacctaacaaga

SEQ ID NO: 15921 - DNA, 25 bp, Artificial
  Probe
tccacttcaacaagtacctaacaag

SEQ ID NO: 15922 - DNA, 25 bp, Artificial
  Probe
agttccacttcaacaagtacctaac

SEQ ID NO: 15923 - DNA, 25 bp, Artificial
  Probe
acttcaacaagtacctaacaagagc

SEQ ID NO: 15924 - DNA, 25 bp, Artificial
  Probe
gttccacttcaacaagtacctaaca

SEQ ID NO: 15925 - DNA, 25 bp, Artificial
  Probe
cctttctttccagactctctcttcc

SEQ ID NO: 15926 - DNA, 25 bp, Artificial
  Probe
agcacattcttagcttatcttcctt

SEQ ID NO: 15927 - DNA, 25 bp, Artificial
  Probe
gcacattcttagcttatcttccttt

SEQ ID NO: 15928 - DNA, 25 bp, Artificial
  Probe
agcttatcttcctttctttccagac

SEQ ID NO: 15929 - DNA, 25 bp, Artificial
  Probe
aaacagggaaagttggagagtatgg

SEQ ID NO: 15930 - DNA, 25 bp, Artificial
  Probe
tagcttatcttcctttctttccaga

SEQ ID NO: 15931 - DNA, 25 bp, Artificial
  Probe
ttagcttatcttcctttctttccag

SEQ ID NO: 15932 - DNA, 25 bp, Artificial
  Probe
cttagcttatcttcctttctttcca

SEQ ID NO: 15933 - DNA, 25 bp, Artificial
  Probe
ccgatccaatgacaaggtatatgaa

SEQ ID NO: 15934 - DNA, 25 bp, Artificial
  Probe
aattggaagagaagtgtctgaggag

SEQ ID NO: 15935 - DNA, 25 bp, Artificial
  Probe
gaattggaagagaagtgtctgagga

SEQ ID NO: 15936 - DNA, 25 bp, Artificial
  Probe
ttagatgtccagttgttacaccatg

SEQ ID NO: 15937 - DNA, 25 bp, Artificial
  Probe
tagtgaaggctgtcattgagatgtc

SEQ ID NO: 15938 - DNA, 25 bp, Artificial
  Probe
ctagtgaaggctgtcattgagatgt

SEQ ID NO: 15939 - DNA, 25 bp, Artificial
  Probe
gagcataccttccctttagtttgtt

SEQ ID NO: 15940 - DNA, 25 bp, Artificial
  Probe
gagagcataccttccctttagtttg

SEQ ID NO: 15941 - DNA, 25 bp, Artificial
  Probe
gaccgatccaatgacaaggtatatg

SEQ ID NO: 15942 - DNA, 25 bp, Artificial
  Probe
agcataccttccctttagtttgttg

SEQ ID NO: 15943 - DNA, 25 bp, Artificial
  Probe
accgatccaatgacaaggtatatga

SEQ ID NO: 15944 - DNA, 25 bp, Artificial
  Probe
tgaccgatccaatgacaaggtatat

SEQ ID NO: 15945 - DNA, 25 bp, Artificial
  Probe
tgagagcataccttccctttagttt

SEQ ID NO: 15946 - DNA, 25 bp, Artificial
  Probe
ttgagagcataccttccctttagtt

SEQ ID NO: 15947 - DNA, 25 bp, Artificial
  Probe
tttgagagcataccttccctttagt

SEQ ID NO: 15948 - DNA, 25 bp, Artificial
  Probe
ttgaccgatccaatgacaaggtata

SEQ ID NO: 15949 - DNA, 25 bp, Artificial
  Probe
agagcataccttccctttagtttgt

SEQ ID NO: 15950 - DNA, 25 bp, Artificial
  Probe
gctgaaagtctctcttgtataagtt

SEQ ID NO: 15951 - DNA, 25 bp, Artificial
  Probe
tttagatgtccagttgttacaccat

SEQ ID NO: 15952 - DNA, 25 bp, Artificial
  Probe
cgaattggaagagaagtgtctgagg

SEQ ID NO: 15953 - DNA, 25 bp, Artificial
  Probe
cgatccaatgacaaggtatatgaaa

SEQ ID NO: 15954 - DNA, 25 bp, Artificial
  Probe
tctttagatgtccagttgttacacc

SEQ ID NO: 15955 - DNA, 25 bp, Artificial
  Probe
ctttagatgtccagttgttacacca

SEQ ID NO: 15956 - DNA, 25 bp, Artificial
  Probe
gcataccttccctttagtttgttgg

SEQ ID NO: 15957 - DNA, 25 bp, Artificial
  Probe
ttctttagatgtccagttgttacac

SEQ ID NO: 15958 - DNA, 25 bp, Artificial
  Probe
tcgaattggaagagaagtgtctgag

SEQ ID NO: 15959 - DNA, 25 bp, Artificial
  Probe
attggaagagaagtgtctgaggagg

SEQ ID NO: 15960 - DNA, 25 bp, Artificial
  Probe
tagatgtccagttgttacaccatgc

SEQ ID NO: 15961 - DNA, 25 bp, Artificial
  Probe
cctagtgaaggctgtcattgagatg

SEQ ID NO: 15962 - DNA, 25 bp, Artificial
  Probe
tttctttagatgtccagttgttaca

SEQ ID NO: 15963 - DNA, 25 bp, Artificial
  Probe
agctgaaagtctctcttgtataagt

SEQ ID NO: 15964 - DNA, 25 bp, Artificial
  Probe
ttcagcaggagtacaagaagcagat

SEQ ID NO: 15965 - DNA, 25 bp, Artificial
  Probe
gatgccaagaatctacttgatgtta

SEQ ID NO: 15966 - DNA, 25 bp, Artificial
  Probe
ggatgccaagaatctacttgatgtt

SEQ ID NO: 15967 - DNA, 25 bp, Artificial
  Probe
atcttctctagcattccaccagcag

SEQ ID NO: 15968 - DNA, 25 bp, Artificial
  Probe
ttttgagagcataccttccctttag

SEQ ID NO: 15969 - DNA, 25 bp, Artificial
  Probe
ggttttctttagatgtccagttgtt

SEQ ID NO: 15970 - DNA, 25 bp, Artificial
  Probe
tgccaagaatctacttgatgttatt

SEQ ID NO: 15971 - DNA, 25 bp, Artificial
  Probe
gttttgagagcataccttcccttta

SEQ ID NO: 15972 - DNA, 25 bp, Artificial
  Probe
gatcttctctagcattccaccagca

SEQ ID NO: 15973 - DNA, 25 bp, Artificial
  Probe
agggatgtggttttctttagatgtc

SEQ ID NO: 15974 - DNA, 25 bp, Artificial
  Probe
gccaagaatctacttgatgttattg

SEQ ID NO: 15975 - DNA, 25 bp, Artificial
  Probe
atgccaagaatctacttgatgttat

SEQ ID NO: 15976 - DNA, 25 bp, Artificial
  Probe
gtggatgccaagaatctacttgatg

SEQ ID NO: 15977 - DNA, 25 bp, Artificial
  Probe
cagggatgtggttttctttagatgt

SEQ ID NO: 15978 - DNA, 25 bp, Artificial
  Probe
cttccagaaggttcttacaagtcac

SEQ ID NO: 15979 - DNA, 25 bp, Artificial
  Probe
tcatgttactgaagttgaaggagaa

SEQ ID NO: 15980 - DNA, 25 bp, Artificial
  Probe
catcatgttactgaagttgaaggag

SEQ ID NO: 15981 - DNA, 25 bp, Artificial
  Probe
atcatgttactgaagttgaaggaga

SEQ ID NO: 15982 - DNA, 25 bp, Artificial
  Probe
ttccagaaggttcttacaagtcaca

SEQ ID NO: 15983 - DNA, 25 bp, Artificial
  Probe
acatcatgttactgaagttgaagga

SEQ ID NO: 15984 - DNA, 25 bp, Artificial
  Probe
gacatcatgttactgaagttgaagg

SEQ ID NO: 15985 - DNA, 25 bp, Artificial
  Probe
tgacatcatgttactgaagttgaag

SEQ ID NO: 15986 - DNA, 25 bp, Artificial
  Probe
ccagaaggttcttacaagtcacaga

SEQ ID NO: 15987 - DNA, 25 bp, Artificial
  Probe
tccagaaggttcttacaagtcacag

SEQ ID NO: 15988 - DNA, 25 bp, Artificial
  Probe
atgacatcatgttactgaagttgaa

SEQ ID NO: 15989 - DNA, 25 bp, Artificial
  Probe
atgttactgaagttgaaggagaaag

SEQ ID NO: 15990 - DNA, 25 bp, Artificial
  Probe
tcttacaagtcacagaaagttccta

SEQ ID NO: 15991 - DNA, 25 bp, Artificial
  Probe
tgttactgaagttgaaggagaaagc

SEQ ID NO: 15992 - DNA, 25 bp, Artificial
  Probe
aactatgataagcgtttggttctcc

SEQ ID NO: 15993 - DNA, 25 bp, Artificial
  Probe
cttacaagtcacagaaagttcctaa

SEQ ID NO: 15994 - DNA, 25 bp, Artificial
  Probe
cagaaggttcttacaagtcacagaa

SEQ ID NO: 15995 - DNA, 25 bp, Artificial
  Probe
gcttccagaaggttcttacaagtca

SEQ ID NO: 15996 - DNA, 25 bp, Artificial
  Probe
tcaataaagagccagatcctagact

SEQ ID NO: 15997 - DNA, 25 bp, Artificial
  Probe
ttacaagtcacagaaagttcctaaa

SEQ ID NO: 15998 - DNA, 25 bp, Artificial
  Probe
tcttgagggagaattaactctggat

SEQ ID NO: 15999 - DNA, 25 bp, Artificial
  Probe
atcttgagggagaattaactctgga

SEQ ID NO: 16000 - DNA, 25 bp, Artificial
  Probe
gttactgaagttgaaggagaaagcc

SEQ ID NO: 16001 - DNA, 25 bp, Artificial
  Probe
aagcaattcattcatccaaactatg

SEQ ID NO: 16002 - DNA, 25 bp, Artificial
  Probe
catgttactgaagttgaaggagaaa

SEQ ID NO: 16003 - DNA, 25 bp, Artificial
  Probe
acatataaagaagacacatggcaga

SEQ ID NO: 16004 - DNA, 25 bp, Artificial
  Probe
cttcaccagaatctcccattacaga

SEQ ID NO: 16005 - DNA, 25 bp, Artificial
  Probe
tcttcaccagaatctcccattacag

SEQ ID NO: 16006 - DNA, 25 bp, Artificial
  Probe
aacatataaagaagacacatggcag

SEQ ID NO: 16007 - DNA, 25 bp, Artificial
  Probe
ttactgaagttgaaggagaaagcca

SEQ ID NO: 16008 - DNA, 25 bp, Artificial
  Probe
tataaagaagacacatggcagaagc

SEQ ID NO: 16009 - DNA, 25 bp, Artificial
  Probe
atataaagaagacacatggcagaag

SEQ ID NO: 16010 - DNA, 25 bp, Artificial
  Probe
ctcaataaagagccagatcctagac

SEQ ID NO: 16011 - DNA, 25 bp, Artificial
  Probe
agcttccagaaggttcttacaagtc

SEQ ID NO: 16012 - DNA, 25 bp, Artificial
  Probe
gagcttccagaaggttcttacaagt

SEQ ID NO: 16013 - DNA, 25 bp, Artificial
  Probe
tgagcttccagaaggttcttacaag

SEQ ID NO: 16014 - DNA, 25 bp, Artificial
  Probe
cttgagggagaattaactctggatc

SEQ ID NO: 16015 - DNA, 25 bp, Artificial
  Probe
gatcttgagggagaattaactctgg

SEQ ID NO: 16016 - DNA, 25 bp, Artificial
  Probe
catataaagaagacacatggcagaa

SEQ ID NO: 16017 - DNA, 25 bp, Artificial
  Probe
aaacatataaagaagacacatggca

SEQ ID NO: 16018 - DNA, 25 bp, Artificial
  Probe
ttgagggagaattaactctggatct

SEQ ID NO: 16019 - DNA, 25 bp, Artificial
  Probe
ttcaccagaatctcccattacagac

SEQ ID NO: 16020 - DNA, 25 bp, Artificial
  Probe
gtcttcaccagaatctcccattaca

SEQ ID NO: 16021 - DNA, 25 bp, Artificial
  Probe
tgtcttcaccagaatctcccattac

SEQ ID NO: 16022 - DNA, 25 bp, Artificial
  Probe
tactgaagttgaaggagaaagccaa

SEQ ID NO: 16023 - DNA, 25 bp, Artificial
  Probe
gattgttgttggcttgtgtactaat

SEQ ID NO: 16024 - DNA, 25 bp, Artificial
  Probe
gctctatgtgaagtgatgataactc

SEQ ID NO: 16025 - DNA, 25 bp, Artificial
  Probe
agattgttgttggcttgtgtactaa

SEQ ID NO: 16026 - DNA, 25 bp, Artificial
  Probe
gttgatgctgttaatgctgttgttc

SEQ ID NO: 16027 - DNA, 25 bp, Artificial
  Probe
ttgttgttggcttgtgtactaataa

SEQ ID NO: 16028 - DNA, 25 bp, Artificial
  Probe
atgtgaagtgatgataactctgtgc

SEQ ID NO: 16029 - DNA, 25 bp, Artificial
  Probe
attgttgttggcttgtgtactaata

SEQ ID NO: 16030 - DNA, 25 bp, Artificial
  Probe
aagattgttgttggcttgtgtacta

SEQ ID NO: 16031 - DNA, 25 bp, Artificial
  Probe
tgttgatgctgttaatgctgttgtt

SEQ ID NO: 16032 - DNA, 25 bp, Artificial
  Probe
tatgtgaagtgatgataactctgtg

SEQ ID NO: 16033 - DNA, 25 bp, Artificial
  Probe
ctatgtgaagtgatgataactctgt

SEQ ID NO: 16034 - DNA, 25 bp, Artificial
  Probe
ctgttgatgctgttaatgctgttgt

SEQ ID NO: 16035 - DNA, 25 bp, Artificial
  Probe
tctatgtgaagtgatgataactctg

SEQ ID NO: 16036 - DNA, 25 bp, Artificial
  Probe
ctctatgtgaagtgatgataactct

SEQ ID NO: 16037 - DNA, 25 bp, Artificial
  Probe
agctctatgtgaagtgatgataact

SEQ ID NO: 16038 - DNA, 25 bp, Artificial
  Probe
ttgatgctgttaatgctgttgttcg

SEQ ID NO: 16039 - DNA, 25 bp, Artificial
  Probe
agttagaaagattgttgttggcttg

SEQ ID NO: 16040 - DNA, 25 bp, Artificial
  Probe
ttagaaagattgttgttggcttgtg

SEQ ID NO: 16041 - DNA, 25 bp, Artificial
  Probe
gttagaaagattgttgttggcttgt

SEQ ID NO: 16042 - DNA, 25 bp, Artificial
  Probe
aagttagaaagattgttgttggctt

SEQ ID NO: 16043 - DNA, 25 bp, Artificial
  Probe
caagttagaaagattgttgttggct

SEQ ID NO: 16044 - DNA, 25 bp, Artificial
  Probe
agcaagttagaaagattgttgttgg

SEQ ID NO: 16045 - DNA, 25 bp, Artificial
  Probe
cagcaagttagaaagattgttgttg

SEQ ID NO: 16046 - DNA, 25 bp, Artificial
  Probe
tgtgaagtgatgataactctgtgcc

SEQ ID NO: 16047 - DNA, 25 bp, Artificial
  Probe
agaaagattgttgttggcttgtgta

SEQ ID NO: 16048 - DNA, 25 bp, Artificial
  Probe
tagaaagattgttgttggcttgtgt

SEQ ID NO: 16049 - DNA, 25 bp, Artificial
  Probe
tgttgttggcttgtgtactaataaa

SEQ ID NO: 16050 - DNA, 25 bp, Artificial
  Probe
cacagcaagttagaaagattgttgt

SEQ ID NO: 16051 - DNA, 25 bp, Artificial
  Probe
acacagcaagttagaaagattgttg

SEQ ID NO: 16052 - DNA, 25 bp, Artificial
  Probe
acagcaagttagaaagattgttgtt

SEQ ID NO: 16053 - DNA, 25 bp, Artificial
  Probe
caagggtttgtctttcaatagatcg

SEQ ID NO: 16054 - DNA, 25 bp, Artificial
  Probe
gcaagttagaaagattgttgttggc

SEQ ID NO: 16055 - DNA, 25 bp, Artificial
  Probe
tacacagcaagttagaaagattgtt

SEQ ID NO: 16056 - DNA, 25 bp, Artificial
  Probe
ttacacagcaagttagaaagattgt

SEQ ID NO: 16057 - DNA, 25 bp, Artificial
  Probe
gttgttggcttgtgtactaataaag

SEQ ID NO: 16058 - DNA, 25 bp, Artificial
  Probe
gaaagattgttgttggcttgtgtac

SEQ ID NO: 16059 - DNA, 25 bp, Artificial
  Probe
tttacacagcaagttagaaagattg

SEQ ID NO: 16060 - DNA, 25 bp, Artificial
  Probe
aaagattgttgttggcttgtgtact

SEQ ID NO: 16061 - DNA, 25 bp, Artificial
  Probe
gctgttgatgctgttaatgctgttg

SEQ ID NO: 16062 - DNA, 25 bp, Artificial
  Probe
aagggtttgtctttcaatagatcgc

SEQ ID NO: 16063 - DNA, 25 bp, Artificial
  Probe
gtactaataaagctggacacaaggg

SEQ ID NO: 16064 - DNA, 25 bp, Artificial
  Probe
ctaataaagctggacacaagggttt

SEQ ID NO: 16065 - DNA, 25 bp, Artificial
  Probe
tactaataaagctggacacaagggt

SEQ ID NO: 16066 - DNA, 25 bp, Artificial
  Probe
gggtttgtctttcaatagatcgcag

SEQ ID NO: 16067 - DNA, 25 bp, Artificial
  Probe
tgtactaataaagctggacacaagg

SEQ ID NO: 16068 - DNA, 25 bp, Artificial
  Probe
taccatgtggatactaggaattgag

SEQ ID NO: 16069 - DNA, 25 bp, Artificial
  Probe
ctaccatgtggatactaggaattga

SEQ ID NO: 16070 - DNA, 25 bp, Artificial
  Probe
gctaccatgtggatactaggaattg

SEQ ID NO: 16071 - DNA, 25 bp, Artificial
  Probe
ataagctaccatgtggatactagga

SEQ ID NO: 16072 - DNA, 25 bp, Artificial
  Probe
taagctaccatgtggatactaggaa

SEQ ID NO: 16073 - DNA, 25 bp, Artificial
  Probe
agctaccatgtggatactaggaatt

SEQ ID NO: 16074 - DNA, 25 bp, Artificial
  Probe
aagctaccatgtggatactaggaat

SEQ ID NO: 16075 - DNA, 25 bp, Artificial
  Probe
tataagctaccatgtggatactagg

SEQ ID NO: 16076 - DNA, 25 bp, Artificial
  Probe
accatgtggatactaggaattgagc

SEQ ID NO: 16077 - DNA, 25 bp, Artificial
  Probe
ctggattatagtacaatctggctgt

SEQ ID NO: 16078 - DNA, 25 bp, Artificial
  Probe
tctggattatagtacaatctggctg

SEQ ID NO: 16079 - DNA, 25 bp, Artificial
  Probe
ctctggattatagtacaatctggct

SEQ ID NO: 16080 - DNA, 25 bp, Artificial
  Probe
tctctggattatagtacaatctggc

SEQ ID NO: 16081 - DNA, 25 bp, Artificial
  Probe
ggaaagttagtttgtagaaggaagt

SEQ ID NO: 16082 - DNA, 25 bp, Artificial
  Probe
tgaaggaaagttagtttgtagaagg

SEQ ID NO: 16083 - DNA, 25 bp, Artificial
  Probe
cagtgaaggaaagttagtttgtaga

SEQ ID NO: 16084 - DNA, 25 bp, Artificial
  Probe
ggtccttacagatggttataagcta

SEQ ID NO: 16085 - DNA, 25 bp, Artificial
  Probe
acgtaccttcctagaacttacttaa

SEQ ID NO: 16086 - DNA, 25 bp, Artificial
  Probe
tatagtacaatctggctgtaacaca

SEQ ID NO: 16087 - DNA, 25 bp, Artificial
  Probe
gtacacacctttaatccctaacagt

SEQ ID NO: 16088 - DNA, 25 bp, Artificial
  Probe
agtacacacctttaatccctaacag

SEQ ID NO: 16089 - DNA, 25 bp, Artificial
  Probe
acacccttagtacacacctttaatc

SEQ ID NO: 16090 - DNA, 25 bp, Artificial
  Probe
gcttctaggtttatatgatctggct

SEQ ID NO: 16091 - DNA, 25 bp, Artificial
  Probe
aggaaagttagtttgtagaaggaag

SEQ ID NO: 16092 - DNA, 25 bp, Artificial
  Probe
gaaggaaagttagtttgtagaagga

SEQ ID NO: 16093 - DNA, 25 bp, Artificial
  Probe
ggtttatatgatctggcttgaatgc

SEQ ID NO: 16094 - DNA, 25 bp, Artificial
  Probe
aagatcacatccgaagagcttctag

SEQ ID NO: 16095 - DNA, 25 bp, Artificial
  Probe
cacacccttagtacacacctttaat

SEQ ID NO: 16096 - DNA, 25 bp, Artificial
  Probe
tcagacagagtgacgaatcagagaa

SEQ ID NO: 16097 - DNA, 25 bp, Artificial
  Probe
ccatgtggatactaggaattgagcc

SEQ ID NO: 16098 - DNA, 25 bp, Artificial
  Probe
ccttagtacacacctttaatcccta

SEQ ID NO: 16099 - DNA, 25 bp, Artificial
  Probe
cacccttagtacacacctttaatcc

SEQ ID NO: 16100 - DNA, 25 bp, Artificial
  Probe
cagagtgacgaatcagagaaagttt

SEQ ID NO: 16101 - DNA, 25 bp, Artificial
  Probe
tggattatagtacaatctggctgta

SEQ ID NO: 16102 - DNA, 25 bp, Artificial
  Probe
accttcctagaacttacttaaacca

SEQ ID NO: 16103 - DNA, 25 bp, Artificial
  Probe
ggttataagctaccatgtggatact

SEQ ID NO: 16104 - DNA, 25 bp, Artificial
  Probe
gtccttacagatggttataagctac

SEQ ID NO: 16105 - DNA, 25 bp, Artificial
  Probe
aggtttatatgatctggcttgaatg

SEQ ID NO: 16106 - DNA, 25 bp, Artificial
  Probe
tccttacagatggttataagctacc

SEQ ID NO: 16107 - DNA, 25 bp, Artificial
  Probe
tagtacacacctttaatccctaaca

SEQ ID NO: 16108 - DNA, 25 bp, Artificial
  Probe
tctaggtttatatgatctggcttga

SEQ ID NO: 16109 - DNA, 25 bp, Artificial
  Probe
ttagtttgtagaaggaagtagtcac

SEQ ID NO: 16110 - DNA, 25 bp, Artificial
  Probe
gttagtttgtagaaggaagtagtca

SEQ ID NO: 16111 - DNA, 25 bp, Artificial
  Probe
aaggaaagttagtttgtagaaggaa

SEQ ID NO: 16112 - DNA, 25 bp, Artificial
  Probe
agtgaaggaaagttagtttgtagaa

SEQ ID NO: 16113 - DNA, 25 bp, Artificial
  Probe
cctccttcctatgacagtgtaacaa

SEQ ID NO: 16114 - DNA, 25 bp, Artificial
  Probe
ctcctccttcctatgacagtgtaac

SEQ ID NO: 16115 - DNA, 25 bp, Artificial
  Probe
tctcctccttcctatgacagtgtaa

SEQ ID NO: 16116 - DNA, 25 bp, Artificial
  Probe
ctctcctccttcctatgacagtgta

SEQ ID NO: 16117 - DNA, 25 bp, Artificial
  Probe
tcctccttcctatgacagtgtaaca

SEQ ID NO: 16118 - DNA, 25 bp, Artificial
  Probe
tagtacaacgctcctgtcatctatt

SEQ ID NO: 16119 - DNA, 25 bp, Artificial
  Probe
ttagtacaacgctcctgtcatctat

SEQ ID NO: 16120 - DNA, 25 bp, Artificial
  Probe
attagtacaacgctcctgtcatcta

SEQ ID NO: 16121 - DNA, 25 bp, Artificial
  Probe
ctaagtccacaagtttctccagtaa

SEQ ID NO: 16122 - DNA, 25 bp, Artificial
  Probe
taagtccacaagtttctccagtaat

SEQ ID NO: 16123 - DNA, 25 bp, Artificial
  Probe
aaatacgacaaagagacaatcaagg

SEQ ID NO: 16124 - DNA, 25 bp, Artificial
  Probe
aaagaaatcaaagggaaagaggtca

SEQ ID NO: 16125 - DNA, 25 bp, Artificial
  Probe
tccacaagtttctccagtaatcata

SEQ ID NO: 16126 - DNA, 25 bp, Artificial
  Probe
gtccacaagtttctccagtaatcat

SEQ ID NO: 16127 - DNA, 25 bp, Artificial
  Probe
aagtccacaagtttctccagtaatc

SEQ ID NO: 16128 - DNA, 25 bp, Artificial
  Probe
cgagtaaatacgacaaagagacaat

SEQ ID NO: 16129 - DNA, 25 bp, Artificial
  Probe
tttgcctgagagatgaaattattgc

SEQ ID NO: 16130 - DNA, 25 bp, Artificial
  Probe
ctccttcctatgacagtgtaacaaa

SEQ ID NO: 16131 - DNA, 25 bp, Artificial
  Probe
aagaaatcaaagggaaagaggtcag

SEQ ID NO: 16132 - DNA, 25 bp, Artificial
  Probe
tggttattgacaaattgaatgggaa

SEQ ID NO: 16133 - DNA, 25 bp, Artificial
  Probe
aatacgacaaagagacaatcaaggg

SEQ ID NO: 16134 - DNA, 25 bp, Artificial
  Probe
ttgcctgagagatgaaattattgct

SEQ ID NO: 16135 - DNA, 25 bp, Artificial
  Probe
ccacaagtttctccagtaatcataa

SEQ ID NO: 16136 - DNA, 25 bp, Artificial
  Probe
atggttattgacaaattgaatggga

SEQ ID NO: 16137 - DNA, 25 bp, Artificial
  Probe
aatactcaaggtcagtgcctatacc

SEQ ID NO: 16138 - DNA, 25 bp, Artificial
  Probe
gaaatcaaagggaaagaggtcagag

SEQ ID NO: 16139 - DNA, 25 bp, Artificial
  Probe
aaatcaaagggaaagaggtcagaga

SEQ ID NO: 16140 - DNA, 25 bp, Artificial
  Probe
agaaatcaaagggaaagaggtcaga

SEQ ID NO: 16141 - DNA, 25 bp, Artificial
  Probe
tttcaacaaatactcaaggtcagtg

SEQ ID NO: 16142 - DNA, 25 bp, Artificial
  Probe
gtttcaacaaatactcaaggtcagt

SEQ ID NO: 16143 - DNA, 25 bp, Artificial
  Probe
agtccacaagtttctccagtaatca

SEQ ID NO: 16144 - DNA, 25 bp, Artificial
  Probe
ccacttcatagtctgttcataatac

SEQ ID NO: 16145 - DNA, 25 bp, Artificial
  Probe
aaagggaaagaggtcagagagaatc

SEQ ID NO: 16146 - DNA, 25 bp, Artificial
  Probe
atacgacaaagagacaatcaaggga

SEQ ID NO: 16147 - DNA, 25 bp, Artificial
  Probe
agtaaatacgacaaagagacaatca

SEQ ID NO: 16148 - DNA, 25 bp, Artificial
  Probe
cattagtacaacgctcctgtcatct

SEQ ID NO: 16149 - DNA, 25 bp, Artificial
  Probe
acaaagagacaatcaagggaaggat

SEQ ID NO: 16150 - DNA, 25 bp, Artificial
  Probe
gggaaagaggtcagagagaatcaaa

SEQ ID NO: 16151 - DNA, 25 bp, Artificial
  Probe
caaagggaaagaggtcagagagaat

SEQ ID NO: 16152 - DNA, 25 bp, Artificial
  Probe
aatcaaagggaaagaggtcagagag

SEQ ID NO: 16153 - DNA, 25 bp, Artificial
  Probe
ggttattgacaaattgaatgggaat

SEQ ID NO: 16154 - DNA, 25 bp, Artificial
  Probe
tacgacaaagagacaatcaagggaa

SEQ ID NO: 16155 - DNA, 25 bp, Artificial
  Probe
ataagaatcccatgttgctaagtcc

SEQ ID NO: 16156 - DNA, 25 bp, Artificial
  Probe
gtatccgtgtcaactggactctaag

SEQ ID NO: 16157 - DNA, 25 bp, Artificial
  Probe
gaaggtaaagtatccgtgtcaactg

SEQ ID NO: 16158 - DNA, 25 bp, Artificial
  Probe
tctcctggaagagtattactgttgg

SEQ ID NO: 16159 - DNA, 25 bp, Artificial
  Probe
ctctcctggaagagtattactgttg

SEQ ID NO: 16160 - DNA, 25 bp, Artificial
  Probe
ctcctggaagagtattactgttggg

SEQ ID NO: 16161 - DNA, 25 bp, Artificial
  Probe
cctctcctggaagagtattactgtt

SEQ ID NO: 16162 - DNA, 25 bp, Artificial
  Probe
tcctctcctggaagagtattactgt

SEQ ID NO: 16163 - DNA, 25 bp, Artificial
  Probe
ttcctctcctggaagagtattactg

SEQ ID NO: 16164 - DNA, 25 bp, Artificial
  Probe
gactccaactcctcttcagacactg

SEQ ID NO: 16165 - DNA, 25 bp, Artificial
  Probe
caactcctcttcagacactgtggaa

SEQ ID NO: 16166 - DNA, 25 bp, Artificial
  Probe
actctgttctcctgttttctagtca

SEQ ID NO: 16167 - DNA, 25 bp, Artificial
  Probe
ctccaactcctcttcagacactgtg

SEQ ID NO: 16168 - DNA, 25 bp, Artificial
  Probe
ctctgttctcctgttttctagtcag

SEQ ID NO: 16169 - DNA, 25 bp, Artificial
  Probe
ctgaggacagtgctgccagaattaa

SEQ ID NO: 16170 - DNA, 25 bp, Artificial
  Probe
actccaactcctcttcagacactgt

SEQ ID NO: 16171 - DNA, 25 bp, Artificial
  Probe
ggactctgttctcctgttttctagt

SEQ ID NO: 16172 - DNA, 25 bp, Artificial
  Probe
tgaggacagtgctgccagaattaaa

SEQ ID NO: 16173 - DNA, 25 bp, Artificial
  Probe
aactcctcttcagacactgtggaag

SEQ ID NO: 16174 - DNA, 25 bp, Artificial
  Probe
aggacagtgctgccagaattaaaag

SEQ ID NO: 16175 - DNA, 25 bp, Artificial
  Probe
gaggacagtgctgccagaattaaaa

SEQ ID NO: 16176 - DNA, 25 bp, Artificial
  Probe
tcctggaagagtattactgttgggg

SEQ ID NO: 16177 - DNA, 25 bp, Artificial
  Probe
atgaattctgcccttccttcctctc

SEQ ID NO: 16178 - DNA, 25 bp, Artificial
  Probe
gatgaattctgcccttccttcctct

SEQ ID NO: 16179 - DNA, 25 bp, Artificial
  Probe
agatgaattctgcccttccttcctc

SEQ ID NO: 16180 - DNA, 25 bp, Artificial
  Probe
gagatgaattctgcccttccttcct

SEQ ID NO: 16181 - DNA, 25 bp, Artificial
  Probe
agagatgaattctgcccttccttcc

SEQ ID NO: 16182 - DNA, 25 bp, Artificial
  Probe
actcctcttcagacactgtggaagt

SEQ ID NO: 16183 - DNA, 25 bp, Artificial
  Probe
gtgctgccagaattaaaagctctag

SEQ ID NO: 16184 - DNA, 25 bp, Artificial
  Probe
gactctgttctcctgttttctagtc

SEQ ID NO: 16185 - DNA, 25 bp, Artificial
  Probe
agtgctgccagaattaaaagctcta

SEQ ID NO: 16186 - DNA, 25 bp, Artificial
  Probe
ctcctcttcagacactgtggaagtg

SEQ ID NO: 16187 - DNA, 25 bp, Artificial
  Probe
aggactctgttctcctgttttctag

SEQ ID NO: 16188 - DNA, 25 bp, Artificial
  Probe
gtctcagagatgaattctgcccttc

SEQ ID NO: 16189 - DNA, 25 bp, Artificial
  Probe
tgctgccagaattaaaagctctaga

SEQ ID NO: 16190 - DNA, 25 bp, Artificial
  Probe
cagagatgaattctgcccttccttc

SEQ ID NO: 16191 - DNA, 25 bp, Artificial
  Probe
tcagagatgaattctgcccttcctt

SEQ ID NO: 16192 - DNA, 25 bp, Artificial
  Probe
cagtgctgccagaattaaaagctct

SEQ ID NO: 16193 - DNA, 25 bp, Artificial
  Probe
ctcagagatgaattctgcccttcct

SEQ ID NO: 16194 - DNA, 25 bp, Artificial
  Probe
tctcagagatgaattctgcccttcc

SEQ ID NO: 16195 - DNA, 25 bp, Artificial
  Probe
acagtgctgccagaattaaaagctc

SEQ ID NO: 16196 - DNA, 25 bp, Artificial
  Probe
gacagtgctgccagaattaaaagct

SEQ ID NO: 16197 - DNA, 25 bp, Artificial
  Probe
ggtctcagagatgaattctgccctt

SEQ ID NO: 16198 - DNA, 25 bp, Artificial
  Probe
tctgttctcctgttttctagtcagg

SEQ ID NO: 16199 - DNA, 25 bp, Artificial
  Probe
ggacagtgctgccagaattaaaagc

SEQ ID NO: 16200 - DNA, 25 bp, Artificial
  Probe
ttctcctgttttctagtcaggcttc

SEQ ID NO: 16201 - DNA, 25 bp, Artificial
  Probe
gttctcctgttttctagtcaggctt

SEQ ID NO: 16202 - DNA, 25 bp, Artificial
  Probe
ctcctgttttctagtcaggcttcac

SEQ ID NO: 16203 - DNA, 25 bp, Artificial
  Probe
cattccttaacgctgaggttatagc

SEQ ID NO: 16204 - DNA, 25 bp, Artificial
  Probe
gtccattccttaacgctgaggttat

SEQ ID NO: 16205 - DNA, 25 bp, Artificial
  Probe
aagtaattgctctcttcctttctaa

SEQ ID NO: 16206 - DNA, 25 bp, Artificial
  Probe
agtaattgctctcttcctttctaat

SEQ ID NO: 16207 - DNA, 25 bp, Artificial
  Probe
ctgaggttatagcacatgcactgac

SEQ ID NO: 16208 - DNA, 25 bp, Artificial
  Probe
gtaattgctctcttcctttctaatt

SEQ ID NO: 16209 - DNA, 25 bp, Artificial
  Probe
ctgaggttatagcgaatgcactgac

SEQ ID NO: 16210 - DNA, 25 bp, Artificial
  Probe
ttgcctgtaggtcaagtgctctaag

SEQ ID NO: 16211 - DNA, 25 bp, Artificial
  Probe
aaagtaattgctctcttcctttcta

SEQ ID NO: 16212 - DNA, 25 bp, Artificial
  Probe
cttctcacacaggtgataggaactt

SEQ ID NO: 16213 - DNA, 25 bp, Artificial
  Probe
ctgtaggtcaagtgctctaagccat

SEQ ID NO: 16214 - DNA, 25 bp, Artificial
  Probe
cctgaggttatagcacatgcactga

SEQ ID NO: 16215 - DNA, 25 bp, Artificial
  Probe
ttctcacacaggtgataggaacttg

SEQ ID NO: 16216 - DNA, 25 bp, Artificial
  Probe
cctgaggttatagcgaatgcactga

SEQ ID NO: 16217 - DNA, 25 bp, Artificial
  Probe
gctctcttcctttctaattagtcga

SEQ ID NO: 16218 - DNA, 25 bp, Artificial
  Probe
tgctctcttcctttctaattagtcg

SEQ ID NO: 16219 - DNA, 25 bp, Artificial
  Probe
cttagcttctcacacaggtgatagg

SEQ ID NO: 16220 - DNA, 25 bp, Artificial
  Probe
aaaagtaattgctctcttcctttct

SEQ ID NO: 16221 - DNA, 25 bp, Artificial
  Probe
tgtaggtcaagtgctctaagccatg

SEQ ID NO: 16222 - DNA, 25 bp, Artificial
  Probe
tagcttctcacacaggtgataggaa

SEQ ID NO: 16223 - DNA, 25 bp, Artificial
  Probe
ttagcttctcacacaggtgatagga

SEQ ID NO: 16224 - DNA, 25 bp, Artificial
  Probe
ttgctctcttcctttctaattagtc

SEQ ID NO: 16225 - DNA, 25 bp, Artificial
  Probe
gcttagcttctcacacaggtgatag

SEQ ID NO: 16226 - DNA, 25 bp, Artificial
  Probe
cgtccattccttaacgctgaggtta

SEQ ID NO: 16227 - DNA, 25 bp, Artificial
  Probe
aggttatagcacatgcactgaccag

SEQ ID NO: 16228 - DNA, 25 bp, Artificial
  Probe
gaggttatagcacatgcactgacca

SEQ ID NO: 16229 - DNA, 25 bp, Artificial
  Probe
tgaggttatagcacatgcactgacc

SEQ ID NO: 16230 - DNA, 25 bp, Artificial
  Probe
attgctctcttcctttctaattagt

SEQ ID NO: 16231 - DNA, 25 bp, Artificial
  Probe
aggttatagcgaatgcactgaccag

SEQ ID NO: 16232 - DNA, 25 bp, Artificial
  Probe
gaggttatagcgaatgcactgacca

SEQ ID NO: 16233 - DNA, 25 bp, Artificial
  Probe
tgaggttatagcgaatgcactgacc

SEQ ID NO: 16234 - DNA, 25 bp, Artificial
  Probe
cttgcctgtaggtcaagtgctctaa

SEQ ID NO: 16235 - DNA, 25 bp, Artificial
  Probe
tgcttagcttctcacacaggtgata

SEQ ID NO: 16236 - DNA, 25 bp, Artificial
  Probe
ctcagatccttgcctgtaggtcaag

SEQ ID NO: 16237 - DNA, 25 bp, Artificial
  Probe
tctcacacaggtgataggaacttgg

SEQ ID NO: 16238 - DNA, 25 bp, Artificial
  Probe
ggtgataggaacttggcctcagatc

SEQ ID NO: 16239 - DNA, 25 bp, Artificial
  Probe
gtgataggaacttggcctcagatcc

SEQ ID NO: 16240 - DNA, 25 bp, Artificial
  Probe
gcttctcacacaggtgataggaact

SEQ ID NO: 16241 - DNA, 25 bp, Artificial
  Probe
taattgctctcttcctttctaatta

SEQ ID NO: 16242 - DNA, 25 bp, Artificial
  Probe
ttatagcacatgcactgaccagctc

SEQ ID NO: 16243 - DNA, 25 bp, Artificial
  Probe
aggtgataggaacttggcctcagat

SEQ ID NO: 16244 - DNA, 25 bp, Artificial
  Probe
agcttctcacacaggtgataggaac

SEQ ID NO: 16245 - DNA, 25 bp, Artificial
  Probe
atgcttagcttctcacacaggtgat

SEQ ID NO: 16246 - DNA, 25 bp, Artificial
  Probe
ttatagcgaatgcactgaccagctc

SEQ ID NO: 16247 - DNA, 25 bp, Artificial
  Probe
cagatccttgcctgtaggtcaagtg

SEQ ID NO: 16248 - DNA, 25 bp, Artificial
  Probe
ctcacagcctcaggaatctataaag

SEQ ID NO: 16249 - DNA, 25 bp, Artificial
  Probe
tataataaaccctcacctgatgcct

SEQ ID NO: 16250 - DNA, 25 bp, Artificial
  Probe
tcacagcctcaggaatctataaaga

SEQ ID NO: 16251 - DNA, 25 bp, Artificial
  Probe
taaagagtaaagagtcactgtggag

SEQ ID NO: 16252 - DNA, 25 bp, Artificial
  Probe
cacagcctcaggaatctataaagag

SEQ ID NO: 16253 - DNA, 25 bp, Artificial
  Probe
ataaagagtaaagagtcactgtgga

SEQ ID NO: 16254 - DNA, 25 bp, Artificial
  Probe
acagcctcaggaatctataaagagt

SEQ ID NO: 16255 - DNA, 25 bp, Artificial
  Probe
gtaaagagtcactgtggaggaagat

SEQ ID NO: 16256 - DNA, 25 bp, Artificial
  Probe
cagcctcaggaatctataaagagta

SEQ ID NO: 16257 - DNA, 25 bp, Artificial
  Probe
ttataataaaccctcacctgatgcc

SEQ ID NO: 16258 - DNA, 25 bp, Artificial
  Probe
cttataataaaccctcacctgatgc

SEQ ID NO: 16259 - DNA, 25 bp, Artificial
  Probe
tatttctccttcccatgtctcttgt

SEQ ID NO: 16260 - DNA, 25 bp, Artificial
  Probe
taaagagtcactgtggaggaagatc

SEQ ID NO: 16261 - DNA, 25 bp, Artificial
  Probe
ataataaaccctcacctgatgcctc

SEQ ID NO: 16262 - DNA, 25 bp, Artificial
  Probe
agcctcaggaatctataaagagtaa

SEQ ID NO: 16263 - DNA, 25 bp, Artificial
  Probe
ctttctctgtttcttgtcctcacac

SEQ ID NO: 16264 - DNA, 25 bp, Artificial
  Probe
aaagagtaaagagtcactgtggagg

SEQ ID NO: 16265 - DNA, 25 bp, Artificial
  Probe
tataaagagtaaagagtcactgtgg

SEQ ID NO: 16266 - DNA, 25 bp, Artificial
  Probe
cctcacagcctcaggaatctataaa

SEQ ID NO: 16267 - DNA, 25 bp, Artificial
  Probe
gcctcaggaatctataaagagtaaa

SEQ ID NO: 16268 - DNA, 25 bp, Artificial
  Probe
acagttcttataataaaccctcacc

SEQ ID NO: 16269 - DNA, 25 bp, Artificial
  Probe
gagtaaagagtcactgtggaggaag

SEQ ID NO: 16270 - DNA, 25 bp, Artificial
  Probe
tcttataataaaccctcacctgatg

SEQ ID NO: 16271 - DNA, 25 bp, Artificial
  Probe
gttcttataataaaccctcacctga

SEQ ID NO: 16272 - DNA, 25 bp, Artificial
  Probe
agttcttataataaaccctcacctg

SEQ ID NO: 16273 - DNA, 25 bp, Artificial
  Probe
cagttcttataataaaccctcacct

SEQ ID NO: 16274 - DNA, 25 bp, Artificial
  Probe
agtaaagagtcactgtggaggaaga

SEQ ID NO: 16275 - DNA, 25 bp, Artificial
  Probe
agagtaaagagtcactgtggaggaa

SEQ ID NO: 16276 - DNA, 25 bp, Artificial
  Probe
aagagtaaagagtcactgtggagga

SEQ ID NO: 16277 - DNA, 25 bp, Artificial
  Probe
atttctccttcccatgtctcttgtg

SEQ ID NO: 16278 - DNA, 25 bp, Artificial
  Probe
cctttctctgtttcttgtcctcaca

SEQ ID NO: 16279 - DNA, 25 bp, Artificial
  Probe
ccctttctctgtttcttgtcctcac

SEQ ID NO: 16280 - DNA, 25 bp, Artificial
  Probe
tccctttctctgtttcttgtcctca

SEQ ID NO: 16281 - DNA, 25 bp, Artificial
  Probe
tttctctgtttcttgtcctcacacc

SEQ ID NO: 16282 - DNA, 25 bp, Artificial
  Probe
ttcttataataaaccctcacctgat

SEQ ID NO: 16283 - DNA, 25 bp, Artificial
  Probe
ctataaagagtaaagagtcactgtg

SEQ ID NO: 16284 - DNA, 25 bp, Artificial
  Probe
tctataaagagtaaagagtcactgt

SEQ ID NO: 16285 - DNA, 25 bp, Artificial
  Probe
cagttcctacgcctttcctctacat

SEQ ID NO: 16286 - DNA, 25 bp, Artificial
  Probe
ccctcacagcctcaggaatctataa

SEQ ID NO: 16287 - DNA, 25 bp, Artificial
  Probe
atgtctcttgtgtcaaggagttgag

SEQ ID NO: 16288 - DNA, 25 bp, Artificial
  Probe
tttctccttcccatgtctcttgtgt

SEQ ID NO: 16289 - DNA, 25 bp, Artificial
  Probe
catgtctcttgtgtcaaggagttga

SEQ ID NO: 16290 - DNA, 25 bp, Artificial
  Probe
ctttcctctacatggatcaagcctg

SEQ ID NO: 16291 - DNA, 25 bp, Artificial
  Probe
ggaatagcttctttgtacagttctt

SEQ ID NO: 16292 - DNA, 25 bp, Artificial
  Probe
aagagtcactgtggaggaagatctg

SEQ ID NO: 16293 - DNA, 25 bp, Artificial
  Probe
gtcctcacctatatcaagttcttca

SEQ ID NO: 16294 - DNA, 25 bp, Artificial
  Probe
ccttatgtcatagtcattcacggat

SEQ ID NO: 16295 - DNA, 25 bp, Artificial
  Probe
tccaccttatgtcatagtcattcac

SEQ ID NO: 16296 - DNA, 25 bp, Artificial
  Probe
ctccaccttatgtcatagtcattca

SEQ ID NO: 16297 - DNA, 25 bp, Artificial
  Probe
tcctcacctatatcaagttcttcat

SEQ ID NO: 16298 - DNA, 25 bp, Artificial
  Probe
cctccaccttatgtcatagtcattc

SEQ ID NO: 16299 - DNA, 25 bp, Artificial
  Probe
gccagtccattatgaagagaagaac

SEQ ID NO: 16300 - DNA, 25 bp, Artificial
  Probe
agccagtccattatgaagagaagaa

SEQ ID NO: 16301 - DNA, 25 bp, Artificial
  Probe
tcctccaccttatgtcatagtcatt

SEQ ID NO: 16302 - DNA, 25 bp, Artificial
  Probe
cctcacctatatcaagttcttcatc

SEQ ID NO: 16303 - DNA, 25 bp, Artificial
  Probe
atagtcattcacggatcattgttct

SEQ ID NO: 16304 - DNA, 25 bp, Artificial
  Probe
catagtcattcacggatcattgttc

SEQ ID NO: 16305 - DNA, 25 bp, Artificial
  Probe
tagtcattcacggatcattgttctt

SEQ ID NO: 16306 - DNA, 25 bp, Artificial
  Probe
tcatagtcattcacggatcattgtt

SEQ ID NO: 16307 - DNA, 25 bp, Artificial
  Probe
ctagaatcctgtcttgttagaacca

SEQ ID NO: 16308 - DNA, 25 bp, Artificial
  Probe
cctagaatcctgtcttgttagaacc

SEQ ID NO: 16309 - DNA, 25 bp, Artificial
  Probe
acctagaatcctgtcttgttagaac

SEQ ID NO: 16310 - DNA, 25 bp, Artificial
  Probe
tcatcattgtacctagaatcctgtc

SEQ ID NO: 16311 - DNA, 25 bp, Artificial
  Probe
atattgagaacagatacacaggctc

SEQ ID NO: 16312 - DNA, 25 bp, Artificial
  Probe
ctcctccaccttatgtcatagtcat

SEQ ID NO: 16313 - DNA, 25 bp, Artificial
  Probe
atgtcatagtcattcacggatcatt

SEQ ID NO: 16314 - DNA, 25 bp, Artificial
  Probe
ttatgtcatagtcattcacggatca

SEQ ID NO: 16315 - DNA, 25 bp, Artificial
  Probe
accttatgtcatagtcattcacgga

SEQ ID NO: 16316 - DNA, 25 bp, Artificial
  Probe
caccttatgtcatagtcattcacgg

SEQ ID NO: 16317 - DNA, 25 bp, Artificial
  Probe
ccaccttatgtcatagtcattcacg

SEQ ID NO: 16318 - DNA, 25 bp, Artificial
  Probe
gtcatagtcattcacggatcattgt

SEQ ID NO: 16319 - DNA, 25 bp, Artificial
  Probe
tgtcatagtcattcacggatcattg

SEQ ID NO: 16320 - DNA, 25 bp, Artificial
  Probe
cattgtacctagaatcctgtcttgt

SEQ ID NO: 16321 - DNA, 25 bp, Artificial
  Probe
tatgtcatagtcattcacggatcat

SEQ ID NO: 16322 - DNA, 25 bp, Artificial
  Probe
tcattgtacctagaatcctgtcttg

SEQ ID NO: 16323 - DNA, 25 bp, Artificial
  Probe
catcattgtacctagaatcctgtct

SEQ ID NO: 16324 - DNA, 25 bp, Artificial
  Probe
cttatgtcatagtcattcacggatc

SEQ ID NO: 16325 - DNA, 25 bp, Artificial
  Probe
ttcatcattgtacctagaatcctgt

SEQ ID NO: 16326 - DNA, 25 bp, Artificial
  Probe
tattgagaacagatacacaggctct

SEQ ID NO: 16327 - DNA, 25 bp, Artificial
  Probe
attgtacctagaatcctgtcttgtt

SEQ ID NO: 16328 - DNA, 25 bp, Artificial
  Probe
tgtacctagaatcctgtcttgttag

SEQ ID NO: 16329 - DNA, 25 bp, Artificial
  Probe
tagaatcctgtcttgttagaaccag

SEQ ID NO: 16330 - DNA, 25 bp, Artificial
  Probe
gtacctagaatcctgtcttgttaga

SEQ ID NO: 16331 - DNA, 25 bp, Artificial
  Probe
ctcacctatatcaagttcttcatca

SEQ ID NO: 16332 - DNA, 25 bp, Artificial
  Probe
cagccagtccattatgaagagaaga

SEQ ID NO: 16333 - DNA, 25 bp, Artificial
  Probe
cttcatcattgtacctagaatcctg

SEQ ID NO: 16334 - DNA, 25 bp, Artificial
  Probe
gatcctcctccaccttatgtcatag

SEQ ID NO: 16335 - DNA, 25 bp, Artificial
  Probe
ttgtacctagaatcctgtcttgtta

SEQ ID NO: 16336 - DNA, 25 bp, Artificial
  Probe
atcattgtacctagaatcctgtctt

SEQ ID NO: 16337 - DNA, 25 bp, Artificial
  Probe
aatattgagaacagatacacaggct

SEQ ID NO: 16338 - DNA, 25 bp, Artificial
  Probe
ttcagcctaatatcatcttcacaag

SEQ ID NO: 16339 - DNA, 25 bp, Artificial
  Probe
tacctgactattcctcacacaagtt

SEQ ID NO: 16340 - DNA, 25 bp, Artificial
  Probe
tctacctgactattcctcacacaag

SEQ ID NO: 16341 - DNA, 25 bp, Artificial
  Probe
ctctacctgactattcctcacacaa

SEQ ID NO: 16342 - DNA, 25 bp, Artificial
  Probe
attcagcctaatatcatcttcacaa

SEQ ID NO: 16343 - DNA, 25 bp, Artificial
  Probe
tcaccttctgattcgttcattgatg

SEQ ID NO: 16344 - DNA, 25 bp, Artificial
  Probe
ctctctacctgactattcctcacac

SEQ ID NO: 16345 - DNA, 25 bp, Artificial
  Probe
tctctctacctgactattcctcaca

SEQ ID NO: 16346 - DNA, 25 bp, Artificial
  Probe
ttccttactccatctaacctactaa

SEQ ID NO: 16347 - DNA, 25 bp, Artificial
  Probe
ctacctgactattcctcacacaagt

SEQ ID NO: 16348 - DNA, 25 bp, Artificial
  Probe
ttactccatctaacctactaagtcc

SEQ ID NO: 16349 - DNA, 25 bp, Artificial
  Probe
attccttactccatctaacctacta

SEQ ID NO: 16350 - DNA, 25 bp, Artificial
  Probe
tattccttactccatctaacctact

SEQ ID NO: 16351 - DNA, 25 bp, Artificial
  Probe
gtctctctacctgactattcctcac

SEQ ID NO: 16352 - DNA, 25 bp, Artificial
  Probe
tctctacctgactattcctcacaca

SEQ ID NO: 16353 - DNA, 25 bp, Artificial
  Probe
ctgtatctcaagaagctccactaat

SEQ ID NO: 16354 - DNA, 25 bp, Artificial
  Probe
tgtatctcaagaagctccactaatt

SEQ ID NO: 16355 - DNA, 25 bp, Artificial
  Probe
ccttactccatctaacctactaagt

SEQ ID NO: 16356 - DNA, 25 bp, Artificial
  Probe
tatctcaagaagctccactaattcc

SEQ ID NO: 16357 - DNA, 25 bp, Artificial
  Probe
gatctacctgtatctcaagaagctc

SEQ ID NO: 16358 - DNA, 25 bp, Artificial
  Probe
tccttactccatctaacctactaag

SEQ ID NO: 16359 - DNA, 25 bp, Artificial
  Probe
tctcctcctctcttcagtacagatc

SEQ ID NO: 16360 - DNA, 25 bp, Artificial
  Probe
ctctcctcctctcttcagtacagat

SEQ ID NO: 16361 - DNA, 25 bp, Artificial
  Probe
gtatctcaagaagctccactaattc

SEQ ID NO: 16362 - DNA, 25 bp, Artificial
  Probe
cctgagcattattgtgaaaccttta

SEQ ID NO: 16363 - DNA, 25 bp, Artificial
  Probe
cctgtatctcaagaagctccactaa

SEQ ID NO: 16364 - DNA, 25 bp, Artificial
  Probe
atctacctgtatctcaagaagctcc

SEQ ID NO: 16365 - DNA, 25 bp, Artificial
  Probe
ggatctacctgtatctcaagaagct

SEQ ID NO: 16366 - DNA, 25 bp, Artificial
  Probe
aagctcaaggagaactgattatcac

SEQ ID NO: 16367 - DNA, 25 bp, Artificial
  Probe
ttaccttccctcctttctccaataa

SEQ ID NO: 16368 - DNA, 25 bp, Artificial
  Probe
tttaccttccctcctttctccaata

SEQ ID NO: 16369 - DNA, 25 bp, Artificial
  Probe
taccttccctcctttctccaataaa

SEQ ID NO: 16370 - DNA, 25 bp, Artificial
  Probe
tattcagcctaatatcatcttcaca

SEQ ID NO: 16371 - DNA, 25 bp, Artificial
  Probe
tttctccaataaagtgtccagtgtc

SEQ ID NO: 16372 - DNA, 25 bp, Artificial
  Probe
attcctcacacaagtttctttacct

SEQ ID NO: 16373 - DNA, 25 bp, Artificial
  Probe
gtttctttaccttccctcctttctc

SEQ ID NO: 16374 - DNA, 25 bp, Artificial
  Probe
ctcctcctctcttcagtacagatca

SEQ ID NO: 16375 - DNA, 25 bp, Artificial
  Probe
ttcctcacacaagtttctttacctt

SEQ ID NO: 16376 - DNA, 25 bp, Artificial
  Probe
tccatctaacctactaagtcccttt

SEQ ID NO: 16377 - DNA, 25 bp, Artificial
  Probe
aagtttctttaccttccctcctttc

SEQ ID NO: 16378 - DNA, 25 bp, Artificial
  Probe
actgttacctggtacgttcatctaa

SEQ ID NO: 16379 - DNA, 25 bp, Artificial
  Probe
agtttctttaccttccctcctttct

SEQ ID NO: 16380 - DNA, 25 bp, Artificial
  Probe
ctccatctaacctactaagtccctt

SEQ ID NO: 16381 - DNA, 25 bp, Artificial
  Probe
caagtttctttaccttccctccttt

SEQ ID NO: 16382 - DNA, 25 bp, Artificial
  Probe
tcctcacacaagtttctttaccttc

SEQ ID NO: 16383 - DNA, 25 bp, Artificial
  Probe
tattcagtggtgatgcctaaaggaa

SEQ ID NO: 16384 - DNA, 25 bp, Artificial
  Probe
gtattcagtggtgatgcctaaagga

SEQ ID NO: 16385 - DNA, 25 bp, Artificial
  Probe
caacttgatttccacctctctcctg

SEQ ID NO: 16386 - DNA, 25 bp, Artificial
  Probe
attcagtggtgatgcctaaaggaat

SEQ ID NO: 16387 - DNA, 25 bp, Artificial
  Probe
ttcagtggtgatgcctaaaggaatg

SEQ ID NO: 16388 - DNA, 25 bp, Artificial
  Probe
ggtattcagtggtgatgcctaaagg

SEQ ID NO: 16389 - DNA, 25 bp, Artificial
  Probe
cggtattcagtggtgatgcctaaag

SEQ ID NO: 16390 - DNA, 25 bp, Artificial
  Probe
cagtggtgatgcctaaaggaatgtc

SEQ ID NO: 16391 - DNA, 25 bp, Artificial
  Probe
gtggtgatgcctaaaggaatgtcag

SEQ ID NO: 16392 - DNA, 25 bp, Artificial
  Probe
agtggtgatgcctaaaggaatgtca

SEQ ID NO: 16393 - DNA, 25 bp, Artificial
  Probe
tcagtggtgatgcctaaaggaatgt

SEQ ID NO: 16394 - DNA, 25 bp, Artificial
  Probe
aacttgatttccacctctctcctgc

SEQ ID NO: 16395 - DNA, 25 bp, Artificial
  Probe
gcaacttgatttccacctctctcct

SEQ ID NO: 16396 - DNA, 25 bp, Artificial
  Probe
ctgcaacttgatttccacctctctc

SEQ ID NO: 16397 - DNA, 25 bp, Artificial
  Probe
ctctgcaacttgatttccacctctc

SEQ ID NO: 16398 - DNA, 25 bp, Artificial
  Probe
ctctctgcaacttgatttccacctc

SEQ ID NO: 16399 - DNA, 25 bp, Artificial
  Probe
actaccttgtacatgaccagctctc

SEQ ID NO: 16400 - DNA, 25 bp, Artificial
  Probe
ctaatcccggtattcagtggtgatg

SEQ ID NO: 16401 - DNA, 25 bp, Artificial
  Probe
cactaccttgtacatgaccagctct

SEQ ID NO: 16402 - DNA, 25 bp, Artificial
  Probe
attcactgggttgtctctgaccttt

SEQ ID NO: 16403 - DNA, 25 bp, Artificial
  Probe
tctgcaacttgatttccacctctct

SEQ ID NO: 16404 - DNA, 25 bp, Artificial
  Probe
tctctgcaacttgatttccacctct

SEQ ID NO: 16405 - DNA, 25 bp, Artificial
  Probe
cttgatttccacctctctcctgctg

SEQ ID NO: 16406 - DNA, 25 bp, Artificial
  Probe
ctaccttgtacatgaccagctctcc

SEQ ID NO: 16407 - DNA, 25 bp, Artificial
  Probe
ttcactgggttgtctctgacctttc

SEQ ID NO: 16408 - DNA, 25 bp, Artificial
  Probe
cattcactgggttgtctctgacctt

SEQ ID NO: 16409 - DNA, 25 bp, Artificial
  Probe
cctaatcccggtattcagtggtgat

SEQ ID NO: 16410 - DNA, 25 bp, Artificial
  Probe
ccactaccttgtacatgaccagctc

SEQ ID NO: 16411 - DNA, 25 bp, Artificial
  Probe
tgcaacttgatttccacctctctcc

SEQ ID NO: 16412 - DNA, 25 bp, Artificial
  Probe
taatcccggtattcagtggtgatgc

SEQ ID NO: 16413 - DNA, 25 bp, Artificial
  Probe
ccggtattcagtggtgatgcctaaa

SEQ ID NO: 16414 - DNA, 25 bp, Artificial
  Probe
ctgctctctgcaacttgatttccac

SEQ ID NO: 16415 - DNA, 25 bp, Artificial
  Probe
ctcaccccactaccttgtacatgac

SEQ ID NO: 16416 - DNA, 25 bp, Artificial
  Probe
cactcaccccactaccttgtacatg

SEQ ID NO: 16417 - DNA, 25 bp, Artificial
  Probe
tcactcaccccactaccttgtacat

SEQ ID NO: 16418 - DNA, 25 bp, Artificial
  Probe
actcaccccactaccttgtacatga

SEQ ID NO: 16419 - DNA, 25 bp, Artificial
  Probe
ggatgtcttgagatgtattacgcaa

SEQ ID NO: 16420 - DNA, 25 bp, Artificial
  Probe
tgtcttgagatgtattacgcaaagt

SEQ ID NO: 16421 - DNA, 25 bp, Artificial
  Probe
atgtcttgagatgtattacgcaaag

SEQ ID NO: 16422 - DNA, 25 bp, Artificial
  Probe
gatgtcttgagatgtattacgcaaa

SEQ ID NO: 16423 - DNA, 25 bp, Artificial
  Probe
aggttaagccatacaacaatttcaa

SEQ ID NO: 16424 - DNA, 25 bp, Artificial
  Probe
aaggttaagccatacaacaatttca

SEQ ID NO: 16425 - DNA, 25 bp, Artificial
  Probe
gagatgtattacgcaaagtaccaac

SEQ ID NO: 16426 - DNA, 25 bp, Artificial
  Probe
tgagatgtattacgcaaagtaccaa

SEQ ID NO: 16427 - DNA, 25 bp, Artificial
  Probe
gtcttgagatgtattacgcaaagta

SEQ ID NO: 16428 - DNA, 25 bp, Artificial
  Probe
ggttaagccatacaacaatttcaaa

SEQ ID NO: 16429 - DNA, 25 bp, Artificial
  Probe
cttgagatgtattacgcaaagtacc

SEQ ID NO: 16430 - DNA, 25 bp, Artificial
  Probe
ttgagatgtattacgcaaagtacca

SEQ ID NO: 16431 - DNA, 25 bp, Artificial
  Probe
aaaggttaagccatacaacaatttc

SEQ ID NO: 16432 - DNA, 25 bp, Artificial
  Probe
ttcacatgccatagtcaaggaagtc

SEQ ID NO: 16433 - DNA, 25 bp, Artificial
  Probe
gatgtattacgcaaagtaccaactg

SEQ ID NO: 16434 - DNA, 25 bp, Artificial
  Probe
agatgtattacgcaaagtaccaact

SEQ ID NO: 16435 - DNA, 25 bp, Artificial
  Probe
atgtattacgcaaagtaccaactga

SEQ ID NO: 16436 - DNA, 25 bp, Artificial
  Probe
gaaggaggaagagaaagttgaggag

SEQ ID NO: 16437 - DNA, 25 bp, Artificial
  Probe
tcttgagatgtattacgcaaagtac

SEQ ID NO: 16438 - DNA, 25 bp, Artificial
  Probe
tgaatacttatgtttacctcactgg

SEQ ID NO: 16439 - DNA, 25 bp, Artificial
  Probe
tgtattacgcaaagtaccaactgag

SEQ ID NO: 16440 - DNA, 25 bp, Artificial
  Probe
gggatgtcttgagatgtattacgca

SEQ ID NO: 16441 - DNA, 25 bp, Artificial
  Probe
aggaggaagagaaagttgaggagaa

SEQ ID NO: 16442 - DNA, 25 bp, Artificial
  Probe
aaggaggaagagaaagttgaggaga

SEQ ID NO: 16443 - DNA, 25 bp, Artificial
  Probe
agaaggaggaagagaaagttgagga

SEQ ID NO: 16444 - DNA, 25 bp, Artificial
  Probe
cagaaggaggaagagaaagttgagg

SEQ ID NO: 16445 - DNA, 25 bp, Artificial
  Probe
cacttcacatgccatagtcaaggaa

SEQ ID NO: 16446 - DNA, 25 bp, Artificial
  Probe
ccattactaagtcggtaaaggtgag

SEQ ID NO: 16447 - DNA, 25 bp, Artificial
  Probe
atcaccattactaagtcggtaaagg

SEQ ID NO: 16448 - DNA, 25 bp, Artificial
  Probe
gatgagcagaaggaggaagagaaag

SEQ ID NO: 16449 - DNA, 25 bp, Artificial
  Probe
atacttatgtttacctcactggtgc

SEQ ID NO: 16450 - DNA, 25 bp, Artificial
  Probe
cattactaagtcggtaaaggtgagc

SEQ ID NO: 16451 - DNA, 25 bp, Artificial
  Probe
accattactaagtcggtaaaggtga

SEQ ID NO: 16452 - DNA, 25 bp, Artificial
  Probe
tcaccattactaagtcggtaaaggt

SEQ ID NO: 16453 - DNA, 25 bp, Artificial
  Probe
cacatgccatagtcaaggaagtcac

SEQ ID NO: 16454 - DNA, 25 bp, Artificial
  Probe
gatcaccattactaagtcggtaaag

SEQ ID NO: 16455 - DNA, 25 bp, Artificial
  Probe
aatacttatgtttacctcactggtg

SEQ ID NO: 16456 - DNA, 25 bp, Artificial
  Probe
caaggaatcacccaaggaagagaag

SEQ ID NO: 16457 - DNA, 25 bp, Artificial
  Probe
gcagaaggaggaagagaaagttgag

SEQ ID NO: 16458 - DNA, 25 bp, Artificial
  Probe
gagcagaaggaggaagagaaagttg

SEQ ID NO: 16459 - DNA, 25 bp, Artificial
  Probe
gtattacgcaaagtaccaactgagc

SEQ ID NO: 16460 - DNA, 25 bp, Artificial
  Probe
tcacatgccatagtcaaggaagtca

SEQ ID NO: 16461 - DNA, 25 bp, Artificial
  Probe
atgagcagaaggaggaagagaaagt

SEQ ID NO: 16462 - DNA, 25 bp, Artificial
  Probe
gaatacttatgtttacctcactggt

SEQ ID NO: 16463 - DNA, 25 bp, Artificial
  Probe
gtcacttcacatgccatagtcaagg

SEQ ID NO: 16464 - DNA, 25 bp, Artificial
  Probe
tgctagtctatacttcaatgttagg

SEQ ID NO: 16465 - DNA, 25 bp, Artificial
  Probe
gctagtctatacttcaatgttaggg

SEQ ID NO: 16466 - DNA, 25 bp, Artificial
  Probe
atgctagtctatacttcaatgttag

SEQ ID NO: 16467 - DNA, 25 bp, Artificial
  Probe
taatgttttgctactcttgtcagac

SEQ ID NO: 16468 - DNA, 25 bp, Artificial
  Probe
gataatgttttgctactcttgtcag

SEQ ID NO: 16469 - DNA, 25 bp, Artificial
  Probe
ataatgttttgctactcttgtcaga

SEQ ID NO: 16470 - DNA, 25 bp, Artificial
  Probe
tattctgttactggacacgaaaact

SEQ ID NO: 16471 - DNA, 25 bp, Artificial
  Probe
ttattctgttactggacacgaaaac

SEQ ID NO: 16472 - DNA, 25 bp, Artificial
  Probe
tgataatgttttgctactcttgtca

SEQ ID NO: 16473 - DNA, 25 bp, Artificial
  Probe
tactctattgtacgtttacagtcgc

SEQ ID NO: 16474 - DNA, 25 bp, Artificial
  Probe
cttttattctgttactggacacgaa

SEQ ID NO: 16475 - DNA, 25 bp, Artificial
  Probe
ccttttattctgttactggacacga

SEQ ID NO: 16476 - DNA, 25 bp, Artificial
  Probe
agtctatacttcaatgttaggggaa

SEQ ID NO: 16477 - DNA, 25 bp, Artificial
  Probe
attctgttactggacacgaaaactt

SEQ ID NO: 16478 - DNA, 25 bp, Artificial
  Probe
ttgataatgttttgctactcttgtc

SEQ ID NO: 16479 - DNA, 25 bp, Artificial
  Probe
ttctgttactggacacgaaaacttt

SEQ ID NO: 16480 - DNA, 25 bp, Artificial
  Probe
tttattctgttactggacacgaaaa

SEQ ID NO: 16481 - DNA, 25 bp, Artificial
  Probe
ttttattctgttactggacacgaaa

SEQ ID NO: 16482 - DNA, 25 bp, Artificial
  Probe
tctatacttcaatgttaggggaatg

SEQ ID NO: 16483 - DNA, 25 bp, Artificial
  Probe
gtctatacttcaatgttaggggaat

SEQ ID NO: 16484 - DNA, 25 bp, Artificial
  Probe
ctctattgtacgtttacagtcgcag

SEQ ID NO: 16485 - DNA, 25 bp, Artificial
  Probe
tctgttactggacacgaaaactttg

SEQ ID NO: 16486 - DNA, 25 bp, Artificial
  Probe
atactctattgtacgtttacagtcg

SEQ ID NO: 16487 - DNA, 25 bp, Artificial
  Probe
tagtctatacttcaatgttagggga

SEQ ID NO: 16488 - DNA, 25 bp, Artificial
  Probe
ctgttactggacacgaaaactttgt

SEQ ID NO: 16489 - DNA, 25 bp, Artificial
  Probe
ctatacttcaatgttaggggaatga

SEQ ID NO: 16490 - DNA, 25 bp, Artificial
  Probe
attgataatgttttgctactcttgt

SEQ ID NO: 16491 - DNA, 25 bp, Artificial
  Probe
aatgttttgctactcttgtcagaca

SEQ ID NO: 16492 - DNA, 25 bp, Artificial
  Probe
gccttttattctgttactggacacg

SEQ ID NO: 16493 - DNA, 25 bp, Artificial
  Probe
actctattgtacgtttacagtcgca

SEQ ID NO: 16494 - DNA, 25 bp, Artificial
  Probe
ctagtctatacttcaatgttagggg

SEQ ID NO: 16495 - DNA, 25 bp, Artificial
  Probe
gtacgtttacagtcgcagcactaaa

SEQ ID NO: 16496 - DNA, 25 bp, Artificial
  Probe
acacgaaaactttgtctaatttctt

SEQ ID NO: 16497 - DNA, 25 bp, Artificial
  Probe
tctattgtacgtttacagtcgcagc

SEQ ID NO: 16498 - DNA, 25 bp, Artificial
  Probe
atacttcaatgttaggggaatgaac

SEQ ID NO: 16499 - DNA, 25 bp, Artificial
  Probe
ctattgtacgtttacagtcgcagca

SEQ ID NO: 16500 - DNA, 25 bp, Artificial
  Probe
tacttcaatgttaggggaatgaaca

SEQ ID NO: 16501 - DNA, 25 bp, Artificial
  Probe
tattgtacgtttacagtcgcagcac

SEQ ID NO: 16502 - DNA, 25 bp, Artificial
  Probe
acttcaatgttaggggaatgaacac

SEQ ID NO: 16503 - DNA, 25 bp, Artificial
  Probe
acttttagataggttaatgaaaggc

SEQ ID NO: 16504 - DNA, 25 bp, Artificial
  Probe
tacgtttacagtcgcagcactaaaa

SEQ ID NO: 16505 - DNA, 25 bp, Artificial
  Probe
tattgataatgttttgctactcttg

SEQ ID NO: 16506 - DNA, 25 bp, Artificial
  Probe
ggccttttattctgttactggacac

SEQ ID NO: 16507 - DNA, 25 bp, Artificial
  Probe
ttgctactcttgtcagacaatggct

SEQ ID NO: 16508 - DNA, 25 bp, Artificial
  Probe
tatacttcaatgttaggggaatgaa

SEQ ID NO: 16509 - DNA, 25 bp, Artificial
  Probe
gagtagagagatgtcctgaattaac

SEQ ID NO: 16510 - DNA, 25 bp, Artificial
  Probe
agagtagagagatgtcctgaattaa

SEQ ID NO: 16511 - DNA, 25 bp, Artificial
  Probe
agagagatgtcctgaattaacacag

SEQ ID NO: 16512 - DNA, 25 bp, Artificial
  Probe
gagagatgtcctgaattaacacagt

SEQ ID NO: 16513 - DNA, 25 bp, Artificial
  Probe
agagatgtcctgaattaacacagtg

SEQ ID NO: 16514 - DNA, 25 bp, Artificial
  Probe
tagagagatgtcctgaattaacaca

SEQ ID NO: 16515 - DNA, 25 bp, Artificial
  Probe
gtagagagatgtcctgaattaacac

SEQ ID NO: 16516 - DNA, 25 bp, Artificial
  Probe
agtagagagatgtcctgaattaaca

SEQ ID NO: 16517 - DNA, 25 bp, Artificial
  Probe
cagagtagagagatgtcctgaatta

SEQ ID NO: 16518 - DNA, 25 bp, Artificial
  Probe
gcagagtagagagatgtcctgaatt

SEQ ID NO: 16519 - DNA, 25 bp, Artificial
  Probe
gagatgtcctgaattaacacagtgt

SEQ ID NO: 16520 - DNA, 25 bp, Artificial
  Probe
gcttgcctgtttaataaagttctca

SEQ ID NO: 16521 - DNA, 25 bp, Artificial
  Probe
tgcttgcctgtttaataaagttctc

SEQ ID NO: 16522 - DNA, 25 bp, Artificial
  Probe
ctgcttgcctgtttaataaagttct

SEQ ID NO: 16523 - DNA, 25 bp, Artificial
  Probe
tctgcttgcctgtttaataaagttc

SEQ ID NO: 16524 - DNA, 25 bp, Artificial
  Probe
ctctgcttgcctgtttaataaagtt

SEQ ID NO: 16525 - DNA, 25 bp, Artificial
  Probe
tcgggaatatgttcaaatctaacct

SEQ ID NO: 16526 - DNA, 25 bp, Artificial
  Probe
aagaaatctgtgacttggaactcta

SEQ ID NO: 16527 - DNA, 25 bp, Artificial
  Probe
ggtcatcgggaatatgttcaaatct

SEQ ID NO: 16528 - DNA, 25 bp, Artificial
  Probe
aggtcatcgggaatatgttcaaatc

SEQ ID NO: 16529 - DNA, 25 bp, Artificial
  Probe
cgggaatatgttcaaatctaacctt

SEQ ID NO: 16530 - DNA, 25 bp, Artificial
  Probe
caggtcatcgggaatatgttcaaat

SEQ ID NO: 16531 - DNA, 25 bp, Artificial
  Probe
agatgtcctgaattaacacagtgtg

SEQ ID NO: 16532 - DNA, 25 bp, Artificial
  Probe
atcgggaatatgttcaaatctaacc

SEQ ID NO: 16533 - DNA, 25 bp, Artificial
  Probe
agaaatctgtgacttggaactctag

SEQ ID NO: 16534 - DNA, 25 bp, Artificial
  Probe
gtcatcgggaatatgttcaaatcta

SEQ ID NO: 16535 - DNA, 25 bp, Artificial
  Probe
gcaactctatgagaagaaacaactc

SEQ ID NO: 16536 - DNA, 25 bp, Artificial
  Probe
aactctatgagaagaaacaactcca

SEQ ID NO: 16537 - DNA, 25 bp, Artificial
  Probe
actctatgagaagaaacaactccat

SEQ ID NO: 16538 - DNA, 25 bp, Artificial
  Probe
caactctatgagaagaaacaactcc

SEQ ID NO: 16539 - DNA, 25 bp, Artificial
  Probe
ctagactcaaagatcaaacgggtac

SEQ ID NO: 16540 - DNA, 25 bp, Artificial
  Probe
tagactcaaagatcaaacgggtact

SEQ ID NO: 16541 - DNA, 25 bp, Artificial
  Probe
ctaagttgactgctcccaagaaatc

SEQ ID NO: 16542 - DNA, 25 bp, Artificial
  Probe
tcatcgggaatatgttcaaatctaa

SEQ ID NO: 16543 - DNA, 25 bp, Artificial
  Probe
cgcaactctatgagaagaaacaact

SEQ ID NO: 16544 - DNA, 25 bp, Artificial
  Probe
catcgggaatatgttcaaatctaac

SEQ ID NO: 16545 - DNA, 25 bp, Artificial
  Probe
gctctgcttgcctgtttaataaagt

SEQ ID NO: 16546 - DNA, 25 bp, Artificial
  Probe
taagttgactgctcccaagaaatct

SEQ ID NO: 16547 - DNA, 25 bp, Artificial
  Probe
cttgcctgtttaataaagttctcaa

SEQ ID NO: 16548 - DNA, 25 bp, Artificial
  Probe
aatctgtgacttggaactctagact

SEQ ID NO: 16549 - DNA, 25 bp, Artificial
  Probe
tatgagaagaaacaactccatgagg

SEQ ID NO: 16550 - DNA, 25 bp, Artificial
  Probe
aagacacatgattctaaccaggtgg

SEQ ID NO: 16551 - DNA, 25 bp, Artificial
  Probe
ggcagagtagagagatgtcctgaat

SEQ ID NO: 16552 - DNA, 25 bp, Artificial
  Probe
tctatgagaagaaacaactccatga

SEQ ID NO: 16553 - DNA, 25 bp, Artificial
  Probe
ctatgagaagaaacaactccatgag

SEQ ID NO: 16554 - DNA, 25 bp, Artificial
  Probe
attattggtggtgtggagtctattc

SEQ ID NO: 16555 - DNA, 25 bp, Artificial
  Probe
gattattggtggtgtggagtctatt

SEQ ID NO: 16556 - DNA, 25 bp, Artificial
  Probe
cgagaatacacacagcagaagataa

SEQ ID NO: 16557 - DNA, 25 bp, Artificial
  Probe
agacattatgacaacaacttccagg

SEQ ID NO: 16558 - DNA, 25 bp, Artificial
  Probe
gacattatgacaacaacttccaggt

SEQ ID NO: 16559 - DNA, 25 bp, Artificial
  Probe
tagacattatgacaacaacttccag

SEQ ID NO: 16560 - DNA, 25 bp, Artificial
  Probe
agattattggtggtgtggagtctat

SEQ ID NO: 16561 - DNA, 25 bp, Artificial
  Probe
tccaagcctgaggtcttatagtatc

SEQ ID NO: 16562 - DNA, 25 bp, Artificial
  Probe
atagacattatgacaacaacttcca

SEQ ID NO: 16563 - DNA, 25 bp, Artificial
  Probe
gagattattggtggtgtggagtcta

SEQ ID NO: 16564 - DNA, 25 bp, Artificial
  Probe
ctccaagcctgaggtcttatagtat

SEQ ID NO: 16565 - DNA, 25 bp, Artificial
  Probe
ccaagcctgaggtcttatagtatcc

SEQ ID NO: 16566 - DNA, 25 bp, Artificial
  Probe
aagcctgaggtcttatagtatcctt

SEQ ID NO: 16567 - DNA, 25 bp, Artificial
  Probe
attatgacaacaacttccaggtctg

SEQ ID NO: 16568 - DNA, 25 bp, Artificial
  Probe
cattatgacaacaacttccaggtct

SEQ ID NO: 16569 - DNA, 25 bp, Artificial
  Probe
acattatgacaacaacttccaggtc

SEQ ID NO: 16570 - DNA, 25 bp, Artificial
  Probe
caagcctgaggtcttatagtatcct

SEQ ID NO: 16571 - DNA, 25 bp, Artificial
  Probe
tctccaagcctgaggtcttatagta

SEQ ID NO: 16572 - DNA, 25 bp, Artificial
  Probe
catctggacatcatcactgagagag

SEQ ID NO: 16573 - DNA, 25 bp, Artificial
  Probe
gcgagaatacacacagcagaagata

SEQ ID NO: 16574 - DNA, 25 bp, Artificial
  Probe
ttacaacttccttcccaatcttcat

SEQ ID NO: 16575 - DNA, 25 bp, Artificial
  Probe
attacaacttccttcccaatcttca

SEQ ID NO: 16576 - DNA, 25 bp, Artificial
  Probe
ggtcttatagtatcctttgggttca

SEQ ID NO: 16577 - DNA, 25 bp, Artificial
  Probe
gagaatacacacagcagaagataaa

SEQ ID NO: 16578 - DNA, 25 bp, Artificial
  Probe
aattacaacttccttcccaatcttc

SEQ ID NO: 16579 - DNA, 25 bp, Artificial
  Probe
agtatcctttgggttcaacatagtt

SEQ ID NO: 16580 - DNA, 25 bp, Artificial
  Probe
ttattggtggtgtggagtctattcc

SEQ ID NO: 16581 - DNA, 25 bp, Artificial
  Probe
aaattacaacttccttcccaatctt

SEQ ID NO: 16582 - DNA, 25 bp, Artificial
  Probe
gacatcatcactgagagaggtttaa

SEQ ID NO: 16583 - DNA, 25 bp, Artificial
  Probe
tatcctttgggttcaacatagtttg

SEQ ID NO: 16584 - DNA, 25 bp, Artificial
  Probe
gtatcctttgggttcaacatagttt

SEQ ID NO: 16585 - DNA, 25 bp, Artificial
  Probe
tttccacaaggttacaaacagcata

SEQ ID NO: 16586 - DNA, 25 bp, Artificial
  Probe
tagtatcctttgggttcaacatagt

SEQ ID NO: 16587 - DNA, 25 bp, Artificial
  Probe
gcacctcaataaagacataatttcc

SEQ ID NO: 16588 - DNA, 25 bp, Artificial
  Probe
ctctccaagcctgaggtcttatagt

SEQ ID NO: 16589 - DNA, 25 bp, Artificial
  Probe
actctccaagcctgaggtcttatag

SEQ ID NO: 16590 - DNA, 25 bp, Artificial
  Probe
tatagacattatgacaacaacttcc

SEQ ID NO: 16591 - DNA, 25 bp, Artificial
  Probe
tacaacttccttcccaatcttcatg

SEQ ID NO: 16592 - DNA, 25 bp, Artificial
  Probe
atctggacatcatcactgagagagg

SEQ ID NO: 16593 - DNA, 25 bp, Artificial
  Probe
atcctttgggttcaacatagtttgt

SEQ ID NO: 16594 - DNA, 25 bp, Artificial
  Probe
cacaaggttacaaacagcatacact

SEQ ID NO: 16595 - DNA, 25 bp, Artificial
  Probe
ttccacaaggttacaaacagcatac

SEQ ID NO: 16596 - DNA, 25 bp, Artificial
  Probe
tgaaagatcctacctcagatacact

SEQ ID NO: 16597 - DNA, 25 bp, Artificial
  Probe
agtgaaagatcctacctcagataca

SEQ ID NO: 16598 - DNA, 25 bp, Artificial
  Probe
gactctccaagcctgaggtcttata

SEQ ID NO: 16599 - DNA, 25 bp, Artificial
  Probe
aatagaagaacaccaggaatcattg

SEQ ID NO: 16600 - DNA, 25 bp, Artificial
  Probe
gatatgctctcctgcttctgatgaa

SEQ ID NO: 16601 - DNA, 25 bp, Artificial
  Probe
atagaagaacaccaggaatcattgg

SEQ ID NO: 16602 - DNA, 25 bp, Artificial
  Probe
caccaggaatcattggatgttacaa

SEQ ID NO: 16603 - DNA, 25 bp, Artificial
  Probe
tagaagaacaccaggaatcattgga

SEQ ID NO: 16604 - DNA, 25 bp, Artificial
  Probe
agatatgctctcctgcttctgatga

SEQ ID NO: 16605 - DNA, 25 bp, Artificial
  Probe
gaatcattggatgttacaaaccctc

SEQ ID NO: 16606 - DNA, 25 bp, Artificial
  Probe
caggaatcattggatgttacaaacc

SEQ ID NO: 16607 - DNA, 25 bp, Artificial
  Probe
aaatagaagaacaccaggaatcatt

SEQ ID NO: 16608 - DNA, 25 bp, Artificial
  Probe
gaagaacaccaggaatcattggatg

SEQ ID NO: 16609 - DNA, 25 bp, Artificial
  Probe
agaagaacaccaggaatcattggat

SEQ ID NO: 16610 - DNA, 25 bp, Artificial
  Probe
acaccaggaatcattggatgttaca

SEQ ID NO: 16611 - DNA, 25 bp, Artificial
  Probe
ggaatcattggatgttacaaaccct

SEQ ID NO: 16612 - DNA, 25 bp, Artificial
  Probe
aggaatcattggatgttacaaaccc

SEQ ID NO: 16613 - DNA, 25 bp, Artificial
  Probe
atgcagtatcatggatctcattggt

SEQ ID NO: 16614 - DNA, 25 bp, Artificial
  Probe
aatcattggatgttacaaaccctcg

SEQ ID NO: 16615 - DNA, 25 bp, Artificial
  Probe
aagaacaccaggaatcattggatgt

SEQ ID NO: 16616 - DNA, 25 bp, Artificial
  Probe
atgtcatctgctccattactttcca

SEQ ID NO: 16617 - DNA, 25 bp, Artificial
  Probe
caggaagagattgaccgtgtgattg

SEQ ID NO: 16618 - DNA, 25 bp, Artificial
  Probe
agtatcatggatctcattggtgcag

SEQ ID NO: 16619 - DNA, 25 bp, Artificial
  Probe
ccaggaatcattggatgttacaaac

SEQ ID NO: 16620 - DNA, 25 bp, Artificial
  Probe
accaggaatcattggatgttacaaa

SEQ ID NO: 16621 - DNA, 25 bp, Artificial
  Probe
cagtatcatggatctcattggtgca

SEQ ID NO: 16622 - DNA, 25 bp, Artificial
  Probe
tgcagtatcatggatctcattggtg

SEQ ID NO: 16623 - DNA, 25 bp, Artificial
  Probe
attggatgttacaaaccctcgtgat

SEQ ID NO: 16624 - DNA, 25 bp, Artificial
  Probe
atcattggatgttacaaaccctcgt

SEQ ID NO: 16625 - DNA, 25 bp, Artificial
  Probe
tggatgttacaaaccctcgtgattt

SEQ ID NO: 16626 - DNA, 25 bp, Artificial
  Probe
gaacaccaggaatcattggatgtta

SEQ ID NO: 16627 - DNA, 25 bp, Artificial
  Probe
ttggatgttacaaaccctcgtgatt

SEQ ID NO: 16628 - DNA, 25 bp, Artificial
  Probe
aacaccaggaatcattggatgttac

SEQ ID NO: 16629 - DNA, 25 bp, Artificial
  Probe
tgtcatctgctccattactttccag

SEQ ID NO: 16630 - DNA, 25 bp, Artificial
  Probe
gtatcatggatctcattggtgcagg

SEQ ID NO: 16631 - DNA, 25 bp, Artificial
  Probe
atatgctctcctgcttctgatgaag

SEQ ID NO: 16632 - DNA, 25 bp, Artificial
  Probe
tgaagaaaatagaagaacaccagga

SEQ ID NO: 16633 - DNA, 25 bp, Artificial
  Probe
ctggaactcatcacaaaatagcaaa

SEQ ID NO: 16634 - DNA, 25 bp, Artificial
  Probe
tggaactcatcacaaaatagcaaaa

SEQ ID NO: 16635 - DNA, 25 bp, Artificial
  Probe
ctaaagtccaggaagagattgaccg

SEQ ID NO: 16636 - DNA, 25 bp, Artificial
  Probe
cacaacattgagatatgctctcctg

SEQ ID NO: 16637 - DNA, 25 bp, Artificial
  Probe
gtggaagaactgaggaaaacaaaag

SEQ ID NO: 16638 - DNA, 25 bp, Artificial
  Probe
ttgaagaaaatagaagaacaccagg

SEQ ID NO: 16639 - DNA, 25 bp, Artificial
  Probe
gaaaatagaagaacaccaggaatca

SEQ ID NO: 16640 - DNA, 25 bp, Artificial
  Probe
gaagaaaatagaagaacaccaggaa

SEQ ID NO: 16641 - DNA, 25 bp, Artificial
  Probe
cattggatgttacaaaccctcgtga

SEQ ID NO: 16642 - DNA, 25 bp, Artificial
  Probe
tcattggatgttacaaaccctcgtg

SEQ ID NO: 16643 - DNA, 25 bp, Artificial
  Probe
aggaagagattgaccgtgtgattgg

SEQ ID NO: 16644 - DNA, 25 bp, Artificial
  Probe
cctctctatttctctctgttccaag

SEQ ID NO: 16645 - DNA, 25 bp, Artificial
  Probe
tcctctctatttctctctgttccaa

SEQ ID NO: 16646 - DNA, 25 bp, Artificial
  Probe
ttcctctctatttctctctgttcca

SEQ ID NO: 16647 - DNA, 25 bp, Artificial
  Probe
tttcctctctatttctctctgttcc

SEQ ID NO: 16648 - DNA, 25 bp, Artificial
  Probe
cactttcctctctatttctctctgt

SEQ ID NO: 16649 - DNA, 25 bp, Artificial
  Probe
aaatgtgccaattagcgtaacttaa

SEQ ID NO: 16650 - DNA, 25 bp, Artificial
  Probe
aataaggaagagaggaggaaaggag

SEQ ID NO: 16651 - DNA, 25 bp, Artificial
  Probe
caaatgtgccaattagcgtaactta

SEQ ID NO: 16652 - DNA, 25 bp, Artificial
  Probe
gaataaggaagagaggaggaaagga

SEQ ID NO: 16653 - DNA, 25 bp, Artificial
  Probe
actttcctctctatttctctctgtt

SEQ ID NO: 16654 - DNA, 25 bp, Artificial
  Probe
aatgtgccaattagcgtaacttaag

SEQ ID NO: 16655 - DNA, 25 bp, Artificial
  Probe
ctttcctctctatttctctctgttc

SEQ ID NO: 16656 - DNA, 25 bp, Artificial
  Probe
ataaggaagagaggaggaaaggaga

SEQ ID NO: 16657 - DNA, 25 bp, Artificial
  Probe
ggaataaggaagagaggaggaaagg

SEQ ID NO: 16658 - DNA, 25 bp, Artificial
  Probe
gggaataaggaagagaggaggaaag

SEQ ID NO: 16659 - DNA, 25 bp, Artificial
  Probe
ctgtgctgtatgagaagaaccaaac

SEQ ID NO: 16660 - DNA, 25 bp, Artificial
  Probe
taaggaagagaggaggaaaggagag

SEQ ID NO: 16661 - DNA, 25 bp, Artificial
  Probe
ctgctaaagctaccactgataactc

SEQ ID NO: 16662 - DNA, 25 bp, Artificial
  Probe
atgctgtgctgtatgagaagaacca

SEQ ID NO: 16663 - DNA, 25 bp, Artificial
  Probe
tgtgctgtatgagaagaaccaaaca

SEQ ID NO: 16664 - DNA, 25 bp, Artificial
  Probe
ctagcttccgtggacacataacaag

SEQ ID NO: 16665 - DNA, 25 bp, Artificial
  Probe
gaagagaggaggaaaggagagaagg

SEQ ID NO: 16666 - DNA, 25 bp, Artificial
  Probe
ggaagagaggaggaaaggagagaag

SEQ ID NO: 16667 - DNA, 25 bp, Artificial
  Probe
accatttctgtttcctcattttcaa

SEQ ID NO: 16668 - DNA, 25 bp, Artificial
  Probe
catgctgtgctgtatgagaagaacc

SEQ ID NO: 16669 - DNA, 25 bp, Artificial
  Probe
ccatgctgtgctgtatgagaagaac

SEQ ID NO: 16670 - DNA, 25 bp, Artificial
  Probe
tgctaaagctaccactgataactcg

SEQ ID NO: 16671 - DNA, 25 bp, Artificial
  Probe
tgctgtgctgtatgagaagaaccaa

SEQ ID NO: 16672 - DNA, 25 bp, Artificial
  Probe
gctgtgctgtatgagaagaaccaaa

SEQ ID NO: 16673 - DNA, 25 bp, Artificial
  Probe
aaccatttctgtttcctcattttca

SEQ ID NO: 16674 - DNA, 25 bp, Artificial
  Probe
ctcaaagacgagaagaagggtgatg

SEQ ID NO: 16675 - DNA, 25 bp, Artificial
  Probe
aaataaagcaaatgtgccaattagc

SEQ ID NO: 16676 - DNA, 25 bp, Artificial
  Probe
aggaagagaggaggaaaggagagaa

SEQ ID NO: 16677 - DNA, 25 bp, Artificial
  Probe
aaggaagagaggaggaaaggagaga

SEQ ID NO: 16678 - DNA, 25 bp, Artificial
  Probe
ccatttctgtttcctcattttcaat

SEQ ID NO: 16679 - DNA, 25 bp, Artificial
  Probe
accatgctgtgctgtatgagaagaa

SEQ ID NO: 16680 - DNA, 25 bp, Artificial
  Probe
aataaagcaaatgtgccaattagcg

SEQ ID NO: 16681 - DNA, 25 bp, Artificial
  Probe
ctaaagctaccactgataactcgcc

SEQ ID NO: 16682 - DNA, 25 bp, Artificial
  Probe
gtgtggcttaaacatttgtttcttg

SEQ ID NO: 16683 - DNA, 25 bp, Artificial
  Probe
aagataccaccatgctgtgctgtat

SEQ ID NO: 16684 - DNA, 25 bp, Artificial
  Probe
ccgttctgaggagtccaaaatatta

SEQ ID NO: 16685 - DNA, 25 bp, Artificial
  Probe
taaagcaaatgtgccaattagcgta

SEQ ID NO: 16686 - DNA, 25 bp, Artificial
  Probe
tgtggcttaaacatttgtttcttgg

SEQ ID NO: 16687 - DNA, 25 bp, Artificial
  Probe
cgttctgaggagtccaaaatattaa

SEQ ID NO: 16688 - DNA, 25 bp, Artificial
  Probe
ataaagcaaatgtgccaattagcgt

SEQ ID NO: 16689 - DNA, 25 bp, Artificial
  Probe
aatgaagattctaccaatgtggctt

SEQ ID NO: 16690 - DNA, 25 bp, Artificial
  Probe
caatgaagattctaccaatgtggct

SEQ ID NO: 16691 - DNA, 25 bp, Artificial
  Probe
ccaatgaagattctaccaatgtggc

SEQ ID NO: 16692 - DNA, 25 bp, Artificial
  Probe
atgaagattctaccaatgtggcttt

SEQ ID NO: 16693 - DNA, 25 bp, Artificial
  Probe
gaagattctaccaatgtggctttca

SEQ ID NO: 16694 - DNA, 25 bp, Artificial
  Probe
tgaagattctaccaatgtggctttc

SEQ ID NO: 16695 - DNA, 25 bp, Artificial
  Probe
aagattctaccaatgtggctttcac

SEQ ID NO: 16696 - DNA, 25 bp, Artificial
  Probe
cccaatgaagattctaccaatgtgg

SEQ ID NO: 16697 - DNA, 25 bp, Artificial
  Probe
ctcactgaaggatttagagcaggtg

SEQ ID NO: 16698 - DNA, 25 bp, Artificial
  Probe
ccccaatgaagattctaccaatgtg

SEQ ID NO: 16699 - DNA, 25 bp, Artificial
  Probe
attctaccaatgtggctttcaccat

SEQ ID NO: 16700 - DNA, 25 bp, Artificial
  Probe
cttttagagaagattccctggactc

SEQ ID NO: 16701 - DNA, 25 bp, Artificial
  Probe
tactctccgactcagccttaacctc

SEQ ID NO: 16702 - DNA, 25 bp, Artificial
  Probe
ctactctccgactcagccttaacct

SEQ ID NO: 16703 - DNA, 25 bp, Artificial
  Probe
agattctaccaatgtggctttcacc

SEQ ID NO: 16704 - DNA, 25 bp, Artificial
  Probe
tttagagaagattccctggactctg

SEQ ID NO: 16705 - DNA, 25 bp, Artificial
  Probe
ttctaccaatgtggctttcaccatc

SEQ ID NO: 16706 - DNA, 25 bp, Artificial
  Probe
gattctaccaatgtggctttcacca

SEQ ID NO: 16707 - DNA, 25 bp, Artificial
  Probe
ctttcttcagtgtccagatgtggtc

SEQ ID NO: 16708 - DNA, 25 bp, Artificial
  Probe
cacctttcttcagtgtccagatgtg

SEQ ID NO: 16709 - DNA, 25 bp, Artificial
  Probe
ctggactctggttctgtacatctca

SEQ ID NO: 16710 - DNA, 25 bp, Artificial
  Probe
caaagatccgaaccgtgaagatgac

SEQ ID NO: 16711 - DNA, 25 bp, Artificial
  Probe
ctatggagaccagcatcttttagag

SEQ ID NO: 16712 - DNA, 25 bp, Artificial
  Probe
tatggagaccagcatcttttagaga

SEQ ID NO: 16713 - DNA, 25 bp, Artificial
  Probe
gattccctggactctggttctgtac

SEQ ID NO: 16714 - DNA, 25 bp, Artificial
  Probe
cactatggagaccagcatcttttag

SEQ ID NO: 16715 - DNA, 25 bp, Artificial
  Probe
actatggagaccagcatcttttaga

SEQ ID NO: 16716 - DNA, 25 bp, Artificial
  Probe
gatgtggtctgtgtgggatgagaat

SEQ ID NO: 16717 - DNA, 25 bp, Artificial
  Probe
agattccctggactctggttctgta

SEQ ID NO: 16718 - DNA, 25 bp, Artificial
  Probe
tttcttcagtgtccagatgtggtct

SEQ ID NO: 16719 - DNA, 25 bp, Artificial
  Probe
gagaagattccctggactctggttc

SEQ ID NO: 16720 - DNA, 25 bp, Artificial
  Probe
gaagattccctggactctggttctg

SEQ ID NO: 16721 - DNA, 25 bp, Artificial
  Probe
atggagaccagcatcttttagagaa

SEQ ID NO: 16722 - DNA, 25 bp, Artificial
  Probe
ctaccaatgtggctttcaccatctc

SEQ ID NO: 16723 - DNA, 25 bp, Artificial
  Probe
actgaaggatttagagcaggtggac

SEQ ID NO: 16724 - DNA, 25 bp, Artificial
  Probe
cactgaaggatttagagcaggtgga

SEQ ID NO: 16725 - DNA, 25 bp, Artificial
  Probe
tcactgaaggatttagagcaggtgg

SEQ ID NO: 16726 - DNA, 25 bp, Artificial
  Probe
tggatctacatgggcttcaacagtc

SEQ ID NO: 16727 - DNA, 25 bp, Artificial
  Probe
tggactctggttctgtacatctcag

SEQ ID NO: 16728 - DNA, 25 bp, Artificial
  Probe
tcttttagagaagattccctggact

SEQ ID NO: 16729 - DNA, 25 bp, Artificial
  Probe
atgtggtctgtgtgggatgagaatg

SEQ ID NO: 16730 - DNA, 25 bp, Artificial
  Probe
tggagaccagcatcttttagagaag

SEQ ID NO: 16731 - DNA, 25 bp, Artificial
  Probe
ccactatggagaccagcatctttta

SEQ ID NO: 16732 - DNA, 25 bp, Artificial
  Probe
cctggactctggttctgtacatctc

SEQ ID NO: 16733 - DNA, 25 bp, Artificial
  Probe
tctaccaatgtggctttcaccatct

SEQ ID NO: 16734 - DNA, 25 bp, Artificial
  Probe
attcctcaactactaccttctcaac

SEQ ID NO: 16735 - DNA, 25 bp, Artificial
  Probe
cattcctcaactactaccttctcaa

SEQ ID NO: 16736 - DNA, 25 bp, Artificial
  Probe
ttcctcaactactaccttctcaaca

SEQ ID NO: 16737 - DNA, 25 bp, Artificial
  Probe
ttctaactaccgaacaataagcctt

SEQ ID NO: 16738 - DNA, 25 bp, Artificial
  Probe
tcctcaactactaccttctcaacag

SEQ ID NO: 16739 - DNA, 25 bp, Artificial
  Probe
ctactaccttctcaacagcctctac

SEQ ID NO: 16740 - DNA, 25 bp, Artificial
  Probe
ccagatccacaagaacttcctatac

SEQ ID NO: 16741 - DNA, 25 bp, Artificial
  Probe
tccagatccacaagaacttcctata

SEQ ID NO: 16742 - DNA, 25 bp, Artificial
  Probe
cagatccacaagaacttcctatact

SEQ ID NO: 16743 - DNA, 25 bp, Artificial
  Probe
gcattcctcaactactaccttctca

SEQ ID NO: 16744 - DNA, 25 bp, Artificial
  Probe
actactaccttctcaacagcctcta

SEQ ID NO: 16745 - DNA, 25 bp, Artificial
  Probe
agatccacaagaacttcctatactt

SEQ ID NO: 16746 - DNA, 25 bp, Artificial
  Probe
ttccagatccacaagaacttcctat

SEQ ID NO: 16747 - DNA, 25 bp, Artificial
  Probe
ggcattcctcaactactaccttctc

SEQ ID NO: 16748 - DNA, 25 bp, Artificial
  Probe
cttccagatccacaagaacttccta

SEQ ID NO: 16749 - DNA, 25 bp, Artificial
  Probe
aactactaccttctcaacagcctct

SEQ ID NO: 16750 - DNA, 25 bp, Artificial
  Probe
caactactaccttctcaacagcctc

SEQ ID NO: 16751 - DNA, 25 bp, Artificial
  Probe
ctcaactactaccttctcaacagcc

SEQ ID NO: 16752 - DNA, 25 bp, Artificial
  Probe
cctcaactactaccttctcaacagc

SEQ ID NO: 16753 - DNA, 25 bp, Artificial
  Probe
tactaccttctcaacagcctctacc

SEQ ID NO: 16754 - DNA, 25 bp, Artificial
  Probe
tcaactactaccttctcaacagcct

SEQ ID NO: 16755 - DNA, 25 bp, Artificial
  Probe
tctaactaccgaacaataagccttt

SEQ ID NO: 16756 - DNA, 25 bp, Artificial
  Probe
tttctaactaccgaacaataagcct

SEQ ID NO: 16757 - DNA, 25 bp, Artificial
  Probe
atttctaactaccgaacaataagcc

SEQ ID NO: 16758 - DNA, 25 bp, Artificial
  Probe
taactaccgaacaataagcctttga

SEQ ID NO: 16759 - DNA, 25 bp, Artificial
  Probe
ctaactaccgaacaataagcctttg

SEQ ID NO: 16760 - DNA, 25 bp, Artificial
  Probe
aactaccgaacaataagcctttgat

SEQ ID NO: 16761 - DNA, 25 bp, Artificial
  Probe
aagagtcatttccgtgttatgtaaa

SEQ ID NO: 16762 - DNA, 25 bp, Artificial
  Probe
aaagagtcatttccgtgttatgtaa

SEQ ID NO: 16763 - DNA, 25 bp, Artificial
  Probe
cttctagccttattcccacagatac

SEQ ID NO: 16764 - DNA, 25 bp, Artificial
  Probe
ataaagagtcatttccgtgttatgt

SEQ ID NO: 16765 - DNA, 25 bp, Artificial
  Probe
gaatgactacacacacacacacaca

SEQ ID NO: 16766 - DNA, 25 bp, Artificial
  Probe
tgaatgactacacacacacacacac

SEQ ID NO: 16767 - DNA, 25 bp, Artificial
  Probe
aggcattcctcaactactaccttct

SEQ ID NO: 16768 - DNA, 25 bp, Artificial
  Probe
caggcattcctcaactactaccttc

SEQ ID NO: 16769 - DNA, 25 bp, Artificial
  Probe
accatgatttctaactaccgaacaa

SEQ ID NO: 16770 - DNA, 25 bp, Artificial
  Probe
ttctagccttattcccacagatacc

SEQ ID NO: 16771 - DNA, 25 bp, Artificial
  Probe
gaccatgatttctaactaccgaaca

SEQ ID NO: 16772 - DNA, 25 bp, Artificial
  Probe
gagaccatgatttctaactaccgaa

SEQ ID NO: 16773 - DNA, 25 bp, Artificial
  Probe
ggagagaccatgatttctaactacc

SEQ ID NO: 16774 - DNA, 25 bp, Artificial
  Probe
ttattcccacagatacctcctcctt

SEQ ID NO: 16775 - DNA, 25 bp, Artificial
  Probe
gacttccagatccacaagaacttcc

SEQ ID NO: 16776 - DNA, 25 bp, Artificial
  Probe
acttaataaagagtcatttccgtgt

SEQ ID NO: 16777 - DNA, 25 bp, Artificial
  Probe
gatttctaactaccgaacaataagc

SEQ ID NO: 16778 - DNA, 25 bp, Artificial
  Probe
ctagccttattcccacagatacctc

SEQ ID NO: 16779 - DNA, 25 bp, Artificial
  Probe
agacagaggaagacaagaagaactt

SEQ ID NO: 16780 - DNA, 25 bp, Artificial
  Probe
cagacagaggaagacaagaagaact

SEQ ID NO: 16781 - DNA, 25 bp, Artificial
  Probe
ctaccagacagaggaagacaagaag

SEQ ID NO: 16782 - DNA, 25 bp, Artificial
  Probe
taccagacagaggaagacaagaaga

SEQ ID NO: 16783 - DNA, 25 bp, Artificial
  Probe
atcaaccagaagaagaagatggatg

SEQ ID NO: 16784 - DNA, 25 bp, Artificial
  Probe
ccagacagaggaagacaagaagaac

SEQ ID NO: 16785 - DNA, 25 bp, Artificial
  Probe
aaatatgaatgcttgactttgcctg

SEQ ID NO: 16786 - DNA, 25 bp, Artificial
  Probe
taaatatgaatgcttgactttgcct

SEQ ID NO: 16787 - DNA, 25 bp, Artificial
  Probe
atatgaatgcttgactttgcctgta

SEQ ID NO: 16788 - DNA, 25 bp, Artificial
  Probe
tatgaatgcttgactttgcctgtaa

SEQ ID NO: 16789 - DNA, 25 bp, Artificial
  Probe
accagacagaggaagacaagaagaa

SEQ ID NO: 16790 - DNA, 25 bp, Artificial
  Probe
aatatgaatgcttgactttgcctgt

SEQ ID NO: 16791 - DNA, 25 bp, Artificial
  Probe
ataaatatgaatgcttgactttgcc

SEQ ID NO: 16792 - DNA, 25 bp, Artificial
  Probe
gctatcccacaataaatatgaatgc

SEQ ID NO: 16793 - DNA, 25 bp, Artificial
  Probe
atgaatgcttgactttgcctgtaaa

SEQ ID NO: 16794 - DNA, 25 bp, Artificial
  Probe
cccacaataaatatgaatgcttgac

SEQ ID NO: 16795 - DNA, 25 bp, Artificial
  Probe
tcccacaataaatatgaatgcttga

SEQ ID NO: 16796 - DNA, 25 bp, Artificial
  Probe
gctgttgctatcccacaataaatat

SEQ ID NO: 16797 - DNA, 25 bp, Artificial
  Probe
atcccacaataaatatgaatgcttg

SEQ ID NO: 16798 - DNA, 25 bp, Artificial
  Probe
cgctgttgctatcccacaataaata

SEQ ID NO: 16799 - DNA, 25 bp, Artificial
  Probe
ccacaataaatatgaatgcttgact

SEQ ID NO: 16800 - DNA, 25 bp, Artificial
  Probe
tgttgctatcccacaataaatatga

SEQ ID NO: 16801 - DNA, 25 bp, Artificial
  Probe
catcaaccagaagaagaagatggat

SEQ ID NO: 16802 - DNA, 25 bp, Artificial
  Probe
cctaccagacagaggaagacaagaa

SEQ ID NO: 16803 - DNA, 25 bp, Artificial
  Probe
tcaaccagaagaagaagatggatgc

SEQ ID NO: 16804 - DNA, 25 bp, Artificial
  Probe
ctgttgctatcccacaataaatatg

SEQ ID NO: 16805 - DNA, 25 bp, Artificial
  Probe
ctcatcaaccagaagaagaagatgg

SEQ ID NO: 16806 - DNA, 25 bp, Artificial
  Probe
tgctatcccacaataaatatgaatg

SEQ ID NO: 16807 - DNA, 25 bp, Artificial
  Probe
tcatcaaccagaagaagaagatgga

SEQ ID NO: 16808 - DNA, 25 bp, Artificial
  Probe
gaagaagaagatggatgcagacctc

SEQ ID NO: 16809 - DNA, 25 bp, Artificial
  Probe
gttgctatcccacaataaatatgaa

SEQ ID NO: 16810 - DNA, 25 bp, Artificial
  Probe
aataaatatgaatgcttgactttgc

SEQ ID NO: 16811 - DNA, 25 bp, Artificial
  Probe
ctatcccacaataaatatgaatgct

SEQ ID NO: 16812 - DNA, 25 bp, Artificial
  Probe
cagaagaagaagatggatgcagacc

SEQ ID NO: 16813 - DNA, 25 bp, Artificial
  Probe
atgaggaataacctgtccagcagaa

SEQ ID NO: 16814 - DNA, 25 bp, Artificial
  Probe
agaagaagaagatggatgcagacct

SEQ ID NO: 16815 - DNA, 25 bp, Artificial
  Probe
gacagaggaagacaagaagaacttg

SEQ ID NO: 16816 - DNA, 25 bp, Artificial
  Probe
aagaagaagatggatgcagacctct

SEQ ID NO: 16817 - DNA, 25 bp, Artificial
  Probe
tcgctgttgctatcccacaataaat

SEQ ID NO: 16818 - DNA, 25 bp, Artificial
  Probe
tatcccacaataaatatgaatgctt

SEQ ID NO: 16819 - DNA, 25 bp, Artificial
  Probe
cagctcagtcaggccaatagaatag

SEQ ID NO: 16820 - DNA, 25 bp, Artificial
  Probe
gatgaggaataacctgtccagcaga

SEQ ID NO: 16821 - DNA, 25 bp, Artificial
  Probe
aaccagaagaagaagatggatgcag

SEQ ID NO: 16822 - DNA, 25 bp, Artificial
  Probe
cacctaccagacagaggaagacaag

SEQ ID NO: 16823 - DNA, 25 bp, Artificial
  Probe
ttgctatcccacaataaatatgaat

SEQ ID NO: 16824 - DNA, 25 bp, Artificial
  Probe
agaaacaagtgaagagcctccagag

SEQ ID NO: 16825 - DNA, 25 bp, Artificial
  Probe
aacaagtgaagagcctccagagttt

SEQ ID NO: 16826 - DNA, 25 bp, Artificial
  Probe
aaacaagtgaagagcctccagagtt

SEQ ID NO: 16827 - DNA, 25 bp, Artificial
  Probe
gaaacaagtgaagagcctccagagt

SEQ ID NO: 16828 - DNA, 25 bp, Artificial
  Probe
cagaaacaagtgaagagcctccaga

SEQ ID NO: 16829 - DNA, 25 bp, Artificial
  Probe
gagatggagatccagctcagtcatg

SEQ ID NO: 16830 - DNA, 25 bp, Artificial
  Probe
tttgctgaaggacactcaaatccag

SEQ ID NO: 16831 - DNA, 25 bp, Artificial
  Probe
agtttgctgaaggacactcaaatcc

SEQ ID NO: 16832 - DNA, 25 bp, Artificial
  Probe
acaagtgaagagcctccagagtttg

SEQ ID NO: 16833 - DNA, 25 bp, Artificial
  Probe
gagtttgctgaaggacactcaaatc

SEQ ID NO: 16834 - DNA, 25 bp, Artificial
  Probe
gtttgctgaaggacactcaaatcca

SEQ ID NO: 16835 - DNA, 25 bp, Artificial
  Probe
agagtttgctgaaggacactcaaat

SEQ ID NO: 16836 - DNA, 25 bp, Artificial
  Probe
cagagtttgctgaaggacactcaaa

SEQ ID NO: 16837 - DNA, 25 bp, Artificial
  Probe
ccagagtttgctgaaggacactcaa

SEQ ID NO: 16838 - DNA, 25 bp, Artificial
  Probe
ctccagagtttgctgaaggacactc

SEQ ID NO: 16839 - DNA, 25 bp, Artificial
  Probe
gaatagttggaggaatatggtggtt

SEQ ID NO: 16840 - DNA, 25 bp, Artificial
  Probe
cagaatagttggaggaatatggtgg

SEQ ID NO: 16841 - DNA, 25 bp, Artificial
  Probe
agaatagttggaggaatatggtggt

SEQ ID NO: 16842 - DNA, 25 bp, Artificial
  Probe
aattacgattgccattcttcaactg

SEQ ID NO: 16843 - DNA, 25 bp, Artificial
  Probe
gaccagaatagttggaggaatatgg

SEQ ID NO: 16844 - DNA, 25 bp, Artificial
  Probe
ccagaatagttggaggaatatggtg

SEQ ID NO: 16845 - DNA, 25 bp, Artificial
  Probe
attacgattgccattcttcaactgc

SEQ ID NO: 16846 - DNA, 25 bp, Artificial
  Probe
cgaccagaatagttggaggaatatg

SEQ ID NO: 16847 - DNA, 25 bp, Artificial
  Probe
atatttggaggacagatttcagagg

SEQ ID NO: 16848 - DNA, 25 bp, Artificial
  Probe
atatgatgaaagagaagtggtggag

SEQ ID NO: 16849 - DNA, 25 bp, Artificial
  Probe
ttcaccctaatcatcatttcatcct

SEQ ID NO: 16850 - DNA, 25 bp, Artificial
  Probe
aatagttggaggaatatggtggttt

SEQ ID NO: 16851 - DNA, 25 bp, Artificial
  Probe
acatatttggaggacagatttcaga

SEQ ID NO: 16852 - DNA, 25 bp, Artificial
  Probe
cacatatttggaggacagatttcag

SEQ ID NO: 16853 - DNA, 25 bp, Artificial
  Probe
ctaatcatcatttcatcctacacgg

SEQ ID NO: 16854 - DNA, 25 bp, Artificial
  Probe
cctaatcatcatttcatcctacacg

SEQ ID NO: 16855 - DNA, 25 bp, Artificial
  Probe
agtatccttacttgtcaccagagac

SEQ ID NO: 16856 - DNA, 25 bp, Artificial
  Probe
accctaatcatcatttcatcctaca

SEQ ID NO: 16857 - DNA, 25 bp, Artificial
  Probe
catatttggaggacagatttcagag

SEQ ID NO: 16858 - DNA, 25 bp, Artificial
  Probe
cgataaattgctatgtgtgctttct

SEQ ID NO: 16859 - DNA, 25 bp, Artificial
  Probe
tatttggaggacagatttcagagga

SEQ ID NO: 16860 - DNA, 25 bp, Artificial
  Probe
tttcaccctaatcatcatttcatcc

SEQ ID NO: 16861 - DNA, 25 bp, Artificial
  Probe
tttgctaaatagtttctggtttgga

SEQ ID NO: 16862 - DNA, 25 bp, Artificial
  Probe
tttcctccgataaattgctatgtgt

SEQ ID NO: 16863 - DNA, 25 bp, Artificial
  Probe
ctaagggcaaatcttctttcacaag

SEQ ID NO: 16864 - DNA, 25 bp, Artificial
  Probe
gaactaagggcaaatcttctttcac

SEQ ID NO: 16865 - DNA, 25 bp, Artificial
  Probe
gcaaatcttctttcacaagtatcct

SEQ ID NO: 16866 - DNA, 25 bp, Artificial
  Probe
ggcaaatcttctttcacaagtatcc

SEQ ID NO: 16867 - DNA, 25 bp, Artificial
  Probe
gggcaaatcttctttcacaagtatc

SEQ ID NO: 16868 - DNA, 25 bp, Artificial
  Probe
taatcatcatttcatcctacacggc

SEQ ID NO: 16869 - DNA, 25 bp, Artificial
  Probe
ccctaatcatcatttcatcctacac

SEQ ID NO: 16870 - DNA, 25 bp, Artificial
  Probe
caccctaatcatcatttcatcctac

SEQ ID NO: 16871 - DNA, 25 bp, Artificial
  Probe
tcaccctaatcatcatttcatccta

SEQ ID NO: 16872 - DNA, 25 bp, Artificial
  Probe
gaagaagacagtaaggaagccagtg

SEQ ID NO: 16873 - DNA, 25 bp, Artificial
  Probe
agggcaaatcttctttcacaagtat

SEQ ID NO: 16874 - DNA, 25 bp, Artificial
  Probe
ctttgctaaatagtttctggtttgg

SEQ ID NO: 16875 - DNA, 25 bp, Artificial
  Probe
aagggcaaatcttctttcacaagta

SEQ ID NO: 16876 - DNA, 25 bp, Artificial
  Probe
taagggcaaatcttctttcacaagt

SEQ ID NO: 16877 - DNA, 25 bp, Artificial
  Probe
actaagggcaaatcttctttcacaa

SEQ ID NO: 16878 - DNA, 25 bp, Artificial
  Probe
aactaagggcaaatcttctttcaca

SEQ ID NO: 16879 - DNA, 25 bp, Artificial
  Probe
gcacatatttggaggacagatttca

SEQ ID NO: 16880 - DNA, 25 bp, Artificial
  Probe
gccaaacaaaccaagatagaatatg

SEQ ID NO: 16881 - DNA, 25 bp, Artificial
  Probe
ccgataaattgctatgtgtgctttc

SEQ ID NO: 16882 - DNA, 25 bp, Artificial
  Probe
ttcctccgataaattgctatgtgtg

SEQ ID NO: 16883 - DNA, 25 bp, Artificial
  Probe
tatccttacttgtcaccagagacga

SEQ ID NO: 16884 - DNA, 25 bp, Artificial
  Probe
ccaacattaacccatctagctcaat

SEQ ID NO: 16885 - DNA, 25 bp, Artificial
  Probe
attaacccatctagctcaatgcaaa

SEQ ID NO: 16886 - DNA, 25 bp, Artificial
  Probe
aaatgaagatgaggtcgctgctaag

SEQ ID NO: 16887 - DNA, 25 bp, Artificial
  Probe
ctggtcatggtgtcagaactgaatg

SEQ ID NO: 16888 - DNA, 25 bp, Artificial
  Probe
caacattaacccatctagctcaatg

SEQ ID NO: 16889 - DNA, 25 bp, Artificial
  Probe
aatgaagatgaggtcgctgctaagg

SEQ ID NO: 16890 - DNA, 25 bp, Artificial
  Probe
actggtcatggtgtcagaactgaat

SEQ ID NO: 16891 - DNA, 25 bp, Artificial
  Probe
gccaacattaacccatctagctcaa

SEQ ID NO: 16892 - DNA, 25 bp, Artificial
  Probe
aacattaacccatctagctcaatgc

SEQ ID NO: 16893 - DNA, 25 bp, Artificial
  Probe
gaagatgaggtcgctgctaaggaag

SEQ ID NO: 16894 - DNA, 25 bp, Artificial
  Probe
cattaacccatctagctcaatgcaa

SEQ ID NO: 16895 - DNA, 25 bp, Artificial
  Probe
aaaatgaagatgaggtcgctgctaa

SEQ ID NO: 16896 - DNA, 25 bp, Artificial
  Probe
tggtcatggtgtcagaactgaatgg

SEQ ID NO: 16897 - DNA, 25 bp, Artificial
  Probe
taacccatctagctcaatgcaaaat

SEQ ID NO: 16898 - DNA, 25 bp, Artificial
  Probe
ttaacccatctagctcaatgcaaaa

SEQ ID NO: 16899 - DNA, 25 bp, Artificial
  Probe
acattaacccatctagctcaatgca

SEQ ID NO: 16900 - DNA, 25 bp, Artificial
  Probe
ctagctcaatgcaaaatgaagatga

SEQ ID NO: 16901 - DNA, 25 bp, Artificial
  Probe
tctagctcaatgcaaaatgaagatg

SEQ ID NO: 16902 - DNA, 25 bp, Artificial
  Probe
catctagctcaatgcaaaatgaaga

SEQ ID NO: 16903 - DNA, 25 bp, Artificial
  Probe
ccatctagctcaatgcaaaatgaag

SEQ ID NO: 16904 - DNA, 25 bp, Artificial
  Probe
cactggtcatggtgtcagaactgaa

SEQ ID NO: 16905 - DNA, 25 bp, Artificial
  Probe
atgtcactggtcatggtgtcagaac

SEQ ID NO: 16906 - DNA, 25 bp, Artificial
  Probe
ctgaatggggacatccttgagaaag

SEQ ID NO: 16907 - DNA, 25 bp, Artificial
  Probe
caaaatgaagatgaggtcgctgcta

SEQ ID NO: 16908 - DNA, 25 bp, Artificial
  Probe
ccagagacgtgattcaccaacttct

SEQ ID NO: 16909 - DNA, 25 bp, Artificial
  Probe
cccatctagctcaatgcaaaatgaa

SEQ ID NO: 16910 - DNA, 25 bp, Artificial
  Probe
aacccatctagctcaatgcaaaatg

SEQ ID NO: 16911 - DNA, 25 bp, Artificial
  Probe
cagagacgtgattcaccaacttctc

SEQ ID NO: 16912 - DNA, 25 bp, Artificial
  Probe
tcaatgcaaaatgaagatgaggtcg

SEQ ID NO: 16913 - DNA, 25 bp, Artificial
  Probe
actgaatggggacatccttgagaaa

SEQ ID NO: 16914 - DNA, 25 bp, Artificial
  Probe
aactgaatggggacatccttgagaa

SEQ ID NO: 16915 - DNA, 25 bp, Artificial
  Probe
accagagacgtgattcaccaacttc

SEQ ID NO: 16916 - DNA, 25 bp, Artificial
  Probe
gaccagagacgtgattcaccaactt

SEQ ID NO: 16917 - DNA, 25 bp, Artificial
  Probe
atctagctcaatgcaaaatgaagat

SEQ ID NO: 16918 - DNA, 25 bp, Artificial
  Probe
acccatctagctcaatgcaaaatga

SEQ ID NO: 16919 - DNA, 25 bp, Artificial
  Probe
gaactgaatggggacatccttgaga

SEQ ID NO: 16920 - DNA, 25 bp, Artificial
  Probe
agaactgaatggggacatccttgag

SEQ ID NO: 16921 - DNA, 25 bp, Artificial
  Probe
caatgcaaaatgaagatgaggtcgc

SEQ ID NO: 16922 - DNA, 25 bp, Artificial
  Probe
cagaactgaatggggacatccttga

SEQ ID NO: 16923 - DNA, 25 bp, Artificial
  Probe
aatgcaaaatgaagatgaggtcgct

SEQ ID NO: 16924 - DNA, 25 bp, Artificial
  Probe
catgtcactggtcatggtgtcagaa

SEQ ID NO: 16925 - DNA, 25 bp, Artificial
  Probe
aacttctcggagccagagacacata

SEQ ID NO: 16926 - DNA, 25 bp, Artificial
  Probe
ggccaacattaacccatctagctca

SEQ ID NO: 16927 - DNA, 25 bp, Artificial
  Probe
tagctcaatgcaaaatgaagatgag

SEQ ID NO: 16928 - DNA, 25 bp, Artificial
  Probe
agagacgtgattcaccaacttctcg

SEQ ID NO: 16929 - DNA, 25 bp, Artificial
  Probe
ctgaagaacatcacctacgagatta

SEQ ID NO: 16930 - DNA, 25 bp, Artificial
  Probe
gaagaacatcacctacgagattatt

SEQ ID NO: 16931 - DNA, 25 bp, Artificial
  Probe
tgaagaacatcacctacgagattat

SEQ ID NO: 16932 - DNA, 25 bp, Artificial
  Probe
gaagacactgaagaacatcacctac

SEQ ID NO: 16933 - DNA, 25 bp, Artificial
  Probe
agaagacactgaagaacatcaccta

SEQ ID NO: 16934 - DNA, 25 bp, Artificial
  Probe
actgaagaacatcacctacgagatt

SEQ ID NO: 16935 - DNA, 25 bp, Artificial
  Probe
aagaagacactgaagaacatcacct

SEQ ID NO: 16936 - DNA, 25 bp, Artificial
  Probe
actctgtggataagattgttattca

SEQ ID NO: 16937 - DNA, 25 bp, Artificial
  Probe
tgactctgtggataagattgttatt

SEQ ID NO: 16938 - DNA, 25 bp, Artificial
  Probe
cactgaagaacatcacctacgagat

SEQ ID NO: 16939 - DNA, 25 bp, Artificial
  Probe
catgactctgtggataagattgtta

SEQ ID NO: 16940 - DNA, 25 bp, Artificial
  Probe
atgactctgtggataagattgttat

SEQ ID NO: 16941 - DNA, 25 bp, Artificial
  Probe
ataatggatttggcaatgatggaag

SEQ ID NO: 16942 - DNA, 25 bp, Artificial
  Probe
aagacactgaagaacatcacctacg

SEQ ID NO: 16943 - DNA, 25 bp, Artificial
  Probe
gctataatggatttggcaatgatgg

SEQ ID NO: 16944 - DNA, 25 bp, Artificial
  Probe
ggctataatggatttggcaatgatg

SEQ ID NO: 16945 - DNA, 25 bp, Artificial
  Probe
gatggctataatggatttggcaatg

SEQ ID NO: 16946 - DNA, 25 bp, Artificial
  Probe
gactctgtggataagattgttattc

SEQ ID NO: 16947 - DNA, 25 bp, Artificial
  Probe
gattgaaattatgactgacagaggc

SEQ ID NO: 16948 - DNA, 25 bp, Artificial
  Probe
ctataatggatttggcaatgatgga

SEQ ID NO: 16949 - DNA, 25 bp, Artificial
  Probe
tggctataatggatttggcaatgat

SEQ ID NO: 16950 - DNA, 25 bp, Artificial
  Probe
atggctataatggatttggcaatga

SEQ ID NO: 16951 - DNA, 25 bp, Artificial
  Probe
attgaaattatgactgacagaggca

SEQ ID NO: 16952 - DNA, 25 bp, Artificial
  Probe
gcggtattaaagaagacactgaaga

SEQ ID NO: 16953 - DNA, 25 bp, Artificial
  Probe
ccatgactctgtggataagattgtt

SEQ ID NO: 16954 - DNA, 25 bp, Artificial
  Probe
gttctgtggaaagtgtaaagcattc

SEQ ID NO: 16955 - DNA, 25 bp, Artificial
  Probe
tataatggatttggcaatgatggaa

SEQ ID NO: 16956 - DNA, 25 bp, Artificial
  Probe
gaccatgactctgtggataagattg

SEQ ID NO: 16957 - DNA, 25 bp, Artificial
  Probe
cggtattaaagaagacactgaagaa

SEQ ID NO: 16958 - DNA, 25 bp, Artificial
  Probe
atgaccatgactctgtggataagat

SEQ ID NO: 16959 - DNA, 25 bp, Artificial
  Probe
gaaagtgtaaagcattccaacgaag

SEQ ID NO: 16960 - DNA, 25 bp, Artificial
  Probe
tgattgaaattatgactgacagagg

SEQ ID NO: 16961 - DNA, 25 bp, Artificial
  Probe
tgaccatgactctgtggataagatt

SEQ ID NO: 16962 - DNA, 25 bp, Artificial
  Probe
tgttctgtggaaagtgtaaagcatt

SEQ ID NO: 16963 - DNA, 25 bp, Artificial
  Probe
ggatggctataatggatttggcaat

SEQ ID NO: 16964 - DNA, 25 bp, Artificial
  Probe
gacactgaagaacatcacctacgag

SEQ ID NO: 16965 - DNA, 25 bp, Artificial
  Probe
accatgactctgtggataagattgt

SEQ ID NO: 16966 - DNA, 25 bp, Artificial
  Probe
ttgatgaccatgactctgtggataa

SEQ ID NO: 16967 - DNA, 25 bp, Artificial
  Probe
taaagaagacactgaagaacatcac

SEQ ID NO: 16968 - DNA, 25 bp, Artificial
  Probe
ggcggtattaaagaagacactgaag

SEQ ID NO: 16969 - DNA, 25 bp, Artificial
  Probe
ttctgttctgtggaaagtgtaaagc

SEQ ID NO: 16970 - DNA, 25 bp, Artificial
  Probe
gatgaccatgactctgtggataaga

SEQ ID NO: 16971 - DNA, 25 bp, Artificial
  Probe
ctctgtggataagattgttattcag

SEQ ID NO: 16972 - DNA, 25 bp, Artificial
  Probe
aaagaagacactgaagaacatcacc

SEQ ID NO: 16973 - DNA, 25 bp, Artificial
  Probe
ctgttctgtggaaagtgtaaagcat

SEQ ID NO: 16974 - DNA, 25 bp, Artificial
  Probe
gtatgatagagtcaaggcagaatgt

SEQ ID NO: 16975 - DNA, 25 bp, Artificial
  Probe
agtatgatagagtcaaggcagaatg

SEQ ID NO: 16976 - DNA, 25 bp, Artificial
  Probe
aagtatgatagagtcaaggcagaat

SEQ ID NO: 16977 - DNA, 25 bp, Artificial
  Probe
agtaccttattctctgctgtgttaa

SEQ ID NO: 16978 - DNA, 25 bp, Artificial
  Probe
atagtaccttattctctgctgtgtt

SEQ ID NO: 16979 - DNA, 25 bp, Artificial
  Probe
tagtaccttattctctgctgtgtta

SEQ ID NO: 16980 - DNA, 25 bp, Artificial
  Probe
taccttattctctgctgtgttaagt

SEQ ID NO: 16981 - DNA, 25 bp, Artificial
  Probe
tatagtaccttattctctgctgtgt

SEQ ID NO: 16982 - DNA, 25 bp, Artificial
  Probe
accttattctctgctgtgttaagtg

SEQ ID NO: 16983 - DNA, 25 bp, Artificial
  Probe
gtatagtaccttattctctgctgtg

SEQ ID NO: 16984 - DNA, 25 bp, Artificial
  Probe
agtatagtaccttattctctgctgt

SEQ ID NO: 16985 - DNA, 25 bp, Artificial
  Probe
ccttattctctgctgtgttaagtgg

SEQ ID NO: 16986 - DNA, 25 bp, Artificial
  Probe
gtaccttattctctgctgtgttaag

SEQ ID NO: 16987 - DNA, 25 bp, Artificial
  Probe
aagcactttggacatagagagaaat

SEQ ID NO: 16988 - DNA, 25 bp, Artificial
  Probe
taagcactttggacatagagagaaa

SEQ ID NO: 16989 - DNA, 25 bp, Artificial
  Probe
ttaagcactttggacatagagagaa

SEQ ID NO: 16990 - DNA, 25 bp, Artificial
  Probe
acagtatagtaccttattctctgct

SEQ ID NO: 16991 - DNA, 25 bp, Artificial
  Probe
agcactttggacatagagagaaatg

SEQ ID NO: 16992 - DNA, 25 bp, Artificial
  Probe
cagtatagtaccttattctctgctg

SEQ ID NO: 16993 - DNA, 25 bp, Artificial
  Probe
aaagtatgatagagtcaaggcagaa

SEQ ID NO: 16994 - DNA, 25 bp, Artificial
  Probe
gagtgttgtggaaacttcagtcata

SEQ ID NO: 16995 - DNA, 25 bp, Artificial
  Probe
agtgttgtggaaacttcagtcatac

SEQ ID NO: 16996 - DNA, 25 bp, Artificial
  Probe
tgttgtggaaacttcagtcatacat

SEQ ID NO: 16997 - DNA, 25 bp, Artificial
  Probe
ttattctctgctgtgttaagtgggt

SEQ ID NO: 16998 - DNA, 25 bp, Artificial
  Probe
gttgtggaaacttcagtcatacata

SEQ ID NO: 16999 - DNA, 25 bp, Artificial
  Probe
gtgttgtggaaacttcagtcataca

SEQ ID NO: 17000 - DNA, 25 bp, Artificial
  Probe
tgtggaaacttcagtcatacataaa

SEQ ID NO: 17001 - DNA, 25 bp, Artificial
  Probe
ttgtggaaacttcagtcatacataa

SEQ ID NO: 17002 - DNA, 25 bp, Artificial
  Probe
cttattctctgctgtgttaagtggg

SEQ ID NO: 17003 - DNA, 25 bp, Artificial
  Probe
tattctctgctgtgttaagtgggtg

SEQ ID NO: 17004 - DNA, 25 bp, Artificial
  Probe
tacagtatagtaccttattctctgc

SEQ ID NO: 17005 - DNA, 25 bp, Artificial
  Probe
agagtgttgtggaaacttcagtcat

SEQ ID NO: 17006 - DNA, 25 bp, Artificial
  Probe
tcagagtgttgtggaaacttcagtc

SEQ ID NO: 17007 - DNA, 25 bp, Artificial
  Probe
cagagtgttgtggaaacttcagtca

SEQ ID NO: 17008 - DNA, 25 bp, Artificial
  Probe
cactttggacatagagagaaatgtg

SEQ ID NO: 17009 - DNA, 25 bp, Artificial
  Probe
actttggacatagagagaaatgtgg

SEQ ID NO: 17010 - DNA, 25 bp, Artificial
  Probe
aaaagtatgatagagtcaaggcaga

SEQ ID NO: 17011 - DNA, 25 bp, Artificial
  Probe
agaaaagtatgatagagtcaaggca

SEQ ID NO: 17012 - DNA, 25 bp, Artificial
  Probe
gcactttggacatagagagaaatgt

SEQ ID NO: 17013 - DNA, 25 bp, Artificial
  Probe
gaaaagtatgatagagtcaaggcag

SEQ ID NO: 17014 - DNA, 25 bp, Artificial
  Probe
ggacatagagagaaatgtggcaatt

SEQ ID NO: 17015 - DNA, 25 bp, Artificial
  Probe
agagagaaatgtggcaattgattaa

SEQ ID NO: 17016 - DNA, 25 bp, Artificial
  Probe
catagagagaaatgtggcaattgat

SEQ ID NO: 17017 - DNA, 25 bp, Artificial
  Probe
atagagagaaatgtggcaattgatt

SEQ ID NO: 17018 - DNA, 25 bp, Artificial
  Probe
ctttggacatagagagaaatgtggc

SEQ ID NO: 17019 - DNA, 25 bp, Artificial
  Probe
ttgatagagttctgttacaagtcca

SEQ ID NO: 17020 - DNA, 25 bp, Artificial
  Probe
tgatagagttctgttacaagtccag

SEQ ID NO: 17021 - DNA, 25 bp, Artificial
  Probe
gatagagttctgttacaagtccagg

SEQ ID NO: 17022 - DNA, 25 bp, Artificial
  Probe
gtggctttgatagagttctgttaca

SEQ ID NO: 17023 - DNA, 25 bp, Artificial
  Probe
tggctttgatagagttctgttacaa

SEQ ID NO: 17024 - DNA, 25 bp, Artificial
  Probe
ggctttgatagagttctgttacaag

SEQ ID NO: 17025 - DNA, 25 bp, Artificial
  Probe
cttaatcaaactgtgttggtgactg

SEQ ID NO: 17026 - DNA, 25 bp, Artificial
  Probe
tggtggctttgatagagttctgtta

SEQ ID NO: 17027 - DNA, 25 bp, Artificial
  Probe
ttaatcaaactgtgttggtgactga

SEQ ID NO: 17028 - DNA, 25 bp, Artificial
  Probe
gctttgatagagttctgttacaagt

SEQ ID NO: 17029 - DNA, 25 bp, Artificial
  Probe
aagaaacaaagccaggttatccatc

SEQ ID NO: 17030 - DNA, 25 bp, Artificial
  Probe
taatcaaactgtgttggtgactgac

SEQ ID NO: 17031 - DNA, 25 bp, Artificial
  Probe
ccttaatcaaactgtgttggtgact

SEQ ID NO: 17032 - DNA, 25 bp, Artificial
  Probe
tttgatagagttctgttacaagtcc

SEQ ID NO: 17033 - DNA, 25 bp, Artificial
  Probe
tgagtgccttaatcaaactgtgttg

SEQ ID NO: 17034 - DNA, 25 bp, Artificial
  Probe
gtacacacaggaactgcaattagac

SEQ ID NO: 17035 - DNA, 25 bp, Artificial
  Probe
atagagttctgttacaagtccaggg

SEQ ID NO: 17036 - DNA, 25 bp, Artificial
  Probe
gaaacaaagccaggttatccatcac

SEQ ID NO: 17037 - DNA, 25 bp, Artificial
  Probe
agaaacaaagccaggttatccatca

SEQ ID NO: 17038 - DNA, 25 bp, Artificial
  Probe
tacacacaggaactgcaattagaca

SEQ ID NO: 17039 - DNA, 25 bp, Artificial
  Probe
ctggtggctttgatagagttctgtt

SEQ ID NO: 17040 - DNA, 25 bp, Artificial
  Probe
aaacaaagccaggttatccatcact

SEQ ID NO: 17041 - DNA, 25 bp, Artificial
  Probe
ctttgatagagttctgttacaagtc

SEQ ID NO: 17042 - DNA, 25 bp, Artificial
  Probe
gagtgccttaatcaaactgtgttgg

SEQ ID NO: 17043 - DNA, 25 bp, Artificial
  Probe
aattagacaaagttcgggattggct

SEQ ID NO: 17044 - DNA, 25 bp, Artificial
  Probe
aatcaaactgtgttggtgactgact

SEQ ID NO: 17045 - DNA, 25 bp, Artificial
  Probe
gccttaatcaaactgtgttggtgac

SEQ ID NO: 17046 - DNA, 25 bp, Artificial
  Probe
aaactgtgttggtgactgactgaaa

SEQ ID NO: 17047 - DNA, 25 bp, Artificial
  Probe
gtgccttaatcaaactgtgttggtg

SEQ ID NO: 17048 - DNA, 25 bp, Artificial
  Probe
ctgcaattagacaaagttcgggatt

SEQ ID NO: 17049 - DNA, 25 bp, Artificial
  Probe
aatgctggtggctttgatagagttc

SEQ ID NO: 17050 - DNA, 25 bp, Artificial
  Probe
acacacaggaactgcaattagacaa

SEQ ID NO: 17051 - DNA, 25 bp, Artificial
  Probe
tgccttaatcaaactgtgttggtga

SEQ ID NO: 17052 - DNA, 25 bp, Artificial
  Probe
agtgccttaatcaaactgtgttggt

SEQ ID NO: 17053 - DNA, 25 bp, Artificial
  Probe
aagagtgggtcttgactaaatccat

SEQ ID NO: 17054 - DNA, 25 bp, Artificial
  Probe
cgtacacacaggaactgcaattaga

SEQ ID NO: 17055 - DNA, 25 bp, Artificial
  Probe
aattgagtgccttaatcaaactgtg

SEQ ID NO: 17056 - DNA, 25 bp, Artificial
  Probe
attagacaaagttcgggattggctg

SEQ ID NO: 17057 - DNA, 25 bp, Artificial
  Probe
atcaaactgtgttggtgactgactg

SEQ ID NO: 17058 - DNA, 25 bp, Artificial
  Probe
aactgtgttggtgactgactgaaac

SEQ ID NO: 17059 - DNA, 25 bp, Artificial
  Probe
attgagtgccttaatcaaactgtgt

SEQ ID NO: 17060 - DNA, 25 bp, Artificial
  Probe
taattgagtgccttaatcaaactgt

SEQ ID NO: 17061 - DNA, 25 bp, Artificial
  Probe
cacaggaactgcaattagacaaagt

SEQ ID NO: 17062 - DNA, 25 bp, Artificial
  Probe
acacaggaactgcaattagacaaag

SEQ ID NO: 17063 - DNA, 25 bp, Artificial
  Probe
caaactgtgttggtgactgactgaa

SEQ ID NO: 17064 - DNA, 25 bp, Artificial
  Probe
tgttcttggagttattgttctgagt

SEQ ID NO: 17065 - DNA, 25 bp, Artificial
  Probe
ctgttcttggagttattgttctgag

SEQ ID NO: 17066 - DNA, 25 bp, Artificial
  Probe
acataaggaatccatcagcattact

SEQ ID NO: 17067 - DNA, 25 bp, Artificial
  Probe
tggagttattgttctgagtattgtg

SEQ ID NO: 17068 - DNA, 25 bp, Artificial
  Probe
aacataaggaatccatcagcattac

SEQ ID NO: 17069 - DNA, 25 bp, Artificial
  Probe
ggagttattgttctgagtattgtga

SEQ ID NO: 17070 - DNA, 25 bp, Artificial
  Probe
gttcttggagttattgttctgagta

SEQ ID NO: 17071 - DNA, 25 bp, Artificial
  Probe
actgttcttggagttattgttctga

SEQ ID NO: 17072 - DNA, 25 bp, Artificial
  Probe
cactgttcttggagttattgttctg

SEQ ID NO: 17073 - DNA, 25 bp, Artificial
  Probe
ttggagttattgttctgagtattgt

SEQ ID NO: 17074 - DNA, 25 bp, Artificial
  Probe
aatccatcagcattactgtaactca

SEQ ID NO: 17075 - DNA, 25 bp, Artificial
  Probe
aaggaatccatcagcattactgtaa

SEQ ID NO: 17076 - DNA, 25 bp, Artificial
  Probe
atccatcagcattactgtaactcat

SEQ ID NO: 17077 - DNA, 25 bp, Artificial
  Probe
ataaggaatccatcagcattactgt

SEQ ID NO: 17078 - DNA, 25 bp, Artificial
  Probe
gaatccatcagcattactgtaactc

SEQ ID NO: 17079 - DNA, 25 bp, Artificial
  Probe
cataaggaatccatcagcattactg

SEQ ID NO: 17080 - DNA, 25 bp, Artificial
  Probe
ggaatccatcagcattactgtaact

SEQ ID NO: 17081 - DNA, 25 bp, Artificial
  Probe
aggaatccatcagcattactgtaac

SEQ ID NO: 17082 - DNA, 25 bp, Artificial
  Probe
tccatcagcattactgtaactcata

SEQ ID NO: 17083 - DNA, 25 bp, Artificial
  Probe
taaggaatccatcagcattactgta

SEQ ID NO: 17084 - DNA, 25 bp, Artificial
  Probe
cttggagttattgttctgagtattg

SEQ ID NO: 17085 - DNA, 25 bp, Artificial
  Probe
ccatcagcattactgtaactcatag

SEQ ID NO: 17086 - DNA, 25 bp, Artificial
  Probe
tcttggagttattgttctgagtatt

SEQ ID NO: 17087 - DNA, 25 bp, Artificial
  Probe
ttcttggagttattgttctgagtat

SEQ ID NO: 17088 - DNA, 25 bp, Artificial
  Probe
ccactgttcttggagttattgttct

SEQ ID NO: 17089 - DNA, 25 bp, Artificial
  Probe
catcagcattactgtaactcataga

SEQ ID NO: 17090 - DNA, 25 bp, Artificial
  Probe
ccaagaagaaagggatacatttagg

SEQ ID NO: 17091 - DNA, 25 bp, Artificial
  Probe
atctcagaagaactcctaaagaagc

SEQ ID NO: 17092 - DNA, 25 bp, Artificial
  Probe
gagttattgttctgagtattgtgaa

SEQ ID NO: 17093 - DNA, 25 bp, Artificial
  Probe
agggtcttctgttgatttcttaaac

SEQ ID NO: 17094 - DNA, 25 bp, Artificial
  Probe
caagaagaaagggatacatttaggt

SEQ ID NO: 17095 - DNA, 25 bp, Artificial
  Probe
atcagcattactgtaactcatagaa

SEQ ID NO: 17096 - DNA, 25 bp, Artificial
  Probe
tacttgtctacagccctcatttgat

SEQ ID NO: 17097 - DNA, 25 bp, Artificial
  Probe
aaacataaggaatccatcagcatta

SEQ ID NO: 17098 - DNA, 25 bp, Artificial
  Probe
taaacataaggaatccatcagcatt

SEQ ID NO: 17099 - DNA, 25 bp, Artificial
  Probe
ttaaacataaggaatccatcagcat

SEQ ID NO: 17100 - DNA, 25 bp, Artificial
  Probe
tacagccctcatttgatgtgattta

SEQ ID NO: 17101 - DNA, 25 bp, Artificial
  Probe
tcagaagaactcctaaagaagccag

SEQ ID NO: 17102 - DNA, 25 bp, Artificial
  Probe
ctcagaagaactcctaaagaagcca

SEQ ID NO: 17103 - DNA, 25 bp, Artificial
  Probe
gggatacatttaggtacatgctctt

SEQ ID NO: 17104 - DNA, 25 bp, Artificial
  Probe
aagggatacatttaggtacatgctc

SEQ ID NO: 17105 - DNA, 25 bp, Artificial
  Probe
aaagggatacatttaggtacatgct

SEQ ID NO: 17106 - DNA, 25 bp, Artificial
  Probe
tctcagaagaactcctaaagaagcc

SEQ ID NO: 17107 - DNA, 25 bp, Artificial
  Probe
gccactgttcttggagttattgttc

SEQ ID NO: 17108 - DNA, 25 bp, Artificial
  Probe
acagccctcatttgatgtgatttaa

SEQ ID NO: 17109 - DNA, 25 bp, Artificial
  Probe
gtaagatgctgagttctctgtgttg

SEQ ID NO: 17110 - DNA, 25 bp, Artificial
  Probe
taagatgctgagttctctgtgttgt

SEQ ID NO: 17111 - DNA, 25 bp, Artificial
  Probe
ggtaagatgctgagttctctgtgtt

SEQ ID NO: 17112 - DNA, 25 bp, Artificial
  Probe
ttggtaagatgctgagttctctgtg

SEQ ID NO: 17113 - DNA, 25 bp, Artificial
  Probe
tatcttgtgttcagttactttggga

SEQ ID NO: 17114 - DNA, 25 bp, Artificial
  Probe
aagatgctgagttctctgtgttgtt

SEQ ID NO: 17115 - DNA, 25 bp, Artificial
  Probe
cattcagaagaacgcagaagaaata

SEQ ID NO: 17116 - DNA, 25 bp, Artificial
  Probe
atcttgtgttcagttactttgggag

SEQ ID NO: 17117 - DNA, 25 bp, Artificial
  Probe
tagaaacattcagaagaacgcagaa

SEQ ID NO: 17118 - DNA, 25 bp, Artificial
  Probe
atatcttgtgttcagttactttggg

SEQ ID NO: 17119 - DNA, 25 bp, Artificial
  Probe
gagatttggtaagatgctgagttct

SEQ ID NO: 17120 - DNA, 25 bp, Artificial
  Probe
gatttggtaagatgctgagttctct

SEQ ID NO: 17121 - DNA, 25 bp, Artificial
  Probe
agatttggtaagatgctgagttctc

SEQ ID NO: 17122 - DNA, 25 bp, Artificial
  Probe
atttggtaagatgctgagttctctg

SEQ ID NO: 17123 - DNA, 25 bp, Artificial
  Probe
attcagaagaacgcagaagaaatat

SEQ ID NO: 17124 - DNA, 25 bp, Artificial
  Probe
acattcagaagaacgcagaagaaat

SEQ ID NO: 17125 - DNA, 25 bp, Artificial
  Probe
cgagatttggtaagatgctgagttc

SEQ ID NO: 17126 - DNA, 25 bp, Artificial
  Probe
actgctcacctgaaattgatacttt

SEQ ID NO: 17127 - DNA, 25 bp, Artificial
  Probe
aactgctcacctgaaattgatactt

SEQ ID NO: 17128 - DNA, 25 bp, Artificial
  Probe
aaactgctcacctgaaattgatact

SEQ ID NO: 17129 - DNA, 25 bp, Artificial
  Probe
aacattcagaagaacgcagaagaaa

SEQ ID NO: 17130 - DNA, 25 bp, Artificial
  Probe
aaacattcagaagaacgcagaagaa

SEQ ID NO: 17131 - DNA, 25 bp, Artificial
  Probe
ctagaaacattcagaagaacgcaga

SEQ ID NO: 17132 - DNA, 25 bp, Artificial
  Probe
catatcttgtgttcagttactttgg

SEQ ID NO: 17133 - DNA, 25 bp, Artificial
  Probe
agatgctgagttctctgtgttgttg

SEQ ID NO: 17134 - DNA, 25 bp, Artificial
  Probe
gaaacattcagaagaacgcagaaga

SEQ ID NO: 17135 - DNA, 25 bp, Artificial
  Probe
agaaacattcagaagaacgcagaag

SEQ ID NO: 17136 - DNA, 25 bp, Artificial
  Probe
attcatatcttgtgttcagttactt

SEQ ID NO: 17137 - DNA, 25 bp, Artificial
  Probe
atggagtgtgttatagaaggaaatt

SEQ ID NO: 17138 - DNA, 25 bp, Artificial
  Probe
aattcatatcttgtgttcagttact

SEQ ID NO: 17139 - DNA, 25 bp, Artificial
  Probe
tttggtaagatgctgagttctctgt

SEQ ID NO: 17140 - DNA, 25 bp, Artificial
  Probe
tggtaagatgctgagttctctgtgt

SEQ ID NO: 17141 - DNA, 25 bp, Artificial
  Probe
caattcatatcttgtgttcagttac

SEQ ID NO: 17142 - DNA, 25 bp, Artificial
  Probe
tcagaagaacgcagaagaaatattc

SEQ ID NO: 17143 - DNA, 25 bp, Artificial
  Probe
ttcagaagaacgcagaagaaatatt

SEQ ID NO: 17144 - DNA, 25 bp, Artificial
  Probe
tcatatcttgtgttcagttactttg

SEQ ID NO: 17145 - DNA, 25 bp, Artificial
  Probe
tatggagtgtgttatagaaggaaat

SEQ ID NO: 17146 - DNA, 25 bp, Artificial
  Probe
ctgctcacctgaaattgatactttc

SEQ ID NO: 17147 - DNA, 25 bp, Artificial
  Probe
gatcctgatcttgtaaattactcga

SEQ ID NO: 17148 - DNA, 25 bp, Artificial
  Probe
tcgagatttggtaagatgctgagtt

SEQ ID NO: 17149 - DNA, 25 bp, Artificial
  Probe
tggagtgtgttatagaaggaaattt

SEQ ID NO: 17150 - DNA, 25 bp, Artificial
  Probe
ttcatatcttgtgttcagttacttt

SEQ ID NO: 17151 - DNA, 25 bp, Artificial
  Probe
ggagtgtgttatagaaggaaatttg

SEQ ID NO: 17152 - DNA, 25 bp, Artificial
  Probe
gatgctgagttctctgtgttgttgc

SEQ ID NO: 17153 - DNA, 25 bp, Artificial
  Probe
cagaagaacgcagaagaaatattct

SEQ ID NO: 17154 - DNA, 25 bp, Artificial
  Probe
cctccctgtgcctgtatctaatata

SEQ ID NO: 17155 - DNA, 25 bp, Artificial
  Probe
ctctgctgctgtgtctttatctatc

SEQ ID NO: 17156 - DNA, 25 bp, Artificial
  Probe
tttccctgacagaacattcctaaat

SEQ ID NO: 17157 - DNA, 25 bp, Artificial
  Probe
ctgtgtctttatctatccctgctag

SEQ ID NO: 17158 - DNA, 25 bp, Artificial
  Probe
tctctgctgctgtgtctttatctat

SEQ ID NO: 17159 - DNA, 25 bp, Artificial
  Probe
atctctgctgctgtgtctttatcta

SEQ ID NO: 17160 - DNA, 25 bp, Artificial
  Probe
ttccctgacagaacattcctaaatc

SEQ ID NO: 17161 - DNA, 25 bp, Artificial
  Probe
ccctgacagaacattcctaaatctc

SEQ ID NO: 17162 - DNA, 25 bp, Artificial
  Probe
cctgacagaacattcctaaatctca

SEQ ID NO: 17163 - DNA, 25 bp, Artificial
  Probe
gctgtgtctttatctatccctgcta

SEQ ID NO: 17164 - DNA, 25 bp, Artificial
  Probe
tccctgacagaacattcctaaatct

SEQ ID NO: 17165 - DNA, 25 bp, Artificial
  Probe
tgacagaacattcctaaatctcaag

SEQ ID NO: 17166 - DNA, 25 bp, Artificial
  Probe
ctccctgtgcctgtatctaatatat

SEQ ID NO: 17167 - DNA, 25 bp, Artificial
  Probe
ctgacagaacattcctaaatctcaa

SEQ ID NO: 17168 - DNA, 25 bp, Artificial
  Probe
tctgctgctgtgtctttatctatcc

SEQ ID NO: 17169 - DNA, 25 bp, Artificial
  Probe
gaacattcctaaatctcaagggcta

SEQ ID NO: 17170 - DNA, 25 bp, Artificial
  Probe
acagaacattcctaaatctcaaggg

SEQ ID NO: 17171 - DNA, 25 bp, Artificial
  Probe
gacagaacattcctaaatctcaagg

SEQ ID NO: 17172 - DNA, 25 bp, Artificial
  Probe
acctccctgtgcctgtatctaatat

SEQ ID NO: 17173 - DNA, 25 bp, Artificial
  Probe
ttcctaaatctcaagggctagtttc

SEQ ID NO: 17174 - DNA, 25 bp, Artificial
  Probe
attcctaaatctcaagggctagttt

SEQ ID NO: 17175 - DNA, 25 bp, Artificial
  Probe
cattcctaaatctcaagggctagtt

SEQ ID NO: 17176 - DNA, 25 bp, Artificial
  Probe
aacattcctaaatctcaagggctag

SEQ ID NO: 17177 - DNA, 25 bp, Artificial
  Probe
acattcctaaatctcaagggctagt

SEQ ID NO: 17178 - DNA, 25 bp, Artificial
  Probe
tccctgtgcctgtatctaatatata

SEQ ID NO: 17179 - DNA, 25 bp, Artificial
  Probe
agaacattcctaaatctcaagggct

SEQ ID NO: 17180 - DNA, 25 bp, Artificial
  Probe
cagaacattcctaaatctcaagggc

SEQ ID NO: 17181 - DNA, 25 bp, Artificial
  Probe
tcctaaatctcaagggctagtttcc

SEQ ID NO: 17182 - DNA, 25 bp, Artificial
  Probe
gatctctgctgctgtgtctttatct

SEQ ID NO: 17183 - DNA, 25 bp, Artificial
  Probe
ctgctgtgtctttatctatccctgc

SEQ ID NO: 17184 - DNA, 25 bp, Artificial
  Probe
gctgctgtgtctttatctatccctg

SEQ ID NO: 17185 - DNA, 25 bp, Artificial
  Probe
ctgctgctgtgtctttatctatccc

SEQ ID NO: 17186 - DNA, 25 bp, Artificial
  Probe
ctgatctctgctgctgtgtctttat

SEQ ID NO: 17187 - DNA, 25 bp, Artificial
  Probe
tgatctctgctgctgtgtctttatc

SEQ ID NO: 17188 - DNA, 25 bp, Artificial
  Probe
tgctgtgtctttatctatccctgct

SEQ ID NO: 17189 - DNA, 25 bp, Artificial
  Probe
tgctgctgtgtctttatctatccct

SEQ ID NO: 17190 - DNA, 25 bp, Artificial
  Probe
ccctgtgcctgtatctaatatataa

SEQ ID NO: 17191 - DNA, 25 bp, Artificial
  Probe
ttttccctgacagaacattcctaaa

SEQ ID NO: 17192 - DNA, 25 bp, Artificial
  Probe
attttccctgacagaacattcctaa

SEQ ID NO: 17193 - DNA, 25 bp, Artificial
  Probe
cattttccctgacagaacattccta

SEQ ID NO: 17194 - DNA, 25 bp, Artificial
  Probe
ctggtagacggttctggaatggaag

SEQ ID NO: 17195 - DNA, 25 bp, Artificial
  Probe
cacctccctgtgcctgtatctaata

SEQ ID NO: 17196 - DNA, 25 bp, Artificial
  Probe
tctggtagacggttctggaatggaa

SEQ ID NO: 17197 - DNA, 25 bp, Artificial
  Probe
cctaaatctcaagggctagtttccc

SEQ ID NO: 17198 - DNA, 25 bp, Artificial
  Probe
cctgtgcctgtatctaatatataaa

SEQ ID NO: 17199 - DNA, 25 bp, Artificial
  Probe
aagaagacaagtatgaagaggagat

SEQ ID NO: 17200 - DNA, 25 bp, Artificial
  Probe
agaagacaagtatgaagaggagatc

SEQ ID NO: 17201 - DNA, 25 bp, Artificial
  Probe
caagtatgaagaggagatcaaggtt

SEQ ID NO: 17202 - DNA, 25 bp, Artificial
  Probe
aagtatgaagaggagatcaaggttc

SEQ ID NO: 17203 - DNA, 25 bp, Artificial
  Probe
agtatgaagaggagatcaaggttct

SEQ ID NO: 17204 - DNA, 25 bp, Artificial
  Probe
gacaagtatgaagaggagatcaagg

SEQ ID NO: 17205 - DNA, 25 bp, Artificial
  Probe
agacaagtatgaagaggagatcaag

SEQ ID NO: 17206 - DNA, 25 bp, Artificial
  Probe
gaagacaagtatgaagaggagatca

SEQ ID NO: 17207 - DNA, 25 bp, Artificial
  Probe
aagacaagtatgaagaggagatcaa

SEQ ID NO: 17208 - DNA, 25 bp, Artificial
  Probe
acaagtatgaagaggagatcaaggt

SEQ ID NO: 17209 - DNA, 25 bp, Artificial
  Probe
aaagaagacaagtatgaagaggaga

SEQ ID NO: 17210 - DNA, 25 bp, Artificial
  Probe
agaaagaagacaagtatgaagagga

SEQ ID NO: 17211 - DNA, 25 bp, Artificial
  Probe
cagaaagaagacaagtatgaagagg

SEQ ID NO: 17212 - DNA, 25 bp, Artificial
  Probe
ataagtttctttgcttctctcctcc

SEQ ID NO: 17213 - DNA, 25 bp, Artificial
  Probe
gaaagaagacaagtatgaagaggag

SEQ ID NO: 17214 - DNA, 25 bp, Artificial
  Probe
gataagtttctttgcttctctcctc

SEQ ID NO: 17215 - DNA, 25 bp, Artificial
  Probe
gaagatgctgaccgaaagtatgaag

SEQ ID NO: 17216 - DNA, 25 bp, Artificial
  Probe
actctcagaaagaagacaagtatga

SEQ ID NO: 17217 - DNA, 25 bp, Artificial
  Probe
aagatgctgaccgaaagtatgaaga

SEQ ID NO: 17218 - DNA, 25 bp, Artificial
  Probe
tgaagatgctgaccgaaagtatgaa

SEQ ID NO: 17219 - DNA, 25 bp, Artificial
  Probe
tcagaaagaagacaagtatgaagag

SEQ ID NO: 17220 - DNA, 25 bp, Artificial
  Probe
ctcagaaagaagacaagtatgaaga

SEQ ID NO: 17221 - DNA, 25 bp, Artificial
  Probe
tctcagaaagaagacaagtatgaag

SEQ ID NO: 17222 - DNA, 25 bp, Artificial
  Probe
ctctcagaaagaagacaagtatgaa

SEQ ID NO: 17223 - DNA, 25 bp, Artificial
  Probe
taagtttctttgcttctctcctccc

SEQ ID NO: 17224 - DNA, 25 bp, Artificial
  Probe
agatgctgaccgaaagtatgaagag

SEQ ID NO: 17225 - DNA, 25 bp, Artificial
  Probe
ctgaagatgctgaccgaaagtatga

SEQ ID NO: 17226 - DNA, 25 bp, Artificial
  Probe
caaggttctctctgacaagctgaag

SEQ ID NO: 17227 - DNA, 25 bp, Artificial
  Probe
tatgaagaggagatcaaggttctct

SEQ ID NO: 17228 - DNA, 25 bp, Artificial
  Probe
gtatgaagaggagatcaaggttctc

SEQ ID NO: 17229 - DNA, 25 bp, Artificial
  Probe
cagatgagagtgagagaggcatgaa

SEQ ID NO: 17230 - DNA, 25 bp, Artificial
  Probe
gatcaaggttctctctgacaagctg

SEQ ID NO: 17231 - DNA, 25 bp, Artificial
  Probe
agatcaaggttctctctgacaagct

SEQ ID NO: 17232 - DNA, 25 bp, Artificial
  Probe
gatgctgaccgaaagtatgaagagg

SEQ ID NO: 17233 - DNA, 25 bp, Artificial
  Probe
atgaagaggagatcaaggttctctc

SEQ ID NO: 17234 - DNA, 25 bp, Artificial
  Probe
atcaaggttctctctgacaagctga

SEQ ID NO: 17235 - DNA, 25 bp, Artificial
  Probe
gatgagagtgagagaggcatgaaag

SEQ ID NO: 17236 - DNA, 25 bp, Artificial
  Probe
tactctcagaaagaagacaagtatg

SEQ ID NO: 17237 - DNA, 25 bp, Artificial
  Probe
gacgaacaacttgaagtcactggag

SEQ ID NO: 17238 - DNA, 25 bp, Artificial
  Probe
gaagaaaagatggagattcaggaga

SEQ ID NO: 17239 - DNA, 25 bp, Artificial
  Probe
tcaaggttctctctgacaagctgaa

SEQ ID NO: 17240 - DNA, 25 bp, Artificial
  Probe
gaagaggagatcaaggttctctctg

SEQ ID NO: 17241 - DNA, 25 bp, Artificial
  Probe
aagaaaagatggagattcaggagat

SEQ ID NO: 17242 - DNA, 25 bp, Artificial
  Probe
gtactctcagaaagaagacaagtat

SEQ ID NO: 17243 - DNA, 25 bp, Artificial
  Probe
agatgagagtgagagaggcatgaaa

SEQ ID NO: 17244 - DNA, 25 bp, Artificial
  Probe
gctctcatctgtaatgtctcttctg

SEQ ID NO: 17245 - DNA, 25 bp, Artificial
  Probe
ggtcctgtctacttcattcttggta

SEQ ID NO: 17246 - DNA, 25 bp, Artificial
  Probe
ctctcatctgtaatgtctcttctga

SEQ ID NO: 17247 - DNA, 25 bp, Artificial
  Probe
tcctgtctacttcattcttggtact

SEQ ID NO: 17248 - DNA, 25 bp, Artificial
  Probe
gtcctgtctacttcattcttggtac

SEQ ID NO: 17249 - DNA, 25 bp, Artificial
  Probe
cctgtctacttcattcttggtacta

SEQ ID NO: 17250 - DNA, 25 bp, Artificial
  Probe
tgtgatagtatcgctgtcatccata

SEQ ID NO: 17251 - DNA, 25 bp, Artificial
  Probe
agatccagagatatattgaccttgt

SEQ ID NO: 17252 - DNA, 25 bp, Artificial
  Probe
gcatgagatccagagatatattgac

SEQ ID NO: 17253 - DNA, 25 bp, Artificial
  Probe
gtgatagtatcgctgtcatccatac

SEQ ID NO: 17254 - DNA, 25 bp, Artificial
  Probe
tgagatccagagatatattgacctt

SEQ ID NO: 17255 - DNA, 25 bp, Artificial
  Probe
gactctctaagctctcatctgtaat

SEQ ID NO: 17256 - DNA, 25 bp, Artificial
  Probe
aagctctcatctgtaatgtctcttc

SEQ ID NO: 17257 - DNA, 25 bp, Artificial
  Probe
atccagagatatattgaccttgtcc

SEQ ID NO: 17258 - DNA, 25 bp, Artificial
  Probe
gagatccagagatatattgaccttg

SEQ ID NO: 17259 - DNA, 25 bp, Artificial
  Probe
atgagatccagagatatattgacct

SEQ ID NO: 17260 - DNA, 25 bp, Artificial
  Probe
agactctctaagctctcatctgtaa

SEQ ID NO: 17261 - DNA, 25 bp, Artificial
  Probe
ctaagctctcatctgtaatgtctct

SEQ ID NO: 17262 - DNA, 25 bp, Artificial
  Probe
tctaagctctcatctgtaatgtctc

SEQ ID NO: 17263 - DNA, 25 bp, Artificial
  Probe
ctctaagctctcatctgtaatgtct

SEQ ID NO: 17264 - DNA, 25 bp, Artificial
  Probe
tctctaagctctcatctgtaatgtc

SEQ ID NO: 17265 - DNA, 25 bp, Artificial
  Probe
ctctctaagctctcatctgtaatgt

SEQ ID NO: 17266 - DNA, 25 bp, Artificial
  Probe
actctctaagctctcatctgtaatg

SEQ ID NO: 17267 - DNA, 25 bp, Artificial
  Probe
agctctcatctgtaatgtctcttct

SEQ ID NO: 17268 - DNA, 25 bp, Artificial
  Probe
catgagatccagagatatattgacc

SEQ ID NO: 17269 - DNA, 25 bp, Artificial
  Probe
taagctctcatctgtaatgtctctt

SEQ ID NO: 17270 - DNA, 25 bp, Artificial
  Probe
attcctgttccctatatcttgtgac

SEQ ID NO: 17271 - DNA, 25 bp, Artificial
  Probe
tgtagtgcatgagatccagagatat

SEQ ID NO: 17272 - DNA, 25 bp, Artificial
  Probe
ctgtctacttcattcttggtactat

SEQ ID NO: 17273 - DNA, 25 bp, Artificial
  Probe
agtgctaatacttgtatgacttcat

SEQ ID NO: 17274 - DNA, 25 bp, Artificial
  Probe
tttcctaatccagagaagtttgacc

SEQ ID NO: 17275 - DNA, 25 bp, Artificial
  Probe
gtagtgcatgagatccagagatata

SEQ ID NO: 17276 - DNA, 25 bp, Artificial
  Probe
tccctatatcttgtgacattcccat

SEQ ID NO: 17277 - DNA, 25 bp, Artificial
  Probe
gttccctatatcttgtgacattccc

SEQ ID NO: 17278 - DNA, 25 bp, Artificial
  Probe
gatccagagatatattgaccttgtc

SEQ ID NO: 17279 - DNA, 25 bp, Artificial
  Probe
tgcatgagatccagagatatattga

SEQ ID NO: 17280 - DNA, 25 bp, Artificial
  Probe
gtgcatgagatccagagatatattg

SEQ ID NO: 17281 - DNA, 25 bp, Artificial
  Probe
agtgcatgagatccagagatatatt

SEQ ID NO: 17282 - DNA, 25 bp, Artificial
  Probe
ttcagaaactacttcattcccaagg

SEQ ID NO: 17283 - DNA, 25 bp, Artificial
  Probe
ttccctatatcttgtgacattccca

SEQ ID NO: 17284 - DNA, 25 bp, Artificial
  Probe
cgttccctatatcttgtgacattcc

SEQ ID NO: 17285 - DNA, 25 bp, Artificial
  Probe
attcagaaactacttcattcccaag

SEQ ID NO: 17286 - DNA, 25 bp, Artificial
  Probe
tgacaaagaatttcctaatccagag

SEQ ID NO: 17287 - DNA, 25 bp, Artificial
  Probe
tagtgctaatacttgtatgacttca

SEQ ID NO: 17288 - DNA, 25 bp, Artificial
  Probe
agttagtgctaatacttgtatgact

SEQ ID NO: 17289 - DNA, 25 bp, Artificial
  Probe
gtggaaggaaatggaaaacttgaag

SEQ ID NO: 17290 - DNA, 25 bp, Artificial
  Probe
tgtggaaggaaatggaaaacttgaa

SEQ ID NO: 17291 - DNA, 25 bp, Artificial
  Probe
ctgtggaaggaaatggaaaacttga

SEQ ID NO: 17292 - DNA, 25 bp, Artificial
  Probe
tggaaggaaatggaaaacttgaagc

SEQ ID NO: 17293 - DNA, 25 bp, Artificial
  Probe
cctgtggaaggaaatggaaaacttg

SEQ ID NO: 17294 - DNA, 25 bp, Artificial
  Probe
aaacaaagccctgtggaaggaaatg

SEQ ID NO: 17295 - DNA, 25 bp, Artificial
  Probe
caaacaaagccctgtggaaggaaat

SEQ ID NO: 17296 - DNA, 25 bp, Artificial
  Probe
ttcctttatcggtatggagtctgcg

SEQ ID NO: 17297 - DNA, 25 bp, Artificial
  Probe
catcatgaagtgcgacatcgacatc

SEQ ID NO: 17298 - DNA, 25 bp, Artificial
  Probe
ccctgtggaaggaaatggaaaactt

SEQ ID NO: 17299 - DNA, 25 bp, Artificial
  Probe
aaagccctgtggaaggaaatggaaa

SEQ ID NO: 17300 - DNA, 25 bp, Artificial
  Probe
tcaaacaaagccctgtggaaggaaa

SEQ ID NO: 17301 - DNA, 25 bp, Artificial
  Probe
ttcaaacaaagccctgtggaaggaa

SEQ ID NO: 17302 - DNA, 25 bp, Artificial
  Probe
tttcaaacaaagccctgtggaagga

SEQ ID NO: 17303 - DNA, 25 bp, Artificial
  Probe
atcatgaagtgcgacatcgacatca

SEQ ID NO: 17304 - DNA, 25 bp, Artificial
  Probe
ttttcaaacaaagccctgtggaagg

SEQ ID NO: 17305 - DNA, 25 bp, Artificial
  Probe
ctacaacagcatcatgaagtgcgac

SEQ ID NO: 17306 - DNA, 25 bp, Artificial
  Probe
aagccctgtggaaggaaatggaaaa

SEQ ID NO: 17307 - DNA, 25 bp, Artificial
  Probe
catcgacatcaggaaggacctgtac

SEQ ID NO: 17308 - DNA, 25 bp, Artificial
  Probe
caacagcatcatgaagtgcgacatc

SEQ ID NO: 17309 - DNA, 25 bp, Artificial
  Probe
tacaacagcatcatgaagtgcgaca

SEQ ID NO: 17310 - DNA, 25 bp, Artificial
  Probe
acatcgacatcaggaaggacctgta

SEQ ID NO: 17311 - DNA, 25 bp, Artificial
  Probe
ggtctgtctgtgcatatagttagat

SEQ ID NO: 17312 - DNA, 25 bp, Artificial
  Probe
ggatgatggagagaagtccgattag

SEQ ID NO: 17313 - DNA, 25 bp, Artificial
  Probe
aggatgatggagagaagtccgatta

SEQ ID NO: 17314 - DNA, 25 bp, Artificial
  Probe
gtctgtctgtgcatatagttagatt

SEQ ID NO: 17315 - DNA, 25 bp, Artificial
  Probe
gatgatggagagaagtccgattagc

SEQ ID NO: 17316 - DNA, 25 bp, Artificial
  Probe
ccagtactctatagctaccatctaa

SEQ ID NO: 17317 - DNA, 25 bp, Artificial
  Probe
agggtctgtctgtgcatatagttag

SEQ ID NO: 17318 - DNA, 25 bp, Artificial
  Probe
gagggtctgtctgtgcatatagtta

SEQ ID NO: 17319 - DNA, 25 bp, Artificial
  Probe
gaggatgatggagagaagtccgatt

SEQ ID NO: 17320 - DNA, 25 bp, Artificial
  Probe
gggtctgtctgtgcatatagttaga

SEQ ID NO: 17321 - DNA, 25 bp, Artificial
  Probe
atgatggagagaagtccgattagct

SEQ ID NO: 17322 - DNA, 25 bp, Artificial
  Probe
cccagtactctatagctaccatcta

SEQ ID NO: 17323 - DNA, 25 bp, Artificial
  Probe
tctatagctaccatctaagagagaa

SEQ ID NO: 17324 - DNA, 25 bp, Artificial
  Probe
cagtactctatagctaccatctaag

SEQ ID NO: 17325 - DNA, 25 bp, Artificial
  Probe
tcccagtactctatagctaccatct

SEQ ID NO: 17326 - DNA, 25 bp, Artificial
  Probe
gtcccagtactctatagctaccatc

SEQ ID NO: 17327 - DNA, 25 bp, Artificial
  Probe
tctgtctgtgcatatagttagattt

SEQ ID NO: 17328 - DNA, 25 bp, Artificial
  Probe
tgatggagagaagtccgattagctc

SEQ ID NO: 17329 - DNA, 25 bp, Artificial
  Probe
agtactctatagctaccatctaaga

SEQ ID NO: 17330 - DNA, 25 bp, Artificial
  Probe
gtctagctgtgccttcaaaataaaa

SEQ ID NO: 17331 - DNA, 25 bp, Artificial
  Probe
ttcgtcccagtactctatagctacc

SEQ ID NO: 17332 - DNA, 25 bp, Artificial
  Probe
ggtctagctgtgccttcaaaataaa

SEQ ID NO: 17333 - DNA, 25 bp, Artificial
  Probe
cgtcccagtactctatagctaccat

SEQ ID NO: 17334 - DNA, 25 bp, Artificial
  Probe
actctatagctaccatctaagagag

SEQ ID NO: 17335 - DNA, 25 bp, Artificial
  Probe
ggaggatgatggagagaagtccgat

SEQ ID NO: 17336 - DNA, 25 bp, Artificial
  Probe
ctctatagctaccatctaagagaga

SEQ ID NO: 17337 - DNA, 25 bp, Artificial
  Probe
cgagggtctgtctgtgcatatagtt

SEQ ID NO: 17338 - DNA, 25 bp, Artificial
  Probe
tcgtcccagtactctatagctacca

SEQ ID NO: 17339 - DNA, 25 bp, Artificial
  Probe
ctatagctaccatctaagagagaaa

SEQ ID NO: 17340 - DNA, 25 bp, Artificial
  Probe
gggtctagctgtgccttcaaaataa

SEQ ID NO: 17341 - DNA, 25 bp, Artificial
  Probe
gtactctatagctaccatctaagag

SEQ ID NO: 17342 - DNA, 25 bp, Artificial
  Probe
tactctatagctaccatctaagaga

SEQ ID NO: 17343 - DNA, 25 bp, Artificial
  Probe
ctgtctgtgcatatagttagatttt

SEQ ID NO: 17344 - DNA, 25 bp, Artificial
  Probe
tccccaaataaacgtgagggttaaa

SEQ ID NO: 17345 - DNA, 25 bp, Artificial
  Probe
ttccccaaataaacgtgagggttaa

SEQ ID NO: 17346 - DNA, 25 bp, Artificial
  Probe
ttccctctccccttccccaaataaa

SEQ ID NO: 17347 - DNA, 25 bp, Artificial
  Probe
gatggagagaagtccgattagctcc

SEQ ID NO: 17348 - DNA, 25 bp, Artificial
  Probe
cttccccaaataaacgtgagggtta

SEQ ID NO: 17349 - DNA, 25 bp, Artificial
  Probe
ggggtctagctgtgccttcaaaata

SEQ ID NO: 17350 - DNA, 25 bp, Artificial
  Probe
atggagagaagtccgattagctcct

SEQ ID NO: 17351 - DNA, 25 bp, Artificial
  Probe
tatagctaccatctaagagagaaaa

SEQ ID NO: 17352 - DNA, 25 bp, Artificial
  Probe
ctctccccttccccaaataaacgtg

SEQ ID NO: 17353 - DNA, 25 bp, Artificial
  Probe
ctccccttccccaaataaacgtgag

SEQ ID NO: 17354 - DNA, 25 bp, Artificial
  Probe
ccttccccaaataaacgtgagggtt

SEQ ID NO: 17355 - DNA, 25 bp, Artificial
  Probe
gttacatcatcatctccttcctcat

SEQ ID NO: 17356 - DNA, 25 bp, Artificial
  Probe
ttacatcatcatctccttcctcatc

SEQ ID NO: 17357 - DNA, 25 bp, Artificial
  Probe
cagttacatcatcatctccttcctc

SEQ ID NO: 17358 - DNA, 25 bp, Artificial
  Probe
agttacatcatcatctccttcctca

SEQ ID NO: 17359 - DNA, 25 bp, Artificial
  Probe
tcagttacatcatcatctccttcct

SEQ ID NO: 17360 - DNA, 25 bp, Artificial
  Probe
gtcagttacatcatcatctccttcc

SEQ ID NO: 17361 - DNA, 25 bp, Artificial
  Probe
cgtcagttacatcatcatctccttc

SEQ ID NO: 17362 - DNA, 25 bp, Artificial
  Probe
cttcgtcagttacatcatcatctcc

SEQ ID NO: 17363 - DNA, 25 bp, Artificial
  Probe
tcgtcagttacatcatcatctcctt

SEQ ID NO: 17364 - DNA, 25 bp, Artificial
  Probe
ttcgtcagttacatcatcatctcct

SEQ ID NO: 17365 - DNA, 25 bp, Artificial
  Probe
gtctacttcgtcagttacatcatca

SEQ ID NO: 17366 - DNA, 25 bp, Artificial
  Probe
acttcgtcagttacatcatcatctc

SEQ ID NO: 17367 - DNA, 25 bp, Artificial
  Probe
tacttcgtcagttacatcatcatct

SEQ ID NO: 17368 - DNA, 25 bp, Artificial
  Probe
tctacttcgtcagttacatcatcat

SEQ ID NO: 17369 - DNA, 25 bp, Artificial
  Probe
ctacttcgtcagttacatcatcatc

SEQ ID NO: 17370 - DNA, 25 bp, Artificial
  Probe
cgtctacttcgtcagttacatcatc

SEQ ID NO: 17371 - DNA, 25 bp, Artificial
  Probe
tcgtctacttcgtcagttacatcat

SEQ ID NO: 17372 - DNA, 25 bp, Artificial
  Probe
acttcagattgtgttctcagtacat

SEQ ID NO: 17373 - DNA, 25 bp, Artificial
  Probe
aacttcagattgtgttctcagtaca

SEQ ID NO: 17374 - DNA, 25 bp, Artificial
  Probe
tcagattgtgttctcagtacattcc

SEQ ID NO: 17375 - DNA, 25 bp, Artificial
  Probe
ttcagattgtgttctcagtacattc

SEQ ID NO: 17376 - DNA, 25 bp, Artificial
  Probe
cttcagattgtgttctcagtacatt

SEQ ID NO: 17377 - DNA, 25 bp, Artificial
  Probe
gtcgtctacttcgtcagttacatca

SEQ ID NO: 17378 - DNA, 25 bp, Artificial
  Probe
ccaggtgtctaacgaataaataggt

SEQ ID NO: 17379 - DNA, 25 bp, Artificial
  Probe
tcccaggtgtctaacgaataaatag

SEQ ID NO: 17380 - DNA, 25 bp, Artificial
  Probe
gtcccaggtgtctaacgaataaata

SEQ ID NO: 17381 - DNA, 25 bp, Artificial
  Probe
atgtagagagatgttagaagggact

SEQ ID NO: 17382 - DNA, 25 bp, Artificial
  Probe
atggatgttctctttgctttcacta

SEQ ID NO: 17383 - DNA, 25 bp, Artificial
  Probe
cccaggtgtctaacgaataaatagg

SEQ ID NO: 17384 - DNA, 25 bp, Artificial
  Probe
tgtagagagatgttagaagggactg

SEQ ID NO: 17385 - DNA, 25 bp, Artificial
  Probe
acgactttgaaatcttctatgaggt

SEQ ID NO: 17386 - DNA, 25 bp, Artificial
  Probe
tttgaaatcttctatgaggtctggg

SEQ ID NO: 17387 - DNA, 25 bp, Artificial
  Probe
aggacgactttgaaatcttctatga

SEQ ID NO: 17388 - DNA, 25 bp, Artificial
  Probe
caagccgaataagtttcagtttcta

SEQ ID NO: 17389 - DNA, 25 bp, Artificial
  Probe
gacgactttgaaatcttctatgagg

SEQ ID NO: 17390 - DNA, 25 bp, Artificial
  Probe
ggacgactttgaaatcttctatgag

SEQ ID NO: 17391 - DNA, 25 bp, Artificial
  Probe
gaggacgactttgaaatcttctatg

SEQ ID NO: 17392 - DNA, 25 bp, Artificial
  Probe
gagaggacgactttgaaatcttcta

SEQ ID NO: 17393 - DNA, 25 bp, Artificial
  Probe
atgttctctttgctttcactaccag

SEQ ID NO: 17394 - DNA, 25 bp, Artificial
  Probe
gatgttctctttgctttcactacca

SEQ ID NO: 17395 - DNA, 25 bp, Artificial
  Probe
tggatgttctctttgctttcactac

SEQ ID NO: 17396 - DNA, 25 bp, Artificial
  Probe
ctttgaaatcttctatgaggtctgg

SEQ ID NO: 17397 - DNA, 25 bp, Artificial
  Probe
agaggacgactttgaaatcttctat

SEQ ID NO: 17398 - DNA, 25 bp, Artificial
  Probe
ttgaaatcttctatgaggtctggga

SEQ ID NO: 17399 - DNA, 25 bp, Artificial
  Probe
aaagatgagaaacaagaaggaaaga

SEQ ID NO: 17400 - DNA, 25 bp, Artificial
  Probe
taacagacatctctaacatacagcc

SEQ ID NO: 17401 - DNA, 25 bp, Artificial
  Probe
agacatctctaacatacagccattg

SEQ ID NO: 17402 - DNA, 25 bp, Artificial
  Probe
cagacatctctaacatacagccatt

SEQ ID NO: 17403 - DNA, 25 bp, Artificial
  Probe
acagacatctctaacatacagccat

SEQ ID NO: 17404 - DNA, 25 bp, Artificial
  Probe
aacagacatctctaacatacagcca

SEQ ID NO: 17405 - DNA, 25 bp, Artificial
  Probe
gacatctctaacatacagccattgt

SEQ ID NO: 17406 - DNA, 25 bp, Artificial
  Probe
ttaacagacatctctaacatacagc

SEQ ID NO: 17407 - DNA, 25 bp, Artificial
  Probe
gaactatttaatgctgctctgtgtc

SEQ ID NO: 17408 - DNA, 25 bp, Artificial
  Probe
atgaactatttaatgctgctctgtg

SEQ ID NO: 17409 - DNA, 25 bp, Artificial
  Probe
gatgaactatttaatgctgctctgt

SEQ ID NO: 17410 - DNA, 25 bp, Artificial
  Probe
tgaactatttaatgctgctctgtgt

SEQ ID NO: 17411 - DNA, 25 bp, Artificial
  Probe
agatgaactatttaatgctgctctg

SEQ ID NO: 17412 - DNA, 25 bp, Artificial
  Probe
aactatttaatgctgctctgtgtcc

SEQ ID NO: 17413 - DNA, 25 bp, Artificial
  Probe
caagatgaactatttaatgctgctc

SEQ ID NO: 17414 - DNA, 25 bp, Artificial
  Probe
tggcttgtactatttatgtcactgt

SEQ ID NO: 17415 - DNA, 25 bp, Artificial
  Probe
aagatgaactatttaatgctgctct

SEQ ID NO: 17416 - DNA, 25 bp, Artificial
  Probe
atggcttgtactatttatgtcactg

SEQ ID NO: 17417 - DNA, 25 bp, Artificial
  Probe
ttgatcccaaatggcttgtactatt

SEQ ID NO: 17418 - DNA, 25 bp, Artificial
  Probe
gatccgttgcgtgtatatgtttaac

SEQ ID NO: 17419 - DNA, 25 bp, Artificial
  Probe
ggcttgtactatttatgtcactgta

SEQ ID NO: 17420 - DNA, 25 bp, Artificial
  Probe
actatttaatgctgctctgtgtcca

SEQ ID NO: 17421 - DNA, 25 bp, Artificial
  Probe
tgatcccaaatggcttgtactattt

SEQ ID NO: 17422 - DNA, 25 bp, Artificial
  Probe
aatggcttgtactatttatgtcact

SEQ ID NO: 17423 - DNA, 25 bp, Artificial
  Probe
cccaaatggcttgtactatttatgt

SEQ ID NO: 17424 - DNA, 25 bp, Artificial
  Probe
gttgcgtgtatatgtttaacagaca

SEQ ID NO: 17425 - DNA, 25 bp, Artificial
  Probe
tcccaaatggcttgtactatttatg

SEQ ID NO: 17426 - DNA, 25 bp, Artificial
  Probe
gatcccaaatggcttgtactattta

SEQ ID NO: 17427 - DNA, 25 bp, Artificial
  Probe
cgttgcgtgtatatgtttaacagac

SEQ ID NO: 17428 - DNA, 25 bp, Artificial
  Probe
ctatttaatgctgctctgtgtccag

SEQ ID NO: 17429 - DNA, 25 bp, Artificial
  Probe
atccgttgcgtgtatatgtttaaca

SEQ ID NO: 17430 - DNA, 25 bp, Artificial
  Probe
catctctaacatacagccattgttg

SEQ ID NO: 17431 - DNA, 25 bp, Artificial
  Probe
acatctctaacatacagccattgtt

SEQ ID NO: 17432 - DNA, 25 bp, Artificial
  Probe
ccaaatggcttgtactatttatgtc

SEQ ID NO: 17433 - DNA, 25 bp, Artificial
  Probe
atcccaaatggcttgtactatttat

SEQ ID NO: 17434 - DNA, 25 bp, Artificial
  Probe
ccgttgcgtgtatatgtttaacaga

SEQ ID NO: 17435 - DNA, 25 bp, Artificial
  Probe
tccgttgcgtgtatatgtttaacag

SEQ ID NO: 17436 - DNA, 25 bp, Artificial
  Probe
atttaatgctgctctgtgtccagta

SEQ ID NO: 17437 - DNA, 25 bp, Artificial
  Probe
tatttaatgctgctctgtgtccagt

SEQ ID NO: 17438 - DNA, 25 bp, Artificial
  Probe
atctctaacatacagccattgttgc

SEQ ID NO: 17439 - DNA, 25 bp, Artificial
  Probe
aaatggcttgtactatttatgtcac

SEQ ID NO: 17440 - DNA, 25 bp, Artificial
  Probe
caaatggcttgtactatttatgtca

SEQ ID NO: 17441 - DNA, 25 bp, Artificial
  Probe
tttgatcccaaatggcttgtactat

SEQ ID NO: 17442 - DNA, 25 bp, Artificial
  Probe
taatgctgctctgtgtccagtacat

SEQ ID NO: 17443 - DNA, 25 bp, Artificial
  Probe
gcttgtactatttatgtcactgtaa

SEQ ID NO: 17444 - DNA, 25 bp, Artificial
  Probe
ctttgatcccaaatggcttgtacta

SEQ ID NO: 17445 - DNA, 25 bp, Artificial
  Probe
ttggctcttcctgtcttgtatagtt

SEQ ID NO: 17446 - DNA, 25 bp, Artificial
  Probe
gttggctcttcctgtcttgtatagt

SEQ ID NO: 17447 - DNA, 25 bp, Artificial
  Probe
tgttggctcttcctgtcttgtatag

SEQ ID NO: 17448 - DNA, 25 bp, Artificial
  Probe
ctgttggctcttcctgtcttgtata

SEQ ID NO: 17449 - DNA, 25 bp, Artificial
  Probe
ttggacaatcagatcaagaagatgt

SEQ ID NO: 17450 - DNA, 25 bp, Artificial
  Probe
tggacaatcagatcaagaagatgta

SEQ ID NO: 17451 - DNA, 25 bp, Artificial
  Probe
acaatcagatcaagaagatgtaacc

SEQ ID NO: 17452 - DNA, 25 bp, Artificial
  Probe
ggacaatcagatcaagaagatgtaa

SEQ ID NO: 17453 - DNA, 25 bp, Artificial
  Probe
tggctcttcctgtcttgtatagttt

SEQ ID NO: 17454 - DNA, 25 bp, Artificial
  Probe
tactgttggctcttcctgtcttgta

SEQ ID NO: 17455 - DNA, 25 bp, Artificial
  Probe
gacaatcagatcaagaagatgtaac

SEQ ID NO: 17456 - DNA, 25 bp, Artificial
  Probe
atcaagaagatgtaaccctctggaa

SEQ ID NO: 17457 - DNA, 25 bp, Artificial
  Probe
atcagatcaagaagatgtaaccctc

SEQ ID NO: 17458 - DNA, 25 bp, Artificial
  Probe
caatcagatcaagaagatgtaaccc

SEQ ID NO: 17459 - DNA, 25 bp, Artificial
  Probe
aatcagatcaagaagatgtaaccct

SEQ ID NO: 17460 - DNA, 25 bp, Artificial
  Probe
atactttgacgacttggacaatcag

SEQ ID NO: 17461 - DNA, 25 bp, Artificial
  Probe
catactttgacgacttggacaatca

SEQ ID NO: 17462 - DNA, 25 bp, Artificial
  Probe
tcagatcaagaagatgtaaccctct

SEQ ID NO: 17463 - DNA, 25 bp, Artificial
  Probe
aagaagatgtaaccctctggaagtc

SEQ ID NO: 17464 - DNA, 25 bp, Artificial
  Probe
tcaagaagatgtaaccctctggaag

SEQ ID NO: 17465 - DNA, 25 bp, Artificial
  Probe
caagaagatgtaaccctctggaagt

SEQ ID NO: 17466 - DNA, 25 bp, Artificial
  Probe
actgttggctcttcctgtcttgtat

SEQ ID NO: 17467 - DNA, 25 bp, Artificial
  Probe
gatcaagaagatgtaaccctctgga

SEQ ID NO: 17468 - DNA, 25 bp, Artificial
  Probe
agatcaagaagatgtaaccctctgg

SEQ ID NO: 17469 - DNA, 25 bp, Artificial
  Probe
tactttgacgacttggacaatcaga

SEQ ID NO: 17470 - DNA, 25 bp, Artificial
  Probe
ttactgttggctcttcctgtcttgt

SEQ ID NO: 17471 - DNA, 25 bp, Artificial
  Probe
ttaagcacccatactttgacgactt

SEQ ID NO: 17472 - DNA, 25 bp, Artificial
  Probe
ctttgacgacttggacaatcagatc

SEQ ID NO: 17473 - DNA, 25 bp, Artificial
  Probe
actttgacgacttggacaatcagat

SEQ ID NO: 17474 - DNA, 25 bp, Artificial
  Probe
tttactgttggctcttcctgtcttg

SEQ ID NO: 17475 - DNA, 25 bp, Artificial
  Probe
gtttactgttggctcttcctgtctt

SEQ ID NO: 17476 - DNA, 25 bp, Artificial
  Probe
ctatgatccagccaaacgaatctct

SEQ ID NO: 17477 - DNA, 25 bp, Artificial
  Probe
tctatgatccagccaaacgaatctc

SEQ ID NO: 17478 - DNA, 25 bp, Artificial
  Probe
acttggacaatcagatcaagaagat

SEQ ID NO: 17479 - DNA, 25 bp, Artificial
  Probe
cttggacaatcagatcaagaagatg

SEQ ID NO: 17480 - DNA, 25 bp, Artificial
  Probe
gacttggacaatcagatcaagaaga

SEQ ID NO: 17481 - DNA, 25 bp, Artificial
  Probe
taagcacccatactttgacgacttg

SEQ ID NO: 17482 - DNA, 25 bp, Artificial
  Probe
tttgacgacttggacaatcagatca

SEQ ID NO: 17483 - DNA, 25 bp, Artificial
  Probe
gtctatgatccagccaaacgaatct

SEQ ID NO: 17484 - DNA, 25 bp, Artificial
  Probe
ccatactttgacgacttggacaatc

SEQ ID NO: 17485 - DNA, 25 bp, Artificial
  Probe
ttgacgacttggacaatcagatcaa

SEQ ID NO: 17486 - DNA, 25 bp, Artificial
  Probe
ggctcttcctgtcttgtatagtttt

SEQ ID NO: 17487 - DNA, 25 bp, Artificial
  Probe
gctcttcctgtcttgtatagttttc

SEQ ID NO: 17488 - DNA, 25 bp, Artificial
  Probe
cgacttggacaatcagatcaagaag

SEQ ID NO: 17489 - DNA, 25 bp, Artificial
  Probe
agaagatgtaaccctctggaagtcc

SEQ ID NO: 17490 - DNA, 25 bp, Artificial
  Probe
catattgtaatgaacagttgtgtgt

SEQ ID NO: 17491 - DNA, 25 bp, Artificial
  Probe
acatattgtaatgaacagttgtgtg

SEQ ID NO: 17492 - DNA, 25 bp, Artificial
  Probe
tatacaatggtacgtgacagaactt

SEQ ID NO: 17493 - DNA, 25 bp, Artificial
  Probe
ctatacaatggtacgtgacagaact

SEQ ID NO: 17494 - DNA, 25 bp, Artificial
  Probe
cctatacaatggtacgtgacagaac

SEQ ID NO: 17495 - DNA, 25 bp, Artificial
  Probe
agacacagacctcttgacaacattg

SEQ ID NO: 17496 - DNA, 25 bp, Artificial
  Probe
aacatattgtaatgaacagttgtgt

SEQ ID NO: 17497 - DNA, 25 bp, Artificial
  Probe
ggtggataacatattgtaatgaaca

SEQ ID NO: 17498 - DNA, 25 bp, Artificial
  Probe
tgttcaggtttatttgtggaaatgc

SEQ ID NO: 17499 - DNA, 25 bp, Artificial
  Probe
acagacctcttgacaacattgtgaa

SEQ ID NO: 17500 - DNA, 25 bp, Artificial
  Probe
tattgtaatgaacagttgtgtgtaa

SEQ ID NO: 17501 - DNA, 25 bp, Artificial
  Probe
aggtggataacatattgtaatgaac

SEQ ID NO: 17502 - DNA, 25 bp, Artificial
  Probe
caaggtggataacatattgtaatga

SEQ ID NO: 17503 - DNA, 25 bp, Artificial
  Probe
atgttcaggtttatttgtggaaatg

SEQ ID NO: 17504 - DNA, 25 bp, Artificial
  Probe
atattgtaatgaacagttgtgtgta

SEQ ID NO: 17505 - DNA, 25 bp, Artificial
  Probe
acctatacaatggtacgtgacagaa

SEQ ID NO: 17506 - DNA, 25 bp, Artificial
  Probe
aagacacagacctcttgacaacatt

SEQ ID NO: 17507 - DNA, 25 bp, Artificial
  Probe
aaatgttcaggtttatttgtggaaa

SEQ ID NO: 17508 - DNA, 25 bp, Artificial
  Probe
gacacagacctcttgacaacattgt

SEQ ID NO: 17509 - DNA, 25 bp, Artificial
  Probe
actttgaggtggactgcatttaata

SEQ ID NO: 17510 - DNA, 25 bp, Artificial
  Probe
ctttgaggtggactgcatttaataa

SEQ ID NO: 17511 - DNA, 25 bp, Artificial
  Probe
atacaatggtacgtgacagaacttt

SEQ ID NO: 17512 - DNA, 25 bp, Artificial
  Probe
ggacttgtcacctatacaatggtac

SEQ ID NO: 17513 - DNA, 25 bp, Artificial
  Probe
cagacctcttgacaacattgtgaaa

SEQ ID NO: 17514 - DNA, 25 bp, Artificial
  Probe
aatgttcaggtttatttgtggaaat

SEQ ID NO: 17515 - DNA, 25 bp, Artificial
  Probe
gacttgtcacctatacaatggtacg

SEQ ID NO: 17516 - DNA, 25 bp, Artificial
  Probe
tttgaggtggactgcatttaataat

SEQ ID NO: 17517 - DNA, 25 bp, Artificial
  Probe
aactttgaggtggactgcatttaat

SEQ ID NO: 17518 - DNA, 25 bp, Artificial
  Probe
cacctatacaatggtacgtgacaga

SEQ ID NO: 17519 - DNA, 25 bp, Artificial
  Probe
attgtaatgaacagttgtgtgtaaa

SEQ ID NO: 17520 - DNA, 25 bp, Artificial
  Probe
tggataacatattgtaatgaacagt

SEQ ID NO: 17521 - DNA, 25 bp, Artificial
  Probe
tgaggtggactgcatttaataatag

SEQ ID NO: 17522 - DNA, 25 bp, Artificial
  Probe
aaggtggataacatattgtaatgaa

SEQ ID NO: 17523 - DNA, 25 bp, Artificial
  Probe
ttcaggtttatttgtggaaatgcaa

SEQ ID NO: 17524 - DNA, 25 bp, Artificial
  Probe
aggtttatttgtggaaatgcaagat

SEQ ID NO: 17525 - DNA, 25 bp, Artificial
  Probe
gaactttgaggtggactgcatttaa

SEQ ID NO: 17526 - DNA, 25 bp, Artificial
  Probe
caggtttatttgtggaaatgcaaga

SEQ ID NO: 17527 - DNA, 25 bp, Artificial
  Probe
tcaggtttatttgtggaaatgcaag

SEQ ID NO: 17528 - DNA, 25 bp, Artificial
  Probe
tacaatggtacgtgacagaactttg

SEQ ID NO: 17529 - DNA, 25 bp, Artificial
  Probe
gttcaggtttatttgtggaaatgca

SEQ ID NO: 17530 - DNA, 25 bp, Artificial
  Probe
ttgaggtggactgcatttaataata

SEQ ID NO: 17531 - DNA, 25 bp, Artificial
  Probe
gtggataacatattgtaatgaacag

SEQ ID NO: 17532 - DNA, 25 bp, Artificial
  Probe
gaggtggactgcatttaataatagt

SEQ ID NO: 17533 - DNA, 25 bp, Artificial
  Probe
ggtttatttgtggaaatgcaagatt

SEQ ID NO: 17534 - DNA, 25 bp, Artificial
  Probe
taacatattgtaatgaacagttgtg

SEQ ID NO: 17535 - DNA, 25 bp, Artificial
  Probe
cttgtaatacctcctctggaacatc

SEQ ID NO: 17536 - DNA, 25 bp, Artificial
  Probe
ttgtaatacctcctctggaacatca

SEQ ID NO: 17537 - DNA, 25 bp, Artificial
  Probe
tgtaatacctcctctggaacatcac

SEQ ID NO: 17538 - DNA, 25 bp, Artificial
  Probe
gcttgtaatacctcctctggaacat

SEQ ID NO: 17539 - DNA, 25 bp, Artificial
  Probe
gtaatacctcctctggaacatcacc

SEQ ID NO: 17540 - DNA, 25 bp, Artificial
  Probe
taatacctcctctggaacatcacca

SEQ ID NO: 17541 - DNA, 25 bp, Artificial
  Probe
gaagaagacactggaggaagagttt

SEQ ID NO: 17542 - DNA, 25 bp, Artificial
  Probe
ggaagaagacactggaggaagagtt

SEQ ID NO: 17543 - DNA, 25 bp, Artificial
  Probe
aagaagacactggaggaagagtttg

SEQ ID NO: 17544 - DNA, 25 bp, Artificial
  Probe
acgtagtacaaatatgcaaagaggc

SEQ ID NO: 17545 - DNA, 25 bp, Artificial
  Probe
ccattcgtacacatcgttctggaat

SEQ ID NO: 17546 - DNA, 25 bp, Artificial
  Probe
ggcttgtaatacctcctctggaaca

SEQ ID NO: 17547 - DNA, 25 bp, Artificial
  Probe
aggaagaagacactggaggaagagt

SEQ ID NO: 17548 - DNA, 25 bp, Artificial
  Probe
attcgtacacatcgttctggaatgc

SEQ ID NO: 17549 - DNA, 25 bp, Artificial
  Probe
cgctgattacgtagtacaaatatgc

SEQ ID NO: 17550 - DNA, 25 bp, Artificial
  Probe
gctgattacgtagtacaaatatgca

SEQ ID NO: 17551 - DNA, 25 bp, Artificial
  Probe
tacgtagtacaaatatgcaaagagg

SEQ ID NO: 17552 - DNA, 25 bp, Artificial
  Probe
gtagtacaaatatgcaaagaggcag

SEQ ID NO: 17553 - DNA, 25 bp, Artificial
  Probe
cttctcagctttcaggtcagacatg

SEQ ID NO: 17554 - DNA, 25 bp, Artificial
  Probe
caggaagtgttctttaaaatgaccg

SEQ ID NO: 17555 - DNA, 25 bp, Artificial
  Probe
gcgctgattacgtagtacaaatatg

SEQ ID NO: 17556 - DNA, 25 bp, Artificial
  Probe
tagtacaaatatgcaaagaggcagg

SEQ ID NO: 17557 - DNA, 25 bp, Artificial
  Probe
gtacacatcgttctggaatgccatg

SEQ ID NO: 17558 - DNA, 25 bp, Artificial
  Probe
ggcgctgattacgtagtacaaatat

SEQ ID NO: 17559 - DNA, 25 bp, Artificial
  Probe
cgtagtacaaatatgcaaagaggca

SEQ ID NO: 17560 - DNA, 25 bp, Artificial
  Probe
acaggaagtgttctttaaaatgacc

SEQ ID NO: 17561 - DNA, 25 bp, Artificial
  Probe
atggtgttggcgatgatgagaaaga

SEQ ID NO: 17562 - DNA, 25 bp, Artificial
  Probe
agaagacactggaggaagagtttgc

SEQ ID NO: 17563 - DNA, 25 bp, Artificial
  Probe
ttacgtagtacaaatatgcaaagag

SEQ ID NO: 17564 - DNA, 25 bp, Artificial
  Probe
ctgattacgtagtacaaatatgcaa

SEQ ID NO: 17565 - DNA, 25 bp, Artificial
  Probe
aaatatgcaaagaggcaggtgtaga

SEQ ID NO: 17566 - DNA, 25 bp, Artificial
  Probe
caaatatgcaaagaggcaggtgtag

SEQ ID NO: 17567 - DNA, 25 bp, Artificial
  Probe
gtacaaatatgcaaagaggcaggtg

SEQ ID NO: 17568 - DNA, 25 bp, Artificial
  Probe
agtacaaatatgcaaagaggcaggt

SEQ ID NO: 17569 - DNA, 25 bp, Artificial
  Probe
catggtgttggcgatgatgagaaag

SEQ ID NO: 17570 - DNA, 25 bp, Artificial
  Probe
gggcttgtaatacctcctctggaac

SEQ ID NO: 17571 - DNA, 25 bp, Artificial
  Probe
tgattacgtagtacaaatatgcaaa

SEQ ID NO: 17572 - DNA, 25 bp, Artificial
  Probe
acaaatatgcaaagaggcaggtgta

SEQ ID NO: 17573 - DNA, 25 bp, Artificial
  Probe
tacaaatatgcaaagaggcaggtgt

SEQ ID NO: 17574 - DNA, 25 bp, Artificial
  Probe
tggtgttggcgatgatgagaaagag

SEQ ID NO: 17575 - DNA, 25 bp, Artificial
  Probe
aatatgcaaagaggcaggtgtagac

SEQ ID NO: 17576 - DNA, 25 bp, Artificial
  Probe
gggcgctgattacgtagtacaaata

SEQ ID NO: 17577 - DNA, 25 bp, Artificial
  Probe
attacgtagtacaaatatgcaaaga

SEQ ID NO: 17578 - DNA, 25 bp, Artificial
  Probe
aggaagtgttctttaaaatgaccgg

SEQ ID NO: 17579 - DNA, 25 bp, Artificial
  Probe
gattacgtagtacaaatatgcaaag

SEQ ID NO: 17580 - DNA, 25 bp, Artificial
  Probe
gctatagtgacatgcagttctctat

SEQ ID NO: 17581 - DNA, 25 bp, Artificial
  Probe
ctatagtgacatgcagttctctatt

SEQ ID NO: 17582 - DNA, 25 bp, Artificial
  Probe
tgctatagtgacatgcagttctcta

SEQ ID NO: 17583 - DNA, 25 bp, Artificial
  Probe
tatagtgacatgcagttctctattt

SEQ ID NO: 17584 - DNA, 25 bp, Artificial
  Probe
gcagtttcctcagtgatggaatatt

SEQ ID NO: 17585 - DNA, 25 bp, Artificial
  Probe
ttcctcagtgatggaatattcatga

SEQ ID NO: 17586 - DNA, 25 bp, Artificial
  Probe
tcgaatgtttgaccacattatttgg

SEQ ID NO: 17587 - DNA, 25 bp, Artificial
  Probe
cagtcgaatgtttgaccacattatt

SEQ ID NO: 17588 - DNA, 25 bp, Artificial
  Probe
gtcgaatgtttgaccacattatttg

SEQ ID NO: 17589 - DNA, 25 bp, Artificial
  Probe
agtcgaatgtttgaccacattattt

SEQ ID NO: 17590 - DNA, 25 bp, Artificial
  Probe
ccagtcgaatgtttgaccacattat

SEQ ID NO: 17591 - DNA, 25 bp, Artificial
  Probe
agtttcctcagtgatggaatattca

SEQ ID NO: 17592 - DNA, 25 bp, Artificial
  Probe
cagtttcctcagtgatggaatattc

SEQ ID NO: 17593 - DNA, 25 bp, Artificial
  Probe
tttcctcagtgatggaatattcatg

SEQ ID NO: 17594 - DNA, 25 bp, Artificial
  Probe
gtttcctcagtgatggaatattcat

SEQ ID NO: 17595 - DNA, 25 bp, Artificial
  Probe
cccagtcgaatgtttgaccacatta

SEQ ID NO: 17596 - DNA, 25 bp, Artificial
  Probe
ttactcaatgttcaagccttcagaa

SEQ ID NO: 17597 - DNA, 25 bp, Artificial
  Probe
ccatacaggagagaaaccatacaaa

SEQ ID NO: 17598 - DNA, 25 bp, Artificial
  Probe
tttactcaatgttcaagccttcaga

SEQ ID NO: 17599 - DNA, 25 bp, Artificial
  Probe
ttacccaatgttcaagccttagaaa

SEQ ID NO: 17600 - DNA, 25 bp, Artificial
  Probe
tttacccaatgttcaagccttagaa

SEQ ID NO: 17601 - DNA, 25 bp, Artificial
  Probe
tactcaatgttcaagccttcagaaa

SEQ ID NO: 17602 - DNA, 25 bp, Artificial
  Probe
catacaggagagaaaccatacaaat

SEQ ID NO: 17603 - DNA, 25 bp, Artificial
  Probe
atacaggagagaaaccatacaaatg

SEQ ID NO: 17604 - DNA, 25 bp, Artificial
  Probe
ttacaaatgtgaacagtgtggaaag

SEQ ID NO: 17605 - DNA, 25 bp, Artificial
  Probe
cttacaaatgtgaacagtgtggaaa

SEQ ID NO: 17606 - DNA, 25 bp, Artificial
  Probe
tacaggagagaaaccatacaaatgt

SEQ ID NO: 17607 - DNA, 25 bp, Artificial
  Probe
aaaccttacaaatgtgaacagtgtg

SEQ ID NO: 17608 - DNA, 25 bp, Artificial
  Probe
acaaatgtaaagactgtgacaaagc

SEQ ID NO: 17609 - DNA, 25 bp, Artificial
  Probe
caggagagaaaccatacaaatgtaa

SEQ ID NO: 17610 - DNA, 25 bp, Artificial
  Probe
tggagagaaaccctacaaatgtgaa

SEQ ID NO: 17611 - DNA, 25 bp, Artificial
  Probe
aacccttagtcaacaccagagaatt

SEQ ID NO: 17612 - DNA, 25 bp, Artificial
  Probe
ccttagtcaacaccagagaattcat

SEQ ID NO: 17613 - DNA, 25 bp, Artificial
  Probe
acaggagagaaaccatacaaatgta

SEQ ID NO: 17614 - DNA, 25 bp, Artificial
  Probe
actcaatgttcaagccttcagaaac

SEQ ID NO: 17615 - DNA, 25 bp, Artificial
  Probe
aattcacacaggagagaaaccttac

SEQ ID NO: 17616 - DNA, 25 bp, Artificial
  Probe
tacaaatgtgaagaatgtggcagag

SEQ ID NO: 17617 - DNA, 25 bp, Artificial
  Probe
cacaggagagaaaccttacaaatgt

SEQ ID NO: 17618 - DNA, 25 bp, Artificial
  Probe
acacaggagagaaaccttacaaatg

SEQ ID NO: 17619 - DNA, 25 bp, Artificial
  Probe
cacacaggagagaaaccttacaaat

SEQ ID NO: 17620 - DNA, 25 bp, Artificial
  Probe
ttagtcaacaccagagaattcatac

SEQ ID NO: 17621 - DNA, 25 bp, Artificial
  Probe
caacccttagtcaacaccagagaat

SEQ ID NO: 17622 - DNA, 25 bp, Artificial
  Probe
aatccatacaggagagaaaccatac

SEQ ID NO: 17623 - DNA, 25 bp, Artificial
  Probe
acaggagagaaaccttacaaatgta

SEQ ID NO: 17624 - DNA, 25 bp, Artificial
  Probe
gaatccatacaggagagaaaccata

SEQ ID NO: 17625 - DNA, 25 bp, Artificial
  Probe
tacaaatgtgaacagtgtggaaagg

SEQ ID NO: 17626 - DNA, 25 bp, Artificial
  Probe
ccttacaaatgtgaacagtgtggaa

SEQ ID NO: 17627 - DNA, 25 bp, Artificial
  Probe
aattcacactggagagaaaccctac

SEQ ID NO: 17628 - DNA, 25 bp, Artificial
  Probe
atccatacaggagagaaaccataca

SEQ ID NO: 17629 - DNA, 25 bp, Artificial
  Probe
tagtcaacaccagagaattcatact

SEQ ID NO: 17630 - DNA, 25 bp, Artificial
  Probe
ggagagaaaccatacaaatgtaatg

SEQ ID NO: 17631 - DNA, 25 bp, Artificial
  Probe
tccatacaggagagaaaccatacaa

SEQ ID NO: 17632 - DNA, 25 bp, Artificial
  Probe
agaatccatacaggagagaaaccat

SEQ ID NO: 17633 - DNA, 25 bp, Artificial
  Probe
cttagtcaacaccagagaattcata

SEQ ID NO: 17634 - DNA, 25 bp, Artificial
  Probe
aggagagaaaccatacaaatgtaat

SEQ ID NO: 17635 - DNA, 25 bp, Artificial
  Probe
aaccttacaaatgtgaacagtgtgg

SEQ ID NO: 17636 - DNA, 25 bp, Artificial
  Probe
acaagagaattcacacaggagagaa

SEQ ID NO: 17637 - DNA, 25 bp, Artificial
  Probe
agtcaacaccagagaattcatactg

SEQ ID NO: 17638 - DNA, 25 bp, Artificial
  Probe
attcacacaggagagaaaccttaca

SEQ ID NO: 17639 - DNA, 25 bp, Artificial
  Probe
tcacacaggagagaaaccttacaaa

SEQ ID NO: 17640 - DNA, 25 bp, Artificial
  Probe
ttcacacaggagagaaaccttacaa

SEQ ID NO: 17641 - DNA, 25 bp, Artificial
  Probe
tgcaggagattaaccgagtgtataa

SEQ ID NO: 17642 - DNA, 25 bp, Artificial
  Probe
ctcatcgagatcatctgctcaagaa

SEQ ID NO: 17643 - DNA, 25 bp, Artificial
  Probe
tcatcgagatcatctgctcaagaac

SEQ ID NO: 17644 - DNA, 25 bp, Artificial
  Probe
gagatcatctgctcaagaaccaacc

SEQ ID NO: 17645 - DNA, 25 bp, Artificial
  Probe
cgagatcatctgctcaagaaccaac

SEQ ID NO: 17646 - DNA, 25 bp, Artificial
  Probe
agatcatctgctcaagaaccaacca

SEQ ID NO: 17647 - DNA, 25 bp, Artificial
  Probe
gatcatctgctcaagaaccaaccag

SEQ ID NO: 17648 - DNA, 25 bp, Artificial
  Probe
catcgagatcatctgctcaagaacc

SEQ ID NO: 17649 - DNA, 25 bp, Artificial
  Probe
caacattctgactaaccgcagcaat

SEQ ID NO: 17650 - DNA, 25 bp, Artificial
  Probe
atcgagatcatctgctcaagaacca

SEQ ID NO: 17651 - DNA, 25 bp, Artificial
  Probe
tcgagatcatctgctcaagaaccaa

SEQ ID NO: 17652 - DNA, 25 bp, Artificial
  Probe
cctcatcgagatcatctgctcaaga

SEQ ID NO: 17653 - DNA, 25 bp, Artificial
  Probe
aacattctgactaaccgcagcaatg

SEQ ID NO: 17654 - DNA, 25 bp, Artificial
  Probe
atcatctgctcaagaaccaaccagg

SEQ ID NO: 17655 - DNA, 25 bp, Artificial
  Probe
gctgagagggatgctttgaacattg

SEQ ID NO: 17656 - DNA, 25 bp, Artificial
  Probe
ccctcatcgagatcatctgctcaag

SEQ ID NO: 17657 - DNA, 25 bp, Artificial
  Probe
aggactccctcatcgagatcatctg

SEQ ID NO: 17658 - DNA, 25 bp, Artificial
  Probe
tccctcatcgagatcatctgctcaa

SEQ ID NO: 17659 - DNA, 25 bp, Artificial
  Probe
caagtggatcagcatcatgactgag

SEQ ID NO: 17660 - DNA, 25 bp, Artificial
  Probe
ccaagtggatcagcatcatgactga

SEQ ID NO: 17661 - DNA, 25 bp, Artificial
  Probe
aagtggatcagcatcatgactgagc

SEQ ID NO: 17662 - DNA, 25 bp, Artificial
  Probe
gaggactccctcatcgagatcatct

SEQ ID NO: 17663 - DNA, 25 bp, Artificial
  Probe
ccgcaaaggatacaacatctatttc

SEQ ID NO: 17664 - DNA, 25 bp, Artificial
  Probe
gatacaacatctatttccaagcgat

SEQ ID NO: 17665 - DNA, 25 bp, Artificial
  Probe
cccgcaaaggatacaacatctattt

SEQ ID NO: 17666 - DNA, 25 bp, Artificial
  Probe
ctcttcaactcttctctgcctgttc

SEQ ID NO: 17667 - DNA, 25 bp, Artificial
  Probe
ccactgttgaactcactgaagatca

SEQ ID NO: 17668 - DNA, 25 bp, Artificial
  Probe
cgcaaaggatacaacatctatttcc

SEQ ID NO: 17669 - DNA, 25 bp, Artificial
  Probe
gcaaaggatacaacatctatttcca

SEQ ID NO: 17670 - DNA, 25 bp, Artificial
  Probe
ggatacaacatctatttccaagcga

SEQ ID NO: 17671 - DNA, 25 bp, Artificial
  Probe
aggatacaacatctatttccaagcg

SEQ ID NO: 17672 - DNA, 25 bp, Artificial
  Probe
aaggatacaacatctatttccaagc

SEQ ID NO: 17673 - DNA, 25 bp, Artificial
  Probe
aatcccactgttgaactcactgaag

SEQ ID NO: 17674 - DNA, 25 bp, Artificial
  Probe
ttcaactcttctctgcctgttcctc

SEQ ID NO: 17675 - DNA, 25 bp, Artificial
  Probe
cttcaactcttctctgcctgttcct

SEQ ID NO: 17676 - DNA, 25 bp, Artificial
  Probe
tcttcaactcttctctgcctgttcc

SEQ ID NO: 17677 - DNA, 25 bp, Artificial
  Probe
cctcttcaactcttctctgcctgtt

SEQ ID NO: 17678 - DNA, 25 bp, Artificial
  Probe
ctgttgaactcactgaagatcagaa

SEQ ID NO: 17679 - DNA, 25 bp, Artificial
  Probe
caatcccactgttgaactcactgaa

SEQ ID NO: 17680 - DNA, 25 bp, Artificial
  Probe
ttatcaaattgtggtggagcagcta

SEQ ID NO: 17681 - DNA, 25 bp, Artificial
  Probe
cttctctgcctgttcctcctcaatc

SEQ ID NO: 17682 - DNA, 25 bp, Artificial
  Probe
cccactgttgaactcactgaagatc

SEQ ID NO: 17683 - DNA, 25 bp, Artificial
  Probe
tcccactgttgaactcactgaagat

SEQ ID NO: 17684 - DNA, 25 bp, Artificial
  Probe
atcccactgttgaactcactgaaga

SEQ ID NO: 17685 - DNA, 25 bp, Artificial
  Probe
actgttgaactcactgaagatcaga

SEQ ID NO: 17686 - DNA, 25 bp, Artificial
  Probe
cactgttgaactcactgaagatcag

SEQ ID NO: 17687 - DNA, 25 bp, Artificial
  Probe
caaaggatacaacatctatttccaa

SEQ ID NO: 17688 - DNA, 25 bp, Artificial
  Probe
tagttccctcttcaactcttctctg

SEQ ID NO: 17689 - DNA, 25 bp, Artificial
  Probe
gtagttccctcttcaactcttctct

SEQ ID NO: 17690 - DNA, 25 bp, Artificial
  Probe
tacaacatctatttccaagcgatga

SEQ ID NO: 17691 - DNA, 25 bp, Artificial
  Probe
aaagatggtagttccctcttcaact

SEQ ID NO: 17692 - DNA, 25 bp, Artificial
  Probe
atacaacatctatttccaagcgatg

SEQ ID NO: 17693 - DNA, 25 bp, Artificial
  Probe
aaaggatacaacatctatttccaag

SEQ ID NO: 17694 - DNA, 25 bp, Artificial
  Probe
atggtagttccctcttcaactcttc

SEQ ID NO: 17695 - DNA, 25 bp, Artificial
  Probe
gatggtagttccctcttcaactctt

SEQ ID NO: 17696 - DNA, 25 bp, Artificial
  Probe
aagatggtagttccctcttcaactc

SEQ ID NO: 17697 - DNA, 25 bp, Artificial
  Probe
tatcaaattgtggtggagcagctac

SEQ ID NO: 17698 - DNA, 25 bp, Artificial
  Probe
acaacatctatttccaagcgatgag

SEQ ID NO: 17699 - DNA, 25 bp, Artificial
  Probe
gagaaggaaactaaaacccagtgtg

SEQ ID NO: 17700 - DNA, 25 bp, Artificial
  Probe
tcttctctgcctgttcctcctcaat

SEQ ID NO: 17701 - DNA, 25 bp, Artificial
  Probe
ggtagttccctcttcaactcttctc

SEQ ID NO: 17702 - DNA, 25 bp, Artificial
  Probe
acctataaaggcttctggaaccctc

SEQ ID NO: 17703 - DNA, 25 bp, Artificial
  Probe
gacctataaaggcttctggaaccct

SEQ ID NO: 17704 - DNA, 25 bp, Artificial
  Probe
gtgcgaattgctacaaaagatggta

SEQ ID NO: 17705 - DNA, 25 bp, Artificial
  Probe
agatggtagttccctcttcaactct

SEQ ID NO: 17706 - DNA, 25 bp, Artificial
  Probe
gaaggaaactaaaacccagtgtgtg

SEQ ID NO: 17707 - DNA, 25 bp, Artificial
  Probe
agaaggaaactaaaacccagtgtgt

SEQ ID NO: 17708 - DNA, 25 bp, Artificial
  Probe
tagaaatacaaggagcatcaggcag

SEQ ID NO: 17709 - DNA, 25 bp, Artificial
  Probe
aagaccagaagctagaaatacaagg

SEQ ID NO: 17710 - DNA, 25 bp, Artificial
  Probe
gaccagaagctagaaatacaaggag

SEQ ID NO: 17711 - DNA, 25 bp, Artificial
  Probe
agaccagaagctagaaatacaagga

SEQ ID NO: 17712 - DNA, 25 bp, Artificial
  Probe
ctagaaatacaaggagcatcaggca

SEQ ID NO: 17713 - DNA, 25 bp, Artificial
  Probe
aaagaccagaagctagaaatacaag

SEQ ID NO: 17714 - DNA, 25 bp, Artificial
  Probe
gtaaagaccagaagctagaaataca

SEQ ID NO: 17715 - DNA, 25 bp, Artificial
  Probe
tgtaaagaccagaagctagaaatac

SEQ ID NO: 17716 - DNA, 25 bp, Artificial
  Probe
cctgtaaagaccagaagctagaaat

SEQ ID NO: 17717 - DNA, 25 bp, Artificial
  Probe
taaagaccagaagctagaaatacaa

SEQ ID NO: 17718 - DNA, 25 bp, Artificial
  Probe
gaaatacaaggagcatcaggcagag

SEQ ID NO: 17719 - DNA, 25 bp, Artificial
  Probe
ctgtaaagaccagaagctagaaata

SEQ ID NO: 17720 - DNA, 25 bp, Artificial
  Probe
agaaatacaaggagcatcaggcaga

SEQ ID NO: 17721 - DNA, 25 bp, Artificial
  Probe
agaagctagaaatacaaggagcatc

SEQ ID NO: 17722 - DNA, 25 bp, Artificial
  Probe
aagctagaaatacaaggagcatcag

SEQ ID NO: 17723 - DNA, 25 bp, Artificial
  Probe
gaagctagaaatacaaggagcatca

SEQ ID NO: 17724 - DNA, 25 bp, Artificial
  Probe
cagaagctagaaatacaaggagcat

SEQ ID NO: 17725 - DNA, 25 bp, Artificial
  Probe
gcctgtaaagaccagaagctagaaa

SEQ ID NO: 17726 - DNA, 25 bp, Artificial
  Probe
agctagaaatacaaggagcatcagg

SEQ ID NO: 17727 - DNA, 25 bp, Artificial
  Probe
ccagaagctagaaatacaaggagca

SEQ ID NO: 17728 - DNA, 25 bp, Artificial
  Probe
accagaagctagaaatacaaggagc

SEQ ID NO: 17729 - DNA, 25 bp, Artificial
  Probe
aaatacaaggagcatcaggcagagg

SEQ ID NO: 17730 - DNA, 25 bp, Artificial
  Probe
gctagaaatacaaggagcatcaggc

SEQ ID NO: 17731 - DNA, 25 bp, Artificial
  Probe
agcctgtaaagaccagaagctagaa

SEQ ID NO: 17732 - DNA, 25 bp, Artificial
  Probe
gagcctgtaaagaccagaagctaga

SEQ ID NO: 17733 - DNA, 25 bp, Artificial
  Probe
tgagcctgtaaagaccagaagctag

SEQ ID NO: 17734 - DNA, 25 bp, Artificial
  Probe
ctgagcctgtaaagaccagaagcta

SEQ ID NO: 17735 - DNA, 25 bp, Artificial
  Probe
ggatagtagaacatgaccagaacat

SEQ ID NO: 17736 - DNA, 25 bp, Artificial
  Probe
tcaccaccatgagatcatctatatt

SEQ ID NO: 17737 - DNA, 25 bp, Artificial
  Probe
tcctatctgaactgcctttacattt

SEQ ID NO: 17738 - DNA, 25 bp, Artificial
  Probe
atcctatctgaactgcctttacatt

SEQ ID NO: 17739 - DNA, 25 bp, Artificial
  Probe
catcctatctgaactgcctttacat

SEQ ID NO: 17740 - DNA, 25 bp, Artificial
  Probe
acactatcaacattatgcttacttc

SEQ ID NO: 17741 - DNA, 25 bp, Artificial
  Probe
gttctaattgcattctgatgtctgg

SEQ ID NO: 17742 - DNA, 25 bp, Artificial
  Probe
ttcagtcctttaaccaaacaatgtc

SEQ ID NO: 17743 - DNA, 25 bp, Artificial
  Probe
agttctaattgcattctgatgtctg

SEQ ID NO: 17744 - DNA, 25 bp, Artificial
  Probe
tttcagtcctttaaccaaacaatgt

SEQ ID NO: 17745 - DNA, 25 bp, Artificial
  Probe
acgttagttctaattgcattctgat

SEQ ID NO: 17746 - DNA, 25 bp, Artificial
  Probe
tccacaacatacaaaccgaaagatt

SEQ ID NO: 17747 - DNA, 25 bp, Artificial
  Probe
ttaaccgaactgcaattagacataa

SEQ ID NO: 17748 - DNA, 25 bp, Artificial
  Probe
tttctttctccttccacctaagttg

SEQ ID NO: 17749 - DNA, 25 bp, Artificial
  Probe
gtttctttctccttccacctaagtt

SEQ ID NO: 17750 - DNA, 25 bp, Artificial
  Probe
cactatcaacattatgcttacttct

SEQ ID NO: 17751 - DNA, 25 bp, Artificial
  Probe
ccacaacatacaaaccgaaagattc

SEQ ID NO: 17752 - DNA, 25 bp, Artificial
  Probe
ctcacaaccagtccacaacatacaa

SEQ ID NO: 17753 - DNA, 25 bp, Artificial
  Probe
cagtttctttctccttccacctaag

SEQ ID NO: 17754 - DNA, 25 bp, Artificial
  Probe
cgttagttctaattgcattctgatg

SEQ ID NO: 17755 - DNA, 25 bp, Artificial
  Probe
agtttctttctccttccacctaagt

SEQ ID NO: 17756 - DNA, 25 bp, Artificial
  Probe
atcaacattatgcttacttctcagc

SEQ ID NO: 17757 - DNA, 25 bp, Artificial
  Probe
tcctttaaccaaacaatgtcgtcat

SEQ ID NO: 17758 - DNA, 25 bp, Artificial
  Probe
acataaatcagtcgtcaacaatcta

SEQ ID NO: 17759 - DNA, 25 bp, Artificial
  Probe
ttctaattgcattctgatgtctggc

SEQ ID NO: 17760 - DNA, 25 bp, Artificial
  Probe
gtccacaacatacaaaccgaaagat

SEQ ID NO: 17761 - DNA, 25 bp, Artificial
  Probe
tatcaacattatgcttacttctcag

SEQ ID NO: 17762 - DNA, 25 bp, Artificial
  Probe
ctatcaacattatgcttacttctca

SEQ ID NO: 17763 - DNA, 25 bp, Artificial
  Probe
actatcaacattatgcttacttctc

SEQ ID NO: 17764 - DNA, 25 bp, Artificial
  Probe
tttactttctagtgtctggaacctg

SEQ ID NO: 17765 - DNA, 25 bp, Artificial
  Probe
agtcctttaaccaaacaatgtcgtc

SEQ ID NO: 17766 - DNA, 25 bp, Artificial
  Probe
tcagtcctttaaccaaacaatgtcg

SEQ ID NO: 17767 - DNA, 25 bp, Artificial
  Probe
ctaaacgggatagtagaacatgacc

SEQ ID NO: 17768 - DNA, 25 bp, Artificial
  Probe
cctaaacgggatagtagaacatgac

SEQ ID NO: 17769 - DNA, 25 bp, Artificial
  Probe
gtctggcaatcaatctcctttcttc

SEQ ID NO: 17770 - DNA, 25 bp, Artificial
  Probe
atttactttctagtgtctggaacct

SEQ ID NO: 17771 - DNA, 25 bp, Artificial
  Probe
gatgtctggcaatcaatctcctttc

SEQ ID NO: 17772 - DNA, 25 bp, Artificial
  Probe
ctttgtgggttgggacagatataaa

SEQ ID NO: 17773 - DNA, 25 bp, Artificial
  Probe
gtcctttaaccaaacaatgtcgtca

SEQ ID NO: 17774 - DNA, 25 bp, Artificial
  Probe
cagtcctttaaccaaacaatgtcgt

SEQ ID NO: 17775 - DNA, 25 bp, Artificial
  Probe
taaacgggatagtagaacatgacca

SEQ ID NO: 17776 - DNA, 25 bp, Artificial
  Probe
ccagtttctttctccttccacctaa

SEQ ID NO: 17777 - DNA, 25 bp, Artificial
  Probe
gcaattagacataaatcagtcgtca

SEQ ID NO: 17778 - DNA, 25 bp, Artificial
  Probe
tagttctaattgcattctgatgtct

SEQ ID NO: 17779 - DNA, 25 bp, Artificial
  Probe
agaatcacctttcaacttcattaga

SEQ ID NO: 17780 - DNA, 25 bp, Artificial
  Probe
gtattcagacaagagatgggaaaga

SEQ ID NO: 17781 - DNA, 25 bp, Artificial
  Probe
attcagacaagagatgggaaagatg

SEQ ID NO: 17782 - DNA, 25 bp, Artificial
  Probe
tattcagacaagagatgggaaagat

SEQ ID NO: 17783 - DNA, 25 bp, Artificial
  Probe
tgtattcagacaagagatgggaaag

SEQ ID NO: 17784 - DNA, 25 bp, Artificial
  Probe
ttcagacaagagatgggaaagatgg

SEQ ID NO: 17785 - DNA, 25 bp, Artificial
  Probe
gagaagactagagggtgtggtgatt

SEQ ID NO: 17786 - DNA, 25 bp, Artificial
  Probe
agaagactagagggtgtggtgattg

SEQ ID NO: 17787 - DNA, 25 bp, Artificial
  Probe
tcagacaagagatgggaaagatggg

SEQ ID NO: 17788 - DNA, 25 bp, Artificial
  Probe
gtattaagtgggattggggagagag

SEQ ID NO: 17789 - DNA, 25 bp, Artificial
  Probe
ttgtattcagacaagagatgggaaa

SEQ ID NO: 17790 - DNA, 25 bp, Artificial
  Probe
attgtattcagacaagagatgggaa

SEQ ID NO: 17791 - DNA, 25 bp, Artificial
  Probe
tattaagtgggattggggagagagt

SEQ ID NO: 17792 - DNA, 25 bp, Artificial
  Probe
agtattaagtgggattggggagaga

SEQ ID NO: 17793 - DNA, 25 bp, Artificial
  Probe
cagtattaagtgggattggggagag

SEQ ID NO: 17794 - DNA, 25 bp, Artificial
  Probe
tggagggcagtattaagtgggattg

SEQ ID NO: 17795 - DNA, 25 bp, Artificial
  Probe
gtggagggcagtattaagtgggatt

SEQ ID NO: 17796 - DNA, 25 bp, Artificial
  Probe
tattgtattcagacaagagatggga

SEQ ID NO: 17797 - DNA, 25 bp, Artificial
  Probe
ccaaatcaatacactagttgtttcc

SEQ ID NO: 17798 - DNA, 25 bp, Artificial
  Probe
cccaaatcaatacactagttgtttc

SEQ ID NO: 17799 - DNA, 25 bp, Artificial
  Probe
attggtggctacagcaaacactaag

SEQ ID NO: 17800 - DNA, 25 bp, Artificial
  Probe
gattggtggctacagcaaacactaa

SEQ ID NO: 17801 - DNA, 25 bp, Artificial
  Probe
tgagaagactagagggtgtggtgat

SEQ ID NO: 17802 - DNA, 25 bp, Artificial
  Probe
atattgtattcagacaagagatggg

SEQ ID NO: 17803 - DNA, 25 bp, Artificial
  Probe
gacggtcagtttgaacctacctttc

SEQ ID NO: 17804 - DNA, 25 bp, Artificial
  Probe
gaagactagagggtgtggtgattgg

SEQ ID NO: 17805 - DNA, 25 bp, Artificial
  Probe
caaatcaatacactagttgtttcca

SEQ ID NO: 17806 - DNA, 25 bp, Artificial
  Probe
gagggcagtattaagtgggattggg

SEQ ID NO: 17807 - DNA, 25 bp, Artificial
  Probe
ggagggcagtattaagtgggattgg

SEQ ID NO: 17808 - DNA, 25 bp, Artificial
  Probe
gtgcagagagaatgactgaaaggtc

SEQ ID NO: 17809 - DNA, 25 bp, Artificial
  Probe
gtggctacagcaaacactaaggaac

SEQ ID NO: 17810 - DNA, 25 bp, Artificial
  Probe
caaacactaaggaacccttcattcc

SEQ ID NO: 17811 - DNA, 25 bp, Artificial
  Probe
attaagtgggattggggagagagtg

SEQ ID NO: 17812 - DNA, 25 bp, Artificial
  Probe
tatattgtattcagacaagagatgg

SEQ ID NO: 17813 - DNA, 25 bp, Artificial
  Probe
aagactagagggtgtggtgattggt

SEQ ID NO: 17814 - DNA, 25 bp, Artificial
  Probe
gcaaacactaaggaacccttcattc

SEQ ID NO: 17815 - DNA, 25 bp, Artificial
  Probe
tgattggtggctacagcaaacacta

SEQ ID NO: 17816 - DNA, 25 bp, Artificial
  Probe
gtgagaagactagagggtgtggtga

SEQ ID NO: 17817 - DNA, 25 bp, Artificial
  Probe
gcagtattaagtgggattggggaga

SEQ ID NO: 17818 - DNA, 25 bp, Artificial
  Probe
gaacccttcattcccacttcccatc

SEQ ID NO: 17819 - DNA, 25 bp, Artificial
  Probe
tggctacagcaaacactaaggaacc

SEQ ID NO: 17820 - DNA, 25 bp, Artificial
  Probe
acaagagatgggaaagatggggaag

SEQ ID NO: 17821 - DNA, 25 bp, Artificial
  Probe
gacaagagatgggaaagatggggaa

SEQ ID NO: 17822 - DNA, 25 bp, Artificial
  Probe
agcaaacactaaggaacccttcatt

SEQ ID NO: 17823 - DNA, 25 bp, Artificial
  Probe
aaacactaaggaacccttcattccc

SEQ ID NO: 17824 - DNA, 25 bp, Artificial
  Probe
tacagcaaacactaaggaacccttc

SEQ ID NO: 17825 - DNA, 25 bp, Artificial
  Probe
tctccttagggtcagtcttctatac

SEQ ID NO: 17826 - DNA, 25 bp, Artificial
  Probe
gtctccttagggtcagtcttctata

SEQ ID NO: 17827 - DNA, 25 bp, Artificial
  Probe
cactcccagtaaacttccttctaag

SEQ ID NO: 17828 - DNA, 25 bp, Artificial
  Probe
tgtctccttagggtcagtcttctat

SEQ ID NO: 17829 - DNA, 25 bp, Artificial
  Probe
ccactcccagtaaacttccttctaa

SEQ ID NO: 17830 - DNA, 25 bp, Artificial
  Probe
ttcataaacaagaacagaccctccc

SEQ ID NO: 17831 - DNA, 25 bp, Artificial
  Probe
ctccttagggtcagtcttctatacc

SEQ ID NO: 17832 - DNA, 25 bp, Artificial
  Probe
ctgtctccttagggtcagtcttcta

SEQ ID NO: 17833 - DNA, 25 bp, Artificial
  Probe
actcccagtaaacttccttctaagg

SEQ ID NO: 17834 - DNA, 25 bp, Artificial
  Probe
ttctgcccttttgttctctcttatt

SEQ ID NO: 17835 - DNA, 25 bp, Artificial
  Probe
tttctgcccttttgttctctcttat

SEQ ID NO: 17836 - DNA, 25 bp, Artificial
  Probe
ctctccacagtcctcatagcttctc

SEQ ID NO: 17837 - DNA, 25 bp, Artificial
  Probe
ctgcccttttgttctctcttattac

SEQ ID NO: 17838 - DNA, 25 bp, Artificial
  Probe
tctgcccttttgttctctcttatta

SEQ ID NO: 17839 - DNA, 25 bp, Artificial
  Probe
gcccttttgttctctcttattacct

SEQ ID NO: 17840 - DNA, 25 bp, Artificial
  Probe
tgcccttttgttctctcttattacc

SEQ ID NO: 17841 - DNA, 25 bp, Artificial
  Probe
ctttctgcccttttgttctctctta

SEQ ID NO: 17842 - DNA, 25 bp, Artificial
  Probe
cctctcctctccacagtcctcatag

SEQ ID NO: 17843 - DNA, 25 bp, Artificial
  Probe
tttctttctgcccttttgttctctc

SEQ ID NO: 17844 - DNA, 25 bp, Artificial
  Probe
ctttctttctgcccttttgttctct

SEQ ID NO: 17845 - DNA, 25 bp, Artificial
  Probe
actttctttctgcccttttgttctc

SEQ ID NO: 17846 - DNA, 25 bp, Artificial
  Probe
tacctaataaaatgtagcatcctgg

SEQ ID NO: 17847 - DNA, 25 bp, Artificial
  Probe
cagtaaacttccttctaagggcagg

SEQ ID NO: 17848 - DNA, 25 bp, Artificial
  Probe
ccagtaaacttccttctaagggcag

SEQ ID NO: 17849 - DNA, 25 bp, Artificial
  Probe
gccactcccagtaaacttccttcta

SEQ ID NO: 17850 - DNA, 25 bp, Artificial
  Probe
cccttttgttctctcttattaccta

SEQ ID NO: 17851 - DNA, 25 bp, Artificial
  Probe
tctttctgcccttttgttctctctt

SEQ ID NO: 17852 - DNA, 25 bp, Artificial
  Probe
ttctttctgcccttttgttctctct

SEQ ID NO: 17853 - DNA, 25 bp, Artificial
  Probe
gtaaacttccttctaagggcaggtg

SEQ ID NO: 17854 - DNA, 25 bp, Artificial
  Probe
agtaaacttccttctaagggcaggt

SEQ ID NO: 17855 - DNA, 25 bp, Artificial
  Probe
ctcccagtaaacttccttctaaggg

SEQ ID NO: 17856 - DNA, 25 bp, Artificial
  Probe
tctccacagtcctcatagcttctcc

SEQ ID NO: 17857 - DNA, 25 bp, Artificial
  Probe
cctctccacagtcctcatagcttct

SEQ ID NO: 17858 - DNA, 25 bp, Artificial
  Probe
tcctctccacagtcctcatagcttc

SEQ ID NO: 17859 - DNA, 25 bp, Artificial
  Probe
ctcctctccacagtcctcatagctt

SEQ ID NO: 17860 - DNA, 25 bp, Artificial
  Probe
ttacctaataaaatgtagcatcctg

SEQ ID NO: 17861 - DNA, 25 bp, Artificial
  Probe
taaacttccttctaagggcaggtgg

SEQ ID NO: 17862 - DNA, 25 bp, Artificial
  Probe
cctgtctccttagggtcagtcttct

SEQ ID NO: 17863 - DNA, 25 bp, Artificial
  Probe
tgactcctatgccctgtctccttag

SEQ ID NO: 17864 - DNA, 25 bp, Artificial
  Probe
ctgactcctatgccctgtctcctta

SEQ ID NO: 17865 - DNA, 25 bp, Artificial
  Probe
ccttttgttctctcttattacctaa

SEQ ID NO: 17866 - DNA, 25 bp, Artificial
  Probe
tcataaacaagaacagaccctcccc

SEQ ID NO: 17867 - DNA, 25 bp, Artificial
  Probe
cataaacaagaacagaccctcccca

SEQ ID NO: 17868 - DNA, 25 bp, Artificial
  Probe
tcccagtaaacttccttctaagggc

SEQ ID NO: 17869 - DNA, 25 bp, Artificial
  Probe
tccttctaagggcaggtgggattat

SEQ ID NO: 17870 - DNA, 25 bp, Artificial
  Probe
tcaatcattccattcctgtcttagc

SEQ ID NO: 17871 - DNA, 25 bp, Artificial
  Probe
ttcaatcattccattcctgtcttag

SEQ ID NO: 17872 - DNA, 25 bp, Artificial
  Probe
agaatgccatgagactatcaagaat

SEQ ID NO: 17873 - DNA, 25 bp, Artificial
  Probe
gagaatgccatgagactatcaagaa

SEQ ID NO: 17874 - DNA, 25 bp, Artificial
  Probe
aagagaatgccatgagactatcaag

SEQ ID NO: 17875 - DNA, 25 bp, Artificial
  Probe
gaatgccatgagactatcaagaatt

SEQ ID NO: 17876 - DNA, 25 bp, Artificial
  Probe
aatcattccattcctgtcttagctt

SEQ ID NO: 17877 - DNA, 25 bp, Artificial
  Probe
agagaatgccatgagactatcaaga

SEQ ID NO: 17878 - DNA, 25 bp, Artificial
  Probe
atcattccattcctgtcttagcttg

SEQ ID NO: 17879 - DNA, 25 bp, Artificial
  Probe
caatcattccattcctgtcttagct

SEQ ID NO: 17880 - DNA, 25 bp, Artificial
  Probe
cattccattcctgtcttagcttgag

SEQ ID NO: 17881 - DNA, 25 bp, Artificial
  Probe
atggtggaacaaatggaatctatga

SEQ ID NO: 17882 - DNA, 25 bp, Artificial
  Probe
attccatttatctattccttgcggt

SEQ ID NO: 17883 - DNA, 25 bp, Artificial
  Probe
atttcctcgtccatatttgcctaat

SEQ ID NO: 17884 - DNA, 25 bp, Artificial
  Probe
tccatttatctattccttgcggttt

SEQ ID NO: 17885 - DNA, 25 bp, Artificial
  Probe
ttccatttatctattccttgcggtt

SEQ ID NO: 17886 - DNA, 25 bp, Artificial
  Probe
aatacgagattgtttgactggattc

SEQ ID NO: 17887 - DNA, 25 bp, Artificial
  Probe
gattccatttatctattccttgcgg

SEQ ID NO: 17888 - DNA, 25 bp, Artificial
  Probe
tggtggaacaaatggaatctatgag

SEQ ID NO: 17889 - DNA, 25 bp, Artificial
  Probe
gactggattcctcagaatgatcttc

SEQ ID NO: 17890 - DNA, 25 bp, Artificial
  Probe
aaaggaaagataccagccacattag

SEQ ID NO: 17891 - DNA, 25 bp, Artificial
  Probe
tttgaatttcctcgtccatatttgc

SEQ ID NO: 17892 - DNA, 25 bp, Artificial
  Probe
gagatttggctaatgcgaacatatt

SEQ ID NO: 17893 - DNA, 25 bp, Artificial
  Probe
ttcctcgtccatatttgcctaattt

SEQ ID NO: 17894 - DNA, 25 bp, Artificial
  Probe
tttcctcgtccatatttgcctaatt

SEQ ID NO: 17895 - DNA, 25 bp, Artificial
  Probe
aatttcctcgtccatatttgcctaa

SEQ ID NO: 17896 - DNA, 25 bp, Artificial
  Probe
agatttggctaatgcgaacatattg

SEQ ID NO: 17897 - DNA, 25 bp, Artificial
  Probe
caaaggaaagataccagccacatta

SEQ ID NO: 17898 - DNA, 25 bp, Artificial
  Probe
gggattcctattacagtaaagcctt

SEQ ID NO: 17899 - DNA, 25 bp, Artificial
  Probe
atgggattcctattacagtaaagcc

SEQ ID NO: 17900 - DNA, 25 bp, Artificial
  Probe
agcaatgggattcctattacagtaa

SEQ ID NO: 17901 - DNA, 25 bp, Artificial
  Probe
aagcaatgggattcctattacagta

SEQ ID NO: 17902 - DNA, 25 bp, Artificial
  Probe
gaatttcctcgtccatatttgccta

SEQ ID NO: 17903 - DNA, 25 bp, Artificial
  Probe
tgactggattcctcagaatgatctt

SEQ ID NO: 17904 - DNA, 25 bp, Artificial
  Probe
ttgactggattcctcagaatgatct

SEQ ID NO: 17905 - DNA, 25 bp, Artificial
  Probe
tttgcctaaggaaatggaagagttt

SEQ ID NO: 17906 - DNA, 25 bp, Artificial
  Probe
tgagatttggctaatgcgaacatat

SEQ ID NO: 17907 - DNA, 25 bp, Artificial
  Probe
ctttctttgctatttcaatgacggt

SEQ ID NO: 17908 - DNA, 25 bp, Artificial
  Probe
actttctttgctatttcaatgacgg

SEQ ID NO: 17909 - DNA, 25 bp, Artificial
  Probe
attacagtaaagccttaggaagacc

SEQ ID NO: 17910 - DNA, 25 bp, Artificial
  Probe
ggtggaacaaatggaatctatgagg

SEQ ID NO: 17911 - DNA, 25 bp, Artificial
  Probe
atacgagattgtttgactggattcc

SEQ ID NO: 17912 - DNA, 25 bp, Artificial
  Probe
gatacaaaggaaagataccagccac

SEQ ID NO: 17913 - DNA, 25 bp, Artificial
  Probe
tgggattcctattacagtaaagcct

SEQ ID NO: 17914 - DNA, 25 bp, Artificial
  Probe
gatttggctaatgcgaacatattgg

SEQ ID NO: 17915 - DNA, 25 bp, Artificial
  Probe
ggactaccatctaactagcatgtac

SEQ ID NO: 17916 - DNA, 25 bp, Artificial
  Probe
taccatctaactagcatgtactgac

SEQ ID NO: 17917 - DNA, 25 bp, Artificial
  Probe
actaccatctaactagcatgtactg

SEQ ID NO: 17918 - DNA, 25 bp, Artificial
  Probe
ctaccatctaactagcatgtactga

SEQ ID NO: 17919 - DNA, 25 bp, Artificial
  Probe
gactaccatctaactagcatgtact

SEQ ID NO: 17920 - DNA, 25 bp, Artificial
  Probe
taagtaatcagcatcgcagtccatt

SEQ ID NO: 17921 - DNA, 25 bp, Artificial
  Probe
ttaagtaatcagcatcgcagtccat

SEQ ID NO: 17922 - DNA, 25 bp, Artificial
  Probe
aagtaatcagcatcgcagtccatta

SEQ ID NO: 17923 - DNA, 25 bp, Artificial
  Probe
accatctaactagcatgtactgaca

SEQ ID NO: 17924 - DNA, 25 bp, Artificial
  Probe
aggattctgttcatttacttgggat

SEQ ID NO: 17925 - DNA, 25 bp, Artificial
  Probe
tgtataagcagggaggtttgattta

SEQ ID NO: 17926 - DNA, 25 bp, Artificial
  Probe
taggattctgttcatttacttggga

SEQ ID NO: 17927 - DNA, 25 bp, Artificial
  Probe
ggattctgttcatttacttgggatt

SEQ ID NO: 17928 - DNA, 25 bp, Artificial
  Probe
agtaatcagcatcgcagtccattag

SEQ ID NO: 17929 - DNA, 25 bp, Artificial
  Probe
tggactaccatctaactagcatgta

SEQ ID NO: 17930 - DNA, 25 bp, Artificial
  Probe
cgttagaaaccttagacaaagaagc

SEQ ID NO: 17931 - DNA, 25 bp, Artificial
  Probe
tgcttattgtaaacagggaaagaac

SEQ ID NO: 17932 - DNA, 25 bp, Artificial
  Probe
ttaggattctgttcatttacttggg

SEQ ID NO: 17933 - DNA, 25 bp, Artificial
  Probe
gcttattgtaaacagggaaagaact

SEQ ID NO: 17934 - DNA, 25 bp, Artificial
  Probe
taagcagggaggtttgatttaatct

SEQ ID NO: 17935 - DNA, 25 bp, Artificial
  Probe
agaaaccttagacaaagaagcattt

SEQ ID NO: 17936 - DNA, 25 bp, Artificial
  Probe
gtataagcagggaggtttgatttaa

SEQ ID NO: 17937 - DNA, 25 bp, Artificial
  Probe
gttagaaaccttagacaaagaagca

SEQ ID NO: 17938 - DNA, 25 bp, Artificial
  Probe
ttgcttattgtaaacagggaaagaa

SEQ ID NO: 17939 - DNA, 25 bp, Artificial
  Probe
tttgcttattgtaaacagggaaaga

SEQ ID NO: 17940 - DNA, 25 bp, Artificial
  Probe
ataagcagggaggtttgatttaatc

SEQ ID NO: 17941 - DNA, 25 bp, Artificial
  Probe
tgggatttatttacttgggaattgt

SEQ ID NO: 17942 - DNA, 25 bp, Artificial
  Probe
acttgggatttatttacttgggaat

SEQ ID NO: 17943 - DNA, 25 bp, Artificial
  Probe
tagaaaccttagacaaagaagcatt

SEQ ID NO: 17944 - DNA, 25 bp, Artificial
  Probe
ttagaaaccttagacaaagaagcat

SEQ ID NO: 17945 - DNA, 25 bp, Artificial
  Probe
gtggactaccatctaactagcatgt

SEQ ID NO: 17946 - DNA, 25 bp, Artificial
  Probe
atttgcttattgtaaacagggaaag

SEQ ID NO: 17947 - DNA, 25 bp, Artificial
  Probe
ctttaagtaatcagcatcgcagtcc

SEQ ID NO: 17948 - DNA, 25 bp, Artificial
  Probe
gtgatgtgagcgaactttaagtaat

SEQ ID NO: 17949 - DNA, 25 bp, Artificial
  Probe
gagcgaactttaagtaatcagcatc

SEQ ID NO: 17950 - DNA, 25 bp, Artificial
  Probe
gatgtgagcgaactttaagtaatca

SEQ ID NO: 17951 - DNA, 25 bp, Artificial
  Probe
tgatgtgagcgaactttaagtaatc

SEQ ID NO: 17952 - DNA, 25 bp, Artificial
  Probe
gaactttaagtaatcagcatcgcag

SEQ ID NO: 17953 - DNA, 25 bp, Artificial
  Probe
atgtgagcgaactttaagtaatcag

SEQ ID NO: 17954 - DNA, 25 bp, Artificial
  Probe
tataagcagggaggtttgatttaat

SEQ ID NO: 17955 - DNA, 25 bp, Artificial
  Probe
tacttgggatttatttacttgggaa

SEQ ID NO: 17956 - DNA, 25 bp, Artificial
  Probe
ttacttgggatttatttacttggga

SEQ ID NO: 17957 - DNA, 25 bp, Artificial
  Probe
gattctgttcatttacttgggattt

SEQ ID NO: 17958 - DNA, 25 bp, Artificial
  Probe
ctgtataagcagggaggtttgattt

SEQ ID NO: 17959 - DNA, 25 bp, Artificial
  Probe
tgtgatgtgagcgaactttaagtaa

SEQ ID NO: 17960 - DNA, 25 bp, Artificial
  Probe
aagagagattgtcctgtgacttctg

SEQ ID NO: 17961 - DNA, 25 bp, Artificial
  Probe
agacttgtttcctagaagcatcctt

SEQ ID NO: 17962 - DNA, 25 bp, Artificial
  Probe
cagacttgtttcctagaagcatcct

SEQ ID NO: 17963 - DNA, 25 bp, Artificial
  Probe
aagcagacttgtttcctagaagcat

SEQ ID NO: 17964 - DNA, 25 bp, Artificial
  Probe
gaagagagattgtcctgtgacttct

SEQ ID NO: 17965 - DNA, 25 bp, Artificial
  Probe
agcagacttgtttcctagaagcatc

SEQ ID NO: 17966 - DNA, 25 bp, Artificial
  Probe
ggaagagagattgtcctgtgacttc

SEQ ID NO: 17967 - DNA, 25 bp, Artificial
  Probe
agagagattgtcctgtgacttctgc

SEQ ID NO: 17968 - DNA, 25 bp, Artificial
  Probe
ttgtttcctagaagcatccttcatt

SEQ ID NO: 17969 - DNA, 25 bp, Artificial
  Probe
cttgtttcctagaagcatccttcat

SEQ ID NO: 17970 - DNA, 25 bp, Artificial
  Probe
gcagacttgtttcctagaagcatcc

SEQ ID NO: 17971 - DNA, 25 bp, Artificial
  Probe
gacttgtttcctagaagcatccttc

SEQ ID NO: 17972 - DNA, 25 bp, Artificial
  Probe
acttgtttcctagaagcatccttca

SEQ ID NO: 17973 - DNA, 25 bp, Artificial
  Probe
attgtcctgtgacttctgcccatta

SEQ ID NO: 17974 - DNA, 25 bp, Artificial
  Probe
gagagattgtcctgtgacttctgcc

SEQ ID NO: 17975 - DNA, 25 bp, Artificial
  Probe
cattccaagcagacttgtttcctag

SEQ ID NO: 17976 - DNA, 25 bp, Artificial
  Probe
attccaagcagacttgtttcctaga

SEQ ID NO: 17977 - DNA, 25 bp, Artificial
  Probe
aagaggaagagagattgtcctgtga

SEQ ID NO: 17978 - DNA, 25 bp, Artificial
  Probe
ttccaagcagacttgtttcctagaa

SEQ ID NO: 17979 - DNA, 25 bp, Artificial
  Probe
acactgaccaaaatatgcaaccttt

SEQ ID NO: 17980 - DNA, 25 bp, Artificial
  Probe
aggaagagagattgtcctgtgactt

SEQ ID NO: 17981 - DNA, 25 bp, Artificial
  Probe
tccaagcagacttgtttcctagaag

SEQ ID NO: 17982 - DNA, 25 bp, Artificial
  Probe
cactgaccaaaatatgcaacctttt

SEQ ID NO: 17983 - DNA, 25 bp, Artificial
  Probe
cacactgaccaaaatatgcaacctt

SEQ ID NO: 17984 - DNA, 25 bp, Artificial
  Probe
taggacacactgaccaaaatatgca

SEQ ID NO: 17985 - DNA, 25 bp, Artificial
  Probe
gaggaagagagattgtcctgtgact

SEQ ID NO: 17986 - DNA, 25 bp, Artificial
  Probe
agaggaagagagattgtcctgtgac

SEQ ID NO: 17987 - DNA, 25 bp, Artificial
  Probe
cagagtcttgcacagcattggtatc

SEQ ID NO: 17988 - DNA, 25 bp, Artificial
  Probe
ttgtcctgtgacttctgcccattac

SEQ ID NO: 17989 - DNA, 25 bp, Artificial
  Probe
aaagaggaagagagattgtcctgtg

SEQ ID NO: 17990 - DNA, 25 bp, Artificial
  Probe
gacacactgaccaaaatatgcaacc

SEQ ID NO: 17991 - DNA, 25 bp, Artificial
  Probe
ggacacactgaccaaaatatgcaac

SEQ ID NO: 17992 - DNA, 25 bp, Artificial
  Probe
aggacacactgaccaaaatatgcaa

SEQ ID NO: 17993 - DNA, 25 bp, Artificial
  Probe
caagcagacttgtttcctagaagca

SEQ ID NO: 17994 - DNA, 25 bp, Artificial
  Probe
acacactgaccaaaatatgcaacct

SEQ ID NO: 17995 - DNA, 25 bp, Artificial
  Probe
gattgtcctgtgacttctgcccatt

SEQ ID NO: 17996 - DNA, 25 bp, Artificial
  Probe
gcattccaagcagacttgtttccta

SEQ ID NO: 17997 - DNA, 25 bp, Artificial
  Probe
ttacaccagagtcttgcacagcatt

SEQ ID NO: 17998 - DNA, 25 bp, Artificial
  Probe
ccaagcagacttgtttcctagaagc

SEQ ID NO: 17999 - DNA, 25 bp, Artificial
  Probe
gaaaagaggaagagagattgtcctg

SEQ ID NO: 18000 - DNA, 25 bp, Artificial
  Probe
aaaagaggaagagagattgtcctgt

SEQ ID NO: 18001 - DNA, 25 bp, Artificial
  Probe
ccagagtcttgcacagcattggtat

SEQ ID NO: 18002 - DNA, 25 bp, Artificial
  Probe
ggaaaagaggaagagagattgtcct

SEQ ID NO: 18003 - DNA, 25 bp, Artificial
  Probe
tttacaccagagtcttgcacagcat

SEQ ID NO: 18004 - DNA, 25 bp, Artificial
  Probe
cagcattccaagcagacttgtttcc

SEQ ID NO: 18005 - DNA, 25 bp, Artificial
  Probe
tgaccgtataaatggataagggaag

SEQ ID NO: 18006 - DNA, 25 bp, Artificial
  Probe
gaccgtataaatggataagggaaga

SEQ ID NO: 18007 - DNA, 25 bp, Artificial
  Probe
ttgaccgtataaatggataagggaa

SEQ ID NO: 18008 - DNA, 25 bp, Artificial
  Probe
tttgaccgtataaatggataaggga

SEQ ID NO: 18009 - DNA, 25 bp, Artificial
  Probe
accgtataaatggataagggaagaa

SEQ ID NO: 18010 - DNA, 25 bp, Artificial
  Probe
acacagagttatcagacattactta

SEQ ID NO: 18011 - DNA, 25 bp, Artificial
  Probe
tacacagagttatcagacattactt

SEQ ID NO: 18012 - DNA, 25 bp, Artificial
  Probe
ccgtataaatggataagggaagaaa

SEQ ID NO: 18013 - DNA, 25 bp, Artificial
  Probe
atacacagagttatcagacattact

SEQ ID NO: 18014 - DNA, 25 bp, Artificial
  Probe
cctatttgtgtggttatatagccct

SEQ ID NO: 18015 - DNA, 25 bp, Artificial
  Probe
atttgaccgtataaatggataaggg

SEQ ID NO: 18016 - DNA, 25 bp, Artificial
  Probe
ctgtttacatgacctatttgtgtgg

SEQ ID NO: 18017 - DNA, 25 bp, Artificial
  Probe
tgtgtggttatatagccctttattt

SEQ ID NO: 18018 - DNA, 25 bp, Artificial
  Probe
ttgtgtggttatatagccctttatt

SEQ ID NO: 18019 - DNA, 25 bp, Artificial
  Probe
tttgtgtggttatatagccctttat

SEQ ID NO: 18020 - DNA, 25 bp, Artificial
  Probe
atttgtgtggttatatagcccttta

SEQ ID NO: 18021 - DNA, 25 bp, Artificial
  Probe
tatttgtgtggttatatagcccttt

SEQ ID NO: 18022 - DNA, 25 bp, Artificial
  Probe
actgtttacatgacctatttgtgtg

SEQ ID NO: 18023 - DNA, 25 bp, Artificial
  Probe
cgtataaatggataagggaagaaag

SEQ ID NO: 18024 - DNA, 25 bp, Artificial
  Probe
ctatttgtgtggttatatagccctt

SEQ ID NO: 18025 - DNA, 25 bp, Artificial
  Probe
cactgtttacatgacctatttgtgt

SEQ ID NO: 18026 - DNA, 25 bp, Artificial
  Probe
acctatttgtgtggttatatagccc

SEQ ID NO: 18027 - DNA, 25 bp, Artificial
  Probe
tcactgtttacatgacctatttgtg

SEQ ID NO: 18028 - DNA, 25 bp, Artificial
  Probe
gacctatttgtgtggttatatagcc

SEQ ID NO: 18029 - DNA, 25 bp, Artificial
  Probe
cacagagttatcagacattacttat

SEQ ID NO: 18030 - DNA, 25 bp, Artificial
  Probe
gtttacatgacctatttgtgtggtt

SEQ ID NO: 18031 - DNA, 25 bp, Artificial
  Probe
tgtttacatgacctatttgtgtggt

SEQ ID NO: 18032 - DNA, 25 bp, Artificial
  Probe
aatggataagggaagaaagtatagt

SEQ ID NO: 18033 - DNA, 25 bp, Artificial
  Probe
tggataagggaagaaagtatagtag

SEQ ID NO: 18034 - DNA, 25 bp, Artificial
  Probe
tgacctatttgtgtggttatatagc

SEQ ID NO: 18035 - DNA, 25 bp, Artificial
  Probe
tatacacagagttatcagacattac

SEQ ID NO: 18036 - DNA, 25 bp, Artificial
  Probe
tttacatgacctatttgtgtggtta

SEQ ID NO: 18037 - DNA, 25 bp, Artificial
  Probe
ggataagggaagaaagtatagtaga

SEQ ID NO: 18038 - DNA, 25 bp, Artificial
  Probe
ttacatgacctatttgtgtggttat

SEQ ID NO: 18039 - DNA, 25 bp, Artificial
  Probe
gaaacgtggttatatcttgaagccc

SEQ ID NO: 18040 - DNA, 25 bp, Artificial
  Probe
ctctgtggctgttggagtttagttt

SEQ ID NO: 18041 - DNA, 25 bp, Artificial
  Probe
aagggaagaaagtatagtagaaact

SEQ ID NO: 18042 - DNA, 25 bp, Artificial
  Probe
aacagaaaacaacatttgaccgtat

SEQ ID NO: 18043 - DNA, 25 bp, Artificial
  Probe
aaacagaaaacaacatttgaccgta

SEQ ID NO: 18044 - DNA, 25 bp, Artificial
  Probe
acatgacctatttgtgtggttatat

SEQ ID NO: 18045 - DNA, 25 bp, Artificial
  Probe
acagaaaacaacatttgaccgtata

SEQ ID NO: 18046 - DNA, 25 bp, Artificial
  Probe
aaaacagaaaacaacatttgaccgt

SEQ ID NO: 18047 - DNA, 25 bp, Artificial
  Probe
gtataaatggataagggaagaaagt

SEQ ID NO: 18048 - DNA, 25 bp, Artificial
  Probe
cagtttgatccagaaggaggagatg

SEQ ID NO: 18049 - DNA, 25 bp, Artificial
  Probe
tcagtttgatccagaaggaggagat

SEQ ID NO: 18050 - DNA, 25 bp, Artificial
  Probe
ttcttcttcctcctactcttcctca

SEQ ID NO: 18051 - DNA, 25 bp, Artificial
  Probe
tcttcttcctcctactcttcctcag

SEQ ID NO: 18052 - DNA, 25 bp, Artificial
  Probe
catacttattcccttgagacctgag

SEQ ID NO: 18053 - DNA, 25 bp, Artificial
  Probe
tttcttcttcctcctactcttcctc

SEQ ID NO: 18054 - DNA, 25 bp, Artificial
  Probe
ccatacttattcccttgagacctga

SEQ ID NO: 18055 - DNA, 25 bp, Artificial
  Probe
atacttattcccttgagacctgagc

SEQ ID NO: 18056 - DNA, 25 bp, Artificial
  Probe
tatatatatgcgatgtccagacagc

SEQ ID NO: 18057 - DNA, 25 bp, Artificial
  Probe
cccatacttattcccttgagacctg

SEQ ID NO: 18058 - DNA, 25 bp, Artificial
  Probe
tgtaagtgccttctgtgtccttgta

SEQ ID NO: 18059 - DNA, 25 bp, Artificial
  Probe
gtaagtgccttctgtgtccttgtac

SEQ ID NO: 18060 - DNA, 25 bp, Artificial
  Probe
cttcttcctcctactcttcctcagg

SEQ ID NO: 18061 - DNA, 25 bp, Artificial
  Probe
cttgtaagtgccttctgtgtccttg

SEQ ID NO: 18062 - DNA, 25 bp, Artificial
  Probe
ctaatcctttctacctgccactcac

SEQ ID NO: 18063 - DNA, 25 bp, Artificial
  Probe
tatatatgcgatgtccagacagcct

SEQ ID NO: 18064 - DNA, 25 bp, Artificial
  Probe
atatatatgcgatgtccagacagcc

SEQ ID NO: 18065 - DNA, 25 bp, Artificial
  Probe
ttcctcctactcttcctcaggctat

SEQ ID NO: 18066 - DNA, 25 bp, Artificial
  Probe
taacatttaaaggtgtcttcctccc

SEQ ID NO: 18067 - DNA, 25 bp, Artificial
  Probe
tacttattcccttgagacctgagcc

SEQ ID NO: 18068 - DNA, 25 bp, Artificial
  Probe
ttgtaagtgccttctgtgtccttgt

SEQ ID NO: 18069 - DNA, 25 bp, Artificial
  Probe
cttttcttcttcctcctactcttcc

SEQ ID NO: 18070 - DNA, 25 bp, Artificial
  Probe
ccttttcttcttcctcctactcttc

SEQ ID NO: 18071 - DNA, 25 bp, Artificial
  Probe
ttaacatttaaaggtgtcttcctcc

SEQ ID NO: 18072 - DNA, 25 bp, Artificial
  Probe
ggggtcttttctttcttcttctttt

SEQ ID NO: 18073 - DNA, 25 bp, Artificial
  Probe
tggggtcttttctttcttcttcttt

SEQ ID NO: 18074 - DNA, 25 bp, Artificial
  Probe
ttttcttcttcctcctactcttcct

SEQ ID NO: 18075 - DNA, 25 bp, Artificial
  Probe
ctaccccatacttattcccttgaga

SEQ ID NO: 18076 - DNA, 25 bp, Artificial
  Probe
ctggggtcttttctttcttcttctt

SEQ ID NO: 18077 - DNA, 25 bp, Artificial
  Probe
accttttcttcttcctcctactctt

SEQ ID NO: 18078 - DNA, 25 bp, Artificial
  Probe
atgaccttttcttcttcctcctact

SEQ ID NO: 18079 - DNA, 25 bp, Artificial
  Probe
taccccatacttattcccttgagac

SEQ ID NO: 18080 - DNA, 25 bp, Artificial
  Probe
actaccccatacttattcccttgag

SEQ ID NO: 18081 - DNA, 25 bp, Artificial
  Probe
ctcactaccccatacttattccctt

SEQ ID NO: 18082 - DNA, 25 bp, Artificial
  Probe
catttaaaggtgtcttcctcccaag

SEQ ID NO: 18083 - DNA, 25 bp, Artificial
  Probe
taagtgccttctgtgtccttgtacc

SEQ ID NO: 18084 - DNA, 25 bp, Artificial
  Probe
cctaatcctttctacctgccactca

SEQ ID NO: 18085 - DNA, 25 bp, Artificial
  Probe
cactaccccatacttattcccttga

SEQ ID NO: 18086 - DNA, 25 bp, Artificial
  Probe
tcactaccccatacttattcccttg

SEQ ID NO: 18087 - DNA, 25 bp, Artificial
  Probe
gaccttttcttcttcctcctactct

SEQ ID NO: 18088 - DNA, 25 bp, Artificial
  Probe
tgaccttttcttcttcctcctactc

SEQ ID NO: 18089 - DNA, 25 bp, Artificial
  Probe
cttcctcctactcttcctcaggcta

SEQ ID NO: 18090 - DNA, 25 bp, Artificial
  Probe
taatcctttctacctgccactcacc

SEQ ID NO: 18091 - DNA, 25 bp, Artificial
  Probe
acatttaaaggtgtcttcctcccaa

SEQ ID NO: 18092 - DNA, 25 bp, Artificial
  Probe
aacatttaaaggtgtcttcctccca

SEQ ID NO: 18093 - DNA, 25 bp, Artificial
  Probe
tcctcctactcttcctcaggctatg

SEQ ID NO: 18094 - DNA, 25 bp, Artificial
  Probe
ccttgtaagtgccttctgtgtcctt

SEQ ID NO: 18095 - DNA, 25 bp, Artificial
  Probe
ttcaatgtctgtgattccttcctaa

SEQ ID NO: 18096 - DNA, 25 bp, Artificial
  Probe
tacaatgccatgtgctaagaatgat

SEQ ID NO: 18097 - DNA, 25 bp, Artificial
  Probe
acaatgccatgtgctaagaatgatt

SEQ ID NO: 18098 - DNA, 25 bp, Artificial
  Probe
gtacaatgccatgtgctaagaatga

SEQ ID NO: 18099 - DNA, 25 bp, Artificial
  Probe
caatgtctgtgattccttcctaaag

SEQ ID NO: 18100 - DNA, 25 bp, Artificial
  Probe
tgattccttcctaaagccaaagttt

SEQ ID NO: 18101 - DNA, 25 bp, Artificial
  Probe
aatgtctgtgattccttcctaaagc

SEQ ID NO: 18102 - DNA, 25 bp, Artificial
  Probe
tcaatgtctgtgattccttcctaaa

SEQ ID NO: 18103 - DNA, 25 bp, Artificial
  Probe
gtgattccttcctaaagccaaagtt

SEQ ID NO: 18104 - DNA, 25 bp, Artificial
  Probe
ctgtgattccttcctaaagccaaag

SEQ ID NO: 18105 - DNA, 25 bp, Artificial
  Probe
aatgccatgtgctaagaatgatttc

SEQ ID NO: 18106 - DNA, 25 bp, Artificial
  Probe
caatgccatgtgctaagaatgattt

SEQ ID NO: 18107 - DNA, 25 bp, Artificial
  Probe
tctgtgattccttcctaaagccaaa

SEQ ID NO: 18108 - DNA, 25 bp, Artificial
  Probe
atgccatgtgctaagaatgatttca

SEQ ID NO: 18109 - DNA, 25 bp, Artificial
  Probe
tgtgattccttcctaaagccaaagt

SEQ ID NO: 18110 - DNA, 25 bp, Artificial
  Probe
atgtctgtgattccttcctaaagcc

SEQ ID NO: 18111 - DNA, 25 bp, Artificial
  Probe
gtctgtgattccttcctaaagccaa

SEQ ID NO: 18112 - DNA, 25 bp, Artificial
  Probe
tgtacaatgccatgtgctaagaatg

SEQ ID NO: 18113 - DNA, 25 bp, Artificial
  Probe
gtgtacaatgccatgtgctaagaat

SEQ ID NO: 18114 - DNA, 25 bp, Artificial
  Probe
tgtctgtgattccttcctaaagcca

SEQ ID NO: 18115 - DNA, 25 bp, Artificial
  Probe
gagtgatcgataatgctttctttgg

SEQ ID NO: 18116 - DNA, 25 bp, Artificial
  Probe
cgtgtacaatgccatgtgctaagaa

SEQ ID NO: 18117 - DNA, 25 bp, Artificial
  Probe
tacgagtgatcgataatgctttctt

SEQ ID NO: 18118 - DNA, 25 bp, Artificial
  Probe
atacgagtgatcgataatgctttct

SEQ ID NO: 18119 - DNA, 25 bp, Artificial
  Probe
cgagtgatcgataatgctttctttg

SEQ ID NO: 18120 - DNA, 25 bp, Artificial
  Probe
acgagtgatcgataatgctttcttt

SEQ ID NO: 18121 - DNA, 25 bp, Artificial
  Probe
tatacgagtgatcgataatgctttc

SEQ ID NO: 18122 - DNA, 25 bp, Artificial
  Probe
acaagatgaaacaacagaagaacaa

SEQ ID NO: 18123 - DNA, 25 bp, Artificial
  Probe
aacaagatgaaacaacagaagaaca

SEQ ID NO: 18124 - DNA, 25 bp, Artificial
  Probe
gaacaagatgaaacaacagaagaac

SEQ ID NO: 18125 - DNA, 25 bp, Artificial
  Probe
agaacaagatgaaacaacagaagaa

SEQ ID NO: 18126 - DNA, 25 bp, Artificial
  Probe
aagaacaagatgaaacaacagaaga

SEQ ID NO: 18127 - DNA, 25 bp, Artificial
  Probe
caagatgaaacaacagaagaacaat

SEQ ID NO: 18128 - DNA, 25 bp, Artificial
  Probe
aaagaacaagatgaaacaacagaag

SEQ ID NO: 18129 - DNA, 25 bp, Artificial
  Probe
tgaaacaacagaagaacaatatacg

SEQ ID NO: 18130 - DNA, 25 bp, Artificial
  Probe
gaaacaacagaagaacaatatacga

SEQ ID NO: 18131 - DNA, 25 bp, Artificial
  Probe
ttaccaggcgaagacaccaatagaa

SEQ ID NO: 18132 - DNA, 25 bp, Artificial
  Probe
ccaatagggagtcgaataagaaaca

SEQ ID NO: 18133 - DNA, 25 bp, Artificial
  Probe
atagggagtcgaataagaaacaacg

SEQ ID NO: 18134 - DNA, 25 bp, Artificial
  Probe
aatagggagtcgaataagaaacaac

SEQ ID NO: 18135 - DNA, 25 bp, Artificial
  Probe
caatagggagtcgaataagaaacaa

SEQ ID NO: 18136 - DNA, 25 bp, Artificial
  Probe
aacaacagaagaacaatatacgaaa

SEQ ID NO: 18137 - DNA, 25 bp, Artificial
  Probe
aaacaacagaagaacaatatacgaa

SEQ ID NO: 18138 - DNA, 25 bp, Artificial
  Probe
aagatgaaacaacagaagaacaata

SEQ ID NO: 18139 - DNA, 25 bp, Artificial
  Probe
agatgaaacaacagaagaacaatat

SEQ ID NO: 18140 - DNA, 25 bp, Artificial
  Probe
tagggagtcgaataagaaacaacgg

SEQ ID NO: 18141 - DNA, 25 bp, Artificial
  Probe
ctttaccaggcgaagacaccaatag

SEQ ID NO: 18142 - DNA, 25 bp, Artificial
  Probe
taccaggcgaagacaccaatagaaa

SEQ ID NO: 18143 - DNA, 25 bp, Artificial
  Probe
tttaccaggcgaagacaccaataga

SEQ ID NO: 18144 - DNA, 25 bp, Artificial
  Probe
aaaagaacaagatgaaacaacagaa

SEQ ID NO: 18145 - DNA, 25 bp, Artificial
  Probe
actttaccaggcgaagacaccaata

SEQ ID NO: 18146 - DNA, 25 bp, Artificial
  Probe
atgaaacaacagaagaacaatatac

SEQ ID NO: 18147 - DNA, 25 bp, Artificial
  Probe
cccaatagggagtcgaataagaaac

SEQ ID NO: 18148 - DNA, 25 bp, Artificial
  Probe
acaacagaagaacaatatacgaaaa

SEQ ID NO: 18149 - DNA, 25 bp, Artificial
  Probe
gatgaaacaacagaagaacaatata

SEQ ID NO: 18150 - DNA, 25 bp, Artificial
  Probe
gcccaatagggagtcgaataagaaa

SEQ ID NO: 18151 - DNA, 25 bp, Artificial
  Probe
accaggcgaagacaccaatagaaac

SEQ ID NO: 18152 - DNA, 25 bp, Artificial
  Probe
agggagtcgaataagaaacaacggg

SEQ ID NO: 18153 - DNA, 25 bp, Artificial
  Probe
cgaagacaccaatagaaacccaggg

SEQ ID NO: 18154 - DNA, 25 bp, Artificial
  Probe
gaagacaccaatagaaacccagggg

SEQ ID NO: 18155 - DNA, 25 bp, Artificial
  Probe
ggcccaatagggagtcgaataagaa

SEQ ID NO: 18156 - DNA, 25 bp, Artificial
  Probe
gttaatcactgtcctcagaagtcac

SEQ ID NO: 18157 - DNA, 25 bp, Artificial
  Probe
taatcactgtcctcagaagtcacat

SEQ ID NO: 18158 - DNA, 25 bp, Artificial
  Probe
ttaatcactgtcctcagaagtcaca

SEQ ID NO: 18159 - DNA, 25 bp, Artificial
  Probe
ccatctctggaacctataacttgaa

SEQ ID NO: 18160 - DNA, 25 bp, Artificial
  Probe
aatcactgtcctcagaagtcacatc

SEQ ID NO: 18161 - DNA, 25 bp, Artificial
  Probe
cgttaatcactgtcctcagaagtca

SEQ ID NO: 18162 - DNA, 25 bp, Artificial
  Probe
aaactctcaccaaggatctcatttc

SEQ ID NO: 18163 - DNA, 25 bp, Artificial
  Probe
caaactctcaccaaggatctcattt

SEQ ID NO: 18164 - DNA, 25 bp, Artificial
  Probe
acgttaatcactgtcctcagaagtc

SEQ ID NO: 18165 - DNA, 25 bp, Artificial
  Probe
cacgttaatcactgtcctcagaagt

SEQ ID NO: 18166 - DNA, 25 bp, Artificial
  Probe
acacgttaatcactgtcctcagaag

SEQ ID NO: 18167 - DNA, 25 bp, Artificial
  Probe
atcactgtcctcagaagtcacatcc

SEQ ID NO: 18168 - DNA, 25 bp, Artificial
  Probe
cacacgttaatcactgtcctcagaa

SEQ ID NO: 18169 - DNA, 25 bp, Artificial
  Probe
gcaaactctcaccaaggatctcatt

SEQ ID NO: 18170 - DNA, 25 bp, Artificial
  Probe
aactctcaccaaggatctcatttcc

SEQ ID NO: 18171 - DNA, 25 bp, Artificial
  Probe
tagatcccacacgttaatcactgtc

SEQ ID NO: 18172 - DNA, 25 bp, Artificial
  Probe
agcaaactctcaccaaggatctcat

SEQ ID NO: 18173 - DNA, 25 bp, Artificial
  Probe
tccatctctggaacctataacttga

SEQ ID NO: 18174 - DNA, 25 bp, Artificial
  Probe
gtccatctctggaacctataacttg

SEQ ID NO: 18175 - DNA, 25 bp, Artificial
  Probe
tgtccatctctggaacctataactt

SEQ ID NO: 18176 - DNA, 25 bp, Artificial
  Probe
aactgtccatctctggaacctataa

SEQ ID NO: 18177 - DNA, 25 bp, Artificial
  Probe
ctgtccatctctggaacctataact

SEQ ID NO: 18178 - DNA, 25 bp, Artificial
  Probe
actgtccatctctggaacctataac

SEQ ID NO: 18179 - DNA, 25 bp, Artificial
  Probe
ccacacgttaatcactgtcctcaga

SEQ ID NO: 18180 - DNA, 25 bp, Artificial
  Probe
actctcaccaaggatctcatttccc

SEQ ID NO: 18181 - DNA, 25 bp, Artificial
  Probe
gagcaaactctcaccaaggatctca

SEQ ID NO: 18182 - DNA, 25 bp, Artificial
  Probe
actgtcctcagaagtcacatccctt

SEQ ID NO: 18183 - DNA, 25 bp, Artificial
  Probe
ggagcaaactctcaccaaggatctc

SEQ ID NO: 18184 - DNA, 25 bp, Artificial
  Probe
ctctcaccaaggatctcatttcccg

SEQ ID NO: 18185 - DNA, 25 bp, Artificial
  Probe
atcccacacgttaatcactgtcctc

SEQ ID NO: 18186 - DNA, 25 bp, Artificial
  Probe
gatcccacacgttaatcactgtcct

SEQ ID NO: 18187 - DNA, 25 bp, Artificial
  Probe
agatcccacacgttaatcactgtcc

SEQ ID NO: 18188 - DNA, 25 bp, Artificial
  Probe
ctgggtgctgatgatggattacctg

SEQ ID NO: 18189 - DNA, 25 bp, Artificial
  Probe
ctggagcaaactctcaccaaggatc

SEQ ID NO: 18190 - DNA, 25 bp, Artificial
  Probe
cccacacgttaatcactgtcctcag

SEQ ID NO: 18191 - DNA, 25 bp, Artificial
  Probe
tggatcgggtccccttcctaataat

SEQ ID NO: 18192 - DNA, 25 bp, Artificial
  Probe
ccctgagattgtaaactatgaacca

SEQ ID NO: 18193 - DNA, 25 bp, Artificial
  Probe
cctgagattgtaaactatgaaccac

SEQ ID NO: 18194 - DNA, 25 bp, Artificial
  Probe
gattgtaaactatgaaccacttggc

SEQ ID NO: 18195 - DNA, 25 bp, Artificial
  Probe
attgtaaactatgaaccacttggct

SEQ ID NO: 18196 - DNA, 25 bp, Artificial
  Probe
ttgtaaactatgaaccacttggctt

SEQ ID NO: 18197 - DNA, 25 bp, Artificial
  Probe
ctgagattgtaaactatgaaccact

SEQ ID NO: 18198 - DNA, 25 bp, Artificial
  Probe
agattgtaaactatgaaccacttgg

SEQ ID NO: 18199 - DNA, 25 bp, Artificial
  Probe
tgtaaactatgaaccacttggcttg

SEQ ID NO: 18200 - DNA, 25 bp, Artificial
  Probe
tgagattgtaaactatgaaccactt

SEQ ID NO: 18201 - DNA, 25 bp, Artificial
  Probe
gagattgtaaactatgaaccacttg

SEQ ID NO: 18202 - DNA, 25 bp, Artificial
  Probe
aggacgttgaggaccattatgagat

SEQ ID NO: 18203 - DNA, 25 bp, Artificial
  Probe
aactatgaaccacttggcttggaag

SEQ ID NO: 18204 - DNA, 25 bp, Artificial
  Probe
ggacgttgaggaccattatgagatg

SEQ ID NO: 18205 - DNA, 25 bp, Artificial
  Probe
gtaaactatgaaccacttggcttgg

SEQ ID NO: 18206 - DNA, 25 bp, Artificial
  Probe
taaactatgaaccacttggcttgga

SEQ ID NO: 18207 - DNA, 25 bp, Artificial
  Probe
cccctgagattgtaaactatgaacc

SEQ ID NO: 18208 - DNA, 25 bp, Artificial
  Probe
gaacaagacagatgtggtgctgatc

SEQ ID NO: 18209 - DNA, 25 bp, Artificial
  Probe
cattatgagatgggagaggagcttg

SEQ ID NO: 18210 - DNA, 25 bp, Artificial
  Probe
gcccctgagattgtaaactatgaac

SEQ ID NO: 18211 - DNA, 25 bp, Artificial
  Probe
cattaagctcatcgactttggcatc

SEQ ID NO: 18212 - DNA, 25 bp, Artificial
  Probe
agaacaagacagatgtggtgctgat

SEQ ID NO: 18213 - DNA, 25 bp, Artificial
  Probe
gaaggagtcactgacagaggatgag

SEQ ID NO: 18214 - DNA, 25 bp, Artificial
  Probe
gagaaggagtcactgacagaggatg

SEQ ID NO: 18215 - DNA, 25 bp, Artificial
  Probe
aaactatgaaccacttggcttggaa

SEQ ID NO: 18216 - DNA, 25 bp, Artificial
  Probe
gttcgagaacaagacagatgtggtg

SEQ ID NO: 18217 - DNA, 25 bp, Artificial
  Probe
gtagcgagttcaagaacatctttgg

SEQ ID NO: 18218 - DNA, 25 bp, Artificial
  Probe
ggtagcgagttcaagaacatctttg

SEQ ID NO: 18219 - DNA, 25 bp, Artificial
  Probe
agaaggagtcactgacagaggatga

SEQ ID NO: 18220 - DNA, 25 bp, Artificial
  Probe
tgagaaggagtcactgacagaggat

SEQ ID NO: 18221 - DNA, 25 bp, Artificial
  Probe
gatgtgttcgagaacaagacagatg

SEQ ID NO: 18222 - DNA, 25 bp, Artificial
  Probe
attatgagatgggagaggagcttgg

SEQ ID NO: 18223 - DNA, 25 bp, Artificial
  Probe
cgcccctgagattgtaaactatgaa

SEQ ID NO: 18224 - DNA, 25 bp, Artificial
  Probe
cttggaagctgatatgtggagcatc

SEQ ID NO: 18225 - DNA, 25 bp, Artificial
  Probe
gagaacaagacagatgtggtgctga

SEQ ID NO: 18226 - DNA, 25 bp, Artificial
  Probe
aacaagacagatgtggtgctgatct

SEQ ID NO: 18227 - DNA, 25 bp, Artificial
  Probe
atgtgttcgagaacaagacagatgt

SEQ ID NO: 18228 - DNA, 25 bp, Artificial
  Probe
acaagacagatgtggtgctgatctt

SEQ ID NO: 18229 - DNA, 25 bp, Artificial
  Probe
ctgagaaggagtcactgacagagga

SEQ ID NO: 18230 - DNA, 25 bp, Artificial
  Probe
gtcgcccctgagattgtaaactatg

SEQ ID NO: 18231 - DNA, 25 bp, Artificial
  Probe
tcgcccctgagattgtaaactatga

SEQ ID NO: 18232 - DNA, 25 bp, Artificial
  Probe
cggtagcgagttcaagaacatcttt

SEQ ID NO: 18233 - DNA, 25 bp, Artificial
  Probe
cacttggcttggaagctgatatgtg

SEQ ID NO: 18234 - DNA, 25 bp, Artificial
  Probe
cgatgtgttcgagaacaagacagat

SEQ ID NO: 18235 - DNA, 25 bp, Artificial
  Probe
tagcgagttcaagaacatctttggc

SEQ ID NO: 18236 - DNA, 25 bp, Artificial
  Probe
tgtgttcgagaacaagacagatgtg

SEQ ID NO: 18237 - DNA, 25 bp, Artificial
  Probe
atgatgaactgtactaccaatcctg

SEQ ID NO: 18238 - DNA, 25 bp, Artificial
  Probe
gcaatgatgaactgtactaccaatc

SEQ ID NO: 18239 - DNA, 25 bp, Artificial
  Probe
caatgatgaactgtactaccaatcc

SEQ ID NO: 18240 - DNA, 25 bp, Artificial
  Probe
gagatgatgacctacttcctcaatg

SEQ ID NO: 18241 - DNA, 25 bp, Artificial
  Probe
aatgatgaactgtactaccaatcct

SEQ ID NO: 18242 - DNA, 25 bp, Artificial
  Probe
cgcaatgatgaactgtactaccaat

SEQ ID NO: 18243 - DNA, 25 bp, Artificial
  Probe
agatgatgacctacttcctcaatgg

SEQ ID NO: 18244 - DNA, 25 bp, Artificial
  Probe
aatgaagtacatcaatgagcactcc

SEQ ID NO: 18245 - DNA, 25 bp, Artificial
  Probe
tacatcaatgagcactccttcaaca

SEQ ID NO: 18246 - DNA, 25 bp, Artificial
  Probe
atgaagtacatcaatgagcactcct

SEQ ID NO: 18247 - DNA, 25 bp, Artificial
  Probe
cgcatccaggttactacagatatgt

SEQ ID NO: 18248 - DNA, 25 bp, Artificial
  Probe
ccgcatccaggttactacagatatg

SEQ ID NO: 18249 - DNA, 25 bp, Artificial
  Probe
gtacatcaatgagcactccttcaac

SEQ ID NO: 18250 - DNA, 25 bp, Artificial
  Probe
agtacatcaatgagcactccttcaa

SEQ ID NO: 18251 - DNA, 25 bp, Artificial
  Probe
aagtacatcaatgagcactccttca

SEQ ID NO: 18252 - DNA, 25 bp, Artificial
  Probe
tgaagtacatcaatgagcactcctt

SEQ ID NO: 18253 - DNA, 25 bp, Artificial
  Probe
tgatgaactgtactaccaatcctgc

SEQ ID NO: 18254 - DNA, 25 bp, Artificial
  Probe
atgatgacctacttcctcaatggag

SEQ ID NO: 18255 - DNA, 25 bp, Artificial
  Probe
gatgatgacctacttcctcaatgga

SEQ ID NO: 18256 - DNA, 25 bp, Artificial
  Probe
caatgagcactccttcaacaacttc

SEQ ID NO: 18257 - DNA, 25 bp, Artificial
  Probe
cactccttcaacaacttccagatga

SEQ ID NO: 18258 - DNA, 25 bp, Artificial
  Probe
atcaatgagcactccttcaacaact

SEQ ID NO: 18259 - DNA, 25 bp, Artificial
  Probe
catcaatgagcactccttcaacaac

SEQ ID NO: 18260 - DNA, 25 bp, Artificial
  Probe
gcatccaggttactacagatatgta

SEQ ID NO: 18261 - DNA, 25 bp, Artificial
  Probe
tccaggttactacagatatgtacca

SEQ ID NO: 18262 - DNA, 25 bp, Artificial
  Probe
tcaatgagcactccttcaacaactt

SEQ ID NO: 18263 - DNA, 25 bp, Artificial
  Probe
acatcaatgagcactccttcaacaa

SEQ ID NO: 18264 - DNA, 25 bp, Artificial
  Probe
atccaggttactacagatatgtacc

SEQ ID NO: 18265 - DNA, 25 bp, Artificial
  Probe
caaatgaagtacatcaatgagcact

SEQ ID NO: 18266 - DNA, 25 bp, Artificial
  Probe
ggaccaaatgaagtacatcaatgag

SEQ ID NO: 18267 - DNA, 25 bp, Artificial
  Probe
aaatgaagtacatcaatgagcactc

SEQ ID NO: 18268 - DNA, 25 bp, Artificial
  Probe
tggaccaaatgaagtacatcaatga

SEQ ID NO: 18269 - DNA, 25 bp, Artificial
  Probe
atggaccaaatgaagtacatcaatg

SEQ ID NO: 18270 - DNA, 25 bp, Artificial
  Probe
gaccaaatgaagtacatcaatgagc

SEQ ID NO: 18271 - DNA, 25 bp, Artificial
  Probe
ccaaatgaagtacatcaatgagcac

SEQ ID NO: 18272 - DNA, 25 bp, Artificial
  Probe
gatgaactgtactaccaatcctgcg

SEQ ID NO: 18273 - DNA, 25 bp, Artificial
  Probe
cacagaagagaaggaggagatggag

SEQ ID NO: 18274 - DNA, 25 bp, Artificial
  Probe
accaaatgaagtacatcaatgagca

SEQ ID NO: 18275 - DNA, 25 bp, Artificial
  Probe
ttctacttggactcagaagcaactt

SEQ ID NO: 18276 - DNA, 25 bp, Artificial
  Probe
catccaggttactacagatatgtac

SEQ ID NO: 18277 - DNA, 25 bp, Artificial
  Probe
aatgagcactccttcaacaacttcc

SEQ ID NO: 18278 - DNA, 25 bp, Artificial
  Probe
cttaacattggacctgtagtggctg

SEQ ID NO: 18279 - DNA, 25 bp, Artificial
  Probe
accgcatccaggttactacagatat

SEQ ID NO: 18280 - DNA, 25 bp, Artificial
  Probe
atgaactgtactaccaatcctgcga

SEQ ID NO: 18281 - DNA, 25 bp, Artificial
  Probe
cagatgaagatcgggcttaacattg

SEQ ID NO: 18282 - DNA, 25 bp, Artificial
  Probe
caggaccgctactacaattcatcat

SEQ ID NO: 18283 - DNA, 25 bp, Artificial
  Probe
ccagcagcagaataaatatgagaac

SEQ ID NO: 18284 - DNA, 25 bp, Artificial
  Probe
taaatatgagaactacagcaccagc

SEQ ID NO: 18285 - DNA, 25 bp, Artificial
  Probe
cttcttcatcagggacatcatcaaa

SEQ ID NO: 18286 - DNA, 25 bp, Artificial
  Probe
cagcagcagaataaatatgagaact

SEQ ID NO: 18287 - DNA, 25 bp, Artificial
  Probe
cccagcagcagaataaatatgagaa

SEQ ID NO: 18288 - DNA, 25 bp, Artificial
  Probe
ttcttcatcagggacatcatcaaac

SEQ ID NO: 18289 - DNA, 25 bp, Artificial
  Probe
aggaccgctactacaattcatcatg

SEQ ID NO: 18290 - DNA, 25 bp, Artificial
  Probe
ataaatatgagaactacagcaccag

SEQ ID NO: 18291 - DNA, 25 bp, Artificial
  Probe
aataaatatgagaactacagcacca

SEQ ID NO: 18292 - DNA, 25 bp, Artificial
  Probe
gcagaataaatatgagaactacagc

SEQ ID NO: 18293 - DNA, 25 bp, Artificial
  Probe
gcagcagaataaatatgagaactac

SEQ ID NO: 18294 - DNA, 25 bp, Artificial
  Probe
agcagcagaataaatatgagaacta

SEQ ID NO: 18295 - DNA, 25 bp, Artificial
  Probe
tgaagtttaacatcaagagcagcag

SEQ ID NO: 18296 - DNA, 25 bp, Artificial
  Probe
aacacggacttgaagtttaacatca

SEQ ID NO: 18297 - DNA, 25 bp, Artificial
  Probe
gaataaatatgagaactacagcacc

SEQ ID NO: 18298 - DNA, 25 bp, Artificial
  Probe
tcttcatcagggacatcatcaaacc

SEQ ID NO: 18299 - DNA, 25 bp, Artificial
  Probe
ctactacaattcatcatgcagcaaa

SEQ ID NO: 18300 - DNA, 25 bp, Artificial
  Probe
gaaggagacagaggaggagtgtaac

SEQ ID NO: 18301 - DNA, 25 bp, Artificial
  Probe
gtgaaacctttgaagaactctcagg

SEQ ID NO: 18302 - DNA, 25 bp, Artificial
  Probe
gcttcttcatcagggacatcatcaa

SEQ ID NO: 18303 - DNA, 25 bp, Artificial
  Probe
ttaacatcaagagcagcagcagttc

SEQ ID NO: 18304 - DNA, 25 bp, Artificial
  Probe
tactacaattcatcatgcagcaaat

SEQ ID NO: 18305 - DNA, 25 bp, Artificial
  Probe
gcccagcagcagaataaatatgaga

SEQ ID NO: 18306 - DNA, 25 bp, Artificial
  Probe
actacaattcatcatgcagcaaatg

SEQ ID NO: 18307 - DNA, 25 bp, Artificial
  Probe
gaagtttaacatcaagagcagcagc

SEQ ID NO: 18308 - DNA, 25 bp, Artificial
  Probe
ggtgaaacctttgaagaactctcag

SEQ ID NO: 18309 - DNA, 25 bp, Artificial
  Probe
ctacaattcatcatgcagcaaatgg

SEQ ID NO: 18310 - DNA, 25 bp, Artificial
  Probe
accgctactacaattcatcatgcag

SEQ ID NO: 18311 - DNA, 25 bp, Artificial
  Probe
gaccgctactacaattcatcatgca

SEQ ID NO: 18312 - DNA, 25 bp, Artificial
  Probe
ggaccgctactacaattcatcatgc

SEQ ID NO: 18313 - DNA, 25 bp, Artificial
  Probe
aatatgagaactacagcaccagctt

SEQ ID NO: 18314 - DNA, 25 bp, Artificial
  Probe
tgaaccaaagggactacgagaagta

SEQ ID NO: 18315 - DNA, 25 bp, Artificial
  Probe
tacaattcatcatgcagcaaatgga

SEQ ID NO: 18316 - DNA, 25 bp, Artificial
  Probe
aaacacggacttgaagtttaacatc

SEQ ID NO: 18317 - DNA, 25 bp, Artificial
  Probe
gaaacacggacttgaagtttaacat

SEQ ID NO: 18318 - DNA, 25 bp, Artificial
  Probe
agaataaatatgagaactacagcac

SEQ ID NO: 18319 - DNA, 25 bp, Artificial
  Probe
cagaataaatatgagaactacagca

SEQ ID NO: 18320 - DNA, 25 bp, Artificial
  Probe
cagcagaataaatatgagaactaca

SEQ ID NO: 18321 - DNA, 25 bp, Artificial
  Probe
gaaccaaagggactacgagaagtac

SEQ ID NO: 18322 - DNA, 25 bp, Artificial
  Probe
cagaaacacggacttgaagtttaac

SEQ ID NO: 18323 - DNA, 25 bp, Artificial
  Probe
gctactacaattcatcatgcagcaa

SEQ ID NO: 18324 - DNA, 25 bp, Artificial
  Probe
atatgagaactacagcaccagcttc

SEQ ID NO: 18325 - DNA, 25 bp, Artificial
  Probe
agaaacacggacttgaagtttaaca

SEQ ID NO: 18326 - DNA, 25 bp, Artificial
  Probe
acagaaacacggacttgaagtttaa

SEQ ID NO: 18327 - DNA, 25 bp, Artificial
  Probe
tgaggataccacagaagagacatta

SEQ ID NO: 18328 - DNA, 25 bp, Artificial
  Probe
ggataccacagaagagacattaagg

SEQ ID NO: 18329 - DNA, 25 bp, Artificial
  Probe
gaggataccacagaagagacattaa

SEQ ID NO: 18330 - DNA, 25 bp, Artificial
  Probe
aggataccacagaagagacattaag

SEQ ID NO: 18331 - DNA, 25 bp, Artificial
  Probe
ctgaggataccacagaagagacatt

SEQ ID NO: 18332 - DNA, 25 bp, Artificial
  Probe
tggaagatggtgaaatagatggaaa

SEQ ID NO: 18333 - DNA, 25 bp, Artificial
  Probe
ggaagatggtgaaatagatggaaac

SEQ ID NO: 18334 - DNA, 25 bp, Artificial
  Probe
atggaagatggtgaaatagatggaa

SEQ ID NO: 18335 - DNA, 25 bp, Artificial
  Probe
gataccacagaagagacattaaggg

SEQ ID NO: 18336 - DNA, 25 bp, Artificial
  Probe
ataccacagaagagacattaaggga

SEQ ID NO: 18337 - DNA, 25 bp, Artificial
  Probe
gaagatggtgaaatagatggaaaca

SEQ ID NO: 18338 - DNA, 25 bp, Artificial
  Probe
atggtgaaatagatggaaacaaagt

SEQ ID NO: 18339 - DNA, 25 bp, Artificial
  Probe
aggaaagaagacgaagtttgaataa

SEQ ID NO: 18340 - DNA, 25 bp, Artificial
  Probe
taccacagaagagacattaagggag

SEQ ID NO: 18341 - DNA, 25 bp, Artificial
  Probe
agatggaaacaaagttactctggac

SEQ ID NO: 18342 - DNA, 25 bp, Artificial
  Probe
tagatggaaacaaagttactctgga

SEQ ID NO: 18343 - DNA, 25 bp, Artificial
  Probe
agatggtgaaatagatggaaacaaa

SEQ ID NO: 18344 - DNA, 25 bp, Artificial
  Probe
aagatggtgaaatagatggaaacaa

SEQ ID NO: 18345 - DNA, 25 bp, Artificial
  Probe
tggtgaaatagatggaaacaaagtt

SEQ ID NO: 18346 - DNA, 25 bp, Artificial
  Probe
gatggtgaaatagatggaaacaaag

SEQ ID NO: 18347 - DNA, 25 bp, Artificial
  Probe
gatggaaacaaagttactctggact

SEQ ID NO: 18348 - DNA, 25 bp, Artificial
  Probe
atggaaacaaagttactctggactg

SEQ ID NO: 18349 - DNA, 25 bp, Artificial
  Probe
atagatggaaacaaagttactctgg

SEQ ID NO: 18350 - DNA, 25 bp, Artificial
  Probe
ctttgtagacttcaacagtgaggaa

SEQ ID NO: 18351 - DNA, 25 bp, Artificial
  Probe
catggaagatggtgaaatagatgga

SEQ ID NO: 18352 - DNA, 25 bp, Artificial
  Probe
agaagagacattaagggagtcattc

SEQ ID NO: 18353 - DNA, 25 bp, Artificial
  Probe
cagaagagacattaagggagtcatt

SEQ ID NO: 18354 - DNA, 25 bp, Artificial
  Probe
acagaagagacattaagggagtcat

SEQ ID NO: 18355 - DNA, 25 bp, Artificial
  Probe
gaagagacattaagggagtcattcg

SEQ ID NO: 18356 - DNA, 25 bp, Artificial
  Probe
gtagacttcaacagtgaggaagatg

SEQ ID NO: 18357 - DNA, 25 bp, Artificial
  Probe
tttggctttgtagacttcaacagtg

SEQ ID NO: 18358 - DNA, 25 bp, Artificial
  Probe
gtttggctttgtagacttcaacagt

SEQ ID NO: 18359 - DNA, 25 bp, Artificial
  Probe
cacagaagagacattaagggagtca

SEQ ID NO: 18360 - DNA, 25 bp, Artificial
  Probe
tgtagacttcaacagtgaggaagat

SEQ ID NO: 18361 - DNA, 25 bp, Artificial
  Probe
ggtgaaatagatggaaacaaagtta

SEQ ID NO: 18362 - DNA, 25 bp, Artificial
  Probe
ttgtagacttcaacagtgaggaaga

SEQ ID NO: 18363 - DNA, 25 bp, Artificial
  Probe
accacagaagagacattaagggagt

SEQ ID NO: 18364 - DNA, 25 bp, Artificial
  Probe
tggaaacaaagttactctggactgg

SEQ ID NO: 18365 - DNA, 25 bp, Artificial
  Probe
aagggtttggctttgtagacttcaa

SEQ ID NO: 18366 - DNA, 25 bp, Artificial
  Probe
ccacagaagagacattaagggagtc

SEQ ID NO: 18367 - DNA, 25 bp, Artificial
  Probe
ttggctttgtagacttcaacagtga

SEQ ID NO: 18368 - DNA, 25 bp, Artificial
  Probe
ggtttggctttgtagacttcaacag

SEQ ID NO: 18369 - DNA, 25 bp, Artificial
  Probe
aatagatggaaacaaagttactctg

SEQ ID NO: 18370 - DNA, 25 bp, Artificial
  Probe
gctttgtagacttcaacagtgagga

SEQ ID NO: 18371 - DNA, 25 bp, Artificial
  Probe
caaaatggcaaatcaaaagggtatg

SEQ ID NO: 18372 - DNA, 25 bp, Artificial
  Probe
cagtcctgagttcatcattctctac

SEQ ID NO: 18373 - DNA, 25 bp, Artificial
  Probe
ccttgaagagacacaatgacaacaa

SEQ ID NO: 18374 - DNA, 25 bp, Artificial
  Probe
agtcctgagttcatcattctctacc

SEQ ID NO: 18375 - DNA, 25 bp, Artificial
  Probe
gttgttctcttatccagatgctgaa

SEQ ID NO: 18376 - DNA, 25 bp, Artificial
  Probe
tcagtcctgagttcatcattctcta

SEQ ID NO: 18377 - DNA, 25 bp, Artificial
  Probe
aacttggttgttctcttatccagat

SEQ ID NO: 18378 - DNA, 25 bp, Artificial
  Probe
tccttgaagagacacaatgacaaca

SEQ ID NO: 18379 - DNA, 25 bp, Artificial
  Probe
acttggttgttctcttatccagatg

SEQ ID NO: 18380 - DNA, 25 bp, Artificial
  Probe
gtccttgaagagacacaatgacaac

SEQ ID NO: 18381 - DNA, 25 bp, Artificial
  Probe
agtccttgaagagacacaatgacaa

SEQ ID NO: 18382 - DNA, 25 bp, Artificial
  Probe
ctgggaatatactctgagatttgct

SEQ ID NO: 18383 - DNA, 25 bp, Artificial
  Probe
tgggaatatactctgagatttgctt

SEQ ID NO: 18384 - DNA, 25 bp, Artificial
  Probe
gtcagtcctgagttcatcattctct

SEQ ID NO: 18385 - DNA, 25 bp, Artificial
  Probe
tctgggaatatactctgagatttgc

SEQ ID NO: 18386 - DNA, 25 bp, Artificial
  Probe
cttggttgttctcttatccagatgc

SEQ ID NO: 18387 - DNA, 25 bp, Artificial
  Probe
ggttgttctcttatccagatgctga

SEQ ID NO: 18388 - DNA, 25 bp, Artificial
  Probe
ctgtcagtcctgagttcatcattct

SEQ ID NO: 18389 - DNA, 25 bp, Artificial
  Probe
cttgaagagacacaatgacaacaaa

SEQ ID NO: 18390 - DNA, 25 bp, Artificial
  Probe
tgtcagtcctgagttcatcattctc

SEQ ID NO: 18391 - DNA, 25 bp, Artificial
  Probe
gggaatatactctgagatttgcttt

SEQ ID NO: 18392 - DNA, 25 bp, Artificial
  Probe
ttggttgttctcttatccagatgct

SEQ ID NO: 18393 - DNA, 25 bp, Artificial
  Probe
acctctgggaatatactctgagatt

SEQ ID NO: 18394 - DNA, 25 bp, Artificial
  Probe
cacctctgggaatatactctgagat

SEQ ID NO: 18395 - DNA, 25 bp, Artificial
  Probe
ctgagttcatcattctctacccaag

SEQ ID NO: 18396 - DNA, 25 bp, Artificial
  Probe
cctctgggaatatactctgagattt

SEQ ID NO: 18397 - DNA, 25 bp, Artificial
  Probe
cagtccttgaagagacacaatgaca

SEQ ID NO: 18398 - DNA, 25 bp, Artificial
  Probe
gatttgctttataactctgggcttc

SEQ ID NO: 18399 - DNA, 25 bp, Artificial
  Probe
tctcttatccagatgctgaaacatt

SEQ ID NO: 18400 - DNA, 25 bp, Artificial
  Probe
ttctcttatccagatgctgaaacat

SEQ ID NO: 18401 - DNA, 25 bp, Artificial
  Probe
ttgttctcttatccagatgctgaaa

SEQ ID NO: 18402 - DNA, 25 bp, Artificial
  Probe
tatccagatgctgaaacattatccc

SEQ ID NO: 18403 - DNA, 25 bp, Artificial
  Probe
gttctcttatccagatgctgaaaca

SEQ ID NO: 18404 - DNA, 25 bp, Artificial
  Probe
tgttctcttatccagatgctgaaac

SEQ ID NO: 18405 - DNA, 25 bp, Artificial
  Probe
agatttgctttataactctgggctt

SEQ ID NO: 18406 - DNA, 25 bp, Artificial
  Probe
tggttgttctcttatccagatgctg

SEQ ID NO: 18407 - DNA, 25 bp, Artificial
  Probe
ttatccagatgctgaaacattatcc

SEQ ID NO: 18408 - DNA, 25 bp, Artificial
  Probe
cctgtcagtcctgagttcatcattc

SEQ ID NO: 18409 - DNA, 25 bp, Artificial
  Probe
atttgctttataactctgggcttcc

SEQ ID NO: 18410 - DNA, 25 bp, Artificial
  Probe
ctctgggaatatactctgagatttg

SEQ ID NO: 18411 - DNA, 25 bp, Artificial
  Probe
tgagttcatcattctctacccaagg

SEQ ID NO: 18412 - DNA, 25 bp, Artificial
  Probe
cctgagttcatcattctctacccaa

SEQ ID NO: 18413 - DNA, 25 bp, Artificial
  Probe
ctcttatccagatgctgaaacatta

SEQ ID NO: 18414 - DNA, 25 bp, Artificial
  Probe
ctgagatttgctttataactctggg

SEQ ID NO: 18415 - DNA, 25 bp, Artificial
  Probe
ccagtccttgaagagacacaatgac

SEQ ID NO: 18416 - DNA, 25 bp, Artificial
  Probe
gagatttgctttataactctgggct

SEQ ID NO: 18417 - DNA, 25 bp, Artificial
  Probe
ggactaagacataaggaagaggcta

SEQ ID NO: 18418 - DNA, 25 bp, Artificial
  Probe
gactaagacataaggaagaggctag

SEQ ID NO: 18419 - DNA, 25 bp, Artificial
  Probe
ccaggactaagacataaggaagagg

SEQ ID NO: 18420 - DNA, 25 bp, Artificial
  Probe
caggactaagacataaggaagaggc

SEQ ID NO: 18421 - DNA, 25 bp, Artificial
  Probe
aggactaagacataaggaagaggct

SEQ ID NO: 18422 - DNA, 25 bp, Artificial
  Probe
cttctcatcactcctcagtctagtc

SEQ ID NO: 18423 - DNA, 25 bp, Artificial
  Probe
ttctcatcactcctcagtctagtct

SEQ ID NO: 18424 - DNA, 25 bp, Artificial
  Probe
gggagagacagaccaataaagtatt

SEQ ID NO: 18425 - DNA, 25 bp, Artificial
  Probe
ccagcaataatttgtgaaggagtaa

SEQ ID NO: 18426 - DNA, 25 bp, Artificial
  Probe
tctcatcactcctcagtctagtctg

SEQ ID NO: 18427 - DNA, 25 bp, Artificial
  Probe
cccaggactaagacataaggaagag

SEQ ID NO: 18428 - DNA, 25 bp, Artificial
  Probe
tagcttctcatcactcctcagtcta

SEQ ID NO: 18429 - DNA, 25 bp, Artificial
  Probe
cccagcaataatttgtgaaggagta

SEQ ID NO: 18430 - DNA, 25 bp, Artificial
  Probe
tacccagcaataatttgtgaaggag

SEQ ID NO: 18431 - DNA, 25 bp, Artificial
  Probe
gacccaggactaagacataaggaag

SEQ ID NO: 18432 - DNA, 25 bp, Artificial
  Probe
acccaggactaagacataaggaaga

SEQ ID NO: 18433 - DNA, 25 bp, Artificial
  Probe
gcttctcatcactcctcagtctagt

SEQ ID NO: 18434 - DNA, 25 bp, Artificial
  Probe
atctacccattgatcctctcttcag

SEQ ID NO: 18435 - DNA, 25 bp, Artificial
  Probe
gtacccagcaataatttgtgaagga

SEQ ID NO: 18436 - DNA, 25 bp, Artificial
  Probe
agcaataatttgtgaaggagtaaac

SEQ ID NO: 18437 - DNA, 25 bp, Artificial
  Probe
cagcaataatttgtgaaggagtaaa

SEQ ID NO: 18438 - DNA, 25 bp, Artificial
  Probe
catctacccattgatcctctcttca

SEQ ID NO: 18439 - DNA, 25 bp, Artificial
  Probe
gcaataatttgtgaaggagtaaaca

SEQ ID NO: 18440 - DNA, 25 bp, Artificial
  Probe
tgggagagacagaccaataaagtat

SEQ ID NO: 18441 - DNA, 25 bp, Artificial
  Probe
agcttctcatcactcctcagtctag

SEQ ID NO: 18442 - DNA, 25 bp, Artificial
  Probe
ctagcttctcatcactcctcagtct

SEQ ID NO: 18443 - DNA, 25 bp, Artificial
  Probe
ctgggagagacagaccaataaagta

SEQ ID NO: 18444 - DNA, 25 bp, Artificial
  Probe
ggacccaggactaagacataaggaa

SEQ ID NO: 18445 - DNA, 25 bp, Artificial
  Probe
acccagcaataatttgtgaaggagt

SEQ ID NO: 18446 - DNA, 25 bp, Artificial
  Probe
gcatctacccattgatcctctcttc

SEQ ID NO: 18447 - DNA, 25 bp, Artificial
  Probe
ataatttgtgaaggagtaaacatgc

SEQ ID NO: 18448 - DNA, 25 bp, Artificial
  Probe
ctaggaaatgcaaggagctgttatc

SEQ ID NO: 18449 - DNA, 25 bp, Artificial
  Probe
taatttgtgaaggagtaaacatgca

SEQ ID NO: 18450 - DNA, 25 bp, Artificial
  Probe
tcatcactcctcagtctagtctgat

SEQ ID NO: 18451 - DNA, 25 bp, Artificial
  Probe
tctacccattgatcctctcttcagg

SEQ ID NO: 18452 - DNA, 25 bp, Artificial
  Probe
cattgatcctctcttcaggcttgga

SEQ ID NO: 18453 - DNA, 25 bp, Artificial
  Probe
ctcatcactcctcagtctagtctga

SEQ ID NO: 18454 - DNA, 25 bp, Artificial
  Probe
tctggacccaggactaagacataag

SEQ ID NO: 18455 - DNA, 25 bp, Artificial
  Probe
ctctggacccaggactaagacataa

SEQ ID NO: 18456 - DNA, 25 bp, Artificial
  Probe
tggacccaggactaagacataagga

SEQ ID NO: 18457 - DNA, 25 bp, Artificial
  Probe
tgcatctacccattgatcctctctt

SEQ ID NO: 18458 - DNA, 25 bp, Artificial
  Probe
atcactcctcagtctagtctgatgg

SEQ ID NO: 18459 - DNA, 25 bp, Artificial
  Probe
gagacagaccaataaagtattgtgc

SEQ ID NO: 18460 - DNA, 25 bp, Artificial
  Probe
cctgggagagacagaccaataaagt

SEQ ID NO: 18461 - DNA, 25 bp, Artificial
  Probe
caggctgcacctaaatttctgaaag

SEQ ID NO: 18462 - DNA, 25 bp, Artificial
  Probe
gaaggcaggtataggatagaatgag

SEQ ID NO: 18463 - DNA, 25 bp, Artificial
  Probe
tgaaggcaggtataggatagaatga

SEQ ID NO: 18464 - DNA, 25 bp, Artificial
  Probe
gtgaaggcaggtataggatagaatg

SEQ ID NO: 18465 - DNA, 25 bp, Artificial
  Probe
atcagaggttattgtgttgtgtgtt

SEQ ID NO: 18466 - DNA, 25 bp, Artificial
  Probe
aaggcaggtataggatagaatgagg

SEQ ID NO: 18467 - DNA, 25 bp, Artificial
  Probe
ggtgaaggcaggtataggatagaat

SEQ ID NO: 18468 - DNA, 25 bp, Artificial
  Probe
agaggttattgtgttgtgtgttctt

SEQ ID NO: 18469 - DNA, 25 bp, Artificial
  Probe
tcagaggttattgtgttgtgtgttc

SEQ ID NO: 18470 - DNA, 25 bp, Artificial
  Probe
attggatcagaggttattgtgttgt

SEQ ID NO: 18471 - DNA, 25 bp, Artificial
  Probe
tacaggtgaaggcaggtataggata

SEQ ID NO: 18472 - DNA, 25 bp, Artificial
  Probe
cagaggttattgtgttgtgtgttct

SEQ ID NO: 18473 - DNA, 25 bp, Artificial
  Probe
gatcagaggttattgtgttgtgtgt

SEQ ID NO: 18474 - DNA, 25 bp, Artificial
  Probe
ttggatcagaggttattgtgttgtg

SEQ ID NO: 18475 - DNA, 25 bp, Artificial
  Probe
tattggatcagaggttattgtgttg

SEQ ID NO: 18476 - DNA, 25 bp, Artificial
  Probe
aggtgaaggcaggtataggatagaa

SEQ ID NO: 18477 - DNA, 25 bp, Artificial
  Probe
gatgtcattatacaggtgaaggcag

SEQ ID NO: 18478 - DNA, 25 bp, Artificial
  Probe
gtcattatacaggtgaaggcaggta

SEQ ID NO: 18479 - DNA, 25 bp, Artificial
  Probe
atgatgtcattatacaggtgaaggc

SEQ ID NO: 18480 - DNA, 25 bp, Artificial
  Probe
aggatgatgtcattatacaggtgaa

SEQ ID NO: 18481 - DNA, 25 bp, Artificial
  Probe
ggatcagaggttattgtgttgtgtg

SEQ ID NO: 18482 - DNA, 25 bp, Artificial
  Probe
ttattggatcagaggttattgtgtt

SEQ ID NO: 18483 - DNA, 25 bp, Artificial
  Probe
gatgatgtcattatacaggtgaagg

SEQ ID NO: 18484 - DNA, 25 bp, Artificial
  Probe
ggatgatgtcattatacaggtgaag

SEQ ID NO: 18485 - DNA, 25 bp, Artificial
  Probe
tcattatacaggtgaaggcaggtat

SEQ ID NO: 18486 - DNA, 25 bp, Artificial
  Probe
tgatgtcattatacaggtgaaggca

SEQ ID NO: 18487 - DNA, 25 bp, Artificial
  Probe
attattggatcagaggttattgtgt

SEQ ID NO: 18488 - DNA, 25 bp, Artificial
  Probe
caggtgaaggcaggtataggataga

SEQ ID NO: 18489 - DNA, 25 bp, Artificial
  Probe
tggatcagaggttattgtgttgtgt

SEQ ID NO: 18490 - DNA, 25 bp, Artificial
  Probe
gtaggatgatgtcattatacaggtg

SEQ ID NO: 18491 - DNA, 25 bp, Artificial
  Probe
cacagtctgtaggatgatgtcatta

SEQ ID NO: 18492 - DNA, 25 bp, Artificial
  Probe
taggatgatgtcattatacaggtga

SEQ ID NO: 18493 - DNA, 25 bp, Artificial
  Probe
aggttattgtgttgtgtgttctttc

SEQ ID NO: 18494 - DNA, 25 bp, Artificial
  Probe
gaggttattgtgttgtgtgttcttt

SEQ ID NO: 18495 - DNA, 25 bp, Artificial
  Probe
acaggtgaaggcaggtataggatag

SEQ ID NO: 18496 - DNA, 25 bp, Artificial
  Probe
ggttattgtgttgtgtgttctttca

SEQ ID NO: 18497 - DNA, 25 bp, Artificial
  Probe
acagtctgtaggatgatgtcattat

SEQ ID NO: 18498 - DNA, 25 bp, Artificial
  Probe
aggcaggtataggatagaatgaggc

SEQ ID NO: 18499 - DNA, 25 bp, Artificial
  Probe
tcacagtctgtaggatgatgtcatt

SEQ ID NO: 18500 - DNA, 25 bp, Artificial
  Probe
gtttgatttgtttcccagcatagtc

SEQ ID NO: 18501 - DNA, 25 bp, Artificial
  Probe
atgtcattatacaggtgaaggcagg

SEQ ID NO: 18502 - DNA, 25 bp, Artificial
  Probe
gttattgtgttgtgtgttctttcat

SEQ ID NO: 18503 - DNA, 25 bp, Artificial
  Probe
agtctgtaggatgatgtcattatac

SEQ ID NO: 18504 - DNA, 25 bp, Artificial
  Probe
cagtctgtaggatgatgtcattata

SEQ ID NO: 18505 - DNA, 25 bp, Artificial
  Probe
atacaggtgaaggcaggtataggat

SEQ ID NO: 18506 - DNA, 25 bp, Artificial
  Probe
gtcacagtctgtaggatgatgtcat

SEQ ID NO: 18507 - DNA, 25 bp, Artificial
  Probe
gttatgaggagagagtgtgacaata

SEQ ID NO: 18508 - DNA, 25 bp, Artificial
  Probe
ttatgaggagagagtgtgacaatag

SEQ ID NO: 18509 - DNA, 25 bp, Artificial
  Probe
atgactgtgtgttatgaggagagag

SEQ ID NO: 18510 - DNA, 25 bp, Artificial
  Probe
ttatgaacttcttccagatgtcact

SEQ ID NO: 18511 - DNA, 25 bp, Artificial
  Probe
tatgaggagagagtgtgacaatagc

SEQ ID NO: 18512 - DNA, 25 bp, Artificial
  Probe
tcaatgttaaggacaggtaaggaag

SEQ ID NO: 18513 - DNA, 25 bp, Artificial
  Probe
ccacctcaccgcattgtatattaac

SEQ ID NO: 18514 - DNA, 25 bp, Artificial
  Probe
cattatggtgtaactcaggaacaga

SEQ ID NO: 18515 - DNA, 25 bp, Artificial
  Probe
tcattatggtgtaactcaggaacag

SEQ ID NO: 18516 - DNA, 25 bp, Artificial
  Probe
atcattatggtgtaactcaggaaca

SEQ ID NO: 18517 - DNA, 25 bp, Artificial
  Probe
acctcaccgcattgtatattaacat

SEQ ID NO: 18518 - DNA, 25 bp, Artificial
  Probe
attatgaacttcttccagatgtcac

SEQ ID NO: 18519 - DNA, 25 bp, Artificial
  Probe
tatcattatggtgtaactcaggaac

SEQ ID NO: 18520 - DNA, 25 bp, Artificial
  Probe
attatggtgtaactcaggaacagat

SEQ ID NO: 18521 - DNA, 25 bp, Artificial
  Probe
cttccagatgtcactgatgtctatt

SEQ ID NO: 18522 - DNA, 25 bp, Artificial
  Probe
aatggtcaatgttaaggacaggtaa

SEQ ID NO: 18523 - DNA, 25 bp, Artificial
  Probe
tatgaacttcttccagatgtcactg

SEQ ID NO: 18524 - DNA, 25 bp, Artificial
  Probe
gtcaatgttaaggacaggtaaggaa

SEQ ID NO: 18525 - DNA, 25 bp, Artificial
  Probe
atggtcaatgttaaggacaggtaag

SEQ ID NO: 18526 - DNA, 25 bp, Artificial
  Probe
tcttccagatgtcactgatgtctat

SEQ ID NO: 18527 - DNA, 25 bp, Artificial
  Probe
tgttatgaggagagagtgtgacaat

SEQ ID NO: 18528 - DNA, 25 bp, Artificial
  Probe
cacctcaccgcattgtatattaaca

SEQ ID NO: 18529 - DNA, 25 bp, Artificial
  Probe
ttcttccagatgtcactgatgtcta

SEQ ID NO: 18530 - DNA, 25 bp, Artificial
  Probe
ttccagatgtcactgatgtctatta

SEQ ID NO: 18531 - DNA, 25 bp, Artificial
  Probe
gttaaggacaggtaaggaagcagaa

SEQ ID NO: 18532 - DNA, 25 bp, Artificial
  Probe
ttatggtgtaactcaggaacagatc

SEQ ID NO: 18533 - DNA, 25 bp, Artificial
  Probe
ctacaattaagaaggctgtcctctc

SEQ ID NO: 18534 - DNA, 25 bp, Artificial
  Probe
ccagatgtcactgatgtctattatg

SEQ ID NO: 18535 - DNA, 25 bp, Artificial
  Probe
tccagatgtcactgatgtctattat

SEQ ID NO: 18536 - DNA, 25 bp, Artificial
  Probe
caatgttaaggacaggtaaggaagc

SEQ ID NO: 18537 - DNA, 25 bp, Artificial
  Probe
gaacttcttccagatgtcactgatg

SEQ ID NO: 18538 - DNA, 25 bp, Artificial
  Probe
cctcaccgcattgtatattaacatg

SEQ ID NO: 18539 - DNA, 25 bp, Artificial
  Probe
tacaattaagaaggctgtcctctca

SEQ ID NO: 18540 - DNA, 25 bp, Artificial
  Probe
tgtattatgaacttcttccagatgt

SEQ ID NO: 18541 - DNA, 25 bp, Artificial
  Probe
ctcaccgcattgtatattaacatga

SEQ ID NO: 18542 - DNA, 25 bp, Artificial
  Probe
tgaacttcttccagatgtcactgat

SEQ ID NO: 18543 - DNA, 25 bp, Artificial
  Probe
atgaacttcttccagatgtcactga

SEQ ID NO: 18544 - DNA, 25 bp, Artificial
  Probe
aatgttaaggacaggtaaggaagca

SEQ ID NO: 18545 - DNA, 25 bp, Artificial
  Probe
gtgtgttatgaggagagagtgtgac

SEQ ID NO: 18546 - DNA, 25 bp, Artificial
  Probe
ctgtgtgttatgaggagagagtgtg

SEQ ID NO: 18547 - DNA, 25 bp, Artificial
  Probe
ttcctacaattaagaaggctgtcct

SEQ ID NO: 18548 - DNA, 25 bp, Artificial
  Probe
ttatcattatggtgtaactcaggaa

SEQ ID NO: 18549 - DNA, 25 bp, Artificial
  Probe
catgactgtgtgttatgaggagaga

SEQ ID NO: 18550 - DNA, 25 bp, Artificial
  Probe
gtgtattatgaacttcttccagatg

SEQ ID NO: 18551 - DNA, 25 bp, Artificial
  Probe
gtgttatgaggagagagtgtgacaa

SEQ ID NO: 18552 - DNA, 25 bp, Artificial
  Probe
atcacttctttctgctgtttctctc

SEQ ID NO: 18553 - DNA, 25 bp, Artificial
  Probe
catcacttctttctgctgtttctct

SEQ ID NO: 18554 - DNA, 25 bp, Artificial
  Probe
tatagtacggtctttattggctctg

SEQ ID NO: 18555 - DNA, 25 bp, Artificial
  Probe
ttatagtacggtctttattggctct

SEQ ID NO: 18556 - DNA, 25 bp, Artificial
  Probe
cattatagtacggtctttattggct

SEQ ID NO: 18557 - DNA, 25 bp, Artificial
  Probe
gcaatccagagaaacactaaataaa

SEQ ID NO: 18558 - DNA, 25 bp, Artificial
  Probe
attatagtacggtctttattggctc

SEQ ID NO: 18559 - DNA, 25 bp, Artificial
  Probe
ggaagactccttacacacatacttt

SEQ ID NO: 18560 - DNA, 25 bp, Artificial
  Probe
atagtacggtctttattggctctgg

SEQ ID NO: 18561 - DNA, 25 bp, Artificial
  Probe
tcacttctttctgctgtttctctcc

SEQ ID NO: 18562 - DNA, 25 bp, Artificial
  Probe
atattcctgccttaagaatgtcctt

SEQ ID NO: 18563 - DNA, 25 bp, Artificial
  Probe
catattcctgccttaagaatgtcct

SEQ ID NO: 18564 - DNA, 25 bp, Artificial
  Probe
ccattatagtacggtctttattggc

SEQ ID NO: 18565 - DNA, 25 bp, Artificial
  Probe
acttctttctgctgtttctctccac

SEQ ID NO: 18566 - DNA, 25 bp, Artificial
  Probe
cacttctttctgctgtttctctcca

SEQ ID NO: 18567 - DNA, 25 bp, Artificial
  Probe
ccatattcctgccttaagaatgtcc

SEQ ID NO: 18568 - DNA, 25 bp, Artificial
  Probe
tgcaatccagagaaacactaaataa

SEQ ID NO: 18569 - DNA, 25 bp, Artificial
  Probe
cccattatagtacggtctttattgg

SEQ ID NO: 18570 - DNA, 25 bp, Artificial
  Probe
gagaattgtctggttcaggcaaatc

SEQ ID NO: 18571 - DNA, 25 bp, Artificial
  Probe
agagaattgtctggttcaggcaaat

SEQ ID NO: 18572 - DNA, 25 bp, Artificial
  Probe
gactccttacacacatacttttgac

SEQ ID NO: 18573 - DNA, 25 bp, Artificial
  Probe
agactccttacacacatacttttga

SEQ ID NO: 18574 - DNA, 25 bp, Artificial
  Probe
acccattatagtacggtctttattg

SEQ ID NO: 18575 - DNA, 25 bp, Artificial
  Probe
cttacacacatacttttgacccatt

SEQ ID NO: 18576 - DNA, 25 bp, Artificial
  Probe
actccttacacacatacttttgacc

SEQ ID NO: 18577 - DNA, 25 bp, Artificial
  Probe
ctgcaatccagagaaacactaaata

SEQ ID NO: 18578 - DNA, 25 bp, Artificial
  Probe
ccttacacacatacttttgacccat

SEQ ID NO: 18579 - DNA, 25 bp, Artificial
  Probe
gaattgtctggttcaggcaaatcac

SEQ ID NO: 18580 - DNA, 25 bp, Artificial
  Probe
agaattgtctggttcaggcaaatca

SEQ ID NO: 18581 - DNA, 25 bp, Artificial
  Probe
cttctttctgctgtttctctccacc

SEQ ID NO: 18582 - DNA, 25 bp, Artificial
  Probe
gacttcagagaattgtctggttcag

SEQ ID NO: 18583 - DNA, 25 bp, Artificial
  Probe
ctccttacacacatacttttgaccc

SEQ ID NO: 18584 - DNA, 25 bp, Artificial
  Probe
aagactccttacacacatacttttg

SEQ ID NO: 18585 - DNA, 25 bp, Artificial
  Probe
gttcaggcaaatcacagagatggag

SEQ ID NO: 18586 - DNA, 25 bp, Artificial
  Probe
ttacacacatacttttgacccatta

SEQ ID NO: 18587 - DNA, 25 bp, Artificial
  Probe
gaagactccttacacacatactttt

SEQ ID NO: 18588 - DNA, 25 bp, Artificial
  Probe
ttcaggcaaatcacagagatggaga

SEQ ID NO: 18589 - DNA, 25 bp, Artificial
  Probe
acacacatacttttgacccattata

SEQ ID NO: 18590 - DNA, 25 bp, Artificial
  Probe
tacacacatacttttgacccattat

SEQ ID NO: 18591 - DNA, 25 bp, Artificial
  Probe
tccttacacacatacttttgaccca

SEQ ID NO: 18592 - DNA, 25 bp, Artificial
  Probe
aggaagactccttacacacatactt

SEQ ID NO: 18593 - DNA, 25 bp, Artificial
  Probe
aattgtctggttcaggcaaatcaca

SEQ ID NO: 18594 - DNA, 25 bp, Artificial
  Probe
gaggaagactccttacacacatact

SEQ ID NO: 18595 - DNA, 25 bp, Artificial
  Probe
tagtacggtctttattggctctggg

SEQ ID NO: 18596 - DNA, 25 bp, Artificial
  Probe
tattcctgccttaagaatgtccttt

SEQ ID NO: 18597 - DNA, 25 bp, Artificial
  Probe
gagacattcaccatatcgactacta

SEQ ID NO: 18598 - DNA, 25 bp, Artificial
  Probe
agacattcaccatatcgactactat

SEQ ID NO: 18599 - DNA, 25 bp, Artificial
  Probe
ctcttatgggagatattcactctgg

SEQ ID NO: 18600 - DNA, 25 bp, Artificial
  Probe
gctcttatgggagatattcactctg

SEQ ID NO: 18601 - DNA, 25 bp, Artificial
  Probe
tgctcttatgggagatattcactct

SEQ ID NO: 18602 - DNA, 25 bp, Artificial
  Probe
tcttatgggagatattcactctggg

SEQ ID NO: 18603 - DNA, 25 bp, Artificial
  Probe
cttatgggagatattcactctgggt

SEQ ID NO: 18604 - DNA, 25 bp, Artificial
  Probe
gacattcaccatatcgactactata

SEQ ID NO: 18605 - DNA, 25 bp, Artificial
  Probe
gtgctcttatgggagatattcactc

SEQ ID NO: 18606 - DNA, 25 bp, Artificial
  Probe
ccagtaactgtaccaatgagctgta

SEQ ID NO: 18607 - DNA, 25 bp, Artificial
  Probe
ttatgggagatattcactctgggtg

SEQ ID NO: 18608 - DNA, 25 bp, Artificial
  Probe
ggtgctcttatgggagatattcact

SEQ ID NO: 18609 - DNA, 25 bp, Artificial
  Probe
acattcaccatatcgactactataa

SEQ ID NO: 18610 - DNA, 25 bp, Artificial
  Probe
taccaatgagctgtacatgatgatg

SEQ ID NO: 18611 - DNA, 25 bp, Artificial
  Probe
cagtaactgtaccaatgagctgtac

SEQ ID NO: 18612 - DNA, 25 bp, Artificial
  Probe
cgagacattcaccatatcgactact

SEQ ID NO: 18613 - DNA, 25 bp, Artificial
  Probe
gaggataatgtcatgaagatcgcag

SEQ ID NO: 18614 - DNA, 25 bp, Artificial
  Probe
cagaggataatgtcatgaagatcgc

SEQ ID NO: 18615 - DNA, 25 bp, Artificial
  Probe
aggataatgtcatgaagatcgcaga

SEQ ID NO: 18616 - DNA, 25 bp, Artificial
  Probe
agaggataatgtcatgaagatcgca

SEQ ID NO: 18617 - DNA, 25 bp, Artificial
  Probe
acagaggataatgtcatgaagatcg

SEQ ID NO: 18618 - DNA, 25 bp, Artificial
  Probe
ttcaccatatcgactactataagaa

SEQ ID NO: 18619 - DNA, 25 bp, Artificial
  Probe
cattcaccatatcgactactataag

SEQ ID NO: 18620 - DNA, 25 bp, Artificial
  Probe
ataatgtcatgaagatcgcagactt

SEQ ID NO: 18621 - DNA, 25 bp, Artificial
  Probe
gggtgctcttatgggagatattcac

SEQ ID NO: 18622 - DNA, 25 bp, Artificial
  Probe
attcaccatatcgactactataaga

SEQ ID NO: 18623 - DNA, 25 bp, Artificial
  Probe
gataatgtcatgaagatcgcagact

SEQ ID NO: 18624 - DNA, 25 bp, Artificial
  Probe
tatgggagatattcactctgggtgg

SEQ ID NO: 18625 - DNA, 25 bp, Artificial
  Probe
cgactactataagaaaaccaccaat

SEQ ID NO: 18626 - DNA, 25 bp, Artificial
  Probe
ggataatgtcatgaagatcgcagac

SEQ ID NO: 18627 - DNA, 25 bp, Artificial
  Probe
ctctcagagaccaactttcaagcag

SEQ ID NO: 18628 - DNA, 25 bp, Artificial
  Probe
gaatgtcctggtgacagaggataat

SEQ ID NO: 18629 - DNA, 25 bp, Artificial
  Probe
gactactataagaaaaccaccaatg

SEQ ID NO: 18630 - DNA, 25 bp, Artificial
  Probe
tcgactactataagaaaaccaccaa

SEQ ID NO: 18631 - DNA, 25 bp, Artificial
  Probe
atcgactactataagaaaaccacca

SEQ ID NO: 18632 - DNA, 25 bp, Artificial
  Probe
ctactataagaaaaccaccaatggc

SEQ ID NO: 18633 - DNA, 25 bp, Artificial
  Probe
tcaccatatcgactactataagaaa

SEQ ID NO: 18634 - DNA, 25 bp, Artificial
  Probe
aatgtcctggtgacagaggataatg

SEQ ID NO: 18635 - DNA, 25 bp, Artificial
  Probe
gtaccaatgagctgtacatgatgat

SEQ ID NO: 18636 - DNA, 25 bp, Artificial
  Probe
caagcccagtaactgtaccaatgag

SEQ ID NO: 18637 - DNA, 25 bp, Artificial
  Probe
taatgtcatgaagatcgcagacttt

SEQ ID NO: 18638 - DNA, 25 bp, Artificial
  Probe
tctcagagaccaactttcaagcagt

SEQ ID NO: 18639 - DNA, 25 bp, Artificial
  Probe
accaatgagctgtacatgatgatgc

SEQ ID NO: 18640 - DNA, 25 bp, Artificial
  Probe
gacaagcccagtaactgtaccaatg

SEQ ID NO: 18641 - DNA, 25 bp, Artificial
  Probe
actactataagaaaaccaccaatgg

SEQ ID NO: 18642 - DNA, 25 bp, Artificial
  Probe
ttatttgagtgaaccagccttagtt

SEQ ID NO: 18643 - DNA, 25 bp, Artificial
  Probe
ttgttatttgagtgaaccagcctta

SEQ ID NO: 18644 - DNA, 25 bp, Artificial
  Probe
gcttattccctttagtgagtgttaa

SEQ ID NO: 18645 - DNA, 25 bp, Artificial
  Probe
tatttgagtgaaccagccttagttg

SEQ ID NO: 18646 - DNA, 25 bp, Artificial
  Probe
gttatttgagtgaaccagccttagt

SEQ ID NO: 18647 - DNA, 25 bp, Artificial
  Probe
tgttatttgagtgaaccagccttag

SEQ ID NO: 18648 - DNA, 25 bp, Artificial
  Probe
tcatttgttatttgagtgaaccagc

SEQ ID NO: 18649 - DNA, 25 bp, Artificial
  Probe
atttgttatttgagtgaaccagcct

SEQ ID NO: 18650 - DNA, 25 bp, Artificial
  Probe
catttgttatttgagtgaaccagcc

SEQ ID NO: 18651 - DNA, 25 bp, Artificial
  Probe
tttgttatttgagtgaaccagcctt

SEQ ID NO: 18652 - DNA, 25 bp, Artificial
  Probe
gtactctatttggacagatggaatc

SEQ ID NO: 18653 - DNA, 25 bp, Artificial
  Probe
gatgtactctatttggacagatgga

SEQ ID NO: 18654 - DNA, 25 bp, Artificial
  Probe
agatgtactctatttggacagatgg

SEQ ID NO: 18655 - DNA, 25 bp, Artificial
  Probe
gtgagatgtactctatttggacaga

SEQ ID NO: 18656 - DNA, 25 bp, Artificial
  Probe
ggtgagatgtactctatttggacag

SEQ ID NO: 18657 - DNA, 25 bp, Artificial
  Probe
tgtactctatttggacagatggaat

SEQ ID NO: 18658 - DNA, 25 bp, Artificial
  Probe
atgtactctatttggacagatggaa

SEQ ID NO: 18659 - DNA, 25 bp, Artificial
  Probe
agcttattccctttagtgagtgtta

SEQ ID NO: 18660 - DNA, 25 bp, Artificial
  Probe
tgagatgtactctatttggacagat

SEQ ID NO: 18661 - DNA, 25 bp, Artificial
  Probe
gagatgtactctatttggacagatg

SEQ ID NO: 18662 - DNA, 25 bp, Artificial
  Probe
tgtgttcttataatacagtgcccta

SEQ ID NO: 18663 - DNA, 25 bp, Artificial
  Probe
gggtgagatgtactctatttggaca

SEQ ID NO: 18664 - DNA, 25 bp, Artificial
  Probe
atttgagtgaaccagccttagttgt

SEQ ID NO: 18665 - DNA, 25 bp, Artificial
  Probe
ctctatttggacagatggaatctca

SEQ ID NO: 18666 - DNA, 25 bp, Artificial
  Probe
actctatttggacagatggaatctc

SEQ ID NO: 18667 - DNA, 25 bp, Artificial
  Probe
gtgttcttataatacagtgccctaa

SEQ ID NO: 18668 - DNA, 25 bp, Artificial
  Probe
tctatttggacagatggaatctcat

SEQ ID NO: 18669 - DNA, 25 bp, Artificial
  Probe
attctttggaatgcctctctaagac

SEQ ID NO: 18670 - DNA, 25 bp, Artificial
  Probe
tactctatttggacagatggaatct

SEQ ID NO: 18671 - DNA, 25 bp, Artificial
  Probe
ttccctgagctggtaatagactcta

SEQ ID NO: 18672 - DNA, 25 bp, Artificial
  Probe
tgagtgaaccagccttagttgtgtt

SEQ ID NO: 18673 - DNA, 25 bp, Artificial
  Probe
ttgagtgaaccagccttagttgtgt

SEQ ID NO: 18674 - DNA, 25 bp, Artificial
  Probe
tataatacagtgccctaaaacggtg

SEQ ID NO: 18675 - DNA, 25 bp, Artificial
  Probe
attcattgcatacatgtgacaactt

SEQ ID NO: 18676 - DNA, 25 bp, Artificial
  Probe
ttcattgcatacatgtgacaacttc

SEQ ID NO: 18677 - DNA, 25 bp, Artificial
  Probe
cattcattgcatacatgtgacaact

SEQ ID NO: 18678 - DNA, 25 bp, Artificial
  Probe
tcattcattgcatacatgtgacaac

SEQ ID NO: 18679 - DNA, 25 bp, Artificial
  Probe
atcattcattgcatacatgtgacaa

SEQ ID NO: 18680 - DNA, 25 bp, Artificial
  Probe
aatcattcattgcatacatgtgaca

SEQ ID NO: 18681 - DNA, 25 bp, Artificial
  Probe
cattgcatacatgtgacaacttcaa

SEQ ID NO: 18682 - DNA, 25 bp, Artificial
  Probe
tgttcttataatacagtgccctaaa

SEQ ID NO: 18683 - DNA, 25 bp, Artificial
  Probe
gagtgaaccagccttagttgtgttt

SEQ ID NO: 18684 - DNA, 25 bp, Artificial
  Probe
tttgagtgaaccagccttagttgtg

SEQ ID NO: 18685 - DNA, 25 bp, Artificial
  Probe
tccctgagctggtaatagactctag

SEQ ID NO: 18686 - DNA, 25 bp, Artificial
  Probe
cttattccctttagtgagtgttaat

SEQ ID NO: 18687 - DNA, 25 bp, Artificial
  Probe
gactatctgtctgccatcctgaacc

SEQ ID NO: 18688 - DNA, 25 bp, Artificial
  Probe
aagactatctgtctgccatcctgaa

SEQ ID NO: 18689 - DNA, 25 bp, Artificial
  Probe
ggaacacaaatttctttgaacattt

SEQ ID NO: 18690 - DNA, 25 bp, Artificial
  Probe
gaagactatctgtctgccatcctga

SEQ ID NO: 18691 - DNA, 25 bp, Artificial
  Probe
agactatctgtctgccatcctgaac

SEQ ID NO: 18692 - DNA, 25 bp, Artificial
  Probe
tgtggaagactatctgtctgccatc

SEQ ID NO: 18693 - DNA, 25 bp, Artificial
  Probe
gtgtggaagactatctgtctgccat

SEQ ID NO: 18694 - DNA, 25 bp, Artificial
  Probe
ggaagactatctgtctgccatcctg

SEQ ID NO: 18695 - DNA, 25 bp, Artificial
  Probe
gtggaagactatctgtctgccatcc

SEQ ID NO: 18696 - DNA, 25 bp, Artificial
  Probe
tggaagactatctgtctgccatcct

SEQ ID NO: 18697 - DNA, 25 bp, Artificial
  Probe
ctgtgtggaagactatctgtctgcc

SEQ ID NO: 18698 - DNA, 25 bp, Artificial
  Probe
cctgtgtggaagactatctgtctgc

SEQ ID NO: 18699 - DNA, 25 bp, Artificial
  Probe
ccctgtgtggaagactatctgtctg

SEQ ID NO: 18700 - DNA, 25 bp, Artificial
  Probe
aacacaaatttctttgaacatttga

SEQ ID NO: 18701 - DNA, 25 bp, Artificial
  Probe
gaacacaaatttctttgaacatttg

SEQ ID NO: 18702 - DNA, 25 bp, Artificial
  Probe
attacatctacctacatccacctct

SEQ ID NO: 18703 - DNA, 25 bp, Artificial
  Probe
ctgattacatctacctacatccacc

SEQ ID NO: 18704 - DNA, 25 bp, Artificial
  Probe
cctgattacatctacctacatccac

SEQ ID NO: 18705 - DNA, 25 bp, Artificial
  Probe
ttacatctacctacatccacctctc

SEQ ID NO: 18706 - DNA, 25 bp, Artificial
  Probe
gattacatctacctacatccacctc

SEQ ID NO: 18707 - DNA, 25 bp, Artificial
  Probe
tgattacatctacctacatccacct

SEQ ID NO: 18708 - DNA, 25 bp, Artificial
  Probe
acctgattacatctacctacatcca

SEQ ID NO: 18709 - DNA, 25 bp, Artificial
  Probe
gacctgattacatctacctacatcc

SEQ ID NO: 18710 - DNA, 25 bp, Artificial
  Probe
acatctacctacatccacctctcta

SEQ ID NO: 18711 - DNA, 25 bp, Artificial
  Probe
tacatctacctacatccacctctct

SEQ ID NO: 18712 - DNA, 25 bp, Artificial
  Probe
catctacctacatccacctctctag

SEQ ID NO: 18713 - DNA, 25 bp, Artificial
  Probe
ctaatcactctcctgttgacttgta

SEQ ID NO: 18714 - DNA, 25 bp, Artificial
  Probe
agacctgattacatctacctacatc

SEQ ID NO: 18715 - DNA, 25 bp, Artificial
  Probe
taatcactctcctgttgacttgtaa

SEQ ID NO: 18716 - DNA, 25 bp, Artificial
  Probe
aatcactctcctgttgacttgtaac

SEQ ID NO: 18717 - DNA, 25 bp, Artificial
  Probe
aagacctgattacatctacctacat

SEQ ID NO: 18718 - DNA, 25 bp, Artificial
  Probe
atctacctacatccacctctctagc

SEQ ID NO: 18719 - DNA, 25 bp, Artificial
  Probe
tgagctatgacatcattggtaagat

SEQ ID NO: 18720 - DNA, 25 bp, Artificial
  Probe
atctcccaacccaaacattctttat

SEQ ID NO: 18721 - DNA, 25 bp, Artificial
  Probe
gctaatcactctcctgttgacttgt

SEQ ID NO: 18722 - DNA, 25 bp, Artificial
  Probe
catctcccaacccaaacattcttta

SEQ ID NO: 18723 - DNA, 25 bp, Artificial
  Probe
tagcatcccaactagaactgaattt

SEQ ID NO: 18724 - DNA, 25 bp, Artificial
  Probe
atagcatcccaactagaactgaatt

SEQ ID NO: 18725 - DNA, 25 bp, Artificial
  Probe
aatagcatcccaactagaactgaat

SEQ ID NO: 18726 - DNA, 25 bp, Artificial
  Probe
taatagcatcccaactagaactgaa

SEQ ID NO: 18727 - DNA, 25 bp, Artificial
  Probe
ttaatagcatcccaactagaactga

SEQ ID NO: 18728 - DNA, 25 bp, Artificial
  Probe
tcccaacccaaacattctttatgag

SEQ ID NO: 18729 - DNA, 25 bp, Artificial
  Probe
ctcccaacccaaacattctttatga

SEQ ID NO: 18730 - DNA, 25 bp, Artificial
  Probe
tctcccaacccaaacattctttatg

SEQ ID NO: 18731 - DNA, 25 bp, Artificial
  Probe
aaagacctgattacatctacctaca

SEQ ID NO: 18732 - DNA, 25 bp, Artificial
  Probe
tttaatagcatcccaactagaactg

SEQ ID NO: 18733 - DNA, 25 bp, Artificial
  Probe
agctaatcactctcctgttgacttg

SEQ ID NO: 18734 - DNA, 25 bp, Artificial
  Probe
aatcattggaatagagatcttggct

SEQ ID NO: 18735 - DNA, 25 bp, Artificial
  Probe
atcattggaatagagatcttggctg

SEQ ID NO: 18736 - DNA, 25 bp, Artificial
  Probe
cttgtagctaatcactctcctgttg

SEQ ID NO: 18737 - DNA, 25 bp, Artificial
  Probe
caagctaaatgaaatgacagaatgc

SEQ ID NO: 18738 - DNA, 25 bp, Artificial
  Probe
ctacctacatccacctctctagctg

SEQ ID NO: 18739 - DNA, 25 bp, Artificial
  Probe
caacccaaacattctttatgagcta

SEQ ID NO: 18740 - DNA, 25 bp, Artificial
  Probe
acccaaacattctttatgagctatg

SEQ ID NO: 18741 - DNA, 25 bp, Artificial
  Probe
tctacctacatccacctctctagct

SEQ ID NO: 18742 - DNA, 25 bp, Artificial
  Probe
cccaacccaaacattctttatgagc

SEQ ID NO: 18743 - DNA, 25 bp, Artificial
  Probe
tggaatagagatcttggctgcttaa

SEQ ID NO: 18744 - DNA, 25 bp, Artificial
  Probe
ttggaatagagatcttggctgctta

SEQ ID NO: 18745 - DNA, 25 bp, Artificial
  Probe
atgagctatgacatcattggtaaga

SEQ ID NO: 18746 - DNA, 25 bp, Artificial
  Probe
cccaaacattctttatgagctatga

SEQ ID NO: 18747 - DNA, 25 bp, Artificial
  Probe
ctaagaacctccactccaaccaatc

SEQ ID NO: 18748 - DNA, 25 bp, Artificial
  Probe
ttctaggcaaagatgtctctgtcaa

SEQ ID NO: 18749 - DNA, 25 bp, Artificial
  Probe
tgattaaagctaagaacctccactc

SEQ ID NO: 18750 - DNA, 25 bp, Artificial
  Probe
ctgattaaagctaagaacctccact

SEQ ID NO: 18751 - DNA, 25 bp, Artificial
  Probe
tctaggcaaagatgtctctgtcaag

SEQ ID NO: 18752 - DNA, 25 bp, Artificial
  Probe
cttctaggcaaagatgtctctgtca

SEQ ID NO: 18753 - DNA, 25 bp, Artificial
  Probe
gattaaagctaagaacctccactcc

SEQ ID NO: 18754 - DNA, 25 bp, Artificial
  Probe
gtctttcttggacacagtcatcttc

SEQ ID NO: 18755 - DNA, 25 bp, Artificial
  Probe
taagaacctccactccaaccaatcc

SEQ ID NO: 18756 - DNA, 25 bp, Artificial
  Probe
attaaagctaagaacctccactcca

SEQ ID NO: 18757 - DNA, 25 bp, Artificial
  Probe
ttaaagctaagaacctccactccaa

SEQ ID NO: 18758 - DNA, 25 bp, Artificial
  Probe
cttctgtcaatcagctaccttccag

SEQ ID NO: 18759 - DNA, 25 bp, Artificial
  Probe
gtccttctgtcaatcagctaccttc

SEQ ID NO: 18760 - DNA, 25 bp, Artificial
  Probe
agaagctgaagaagaaacagacaaa

SEQ ID NO: 18761 - DNA, 25 bp, Artificial
  Probe
ctaggcaaagatgtctctgtcaagg

SEQ ID NO: 18762 - DNA, 25 bp, Artificial
  Probe
taaagctaagaacctccactccaac

SEQ ID NO: 18763 - DNA, 25 bp, Artificial
  Probe
cagaagctgaagaagaaacagacaa

SEQ ID NO: 18764 - DNA, 25 bp, Artificial
  Probe
tctttcttggacacagtcatcttcc

SEQ ID NO: 18765 - DNA, 25 bp, Artificial
  Probe
gctaagaacctccactccaaccaat

SEQ ID NO: 18766 - DNA, 25 bp, Artificial
  Probe
gcttctaggcaaagatgtctctgtc

SEQ ID NO: 18767 - DNA, 25 bp, Artificial
  Probe
taggcaaagatgtctctgtcaaggt

SEQ ID NO: 18768 - DNA, 25 bp, Artificial
  Probe
cgtctttcttggacacagtcatctt

SEQ ID NO: 18769 - DNA, 25 bp, Artificial
  Probe
tccttctgtcaatcagctaccttcc

SEQ ID NO: 18770 - DNA, 25 bp, Artificial
  Probe
gagcttctaggcaaagatgtctctg

SEQ ID NO: 18771 - DNA, 25 bp, Artificial
  Probe
gctgattaaagctaagaacctccac

SEQ ID NO: 18772 - DNA, 25 bp, Artificial
  Probe
gtgctgattaaagctaagaacctcc

SEQ ID NO: 18773 - DNA, 25 bp, Artificial
  Probe
ggtgctgattaaagctaagaacctc

SEQ ID NO: 18774 - DNA, 25 bp, Artificial
  Probe
gatcatgtttgagctaccagatgac

SEQ ID NO: 18775 - DNA, 25 bp, Artificial
  Probe
ccttctgtcaatcagctaccttcca

SEQ ID NO: 18776 - DNA, 25 bp, Artificial
  Probe
tgctgattaaagctaagaacctcca

SEQ ID NO: 18777 - DNA, 25 bp, Artificial
  Probe
tccaaccaatccaaggagcttctag

SEQ ID NO: 18778 - DNA, 25 bp, Artificial
  Probe
tggtgctgattaaagctaagaacct

SEQ ID NO: 18779 - DNA, 25 bp, Artificial
  Probe
gtggtgctgattaaagctaagaacc

SEQ ID NO: 18780 - DNA, 25 bp, Artificial
  Probe
ggtggtgctgattaaagctaagaac

SEQ ID NO: 18781 - DNA, 25 bp, Artificial
  Probe
agcttctaggcaaagatgtctctgt

SEQ ID NO: 18782 - DNA, 25 bp, Artificial
  Probe
aaggagcttctaggcaaagatgtct

SEQ ID NO: 18783 - DNA, 25 bp, Artificial
  Probe
caaggagcttctaggcaaagatgtc

SEQ ID NO: 18784 - DNA, 25 bp, Artificial
  Probe
atccaaggagcttctaggcaaagat

SEQ ID NO: 18785 - DNA, 25 bp, Artificial
  Probe
caatccaaggagcttctaggcaaag

SEQ ID NO: 18786 - DNA, 25 bp, Artificial
  Probe
ggtccttctgtcaatcagctacctt

SEQ ID NO: 18787 - DNA, 25 bp, Artificial
  Probe
tggtggtgctgattaaagctaagaa

SEQ ID NO: 18788 - DNA, 25 bp, Artificial
  Probe
aatccaaggagcttctaggcaaaga

SEQ ID NO: 18789 - DNA, 25 bp, Artificial
  Probe
ggaggtccttctgtcaatcagctac

SEQ ID NO: 18790 - DNA, 25 bp, Artificial
  Probe
gaagctgaagaagaaacagacaaaa

SEQ ID NO: 18791 - DNA, 25 bp, Artificial
  Probe
aagctgaagaagaaacagacaaaac

SEQ ID NO: 18792 - DNA, 25 bp, Artificial
  Probe
ttggtaggtagtgattaactgtgaa

SEQ ID NO: 18793 - DNA, 25 bp, Artificial
  Probe
tggtaggtagtgattaactgtgaat

SEQ ID NO: 18794 - DNA, 25 bp, Artificial
  Probe
ggtaggtagtgattaactgtgaata

SEQ ID NO: 18795 - DNA, 25 bp, Artificial
  Probe
aatttatctctggagttacacctgg

SEQ ID NO: 18796 - DNA, 25 bp, Artificial
  Probe
actgtgaataaactccaatgacttc

SEQ ID NO: 18797 - DNA, 25 bp, Artificial
  Probe
aactgtgaataaactccaatgactt

SEQ ID NO: 18798 - DNA, 25 bp, Artificial
  Probe
agcaatttggtaggtagtgattaac

SEQ ID NO: 18799 - DNA, 25 bp, Artificial
  Probe
tttggtaggtagtgattaactgtga

SEQ ID NO: 18800 - DNA, 25 bp, Artificial
  Probe
atttatctctggagttacacctggg

SEQ ID NO: 18801 - DNA, 25 bp, Artificial
  Probe
gcaatttggtaggtagtgattaact

SEQ ID NO: 18802 - DNA, 25 bp, Artificial
  Probe
taactgtgaataaactccaatgact

SEQ ID NO: 18803 - DNA, 25 bp, Artificial
  Probe
atttggtaggtagtgattaactgtg

SEQ ID NO: 18804 - DNA, 25 bp, Artificial
  Probe
agtgattaactgtgaataaactcca

SEQ ID NO: 18805 - DNA, 25 bp, Artificial
  Probe
ttaactgtgaataaactccaatgac

SEQ ID NO: 18806 - DNA, 25 bp, Artificial
  Probe
gtgattaactgtgaataaactccaa

SEQ ID NO: 18807 - DNA, 25 bp, Artificial
  Probe
aatttggtaggtagtgattaactgt

SEQ ID NO: 18808 - DNA, 25 bp, Artificial
  Probe
caatttggtaggtagtgattaactg

SEQ ID NO: 18809 - DNA, 25 bp, Artificial
  Probe
aattggtgtatatcatgaagccttg

SEQ ID NO: 18810 - DNA, 25 bp, Artificial
  Probe
ggaattggtgtatatcatgaagcct

SEQ ID NO: 18811 - DNA, 25 bp, Artificial
  Probe
ttggaattggtgtatatcatgaagc

SEQ ID NO: 18812 - DNA, 25 bp, Artificial
  Probe
gaattggtgtatatcatgaagcctt

SEQ ID NO: 18813 - DNA, 25 bp, Artificial
  Probe
tggaattggtgtatatcatgaagcc

SEQ ID NO: 18814 - DNA, 25 bp, Artificial
  Probe
aaatttatctctggagttacacctg

SEQ ID NO: 18815 - DNA, 25 bp, Artificial
  Probe
attggtgtatatcatgaagccttgc

SEQ ID NO: 18816 - DNA, 25 bp, Artificial
  Probe
gtaggtagtgattaactgtgaataa

SEQ ID NO: 18817 - DNA, 25 bp, Artificial
  Probe
attaactgtgaataaactccaatga

SEQ ID NO: 18818 - DNA, 25 bp, Artificial
  Probe
tgattaactgtgaataaactccaat

SEQ ID NO: 18819 - DNA, 25 bp, Artificial
  Probe
ggtagtgattaactgtgaataaact

SEQ ID NO: 18820 - DNA, 25 bp, Artificial
  Probe
aggtagtgattaactgtgaataaac

SEQ ID NO: 18821 - DNA, 25 bp, Artificial
  Probe
gattaactgtgaataaactccaatg

SEQ ID NO: 18822 - DNA, 25 bp, Artificial
  Probe
tagtgattaactgtgaataaactcc

SEQ ID NO: 18823 - DNA, 25 bp, Artificial
  Probe
tttatctctggagttacacctgggc

SEQ ID NO: 18824 - DNA, 25 bp, Artificial
  Probe
cttgctgaactaagttttgtgtgta

SEQ ID NO: 18825 - DNA, 25 bp, Artificial
  Probe
tgcctctttccctgctgatgataaa

SEQ ID NO: 18826 - DNA, 25 bp, Artificial
  Probe
catgaagccttgctgaactaagttt

SEQ ID NO: 18827 - DNA, 25 bp, Artificial
  Probe
atatcatgaagccttgctgaactaa

SEQ ID NO: 18828 - DNA, 25 bp, Artificial
  Probe
tatatcatgaagccttgctgaacta

SEQ ID NO: 18829 - DNA, 25 bp, Artificial
  Probe
tatcatgaagccttgctgaactaag

SEQ ID NO: 18830 - DNA, 25 bp, Artificial
  Probe
gtatatcatgaagccttgctgaact

SEQ ID NO: 18831 - DNA, 25 bp, Artificial
  Probe
tgtatatcatgaagccttgctgaac

SEQ ID NO: 18832 - DNA, 25 bp, Artificial
  Probe
gtgtatatcatgaagccttgctgaa

SEQ ID NO: 18833 - DNA, 25 bp, Artificial
  Probe
ctgcctctttccctgctgatgataa

SEQ ID NO: 18834 - DNA, 25 bp, Artificial
  Probe
ccttgctgaactaagttttgtgtgt

SEQ ID NO: 18835 - DNA, 25 bp, Artificial
  Probe
ttttaaatcttgtctcctgtgagct

SEQ ID NO: 18836 - DNA, 25 bp, Artificial
  Probe
ttttgaggtagaaaagaccaagagc

SEQ ID NO: 18837 - DNA, 25 bp, Artificial
  Probe
tcagccatttggtcttactattagg

SEQ ID NO: 18838 - DNA, 25 bp, Artificial
  Probe
catcagccatttggtcttactatta

SEQ ID NO: 18839 - DNA, 25 bp, Artificial
  Probe
tctctttcaagaagcctttcaaatt

SEQ ID NO: 18840 - DNA, 25 bp, Artificial
  Probe
ctctttcaagaagcctttcaaattg

SEQ ID NO: 18841 - DNA, 25 bp, Artificial
  Probe
atcagccatttggtcttactattag

SEQ ID NO: 18842 - DNA, 25 bp, Artificial
  Probe
ccatcagccatttggtcttactatt

SEQ ID NO: 18843 - DNA, 25 bp, Artificial
  Probe
gaagaaattctctttcaagaagcct

SEQ ID NO: 18844 - DNA, 25 bp, Artificial
  Probe
agaagaaattctctttcaagaagcc

SEQ ID NO: 18845 - DNA, 25 bp, Artificial
  Probe
ttctctttcaagaagcctttcaaat

SEQ ID NO: 18846 - DNA, 25 bp, Artificial
  Probe
attctctttcaagaagcctttcaaa

SEQ ID NO: 18847 - DNA, 25 bp, Artificial
  Probe
aattctctttcaagaagcctttcaa

SEQ ID NO: 18848 - DNA, 25 bp, Artificial
  Probe
aaattctctttcaagaagcctttca

SEQ ID NO: 18849 - DNA, 25 bp, Artificial
  Probe
atctgccagtgctgagaatgagtag

SEQ ID NO: 18850 - DNA, 25 bp, Artificial
  Probe
agaaattctctttcaagaagccttt

SEQ ID NO: 18851 - DNA, 25 bp, Artificial
  Probe
aagaaattctctttcaagaagcctt

SEQ ID NO: 18852 - DNA, 25 bp, Artificial
  Probe
gaaattctctttcaagaagcctttc

SEQ ID NO: 18853 - DNA, 25 bp, Artificial
  Probe
cccaagaagaagaagaaattctctt

SEQ ID NO: 18854 - DNA, 25 bp, Artificial
  Probe
tggtcttactattaggccagttgaa

SEQ ID NO: 18855 - DNA, 25 bp, Artificial
  Probe
ttggtcttactattaggccagttga

SEQ ID NO: 18856 - DNA, 25 bp, Artificial
  Probe
cccatcagccatttggtcttactat

SEQ ID NO: 18857 - DNA, 25 bp, Artificial
  Probe
catctgccagtgctgagaatgagta

SEQ ID NO: 18858 - DNA, 25 bp, Artificial
  Probe
tttcaagaagcctttcaaattgagt

SEQ ID NO: 18859 - DNA, 25 bp, Artificial
  Probe
ttcaagaagcctttcaaattgagtg

SEQ ID NO: 18860 - DNA, 25 bp, Artificial
  Probe
tctttcaagaagcctttcaaattga

SEQ ID NO: 18861 - DNA, 25 bp, Artificial
  Probe
ctttcaagaagcctttcaaattgag

SEQ ID NO: 18862 - DNA, 25 bp, Artificial
  Probe
aagaagaaattctctttcaagaagc

SEQ ID NO: 18863 - DNA, 25 bp, Artificial
  Probe
tcaagaagcctttcaaattgagtgg

SEQ ID NO: 18864 - DNA, 25 bp, Artificial
  Probe
ccaagaagaagaagaaattctcttt

SEQ ID NO: 18865 - DNA, 25 bp, Artificial
  Probe
tcccatcagccatttggtcttacta

SEQ ID NO: 18866 - DNA, 25 bp, Artificial
  Probe
ctcaccaacagaggaagagcaagag

SEQ ID NO: 18867 - DNA, 25 bp, Artificial
  Probe
gattcttcagcctcctcaccaacag

SEQ ID NO: 18868 - DNA, 25 bp, Artificial
  Probe
atttggtcttactattaggccagtt

SEQ ID NO: 18869 - DNA, 25 bp, Artificial
  Probe
catttggtcttactattaggccagt

SEQ ID NO: 18870 - DNA, 25 bp, Artificial
  Probe
tttggtcttactattaggccagttg

SEQ ID NO: 18871 - DNA, 25 bp, Artificial
  Probe
ttcaagagaaatcggaaggagggtg

SEQ ID NO: 18872 - DNA, 25 bp, Artificial
  Probe
ccatttggtcttactattaggccag

SEQ ID NO: 18873 - DNA, 25 bp, Artificial
  Probe
ttctcccatcagccatttggtctta

SEQ ID NO: 18874 - DNA, 25 bp, Artificial
  Probe
ccccaagaagaagaagaaattctct

SEQ ID NO: 18875 - DNA, 25 bp, Artificial
  Probe
agaagaagaaattctctttcaagaa

SEQ ID NO: 18876 - DNA, 25 bp, Artificial
  Probe
aagaagaagaaattctctttcaaga

SEQ ID NO: 18877 - DNA, 25 bp, Artificial
  Probe
agaagaagaagaaattctctttcaa

SEQ ID NO: 18878 - DNA, 25 bp, Artificial
  Probe
aagaagaagaagaaattctctttca

SEQ ID NO: 18879 - DNA, 25 bp, Artificial
  Probe
cagccatttggtcttactattaggc

SEQ ID NO: 18880 - DNA, 25 bp, Artificial
  Probe
gaagaagaaattctctttcaagaag

SEQ ID NO: 18881 - DNA, 25 bp, Artificial
  Probe
gaagaagaagaaattctctttcaag

SEQ ID NO: 18882 - DNA, 25 bp, Artificial
  Probe
attatagatagtgtggatgctgtca

SEQ ID NO: 18883 - DNA, 25 bp, Artificial
  Probe
ttatagatagtgtggatgctgtcag

SEQ ID NO: 18884 - DNA, 25 bp, Artificial
  Probe
aacagagaggatgacacttacatag

SEQ ID NO: 18885 - DNA, 25 bp, Artificial
  Probe
tatagatagtgtggatgctgtcagt

SEQ ID NO: 18886 - DNA, 25 bp, Artificial
  Probe
ccgctggtaatatactgtattctgt

SEQ ID NO: 18887 - DNA, 25 bp, Artificial
  Probe
tgtccgctggtaatatactgtattc

SEQ ID NO: 18888 - DNA, 25 bp, Artificial
  Probe
ctgtccgctggtaatatactgtatt

SEQ ID NO: 18889 - DNA, 25 bp, Artificial
  Probe
cattatagatagtgtggatgctgtc

SEQ ID NO: 18890 - DNA, 25 bp, Artificial
  Probe
tccgctggtaatatactgtattctg

SEQ ID NO: 18891 - DNA, 25 bp, Artificial
  Probe
gtccgctggtaatatactgtattct

SEQ ID NO: 18892 - DNA, 25 bp, Artificial
  Probe
acagagaggatgacacttacatagt

SEQ ID NO: 18893 - DNA, 25 bp, Artificial
  Probe
acaggtcattgagtcttagtaggtg

SEQ ID NO: 18894 - DNA, 25 bp, Artificial
  Probe
ccaccactcagaatctcatactcat

SEQ ID NO: 18895 - DNA, 25 bp, Artificial
  Probe
gaagacaacactactgcttaacctg

SEQ ID NO: 18896 - DNA, 25 bp, Artificial
  Probe
cagagaggatgacacttacatagtc

SEQ ID NO: 18897 - DNA, 25 bp, Artificial
  Probe
cgttcaatgtatagccagactgtac

SEQ ID NO: 18898 - DNA, 25 bp, Artificial
  Probe
atagatagtgtggatgctgtcagtg

SEQ ID NO: 18899 - DNA, 25 bp, Artificial
  Probe
caccactcagaatctcatactcatg

SEQ ID NO: 18900 - DNA, 25 bp, Artificial
  Probe
gctgtccgctggtaatatactgtat

SEQ ID NO: 18901 - DNA, 25 bp, Artificial
  Probe
ttcggaagacaacactactgcttaa

SEQ ID NO: 18902 - DNA, 25 bp, Artificial
  Probe
gacaggtcattgagtcttagtaggt

SEQ ID NO: 18903 - DNA, 25 bp, Artificial
  Probe
ggaagacaacactactgcttaacct

SEQ ID NO: 18904 - DNA, 25 bp, Artificial
  Probe
ccattatagatagtgtggatgctgt

SEQ ID NO: 18905 - DNA, 25 bp, Artificial
  Probe
accattatagatagtgtggatgctg

SEQ ID NO: 18906 - DNA, 25 bp, Artificial
  Probe
cgctggtaatatactgtattctgta

SEQ ID NO: 18907 - DNA, 25 bp, Artificial
  Probe
caggtcattgagtcttagtaggtgc

SEQ ID NO: 18908 - DNA, 25 bp, Artificial
  Probe
aagacaacactactgcttaacctgt

SEQ ID NO: 18909 - DNA, 25 bp, Artificial
  Probe
gagcaaacaaataatgacctaagca

SEQ ID NO: 18910 - DNA, 25 bp, Artificial
  Probe
tgagcaaacaaataatgacctaagc

SEQ ID NO: 18911 - DNA, 25 bp, Artificial
  Probe
attgggaaagggtagaacatttgat

SEQ ID NO: 18912 - DNA, 25 bp, Artificial
  Probe
agcaaacaaataatgacctaagcac

SEQ ID NO: 18913 - DNA, 25 bp, Artificial
  Probe
tgggaaagggtagaacatttgattt

SEQ ID NO: 18914 - DNA, 25 bp, Artificial
  Probe
ttgggaaagggtagaacatttgatt

SEQ ID NO: 18915 - DNA, 25 bp, Artificial
  Probe
gtttctgttcactgtctcttcaaag

SEQ ID NO: 18916 - DNA, 25 bp, Artificial
  Probe
cgggctttaagtttggattatttca

SEQ ID NO: 18917 - DNA, 25 bp, Artificial
  Probe
acgggctttaagtttggattatttc

SEQ ID NO: 18918 - DNA, 25 bp, Artificial
  Probe
gcaaacaaataatgacctaagcaca

SEQ ID NO: 18919 - DNA, 25 bp, Artificial
  Probe
cacgggctttaagtttggattattt

SEQ ID NO: 18920 - DNA, 25 bp, Artificial
  Probe
tcggaagacaacactactgcttaac

SEQ ID NO: 18921 - DNA, 25 bp, Artificial
  Probe
ataggtcagtggctaagtcaaggaa

SEQ ID NO: 18922 - DNA, 25 bp, Artificial
  Probe
gttcggaagacaacactactgctta

SEQ ID NO: 18923 - DNA, 25 bp, Artificial
  Probe
aaacaaataatgacctaagcacagt

SEQ ID NO: 18924 - DNA, 25 bp, Artificial
  Probe
actcacaacctcacatccaaattat

SEQ ID NO: 18925 - DNA, 25 bp, Artificial
  Probe
aattgggaaagggtagaacatttga

SEQ ID NO: 18926 - DNA, 25 bp, Artificial
  Probe
taccattatagatagtgtggatgct

SEQ ID NO: 18927 - DNA, 25 bp, Artificial
  Probe
ttgtccattactgttgctattctgc

SEQ ID NO: 18928 - DNA, 25 bp, Artificial
  Probe
tttgtccattactgttgctattctg

SEQ ID NO: 18929 - DNA, 25 bp, Artificial
  Probe
attgggtgggtttactcttagaatc

SEQ ID NO: 18930 - DNA, 25 bp, Artificial
  Probe
catattgggtgggtttactcttaga

SEQ ID NO: 18931 - DNA, 25 bp, Artificial
  Probe
ctttgtccattactgttgctattct

SEQ ID NO: 18932 - DNA, 25 bp, Artificial
  Probe
gctttgtccattactgttgctattc

SEQ ID NO: 18933 - DNA, 25 bp, Artificial
  Probe
tattgggtgggtttactcttagaat

SEQ ID NO: 18934 - DNA, 25 bp, Artificial
  Probe
atattgggtgggtttactcttagaa

SEQ ID NO: 18935 - DNA, 25 bp, Artificial
  Probe
gaggctggatgcaagatagatacta

SEQ ID NO: 18936 - DNA, 25 bp, Artificial
  Probe
tgcttggatagtcagtttgtgtatg

SEQ ID NO: 18937 - DNA, 25 bp, Artificial
  Probe
gtgcttggatagtcagtttgtgtat

SEQ ID NO: 18938 - DNA, 25 bp, Artificial
  Probe
aaataacctcttcaagttgtaaccg

SEQ ID NO: 18939 - DNA, 25 bp, Artificial
  Probe
agtttctgttctttccttgggtttc

SEQ ID NO: 18940 - DNA, 25 bp, Artificial
  Probe
aggctggatgcaagatagatactat

SEQ ID NO: 18941 - DNA, 25 bp, Artificial
  Probe
gcttggatagtcagtttgtgtatga

SEQ ID NO: 18942 - DNA, 25 bp, Artificial
  Probe
ggctggatgcaagatagatactata

SEQ ID NO: 18943 - DNA, 25 bp, Artificial
  Probe
ggctttgtccattactgttgctatt

SEQ ID NO: 18944 - DNA, 25 bp, Artificial
  Probe
aagttggagggaagtttgtagtcat

SEQ ID NO: 18945 - DNA, 25 bp, Artificial
  Probe
cttggatagtcagtttgtgtatgaa

SEQ ID NO: 18946 - DNA, 25 bp, Artificial
  Probe
tgtgcttggatagtcagtttgtgta

SEQ ID NO: 18947 - DNA, 25 bp, Artificial
  Probe
ttggatagtcagtttgtgtatgaaa

SEQ ID NO: 18948 - DNA, 25 bp, Artificial
  Probe
gaaataacctcttcaagttgtaacc

SEQ ID NO: 18949 - DNA, 25 bp, Artificial
  Probe
ttgggtgggtttactcttagaatcg

SEQ ID NO: 18950 - DNA, 25 bp, Artificial
  Probe
gaagttggagggaagtttgtagtca

SEQ ID NO: 18951 - DNA, 25 bp, Artificial
  Probe
tgaagttggagggaagtttgtagtc

SEQ ID NO: 18952 - DNA, 25 bp, Artificial
  Probe
tttctgttctttccttgggtttcct

SEQ ID NO: 18953 - DNA, 25 bp, Artificial
  Probe
gtttctgttctttccttgggtttcc

SEQ ID NO: 18954 - DNA, 25 bp, Artificial
  Probe
gtgggtttactcttagaatcgcatg

SEQ ID NO: 18955 - DNA, 25 bp, Artificial
  Probe
gtgaagttggagggaagtttgtagt

SEQ ID NO: 18956 - DNA, 25 bp, Artificial
  Probe
tgtgaagttggagggaagtttgtag

SEQ ID NO: 18957 - DNA, 25 bp, Artificial
  Probe
ctgtgaagttggagggaagtttgta

SEQ ID NO: 18958 - DNA, 25 bp, Artificial
  Probe
aatttgattgtttgccatattgggt

SEQ ID NO: 18959 - DNA, 25 bp, Artificial
  Probe
ggtgggtttactcttagaatcgcat

SEQ ID NO: 18960 - DNA, 25 bp, Artificial
  Probe
ccatattgggtgggtttactcttag

SEQ ID NO: 18961 - DNA, 25 bp, Artificial
  Probe
aagatgatagtcctgttgggaatga

SEQ ID NO: 18962 - DNA, 25 bp, Artificial
  Probe
caagatgatagtcctgttgggaatg

SEQ ID NO: 18963 - DNA, 25 bp, Artificial
  Probe
atttgattgtttgccatattgggtg

SEQ ID NO: 18964 - DNA, 25 bp, Artificial
  Probe
cagtttctgttctttccttgggttt

SEQ ID NO: 18965 - DNA, 25 bp, Artificial
  Probe
aaggaggctggatgcaagatagata

SEQ ID NO: 18966 - DNA, 25 bp, Artificial
  Probe
acaagatgatagtcctgttgggaat

SEQ ID NO: 18967 - DNA, 25 bp, Artificial
  Probe
ctgtccagtttctgttctttccttg

SEQ ID NO: 18968 - DNA, 25 bp, Artificial
  Probe
catgctgtagaaatgctctaaagtg

SEQ ID NO: 18969 - DNA, 25 bp, Artificial
  Probe
gctggatgcaagatagatactatat

SEQ ID NO: 18970 - DNA, 25 bp, Artificial
  Probe
atgctgtagaaatgctctaaagtgc

SEQ ID NO: 18971 - DNA, 25 bp, Artificial
  Probe
cacaaacacagcatagtggaagaaa

SEQ ID NO: 18972 - DNA, 25 bp, Artificial
  Probe
cagtggtatcttagcagacttcaag

SEQ ID NO: 18973 - DNA, 25 bp, Artificial
  Probe
tcagtggtatcttagcagacttcaa

SEQ ID NO: 18974 - DNA, 25 bp, Artificial
  Probe
ttcagtggtatcttagcagacttca

SEQ ID NO: 18975 - DNA, 25 bp, Artificial
  Probe
gtggtatcttagcagacttcaagta

SEQ ID NO: 18976 - DNA, 25 bp, Artificial
  Probe
tggtatcttagcagacttcaagtaa

SEQ ID NO: 18977 - DNA, 25 bp, Artificial
  Probe
agtggtatcttagcagacttcaagt

SEQ ID NO: 18978 - DNA, 25 bp, Artificial
  Probe
gatgtcgttcagcaagaagatgatg

SEQ ID NO: 18979 - DNA, 25 bp, Artificial
  Probe
atgtcgttcagcaagaagatgatga

SEQ ID NO: 18980 - DNA, 25 bp, Artificial
  Probe
tgatgtcgttcagcaagaagatgat

SEQ ID NO: 18981 - DNA, 25 bp, Artificial
  Probe
cttcaaagtttatcagaggcgaatg

SEQ ID NO: 18982 - DNA, 25 bp, Artificial
  Probe
tttcagtggtatcttagcagacttc

SEQ ID NO: 18983 - DNA, 25 bp, Artificial
  Probe
tttcacttcaaagtttatcagaggc

SEQ ID NO: 18984 - DNA, 25 bp, Artificial
  Probe
acttcaaagtttatcagaggcgaat

SEQ ID NO: 18985 - DNA, 25 bp, Artificial
  Probe
gaataaactcatcctaattgccagg

SEQ ID NO: 18986 - DNA, 25 bp, Artificial
  Probe
ttcaaagtttatcagaggcgaatgc

SEQ ID NO: 18987 - DNA, 25 bp, Artificial
  Probe
gtgatgtcgttcagcaagaagatga

SEQ ID NO: 18988 - DNA, 25 bp, Artificial
  Probe
ggaataaactcatcctaattgccag

SEQ ID NO: 18989 - DNA, 25 bp, Artificial
  Probe
tcgttcagcaagaagatgatgactg

SEQ ID NO: 18990 - DNA, 25 bp, Artificial
  Probe
gtcgttcagcaagaagatgatgact

SEQ ID NO: 18991 - DNA, 25 bp, Artificial
  Probe
gccatacggaataaactcatcctaa

SEQ ID NO: 18992 - DNA, 25 bp, Artificial
  Probe
cacttcaaagtttatcagaggcgaa

SEQ ID NO: 18993 - DNA, 25 bp, Artificial
  Probe
ttcacttcaaagtttatcagaggcg

SEQ ID NO: 18994 - DNA, 25 bp, Artificial
  Probe
tacggaataaactcatcctaattgc

SEQ ID NO: 18995 - DNA, 25 bp, Artificial
  Probe
agccatacggaataaactcatccta

SEQ ID NO: 18996 - DNA, 25 bp, Artificial
  Probe
ggtatcttagcagacttcaagtaaa

SEQ ID NO: 18997 - DNA, 25 bp, Artificial
  Probe
cggaataaactcatcctaattgcca

SEQ ID NO: 18998 - DNA, 25 bp, Artificial
  Probe
acggaataaactcatcctaattgcc

SEQ ID NO: 18999 - DNA, 25 bp, Artificial
  Probe
ggctgaggtcatcaacatcatcaag

SEQ ID NO: 19000 - DNA, 25 bp, Artificial
  Probe
tgtcgttcagcaagaagatgatgac

SEQ ID NO: 19001 - DNA, 25 bp, Artificial
  Probe
tcacttcaaagtttatcagaggcga

SEQ ID NO: 19002 - DNA, 25 bp, Artificial
  Probe
ccatacggaataaactcatcctaat

SEQ ID NO: 19003 - DNA, 25 bp, Artificial
  Probe
aagccatacggaataaactcatcct

SEQ ID NO: 19004 - DNA, 25 bp, Artificial
  Probe
ctgaggtcatcaacatcatcaagcg

SEQ ID NO: 19005 - DNA, 25 bp, Artificial
  Probe
tcctcaacattttcagtggtatctt

SEQ ID NO: 19006 - DNA, 25 bp, Artificial
  Probe
ttcctcaacattttcagtggtatct

SEQ ID NO: 19007 - DNA, 25 bp, Artificial
  Probe
caacattttcagtggtatcttagca

SEQ ID NO: 19008 - DNA, 25 bp, Artificial
  Probe
aacattttcagtggtatcttagcag

SEQ ID NO: 19009 - DNA, 25 bp, Artificial
  Probe
tcaacattttcagtggtatcttagc

SEQ ID NO: 19010 - DNA, 25 bp, Artificial
  Probe
cgttcagcaagaagatgatgactgg

SEQ ID NO: 19011 - DNA, 25 bp, Artificial
  Probe
tggctgaggtcatcaacatcatcaa

SEQ ID NO: 19012 - DNA, 25 bp, Artificial
  Probe
acattttcagtggtatcttagcaga

SEQ ID NO: 19013 - DNA, 25 bp, Artificial
  Probe
gttcctcaacattttcagtggtatc

SEQ ID NO: 19014 - DNA, 25 bp, Artificial
  Probe
cattttcagtggtatcttagcagac

SEQ ID NO: 19015 - DNA, 25 bp, Artificial
  Probe
cctcaacattttcagtggtatctta

SEQ ID NO: 19016 - DNA, 25 bp, Artificial
  Probe
gtgtcaacttgattagtttgcctaa

SEQ ID NO: 19017 - DNA, 25 bp, Artificial
  Probe
gaagggatcgtgtgtactatgtaat

SEQ ID NO: 19018 - DNA, 25 bp, Artificial
  Probe
tgaagggatcgtgtgtactatgtaa

SEQ ID NO: 19019 - DNA, 25 bp, Artificial
  Probe
ttgaagggatcgtgtgtactatgta

SEQ ID NO: 19020 - DNA, 25 bp, Artificial
  Probe
aagggatcgtgtgtactatgtaata

SEQ ID NO: 19021 - DNA, 25 bp, Artificial
  Probe
tcgtgtgtactatgtaatatactgt

SEQ ID NO: 19022 - DNA, 25 bp, Artificial
  Probe
agggatcgtgtgtactatgtaatat

SEQ ID NO: 19023 - DNA, 25 bp, Artificial
  Probe
cacagagaaattgttatttggtgct

SEQ ID NO: 19024 - DNA, 25 bp, Artificial
  Probe
tttgaagggatcgtgtgtactatgt

SEQ ID NO: 19025 - DNA, 25 bp, Artificial
  Probe
ggatcgtgtgtactatgtaatatac

SEQ ID NO: 19026 - DNA, 25 bp, Artificial
  Probe
ttctcttaaacccttcgctacacag

SEQ ID NO: 19027 - DNA, 25 bp, Artificial
  Probe
cttctcttaaacccttcgctacaca

SEQ ID NO: 19028 - DNA, 25 bp, Artificial
  Probe
tcttaaacccttcgctacacagttc

SEQ ID NO: 19029 - DNA, 25 bp, Artificial
  Probe
ctcttaaacccttcgctacacagtt

SEQ ID NO: 19030 - DNA, 25 bp, Artificial
  Probe
gggatcgtgtgtactatgtaatata

SEQ ID NO: 19031 - DNA, 25 bp, Artificial
  Probe
ccttctcttaaacccttcgctacac

SEQ ID NO: 19032 - DNA, 25 bp, Artificial
  Probe
ggactgcacagagaaattgttattt

SEQ ID NO: 19033 - DNA, 25 bp, Artificial
  Probe
ctgcacagagaaattgttatttggt

SEQ ID NO: 19034 - DNA, 25 bp, Artificial
  Probe
actgcacagagaaattgttatttgg

SEQ ID NO: 19035 - DNA, 25 bp, Artificial
  Probe
aggactgcacagagaaattgttatt

SEQ ID NO: 19036 - DNA, 25 bp, Artificial
  Probe
gactgcacagagaaattgttatttg

SEQ ID NO: 19037 - DNA, 25 bp, Artificial
  Probe
ctacagcatgtaccacctgacatag

SEQ ID NO: 19038 - DNA, 25 bp, Artificial
  Probe
atcgtgtgtactatgtaatatactg

SEQ ID NO: 19039 - DNA, 25 bp, Artificial
  Probe
tgcacagagaaattgttatttggtg

SEQ ID NO: 19040 - DNA, 25 bp, Artificial
  Probe
tctcttaaacccttcgctacacagt

SEQ ID NO: 19041 - DNA, 25 bp, Artificial
  Probe
caggactgcacagagaaattgttat

SEQ ID NO: 19042 - DNA, 25 bp, Artificial
  Probe
gatgcaaaggcgaagagatttatcc

SEQ ID NO: 19043 - DNA, 25 bp, Artificial
  Probe
ggatgcaaaggcgaagagatttatc

SEQ ID NO: 19044 - DNA, 25 bp, Artificial
  Probe
gatcgtgtgtactatgtaatatact

SEQ ID NO: 19045 - DNA, 25 bp, Artificial
  Probe
atttaacagtacattttcgtggctc

SEQ ID NO: 19046 - DNA, 25 bp, Artificial
  Probe
cttaaacccttcgctacacagttcc

SEQ ID NO: 19047 - DNA, 25 bp, Artificial
  Probe
ttttgaagggatcgtgtgtactatg

SEQ ID NO: 19048 - DNA, 25 bp, Artificial
  Probe
cgtgtgtactatgtaatatactgta

SEQ ID NO: 19049 - DNA, 25 bp, Artificial
  Probe
tacattttcgtggctctcaaacatc

SEQ ID NO: 19050 - DNA, 25 bp, Artificial
  Probe
tttaacagtacattttcgtggctct

SEQ ID NO: 19051 - DNA, 25 bp, Artificial
  Probe
tatttaacagtacattttcgtggct

SEQ ID NO: 19052 - DNA, 25 bp, Artificial
  Probe
cttttgaagggatcgtgtgtactat

SEQ ID NO: 19053 - DNA, 25 bp, Artificial
  Probe
gtgcgagttataaatgtggaaactg

SEQ ID NO: 19054 - DNA, 25 bp, Artificial
  Probe
ctatttaacagtacattttcgtggc

SEQ ID NO: 19055 - DNA, 25 bp, Artificial
  Probe
ttaacagtacattttcgtggctctc

SEQ ID NO: 19056 - DNA, 25 bp, Artificial
  Probe
caaaggcgaagagatttatccgtgg

SEQ ID NO: 19057 - DNA, 25 bp, Artificial
  Probe
ttaaacccttcgctacacagttcct

SEQ ID NO: 19058 - DNA, 25 bp, Artificial
  Probe
cccttctcttaaacccttcgctaca

SEQ ID NO: 19059 - DNA, 25 bp, Artificial
  Probe
tgcgagttataaatgtggaaactgg

SEQ ID NO: 19060 - DNA, 25 bp, Artificial
  Probe
aaaggcgaagagatttatccgtggt

SEQ ID NO: 19061 - DNA, 25 bp, Artificial
  Probe
gtacattttcgtggctctcaaacat

SEQ ID NO: 19062 - DNA, 25 bp, Artificial
  Probe
cgagttcttatccttgtggtgagtg

SEQ ID NO: 19063 - DNA, 25 bp, Artificial
  Probe
gagttcttatccttgtggtgagtgc

SEQ ID NO: 19064 - DNA, 25 bp, Artificial
  Probe
tccgagttcttatccttgtggtgag

SEQ ID NO: 19065 - DNA, 25 bp, Artificial
  Probe
ctccgagttcttatccttgtggtga

SEQ ID NO: 19066 - DNA, 25 bp, Artificial
  Probe
ccgagttcttatccttgtggtgagt

SEQ ID NO: 19067 - DNA, 25 bp, Artificial
  Probe
gttcagtacatcattgccactcagg

SEQ ID NO: 19068 - DNA, 25 bp, Artificial
  Probe
ggttcagtacatcattgccactcag

SEQ ID NO: 19069 - DNA, 25 bp, Artificial
  Probe
ttcagtacatcattgccactcaggt

SEQ ID NO: 19070 - DNA, 25 bp, Artificial
  Probe
gttcttatccttgtggtgagtgcag

SEQ ID NO: 19071 - DNA, 25 bp, Artificial
  Probe
ttatccttgtggtgagtgcagagaa

SEQ ID NO: 19072 - DNA, 25 bp, Artificial
  Probe
ttcttatccttgtggtgagtgcaga

SEQ ID NO: 19073 - DNA, 25 bp, Artificial
  Probe
agttcttatccttgtggtgagtgca
